United States Patent Application Publication US 2003/0073623 A1 - sequence listing, part 3

SEQ ID NO: 11401 - DNA, 488 bp, Homo sapiens
  misc_feature (1)...(488): n = A,T,C or G
nctgaggacctnggaanntatcattccatccgtannnnccnnaannnnaangganatggacatttaaggtgacaacatccgagttccatttcaccctcatgcagcacggagtggacaagagatggggtctcactttgtcacccaggctgggctcaaactcttggcttcaagcgatcttctcgccttggtctcccaaagtgctgggattacaggcttgaactactgtactcgactgacttttcctatttctaatgtcagcatgaagaacacaagaagtcagcttcaaagacggagtctctctcttgttgcccaggctgaagtgcactggcgcaatctcggctcactgcaatctctgcctcccagggtcaagaaattctcctgcctcagcctcccgagtagctgggatttcagacatgcaccaccacgccagggcatccagcaatatcatctattctccactttgctaaatcctacctttggcagagcct

SEQ ID NO: 11402 - DNA, 412 bp, Homo sapiens
  misc_feature (1)...(412): n = A,T,C or G
ggccagtaggcgtgcagacccctccccgccacgatcgtcgctgtgcttggtgtgtatgaccctaggctccccgcccaccctctgcctggtcgcgctcttcagtcccacgaggagctgacacgttctctctggccgccatccggctcgcacaggggccttccagcgcctcaggccccgcgtttgtgtctggagtctccccccggggagaggacactggcccctcgcactccagaaaagccatgccagctgggctcgttgacaaagggtaaaacatgctcactcccacccggcaatcatttttttgtttttttaaaaaaagtttttattttttccaaactagtgcatgtataaataatggcaggatggggggtactgtgtagatgattaactgactttttaatattacgtaaan

SEQ ID NO: 11403 - DNA, 476 bp, Homo sapiens
  misc_feature (1)...(476): n = A,T,C or G
atcgagccctnatcgagagctttaggccagngcggnggaattctttctgtatttctccttttctctgcaggtgctagttcttggagttttggggaggtgggaggtaacagcacaatatctttgaactatatacatccttgatgtataatttgtcaggagcttgacttgattgtatattcatatttacacgagaacctaatataactgccttgtctttttcaggtaatagcctgcagctggtgttttgagaagccctactgctgaaaacttaacaattttgtgtaataaaaatggagaagctctaaaaaaaaaaaaaaaaaaaaaaaaaaaaaaaaaaaaaaaaaaaaaaaaaaaaaaaaaaaaaaaaaaaaaaaaaaaannnnngnnnnngnnaaaaataagggggcnngaaaaaacccggggaaaaccccgacgtgccccttttggggcccccccccttggggggccccctccct

SEQ ID NO: 11404 - DNA, 445 bp, Homo sapiens
  misc_feature (1)...(445): n = A,T,C or G
ctacgagatcgagaccatctgaccangcggnggaattcctttgctcctgaatgtgattttcagaaatgtagaagaagtaccccttattgaatgaaaatcttcttaactgattaattcagacaaaaactgcatttggcagatgcacaagatgttccaaatacttctgctagctaaaatgaaatgtagattgctttcttgtgatttgaagagaagcagcagtctttacttttccagccaaatccagtagcagaatcatcttccacaacaaggaattaaagtaattactgtgcaagatcaatgatcgttttcacttactgcttttagtaaacgtgactcgctgtaattcgccataactggaggcctatgccttgttgaatgcttcatcaggaaatgtgaagcagagattgcgctgctgtgcttcatattggtgccttatgggattatn

SEQ ID NO: 11405 - DNA, 406 bp, Homo sapiens
  misc_feature (1)...(406): n = A,T,C or G
agggagccagatgcgcctccctggatttgcaggcatgataaactctgaaatggaagggccgaatgtccccaaccctgcatctagaccaggtctttctggagtcagttggccagatgatgtgccaaaaatcccagatggtcgaaattttcctcctggccagggcattttcagcggtcctggccgaggggaacgcttcccaaacccccaaggattgtctgaagagatgtttcagcagcagctggcagagaaacagctgggtctccccccagggatggccatggaaggcatcaggcccagcatggagatgaacaggatgattccaggctcccagcgccacatggagcctgggaataaccccattttccctcgaataccagttgagggccctctgagtccttctaggggn

SEQ ID NO: 11406 - DNA, 442 bp, Homo sapiens
  misc_feature (1)...(442): n = A,T,C or G
nttgaggaccctagnntttgaagacccttagtccatgtggtggaattcgacagaatcagctgggctggagaccttgacaagaaagatgcatcaatcaacatagaaaatatgcagtttatacacaatggcacctatatctgtgatgtcaaaaaccctcctgacatcgttgtccagcctggacacattaggctctatgtcgtagaaaaagagaatttgcctgtgtttccagtttgggtagtggtgggcatagttactgctgtggtcctaggtctcactctgctcatcagcatgattctggctgtcctctatagaaggaaaaactctaaacgggattacactggctgcagtacatcagagagtttgtcaccagttaagcaggctcctcggaagtccccctccgacactgagggtcttgtaaagagtctgccttctggatctcacn

SEQ ID NO: 11407 - DNA, 446 bp, Homo sapiens
  misc_feature (1)...(446): n = A,T,C or G
nttcgagttcactagcccangcggnggaattctgaaatgtgctgcatggtttttctattcctatgtcctggaagcctttgtttaaagtgggctttacaaatgtgtccctgaggtgcgtgagcaagagaacaatctcagccccaatacgggggctgtgttcttgccgtaagaatctgtagctgactggtgtgctgaacccgggcactctttttcctattgtttgccatggaaatttccactttggaccgagtaaggtcaactaggtgttttaaaattgtttttctcctatgtgattgggtgtgaagagggaaagtaggaatacactcagaattattactggattgcataaaagtgatagaagtgtagtggggttcacttcctcaattggtgcttcctagatttttctctcccatctcttcctgctttgtttctttaaagaaaaggct

SEQ ID NO: 11408 - DNA, 471 bp, Homo sapiens
  misc_feature (1)...(471): n = A,T,C or G
catcggagaccatatcgaagactctggaaancgnctcatggntctaatcgtggcgagagcggatctgaccacttccatgtgcctttgtatttgggaaagaaaagcatgcattggctgaaatgaaacaaaagcccttacttgggaaaagggacccccaccagcggccctgcttgctccgtagctgggaacatcttttctggtttcctgagccagcacctgaattgcaacgaagctctgaggatactcaacaccacccagcagtgcgtcagaatggaacgtacattctcattctcagactgttcaatatggtgcccgtaacctccaaagccacacaggaggctgccagcagcattttccccaagggcctgagctcagggtcaagtccctgctggccatcttggggctgtcactgggggtctgggtcaaggacatcccaggaatggtgactgccacatacctcatcttcttact

SEQ ID NO: 11409 - DNA, 443 bp, Homo sapiens
  misc_feature (1)...(443): n = A,T,C or G
ntttgtagatcgttagccattgcggnggaattcagacagaaagcttagtaccaaagaggctctggatgaaagtatacctccagtttccttttggaggattatgaagctaaatttaactgaatggccttattttgttgttggtgtattttgtgccattataaatggaggcctgcaaccagcatttgcaataatattttcaaagattataggggtttttacaagaattgatgatcctgaaacaaaacgacagaatagtaacttgttttcactattgtttctagcccttggaattatttcttttattacatttttccttcagggtttcacatttggcaaagctggagagatcctcaccaagcggctccgatacatggttttccgatccatgctcagacaggatgtgagttggtttgatgaccctaaaaacaccactggagcattga

SEQ ID NO: 11410 - DNA, 469 bp, Homo sapiens
  misc_feature (1)...(469): n = A,T,C or G
ggcagatnnnnnnnattgagaaccctagaacgtcgggaaanctccggactatatcgccacagctggtgccatgctgcagtatgctgtcagccttctgaattccactaatgtctcggctcgccagctgcccccaagcgtagccagggtggttgccaaaagccgagttctgtttcctcttgggttgggacatgctgctgagtacgtcaggcctcgggtggcgctcattgggtaagacgataacagagcagggccactcccttctcactttgctgccagagggcacacctgaactctgctttattcttagggatgcagcccacagagtccatccgcttgcaggacagggtggcaacatgggctttggggatatcttcagcttggcccatcacctcagtacggcagccttcaatgggaaggacttangttccgtgagccacctcacaggttatgaaacagatagacagcgtcg

SEQ ID NO: 11411 - DNA, 444 bp, Homo sapiens
  misc_feature (1)...(444): n = A,T,C or G
ctagaattttgagaccatctgaccangcggnggaattccttcctctgactgcgtttgtgcctctatgcactggggctttaaatgttcatgagatcctctctcagtgcaatgtcaattaaacacctatagctggaacagtaggggctggaaaaatgccaaggcagatacaactgagactccgtccggagaagccttcaacagagcacttggaattaattcataagaaaaggttataggtaaatgaaaaatactgactgacaaataggagtaacttgaatctacccctccctgggaaccatgcaacaggaaccctcaccaggcatctcactgcggttgtttgtaattatctttcatatgaaaacaaggcccaatgaaaattaactcttcctttcagcttaatgatttaaggctcagtcagatttggggctgatgagaaagccttgg

SEQ ID NO: 11412 - DNA, 445 bp, Homo sapiens
  misc_feature (1)...(445): n = A,T,C or G
taagaagttgacggaccactagtcctgtgacggcgaattcgtccttgtcaagcacacccctcgtgtccaggttcctcatgggcagtgctcggggtgacaaagaaggcgacattgactacagcaccgtgctcctcggcatgctggtgacgcaggacgtgcagctcgggctcttcatggctgtcatgccgactctcatacaggcgggcgccagtgcatcttctagcattgtcgtggaagttctccgaatcctggttttgattggtcagattcttttttcactagcggcggtttttcttttatgtcttgttataaagaagtatctcattggaccctattatcggaagctgcacatggaaagcaaggggaacaaagaaatcctgatcttgggaatatctgcctttatcttcttaatgttaacggtaattctcaaactatgtgttatttn

SEQ ID NO: 11413 - DNA, 483 bp, Homo sapiens
  misc_feature (1)...(483): n = A,T,C or G
tggcgagngnnnnnnnaatcgtagacattagactttgcggngcaattcgncatgaagtggctgaaaacagagacgtttgtcctctctgcaaacctccatggtggtgccctcgtggccagttacccatttgataatggtgttcaagcaactggggcattatactcccgaagcttaacgcctgatgatgatgtttttcaatatcttgcacatacctatgcttcaagaaatcccaacatgaagaaaggagacgagtgtaaaaacaaaatgaactttcctaatggtgttacaaatggatactcttggtatccactccaaggtggaatgcaagattacaactacatctgggcccagtgttttgaaattacgttggagctgtcatgctgtaaatatcctcgtgaggagaagcttccatccttttggaataataacaaagcctcattaattgaatatataaagcaggtgcacctatgtgtaaagggtcan

SEQ ID NO: 11414 - DNA, 442 bp, Homo sapiens
  misc_feature (1)...(442): n = A,T,C or G
ntttcgagatcgctagccattngcggggaattccaggaaaaaccacaccctacttaccttctagggtaattttgaagagcttttgtttgccctcttgtgtaattacgggcttgttttttttcagtaatgtcctgtttgcccttcttatcagcatctatctagctacattctgacaggataactgcaaactgaatgattcctgggcatcataatggatgtttctttctacttaggtgtctcccctcctctctgcttatatctagcatgcctgttttgggtggtccctggggttgtgggatttcccaggggctacccttcctgctcttggctagatatctgccttctctaacaatgtcatcaaagattacactttgggaacaggcattttcaaggatacacagcttcaggactgctaatgttaacttttttctgcatattaatt

SEQ ID NO: 11415 - DNA, 460 bp, Homo sapiens
  misc_feature (1)...(460): n = A,T,C or G
ntttgagaaccctgagaacctcggaagngctgggaaattcagngcactgggaatcggccactacttactttactatggcaactctacagtatgagtatgctccgttatctaaaaaagctcatgagcagaacagattgagaaagaagtcagtgaggccatgatgaagtccctaaaatactgcgatgtggattcagtgtctgctcgacagcccctttgtcagtatcgagctgcaaccatccatcacaggctggcctccatgtaccacagctgtctgaggaatcaggtattgtcagtccaagttaagtacagtgccacatcagtttaaaagtgttctgggtgctttttgtttttttaacatggtcatatatgtcttccttgacgtccactcaggtgaactgctgtcctaaattttctgctgcgtctgtgcctttttttgtgctgtgccacttaaacaatatgt

SEQ ID NO: 11416 - DNA, 396 bp, Homo sapiens
ggggagcgtaggaacacagacaccagaaaagagggtgagatgatgaaaagagcaggtgggaacacagacatgaaaaaggaggatgagaaggtaaaaagaggaactgggaacacagacaccaaaaaggacgatgaaaaagtcaagaagaatgaacccttacatgaaaaggaagccaaggatgacagcaagaccaaaacacccgagaaacagacgcccagtggccccaccaagccctctgaaggaccggccaaggtggaggaggaggcagctcccagcatatttgatgagcctctggagagagtgaagaacaatgaccccgagatgactgaggtgaacgtcaacaactcagactgcatcacaaatgagatcttggtccggtttactgaggctctggag

SEQ ID NO: 11417 - DNA, 557 bp, Homo sapiens
  misc_feature (1)...(557): n = A,T,C or G
cttgaaacctagaatccctntnnnnnnnncaattctgtgtctgtttttatgccactaccatgctgtttttgtttctatagctctgtggtataatttaaagtcaggtaatgtgattcttccagttttgttctcttgctcaggataactttggctacgctgggtcttttgtggttccatataaatttcagcatttttttttctatttcagtgaagaatgttattggtattttgatagggattgcattgagtctgtagattgctttaggtagtgtgaacattttaacaatattaatttttctaatgtatgaacatggaatttctttccattttttggtgccctcttcaatttctttcatcagtggtttatagttttcattgtagaaatccttctcttctttnggtaagttaattttgaggtactttattttatttgtggcaattggaaatggaattcctttcctgatttctttttcagatgttttctgttggcatatagaaatgctactgatttntgattgtgatttgatcctgcaacttactgatttgttgatagtctt

SEQ ID NO: 11418 - DNA, 469 bp, Homo sapiens
  misc_feature (1)...(469): n = A,T,C or G
ggggnaatcgagaccactgncattgagggcactagtccgagcgagggaaataagagaaaccgtgggcccatgtgtgtgtgtgtctatgaagataaaataattgggggccatctagaaatagaaaggcagtgggaagacagattctacggcactgctttcatttaattgggctttaggcactccattcgaatgcagaacctcacctctagttgagaccaagaattggcaaatttgcatgagctcctggaaagagttgctgactttgtatctaagacctgccagggaataccaagagttgtttctacagactttttttttttttttggttgggaaaaaaatccggggccccccgggagggaggggaaaaaaattttttttttttacagaaaataaggggggggagccccccccaaccttggggtttttaagggtcaaaaaccagggcctcgggaaaattcccagggtagtt

SEQ ID NO: 11419 - DNA, 480 bp, Homo sapiens
  misc_feature (1)...(480): n = A,T,C or G
gccccccaatggagaccattagnncaatgggaggcccttagtccagcgtggtggaatttgcccaccttgtgagaggtggttgttggtcaggacgggaagctggtgaccttggcatgtcttggcagcagctagatcaggccctcggcagagacacaggaagcggaactgctgtgccttaacttggctgtggagctggagctggagaaggcagcatactgaccagtggctttttgattgattgtttgttatgaggtggagttttactcttgttgtctaggctggagtgccgtggtgcgatcttagctcactgcaacccccgcctcccgggttcaagcgattgtcctgcctcagcctcccaagtagctgggattacaggcacgcgccaccacgcctggctaattttgtgtttttggtagagatgggatttcaccatgttggccaggctaatctcgaactcatgatctcgggtgatccgcccan

SEQ ID NO: 11420 - DNA, 480 bp, Homo sapiens
  misc_feature (1)...(480): n = A,T,C or G
cgccccccccccccaatgagactcatgatggcgctggaaacgccggtcctgcccctttgagggggtgcaaacatgactgggacctaagagccagaggctgtgtagaggctcctgctccacctgccagtctcgtaagagatggggttgctgcagtgttggagtaggggcagagggagggagccaaggtcactccaataaaacaagctcatggcaaaaaaaaaaaaaaaaaaaaaaaaaaaaaaaaaaaaaaaaaaaaaaanncgccccccctttaatttaaagggccccttaaaacccccgtaaaacccccgggggggtttttttaagccccccccttttgggggcccccccccccccggtttttttttgggcggggggggggcccccccccttttttttttaaaaaaaaaagggaaaattccctctttttttggggggggggttttttttttttggggnnnnncnnnncnananannnaa

SEQ ID NO: 11421 - DNA, 336 bp, Homo sapiens
gggatcatcatcctagccagtcctggttgggctcctgctcctaggtctactcatctacatcctctacaagcttggattcttcaaacgctccctcccatatggcaccgccatggaaaaagctcagctcaagcctacagccacctctgatgcctgagtcctcccaatttcagactcccattcctgaagaaccagtccccccaccctcattctactgaaaaggaggggtctgggtacttcttgaaggtgctgacggccagggagaagctcctctccccagcccagagacatacttgaagggccagagccaggggggagaggagctggggatccctccac

SEQ ID NO: 11422 - DNA, 332 bp, Homo sapiens
gccatcctgtttggcctcctgctcctaggtctactcatctacatcctctacaagcttggattcttcaaacgctccctcccatatggcaccgccatggaaaaagctcagctcaagcctccagccacctctgatgcctgagtcctcccaatttcagactcccattcctgaagaaccagtccccccaccctcattctactgaaaaggaggggtctgggtacttcttgaaggtgctgacggccagggagaagctcctctccccagcccagagacatacttgaagggccagagccaggggggtgaggagctggggatccctcccccccatgcactgc

SEQ ID NO: 11423 - DNA, 445 bp, Homo sapiens
  misc_feature (1)...(445): n = A,T,C or G
nctgacgaccatctgaccagngcggnggaattcgatttgtgagcctcaagtgactactctgtggaatcatctgtccttgcctttgaattagctttccctaggccatgagtcaacattagtagtttatacatccaaattggtaggtctttatgaaattcttctatgtattcgttctagacatataagtgaagtataagaaattatagatttacattgtggttgtttttacagcttctggacatctttgagaaaatacttgggtggcattgaaacactagccaatggaagcatttgattttgtagaattttgaaatgtagtgccttactcatagtacacttcctagtcttgggggtgggaagaccagtctgtagctaacttattactgtgttatacatcatgctaaagcccagcctgggcatttgtaaacctcggggaggtttctan

SEQ ID NO: 11424 - DNA, 445 bp, Homo sapiens
  misc_feature (1)...(445): n = A,T,C or G
ntttgagactctagtccatgtggtggaattctgtgcatgtgcatgttggcaaatagcagggcagagaagggccaggctctggagggagagtgatgcttttgcttatttgttttgttttgttgagacagtctcacgctgttgtccaggctggagagcagtggtgtgccatcactgctcaagtgatcctcctgcctcagcctcctgggaaattgggaccacacgcgtgcaccaccacacttggcaaatttttaaaattttttgtagagacaaggtcttgctgtgttacccaagctggttcctaattcctggcctcaagcgatcctcccacattggcctcccaagggctgggattacaggcgtgagccaccatgcccagctgaggttgatgctctgaactggcctgtgctactcttgtgcaggggcttcagggagagaggcctgggcc

SEQ ID NO: 11425 - DNA, 496 bp, Homo sapiens
  misc_feature (1)...(496): n = A,T,C or G
tggggagcccaggnnngnnnnnaactgagaccncangaagagcggtggaanacgngaagcactccttcttgatggctctggtttcccagcataatgtaaattgaagagatctaaccaaatgaatggcaaggtccctggcagcccagatgttatgtgagttctgagcttctaagttaatttaaaaaaaaaaatgattaaacaaggaagcatctgtgcttcctttagggctaaaatcaacagggcctggagtgaaatggcatgctggactcactgagtggtagcacctccttaaaaatgcctgcaggcaggggccctcctccctcaatggggctggggctaggggtaaactgggtgcagcccagggccacttccaaagaatgccccagggaggaatggctaaaagaatgcagatcctcagaggtgggggacattgagagacttcaagacccaagagacttcaagacccaaaacttctaggccgggcacagtggctcac

SEQ ID NO: 11426 - DNA, 494 bp, Homo sapiens
  misc_feature (1)...(494): n = A,T,C or G
cgtcnnacgacncagcggccgnccncggggattgatnaccaactgatgnacgcttaggccangcggnggaattccatcaatagaaccaaggtgggaagctggcagtgcttggttcatgtttcatgttctttgatcaatatttggacaaagaagaaaacagcagaatcatggatgttgttttccagtggctcacgacaggagacatccacctaaaccagattgatgctgaggacccagagatttctgactacatgatgctgccctacacagccaccctatcaaagcggaatcgagagtgtctccaggagagtgatgagatcccaagggactttaccaccctcttcgacctgtccatcttccagctggataccacctccttccacagcgtcatcgagtcagtacctgtgggcctctgagccacactgcactccattctgagtgtttggtttggaaacatgaacctgggaacgggaattagggtcacagtaaatgtg

SEQ ID NO: 11427 - DNA, 477 bp, Homo sapiens
  misc_feature (1)...(477): n = A,T,C or G
agcgcggntnnnnnnncctcgatgaccctgaagaaccgtcgnggaanncgaatagttctatagttcgccttctgatcttttttaagcaaatgggaaatcgcccccttctggcagttgctccccagacttctgttttggagttaggttctcaccatcctatgttagggctctaagggaaggtaagagaagagagaactgagacttttgccttcactctgaagcgggccaaatcctcagttgtgaatggcctcaaggggagccaagattccactccctgcctgaagggtcactgtccttcactgtaccggtgccatgaaggaagctctaacaggatactccttcttccctggaaaggcaggagagctgggcatctatgagtggggaccccagggggacctgcaatcaccagactcaccttccagagcagcacggccagctgcaggaagatgaggattcccaccaacaaactgatggcga

SEQ ID NO: 11428 - DNA, 481 bp, Homo sapiens
  misc_feature (1)...(481): n = A,T,C or G
nattgatgaccantattgtagnaccactagaacagngcggnggaattcttttgttcccttctccattctggagagggacttcccctacatagagccctgatttttgtggctgtggggattggaggtagcattcaaagatcagatgtgcttttcctcactttggagatgaacactctgggttttacagcattaacctgcctaaccttcatggtgagaaatacaccatctctcttctagtcatgctgtgcatgccgcttactctgttggggtctatataaatttgttgaactcttacctacattccaaagaagtttcaaggaaccataaatatatgtatacatatacatatataaaatatatatattaaaataaaattatcaggaatactgcctcagttattgaacttttttttttaagaatactttttttttaagctgagaagtatagggatgaaaaagatgttatattgtgtttgactatt

SEQ ID NO: 11429 - DNA, 485 bp, Homo sapiens
  misc_feature (1)...(485): n = A,T,C or G
tttgagcccctcggccnnnccnttttgagacactagaccaagccgnggaattcgtttaaaaatgttataaattaggttcttgggtcgtgatatgaattgttactaatctttgtgactatttaatcttcaaatattgtgcttaaccccagcaatccgcacgtatcctgcaccccaccccaaaagagtcatctgtattttaatgccactggtcttatcggtccttttgtctgttgagaccagtcatgacagcattcaagattatgaaagtgttacaatgccgcttcaagtctgcaaaacctcaaacgtagccaacttgacaaatatttaagtgttacggcagatttaaaatccatctggcacaccgtggtaggtatttgtacagttcttttaattacacatagctttaaaccatcaacctgatgagtttaaagcttttgcacccatgccttcacttcagaatgaacaacctcattgtgatcttatgt

SEQ ID NO: 11430 - DNA, 480 bp, Homo sapiens
  misc_feature (1)...(480): n = A,T,C or G
gggtaccganaatcgagaccatagnnnatcgtagaccatagtccgtgtggtggaattcttttgtatttttagtaaagacagcgtttcaccatgttggccaggctggtctcaaacccctgacctcaaatgatcttcccaccgtggcctcccaagttgctgggattacaagcgtgaatcaccacacctggcccggaatccgtatttaatgtttgctaacaacctaagactcagcgttccctttttcccttgtgaccacacctggacaagctgatgagtctaagggctcccttctctgtcataggcaagagatttaaaccatgtaactacatgcccatacaggggatcttgtgcccaactctaccccaaccacagtaaacaaccaggccaggctcctttctttgctctctcaggccatttcagttatgcttgatgggtctgtcctgctcttcccaagatctcaacaatgtgagcaataagcct

SEQ ID NO: 11431 - DNA, 479 bp, Homo sapiens
  misc_feature (1)...(479): n = A,T,C or G
nattgagnaccccttttgagnaccactagaacagcgcggaggaattcgatttgattatcatctggattcagaaatcttttcattgtacagagatttcattgtcattgtcgttgttgttaactgatttttaatgatattgatttataggcatttgtcggcagtttttaaattactatatagggttgaatgtctaatttctataatgtgtggatgcccatcagatatttagtgcattctatatttagcccaagtgtgatcacaatttattttataactttttatgtgttacttacatgactcaatatgcatcttacttaagaaattatgttgtgatctggagtgacacaaatggattgagataccacatccattaaaaatataagtgaatattttatatttaagttgtttaaatatttgcacattattgaaaacatagtactaggaaatgaaggcaccatttaacaaacgtgttctgaatc

SEQ ID NO: 11432 - DNA, 453 bp, Homo sapiens
  misc_feature (1)...(453): n = A,T,C or G
taccgaaacctaccgctaagaccantaggaagngcgnggaantccaggatgtctgggaaattgtctgtgacatttaaactggtttttgtttagggggcatttttcaaatctgggttcctttcctcagcatcagagagcattgaggaacctgaggaaataataaggtctttctttctgggatgatgaatctgatacgttcttcctcttcaccttaaagctgagactcagctaaactggaaaccaccaccaatcccaccatccttcaagattgcagggaaagttgattttctgcatgcttcttagtttttaatgtgcatcagaatcacatggaggacttgttaaaacaaagattgctgggcaacatccccagagtgtaagattcagtaggtctggggtgagacttttaaaatttgtacctctaataagtttccagatgatagtgattttgctggg

SEQ ID NO: 11433 - DNA, 457 bp, Homo sapiens
  misc_feature (1)...(457): n = A,T,C or G
ggcgtcacgnaaactgagaaccttgattatcctagnaagngcggnggaattccccctctacctcagcacagaatcgccccgggtcctactacagaatcaatccttgaacactgcctccacgtcgccggctcaatctgggcgagaacccagacttccaccgcagccccgcaatctgcagacctcagcggcagcgcaggtggcaggtaagcggcgcacgctcgtcccacttagggcttaggatctccaggcttcgcgctcatccccggcccggaagctgcgcctctggctcagccggactgggtcaggccagggaccggagcttcagatagcccaggactctgcgtggacgcgccccgaggggctgccgcgccagattcccatatccaggcagccacactcagagggttgtagtagttgtccacctctggacagtcccactcagccccttcttcactct

SEQ ID NO: 11434 - DNA, 481 bp, Homo sapiens
  misc_feature (1)...(481): n = A,T,C or G
gtgggacgnnnncnaactgaaaccanactganangcccgcaatngcggnaaaattnctacctgttntcgtttgtccctgctgctttgcagaaagggttttatgtgttcaatgcactggatctcatggagaacagaaccttcctggagaagctcaagtttggcataggggacggcaacctgcagtattacctttacaattggaaatgccccagcatgggggcagagaaggttggactggtgctacaataaccagtcaccagtgcgattctggataaagccactgaaaattcgaaccaggaaatggaaccccaccactgttggtccaattttcacacacgtgagaatccctggcaaagggagcagaactgaaccggctttaccaaaccgccagcgaacttgacaattgtattgcgatggcgtgggctgcgtgacgtcacctccggtcgtgtctctggtctccgtgttttccagttaattacat

SEQ ID NO: 11435 - DNA, 283 bp, Homo sapiens
  misc_feature (1)...(283): n = A,T,C or G
gcgcgggnnnnnnaactgagaccattggatggtcgtggaantgcgcagaggatacccaagaaggcctttgtggctgctgcccctgtggctgctgccaccacagctgctcctgctgctgctgcagccccagctaaggttgaagccaaggaagagtcggaggagtcggacgaggatatgggatttggtctctttgactaatcaccaaaaagcaaccaacttagccagttttatttgcaaaacaaggaaataaaggcttacttctttaaaaaaaaaaaaaaaaaaa

SEQ ID NO: 11436 - DNA, 451 bp, Homo sapiens
  misc_feature (1)...(451): n = A,T,C or G
ctttgacccccctgagaccatagaccangcggnggaattcatctcttgagcccaggagagatcggtagaatgtattaaatgaatagggggaagacagagccttgggaaatggaaaaaaattagcttaatagaataaaacatgatccatctatatactgtctataaatacagactcactttagatacaaagacacaatgagattgaaaacaaaagaatgaagaaatgaattccatgcaaaaagtaaccaaatgaggccaggcttattgactcatgcctgtaatcccagcactctgggaggctgaggcgggcagattccttgaggtcgggagttcaagaccagcctgaccaacatggagaaaccctgtctgtactaaaaatacaaaattagccaggcgtggtggtgcatgcctgtaatcccagctacacggtaggctgaggcaggagaatcgn

SEQ ID NO: 11437 - DNA, 449 bp, Homo sapiens
  misc_feature (1)...(449): n = A,T,C or G
ngggttttaaaatgatacctgagaacntcnggaaanccngngagatctcagccccacactcaagccaacaccactccaactctcaagaacatggtctccaccacctttaggaagacctttccaaggtcacttatttgggtcactggtccatcaaagccaagcctgggccagccaagtacaaggcctgctggagccttggccgctgtagctggtgggaaacaagaggccaggtgtggggctggacagtccaaggagccacatccggggacaaaacaagtgcaggggacatccatgcaggtcttgatgccagggagttagggaattggggtcctggcagggaagcagggctgggagctggctgcaagaatgaaaggaagactcagggggaggggcaggaaatagaaagggacatgtagggggagtgctgccgcccacttgcagcctggngg

SEQ ID NO: 11438 - DNA, 332 bp, Homo sapiens
cgatgcagcagatacctttacaccctggtcatcactgacaaagagaaggcagagaaactgaagcagtccctgccccccggtttggcagtgaaggaactgaaatgaaccagacacactgattggaactgtattatattaaaatactaaaaatcctaaaaaaaaaaaaaaaaaaaaaaaaaaaaaaaaaaaaaaaaaaaaaaaaaaaaaaacaaaaaaaaaacactgtttgaataaagagcgagacggaattaatattggtttttcttttgaaaagaccatttgatttttatgttgctccagctaaggcattttttttgattaaaatttctata

SEQ ID NO: 11439 - DNA, 489 bp, Homo sapiens
  misc_feature (1)...(489): n = A,T,C or G
ggagggggccccccaatgagaccnttttgaagccgtggaanncccaagnatttgttggaaggtgccacattatttaacaaagaggaacatcattattctgcagctttccagattggtggacattggatgcactatgatgggctcagaaatgtgaatttaattttgttaaataaacccccagagtttctcctcttgtcatcattggtttatattcgagcaacagagaaataaatatagattgatgctaaaagttgttttccctcctgcccatgctctcccagatgaagggcttttattttgtgtatacttggtatccaagaaaatagttcaactatactagtttcagaagtgtattttcagtgtttaaccccaggtaaatgttttatatagaggatctgtgcaaaaatgtttgtaatttttttatatttcctgagttatttttatatgagcatattttatgttggaataaaatatatcttgtggcctttg

SEQ ID NO: 11440 - DNA, 448 bp, Homo sapiens
  misc_feature (1)...(448): n = A,T,C or G
nttgtagatccctagtctgtagtggcgaattcgatcgcttgagcccaggaatttgaggctgcagtgagctatgatcgcactattgcactccaacctgggtgacatgagcgagaccctttctctaaaaagtaaaaaagaaagaaagtaagtcagggccagaaacaatggctcatgcttgtaatcccagtactttgggaggccaaggtggttggatcgcttgagcccaggagttcaagaccagcctgggcaaaagcccctactttctccctgtccccctaaatcttcctctccagcctctctgcccctcactaatcacctctcccggcatcactttgcatgtagataagatcttttctccgtcccctccctccctctgctccatttttaccaccatcccatcccagtgtaactaggttggtgggtgttcttgccccctcactgaccattn

SEQ ID NO: 11441 - DNA, 451 bp, Homo sapiens
  misc_feature (1)...(451): n = A,T,C or G
attcgagacattgntttgctcgaccactatcagtgtggtggaattcccacttttcgagaatgaaggcaaaaaagaggaatcttctccttcacgctcagctttatttgcccaacttaaccagggagaagcaattacaaaagggctccgccatgtcacagatgaccagaagacatacaaaaatcccagcctgcgggctcaaggagggcaaactcaatctcccaccaaaagtcacactccaagtcccacatctcctaaatcttatccttctcaaaaacatgccccagtgttggagttggaaggaaagaaatggagagtggagtaccaagaggacaggaatgaccttgtgatttcagagactgagctgaaacaagtggcttacattttcaaatgcgaaaaatcaactattcagataaaagggaaagtaaactccattataattgacaactgtaag

SEQ ID NO: 11442 - DNA, 469 bp, Homo sapiens
  misc_feature (1)...(469): n = A,T,C or G
ntttgtagactcgtagaccatgcggnggaattccaacaactgggctgttctggtgtgtacatcccgattctggtttaattatcgacatgttgcatataccctttctgtttatagaagtgtcaagaggctaggtattcctgacagtcacattgtcctaatgcttgcagatgatatggcctgtaatcctagaaatcccaaaccagctacagtgtttagtcacaagaatatggaactaaatgtgtatggagatgatgtggaagtggattatagaagttatgaggtaactgtggagaattttttacgggtattaactgggaggatcccacctagtactcctcggtcaaaacgtcttctttctgatgacagaagcaatattctaatttatatgacagggcatggtggaaatggtttcttataatttcaagattctgaagaaattaccaacatagaactcgcggatgcttttgan

SEQ ID NO: 11443 - DNA, 450 bp, Homo sapiens
  misc_feature (1)...(450): n = A,T,C or G
cactgagaccctttgaagacctgcggaannccaacctaataccttgcaaagaagcaggattgaagttttccaaaggagagattcttcagattgtaaatagagaagatccaaattggtggcaggctagccatgtaaaagagggaggaagcgctggtctcattccaagccagttcctggaagagaagagaaaggcatttgttagaagagactgggacaattcaggacctttttgtggaactataagtagcaaaaaaaagaaaaagatgatgtatctcacaaccagaaatgcagaatttgatcgtcatgaaatccagatatatgaggaggtagccaaaatgcctcccttccagagaaaaacattagtattgataggagctcaaggtgtaggccgaagaagcttgaaaaacaggttcatagtattgaatcccactagatttggaactacggtgc

SEQ ID NO: 11444 - DNA, 444 bp, Homo sapiens
  misc_feature (1)...(444): n = A,T,C or G
gtcgtcctnaancctagggnaactgatntctgggaaancangnaaaatcaagaaaatgtccttaaagcaattgagcaggctgatctactgcatgaggaagctgaaaccccacgtagtgttcttgaagaaattggactgacataactctcctcccttgttgatgacttcttgtggcatttcacacactgtagatggtcactcccttcatgtccatgttagctcatggtgtaagatgatgtcttgtcagtattactgttttgctaagccgcttcattcatgcctacacaatttttttttaaaagggaactttagttaattaagtgataagggacttaaatatgaattagaatggtgcagaaagagataccttttctggatattttaaagtttaaaggtcagtttctcttaatctgattatgtgcacatatgaaaatggcacatcat

SEQ ID NO: 11445 - DNA, 451 bp, Homo sapiens
caattttctgcatagcatcagcaatgagtctgtacaactgtcttgctgcactaattcataagataccatatggacaatgcacgattgcatgtcgtggcaaaaacatggaagtgagacttatttttctctctggactgtgcatagcagtagctgttgtttgggctgtgtttcgaaatgaagacaggtgggcttggattttacaggatatcttggggattgctttctgtctgaatttaattaaaacactgaagttgcccaacttcaagtcatgtgtgatacttctaggccttctcctcctctatgatgtattttttgttttcataacaccattcatcacaaagaatggtgagagtatcatggttgaactcgcagctggaccttttggaaataatgaaaagaatgatggaaacttggtggaagccactggtcaaccctcagctccccatgagaa

SEQ ID NO: 11446 - DNA, 466 bp, Homo sapiens
  misc_feature (1)...(466): n = A,T,C or G
aaggctgnnnnnnnntttgaatagcatagcatangcggngcaantcgaataaacgagatctagtatttgatagcacaacggggtgacaacagttaataatttgctgtacatttaaaaataactcaaagtatacttggattgtttataacacagagaaaggataaatccttgaggcaatggataccccatttactctgtgattattctgtgcctgtattagagtgtctcatatgccccataaatacatatacctaccatgtacccacaaaaaaaattaaaaagaacgttgatgtatttcttttgtgaaatgcaagttcatagccctttttatatcaggaagattttttttctactgattgataagaaccctttatatattatggatatcattttcatttgttgattattaccaggtcacagctttatttccagtcaagttgttcaggtcctgcatagtctgatattg

SEQ ID NO: 11447 - DNA, 488 bp, Homo sapiens
  misc_feature (1)...(488): n = A,T,C or G
nattgatagcattacgccagtgcggtggaattctaaactattaaaactttaaaaaatactcaaaatatgtaagttttttggttgaacctttagatttgctcataatgtttaacataacaacatttatttcaaatcactgaattcatggagatgtggacacgcttggtttgctctatttttgtttatgtgtgatagtggttctgtcatcatcattcatgttttttaaggcctggtcataaaactttaaattttactagtgttacttaatgtatattctaaaaagagaatgcagtaactaatgccctaaatgtttgatctctgtttgtcattactttttcaaaattatttttttctgtaaagtataatatataaaacttcttgcttaaattgaatttctatattagtggttaattgcagtttattaaagggatcattatcagtaatttcatagcaactgttctagtgttttgtgtttttaaaacagaatt

SEQ ID NO: 11448 - DNA, 451 bp, Homo sapiens
  misc_feature (1)...(451): n = A,T,C or G
catagatgacaccttgacagccntgcggaattccgnagttttaaagtgcatgtttaatataacaattttatgcttagaaaaaactgtcattttcatgtttcagactacatcagggtacatttttatgttaaaccaaaggaatcatgctggagatctactgtacaatacagggcctatgattgacaatccgatgtggtatactgaagcatttgctaagaggtctatcttatgttaagtactctttccacaaaagggaacaaaacaaagcaaaaggggtggaaggaaagttctgggagtggtggctaagttcatggcattgataagtgatggtttgatggtttcacaggtgtatatttaactccaaacacatcaagttgtatacgttaaatattggtgactttttgtatgtccaacatatttcaataaagtgggttttttttaaagagggaat

SEQ ID NO: 11449 - DNA, 488 bp, Homo sapiens
  misc_feature (1)...(488): n = A,T,C or G
gccccccgaatagaaacccctcgnanactgagactctaggacangcggtggaattcagggcaaggtgtctggctgcgcgtttggctgcaatgagctcggcctcggggctccgcagggggcacccggcaggtggggaagaaaacatgacagaaacagatgccttctataaaagagaaatgtttgatccggcagaaaagtacaaaatggaccacaggaggagaggaattgctttaatcttcaatcatgagaggttcttttggcacttaacactgccagaaaggcggggcacctgcgcagatagagacaatcttacccgcaggttttcagatctaggatttgaagtgaaatgctttaatgatcttaaagcagaagaactactgctcaaaattcatgaggtgtcaactgttagccacgcagatgccgattgctttgtgtgtgtcttcctgagccatggcgaaggcaatcacatttatgcatatgatgctaan

SEQ ID NO: 11450 - DNA, 466 bp, Homo sapiens
  misc_feature (1)...(466): n = A,T,C or G
gttttgacgaccactaggccagggcggnggaattccagattcttaattcataccatgaattcttaatttctgtaccatctatgttaatgatctgctgaaggtgactcaagattttcaaggtgtaatacagtttgatcatgtaccggacctggatatttaattttttttccctcacagttaatctcctccttgataaagcaataacactgctttgagtctgttgcctaatagcatgtcagaatcctctcctggatggtgattttataggaaagtttgtatgcatatcacccagtctatcttttaaaaattaagaaatttaaatgtatgctggaagtaatgacactatattgtggcattttattttaaaaattggggaaagttgcatatttttttaaaagtaagtgtttgagtaaaaaaattgaaggtacttttttaaggagaaaaatttatatgccacaagttacat

SEQ ID NO: 11451 - DNA, 439 bp, Homo sapiens
  misc_feature (1)...(439): n = A,T,C or G
ngcgttttaatcatgcataccgtagtctnngaaaacnnnagagaggnncggggctgtttcttttgccatccagtgtcatcctcttctctgcagcgacacacgctctcgccgccgccatgagtgagcagatgacccttcgtggcaccctcaagggccacaacggctgggtaacccagatcgctactaccccgcagttcccggacatgatcctctccgcctctcgagataagaccatcatcatgtggaaactgaccagggatgagaccaactatggaattccacagcgtgctctgcggggtcactcccactttgttagtgatgtggttatctcctcagatggccagtttgccctctcaggctcctgggatggaaccctgcgcctctgggatctcacaacgggcaccaccacgaggcgatttgtgggccataccaaggatgt

SEQ ID NO: 11452 - DNA, 441 bp, Homo sapiens
  misc_feature (1)...(441): n = A,T,C or G
atagagattcgtagacattagncagagtggtggaattcggctccttaagtatgcctgggtcttggataaactgaaagctgagcgtgaacgtggtatcaccattgatatctccttgtggaaatttgagaccagcaagtactatgtgactatcattgatgccccaggacacagagactttatcaaaaacatgattacagggacatctcaggctgactgtgctgtcctgattgttgctgctggtgttggtgaatttgaagctggtatctccaagaatgggcagacccgagagcatgcccttctggcttacacactgggtgtgaaacaactaattgtcggtgttaacaaaatggattccactgagccaccctacagccagaagagatatgaggaaattgttaaggaagtcagcacttacattaagaaaattggctacaaccccga

SEQ ID NO: 11453 - DNA, 442 bp, Homo sapiens
  misc_feature (1)...(442): n = A,T,C or G
nttgaggaccatagnntttgatgacccttagacagtgcggnggaattctgagggtttaggaggtctgaacacacacagtggataggttaatctatgttgtgaatctgagtaaaaggccagagcaggaatgagcctgctgtggcgtgggtttggaaaggctcacaggaaagaacctgcaggatcatgggtgggaggggaggcccctgatgtgctctccagggaagaggggctggggtttaaatagcatgcttggaggaagattttccttcaatttttcctaagtccttgaattcaccagtagatttttgtaaacaaaatgtaagttgatgttttctctcaattatcctaggagtgacctttatatgtgtggaagattaatggtatatgctccttatgtcactgcttttgagtaaaatccatttcctttctctgtttcagcctg

SEQ ID NO: 11454 - DNA, 459 bp, Homo sapiens
  misc_feature (1)...(459): n = A,T,C or G
nggcgtgcctnnaaaactgaaaaccattgcatgngcccagcanannccggnggaantcgacgcgtcatcactgcagaaacgtgcaggcagagccgatcagaactacaattacatccagcatgcgtatcccactgcctatggtgggaagtactcagtcaagacccctgcaaaggggggagtctcaccttcttcctcggcttcccgggtgcaacctggcctgctgcagtgggtgaagttttggtaggcaatttcttgcaaccaccaccgaggccccgaaaagcactggtcgtcagggagctcctccccttggcccccagcctgtgccagccctggcccggctgccacacctctgtttcctaggctggggacccagcttgtctctccttgtttcttcccactgcactgtggtgcttcagtggccaccagcctcgtcacatacaccagcatctttctgtacct

SEQ ID NO: 11455 - DNA, 462 bp, Homo sapiens
  misc_feature (1)...(462): n = A,T,C or G
atggcggncnnnnattgaagatccctagtccgtgtggtggaattcgcgctctccaactccgcggccatccgggccgagatccagcgcttcgagtccgtgcatcccaatatctacgccatctacgacctgatcgagcgcatcgaggatttggcgctgcagaaccagatccgggagcacgtcatctccatcgaggactcgtttgtgaacagccaggagtggacgctgagccgctccgtaccggagcttaaagtgggcatagtggggaacctgtctagcgggaagtcagccctggtgcaccgctatctgacggggacctatgtccaggaggagtcccctgaaggggggcggtttaagaaggagattgtggtggatggccagagttacctgctgctgatccgagatgaaggaggcccccctgagctccagtttgctgcctgggtggatgcagtggtgtttgtgttn

SEQ ID NO: 11456 - DNA, 462 bp, Homo sapiens
  misc_feature (1)...(462): n = A,T,C or G
aggcgccagngnngaaaacggattgacccggtcacgcanngncnnggaannntttnttctgcatttgcatgtgcatgtgtgtacactgctacacatgaatgtaatttttgttatgtaggtctataggctgttgattaaagataagttttgtgagcatttctggctgctgttaagtcctcattaatattttaatagattctttaatatttaacagcaattgtatagatgtagtatggtatttggatacttaggttgttttcagtgttttgatattaaaattaaaactttgaagaatatctttatacataaatatttgatgatatctctaatcttttcctctggctagtttcctagaaatagaattacttgttggaaggatatgagccttaaagatcttgctgcataattaatacttctttaattttttaggaagtattttagtatattgtaaatccttatgac

SEQ ID NO: 11457 - DNA, 477 bp, Homo sapiens
  misc_feature (1)...(477): n = A,T,C or G
cttcgattgccttccnnattgagaccatagtcagngtggtggaattcccccctggtagtcaggaggtgctggtgtccacctccagggcccccaagctacagggggcacatgggcccatctggtgggtcaggacctgcaggggacccggaggctcccacccccacctctcaggactctgcctccaccacccccgtgggcatgcactgaagggttgcctgcagggtctccaggcgagggggaccccacagggtgggcagcgccttctcccggcttccccacagtcccctgcagcgtcccgtctggctgttgacctacatgtggtcgggcacacctcacactacaaggctacccctgggcccatccctgccccttccacggcccccacctgtggtcaggtgttgccaccccctcaggacctggtctcaaggcagccccactcgagtcttctggagtccaaggcacgccactcgcccaaaa

SEQ ID NO: 11458 - DNA, 486 bp, Homo sapiens
  misc_feature (1)...(486): n = A,T,C or G
aaaattcgagaccatagcaggcggagtgaaactgatccttcacatgagaaaaactgagtgggaagtgcagtgtttccaaacaatacctatcataactacgtattcattgtctacctgctaagtcaagggttcactgcatttctccttcctcagaatacactctggacctgtgctgtctaatatggtagccactaacaaaatgtggccattttgatggaaatccattaaaatcaaagaaaatttaaaactcaattcctcaattgggctggccacatttcaaatgctcactacccacctgtggctagggtctacttctactgtattggcgagcatggatatagaacatttcatcacagttctgttggaccaatctagatagattcattatcccatctagagaagagactttagtcactgtcttcttgcttcagacccatctatatttaaaacaaatttccctaaatcctgagactgagacggagctan

SEQ ID NO: 11459 - DNA, 445 bp, Homo sapiens
acttgtagaccactagctcgagcgccgtaattagcagagtgtgtggcatatggtatgcccttaaaaagcatcagtagagcaaatggatatgtcacaaggttatcatgaggctatgacagtagaactgtcccgggagttctgtgagctgtgcagcttcatgtaggttagttaatttgccaagtatagtatatgctgtccttatgcaactggcaaggatgaatcttagtttccaatgcatttattattattaatttcaaaaaaagaaatatgtaacacagactctgggaggcaaggtcatctccttaactacgcttaatagagaggggaggtgaggtgctggcacctgggaatgtctttgtgtcagcttttacttaaaggtatttcaaaacttcaagaaaaatgcacatttctgagaggtgtgtatatcttagccctaccaagtatg

SEQ ID NO: 11460 - DNA, 427 bp, Homo sapiens
gcggtgagccgagatcgcgctattgcactctagcctgggcaacaagagcaaaactcaaaaaaaaaaaaaaaaaaattttgaatttccttcacccctttataacaggacaggggcttttggccttattaacaagggaaaactttgcccaccccgttggtttcttaacagtcctgggggggtcggttttttcttgggccccctccttaaatggggacatccctactttgggaaggctcaccatttcctatccccctattggattaattttatcccaagacttatttaaaatcctccttgctcccaaaaccctcctttcactgcctaagttctccctcggaaatcccatagcatttcattttctcaacacaaactcaaagaaatttgttggtgggagggaccttagagctgcgattctcacccgggccag

SEQ ID NO: 11461 - DNA, 463 bp, Homo sapiens
  misc_feature (1)...(463): n = A,T,C or G
atcgagcnccntnnattgaggaccattagtccgtgtggtggaattcttaatatgcttgaactgtcgccttaactatgttaagcatctagactaaaagccaatatataattattgctgcctttctaaaaacccaaaatgtagttctctattaacctgaaatgtacactagcccagaacagtttaatggtacttactgagctatagcatagctgcttagttgtttttgagattttttagtcaacacataatggaaacttctttcttctaaaagttgccagtgccacttttaagaagtgaatcactatatgtgatgtaaaagttattacactaaacaggataaacttttgactccccttttgttcatttgtggattaagtggtataatacttaattttggcatttgactcttaagattatgtaacctagctactttgggatggtcttagaatatttttctgataag

SEQ ID NO: 11462 - DNA, 444 bp, Homo sapiens
  misc_feature (1)...(444): n = A,T,C or G
ntttgaggaccattagnntttgaagacccttagacagtgtggtggaattcacctgtttttgaatagtctgtgatctaagaacattttttaaaaagtcatctttttcttttttgtttttaaatggctaaaaaagtaaaaagaatacattgtgctatgtgaaaattatataaaattcagatttctgtgtccataaataaagtttttttggaagacagccatgctcattttctaatgtagtgtgtgcgtgtgtgcttctctccaacagcaaagatgagtgagtaggtgcaggagagatcgaggtcatgctctcccggctttgcactgctgcttagagtactgcagatcacaatgatgcatttataattggacagtattttgagagccacacatatcatggcactctgacttaaaaaaaaattacaagtacttatccatcatcaaaac

SEQ ID NO: 11463 - DNA, 444 bp, Homo sapiens
taaaagttgtagatccctagtcctgtgtggtcgaattcggggtatagggagtcatcagacacaggctgtgctctcagtctagtgagggagaaaagacacacagtagcagaagagaacaggctcacagcagtctggactctgcaccaagcagctcgatccaccaacactgtcaaggtggagactggaggtggtggggcttgaaatgagcccaggaaaccagagcagtgagggcgggcggggcatttcacccaggaatattgagaatgagggcctggaggtgaaatgtgcaaaacccacccctcacactgcagccaaggtttttatcatgttactctgatcatgtttttcaccccctgacattcttcaatgacttactatttctagcacaaaaagctagaacttttggtctggtagatgtggcctttgtgagcttacatcagtttg

SEQ ID NO: 11464 - DNA, 454 bp, Homo sapiens
  misc_feature (1)...(454): n = A,T,C or G
cggaaaaatnnttttgtagacactagtccttgcggtgcaattccagntaaatgttctgtagaccttatttatgtcatgacctcacaatctatagaagctttagagtatgttttaatatctggtagcattagtcttccttttattgttattctttctcagagttcttacatgttttgttttctatatgaatgttataatccacatgtttaacattagaaaaaataacttatatttgttgaaatagccctaaatttgtatattaatttggggagtattgacattattatgaagttaacataggctatccaagaacaataaatgcccttttaattgttcaaatttacttttgagcctctcaggaatgctttaatgttttcttatataggttatagatactgtattcctaagtagcttttgaccgatttatctgtgtgtgtatatgtctgtataataa

SEQ ID NO: 11465 - DNA, 487 bp, Homo sapiens
  misc_feature (1)...(487): n = A,T,C or G
aaaaattgagaccatatccangctgataacatagttgatgtcgngctaagcggggtaagttggaagagagagaaatgactcgtcccttgccatcatggtgaggcgagatacacatagaaaacatgcagaagacaaggcacatatgtgtgtggggtatatgtatatgggtctctatatagatggagattgtaaagcatttgtgcaagtggtcatagtaagctcctagttttgcaggataaaaaacattttaagtgggaaagcaaaacaaaacaaaaaaagcagaaaagagatcagaaatcactggaggtatcaagtgtcccactaagaagtttcacaggggctgggtgtggtggctcatacctgtaatcttatcactttggaaggccaagttgggaggactgcttgaatccgggagttctagattagcctgggcaacatagcaagaccctatctcttcaaaaagttttgtacaaattagctgggaacg

SEQ ID NO: 11466 - DNA, 475 bp, Homo sapiens
cccccatagagatccctagtccagtggcgcggaattcgaagaatgggtttgactctgaagttttaggcagtccttgtgtcagtcatctggggaagaagataattttttgcttttttgtttgtttttgagacagggtcttactctgtcaccaagactggagtgcagtggcatgatcatagctcactgcagcctcaatattctgggctcaaacaatcctccggactcaaacaatcctcccacctcagcctcctgagtagctgagtctacaggcatacaccaccatgcctggctaatttttgtattttatgtagagatggggttttgtcatgttgcccaggctggtcttgaactcctagattcaagccgtctgcccgcctcagcctcccaaagtgctgggattataggcattagccatcacatccagcaaagaagagaagtttggattaagaattggaaactgtgtctagtttctctc

SEQ ID NO: 11467 - DNA, 449 bp, Homo sapiens
  misc_feature (1)...(449): n = A,T,C or G
gtgggcctgaacctgagancctaggtgngccagnaaagcggnggaanttaaaaagaagtccctgaagaggccagagtgttgacaaaattcaacatgatggtggagtccacacaaacacaggaaacaaagctcggccgttccatacagccgtctgtccttggaatggcttcgttttaagtcaacgtctcttcatgccgcacatattccccaatgtctgcttgatgaaataccacaatcgccatggggtctacttttctgcagtcttgtgtagatttggctgccaccccaaaaccctgggattcaaaagaagagacactaactcactgaagtcattcaatatgcccatattgagggctggaaataacaaagacggaaaaaatacagttctggtctttctgggattcaaaacgtgctgagaatttattctctcaagcactcagattgaagaa

SEQ ID NO: 11468 - DNA, 447 bp, Homo sapiens
  misc_feature (1)...(447): n = A,T,C or G
ngtggtttttaacccaggacccctgatatctgggaaanncccaactntggggattgggagaaggtacacaaacttgagtatttcaggacaccatcctagggaaaacaaacaggaggctcttagcacctaacctagctttgcaggattgaaagaaggcatgcaaagtcaagaattagccctcaagagggaaaaagaaatgtagagcaggtgcatccatagaaaaggattaagaaagtctcattatccatagacaggctgactggtgaaggcatttctctcctgatgccagtcaataaggattggaggaggagatgactgcctccttcttcaaatgtgaagacagcatttgaagcaacaagacttcaaaggacagcacttcaaggaacatgaaaagttaaggagccatgacatcacaaaggaacacaatattccagaaagcaactacta

SEQ ID NO: 11469 - DNA, 479 bp, Homo sapiens
cccccattggagacccctggccaatcgagagcactagtcagtgtggcggaattcgtgagccactgagcccggctggaaaatttattttcagtctaaattgtgataaatgaaagtttcacagttttaaggtattgaatgcacggctcaattggaaatgatgtttgtaaccaattacttggccaatggttcaggtctccagagaggtggtcctctccataagccaaagcatgtgttactgttaggaactgggaaaaataaaggttggcctttttgtttgtttgtttgtttgtttttttcccccttcaacacagggcctcactctgtagcccagctggagtgcagtggcacaatcacggcttgctgcagcctcaacctcctgggctcaagtgatcctcctgactcaggcccctaagtagctgggactacaggcaagcactaccaaacccagctaataggtattttagttgagatggtttcgc

SEQ ID NO: 11470 - DNA, 527 bp, Homo sapiens
  misc_feature (1)...(527): n = A,T,C or G
acagatttcgttatccccctgcccagggtaggggggatccattcagtccgttgggtagcttacaatttcatttctggttcacatgtgcaaagtccttagctagtgatgtcacgcagtgaggactcagtgttggcagctacttctagtactacagttgttatcatcatcataggctcagtgcctgcctcagatgtttaaatctgaccattttaagaggaggcaaagcaaaataaggagtgaatgaaagtaggaggttgtggcaaattcggaaagcagcatttcaggtcagccctgtgctctgtgctcatcatatctttgaatctttggctgtcaactcagattgctgtttggtgttatctcaggtagcagacagtaactgttgatagtcctaactttggagacttgtaatataataagataaagataaaagcctatacctattatccaatgtggaaataaaatcagtttcccttaggtatcatctggtgaaattantcttatggcacataagaagattaggcctgagt

SEQ ID NO: 11471 - DNA, 473 bp, Homo sapiens
  misc_feature (1)...(473): n = A,T,C or G
attcgcggacccctagtctagtgtggcggaattcgacgctctcttcctgtctttgtggctccggaaaggcgtttgggatgccaacgatgaggctgctgtcatttgtggggttggctctatttgctgtcactcaagcagaggaaggagccaggcttttggcttccaaatcactgctgaacagatacgccgtggagggacgagacctgaccttgcagtacaacatctacaatgttggctcaagtgctgcattagacgtggaactatctgatgattccttccctccagaagactttggcattgtgtctggaatgctcaatgtcaaatgggaccggattgcccctgctagcaatgtctcccacactgtggtcctgcgccctctcaaggctggttatttcaacttcacctcggcaacaattacttacctggcccaggaggatgggcccgttgtgattggctctaccagtgcacctggn

SEQ ID NO: 11472 - DNA, 461 bp, Homo sapiens
  misc_feature (1)...(461): n = A,T,C or G
cgggaaaaaaaaatttcgagacattagnncttgaggtcccttagcacagagcgggggaagtccttgccagttcttgaagggataaagcgattctaataatgctttacttctctctgttcaatttaatgtgatataattctagtataaaaatattttggacagatgattaacatggtcatacgaggatttgtactatagaatatcttctagtactaacctttctgtagagcaaattatatttctctcactggatagattttagatgtgtttcttcatataaaattacaaactgagatggaattcatttcagaggtcttgtcattcatcccctgccttcaaaccgggctttacctaaactaacctagagaatgaagcatttctctttgctacatgaggtaaagaacactactacttctcttaataccattgttaccaatgacttgtgaagaatattgcttcaa

SEQ ID NO: 11473 - DNA, 477 bp, Homo sapiens
  misc_feature (1)...(477): n = A,T,C or G
cgcccctaagattacatcgaataatgaggcatcggagcagcgngncnggctgcgcgtttggctgcaatgagctcggcctcggggctccgtttggggcacccggcttgtggggaagaaaacatgacagaaacagatgcgttctataaaagagaaatgtttgatccggcagaaaagtacaaaatggaccacaggaggagaggaattgctttaatcttcaatcatgagaggttcttttggcacttaacactgccagaaaggcggggcacctgcgcagatagagacaatcttacccgcaggttttcagatctaggatttgaagtgaaatgctttaatgatcttaaagcagaagaactactgctcaaaattcatgaggtgtcaactgttagccacgcagatgccgattgctttgtgtgtgtcttcctgagccatggcgaaggcaatcacatttatgcatatgatgctaaaatcgaaattcag

SEQ ID NO: 11474 - DNA, 455 bp, Homo sapiens
  misc_feature (1)...(455): n = A,T,C or G
aggggnnnattgagttcattactctgtgcggnggaattcttaggatctagtagttagaaaagacagtaaaaataaggtagaatctgcatattaaaggagttttagattaacagtgaattacagtgagcagtactacagaactacagaaattgaagtaaattcaagagtgttttgccctggtagatgtttgtaaaattgattatagggccataatcccttatctatatataacctttggtgccaggtatttttggatttcagaattttgaggaaagatttgttttagattttggtaagagtaatcaaacacaatattaatgtggaacatggatagtcacattaagtgagagaaataaaagataaaaatagtctcccatcagtgctcaggtgaagttttgccattatatattaggattaagctttgccaccaacatagntatagaactttgagtttg

SEQ ID NO: 11475 - DNA, 438 bp, Homo sapiens
  misc_feature (1)...(438): n = A,T,C or G
atcatctttacaaaaaaatcaaaaaattagctgggcgtggtggcatgcacatgtggccccagctatttgagaggctgaggatctcttgagcccaggaattcaaggctgcagtgagctgtgatcacgccactgtactccagcctgagcaacagagtgactggacggctttccaagattgagacctacccttttaaccattgtgtgtgtgtgtgtgtgtgtgtgtgtgtgtgtagtgaattaaataatgcatataaagagcttantatagtgcttgaaagtaagggcgtattaactggtgctctatatatggtctttagctggagaccttcagatctctccacacgcaggaggcctgtatgtgtatccaaccacctgcttatatagcatgtggccttcggtgtcccacaggcagctccagctcagcttggaccacactga

SEQ ID NO: 11476 - DNA, 481 bp, Homo sapiens
  misc_feature (1)...(481): n = A,T,C or G
ccccgccccgccccgaatggaaacctattgtagacattagaacangcggnggaattcggcttagctcatggagttattatgacttcattctccccattcaccccaaaaatctttaaaatttttccgaagttaaaggctgtttccagcagagtagataggtagtaacaaagataacagctggacacagcacttactttcaggcattcttctaagtgcttgctctgtattgactcatttgacctaacccttcaggggtactattatcacctccactttacagatgaaggcgaagacgcccagagatgttgagtgacttgtccaaggtcacacagcgggtacatggtggagctgagactcaaccccaggctatctgactccagggcctctttgagggtttctgattttagcttcagagctgacatgtctcttaagtgtctcatagccaatccttccccaggaatgggactctaggcctggggag

SEQ ID NO: 11477 - DNA, 440 bp, Homo sapiens
ttaatttgtagaccttagtccttgtggtcgaattcgtacacaggagcgcatggccatggctttggaaaggagaatggaaaaatagaagaaggtcggccgggcttggtggcttaagcctgtaaccccagcactttgggaggccgaggtgggcggatcacctgaggtcaggagttcgggaccagcctggcaaacaccccatctctactaagcgaaaacccatctctactaaaattacaaaaattagctgggcatggttgcgcatgcctgtaatcccagctactttggaggctgaggtggggagaattgcttgaacctgggaggtggaggttgcagtgagccaaggtcgcgacactgcactccagcctgggtgacagagtgagactccatctcaacagaagaaaaaaaaaaaaaaaaaaagcggccgctcgagtctaaagggc

SEQ ID NO: 11478 - DNA, 553 bp, Homo sapiens
  misc_feature (1)...(553): n = A,T,C or G
gatcggattacagtccgagtggnggaattcgtcaagcgcaatgagctggctgccttggcacgaggggcgctggcgggcatggctcagctgcgtgagctgtacctcaccagcaaccgactgcgcagccgagccctgggcccccgtgcctgggtggacctcgcccatctgcagctgctggacatcgccgggaatcagctcacagagatccccgaggggctccccgagtcacttgagtacctgtacctgcagaacaacaagattagtgcggtgcccgccaatgccttcgactccacgcccaacctcaaggggatctttctcaggtttaacaagctggctgtgggctccgtggtggacagtgccttccggaggctgaagcacctgcaggtcttggacattgaaggcaacttatagtttggtgacatttccaaggaccgtggccgcttggggaaggannaggaggaggaggaanaggaggaggggngggagaagaaacangatagtgaccagggtgatgcagatgtgacctangatgatggaccgccgactctttctg

SEQ ID NO: 11479 - DNA, 437 bp, Homo sapiens
  misc_feature (1)...(437): n = A,T,C or G
ngttgatgaccctctgaacangcggnggaattcgattgactaatttgaattttgatgggccctggggtctaggtgctatccctggttgtctgggacctggccctggggtgattagggctgagtgtgagagccctataaaaaggtgcttgaggtgtgggctctggattggttggtttgcatatgaaagacgtgttctcaggcaagttgtttgctatctccaggaattagcaaactctgggaggggcagtccagggtcagtacagccccaagatgtcaagtcatcagaaaacaaaaggcatggttaatataatataaaaatgattccaagcaataagcattgtcatggtttaatttgttcttagagtgacagattgtggtagtcagcctctaagatggcctacagtgaccctaccttctatattcatgccctcccacat

SEQ ID NO: 11480 - DNA, 453 bp, Homo sapiens
  misc_feature (1)...(453): n = A,T,C or G
nctgggcttanacctgggggactgangtctgngaaaancnannaagaagaagacctttctgtggaaatagatgacatcaataccagtgattagcttgatgacctcacacaagatctgactgtatcccagctcagtgatgttgcggattatctggaagatgttgcatagacacgaagaaggaagtattctaattaacaaggacagaggactgaccggttccatttttttttttttccaaacaatcactcagctggaagggcggctctctattggggccttgcatttcaaaaacactgcagattttttttaaaagaaattttcattttactaaacaaaatacttcttatttgagcccatggggggaagatttaatattcttaatttaactgtccatttctttatggaaatggattatctacactcagtttcattacagggaaggaacccatgaaa

SEQ ID NO: 11481 - DNA, 471 bp, Homo sapiens
  misc_feature (1)...(471): n = A,T,C or G
ggacgtcccattgagnccnttaaactgagaccatcagnacagngcggnggaattcatttgaaaagattaaatgttaagacaggcatggtggcttatgcctgtaatcctggcactttggaaggtcgaggtgggaggattgcttgagcccaaaagttcaagaccagcctgggcaacatgatgaaacatcatctccacaaaacatacaaatatcagctctgttatatatgaaataaacagagttttccaaagatcttttataagatgggagaaaggagatgaaatagaagagagattgacttggtccttcaggattggaatctgatagatgggacactagaggaagtttaatgtaatctttttggctatctagatctagtttttaggccctggctagaagccagttagttcctcttctagaatggccaattaagtctacaatgccggccacagtgagcttgtggtatttagctt

SEQ ID NO: 11482 - DNA, 460 bp, Homo sapiens
  misc_feature (1)...(460): n = A,T,C or G
cattgacgaccattagttgangcgcctgaatacgngacatttgggctatccacgcgctgcggatcgtggctaagtatctgaagagggctgtcaacagcactgacaaatgaagaagaagaatgagtctcagggcaccttcctggagtggccctcgccatccagggaccagcgcgttgcctcccccggcgcttttacatcacatgagcagctgacagcgtatttattatgcctttgctgaaacagttgatgagaaatatgtttcccttcagttttcatttagaagacaaggcgtcgtttgaataacttgcctgatttttcttcctaccgagtagcatttctttttttttcaccatatctttccctaaggcagctccttattctgtaggaattgccaatgttgatgtgttattgttaggtatttatatcattcacagggctggcagaaatcccgatgatcttg

SEQ ID NO: 11483 - DNA, 461 bp, Homo sapiens
  misc_feature (1)...(461): n = A,T,C or G
gcgggcccnnnnngnaagaaccttgaaacctangnccctgcnagctacgtacangcggnggaattcattntgcattaaaaataaattggctcattgttacttcatttttacctcaggccaacaatgataataccgtttttttctttcaaaggttatatttttaaatatccattttctccatgtcttctttgtgatgcatgtatcctatatatctgcctttaagtatttccaggtagcatgttcagtgacactatttggatttttacctatttattgaggatgtttttaactcatgtagtatttgtcttattacagaattagaacttatttggaaaagcattaagggaatattttaatgcaagttaggtccgaacaattatttgttattaatttagaaatatgtagaaccttagaggaaaatgtatagattttcaactttagaaatggtatggtatttctat

SEQ ID NO: 11484 - DNA, 451 bp, Homo sapiens
  misc_feature (1)...(451): n = A,T,C or G
gttgacnaccctttgatgatcatctagaccancnggnggaattcgaagccaagcccacagagactttgtgagagatgcgacttggtccccgctcaatcactccctgcttaccacagtgggctgggaccatcaggtcgtccaccacgttgtgcccacagaacctctcccagcccctggacctgcaagtgttactgagtagattggatttaagacaaaaagcaagtcccccatgagtgtccacttctttgccctgccctctcagcttgtgagacaacacaggagccttctatagtatgttgatatgctagatctgtgccgttaataggcatcgtctctcagcctgagggaggctggattctgggttcctgtagtcacagggaggaaaagctttcttaaaaatggacatgtatgtgcgtgcgagtgtgtgtgtagatttatagtttttggtagg

SEQ ID NO: 11485 - DNA, 441 bp, Homo sapiens
  misc_feature (1)...(441): n = A,T,C or G
gttgatnacattaganactgatgaccctctgaccancnggnggaattcaggagagactgaacatcctcaagaggcatgctaaggatgaggaacgggagcagaggctagagaagctggactcccgggatgggaagttcatccaccgcatgaagctggagagtgcatctacttcctccctggaggatcgggtgaagcggaatatctactctttacagagaacttcggtagctctggagaagaactttatgaaaagatgaaaactgtcccctctcttattggttttcctgcattttccagggaagctgctgaccccttaattctctttataagagttcaaatgacttctttcacagatgtcaaaccaccagtgttcaaagtgaccctgcttcattgagtcctgaaacagctcacttcctttgagagctagtgtgacttgctttg

SEQ ID NO: 11486 - DNA, 485 bp, Homo sapiens
  misc_feature (1)...(485): n = A,T,C or G
cgccccctaggagaccctcgaatacggaggccatccgaaangcggnggaattctattgtctggaccttcaacacaacccctcttgtcaccatactttcagaagggggcactatcatagtgacccaaaagcgtaatagggagagagtagacttcccagatggaggctactccctgaagctcagcaaactgaagaagaatgactcagggatctactatgtggggatatacagctcatcactccagcagccctccacccaagagtacgtgctgcatgtctacgagcacctgtcaaagcctaaagtcaccatgggtctgcagagcaataagaatggcacctgtgtgaccaatctgacatgctgcatggaacatggggaagaggatgtgatttatacctggaaggccctggggcaagcagccaatgagtcccataatgggtccatcctccccatctcctggagatggggagaaagtgatatgaccttcan

SEQ ID NO: 11487 - DNA, 447 bp, Homo sapiens
atagtagaccctagccggtagacattagtcagtgcggtggaattcgaactcctggcctcaaaacaatcctcctgcctcagcctcccaaagtgctgggattatgggtgtgagccactgtgccagactttccttaattttgtaagtggcagtcaaggttgcaagaggacctaagctagtattggagtgagcattatgcaatgacccaagtattggagggtttttcatacagtctgcaggatcacttttatttctgtttcaggagcataaggagaattattttttactcccttataaagcccagtatcaatgaaaagggagagagagaactagaaccaatcacaacctctcaagccctgcagattgctggcagagctggcagattcagctcacggtttaaagaaggagaggttacaacaatgaatcatgaagatctcagtttattaaagg

SEQ ID NO: 11488 - DNA, 537 bp, Homo sapiens
  misc_feature (1)...(537): n = A,T,C or G
acgatgacactaggacagngcggnggaattccaagctttaaccgcagctatccctccagagtccctgacccgtggggtgtacagtgaagagacccttagagcccgtttctatgctgttcaaaaactggcccgaagggtagcaatgattgatgaaaccagaaatagcttgtaccagtacttcctctcctacctacagtccctgctcctattcccacctcagcaactgaagccgcccccagagctctgccctgaggatataaacacatttaaattactgtcatatgcttcctattgcattgagcatggtgatctggagctagcagcaaagtttgtcaatcagctgaagggggaatccagacgagtggcacaggactggctgaaggaagcccgaatgaccctagaaacgaaacagatagtggaaatcctgacagcatatgccagcgccgtaggaataggaaccactcaggtgcagccagagtgaggtttaggaagattttcataaagtcatatttcatgtcaaaggaaatcagcagtgag

SEQ ID NO: 11489 - DNA, 445 bp, Homo sapiens
  misc_feature (1)...(445): n = A,T,C or G
attgggcctttgagaccctagacagngcggnggaattcatctctcatcaaacttcttcggaccacagggcctctcacatggttgtcaggttttttagggaaatgattgtactatcccactgtttactaattcagtctgactgtcatccatgctgatatgctttcattttgctgtgatagggagagaatgcacatgtgcttctcggaatttgtgctgtcactggagcatttatttgagtgtctataatgtattcagggttgtgctaaaacctgtcagtagagaacaataagaagaagtcacaatctagttgtgctgagatatattcagttaggtgaaagaggtgctcttcaagccatatgactagatgagatcaccggtgaatatgtacagacaggggagaagaaagtgaggaccatcaagtgataggagaccaaagagtcttgtn

SEQ ID NO: 11490 - DNA, 463 bp, Homo sapiens
  misc_feature (1)...(463): n = A,T,C or G
atcgacccctctnnatcgagaccatctagaccgngcggtggaattcgtcccaaaaaaaacaaacccgaaaaactttttattagtagatcttcaagtatacttatatataaaatataggcatttgtgactataagcttttggaagtattctttattgattaagaaggtttccattcctgggtggcatgtataggccgctagaatggcttctacattttttgttttttggttttggttttctacatttatgtctttactccatttgtgtgtgtgtgtgtgtgtgtgtgtgtgtgtgtgtgtgtagaatgcacacagtccaactatatttcttccaagtggggtgccagtgtagctctctattaaacccccttttcccaatgaattgacacacccgcattgncatatattaaatatatatatttagtgaggtttatttctcaatatgccatgctgttacacttact

SEQ ID NO: 11491 - DNA, 486 bp, Homo sapiens
  misc_feature (1)...(486): n = A,T,C or G
gggaggaagccggnannnnnaatttgagatcgtaggcatngcggnggaattcacgagataaggctcgaaaacagcagcagcaacaccgactggagaacctccatggagccatgtacacgtgaggaggttggggctgagtgctggccctctgcgtcttccttattaaccttgaatcctcattaaaggtttctttacccaccctgaggctgtattgatcacagacctggccaggggctctgcatcctccatcaggtctctacttctgttggggaaggtgatcctaaatcgcagaaggcaccaggctgcggttttcctccctgctggcccatctggactcatggcagtggtaaagaactggattactgcaatagccagggcttgggcctatgtgttcatggttggaaggcaaaatgtgtcagggtctggtacccagctaattacttanagctgataaactacgctgggtgcagtggctcatgtctgtan

SEQ ID NO: 11492 - DNA, 441 bp, Homo sapiens
atagattagtagatccctagtccttgtggtggaattcgaattccaccacagagaccacgctttgatccagttggcccacttccaggacctaaccccatcttgccagggcgaggcggccccaatgacagatttccctttagacccagcaggggtcggccaactgatggccggctgtcattcatgtgattgatttgtaatttcatttctggagctccatttgtttttgtttctaaactacagatgtcaactccttggggtgctgatctcgagtgttattttctgattgtggtgttgagagttgcactcccagaaaccttttaagagatacatttatagccctaggggtggtatgacccaaaggttcctctgtgacaaggttggccttgggaatagttggctgccaatctccctgctcttggttctcctctagattgaagtttg

SEQ ID NO: 11493 - DNA, 443 bp, Homo sapiens
atagaagacactagctcgagtgccgtaattcgctagcctgtgctcatccacaatcacaatgaacatgtcaaggaagaatttgcagagactcaagggaagcacaatgggataaggtaatcactttcagtgaaaaactgttttcttgaaaacaggcttggacacaattgaaagctggcttcctgcaaacacaccaagagtctgtaatctagcctatccattatatgtcctttattattcatgatatcctattcttctaccttgttgcctggtaactttttctgaggactgagtttctgcagcgatgtggtgcactcttcctgtgatgaggaaacatctgggcccccttctgcaggctttggaagatgatgtgtcttgtcaaggggtaaagggcaaatggatttaatttctgcttaaaactatcatagacgttccaaatagaatat

SEQ ID NO: 11494 - DNA, 449 bp, Homo sapiens
  misc_feature (1)...(449): n = A,T,C or G
aatgaggncattgangactctctgnccgngcggnggaattccctttagtcaggaaggacgttggtgttgaggttggcatacgtatcatggacagtaactaccatggctcccgaagttttgccaaaacctcggatgcgtggccttctggccaggcgtctgcgaaatcatatggctgtagcattcgtgctatccctgggggttgcagctttgtataagtttcgtgtggctgatcaaagaaagaaggcatacgcagatttctacagaaactatgatgtcatgaaagattttgaggagatgaggaaggctggtatctttcagagtgtaaagtaatcttggaatataaagaatttcttcaggttgaattacctagaagtttgtcactgacttgtgttcctgaactatgacacatgaatatgtgggctaagaaatagttcctcttgataaataag

SEQ ID NO: 11495 - DNA, 466 bp, Homo sapiens
  misc_feature (1)...(466): n = A,T,C or G
cgacgtcccatgagaccntaactgagaccttaggacangcggnggaattcgcgcctcggaggcgttcagctgcttcaagatgaagctgaacatttccttcccagcttctggctgacagaaactcattgaagtggacgatgaacgcatacttcgtactttctatgagaagcgtatggccacagaagttgctgctgacgctctgggtgaagaatggaagggttatgtggtccgaatcagtggtgggaacgacaaacaaggtttccccatgaagcagggtgtcttgacccatggccgtgtccgcctgctactgagtaaggggcattcctgttacagaccaaggagaactggagaaagaaagagaaaatcagttcgtggttgcattgtggatgcaaatctgagcgttctcaacttggttattcgaaaaaaaggagagaaggatattcctggactgactgatactacagtg

SEQ ID NO: 11496 - DNA, 443 bp, Homo sapiens
  misc_feature (1)...(443): n = A,T,C or G
attgtangtccctagtcattgtggtcgaattcgattcatatctgcctgcagctcactttcagattgcttggggaaaaaagtgtgtgttgggagagagaagagatggagagagcgagcacaaatgtgccaaaatgttgcttgaaaacagacaggtacgcttaggatatgtttgccaggcgtctttcttttataatgcctgtttgttgttgccattgtttgtgactgtagaagaatagttgctcattgcttatcatttggaatatggaaaagtatcatccttaattttacctgtagagattacttaataaagaattaaattgtgattacactatgtataattttctttcttctacttttgctaatatgttgtaagtattttttcacataattgagtatctttggaaacatgatacttaagcacttcagaatttttcttcatatan

SEQ ID NO: 11497 - DNA, 447 bp, Homo sapiens
  misc_feature (1)...(447): n = A,T,C or G
ntcttaagccctattgatgctctcggacanccggnggaantcaccttatccttttaaatgcatcagacagcttcagatttctttgacttgtaagtaggctgtgtagctggcagtgccttgacatgactaatagtggtgataatatcaaatttgttttttgtcagtcttcataggtgcttagaaacatttgcaagtatgatctgtttttattacatctctggtagccaatttctagagtcttgactccaggtgtgtactctggctagagaatgctgttccttgatttattgcctctttaagccaggtgtctgcaattgggtagagtttttcattctttacataaacattttaccttggtgaatatttaaaccaactaccaactgaattacctttttatgaaggtgctagggaaaagctgtattctttggggacagtcatgcttagtac

SEQ ID NO: 11498 - DNA, 494 bp, Homo sapiens
  misc_feature (1)...(494): n = A,T,C or G
aggatcnnnnttccgttgatctcgtagggcngcanntttggaaagatgctctgctctatgacaatatattttaactgactttctagatgccttaatatttgcatgataagctagttttattggtttagtattcttgttgtttacgcatggaatcactattcctggttatctcaccaacgaaggctaggaggcggcgtcagaggtgctgggtgacagagccatgagccagccattttataagcactctgatttctaaaagttaaaaaaaatatatgaaatctctgtagcctttagttatcagtacagatttattaaatttcggcccttaacccagccttttccagtgtgtaacccagtttgaaatcttaaaaaaagaaaaaatgaaaaaaaaaggaaaaaaagaaaaaaggaaaaaaacagtttgaacacaaaggctctatggaagaaatgcctctatgtaggtgaagtgttctctctgcatgcaacagtaaaan

SEQ ID NO: 11499 - DNA, 457 bp, Homo sapiens
  misc_feature (1)...(457): n = A,T,C or G
nttcgagaccctcggaagngcggnggaatttctttgattgcctgctaattccaacaggggatgtagacatgttgcagtaaaaatatttaaaaatgtggatagatactgtgaagttgctcgctcagaaatacaagttctggaacatctgaatacaacagaccccaacagtactttccgctgtgtccagatgttggaatggtttgagcatcatggtcacatttgcattgtttttgaactattgggacttagtacttacgacttcattaaagaaaatggttttctaccatttcgactggatcatatcagaaagatggcatatcagatatgcaagtctgtgaattgtaagttcttggtatatcttcgttaatttgctggttttatccattccacatatcaaaatgtgcatcctaagtgtgtacaatttttatttgattaaaaataaagggggaggaagaat

SEQ ID NO: 11500 - DNA, 451 bp, Homo sapiens
  misc_feature (1)...(451): n = A,T,C or G
gttgagtccccattgtatgtcatctagaccancnggnggaattcgagcaaagctaggcctgattagagtagagtgactattaaaaaacataactttctatgagctataaatcaaagttttaaaaagatgtttggatatatttgagtattccgatcatgaaaacagaaattgccctgcctactacaaggacagactgatgggaaattatgcacctggtcaacttagcttttaagcagacgatgctgtaaaaactaacggcttctctgatatttattgtaagttttagtactgatctccttttccagtgctgcacactcctggtttggaactttaatagcgttgcaacgaaatcctatatccagtttcctgtaatttaattgaagaaaaatacatccaaataaagactttattattaacagaccagatagcatcagaaatcatgtgactgtta

SEQ ID NO: 11501 - DNA, 550 bp, Homo sapiens
  misc_feature (1)...(550): n = A,T,C or G
gtaaaggtacattatatgtcctgtatatatttctcaccgcactgaactaccaccgccccgcacgaggacnattttnanntttcgnaagcccttcggaaagngcgnggaannnntttgcagtaccttagnacangcggagagaatcgggacacatgagcgggnnggccctgctaagccaagggcttcacttcttgagaagcacatgcggaattcagctgaggccgcgagcaggggaaaatggtcagtctcggaagagaagtcttatacctgccttaggattgaactgtgcacttcttttgggttttttttttctttttgaaacaaagtcttgctctgttgtaccctcgctggcacgatcttgtctaactgcaacctctgcctcccgggttgcacttctgagagggagaggagacactgtcaataattgttccaagacaactggaataaactgattacccagagaactacaacatatcaaatcttatttcttgagaaaaattaatctttacttcatctttcccaaaatgctgattgcaaagagagtgacttn

SEQ ID NO: 11502 - DNA, 451 bp, Homo sapiens
  misc_feature (1)...(451): n = A,T,C or G
naatcgaagactacattggaagcccgtcggaanncacccagagcagtttaataataattgttgttttttagttctgtggctgccttacaggatcattggtctggtagctcagtcactttagtgccatattcataatgctttgactttaatcccaggaaaccgtggctgccaggctttctgtttcactcttgcgtcacacccagctactacctgtagacaaagccttctatgaagcaggcattgctgccaaggtgagctgggacaaggaagggtggggcagataggaggaagttaaaggttggaaaatagaatatcccttctgctctggtagaggaaagctgagtgtagggctgatgttacggaggatgtagtcctcctatgtcttcctggatttttctccctggatcccagagaaatagcattcaagcccagcttgctcactcccatttgn

SEQ ID NO: 11503 - DNA, 465 bp, Homo sapiens
  misc_feature (1)...(465): n = A,T,C or G
cgccccccgcccccccnaatgatnccatgacgaccatctgacagngcggnggaattctgacagttgagtatgtctatgaaaggatgacaggcctccgctggatttgcaaagttattctagagagtgaagtaattgcagaagcagttggggtgaagaaaactgtcaaatatgaagctgctggggaagctgtgaaaaccctcaaaaagacccagccaactgtcattaacaacttgaagaaaggagctgttgaagatgtgatttcaagaaatgaaattcagggccgctcagcagaggaggcttacaaacagcaaatcaaagaagataatattggaaatcagctgctgagaaagatgggttggactggtggtggtttaagtaaatctggtgagggcatacgggagcctatctcagtgaaagagcagcataagcgggaagggcttggtctggatgtagagagggtgaata

SEQ ID NO: 11504 - DNA, 471 bp, Homo sapiens
  misc_feature (1)...(471): n = A,T,C or G
tggcgcanagnacacaaactgaaaccntaggctttgacggcatttcgacagggcttggttgtagcctgcaggctgtgttcaatgtaggggctgtacacttgggactgacctattaaatctcttactcatgggtgagtaaaaaatgctaatctccacgttaacagatatccaaaatactcctaaggggtcctgggacttggagaaactagtgtgaacctggattcaaagccagatttcttactgcaaagaatttttttctctactgagcagcctcatgtcagaccactgcagacggcagctgagttctcaggaggcatgaaagcagtgtgcaagtggaggctaatgctgatggggcacagagaatacaaaggctggcctgtcttccccaagagacaaagcagccacggaggcttatacctttgcatgcctcaagatcagagtccagagacaatggaaacacttggaccctgg

SEQ ID NO: 11505 - DNA, 449 bp, Homo sapiens
  misc_feature (1)...(449): n = A,T,C or G
nactgaagacctcactgaagnccgtcggaannctctttcttctcagggaatatatctgctagaaggaaatagctgggaagaatttaatgatcagggaaattcattatttctatatgtggaaactttttgcttcgaatattgtatctttttaaatctaaatgttcatatttttcctgaagaaaccactgtgtaaaaatcaaattttaattttgaatggaataatttcaaagaactatgaagatgatttgaagctctaatttatatagtcacctataaaatgttctttatatgtgttcataagtaaattttatattgattaagttaaacttttgaattgatttgaggagcagtaaaatgaaagctatatctattctaaaccttatttagacattggtaccagttacccaggtgaaaatatggagtaactttgttttgtatggtaagggtta

SEQ ID NO: 11506 - DNA, 465 bp, Homo sapiens
  misc_feature (1)...(465): n = A,T,C or G
catggagaccctaattggngngccgtaattcgcttctaatcacttagatttaagctttgtttcaacaacaaatctgtgtaactacatattaatagtataacatgtgaggccatgaaggctaggactaggaaggatagatgggagaaatgccctgaggggaaaacatcaccaggactataagcctgttttccactgagaatattacaagattaggttagaatggaaagtcccgtacaagatagtagaatgttggtaagcattttaacctggtcataaacaagactaggaaacaagtttagattgatgaaaaagtatgaaaaatcttaagagaaagtcccctttccctctcctttttaaaaattctttcaggccaaatttagtgttatgagaaaaactatatacatgcatgcaatactttgttagtaaatatatgtaaagataaatgttgtaaaatataaaacactg

SEQ ID NO: 11507 - DNA, 472 bp, Homo sapiens
  misc_feature (1)...(472): n = A,T,C or G
natgagaccctagccaggcgtttgatcgcattacaggcgcgagccaccgtgcccggcctgatgtttttgaatgattatgaaaatgggtatacagcattaaaaccttagactgattttaaatatattaatttcttttaaactcaatataatgttaatattactgtagcacttactagcatttctgaaggttggtcttgagataagattgaaaatgacagttgttgattttctgaggtaatatacccaaataaaatatatgtatgtgtacatgaatctaaactgtcttcttctgttcctcattttgctttacttaaataatctttcatattttttaagtgttttgcccatgtgcttgggtagccttgaagtcaccagaataactaggactcaaattcagaccaaaccaggactagctttttgtgccatgagttagccatggtcctggacccagcaaaaagaatgattatgatgg

SEQ ID NO: 11508 - DNA, 465 bp, Homo sapiens
  misc_feature (1)...(465): n = A,T,C or G
nttgagattcgtagtcagtgtggnggaattcctgaccctctcgcgggactgaccctgttgtgggcagtggtctccccccttggcgcctccttgcgcaggcccagcctccactctcctcgtctaggtttctttacctccagggatcagctgtgtgtgtgtgacctccctaccgggctatcggcctcttgggagccagcggcagggccggcacctgcgtgcctgtgcccgtgtgcgtgagacagagcccttgcccctgctgctgccccgagggctgccctgccctggaagggcccctctgcctccacaccagtggagtcttcgagacttgggagctgcttggcctcattttcagccatgaacagacggcctgtggtctctgggcctgaggcacggactcgtancaccanggtttggaggctgcgacccgcccagagagcagcttcacactggcgccacagaggagcc

SEQ ID NO: 11509 - DNA, 479 bp, Homo sapiens
  misc_feature (1)...(479): n = A,T,C or G
catcgaccnccctnnnatgtagaccactgnccangcggnggaattcggaaagcaagcattaaaggaatctcagttcactttatccaaatgcatagatgccgtgatggtgctgggaaattcgcatttattcatgaatcgttccaacaaacttgctgtgatagcaagtcacattcaagaaagccgattcttatatcctggaaagaatggcagacttggagacttcttcggagaccctggcaaccctcctgaatttaatccctctgggagtaaagatggaaaatacgaacttttaacctcagcaaatgaagttattgttgaagagattaaagatctaatgaccaaaagtgacataaagggtcaacatacagaaactttgctggcaggatccctggccaaagccctttgctacattcatagaatgaacaaggaagttaaagacaatcaggaaatgaaatcaaggatattggtgattaaggctg

SEQ ID NO: 11510 - DNA, 475 bp, Homo sapiens
  misc_feature (1)...(475): n = A,T,C or G
aatgagaccaatggatgaagcgcgcaannccatatagnngcaaggaagccccgtgtgttttgatatacattcctgatgggcacacaaaggaaatgccaacatcagggtcaaaggaaaagaccaaagtagaagccacaaaaaatgagacctctgctccttttaaggaaagaccaacaccttctctgaataataattgtactacatctgaggattccttggtcctttacaatagagtggctgttcaaggagatgtggttcgtgaattaaaagccaagaaagcaccaaaggaagatgtagatgcagctgtaaaacagcttttgtctttgaaagctgaatataaggagaaaactggccaggaatataaacctggaaaccctcctgctgaaataggacagaatatttcttctaattcctcagcaagtattctggaaagtaaatctctgtatgatgaagttgctgcacaaggggaggtggt

SEQ ID NO: 11511 - DNA, 520 bp, Homo sapiens
tttgcccttccactaacgctgttctcccctgccagattagcccctttctctcctggtttgcggtgccgtgggcctcagctttttatgtttgccatttctatgagtcgcttcctcactcataaccttttctgtcatttctctaatgctatcaacttcgctgtcctttttcctattcatggattcagtatttaaaattttgaaaacgattttgctagtagtaattgccttcttcacagggctgttacatagataaaatcaacgtttattatgaaaataccttgaaaaaacattaagtgctacaaaaattcaaggcagataattttcctcttgcagagatataattctgtttttattctccagatactgtgtcttgttttcctaaatcagactaccccacacaatgtaatctggaaaaactaaaactcctgaccattgctgagatatgaagccatgacctttatttgtgctgtggaaaatcaaagttgattccaggcagtaccatcttagacttgtgtattag

SEQ ID NO: 11512 - DNA, 450 bp, Homo sapiens
  misc_feature (1)...(450): n = A,T,C or G
nactgatgaccaccttgaagnccgtcggaanncccacctgggaagtggccagaactgcctggggtccaagaactcttgtgcctccgtccatcaccatgtgggttctgaagaccctcgactgcctccccgatgctccgaagcctgatcttccagggtggggaggagaaaatcccacctcccctgacctccaccacctccaccaccaccaccaccaccaccaccaccaccaccactaccaccaccacccaactggggctagagtggggaagatttcccctttagatcaaactgccccttccatggaaaagctggaaaaaaactctggaacccatatccaggcttggtgaggttgctgccaacagtcctggcctcccccatccctaggctaaagagccatgagtcctggaggaggagaggacccctcccaaaggactggagacaaaaccctct

SEQ ID NO: 11513 - DNA, 473 bp, Homo sapiens
  misc_feature (1)...(473): n = A,T,C or G
caccgatncccgagaggcgtcgcaggaanccnannnacaaacaatactactttcaaactgtcctaaatgctataataatatttcatgcagatttttgtcttctcatttcttagagatgaaaaggtgctatatatatatttttatacatctgttaaggaaaagaaaagtgcttacctctgcagacagcccaagcatcttcatcacatttctcaccacttgttctcaattcaaaaaaattatattcttcaaggctaagaagaccatttccatctaaatcaattacttcaaatatatctgataaagtagacctaaaattataaaaatagctagttatttcttgtcactaaggcaactacgctgaagaagggttttttttttttttttgaaagggagtctcactttgtcccccaggctggagggcaggggcgtgattttggttcactgaaagcaccgcctcctgggttacgccattt

SEQ ID NO: 11514 - DNA, 450 bp, Homo sapiens
catcgagaccatattgaagcctgttggaattccggcgaaggaggtggtggctgcgttgggctccgggaagccgttcgggctggggctgtcggccgcggtgcggaggcactcgcgcggggggtaattcggggtctgggttctggggccgcgcagctttccccgatggcccactgcgtgaccttggatcagctgtccatttcctgtgaccatctcattgacaaggacatcggctccaagtctgacccactctgcgtccttttacaggatgtgggagggggcagctgggctgagcttggacggactgaacgggtgcggaactgctcaagccctgagttctccaagactctacagcttgagtaccgcttttagacaggccagaagctacgctttggaatctatgacatagacaacaagacgccagagctgagggatgatgacttcctagggggg

SEQ ID NO: 11515 - DNA, 432 bp, Homo sapiens
  misc_feature (1)...(432): n = A,T,C or G
natcgagaccctaggaattgagcgccattncttaagacgctttttcaagtgattgtatcattttatcctttcaccacaaatgtatgacaattcaggttgcacacagccttgtcaacatttggtgtagcacagtggctcacgcctgtaatcccagcactttgagaggccaaggcaggaggatcgcttgagcccagaagttcaagaccagcctgggcaacatgacaagaccccatctctacaagaagtttaaaaactagctgggcatggtggcacacacctgtggttccagctactctcaagctgagacgggaggatcacttcagcctgggaagtcgaggctgcagtgagccatgttcacaccactgcacatgctgtgttgtccaggcctggacaacagagcaagaccttgtctttaaaaaaaaaaaaaaaaaa

SEQ ID NO: 11516 - DNA, 483 bp, Homo sapiens
  misc_feature (1)...(483): n = A,T,C or G
cgcccccccccccccatcgagnaccnnattgtcgatccctagtccatgtggtggaattcttaggctttggtttgcctgagtaacggccagtgagggcaaaagcttcaccaactcgaatcgtgagcttatctctgaagtcgaggtgaagcgttgggggtgctaaaatttgtaattataaaggcaagtcatttttattgatgtcttattacaaatctacaaatgtgcaagtttcagaagtataaattgtagtagacacatacccagctcatccttgcaagtaattggtttggtgcaaaatgatggtttgccttgtccaacaatgttgacagcactgacacggtactcataggtatcaccttcttttaagcctttaacagtgtattttctgctaagcaagttgtcatttgtaactttgtggaacttctcagtcccaatgagccgactttctaggacatagttaataatttctgacccaccatcata

SEQ ID NO: 11517 - DNA, 463 bp, Homo sapiens
  misc_feature (1)...(463): n = A,T,C or G
aattgatnactctagtgaagngccgnggaattcggcaatagctcattatgggtttgatttgcattttcctgatgaatagggttgttgagcaccttttcatatacctgttggccatttgtatgtcttccttagaaaatgtctattgaggtaatatgaccatttaaaaatcagattattgattttttttttgccattgagttgtaggagttacttatgttataagcatattaaccccttattagatataaggtttgaaaatatcctcttctattctgtcagtagtcttttcatttttttgaatgtttcccttgctgtgcagaatcttttagagtttgatgtattctcatttatttgcgttcttgttgcttgtgcttttggtgtcatatccaaaaaattattgccaaaattaatgccatgaaggttccccccatgtttgattccagtagtttcatagttttaagcg

SEQ ID NO: 11518 - DNA, 459 bp, Homo sapiens
  misc_feature (1)...(459): n = A,T,C or G
atttgagaccttaggangtgaggagcaatctcgacattgctggtcatgctaagactgactgttccaagctacttctgtggactttgacttatagagaggagtggtgaatattctgaaatgctaactaacttaaaaatttgatagattaatttctaaaacatatacaaagatgttgtagagaccatacaactgttccctggaaggttggtactatttatttcttgttgaatgctgtgtgaagtttgtggagtgtttgaattctgtctctatcatttactaatagaatatatttcatcaagtgtcttaaatattattagcatatttctggatgtataaaatgggaaagtaattgtctctatttcaaaattattggaaggattagatctaatgtgcttatatcatctatttaataaaaatacatgttccctttattttttcagaagaatatgccctagcttn

SEQ ID NO: 11519 - DNA, 446 bp, Homo sapiens
  misc_feature (1)...(446): n = A,T,C or G
tggggtntccctcctatcgtcnacgtgactncggcaananccgccnnngntggactttgtggccccttcatggccgtttgttgtctactgtctttacaaagagcctctgttggaatgctacacaaaactgcgggagaggggaggggtcatcaacctcaggctgtctgaaacctggctcagaaattatcaggttttgccagatcgaagtcatcctaaactgctgatgagtggaggtgggggttatcttctctccggcttcaccgttgccatggacaaccttaaagcagacaccagcctcaaatctaatgcaagcactttagaatcacacgagactgaggagcctgcagctaaaaaacgaaaatgcccagagtctgactcttaacccttttgagaattgctctgaattttgttctcaggcattatacagttagtaattaaactttaan

SEQ ID NO: 11520 - DNA, 442 bp, Homo sapiens
  misc_feature (1)...(442): n = A,T,C or G
nttcgagatcgtaagccatgcggnggaattcaaatgagtaagcaaactttgcttgctgttttttatttgagaaggggtctcactctctcacccaggctgaagcgcagtggcacaatcacagtttcctgcatcctcaaactcccgggctcaagggatcctcctgcctcagcgtcctgagtagctgggactacaggtgcaggcttccacacccagctaattattattttttttttgaagagttggggtctagccatcttgctcaggctggtctcaaactcctgggctcaagcgaaccccctgcctcagactcccaaagttctgggattacaggtgtgagccaccacacctagcccagattttttagttggaataagataatgagcctatcccaaaatggctgcaatattttatattcatcaattcttattgtgctttaaagctg

SEQ ID NO: 11521 - DNA, 479 bp, Homo sapiens
  misc_feature (1)...(479): n = A,T,C or G
ggggccnnnnnnnaacaaaaactgagaccntaggaagctgatggccntccgtgagcccaggagtttaacagtttaaaatcagcctgggcaacatgatgagacatcgtttctacaaaaaaattttttaaattagctaggcattgtgatgtgcacctgtggtccctgctacttgggagcctgaggcaggagaatcgcttgaaccttggaggttgtggctgcagtgagccctgatcgcaccactacaccccagcctgggtaacagagcaagaccctgtctcaaggaaaaaaaaaatcatctggcccatcctgttacttaacagagaaggtacctgaggctcaaaaaggatgactgacagtcctagtggcagaatggaggtgggatctggaacccacaacttgattcctaggactctttttttttaattcccacattggctgggtgtggtggctcacgcctgtaatcccagcactttgggagg

SEQ ID NO: 11522 - DNA, 543 bp, Homo sapiens
  misc_feature (1)...(543): n = A,T,C or G
attgganacctctgtccctattccaannnncaattcanaaagataagaccttggaacgtgaatggaggaagagattaattttgagaaggagagaaaagagacattaacccaaggagtcacggagtggcagttttaggttgggcaagaggagcatgtcggaggaaggagccaacagagggagaaattgaacatgtgaggaaataatggaatgcagtgacaggagggcatggggcaagtgggatcaagggcattgagaaaaatggggaaataaattttgatatatagaggaagttgagaaatttcactaaaaagaaaacagaaaagttaaactgatctgtaaaaatcagcacatattagccggcatggtggcgtacacctgtagtcccaactactccgcggaccacatgggtcctggaggctcagatgggaagatggcttgagcttaagagatggaggttgcagtgagatgcgatcgggccactgcacttagcctgggcgacagagtgagaccctgtctcanggaananaaaaaaaaaaaaaagc

SEQ ID NO: 11523 - DNA, 459 bp, Homo sapiens
  misc_feature (1)...(459): n = A,T,C or G
actgatnaacctaggccatttgcttgcctctcccttgagaaaagaggatctaggatccagttggtgcagcttatggcttgtccctgtgtgtatagttgctaaattattcttttatttttatttttaagaagttattctttagataataataggcatgtagcttaaaaggaaacctcaaaagacacaaaggatttgtctcattttaaattaaaaaaatactgtatcagcatcaagtaattaaacatttgttggaatatcataacttcttttttctttattgtatgttccctttcctgtgcttacgtattttcagaaattttagttggtgtgcataccacaatttgtattttatacttaaatatacatttcatggttgtatatttatttgatcaagttcttttatatcaaataacagagcttggcatttggttgcttgctcataactcggcagtaagcatn

SEQ ID NO: 11524 - DNA, 445 bp, Homo sapiens
  misc_feature (1)...(445): n = A,T,C or G
ntagacttcgatgacccttacaccangcggnggaattcctccgctgcacaaaatgcattttttcgtatcaaaaagtcaccactaaccctcccccagaagctcacaaaggaaaacggagagagcgagcgagagagatttccttggaaatttctcccaagggcgaaagtcattggaatttttaaatcataggggaaaagcagtcctgttctaaatcctcttattcttttggtttgtcacaaagaaggaactaagaagcaggacagaggcaacgtggagaggctgaaaacagtgcagagacgtttgacaatgagtcagtagcacaaaagagatgacatttacctagcactataaaccctggttgcctctgaagaaactgccttcattgtatatatgtgactatttacatgtaatcaacatgggaacttttaggggaacctaataagaa

SEQ ID NO: 11525 - DNA, 481 bp, Homo sapiens
  misc_feature (1)...(481): n = A,T,C or G
agcgggtccnnnnaatcgagaaactgagaccntacggaagagccgnggaatttcgttggggtccagctgaggaaggagcgcggatcccaggctcgttctttgcctgggctgcccctgcggcccctggggcgggtgctgctgcggcgccagctccaagggcggatccaggcgggaggggcctcctcggagaagcggggcgcggtcccaactacgcagaggctggcacgccgaccctccacacctcaccacgcccccatctccgtccgtgtacacacactcacacaaggacgccaaccccacctagatgcaaagcaggattcaaaagaacatctttgcgttttctaccggctccccatcatcgtactagggaggaagaagcgggtgagaaacaaaacttctttccattgtcctgcccagttctgcggacttgttctgaggccgaggagcctgtgttggagagatggtgatgggcctgggcgtt

SEQ ID NO: 11526 - DNA, 444 bp, Homo sapiens
  misc_feature (1)...(444): n = A,T,C or G
nttcgagatcgttagcccacgcggnggaattcttccagaatacaaaagaaaccattttctaggttgaggatgtttctaatttactaataatatttatccatgaatctctgttccagcgagggacaatttcagttagtgagacaacgcagacggcttcattcccaggtgcctgggagccaggaatccattcacaggacctgtagcttcacagatggaagctccatttaaatgtgactgtccttgtgaaactatttattgttggcaccattattcaggagctgttcaatggaatgttaagcacatcgatgacaaataaagaacagtgtggttgtttttctgtttaatgatcagttgtatggatccagtgaggatattgtgatgacccagactccactctccctgcccgtcacccctggagagccggcctccatctcctgcaggtcn

SEQ ID NO: 11527 - DNA, 416 bp, Homo sapiens
  misc_feature (1)...(416): n = A,T,C or G
tgtaccttcatgttgtaaagttaatagagataaatatttttatcaaaaattttataaacacagcctttctttagcattgatttaatttcagaacatcttcatattgattattagccataaagtttctaacatgaaacatttatctataaattttgtgattatagtagtggaatacatagaaaaaatatgctttcaactttgtgagtgaatttcgtgttgtgtaagttatatgtcaaatctttgaattttaattttactcttttatacatgtgataatttcataaagtgagggatcccaaaaaaagagtttcatccaacattcttgttctgcaggttgcttttataaagaaggtgaactattttcatgtaatgttaagagttaaacttatctttcccaaatataactntattattag

SEQ ID NO: 11528 - DNA, 418 bp, Homo sapiens
caaacactagtctgtcagagcggccataagccataaagagtcaatctcttaattatatttttcatcatgtaaacaagttgcccatttccctttcttagattgcaccagtgaaggagatgttttgcaaagattcagagaactaatttttcactggataagacctgagtaacccagaccccccaccgtggttcttttcacagccctcgactttgcacttaaaaagggatattgtaaatgaaaggctgcagtgccagttttaagaaagaatttctgtgaagtgtgaggactctggagtctagctcacataaagagagtgctatataaaaatccgacagctgaactatgttgctcttttttggcagggagtggggatgagatttgacaccaatatgggcaaaattagataaccttttgttaa

SEQ ID NO: 11529 - DNA, 470 bp, Homo sapiens
  misc_feature (1)...(470): n = A,T,C or G
tggggatttaatcgatagcatacgtcagngcggnggaattcgtcactgatctttctggcaaggaaaccatctgccgtgtgactggtgggatgaaggtaaaggcagaccgagatgaatcctcaccatatgctgctatgttggctgcccaggatgtggcccagaggtgcaaggagctgggtatcaccgccctacacatcaaactccgggccacaggaggaaataggaccaagacccctggacctggggcccaggcggccctcagagcccttgcccgctcgggtatgaagatcgggcggattgaggatgtcacccccatcccctctgacagcactcgcaggaaggggggtcgccgtggtcgccgtctgtgaacaagattcctcacaatattttctgttaataaagtgccttcatgtcccaggaatgaggggcacctttgctccagtcaacgatacaacggaaggtagagtcgg

SEQ ID NO: 11530 - DNA, 488 bp, Homo sapiens
  misc_feature (1)...(488): n = A,T,C or G
gactttaacnnaggnnggnnnnaattgaaaacctnattgtagaccattagtccagngcggnggaattcccaagatgccgaaaggaaagaaggccaagggaaagaaggtggctccggccccagctgtcgtgaagaagcaggaggctaagaaagtggtgaatcccctgtttgagaaaaggcctaagaattttggcattggacaggacatccagcccaaaagagacctcacccgctttgtgaaatggccccgctatatcaggttgcagcggcagagagccatcctctataagcggctgaaagtgcctcctgcgattaaccagttcacccaggccctggaccgccaaacagctactcagctgcttaagctggcccacaagtacagaccagagacaaagcaagagaagaagcagagactgttggcccgggccgagaagaaggctgctggcaaaggggacgtcccaacgaagagaccacctgtccttcgagcag

SEQ ID NO: 11531 - DNA, 522 bp, Homo sapiens
  misc_feature (1)...(522): n = A,T,C or G
tgctggatgtgataggtttgtatagagtgagagaatatacattgtgacttttattagaatataatgggaccattgtcacatatgtaattttaatacaaatgactttgaattcctaaaacagaaagaatcttataagaaattgttagtatgtgtgcttacatctgctatgattatagcattagattaaaaatttagatttgcgatattcaaactttcttctcatttggctcagtcccagatttcttcttagagctctgcctttgtacttatcggagattcttttgaaaatttgacaaccagtataacttttcataacactgatatttctgcccagtaagaacatgaaaactttgctgggttcttctttttctgtgaatgtgagataatgtattatgggtctcttcttggagaaagtctcttcttttagcaccagtctttttgctaaccatgatgcctttngtgtagtgagaaaaagacatcctacctggaccaaattactatgcnaagatgctgtntttactg

SEQ ID NO: 11532 - DNA, 417 bp, Homo sapiens
  misc_feature (1)...(417): n = A,T,C or G
gcccctcaggacgtgtcatacaattacagtggcgacggagctgggggttccttccctggcctcccggacggtgcagaccttgtggactccatcatcaaaggcgggccaggggacgagtggatgcaggagcttgatgaattgtttggtaacccctaatcaagagaggccccaagatccacaactcgagtggttaaagcttaaaaagtgaaaaagaaacaggatgttgacccatccttgttttttgttttttttgacccacgtaaactgagcaaaactgcagctggctgacaatggaagatccaggtgccaatccacagccccaccaggcctcatttcacctgattttcacacagcaatcgagatgagacgccatgcagatcccggctgcgagagagggagacacccggaggagcangt

SEQ ID NO: 11533 - DNA, 489 bp, Homo sapiens
  misc_feature (1)...(489): n = A,T,C or G
tggcncnnnatgagnccttgagaacctacgcagngncgnggaantcggcagaatatttactatgcacaacgtcaagcactttacacacattcattttattcatgatctggaccttcaaaccatctcttcttgatccagtcccagctaccatgaactacttcataatttccctaaatgtgccaggttctttcatgaccctgatcctttgtgtttttgtttatttctttctttgttttgttcgtttttgagccagagtctccatttgtatccaggctcactgtagccttgacctcctaggctcaagtgatcctcttgcctcagccccctaagtagctgggactgcaggagcacaccaccaccacacctggctcattaaatttttttttttttgtaaaaacaaaatctcgctatgttgcccaggctggtctcgaactcctggcctcaaggaatattcctgtttcaccctcccaaagggttgggatttcaggg

SEQ ID NO: 11534 - DNA, 503 bp, Homo sapiens
  misc_feature (1)...(503): n = A,T,C or G
naactcgaagaccanctgngananngncnnngnaactgagnaccactagtacagngcggnggaattcctgcaagtggtgtaactatgtttttcaatgatcgcatttgaaacataagtcctattataccattaagttcctattatgcagcaattatataataaaaagtactgcccaagttatagtaatgtgggtgtttttgagacactaaaagatttgagagggagaatttcaaacttaaagccacttttggggggtttataacttaactgaaaaattaatgcttcatcataacatttaagctatatctagaaagtggactggagaactgagaaaattacccaggtaattcagggaaaaaaaaaaatatttatatatataaatacccctacatttgaagtcagaaaactctgaaaaactgaattatcaaagtcaatcatctataatgatcaaatttactgaacaattgttaatttatccattgtgcttagctttgtgacacagc

SEQ ID NO: 11535 - DNA, 419 bp, Homo sapiens
  misc_feature (1)...(419): n = A,T,C or G
aaactgcagcttccttctcaccttgaagaataatcctagaaaactcacaaaatgtgtgatgcttttgtaggtacctggaaacttgtctccagtgaaaactttgatgattatatgaaagaagtaggagtgggctttgccaccaggaaagtggctggcatggccaaacctaacatgatcatcagtgtgaatggggatgtgatcaccattaaatctgaaagtacctttaaaaatactgagatttccttcatactgggccaggaatttgacgaagtcactgcagatgacaggaaagtcaagagcaccataaccttagatgggggtgtcctggtacatgtgcagaaatgggatggaaaatcaaccaccatanagagaaaacgagaggatgataaactgggggtggaatgcgtcatgaaaggcgt

SEQ ID NO: 11536 - DNA, 459 bp, Homo sapiens
  misc_feature (1)...(459): n = A,T,C or G
ggggnattgtagacactagnccattgaggngcaattccctgtacctacagaaataaaaatacacaaaaattagctgggtttggtggtgtgtgcctatggtcccagttactcaagaggcctagatgggaggatcactgagcccaggaggtcaaggcttcagtgagccatgttcgggcaacagagcgagaccctgtctcaaaaaacacaaaccaaaacgccctgttcagtgctaagaacagagccctgtgcactcttgtggcagtcgtaggccccaggaggccgcttttgagagctgtaggtctgaatgttccctccgctttgacagcccagactcaagacaaaaagtgcagatagttcagcactggaggctctgctgaccccgcactccagagacagcaccgtgggaagcttctgggagttccccacccgatgaacgtgctggaggcagagcacagggct

SEQ ID NO: 11537 - DNA, 473 bp, Homo sapiens
  misc_feature (1)...(473): n = A,T,C or G
tggacccnnnnaaagnaaaactgagaccctatcagctgatggccttcgggatttgaactttttatgtaaggtatttctgtgacattttgttttttgttttgataagtagaagtggaaaaggggtttttaagttttttgaagtgaaatgatattcagtttcttcctccgtagggaggcagcaatcttactggggttagaataggctgcttcgtgattatatataatgttctgggagttctatgaatatagggaattcttgaacatcttgaaattatataaaaaatattgtaaatgtgcatgagtgctttcttggatgcagtgttaaaggtgatgtggagaagagggtccatgattcaaacagattgtgcttttatttctctagtcctgccctctcttctgaactctagactgcctattcagcatctttacttcgacatctaataggcctctcanatctaaaatgtctgcattta

SEQ ID NO: 11538 - DNA, 494 bp, Homo sapiens
  misc_feature (1)...(494): n = A,T,C or G
catcgacccctcnnatcgagnaccactaggccagngcggnggaattcatggagaaaggggaagtagtagaattcagaaacaaaaatgcgcatctctttctttgtttgtcaaatgaaaattttaactggaattgtctgatatttaagagaaacattcaggacctcatcattatgtgggggctttgttctccacagggtcaggtaagagatggccttcttggctgccacaatcagaaatcacgcaggcattttgggtaggcggcctccagttttcctttgagtcgcgaacgctgtgcgtttgtcagaatgaagtatacaagtcaatgtttttccccctttttatataataattatataacttatgcatttatacactacgagttgatctcggccagccaaagacacacgacaaaagagacaatcgatataatgtggccttgaattttaactctgtatgcttaatgtttacaatatgaagttattagttcttagaat

SEQ ID NO: 11539 - DNA, 418 bp, Homo sapiens
caagaatggccagattctcctctgggacccaagcacagggaagcaggtgggctttaccctcgctggccacagcaagtggatcacaggcctgagctgggagcccctccatgcgaaccctgagtgccgctatgtggccagcagctccaaggatggcagcgtgcggatctgggacacaactgcaggccgctgtgagcgcatcctcaccgggcacacccagtcgggcacctgtctccggtggggaggggacgggcttctctactctgcctcccaggaccgcaccatcaaagtctggatagctcatgacggtgtgctgtgccggactcttgcaggccacggccactgtgtgaacaccatggccctcagcactgactatgccctgcgcactggggcctttgaacctgctgaggcctcagttaat

SEQ ID NO: 11540 - DNA, 486 bp, Homo sapiens
  misc_feature (1)...(486): n = A,T,C or G
catgacnccttattgagngcgtggaanncacctactggtgcatgaggaccatcaatgagactcacaatttcctcttctgtgaatttgcaactggcttcctagagtactttgatctcaacacagacccctaccagctgatgaatgcagtgaacacactggacagggatgtcctcaaccagctacacgtacagctcatggagctgaggagctgcaagggttacaagcagtgtaacccccggactcgaaacatggacctgggacttaaagatggaggaagctatgagcaatacaggcagtttcagcgtcgaaagtggccagaaatgaagagaccttcttccaaatcactgggacaactgtgggaaggctgggaaggttaagaaacaacagaggtggacctccaaaaacatagaggcatcacctgactgcacaggcaatgaaaaaccatgtgggtgatttccagcagacctgtgctattggccaggaggn

SEQ ID NO: 11541 - DNA, 499 bp, Homo sapiens
  misc_feature (1)...(499): n = A,T,C or G
aggcgaggggnnnncattgagaccataatcgatggcggtaancacggcaagaaaataatacacgaggggtcccttcactgctgaagagcttcctccaggagcgactgggaatccacttaattcgaaggaagatagtaaagcctaagcatcatgttttgatgtctcggaaggaatcatggaaggtgaaaagcgaaatcccaaaggtgccgaagcagcctctggtgctccatcacccgcgcatgacgacaaccaagtctccctcaaaggatatgctagagccagaggcagagctggctgaagatctgcccactaccaaaagcacttctgtggagtcagagatgcccactgagaacctggaaggccattccccgtcttgccggaccttcgtgccactgcctcccatctgctccaactccactgtgcatagtgaagagaccctgtcccacctgagtgacacaactgtccgcctcagcccagagcgcccatcagatgaggactc

SEQ ID NO: 11542 - DNA, 466 bp, Homo sapiens
  misc_feature (1)...(466): n = A,T,C or G
agacgcgcgnnttnnnccttgatcgatatgcatngngcnggaactccctttgcccacctgtcaaggtggcaggcactgtgctgggtacaggaggacagtcagacatgtcccttcttagctatagtcgagctgtctgggaaacaggatgaaaaacaggagggttattttcttgtgccctctttgtcagctgatcccctcttctgctaccagctatttggccagcaagccgtttttagtccccactttgcccatttttctgttttggttcatcgtttcttaaaagccatgttataaaacatggtagtttgaatcctgttgctaattttaaactttcctctaaaatgtactgaattttgacaaaaatttgaaaatatcctcagctaactagaataaaaaggatcataaaacaatgattttaaaactgaaatctctagaaactcaacatccaagtcagccgcatttcttc

SEQ ID NO: 11543 - DNA, 475 bp, Homo sapiens
  misc_feature (1)...(475): n = A,T,C or G
cgcgtaaccnnnatcggagnaacancgtagaacataggaaagngcggnggaaancaaaaatagacgtaaaaataaaggcatttggctggtccaagatgtaattatcaatcagtcagcacctgtgattcttttacttaggtttttgtggttttttttttttaaacaaattttaccccaattttcttgagtcattctctctctgcagcaacaaaggaagggcctgtacctccctaccaatgacttggtgtccttattttctaccccaaaagcagggattttacctgtgtccaaaggggttttgaattctacaaactcatcaccatgaggcagggaatcattgaaaaccacctgtgtctcctttgggagaaggacatatcttaagtatttacgtagcttattcttctatatctacatatgcaaagctctccttaacagaaaagggtacatatgcatagggggaggagatcacaccttg

SEQ ID NO: 11544 - DNA, 476 bp, Homo sapiens
  misc_feature (1)...(476): n = A,T,C or G
agaggcaggggggnnccccaatagagnnccnaactgagtacatcaggacagngcggnggaattcaaccgaacagaggtggacagctcagtattcccagcagaggggctgatccccccctacggcttgacagcagacacctacatcgacctggcagctgatgaggaaggtctttgggctgtctatgccacccgggaggatgacaggcacttgtgtctggccaagttagatccacagacactggacacagagcagcagtgggacacaccatgtcccagagagaatgctgaggctgcctttgtcatctgtgggaccctctatgtcgtctataacacccgtcctgccagtcgggcccgcatccagtgctcctttgatgccagcggcaccctgacccctgaacgggcagcactcccttattttccccgcagatatggtgcccatgccagcctccgctataacccccgagaacgccagctct

SEQ ID NO: 11545 - DNA, 470 bp, Homo sapiens
  misc_feature (1)...(470): n = A,T,C or G
gttgggcgcgngggccccccaatgagaccaactgaatcgtcggaannccccaagaagaaaatctgaaggatcagtttaactatacccttagtacatatgaagaagctttaaaaaacagagagaacattgtttccatcactcaacaacaaaatgaggaactggctactcaactgcaacaagctctgacagagcgagcaaatatggaattacaacttcaacatgccagagaggcctcccaagtggccaatgaaaaagttcaaaagttggaaaggctggtggatgtactgaggaagaaggttggaaccgggaccatgaggacagtgatctgattgaaaaaaaacgacagtctggggaagcgatcacatctggtgaccaggctgcttcattcaacactgtgtaaacaccaaagccttaacttagcaaacagttgttagaagtgggacactccaaccacattccaagctgagaan

SEQ ID NO: 11546 - DNA, 419 bp, Homo sapiens
agggaaggtgcatacctctgcctcttccctgcacctctctcgcctagcaaacactctgtgaggttggcagctcttgtaccagcttagcctggcacaggggctggggtagggaaaaggccctactggagcaggaagaggcaaggactactccagacagagggattcaaaggggaagaaaaaggtcatgggaaacacttcacaggacagcagtatctcagccagagatggcagagatctcaacactcacacagctgcttgagggcacctagatgtgaaggatacaccagagaatagcaggcaactctgatgcagatcagtggtacctgccctggggcaggagaaggagaaatggtgtgccattcatttgccatctctggtctcagtcacacatgattcagtacttaacattctttgtgaac

SEQ ID NO: 11547 - DNA, 478 bp, Homo sapiens
  misc_feature (1)...(478): n = A,T,C or G
tgganccnanaanagaaagctgaaacctttgnannactgagtcactagtacangcggnggaattctgcatgtacaacataagctaaattccttcctactaagggtagtgtgatgctaccactctgtaactgaacaagccattcaagatggtgatgttatttataagagtggattgttgacattggcaaatgtggtttgctctggaagtggttgtattctgtaacattttttttctcccagtaataaataaatatacacacaaacgtccaattttattttcactgctttcctgcaactcactattttattttatgtaagacctttatattgccaaaaatggtttttatagccatattccgttcaaagagcctaacctctgtggttagaagaactgaggctgattaaaaggtatggaatgaaggtggtgaaggaatttgaagctttttgagagtactggagtaattcagaaataaaggaa

SEQ ID NO: 11548 - DNA, 490 bp, Homo sapiens
  misc_feature (1)...(490): n = A,T,C or G
taatggcccttctantgagatcataggacagngcggnggaattcggcggcggctgctgggcctccgccttcttttctacgtgaaatcagtgaggtgagacttcccagaccccggaggcgtggaggagaggagactgtttgatgtggtacaggggcagtcagtggagggcgagtggtttcggaaaaaaaaaaagaaaaaaagaaaaaaaaagaaaaaaaaagggtttttttttttttttaaacggaatcgtaatggggttgaataatttaaatgggggggttaaaaaagcatgttatcctgtctatctttaaaaaattcctgtataaaactgtggagcagtttttaaaatagggttggttaatataaaaagcaaaaaaatggcgctatgtttgattcctacaacgaaattatccccacctttttttcattcttaactctttaaaggattcaaacgcaactacaatctgggctggacttaaaaaaacaattt

SEQ ID NO: 11549 - DNA, 484 bp, Homo sapiens
  misc_feature (1)...(484): n = A,T,C or G
attgacaccttattgagngcgtggaattcttcttggaaacctctgcgccatgagagccaagtggaggaagaagcgaatgcgcaggctgaagcgcaaaagaagaaagatgaggcagaggtccaagtaaaccgctagcttgttgcaccgtggaggccacaggagcagaaacatggaatgccagacgctggggatgctggtacaagttgtgggactgcatgctactgtctagagcttgtctcaatggatctagaacttcatcgccctctgatcgccgatcacctctgagacccaccttgctcataaacaaaatgcccatgttggtcctctgccctggacctgtgacattctggactatttctgtgtttatttgtggccgagtgtaacaaccatataataaatcacctcttccgctgctttagctgaagagttgacataaaaaggattaaaaaaaaaaggggctctctctataaaaggggcccattan

SEQ ID NO: 11550 - DNA, 476 bp, Homo sapiens
  misc_feature (1)...(476): n = A,T,C or G
gagttccnannaaacanacatgattacctaggaagactgatggccttcgcacaaatctatcagaggaggtatatggaggagcatgcattttgcattttagtaatttgaggtttattctaataagtattaggaaaaaagtaacatttaaactcataatttcacagatattatgatggtatttaactttataaagggaattgatttttaaaaaattaatttgaataagtgatacgtagatacaggttttttaaatcaggaaggttgtatgcaaataactaagatttaggaaacattgcttccttaaaaaactccagatcagagagggacagcagctcacatgcacccaggatcacacagccttttagtgacagagctgggactaaattagcgtgcctcactactaaaactacggaagttaagactttgcagggattcttctcatttaagcagtattggtacaattttttcattctttc

SEQ ID NO: 11551 - DNA, 476 bp, Homo sapiens
  misc_feature (1)...(476): n = A,T,C or G
gggcggnnnnaggagcctgagacccttcgaaaaatgagnactctaggaagngcggtggaattcggcaaaataacttggcaaacttagttctggtgatttcttgatggtttggaagtctattgctgggaagaaattccatcatacatattcatgcttataataagctggggattttttgtttgtttttgcaaatgcttgcccctacttttcaacaattttctatgttagttgtgaagaactaaggtggggagcagtactacaagttgagtaatggtatgagtatataccagaattctgattggcagcaagttttattaatcagaataacacttggttatggaagtgactaatgctgaaaaaattgattatttttattagataatttctcacctatagacttaaactgtcaatttgctctagtgtcttattagttaaactttgtaaaatatatatatacttgtttttccattgtatgc

SEQ ID NO: 11552 - DNA, 489 bp, Homo sapiens
  misc_feature (1)...(489): n = A,T,C or G
ntatcgtagtccctagtccatgtggtggattgactgcctatctgcccagctcccacagcttgtccctcgaacgcacctgcaggaggctgtgacccatgcagtggcaatgcggctagctgtgtccatggcctgtggaaatatgccagcccagcagaacagctggaatcctacactattaatatggttatgttttccaagcaagtactgctcaatttatacaagttaaatgcacatctgtgatttgatagcacagctgagaactgttataacatctaacaattaaatgacagtaacagtatatgacaaattaggggaaagaaccacaacttcaaaaggatagtttccttttaagaagaaactaacatgaaaaaagactgacatccaccccaaaaaacaggcaaataccacattaagtaatttaccaaaaacaagaaaagcaaatggataataaatatatggaaatattcaagctcacaatttatcatacat

SEQ ID NO: 11553 - DNA, 468 bp, Homo sapiens
  misc_feature (1)...(468): n = A,T,C or G
aatcgaagaccacttgacagccncttggaattnctttacacttttcctcagatgcatctaaaaatttcatctttttcatgtataaatacttaataacttatgatacttgtaataataaacagtaaatttccagtttttgctgacatatagaaatataattggtttttatatattaactgcatatccttcaaccttgcacaactcacttattggttctagtaacgttttatagattccataggattttctaacattgagaatcgtgtttgcaaataacagatttacttcttcctttcaaattctggatgcttttttatttcttgccttattgtagtggctagtgggtggggatagtgtgtttttagggaaagctaatctctctggcattgatcaggtgagagacattcagctccagagagtttaattttgctgttaggtgaaccgactcacaattgcaaagtctgaagg

SEQ ID NO: 11554 - DNA, 474 bp, Homo sapiens
  misc_feature (1)...(474): n = A,T,C or G
gagggcagggngnngcccccctagagnccnaactgagaccataggacangcggnggaattcggcttgtccaaggagtcaacagcataattaagatgtaaaacgactggccctcacttagtacttggactagtcccctaaaccacagtgtagcatattctacaagaatctttcctttcttactcatgccgggttctgagtcagacaggaagccaccagctagagaagcgggaggccctttctgatgggcccagagcaagatgctgtagtgactgggccaatcttatgctcttccctacaacaccaggaagaaaaatgattaaggaaatgagttgaaagacattctagataagccattcaatgcttaaagactaataggaatctggacaaatgaaatagaacaggaaccattcagtctaaaaggagaaagcagcagaaacacccacacccacacacaccagtctgctaatgaagaa

SEQ ID NO: 11555 - DNA, 468 bp, Homo sapiens
  misc_feature (1)...(468): n = A,T,C or G
gaagtncccggnctgcnaatactggatgcatcgangcctttggnaaancnanncnnnancttgncccgctgcggnccgcggctcccggccaaacccccctcaggaaagaggttttaaaatcaaagatgggaaaatcggagaaaattgcccttccccatggccagcttgttcatggtatacacttgtatgagcaaccaaagataaacagacagaaaagcaaatataacttgccactaaccaagatcacctctgcaaaaagaaatgaaaacaacttttggcaggattctgtttcatctgacagaattcagaagcaggaaaaaaagccttttaaaaataccgagaacattaaaaattcgcatttgaagaaatcagcatttctaactgaagtgagccaaaaggaaaattatgctggggcaaagtttagtgatccaccttctcctagtgttctttcaaagcctcctaggcacn

SEQ ID NO: 11556 - DNA, 457 bp, Homo sapiens
  misc_feature (1)...(457): n = A,T,C or G
nattgagacccctcgtagagcacactagtccangnggnggaattccccatagacagatggacagcagcaagcccatgggggcccccacaggtaggctctgtgatgccaggaagcctgggcattccctggcaagaccaccgcaggatgggcagcacagctctgacctaacaagctggacttttgggcagtctgcccaagccatggcctcccgccaccgcccccgccccagcagtgtcctcagaacactctactcgcacctcccggtgatacatgaactctgacccctccccaggaaaggcttctgtacagagcatgctgggtctgcatctcctctcgactcctacatggtggtcactgcccctggcaggtctctgaaagggaaatgcttttctgcataggcccctgcttgggcagtacacagtgagaccgaccccctctgaatatgacaacagcctgg

SEQ ID NO: 11557 - DNA, 441 bp, Homo sapiens
  misc_feature (1)...(441): n = A,T,C or G
nttaaactgagaacctggaagngtgaggaccntctcaaggacgggaagagcagagagcaggtttgggtcagtgttctccagcctgcatttttgccttgatgtccatccctgctacancgaaagaactacagagtgcgaggtaatccgggaaggaggtcatgcactggtttgggccgggcagctgcaaggaaaactggttgccatcaaggccttcccaccgaggtctgtggctcaattccaagctgagagagcattgtacgaacttccatgcctacagcacgaccacattgtccgatttatcactgccagccgggggggtcctggccgcctgctctctgggcccctgctggtactggaactgcattccaagggctccctgtgccactacttgacccagtacaccagtgactggggaagttccctgcggatggcactgtcccn

SEQ ID NO: 11558 - DNA, 452 bp, Homo sapiens
  misc_feature (1)...(452): n = A,T,C or G
gataaacactgaaaccntctgnaanctcgagaacctagtccangtcgtggaattcgcccttctctgagccctgcctcctcccacactgggtgaccccccaaccaccaccccctctcctcaggccgaccaccagcacagctaccccagctctcagcagcggcaggagaggaggcaacctgtttcttcccaaggcagcccctagccagttcctgcatccctgcctcttgctgcctccgtggcctctaaacctccagcctcccccgcccccaccccgctctttcctacagcattttaaagtgctaggtctccacttgcttcaggctgtctgcttttctccccttcagccaaacttcttgaatgtatactgcctgcagcggcctgccatctccacagcctcaacccccattctccccccacccatcaaaacctgactttgacctcccgctcctcca

SEQ ID NO: 11559 - DNA, 408 bp, Homo sapiens
aagatatacaagattccctaacagtgtctaatgaagtgcaaacagcaaaagaatttataaagattgtagaagctgcagaaaatgaataccagactgccatcagtgagaattatcagacaatgtcggacactactttcaaagccttacgtcgacagttgccagttacacgcactaagattgattggaacaagatccttagctacaagattggcaaagagatgcagaatgcataagatgaacattgcatgaccggatcattttagtgtctttgcgttaaaaaatcattgcaaaagtattctgaactgtcaagctgcccagtcagatgggctgttgccatttaaaatcactggaattaattagtttgattagagcacaaagcttagctaatcaaccattatttttcattgt

SEQ ID NO: 11560 - DNA, 467 bp, Homo sapiens
  misc_feature (1)...(467): n = A,T,C or G
gagccaggngcncccccactgagaccnactgaagcccttcggaannccccccctgaatgttggacaccaactgcataccctaggttgcttaaagggatttcactattatatatagtcaataaaaatgaagtagttgtatatatgcaacattgtgtacagaggggaaataatgaatagtattaaagaaacattctcgtcttcctttacctttaatcccctaatacctagtctactttttaaattttcagacttcactgctttttgaattcataattctaattttcacattattgttaatggaaaatcatatctaataaaggttttagttattcccatgcacagtatgaaaattctcatttgctgaggttttgtttcaagaaaatgtattggcatgtctttgagaacatgttttattgtctcctgtgtcatataatccaaactaatctccgtttacagactttaacttg

SEQ ID NO: 11561 - DNA, 459 bp, Homo sapiens
  misc_feature (1)...(459): n = A,T,C or G
gggccgggngnccccctgagcccatagagacatagtaaggccggggactaggttaaactgcaacgggagtttgaaggagggtgagaagcacacagcaagtgcttaacagggaagaaatcatttgggaagaggatctggtgtgagtagtaataatgcacggctgagttctcaggtcagaatgggaagcttcatagaggtaagcgagaaagagaaggagagagataaaaaaggaaaataaaaaccccaggctttcaatgattcactttatgtggataattatgtgcattttaaccaacatccgacttagaacatattcattttttggttaaaactaggcatttgtcaggtcgggcatggtggctcatgcctgtaatcccagcactttgggaggccgaggcgggcggatcacctgaggttaggggttcgagaccagcctgaccaacatggagaaaccccgtc

SEQ ID NO: 11562 - DNA, 476 bp, Homo sapiens
  misc_feature (1)...(476): n = A,T,C or G
agagggcacggnnnnncccccaactggagaccancttgacagccttgnggaannccttccaaaggttcgttgaaaaaacattggtgtggatgatgttggaaaggatattggaccagatactaccagcattaacagagttgctgacactttgaataactggagtatccatccagatcccaagggagaacccagtgaagagaagaatgcaatggcaaagactttttatgattcctcttttcccacagaacatgtgaaaacaaagcctctgatatcaactccactacaaagccatttgcaggcaatcaagacgactaaaaatacttctggtgatgatgactggcagagcctcattacgaatcaactaaataaaagtgaaaatttactaagtttagaaaatgacaaccagccaaagaaaagaaaagcagaagagacgttggaaaaaaacaacagattaaaataatgtagataagtgcttt

SEQ ID NO: 11563 - DNA, 448 bp, Homo sapiens
attgacgaccattagtgcaagacgtggaattcgctttttattgttgttgcgagcgtttaaatgtttaaagcaagaaatttaaggatggaaaagagaggtgattgtatttatcacaaaggtgcgtgaattttccgaggctgaaacgtactactttgaagatacttggtgatgtacatcaaatacctagttatcgactacccaaagcaatttttgcctttagtgctaactagctaaaaggtagaatgtatttttattttattctaagaaaaatgaaacctgcatgtttcttttcagagaacctgcaggtgtatacttttgtcaaaagttaatgattgaaagcccattctcatcatacgcatgataagacatcatttcacattatttgattaaaaaaacacttctggactctagtaaatggctcctttgattcagacattattttgactgg

SEQ ID NO: 11564 - DNA, 463 bp, Homo sapiens
  misc_feature (1)...(463): n = A,T,C or G
natcgagaccactagtccgttcggtggcattcgctgggattacaggtgtgagccactgagcctggccaaaaagttttaattatttaaagtaaattgggctttttcttcataagatgatacataaattctaactgagtgagcttggagatgaatttttcaggaaatagtgatataattctagtgataaaacattaaactcctaaataaattttttttccatcatgcttctatagatacatatatatctatagttgtcatctgattaagtgatccagtctttgaaaatactgaagttttgaagccgacataaaatagttttaaaagctgcataacttaagcattctgtattgtgctgagtgactaaaatatccaaaaactttaaaacatcacaaatacttacttgctgcttaaaagctgtggtttgccattntctgcttagagatttttgatgtatttgcttaat

SEQ ID NO: 11565 - DNA, 481 bp, Homo sapiens
  misc_feature (1)...(481): n = A,T,C or G
cccccccccccccctccnattgtagacattttgaagtctggtggaattccaagcgcagctagctcagcaggcggcagcggcggcctgagcttcagggcagccagctccctcccggtctcgccttccctcgcggtcagcatgaaagccttcagtcccgtgaggtccgttaggaaaaacagcctgtcggaccacagcctgggcatctcccggagcaaaacccctgtggacgacccgatgagcctgctatacaacatgaacgactgctactccaagctcaaggagctggtgcccagcatcccccagaacaagaaggtgagcaagatggaaatcctgcagcacgtcatcgactacatcttggacctgcagatcgccctggactcgcatcccactattgtcagcctgcatcaccagagacccgggcagaaccaggcgtccaggacgccgctgaccaccctcaacacggatatcagcatcctgtccn

SEQ ID NO: 11566 - DNA, 406 bp, Homo sapiens
atgtattactgtataaagcaaagctgtatatactaaacattttttagcagagtaatatttatttgcatagtctatttattgtattcgtattacactgttattaaatactgggatgaaatcagtgacctgaagcaagaaatcttgccttttaatgtatcattaattagggctgctgtgatattgtcagcttgcattaacaattagaagatagagaacccgccatcagggtgtctacctaacttctcagggactacacttggtagttttccaccatttaaagaactggtaaatatgaaacatttgttgagttaccagaattgccattaacagtgttttctttcccatattccatgctttctgcctctgtgtatatatataatatatatgtatatgactgtgctgtgat

SEQ ID NO: 11567 - DNA, 417 bp, Homo sapiens
  misc_feature (1)...(417): n = A,T,C or G
tgacaacaagacaggcaaaccactgccctttgggactctgggagtacacaagaaagcagccttccaggatgctaatgtctgcctgtttgtttttgattgtatctactttaatgatgtcagcttgatggacagacctctgtgtgagcggcggaagtttcttcatgacaacatggttgaaattccaaaccggatcatgttctcagaaatgaagcgagtcacaaaagctttggacttggctgacatgataacccgggtgatccaggagggattggaggggctggtgctgaaggatgtgaagggtacatatgagcctgggaagcggcactggctgaaagtgaagaaagactatttgaacgagggggccatggccgacacagctgacctggtggtccttggagccttctatgggcaagggan

SEQ ID NO: 11568 - DNA, 488 bp, Homo sapiens
  misc_feature (1)...(488): n = A,T,C or G
gaaattggaaaccctctnnnnaactganaccctccgaagagngccggaannctgccaggaagaatgtaagttctccaacatcttcaaataaagaagtggttatgaggaatgatcagaataatggagatatgaaaccattccagaatttcacaacaataccaatcacacaggctctcaactacaatctgagcaaagaagggcatttagaaaaagaaccttggaatgcattcagccatcatggcccagttaatgtctccatcaatggaattccttgcattctcttctgggccaaaagaataatgattaaatttaagaatcaaacctggctggaccttacagacgagccatttggtcagaaggtaactgtggaccctgacaactcaaattgcagtgaagaaagtgctaggttgtctttgaagcttggtgatgctggaaaccccagaagtcttgctataagattcatccttaccaattacaacaagttgtcc

SEQ ID NO: 11569 - DNA, 484 bp, Homo sapiens
  misc_feature (1)...(484): n = A,T,C or G
tganngtcgataccctatcnagngactgagaaccntcgcgcgccccgagaagccgcccgggcaggtcacgcggctccgcgccctgcccctgacccaagggcagctggttctggtctggtcggatgaacacgtgggctccaagtgcctgtggacatacgagatccagttctctcaggatggtaaggcgtacaccccggtcagcaggaagccatcgaccttcaacctctttgtgttcagcccagacacaggtgctgtctctggctcctaccgagttcgagccctggactactgggcccgaccaggccccttctcggaccctgtgccgtacctggaggtccctgtgccaagagggcccccatccccgggcaatccatgagcctgtgctgagccccagtgggttgcacctccaccggcagtcagcgagctggggctgcactgtgcccatgctgccctcccatcaccccctttgcaatatatttttata

SEQ ID NO: 11570 - DNA, 463 bp, Homo sapiens
  misc_feature (1)...(463): n = A,T,C or G
cttgagacctatggaggaccatagtccgtgtggtggaattcgtcatggcgcccgaggagaacgcggggaccgaactcttgctgcatagtttggagcgccgcttcctggcggcgcgtgcactgcgctccttaccctggcagagcttanaagcaaagttaagagactcatcagattctgagctgctgcgggatattttgcagaagcacgaggctgtccacacagagcctttggacgagctgtacgaggtgctgacggagaccctgatggccaaggagtccacccagggccaccggagctatttgctgccctcaggaggctcagtcacactctccaagaacacagccatcatctcccacggcatcacaggcctggtcacatgagatgctgccctctaccttgcagaatgggccatcgagaacccggcagccttctctcataggtgacctcggggtgcacggcaggg

SEQ ID NO: 11571 - DNA, 439 bp, Homo sapiens
  misc_feature (1)...(439): n = A,T,C or G
ccttgacgttcgattacnccagngcggaggaattgcggtatgcccccgaatccctctcggacaacatcttctctcgccagtcagacgtctggagcttcggggtcgtcctgtacgagctcttcacctactgcgacaaaagctgcagcccctcggccgagttcctgcggatgatgggatgtgagcgggatgtccccgccctctgccgcctcttggaactgctggaggagggccagaggctgccggcgcctcctgcctgccctgctgaggtgagttgctacagtggctggagagacgacatctgctccatgggctggtggccgacagtaatctcacgctgggacctggcctgcagcccctgccccagacctctcaccatcaccgccaccaccgtgcagctgccaccaaccctgcacgctactgctgcctcagtggctgtacc

SEQ ID NO: 11572 - DNA, 577 bp, Homo sapiens
  misc_feature (1)...(577): n = A,T,C or G
caataggatgcactgtccagagaggnggaattctttgagagccgtccggagccagccaacgagcggaaaatggcagacaatttttcgctccatgatgcgttatctgggtctggaaacccaaaccctcaaggatggcctggcgcatgggggaaccagcctgctggggcagggggctacccaggggcttcctatcctggggcctaccccgggcaggcacccccaggggcttatcctggacaggcacctccaggcgcctaccctggagcacctggagcttatcccggagcacctgcacctggagtctacccagggccacccagcggccctggggcctacccatcttctggacagccaagtgcccccggagcctaccctgccactggcccctatggcgccctgctgggccactgattgtgccttataacctgcctttgcctggaggagtggtgcctcgcatgctgataacaattctgggcacggtgaagcccaatgcanacagaattgctntagatttcaaagagggaatggatgtgccttccacttacccacgctcaatgagacaacaggagagcattgt

SEQ ID NO: 11573 - DNA, 472 bp, Homo sapiens
  misc_feature (1)...(472): n = A,T,C or G
cccccattcgtagatattagatagtgcggcggaattccttanatttactgacagaaatctagagaatgcttaattttttttccagcagtgaagtagaagagacaggtatatcccagaaggttatgcaaaacatcaagagaagatgagagggtaaggtttatagactgagttattagaaaaatgcacaatggggtttgggttgcataaaaacagggtctatgggtgtgtatttataagttcacacatgcacacacaaacacacacatatatgtacacacacaggcagccctcaacattctcatgattggcttttgtacattattttttaattattaatacctcaaaatgtgtttatatagagaaattgaactttagtgcatcacaaaagagaagagacttcaatttctagttcaagaaatgaatgagaaagatccttagaatttatagcacctggagatctacgagaaaaact

SEQ ID NO: 11574 - DNA, 443 bp, Homo sapiens
  misc_feature (1)...(443): n = A,T,C or G
cctagaagttcgattacactcgngcggnggaattcgaagaaaaaagagaaggcatagatctaaagtaaatggtctccaaagagggagaatgaaagtctgacctagaaaacatttaactctgaataacagagtccaaaagaaaagatggcaacaaagaggaagaaaagccaacactagacctttgaaaagaagaagaaaaagaggtccaagaattcccaaagatgaaaatattaattttaaacaatctgaacttcctgtgacctgtggtgaggtgaagggcactctatataaggagcgattcaaacaaggaacctcaaagaagtgtatacagagtgaggataaaaagtggctcactcccagggaatttgaaattgaaggagaccgcggagcatccaagaactggaagctaagtatacgctgcggtggatataccctgaaagtcc

SEQ ID NO: 11575 - DNA, 491 bp, Homo sapiens
  misc_feature (1)...(491): n = A,T,C or G
gtccagccnattgagaccctaactgagacattagaccagngcggtggaattctttttgaaacatatattaatggttcttcaccattttatggatatactgttttttatttaacaaatcctctcttagaaaaggatacttcagatactcttgcagttcaaaataaaatttagataaacatctttacttaaatctctggctatatctttaagtaaagtaaatttctagaagtaaaattgtgggccagaggatatgcatgttttaagaatcttgatacatacatggctgaatttgttcttcaatacagtggttttagcttattcatctgccaacatcaatttgtatttctatttcatgaaatatttgtgaacaccaaacacttaatttttaaaatgacatcagtttgagagattttgaagctcatgtttcaatttgtatcactttcattattgatgagtttaaacttaaaaaaaggttttggtttttgatggct

SEQ ID NO: 11576 - DNA, 242 bp, Homo sapiens
  misc_feature (1)...(242): n = A,T,C or G
caataggatcactgctcagagagggcaatncatagatcactagtcagagaggagcaattcgccaggctctgagctgaccctcctgaagcactaaccccgggcgtttggcacgtggaggagtcaggctgctttcgcctctgcaagggcagaacactaacctgaccgtgggcggagccttgcgggatccacccccaataaaagcaattccaaccttaaaaaaaaaaaaaaaaaaaagagggggg

SEQ ID NO: 11577 - DNA, 466 bp, Homo sapiens
  misc_feature (1)...(466): n = A,T,C or G
catcgacaccatattgacgnccgtnggaanncgacacgggtcangaactagcggaattactggaggaagaaaaactaagttgggtgccagtgctcatctttgctaataagcaggatttgctcacagcagcccctgcctctgaaattgcagaaggactgaacctgcataccatccgcgaccgagtctggcagatccagtcttgctcagctctcacaggagagggcgttcaggatggcatgaactgggtctgcaaaaatgtcaatgcaaagaagaaataaaatctatacgaatggagatgcaggagctgcgggagccgaattcggtcctgaaaaacactaatttgctgctttctgaccaaatgtttttccatctgtgtacagctccagctgtttgaagagagggaacaacacggtttagaaagaatccccattccagcagtagatttaactgatctctgagggtcagg

SEQ ID NO: 11578 - DNA, 440 bp, Homo sapiens
  misc_feature (1)...(440): n = A,T,C or G
atggatttgttgacccttagtccangcggtggaattcgaggccttgaggaagaacacagaggagcagctggagattgcattggctccttatcagcacttggaagaagacatgaagagtctgaagcaggtattagaaatgaagaatcagcaaatacacgagcaagaaaagaagattcttgagctggaaaagctggcagaaaagaacattatcctagaagaaaagatccaggttctccaacagcagaacgaagacctcaaagcaaggattgaccaaaacacagttgtcaccagacagctgtcggaggaaaatgctaacctccaggaatatgttgagaaggaaacccaggagaagaagagattgagccgaaccaatgaagagctgctttggaagctccaaactggggacccgaccagtccgattaaactctcgcccacatctc

SEQ ID NO: 11579 - DNA, 486 bp, Homo sapiens
  misc_feature (1)...(486): n = A,T,C or G
gaaattagatnncttnnnnnnnctgatntacctactcagtgtgctggaattcgttgaagtagcccaagtaagagacgatggcggttgggactgggtagcaggacagagggagtgggcagatcccactaactttcagaggtagtgctcatagggcactgatgagttagatgtggagcctcagtgagcaggaggcctcgggtttcaggcttggatggaaggtggtgccattccctttcactaagatagagaatgctagaggaagaagaagtttaggcaggaggtgtggctttgattttggccgtgtgaattagagatgctcattggacatctatgtggagattctcagcagatctggaaataggaattgctggagagaggtggccactgtgtgcttccttggccctgactactgaggctttggaaggatgccattgactgaggaagtttatagctcaggttggtccaatttctaggtctgtatagacc

SEQ ID NO: 11580 - DNA, 479 bp, Homo sapiens
  misc_feature (1)...(479): n = A,T,C or G
cgcacgaccccnatttgagccttattgtagacattagaccangcggtggaattcgctggtgggggtatgaattggtacagtcgctttggaaagctactgagcagtatgtactaaagccagacatatgcgtatttctgaaccaggagtttcactcctaggtatgtactcaaaagaactgtgtacactatgttcaccaaaaaacaagaatgtttatagcaaccctctttgcattagtcaaaagctagtaattacccaaaagttcctgaatggtagaatgaattactaaattgtagtattttcatacaatggaatactatacagcaatgagaatgaataaattacaatataaacaacaatatggatgaacattacataattttgaatgaaaggagccagacacaaaaaaaggatatactgtacaattccatttatacgaagcataaaatcaggcaaaaatctataaatctgtcctgccagan

SEQ ID NO: 11581 - DNA, 465 bp, Homo sapiens
  misc_feature (1)...(465): n = A,T,C or G
ctttcgcgatccactagtccagtgtgcagtaattcctaggtgatctgcccaccttggcctcccaaagtgctgggattacaggtgtgagccaccatgcctggactcgttgttgttgttgtttttaattagtgaggagctacaagaacacatttataaaaattaagaggaaacagccccactgcatttgagaaggttaccatttccttcgaagttcctgctgttgccccttcctggtgggggagacactgtcctgtttcagtcattccgttgctttgctttatagttttattaatgtgtttgtgttggctttgcatgttttcaaatatatgaatgaaatcatgcagagtttattcttttacagtttgccttttcacttgattatgttcctgagatgtatccggattattgtgtgtagctgtatggcattccttttccctgctgcctagngatccattgaaaatacaa

SEQ ID NO: 11582 - DNA, 475 bp, Homo sapiens
  misc_feature (1)...(475): n = A,T,C or G
ggcgggnnnttttaaatgagaccactggaaggcgttggaanncacaatatctataaaaaataaagtcttgcatttgctaagaaaaaaatcttaacatataaaatgtaccagagacttactcagttatgcagattgtcaaatttcaagtgattgaggataatcaattttgttgtctcctaaattaaaaagcatatgcttatttggtagacatttgagggaaataatggttttctttcattaacaaatttcttctagtggaccatattattttacttaagaggaaggattacttgttatttgtttcttcttatacatcatagttattctatgaaggttctttcttactgctaaatttcctttcagtaggattcattaaacagttttgaagccatgctacagtaattttattttctattaattaaatattaaattccagattgagatttgagtcattggaaataaagcatatgactan

SEQ ID NO: 11583 - DNA, 468 bp, Homo sapiens
  misc_feature (1)...(468): n = A,T,C or G
nattgaagaccattagnttgagcggcgtaattcatctttccgcgccgccacaatggtgcgcatgaatgtcctggcagatgctctcaagagtatcaacaatgccgaaaagagaggcaaacgccaggtgcttattaggccgtgctccaaagtcatcgtccggtttctcactgtgatgatgaagcatggttacattggcgaatttgaaatcattgatgaccacagagctgggaaaattgttgtgaacctcacaggcaggctaaacaagtgtggggtgatcagccccagatttgacgtgcaactcaaagacctggaaaaatggcagaataatctgcttccatcccgccagtttggtttcattgtactgacaacctcagctggcatcatggaccatgaagaagcaagacgaaaacacacaggagggaaaatcctgggattctttttctagggatgtaatacatatatttacaa

SEQ ID NO: 11584 - DNA, 568 bp, Homo sapiens
  misc_feature (1)...(568): n = A,T,C or G
aatagaaaacctagtntnaccannccngnnnnncaattcccataccatataaaaaataattgtaatatggtataaacactgattaaaagtaattatggattttcatgcctgaagaaccttctcagtattcttacagcactgtatcttctttattggttgagaatatcagtctagaaagactttcctagatgttaaatgtgctagtcagtgtcatgaatataaacccttacttgtaagtttgctatagactagttgtacaacactagaatgaaattatgtaatacttttaagaattgtagtgattgcagggttgtgttaaggtaacattttatgcatgtgtcagtgacagaaaggatcagggtataaaacttagcactaaatagcatgctccttaggaagttttaaggtaagcagtaggaatattcatgtaattctgatgagtttatgtaagttaaggaaaatgcaatgccagtttgttgactntaaacactannaacaaaatacattntgtggaaccaacaaaggagacattctggngaaaaacttanatggctcanatttaaataag

SEQ ID NO: 11585 - DNA, 475 bp, Homo sapiens
  misc_feature (1)...(475): n = A,T,C or G
nggtactggnaggggnnttttatttgtagacattagacagtgcggtggaattcctgtttattatgtatttctcccatttttatattgagttttttaattattaattttataaattccatattgcaaacatcttattccaatttgtggcttttaattttatttgacatgtgttttgatacacgggagttttaaattttactgtaatttaatttatcaatattttcttttatgacatgctttttgtgtcttgtataaaaaatattttgcattctgaacttaaaaaaatgttctataaaatttattaacaaatttgattggcttttctttttatacttaattctttaacaacagggaattgaattttgtgtgtagaagtgaggtaagaatccctttcattttcactgtatggataaccagtgtaccaactccaccaactccattgctttccaagtatcttcagcctgcctgtctcatn

SEQ ID NO: 11586 - DNA, 456 bp, Homo sapiens
  misc_feature (1)...(456): n = A,T,C or G
ncggtccttaaaatgaaaaccctttgngccagcacaagcggnggaantncaggctggtctcgaactcttcacctcaagtgattcactcacctcggcctcccaaagtgttgggattacaggcgtgagccactgcacccagcctaggggttttctttttgaggtgataaaaatgttctaaagtttatagtgatgatgcttgcaatttctataagtagacttaatgcagtgatggttgcaaattctataaatatatttaatgtggtgatggttgcaaattctatgaaaaacccaaattgtacaatttcaatgagtgaaagcatgctatgtgaatgtcttcataaaggttttatttaaaaaatgagcaaacggtagaatgttaacatggcccacgtctatgtggtgtctatattggtttctattatatgttttctatgtggntgaaacattcctaataaa

SEQ ID NO: 11587 - DNA, 467 bp, Homo sapiens
  misc_feature (1)...(467): n = A,T,C or G
nttgagcccctnggnattgtagactttagaccatgcggtggaattccagaaccctgcctgaagttggctgcatgcttgtttaaggctaattgaacaaatgcttgcatgccttttatgacacacaactaaattgtgagcaatccaggtacctaccacttctgtgtctcagttggtccgacagaactagtacataataggccatgttttatcctccagctagacatctagagaagtaaataagccttcaagtgcttcatcactatgtgtgaattgtgaagaaaaacttttattaaaacgttaatatgattgtgacaattgtttactctggcaagtagtttgcctcttggattcctctctgtgaatctgcccataatgtcctgaaattccaaatgtgtccttttctcttcctctcatttactatttctattcaaaactggaatatgtggacatgtgtacagccttttaaa

SEQ ID NO: 11588 - DNA, 479 bp, Homo sapiens
  misc_feature (1)...(479): n = A,T,C or G
ccccccaaaaaaaagattttgaaaccttcgaaactgacgacntctggaagngcggnggaattcaactgaagtgacccccaagttggaacctgggagatgtcacgagttttacgttgtttgcttttggtgggcagagctgcattggtcttccagtactttatgaactcagtgggcttgtatggactggttgggaacttcaccatcatgcaaatattgttttcatttaaaaattaaggagtcccctctgtaaagcagtaagatcctactcatgaccttcgtgtgcttccgtccagtaggaagagacctaaactctcagaaaaacatactccgagaacagagtccaaggctagattttgtcctgttgaccagctgttcttaaacttgggcctgttgagggatcgcgtgggagcattttaaaaatgtccatgttctgaccacattccatttaattctcattcagtgttctggtggggggaagc

SEQ ID NO: 11589 - DNA, 462 bp, Homo sapiens
  misc_feature (1)...(462): n = A,T,C or G
aattgatgaacactagganttggacgacgatttcgcgggcggcggcgttggcggcttgtgcagcaatggccaagatcaaggctcgagatcttttcgggaagaagattgaggagctgctgaaacagctggacgacctgaaggtggagctgtcccagctgcgcgtcgccaaagtgacaggcggtgcggcctccaagctctctaagatccgagtcgtccggaaatccattgcccgtgttctcacagttattaaccagactcagaaagaaaacctcaggaaattctacaagggcaagaagtacaagcccctggacctgcggcctaagaagacacgtgccatgcgccgccggctcaacaagcacgaggagaacctgaagaccaagaagcagcagcggaaggagcggctgtacccgctgcggaagtacgcggtcaaggcctgaggggcgcattgtcaataaagcacag

SEQ ID NO: 11590 - DNA, 508 bp, Homo sapiens
  misc_feature (1)...(508): n = A,T,C or G
nggggcgtccnaatcgtagaccactaattgagngccgttgaaanccatcgactacaaggaatagctgcccaagtgtaaagcattcctcagctccgatgaacacangatagaaaaatgaagatggtttactgtttataaagntctgggtttcagtggggagagaagtggaatggtttgtcttcagggagatatgcacgagtttgataatactttataaccactttaaaaaaacagtttcctgctatggccctgaagattcctgccaagagaatatttggtgataattttgatccagattttattaaacaaagacgagcaggactaaacgaattcattcagaacctagttaggtatccagaactttataaccatccagatgtcagagcattccttcaaatggacagtccaaaacaccagtcagatccatctgaagatgaggatgaaagaagttctcagaagctacactctacctcacagaacatcaacctgggaccgtctggaaatcctc

SEQ ID NO: 11591 - DNA, 441 bp, Homo sapiens
  misc_feature (1)...(441): n = A,T,C or G
ntgggctcgagaccatagtccttgtggtggaattcgcttgacccttagacggaaggcaactgagcctcctccatcccaggaaggggaacctccagctgagcccagcatctacgccactctggccatccactagcccggggggtacgcagaccccacactcagcagaaggagactcaggactgctgaaggcacgggagctgcccccagtggacaccagtgaaccccagtcagcctggacccctaacacagaccatgaggagacgctgggaacttgtgggactcacctgactcaaagatgactaatatcgtcccattttggaaataaagcaacagacttctcaacaatcaatgagttaataacaaaaaaacaaaaaacaaaaacagacgtaaaggccgggtgtggtactcaggaggctgagtggggaggattccttgaacaca

SEQ ID NO: 11592 - DNA, 477 bp, Homo sapiens
  misc_feature (1)...(477): n = A,T,C or G
tggcgggcgcccnccaaatgatgacactagattngcggnccatttcaannncaaatgagggtgggccagatgagtatgtttaagtggagagtgcttccagctgagatgatttgagtctgtcctaactgctccattgagttctcgtgccctcatcagctgagggcagggaatggaactttaatggaagaaccacttttatctattctttttattcattgtttcagttctgatttcagcaaacatgagcaaaccactttgactgaaagcagaaagagtgaaaattctattttgttacgctactggtgttcaattattagtttgtaccatttttaatttatgtcagttgatgcatctgaaaataagtgcttggagtgttcgtacccttatttttttttaagattcctagaaggaatctttggttaattcagattgagcagctaaaggttttgctatttaccttcgtgcaggctggcatat

SEQ ID NO: 11593 - DNA, 469 bp, Homo sapiens
  misc_feature (1)...(469): n = A,T,C or G
natcgagcccctcngnattgacgaccttagaccatgcggtggaattcgtgtggttgctcacagctgtaataacaacaccttcagaggctgaggtgagaggatcagttgaggccaggagtttaagaccagcctgggcaacatagtgagacccctgtctcccaaaaattttttttaattagctgtgcgcaattgctcatgcatagtcccagctacccaggaggctgaggtgggaggatcacttgagcccaggaatttgaagctgcagtgagctgtgttcttgccactgcactccaatctgggtgactgagcaagaccctgtctcttaaaaaaataaaaaagatctccaagcatagagaagagtctggagggaaacaccaaactcataacagtcttactgcaggcaagtgggataaaggcccagactccatggtggaagttaaagggcatttccaagttaaggctaagactt

SEQ ID NO: 11594 - DNA, 445 bp, Homo sapiens
ataaaccggtcggtccactagtcctgtgtggtcgaattcggacaagtaaactggaatattcacataatagaacattatacaattgtcaaatgaactataatgatacctaaccatatggatgaatctgagcaataaaataattaagtgaaaaaagtttaatcccagaagagtaaatgtagcatgatgccctttctaaatgaaaggttttttcttttctatggagttattctttacatacaatatagttcataaattttaaatatattgtttaataaattttgataattgtatataatagtatagtcaccatcaagatgtagaaaatagaaaataggctaggcacagtggctcacgcctgtaatctcaacactttgggaggccaaggtgggaagatcacttgatcccaggaattctagatcagcttggacaatgtattgagacctgg

SEQ ID NO: 11595 - DNA, 450 bp, Homo sapiens
  misc_feature (1)...(450): n = A,T,C or G
aaaaattagaggaccattngnntttgtcgntcccctagtccatgtggtggaattcgtttgtttggggtttgattgtttagattgactcccatgacaaagggtcttttcaaagtagagtttgattccttatagaattctgagtggtattagtctcagatcatatcagaaggccccagaagaaaaagattattggtataagaaatcatttaaagacttcattttgaaagaaatatctcttagaaattgaagtgtaggaaaaagaaaatgggccatgtattaagacccattatgtggaaggcactaaaaatggctagcacttattgacctttctgtgtaccaggcactgtgatatgcactttatgtgcacagtctcatttaatgcccaatcaccccttgtgacaaataccattattccccatcttagagtcaaggaaacagactagagagact

SEQ ID NO: 11596 - DNA, 470 bp, Homo sapiens
  misc_feature (1)...(470): n = A,T,C or G
attgagaccctnngaattgacgacattagtcagtgcggtggaattccagcaagtccatggggactttagaaaatacatttgaaggtcataaaagcaaaaacaaggaagattgcgatgaacgcgacttacttactggcaaccggaaaataaaaatatctaaccttgaaaaggaacaaatgctcacctctgactttaagaaaaataccagactattaccaaaattgaagaaaatagaaaatcaggtagctatgtcattttataagcatcagtcctcaccagatttgtcaagcgaagaaagtgaaacagaaaaggaaattaaaaggaaagctgaagttaagaaaaccaaagcaggaaacaccaaagaagcagcggttcacctgagaaagagcacaagaaacacaagtaatattccagtgattatggaacctgaaactgaagaaagtgaaaatgaattttatatcaaacgaaag

SEQ ID NO: 11597 - DNA, 494 bp, Homo sapiens
  misc_feature (1)...(494): n = A,T,C or G
ggnntgtccnattgtagaccantattgatgatcattagtccagtgcggtggaattcctctttcttaagcctgtgtagaaagttcttttgtccgggtgacattggcatgattgaatcagtgccagagccaaacaggatgtggttctgggcgactcccaacttccagcaaatccgtggttgttttcagttaccttaagagggacaactgaaacagagacaagcaccccaacagtagggtgcttcgaggtcctggaggggagccctggccctgtggagagagaccgagtcgtgcagcgtccgtggcctgcatttgaaactgaagggcaagaggctggtgagatccgagagtcatgccgctgcgtggaggaacatgctgaacctctggaggaacggctctacctccaggtcaggctggaggcttttgcatttggtttggcgaggagagacagcaggatttctgggtgccggacatgcttctcggtcagagctggtgcg

SEQ ID NO: 11598 - DNA, 471 bp, Homo sapiens
  misc_feature (1)...(471): n = A,T,C or G
tcagtatacatngnacagncctgaggaccnctcagnaccgcanaagaagaaggaatacctaaagaaacagacatagaaatcatcccttaaatcccggaaactctagagccactgtcccttccagatgtgctgaggatctcggcagttctggaggacaccacagaccagctctctattctgaactacatcatgcccgttcagtacgaagggagacagagcatctgcgtgaaaagcagagaaatgaatctagaaggaacgaatctagacaaacttccaatggactcaacaatcacaaaaatacccagtccgttaataactgaggaaggacccaacttgccagaaatcagacacagaggccggttcgctgtggagtttaacaaaatgcaggatcttgtcttcaaaaaacctacaaggcagaccatcatgactacggagacactgaagaaaattcagattgataggcaagttttc

SEQ ID NO: 11599 - DNA, 469 bp, Homo sapiens
  misc_feature (1)...(469): n = A,T,C or G
nggcggnnggngccgcctgaaacccncctacntngctagcagaanccgncgnaantnntgangacttggcgagcaagctgnnngagnctgatgcaacccctgggctttgactatcatgccaaaaggcagcaaataagtgcctttggttcccttcagaatacatggacaatccaaagctctattagtctattattcagaatgaaaagtgtttacaatattcgtcctcttactcctcagtatgtgagactgttcctcgtagcaggtaatttcttccgaattcaaaaactcctcatggaagcatctgtttttgtcatcaaggagggggctgtatgtggaattgcaaggccaaagacatctcgggtcaactcttctcaggaccagatccaagtcgccagtgagaacacacattcaggcagcctccaccagcgccctgcctcaggagcgaggctccctgcttcatgtgggcaag

SEQ ID NO: 11600 - DNA, 481 bp, Homo sapiens
  misc_feature (1)...(481): n = A,T,C or G
tctggaatgacctnngaaanntctggttgtatactgagcacagncnggnggaannnctgnctnctaatgtccccgatgccaggaaagttctgttttcccacagttagtggtttcctcactgacaaaggtctaagctcagggagcagagagcccacatttctggatttctcacactctgtcctctaacccttacttacaacaacagctctagggactagttatgattattatcctcatttgatggatgaggaacttgaagttcagagaggctaggtaaattcccaaggtcatgcagcaaaggagaagcagacccatgacgtgaagccaggttggtttgactgtgctctctcactcagggtcctgtaatccaggatctagagtttccaagtgtggcttcctaggccttttgggcctgctcttcttccattgccttccccacctgggctccctctatctaaagattaaggttcctcccaaggcn

SEQ ID NO: 11601 - DNA, 461 bp, Homo sapiens
  misc_feature (1)...(461): n = A,T,C or G
cgggggnnaatgaattcattactatctagcccangcggtggaattcgcgtaatgcatgtgggaagacctttagtcagaggtcagtgctcaccaaatatcagtttaattcacacaagggtgaaagctctttgaacatcctgaatgttagaagccttcatacacttgtgaaattggttatacagtttcaaaaaaggagatcagagaaagccaaagaatgtcagaaatttgtagaaaatgacttcttgtttgaatatgtaaaagctttcaagaaaaattaaaacttttcattagaaaatttgtactgaggggaattctattcatctaagtaatatggagaaaatatttatctggaatttatgttgtttagtgttatattccagacgtgataccaaaattttgttgcaaatataatggacaatatttatttatacccatattcacagtggaatctgaagcttatg

SEQ ID NO: 11602 - DNA, 454 bp, Homo sapiens
  misc_feature (1)...(454): n = A,T,C or G
ggagggntttgagtcattagccagtgcggnggaattctttctggcgcctgggacagattaggagaaagaggcggaggagggctgggaagaggatgtggagaaatggaaggtggaggtgaccctcaaagaaagggttgctggaggcattaattattcaaataagcactggataggggagcaccaccttcattaagatggcaactttgattaatgggaattaagctattgaaagtaacaaacttttcatcagcttattaaaactgtcacatttcttaggtggagagagccatcttttcagagtagaactggacactccagactatgtgacctgccctttgcggccacaatggtagttgggggcagactatttccaccaggcccaacagtgaacttgccagtcaccaaaggccaccaatacattttatgggggaaactctgtagtctaaggagttct

SEQ ID NO: 11603 - DNA, 473 bp, Homo sapiens
  misc_feature (1)...(473): n = A,T,C or G
tacataaggcatccgaaagncctgatgaaccttaganngcacactatgcatctgagaaaggtctgatatctggaatctataaggatcttagacaaatcaacaatcaaaaaacaaataaccccattttaaaaataggcaaaggacactaacagacgtttctcaaaagaagacatacatgtggccaacaaaagtaggaaaaagtgctcagcatcactaattatcagagaaatacaagtcaaaaccacaatgagatattatctcccaccagtcagaataactattattaaaaagtcaaaaacaatggatgctggcaaaggtgtggagaaaaagaaatgcttatctttgtatttttaaaaccatgatttccttcctctaatcttaatattttaagtgaagagttcacatttctgtcaaaatccatcatatgtcgaactttgcaatanaatttctacttctccaccactacccttaan

SEQ ID NO: 11604 - DNA, 458 bp, Homo sapiens
  misc_feature (1)...(458): n = A,T,C or G
cgatggggnatgaattcactactatctgcccaggcggnggaattcgggaaacccacttttgtgtaaatgctgtttttaacacaaacacaaaggctattgattcgttcagtcatctgctttctgtttctggatgtgccttttcatacatgtgtcctcttgtccctggcttcttacacttggcgttgtttttaaggtttatccatgcagttcccctccaatgtataaaacaaaggaggtgaaaacctgtccatgcggaagcttgtgcacccatgttcacagcagcattggagaaggataccgaacatcttctcgtgggcttactggccattagcgtatctcctttggagaggagtctattcaaacctcttgcctatttttaatcgaatgatttatcttgagttgtaacagatgtttttttttcgtctttccttttaaagatgggcttttgctcttacccg

SEQ ID NO: 11605 - DNA, 446 bp, Homo sapiens
  misc_feature (1)...(446): n = A,T,C or G
gggggggnatcgagaccatagaccagcgtggaggaattctcataacaaagccagagctctaaaaatatttctgttaccacctctcagaaactgtaaacatcttttgcttgtataggctgaaaatttcatctgttctgggctacggaaatatttgcttactgaataattcagttttactgatcttttctatatgactatgactcatgattatcatcctaaattgagatccactagaattgccaactctgttgctcacaattcttattatacaattgtatggcaatttacatgatttgtctatgcatgctcccacagtgccgctttctgttcttaagagtttatttttctactatgctttaaagtatttcaccagctacttgaaatcttgcaaatgacctctttttctacttttgcaggcatgttgtactgtattatattttctctgg

SEQ ID NO: 11606 - DNA, 461 bp, Homo sapiens
  misc_feature (1)...(461): n = A,T,C or G
ggagggnattgagtcgactagcccgtgcggnggaattcgagaaaggagaatggcgtgaacccgggaggcggagtttgcagtgagccgaggtggtgccactgcactccagcctgggcgacagagcgagactccgtcaaaaaagaaaagaaaagaaaagaaagatttttaagaattcagcaaaaactcagccagctctttctatggggcagttgctaatttagttctaggcaaacgtggacacattaaattctcctacaaaccctccaaaaaaaaaaaaaaaaaaaaaaaaaaaaaaaaaaaaaaaaaaaaaaaaaaaaaaaaaaaaaaaaaaaaaaagggccccccataaaaaaaagggccccaaaaacccccgggaaacccccggggggggttttttaaggccccccctttggggggggcccccccccccgcgctttttttgggggaggggggggcccccc

SEQ ID NO: 11607 - DNA, 409 bp, Homo sapiens
aaccgagtcacgggagtttggaaaaggcttcttggagccgggctataagatttactaaagttgatgccaataagatcatcactgtgatcaacaatttaaaaacatgcttagctgctgtttaaatcatctcttagttcttgagaaaaaaaataatacaaaacaaataaaacacgtcttcttaccatcaggaaaaaggagatttgtcatacttatggtagcaggtgggcatgcatccaattcatctgacagtaatatcaatttatatataaataagctaaaaagaagaaggttaaagttatacaatcctattttatgccacgcaaaataagaatttgctctgtccacagatccatgtgatctaccttgatatggcattgtcattaggatgcaaactgtgtctaagcagtga

SEQ ID NO: 11608 - DNA, 459 bp, Homo sapiens
  misc_feature (1)...(459): n = A,T,C or G
gcggtaaaattcgagacattagtccagtgcggtgccattcgagaggtaggactggattaaatgaccactgaactcactgaatccagatcattcatatcatcaacaaaagctctagggggaggtcacgttgtgaatgcttaaaacatattattttcttcaacaaccatatcgctaaactaatatatccagagattttgcacaattcgtgttgaaccttccaaaacaaaaataaagacctgtccaaaagttttgacaaaaatactgattgctcccaaataaagtgcttctaagctttgtgtagacatagtttaactgatttgtaaaaatagcctaagcatgttgagaatgaagtaaaagttttcccatgtgctgtctaatgtactctgtgtaactctgaagacacatcagcttctaggattgcagcaatctatgaataacattntttctctcatttatgac

SEQ ID NO: 11609 - DNA, 492 bp, Homo sapiens
  misc_feature (1)...(492): n = A,T,C or G
gttgagaccantgncagngnggngactgatgacactacagagtgccgcgcatcttactcagctctgtggctntgctgccttttcctgcggccagacccaggaagtgctaacaccacctctctccccactcttccctctggattctggggtcccccacaccgtatttcctccactccagctgccacttttggaagggtattgagtcaggagctgagggaaggggtgaggaaggtggacatcccatcccaactgtaatgcctttnttttttttttttttttttttttttttttttttttgggcccctttgggccttggggggcccccaaaaaaaaaaaaatttttgggtttnnaaaaaaaaaaaaaaaaaaaaaaaaaaaataaataaatataaaaaaaaaaaaaaaaaaaannnnggggcaccccccccttttaaaggggggcccacaaaccccccaaaaacccctaactttgttttttttaaacaccacttc

SEQ ID NO: 11610 - DNA, 465 bp, Homo sapiens
  misc_feature (1)...(465): n = A,T,C or G
nattgaaaatcgtagaccttagcccgagcggtggaattcgttcatgaccagcttgaccaacatgaagaaaccctgtctctattaaaaatacaaaagtagccaggcatggtggcgcatgcgtgtaatcccagctacttgggaggctgaggcaggagaattgcttgaacctgggaggcagaggttgcagtgagtcgagatggtgccattgctctcgtttgggcaacaagagtgaaactcttgtctcaaaaaaaaaaaaaaagggggtttaaaacagttttgtctttacgggggggattgggccccacaaaatagctttaaccgggactgggcacataaaatgggtaaaaaatttttgttttttatttccgaaaggaaaaaccccaccaacccttttttgcaaaatgggaaggttttttcaaattcaaatttaataaacagtgaaagatcctttgtatataaaagtgg

SEQ ID NO: 11611 - DNA, 460 bp, Homo sapiens
  misc_feature (1)...(460): n = A,T,C or G
actgccgcagcctcccaaagtgttgggattacaggcgtgagccactgcacccagcaaatctgtacttattataaacaataacttcccgtttccttttgtcctgacacccaccattctactttctgtctctatgatcctgactaccctatctcatataagtggaatcattcagtatttgtccttttgtgactggcttatttcactgagtataatgttctcacagttcatccatgttatagcatgtgtcagaatttcttaaggctaatattccattgtatgcatgtgccacatttcgctttcagtagtcatttttaagctctataaaataaaatgaagaaaggacagttcanctnanaaaaaaaaaaaaacaaaaaaaaatgaaagaacaaaaaaaataacaaaaaaaaaacccccccaaaaaaaaannnngggcgcgtcctactttagaggcgccgttaac

SEQ ID NO: 11612 - DNA, 459 bp, Homo sapiens
  misc_feature (1)...(459): n = A,T,C or G
gcggtaaatcgagacattgnnattcgagacctctgtccgtgtggtggaattccacagagcatccaagaaaccaaagcagtgggtggccgtttgtatgcaggggcaaaaggtgctcttggagaaaactggatctcagcttggagaacaggaactgccagactttcaaccgcagactcctaggagagatctcagggagagctctccagcagagccttcccaggcagtagcttatgaccggctgagcccccatcattgggagaaatccccactcctccaagaaccaacccccaaattggctgggacaggtaaacactctgccttttctctccctctcatcagccctttatctccatcaatgtatctcatggttctgcaaaggcatagaccacatgtgtgtgtttttttaaatgttatatataatagtagatgattattcactaaacaaatttcactaattag

SEQ ID NO: 11613 - DNA, 453 bp, Homo sapiens
gggtaactgagaccactatcagtgtggtgcaattcggttttgatcccctgacctcgtgatctgcccaccttggcctcctaaagtgctgggattacaggcgtgagccacggcgcccagcctaaatcttttaatatactgtgaggcatgtataccgttacgcctttacaatgggaaaccaaggctgagagaggtttaataatttgctcaaggtcataaagctagattagaaccctggtattaatggtgactaatttatttttttttttgagtcaaagtctcactctgtcacccaggctggagtgcagtggcgcagtcttagctcactgcagcctctacctcccaggctcaagtgagcctcctgcctcagttcccaagtagctgggactataggcgcgtaccactacactgggctgatttttgtattttttgtagagatgaggtttcgctatattg

SEQ ID NO: 11614 - DNA, 450 bp, Homo sapiens
  misc_feature (1)...(450): n = A,T,C or G
attgaggaccatagaacagcgcggnggaattcggcaagatgggtcaaagtcagagtggtggtcatggtcctggaggtggcaagaaggatgacaaggacaagaaaaagaaatatgaacctcctgtaccaactagagtggggaaaaagaagaagaaaacaaagggaccagatgctgccagcaaactgccactggtgacacctcacactcagtgccggttaaaattactgaagttagagagaattaaagactatcttctcatggaggaagaattcattagaaatcaggaacaaatgaaaccattagaagaaaagcaagaggtaagttgaaaagttactatcattttcttttttacaaattgaattctataaaattgtcaacaaataaatgaaattcaagtagctgaacctgtccaggctttcatgagtattattagctgccttttacaagcat

SEQ ID NO: 11615 - DNA, 489 bp, Homo sapiens
  misc_feature (1)...(489): n = A,T,C or G
tggagccnctnnnaatggagaccgtaggannnnccnattgatgaccattagaccaagcggnggaattcccacagacctagcgccggggcttcatgcggaaccaccagtgagcagcccaggcactcagacggaagccaagtcaaaacacggccccggccaggtgtggtggctcacgcctgtaatcccaacacttagggaggtcgaggtgggtggatcacctgaggtcgggagttcgagaccagcctgaccaacatggagaaaccccgtctctcctaaaaatacaaacttggccaggcctggtggcgcatgcctgtaatcccagcaactcagggggctgaggcaggagaatcgcttgaacctgggaggcagaggttgcggtgagctgagatggcaccattgcactccagcctgggcaacgagagcaaaactctgtctcaaaaaataaaaataaataaaacacggccctgtcgctttgctagctgccatctn

SEQ ID NO: 11616 - DNA, 500 bp, Homo sapiens
  misc_feature (1)...(500): n = A,T,C or G
aatcgaggcccctgngnnnnncnnnaactgagaccctagtccagngcggnggaattcgtcaagtgtatgtgtggctcctttgctctcaaaaaataaaaaacaatgaagaattaaaagttaggactaggggtcccttaagtgattctttaaaagccacagcatatgctgggcgcggtggctcatgtctgtaatcccagcactttgggaggctgaggcgggtggatcacctgaggtcgggagttcgagaccagcctgaccaacatggagaaaccccatctctactaaaaatacaaaattagccgggtgtggtggtacatgcctgtaattccagctactcgggaggctgaggcaggagaatcgcttgaaccgagaaggcagaggttgcagtgagccgaaatcatgccattgcgctgtagcctggggaacgagcaaaactccgtctcataacaaaaaacaaaacaaaacaaacaaaaaaaaaacacagcttcagggagtcagtt

SEQ ID NO: 11617 - DNA, 475 bp, Homo sapiens
  misc_feature (1)...(475): n = A,T,C or G
natggagaccaatggatggagcgccgtagncgaagcttgtctgtgttccttggcacaagaactcacttgaactatcaccttgactatcagatatgtttttgcactattttttttaactgaaaaagaaatatctaagctgtacatggtacactagaattttctgaaagcagaaaacgttcagattttgtagttaattttcattacaatagaaacatgcacatggaaacccatgagctaggattctaccgaggaaaacatctagtgggattagcaaggtgaagggaaagcatctggtggcatggcagcatggggaggctcacacacagaagttgcacgtggacatctgttttaatcagcacaagtgaattaaccatgcttcttcatttttttactttagttaaaaaagaggacatttaatattctacatgctgtaactatcaggacatggttagcaatctcaatttcatttttgata

SEQ ID NO: 11618 - DNA, 472 bp, Homo sapiens
  misc_feature (1)...(472): n = A,T,C or G
atttggagacccctcgagcagcgcttggaattnctagnttgtaaatcagctgggatttcttcctttttatttcattcttttaaaaaatttattttaaggtagtacatgtagttggaagaactactataaaaacaatatatgtgggaaaacttccagccctctgttaattgtgtgtctcaaatttgttctggaaaagaaagggggaaagtctatgaacgacttttcaacctggcaattccatatacaatgttaaacttgattcttatgacatattcctatgaaaataataaatactggcacttttccttgcagaaagcactcagacctgaatcagagaaaatcatatgccaaagccaactgccagtgttagacctctttttccataaagagtaaatggaatgctaacactagtgggcttattgagaaaatttaaaggttgctgtagtgtttagaacttaggctggaaaaccat

SEQ ID NO: 11619 - DNA, 418 bp, Homo sapiens
cgccaccacacccagctaatttttgtatttttcgtagagacagggttttgccctgtcagccacgttggtcttgaactcctgacctcatgatccgcctgcctcagcctaccaaagtgctgggattacaggcgtgggcaactgtgtccagcccccgtcacttttcctctctctctcaccccccactttagacccacccccacacaggcctgaggagacctctgcccaaggattccgccagctgctggagctgaacctactggggacgtacaccttgaccaagctcgccctcccctacctgcggaagagtcaagggaatgtcatcaacatctccacgcctggtgggggcaatcggccatgcccaggcagttccctatgtggccaccaagggggcagtaacagccatgaacaaagctttggg

SEQ ID NO: 11620 - DNA, 496 bp, Homo sapiens
  misc_feature (1)...(496): n = A,T,C or G
nattggagttcactagcncgtgtggtggaattccacagcagtacctctttgaccgccttgcccacgaggtaacatggttttcagagtaagacagctcaaactggtcaagggtcctgattctacaggcatcacaggtctgtgcacaccagcattgtgtggaagagaaactcgaaacactagtcctggcctgattactcgctcacttcctgagttttcagactggcctctctagcaccttatgtggccacgtgagctgggtgctaatccttaccacaccaccaccaatttcaatcagagcagctctatttttatgctatatattgaggtctacaagattttgtggagaaaaagagttttgccgcttaaagaaaattgaggactctttgtctttacggagctcattattccaagtgcatgtgtgttgacaacttctattccaaagtagcacaacctatgaaaaagatctggatcttgtactccagtgtgactttggtta

SEQ ID NO: 11621 - DNA, 456 bp, Homo sapiens
cgggaaatcgagacactagtccgtgtgagggcattccagagactgctgagcccgtccgtccgccgccaccacccactccggacacagaacatccagtcatggataaaaatgagctggttcagaaggccaaactggccgagcaggctgagcgatatgatgacatggcagcctgcatgaagtctgtaactgagcaaggagctgaattatccaatgaggagaggaatcttctctcagttgcttataaaaatgttgtaggagcccgtaggtcatcttggagggtcgtctcaagtattgaacaaaagacggaaggtgctgagaaaaaacagcagatggctcgagaatacagagagaaaattgagacggagctaagagatatctgcaatgatgtactgtctcttttggaaaagttcttgatccccaatgcttcacaagcagagagcaaagtcttctatttga

SEQ ID NO: 11622 - DNA, 455 bp, Homo sapiens
  misc_feature (1)...(455): n = A,T,C or G
nattgagaccctatccangcggtggaattccttcatactttggcaagggcatccgctacgtatcttttgagcagtacgggagagacgtgagttcctgggtggggcactacggcgcccttgtgacccactccagtgtgagggtcaggatccgtctgtcctagcgactggactactgcctgacgttgtcagtcaagaccagccttgcagccaggtgcagtggctcacacctgtggaatcccagcacttcaggaggccgaggtgggaggatcacttgtagctcgggagttcaagaccagcctgggcaacatagtgaaaccgtctccacaaataatttttaaaaaattagccaggcatggtggtgccgcctgtagtcccagctactcangaggcttgggtgggaggattgcctgagaccaggaggttgaggctgcagtgagccgtgatttcaccaccac

SEQ ID NO: 11623 - DNA, 478 bp, Homo sapiens
  misc_feature (1)...(478): n = A,T,C or G
aatggagaccctaggccatttgagngccattcacttcagacgggtcacaacataacattctcacgagtcacagcaaaaccagacaagaaaagagaactgagatggaatactatacccatgagaagcaagagaaaggcactttgaattcaaatgcagcttatgaacaaagtcatttcttcaataaaaattataccgaagatattttcccagtgacaccaccggagttagaagaaaccattcgagatgaaaaaataagaagacttaagcaggtgctgagagagaaagaagcagctcttgaagaaatgcgtaagaagatgcaccaaaaataaaatctcctgtaaagacttcagtgaaatagctgttttttaaaatatacttcagcattaataagttaattgtaggtgtgttctgaaagtgtctttgaatatgaagcttgttttttcatcagtcgattgtacaactttaaggaatacagaan

SEQ ID NO: 11624 - DNA, 477 bp, Homo sapiens
  misc_feature (1)...(477): n = A,T,C or G
attcgagttccactagnccagngcggnggaattcgagaggaaagggaggaaggggcaaaatctgaccacttaaatctaagcatattagatcattttatgctagaaagtcctgaatgatgtgactttcgttcttgtaaaacacctctttccatagattcatggcccaaacagtatataaagagtggggaaggaactgcatttgtaaatagttcaaatcattgctccatcttaactacgcagttcacaaagtgtgaagaaatgtgatcatctcaaaaaagataatggggaaaaaatatgttttgttctgtgactttaaagtcttgcaatattttacataaatgataatgggtgctttaataagaactcttgatacttttgttattgtattcaatatatgcatataatacaacaggatgatattggtttggatttggaaatgtattctttcttatgcaatcttatgcagncatactgctt

SEQ ID NO: 11625 - DNA, 457 bp, Homo sapiens
  misc_feature (1)...(457): n = A,T,C or G
nccaacctgaatgcatctcatcgngcggngcaattccgattcttctgcctcagcctcccgagtagctggaattacaggcacctgttttgtgggtaatttttatgcaagaactatgagcactccaaaggaggttgctatggtttggatatttgtgtctccccaaaattcaagtgcttaacctaatgatcagtgtgatattaggaggtagggtgggagctctgggacatggttagatcatgaaagcaaagccctcatgaatgggatcagtgtccttataaaagagacccaggagagctgctttcttcctccccccacacaaggacacagcaagaaggtgccattgttaaccagagagtggatcctcaccaaacaccaaatctgccagcacctcgatcctgaactccccagcctccaggactgtgcgagagaaattcctgttacttataagccactcagt

SEQ ID NO: 11626 - DNA, 457 bp, Homo sapiens
aggaaaattcgagtcactagtccagtgtggtgccattcatagtagaaaggatctttaccagacagtaaggtcatggtacaaatcaggtgagtgaatgttggtcagaggtagcctgacactctgatgaggacttcaagatgagaatgagaaaaatgtctattaaaatcactacatttgataatatctcagatttagaatctcttttgggattcagatagtctgattattccaattcaagtgttcagttaagttttagttactattcctataatacccaatccactaatatcatatctcctgtggaatattcattggtgcgatggcctcatccccttttttactttttattgacatggtggttataaaatgaagagacttactctattggaattttcatctacgtagtatttgggctgtcaagactaaatagcgaaagggtagaatattagatcattct

SEQ ID NO: 11627 - DNA, 461 bp, Homo sapiens
  misc_feature (1)...(461): n = A,T,C or G
gcgggaaatanncctcgtagacactattcttgtgcggtcgtaatcgcgagaccccatctctacatacaataagaattataaaatgtaaagtgaatggaatgcattgaaatttgatcctgtagcaaagccatcccttttgaattttgaacatttgtttaatgcctcttttccaagcatattttgaatattcagagataaatgagcaagatactgccatcaagaaactcctatttttctatgagagaaaggggaaagacgcgcagttgtacacatatggttcgctctaatagagcggaataaaatccatgctattggtatacacaaggacaaattttgtcagccatgtgtatgggtatcttcaaagagcacaggtgccatctgttctgagctaatgacccattgaagaaggccacaccatatttgtgggaaaagcagcataaacaaatgccagagtattttcc

SEQ ID NO: 11628 - DNA, 463 bp, Homo sapiens
  misc_feature (1)...(463): n = A,T,C or G
cggggaaannntttgtagnncttnttttccgtcgtccctagtccgtgtggtggaattcgaaagccaccaagatgctgacagagtttgggaccgaggtggagcccgagtttgggaccaaggtggagcccgagtttgagacccagttggagcctgagtttgagacccagctggaacccgagtttgaggaagaggaggaggaggaggaagaggaggagatagccactggccaggcattccccttcacaacagtagagacctacacagtgaactttggggacttctgagatcagcgtcctaccaagaccccagcccaactcatgctacagcagcagcacttcccaagcctgctgaccacagtcacatcacccatcagcacatggaaggcccctggtatggacactgaaaggaagggctggtcctgcccctttgagggggtgcaaacatgactgggacctaagagccc

SEQ ID NO: 11629 - DNA, 474 bp, Homo sapiens
  misc_feature (1)...(474): n = A,T,C or G
actggagccccctcgagaacctaggacagtgcggnggaattcacaggatggtgtgctcaattaccccatgtgagtgcgtggactcctgtgtgctcctgctccctacagtgggctgcaactcctgtacttgaagctgagacctcatatgacgtggccttcgtgttgccagagagtgtctggaagctgctgttgccatcttgaacaactcaccaacctccaacccagagccccagtgagagaggagcatttggcctcctgcttccttctgtggcctctgccgggctccattcccaaggaaaagagaggagcttgggctcacagaaagagaaggggatgaaaccccaaggggccctatctttgggatttacatggaattttattttctacaagttcgaccttagccatggtttgcaagtgaacagaacattttgaccaaaaaaaacaaaaaaaaaaaaacccgccccttgtttcttg

SEQ ID NO: 11630 - DNA, 498 bp, Homo sapiens
  misc_feature (1)...(498): n = A,T,C or G
nattgagaccantagccangcgcggttgtagaccatagtccagngcggaggaattcaactgccctcttttaaataaaaatgtaaaaaggccactcccaggtaaaatccagggggaagagtcatctaagtttaccatgcagttgtttaccaaaaatagaggaggagagtcttaacttttgctcttggatttaagtcaaggtactgtatagaagttgtgtaaaatcagtatgaaagttcaatgttgctgttcttgctcagtgattttaaagaaattgagtagttcctatgtgatttttttttttcttttctaaactgcattcctgtgcccacctacggcatgcctctatgtattggctactacagtgttttaaaaagtgtttcagatatttctctaattatgtacaacctaaaatgttggtgttttgtatggatcacaagtgcagcattccttaattccttctgctatatgtcacacagttgttatttggagaaccaagt

SEQ ID NO: 11631 - DNA, 473 bp, Homo sapiens
  misc_feature (1)...(473): n = A,T,C or G
attgagacccctggagaccctaggaagngcggnggaattcgngcagacaagggcatggcccccgccctccggcatctgtacaaggagctcatggggctttggaacaaggatgagatcagcaccacagacgcgatcttcgtccagcgggatctgaagctggtccagggcttcatgccccacttcttcaggctgttccggagcacggtcaagcaagtggacttttcagaggtggagagagccagattcatcatcaatgactgggtgaagacacacacaaaaggtatgatcagcaacttgcttgggaaaggagccgtggaccagctgacacggctggtgctggtgaatgccctctacttcaacggccagtggaagactccctttcccgactccagcacccaccgccggctcttccacaaatcagacggcagcactgtctctgtgcccatgatggctcagaccaacaagttcaactn

SEQ ID NO: 11632 - DNA, 445 bp, Homo sapiens
  misc_feature (1)...(445): n = A,T,C or G
aataaagaaaaagatctgaactgatcataatgagctaaaagtctagcttttcacttatgaatcatgggagagataactgataactcttgccgtatcaggagactgaaagttcatactaatttacaaactttgtaaagactggtgctgttcattcatattgggaagaaccctttcttttgtgaccataggaccatttttcaaaatgcgctttcttcgtagaagaaatgttcagtttaattagctttggattttaacatgtttttctgaatgaccagatgtaggcttagccaggttattttctctaatttaatggataataaatattaagctcttggttaaatgtttttcagccattgaaaatgttatgaaaaagccttgaatatgcatgctgctttcatttttataaactgtgtattttttaactatagctttattaataattccn

SEQ ID NO: 11633 - DNA, 494 bp, Homo sapiens
  misc_feature (1)...(494): n = A,T,C or G
natcgagaccatgncagngcgngatgaagaccctagaccgtgcggcactgtaaagtcatttaacattcaaatctgaagactctgcagtttacaatactcagaatgaagatttcattgctttttcagctaatgttacaccatgtgtttccaaggatggaggatatatacagttgatgccagccacaagcacagcttttggcaattcaaataacattctgatagctacctgtgtgactgatccaacagcgttaggaacatctgtaagtcagtctaatgtagtggtgttgcctggaaattctgcacctatgactgctcaacctctaccacctcagttacagacaccaccaaggtcaaacagtgtatttgctgtcaaccaagctgtgtcaccaaacttttcacaaggatctgccataataattgcctctccagtccagcctgtactccaaggaatggtagggatgatcccagtatctgtggttggacagaatggaaat

SEQ ID NO: 11634 - DNA, 454 bp, Homo sapiens
  misc_feature (1)...(454): n = A,T,C or G
nttcgactgcgtacattagaccangcggtggaattccgggaggctgaggcaggagaatggcgtgaacccgggaggcggagcttgcagtgagccgagatcgcgccactgcactccagcctgggcaacagagcgagactccgtctcaaaaaaaaaaaaaaaaaaatggaggttcctcaaaaattatggggaaaattcctttttttatctgaaggtttttttgggggaggaaagtatcctttggattcataagggacgggggaaagggggatttttttttttttaaaaaaaaaaaccttttttttttggaaacaaaaaatttttttttggatcaaaaaaaaagttttgaaaatttcaaaaaagggaagcaggtttaaaaccctttctttccccggggggtttaaaaaaggggaaaaccgggcaaaatcgccccccaaaagaactaaaaaattttttn

SEQ ID NO: 11635 - DNA, 473 bp, Homo sapiens
  misc_feature (1)...(473): n = A,T,C or G
attgatgccctcggnanncncatgatgaccattagaacangcggtggaattcgttcttatgacggcggatgtaccagattaataacattttatgaatattaaaactttcttaatactataaaacacttatttgagattaaattaaatttttcatgagcccctctttggcaggaactctgattaattctttgaatttatcccagcttcttaaatgggggctgtgacataataaatgcttaataaacgcttatatgaatggatttttagaattaactaagaagccagaaatggcaacaatttacagaaatcccacctttccatgcttaatacaaaaatgtcttaaatataaagctgtgattatatcctaaatccagataaatcatcaaatatattagattaagaccagggcttacacacttatgcaatagtgctttccaaaccatgacaaaaactacaagtttatttatgatttg

SEQ ID NO: 11636 - DNA, 459 bp, Homo sapiens
  misc_feature (1)...(459): n = A,T,C or G
ccccaattgagtgcactacttcatgcggnggaattcgtttgtaataacagaaaactgcctataactgcttaaaactgcagataacccatatgtccataatggtagaatggatagattgaggtatatattcattcagtagaataccaatacagtagtgaaaatgaaagtaaatttctgctatacaaacaatgtacattaatgacatgaaaataatgtcagatgaaagtaaatcacaaaatacatgcagtatgatcctattaatataaaagattcagaaacctttaagattaatatgtggctcgggattacaaatgttaaactaaagaaaagagaatgataaaattctggagtgattggaggagcaggaaaggaaggggatggtgtctggcagggacatacaggatttcaaagggatattataatattcttaaactggacagtgcatacacagattttttg

SEQ ID NO: 11637 - DNA, 461 bp, Homo sapiens
atgagacatagacaggcggtgaagccatccaaccccacctcaaatagtaatttcttggacttgaatctcccgccacagctttcacaggtctgggagggatccctgtagcaggggaagaagaggtgaagggttcgaccatgccactgtcaacctcttcccattcattacaacaaggacagcagcctacaagtctccacactactgtggcctgacaacagaactgagaggagaggattagactctggggtgcttgcatgggcaactggatttttgcatgattcctttatgattttgcttttaatgtatacacccagaagagccaatataaacgttcctcatgcctacagctagcgtgttacctcatagttgatgaagtatttcttcattaggcctttaacataatttattagtgtaataattctggcattgtttctcatgagtgatactatctctaactcatt

SEQ ID NO: 11638 - DNA, 491 bp, Homo sapiens
  misc_feature (1)...(491): n = A,T,C or G
ntaccgaagctctcgnannnncctcccgatactactggtaaagccgnggaantctcgagttcagctggatacgattcagggtgaactaaatgcacctactcagttcaagggcctactaaatgaattgatgtctcaaatcaggatgcagaatcattttggagcagtcagatctgaagaaaggtattacatagatgcagatctgttacgagaaatcaagcagcatttgaaacaacaacaggaaggccttagccatttgattagcatcattaaagacgatctaaaagatataaagctggtcgaacatggattgaatgaaaccatccacatcagaggtggtgtctttagttgacagttcacaaacttgtgtaaaggtttgtgaaatgcatcttcttactgcatcagaccttccttaagaatgaaaccgaccacatggagggaaaaagaaaacaattctttcttggcttggttttttgagaagtttactgacaaag

SEQ ID NO: 11639 - DNA, 501 bp, Homo sapiens
  misc_feature (1)...(501): n = A,T,C or G
natcggagacccctgnnnanngnggngattgtagaccatagtccagtgcggcggcatttctacttatggtcttgtttgttgacatgacaaattaacattcttatagttacatctggaaatgagcatttgaaatagataatcctttaagccttgtggcaaaatttttgtggcttttgtttaactttgaaaggttattatgcactaaccttttttggtggctaattagggtttaaatacagaaacaagatttcaaataaaactgtctttggcagtgagtaaatagcatattttgaagtagagttgtatactttttcataagatgtttgggaatttttttcctgaagtaataatttattccacatctacatcagtgaaagctatctacctatcctgagtctatcttaaaggaaaaaaagaaaaaaaccttatctcttgcccttattttgaattttccactctttcattaatttgttttaagctccgcgttggaaaaaaggggta

SEQ ID NO: 11640 - DNA, 475 bp, Homo sapiens
  misc_feature (1)...(475): n = A,T,C or G
actcgagaccnctcgtagacactggaaagngcggtggaatttgttatttatatatttaagtagtttgctacatattgtattggatttatttcatgctaatataattattttcttttttgtttacattgtccatgggaaaatgctaagtcacagatgaatacagcaagattaaatattgcagacctagggatccaaatgaagaactagatgttttagattttatgagattatatcagactatctaaaaagctacatttataaaaagtactggaatacagtaggcataaaacaaacttggtttctattgcatttattacaaattttagaacaaaaccatgtcctttgcagcaacatggatgcagctagaggtcatcctaagcaaattaatgcaggaacagaaaaccaaatattgcatgtcctcacttataagtgggagctaaacattgaatacacatagacaaaaatgggaacaacg

SEQ ID NO: 11641 - DNA, 503 bp, Homo sapiens
  misc_feature (1)...(503): n = A,T,C or G
ngagtggcccccactgagaatatagtncgtgtggtggaattcctgatacattctgactacccagcttaatgcctgccatggagtaggtgatcaataactgtgaaatgaataaattaatgcattgtgtatgtgtgtcacatttgtttcataggcgtgtgtggatactttagctgttctatgattcgtcttgtaacagcaagaaacttgttcagagcagttactgagccaactgtgtacttagaagaacatttaagcagcagaatactgtttaagtagtagtctatccacttagcttgtgattcatcagtataccatcattattcagaccttcagctgtctagaccgttagcctgaatagcatctcccgcactcctaataatgccttcctcaaagtttgagcttccctgggcaaaaattcatctcgtcttcccaccagtttattcatattgcccacatgtaatgggttatttcagtgtacatctcattgagtgaatatttagaat

SEQ ID NO: 11642 - DNA, 382 bp, Homo sapiens
ggagtgtttccctccccaagggggtgtcagtctttgtcgactgactctgtcatcacccttatgatgtcctgaatggaaggatccctttgggaaattctcaggagggggacctgggccaagggcttggccagcatcctgctggcaactccaaggccctgggtgggcttctggaatgagcatgctactgaatcaccaaaggcacgccccacctctctgaagatcttcctatccttttctgggggaatggggtcgatgagagcaacctcctagggttgttgtgagaattaaatgagataaaagaggcctcaggcaggatctggcatagaggaggtgatcagcaaatgtttgttgaaaaggtttgacaggtcagtcccttcccaca

SEQ ID NO: 11643 - DNA, 452 bp, Homo sapiens
  misc_feature (1)...(452): n = A,T,C or G
aatagattaccctccgnannttttgagtacactagtcagtgtggnggaattcccatctgtggacttgctggggctgcgccgtgcacggtgtggtgaatgctacacccacccccaggggcggggctgagagtggctgggacctggagcacatggggatgctgtgtgggaaccaacttgccccccaccctgtgtctctaggggtccgcagcagtagagaagcagacagccagccctgtccctgcggcgtcaccctccaccccatactaacccagcagcgcatggagagatttcgggagtgctctaaaggcctttggagcaatttagggcaattacgggcagttttagaaatgctgaggggttgttttgcctgcggggcggggatggttgccttatgcccacagtgaagcgggcgagatgcggtagctgggttcacgcaagcctttctgagagca

SEQ ID NO: 11644 - DNA, 510 bp, Homo sapiens
  misc_feature (1)...(510): n = A,T,C or G
aggcgnggnngnnnnnnncctcgatagcgctcgctagtgcggnggaattcgatcatcatttcttgtaatttcttgtacatgtatattacttgttcttaatagatttttggaaacaagactttattgagatcagtttggttttcctgttaatttacctgtttgactttataatgtgttttagttttgcagaagaacactgttgtagtttagaaggcttttcataaatcccctcataggcaaagatgaaaacttcccactatttttttcccctcttaggaagacatactggaaagaaaatgtttagcatcttagtgtagtatagctattgtaaacagttcatgactagattttgattcggaaatctatactgaccaaggattaatcttaaggattgtataattcattaaagctgtggtctttccatgtggagactgatagaaaataattttgtcccaagtcttatttgctgactttttctgtcatgagtgagattgttgaacaaactgaata

SEQ ID NO: 11645 - DNA, 469 bp, Homo sapiens
  misc_feature (1)...(469): n = A,T,C or G
agggagtccgggnnttncnnnccctgagttgcatagcacangcggnggaattcagtacatagagaatagaaggcattcattatacattttctgagtagagtgaaattgaattttgttgaacttggcagccctgttcagtaggacaggtacatccaagtatcacttgtaatgtcatagttggggagggtgttacaaagcaggcagatgatgggtgcttgatattgataaatttctgaatattgaaaaacagacaactggaaagtttaaatgatcattatttgggatgttaactcatagtatgtctctcataaaagtaaaaaaagcacttttaaggattttctttttagagtaagccaaatattttagaggagagtccagttcaatttcctgtggcttctacaatggtcacactgtgtcatgatgtttggtactcacaaataagaccctatggaccccgaaaggtcatacc

SEQ ID NO: 11646 - DNA, 492 bp, Homo sapiens
  misc_feature (1)...(492): n = A,T,C or G
cccccgccccnnnnngnaattgagncccattgagnancactaggccgngcggnggaattcgctcaagcccggaccaatccccacgttccgggccgccaccctgaccctgcagcgtaccgggaagcgaaaccggccggatgggccgctgagcccgaatcgggcactgtgtggagccccctggagctgagatcaggatgttccgcttcatgagggacgtggagcctgaggatcccatgttcctgatgtgagtattccctccccctcaagctctcccactccaggtctctgagcagttcaggcagacatcgggttcccattgctaggaatggttggaactggctggatacctagctcctacctagcaggaagtaggcatcggtgccactgttgctctgtgcgtatttttttgcagggtggtggagggattgacagtttggcgcttctgccatccatactatgtgctcactcccagggatccctttgctattcacc

SEQ ID NO: 11647 - DNA, 468 bp, Homo sapiens
  misc_feature (1)...(468): n = A,T,C or G
aatgagaccatcgtaggcactaggaagncgcccatctatgaattattcttgccagaagaattggacctgaatctaatcaagaatctatatctaacttactggttaacaggaaatgtacgaaacagaggaacaagttaaatgaaaatacagtatatgatcagccaattctaaagtgtgagaaatcctataggacaaatagcagcttgcttgcttgctttctttctttctttctttctttctttctttctttctttctttctttctttctttcttttctttctttctttctttctttctttctttctttcttactttctttctctccttctttctcttctttctttctttccttctctctctgcctgagtctttattctataaagactgggactcgctctgtcacccacgctggaatacagaggcatggacactgttcgctgtggcctaaatcttctgaactcaaatgat

SEQ ID NO: 11648 - DNA, 448 bp, Homo sapiens
  misc_feature (1)...(448): n = A,T,C or G
cctgacctgcatagcatagcccangcggnggaattccgggtccaggcttgagggtggggtttagccaggagcccagcccttctgtatcatcagcattaatagtacctacttcatacaatttactttacagtgaaggtaaaacatgtcagcacctaggtcataagtactcaataaatgttagtagaggaggaagagtttttgttacatattattatcttcatcagccattattacctgctaataaagtcaacagagtgatgccacagtaatttatatttaggtttcaattatatatagttttacaaattggagacttattttccatgctatctaattaataaagcaattcaaagaaaatgcaataatggagggaacttgtaagctgtaaaagtagctttgcccagaagagaaccacagtgaatgttcagtcaaattttcatacattgag

SEQ ID NO: 11649 - DNA, 444 bp, Homo sapiens
  misc_feature (1)...(444): n = A,T,C or G
ngggcgcaaatgagnccccatgagantctcgaaaggcggngaaagcaggattaaaggcactgtgactatgaatgatacactacagtttgcttgttgacagagcacgaccctgtctcttaaaaaagggaaataaaataaattaatctttacaacaaccctcctaggtagaccagaaagaggcggtatccttattttattgatggtctgagtgaggtcatacagacagtaggtggccaagcccagatgccaagcctaagcctcgttccttttgtttacccaaggttcctattcataccattatatgaccatttagtcttaaataatctgttttaattgcaaattttattttaagaaagggaaaaaatcacatttattctgctgcatcttcttgctttattcataatgaattctgcaggtcaatttatcctcaacgatggcaagcca

SEQ ID NO: 11650 - DNA, 497 bp, Homo sapiens
  misc_feature (1)...(497): n = A,T,C or G
ntcgagacccttngnagngtcgtagtccctagtccgtgtggtggaattcaaaaattgtaaattctatggacttaatattttcaacatacttcaatttttttttcaactataaaaatggagataatttcctagaaaattattctctactgggtcgtaagctagtcacgctgtataactttaaaacttaacagacttttacttaagatatacttttatatttggtcttcacaacaaaccagtgagagaataacgtaacaacattttgaacaccctcccactctaccttttttatctttctgctttttaatctcagctacctgtttctcctcacggttgcccaccccagcaaaaaacaaataggtcctcagaaccatacatctgaaacaataaggcaatctttttcaccaaagataaaactccagcttctactaatcaaggcttaaaaaaatcttatggtatcagtttcagctggggcatatgattaccaatgatgaatg

SEQ ID NO: 11651 - DNA, 492 bp, Homo sapiens
ttcgagtccctagtccatgtggggaactccatgtggtactggcacaaatacaaaaaatacagacaaatggaacagaatagagagcccagaaataaatccttttatatgttctgaaaagattttcaacatggatgccaagattattcaattggaaaatgaccatcttttttaaaaatggtgctgggaatactagatatatacatacaaaagaataatggtggatcctcattttatacagtatattacagttcactcaattttgatcaaaagcctaagcagcagagataaaagtatacatatcttataaaaaaaaaaaaaaccgggaaaagcttcatgccattggaatcggcagggctttcctggatttaacaccaaaaaacacaggcaacaaaaaaaataatcaatatattagatttcatcaaaattcaaaacttttgggccccaatgaccatattaataaagtgaaaaagccaaccacataatgggagaaag

SEQ ID NO: 11652 - DNA, 454 bp, Homo sapiens
  misc_feature (1)...(454): n = A,T,C or G
cttggacgacacttagaagacccctagtccagtgcggtggaattcggctactttaagaggccatctttaatactttatgagtagtcctggagtgtaaacataaacgagtattcttttgtagtcagaaaagtgtcctctcaataatttagtaggggcttattgtctctcaaaactaacctaaaagaaaatgacacattttataatagaatattacatttatttctggaagtgtgttttcaaaaagatatttacatagtctgtaaactagaaagtgttaggtaaagctctaggttactgtgttactattataatattaaacattcgaataggcagtcgttcaaagactctttggaatatctatgaatgaatatcctctattcttataatattaaaacccataagtaaatataggacatacaagagaaatgagttaaatgactatgtaagggagagn

SEQ ID NO: 11653 - DNA, 451 bp, Homo sapiens
  misc_feature (1)...(451): n = A,T,C or G
naatgaagaccccattgaagncgtcggaaagngcgggggaaatgcaaggtatttaaagacctttttatattgctcaggtcagagggactgtctgtctcttccttaccatacctattgatattttattttgggggtgctcagagaagtaaataatttctgtattgtctttacaaattaatgtgacttccccttcctcttccttttttttttttttaagtggagttctttaaaaagtgggcaatgcagggctttataccccaccttttgttatgcattaattacaaattctttttaaaattttgggactttagttaaaataaaccctaaataatattttaaaattggttattatttagtattttaaaaaaagttatacttgatttatttaaaacatagtcttaagggccctttccatttgggagtttaaaataaaaacactgccaccttgggg

SEQ ID NO: 11654 - DNA, 587 bp, Homo sapiens
  misc_feature (1)...(587): n = A,T,C or G
gcatcaaacttacgtttctctgcgtttcctgatcactaagtatcccctcctcactctagcgaatagcgcttacatctgnnnnggcgggagttgaagaccctatgcantttcgaggaccctctccangcggcggaattcattaatcccatcctgatagattcttctcctaacagtttgcatttgagataaggctactgtatttaatacatagatgacggtgagaaggcttatttttagaaacttaaggaatgaaactatttactagctagcactaggaatgtagtaacttttgagagctgcttcatggggcaggcaaaaatatccagataacagaatgctgaacagctgctataatagacgtcaatgctatgccagacactgtgctaggtcccctgcatatagaaccttcacaaaacctgcaatgcagccatttgcattaaattcagcacaagtaacagaagctcaaaataatagtgattaatttaatatgtagaggtgggcagccccgaattgccatggtagctttgctcctccaagtcttgccagattagaaggctttaatctgtttattccactccccataggct

SEQ ID NO: 11655 - DNA, 455 bp, Homo sapiens
cccccatagtagatccattgtacagcgtggtggaattccgatcctcagaatgcagatgtttatcaccaccgaggacagctgaaaatactccttgatcaagttgaagaagcagtggcagattttgatgaatgtattaggttaagacctgagtctgctctggcacaagcacagaaatgttttgcattgtaccgccaggcatatacgggaaacaactcttcacaaatccaagcagctatgaaaggttttgaagaggtcataaagaaatttccaaggtgtgccgaaggctatgcactatacgcccaggcattaacagatcaacaacagtttggtaaagctgatgaaatgtatgataaatgtattgatttggaaccagataatgctacaacatatgttcataaaggtttacttcaacttcagtggaagcaagatctggatagaggtttggaacttatcag

SEQ ID NO: 11656 - DNA, 490 bp, Homo sapiens
  misc_feature (1)...(490): n = A,T,C or G
agggacnnnattgagaaactgagagcntacgcagngncgnggaantccagaaggatggacaaatgtttgaatttcattaaggggatctaatggaatctttgccacttgaaagaatttctctctccaacagaggtgagcagttttagtctttgagaaattattcccagagaaaccaatgataggtcagcccagggacccacctgcacccaacagaaatgagcttaacaatccagtatgttctaggtgttgacttcaacagcccagatgagattgactttcccaatcctgccaagaagcctaaaagtgcccctggaggacacacggaatgaagtcagcagctggcctgggcagctctgctctctgtgcttgctcacctgtgtgccccagaaagtgtctctgtgacattcctgacttcctctctgtcttttctcctttctttccattcaagaaaaccctctcttagaaaacatagtagccaacatgtgttagg

SEQ ID NO: 11657 - DNA, 460 bp, Homo sapiens
  misc_feature (1)...(460): n = A,T,C or G
nttgaattcataccatatccangnggcggaattctttaaagccaacttctaatacctcttttttccattgcttcattgccaagaggaataattagactgttgcaacaattatgacaaaggcgtcctatacccttggtcttctttcatccatagggcatccaaaagagacctggtttctctgttgattggaagttcacatcaaattccttgaccctgggattaaacctacagtaaacatgtgtatttttgtgttgcagatgcgtatcatagatggatagtaatgaataccatttattgagcatttatcatgtgcgaagtactctgctttcttcttcacaggtagatttaatcatctccccaaccctttgaggtagggaatactgtgatccttgttgtatatttttaaaaaaatggagactcatgttaactgacttgccccttaccgtccttaagtggggag

SEQ ID NO: 11658 - DNA, 494 bp, Homo sapiens
  misc_feature (1)...(494): n = A,T,C or G
catcgaccnccctngaaatgagcancattaggacagngcggnggaattcctcattaaaatttaccctgtgcaagcattggccatgtcagtaaactgcagcacctgttcttcttcacgttttttgtttttatttttgtttggatggcaggtaatcattcacctgtaaacaagcagggtgtaattttggaggtaccactagtctttagttctattccagctgtagggagggctggatagggtcagaagtaatgggattctttgctgctttcctctactacaggctgtttgggtcttctttggaagatgaagctttggctcttaaatccttattcctgggcaggatagctccagcttctttcagagaccgaaatattttcacctcccttccccactatcccagaaaaacatacttaatgttttagagaacactttgtttaactaatgaatctaatcgtatttctcctgatagntctacttttggccacaaattgttn

SEQ ID NO: 11659 - DNA, 463 bp, Homo sapiens
  misc_feature (1)...(463): n = A,T,C or G
nattgagatccatacccatggccgngngcnggaantcgagcaatgctacagacattctagtatggttgttggagtctaaagacagcgctcccatgcagataggtgacatgaaaaatatgtagcgggcatttcctagaatgtcatagccacggagtcttataataactcttggcatccaagataaaagctggatcacttcctccaaatagtcttcactcacttccgggagtgggttgtattcacctttagctctgttcacgagacactcgtgggatattcctagccttctgcccccttagttacgggcattgccgtctcactgctgtataaccagaggcgtgggagctgcagctgtcagaatcctaatcccttctgcctggactcgttaccagaggtagcgagtgtgtatagtagtaaactgtgctgcgatgctaccctttccagtcctaccagaggtcccacn

SEQ ID NO: 11660 - DNA, 463 bp, Homo sapiens
  misc_feature (1)...(463): n = A,T,C or G
gtgcgggcnnttttnaaactgactgcattgcatngngcnggaacncccagaaaggagtgtggactcataaagtcactgctgtcctttggttttcctgatgtaccttatgttgtaaggcctcttttcaatgtggtaaaagctctgggccaccccataaggctgcaggcgctagaagctcttcccatagagaacatctatatcctcaaaccaaggagaaaaaggaagctgctgttcataaatattgaagaggcagggagagcttgcactgaggccagggtgtattaacatgcatgccatcgtgaagtggcttctaatggacatttgtaaggtggtgtcccctcccttcccctcccccctctaatgctgcctgggttgctctttgcaacacgtgcagtctgcaacttagctggcttttagcaaaattacccatcgcgattcatttgtcccattgggccatgggatn

SEQ ID NO: 11661 - DNA, 500 bp, Homo sapiens
  misc_feature (1)...(500): n = A,T,C or G
nttgaggccccttggcantttcgagntacactactccgagngcgggaattctgggggtttatcttcattcattaaataattgcatgtaaagaattttcctgtcactatttcaaatgtttcatgtagttattatagtgcttcagaatccaaagggttatgtgttacttatgtaagatgagcagtctagggggtggagaacaggtcatctagtgcagattcttcctagctgaagcgtgttttctctggggacaaccaagtaggatttaattgttttgcttccttttttgggaacttaaacccatcttgcgatgtcctaagtctccaagcatcttatttgacctgcttatacacatttgactaaatagctaaatatgaccacattgacgtggtaaagctttaacacttttgtccagattgaatcactccatctgctatcagttaagcagtggaaaactgttatggaaaagcaaacatgttttgatagatttaatgtgtaaagn

SEQ ID NO: 11662 - DNA, 463 bp, Homo sapiens
  misc_feature (1)...(463): n = A,T,C or G
gccttacccggntgcnaactcgatgactacagctaatgattgcaanaccnangananggnnanaataagctgcaggggtttggtttgttgaatcgttttgcatgactgatattagttcaggtttcccaaacttggtctgtggatgataaacatctataagattaaagaccacggaagtcatgtttttgtaactttttgtttaatacatagagaaaatgagactcacatagtgggttgaccaggccttcaaagcaaggtaatggggacacctgaataaaagcctcactgtcttcactcccattgctctggtgtcttacatataggcctttcttcttactcctgttaagctgccttgtatttttttgacctatcaaaatcatttttcaattacttgtttcccctagatttcagatgtcccggtatgaaaggttttatatatatttaaaaaattaagtataaacat

SEQ ID NO: 11663 - DNA, 498 bp, Homo sapiens
  misc_feature (1)...(498): n = A,T,C or G
tccgaagctacttganngntcagtatcgactngcaangnaccctntganaagngaggtatatctaggtgtggtggctcatgcctgtaatcccagcactttgggaggccgaggtgggtggatcacttgagatcaggagttcgagaccagcctggccaatatggcaaaaccccatctctactaaaaatacaaaaattagtcgggcatggtggtgtatgccagctactcgggaggctgagacaggagaatcgcttgaacctgggaggtggaggttgcagtgagctgagattgcaccattgcactccagcccgggtgacagagcaaaactttgtctcaggaaaaaaaaaaaaaaaaaaaaaattcgggcccagggcccctgccccctccccttaagcccctgactcttatcttgccctcagggggctttttgtcttcctcaaaaggcgaaccccatgggccggggaatctcctaaaataaggaaggacaaaactttttttgg

SEQ ID NO: 11664 - DNA, 478 bp, Homo sapiens
  misc_feature (1)...(478): n = A,T,C or G
tgagtngcccnnnagtnnnnacactgagactctgctagatgccgntgagaacancccggccacaaaagaggacagcagaagtgggcacaagccattattgatagaagatcatcatggctagtcagggatggacaaatacagaggtgcccagcagctcactcctctccactctatagcatcttcatgactacaggccctgctgaccaacagcagccctaggccgaccaccaggcactgggctgcagacctgaagacagtagcttcaaaaaagcaaagtcgctccacattcggcagtttccatagatcaccccagcaagctcccccttcatagatccacttcagcagcttgggcatgctcggattatcagatttccctgcacgcttcaatttgtttacccacaccagtgcttcaaacagcctgctcagtcatactttgtctgatcctgactggcacgccacagtagagcaggctacattt

SEQ ID NO: 11665 - DNA, 460 bp, Homo sapiens
  misc_feature (1)...(460): n = A,T,C or G
tggcgcgcgngnagatttgaatcgattgcntggccangnccnggaattcgcctcttggctggtcggtctgtggagtgcctgaagtgaccagctttttgtattgcctttttgcccccatctcttctattttgcattacactgctgacctgcacttcctgtgtctcggtgaggttcttcagggcaggaactgtgtctagttcagtttcacccttagcaacaagtggtaatgaaatatttctgccaaggatccaattcagattattagctgcagctgaggacagccaccctttcttcgtctctgctgagcgaaggctacacggcccttcctccttgcagctgtttcaccttctaccttgcgtggagccaggcttttgcaccgaatctgagatgccattttaaacagaagactccatcctcttgaagatgggaaattcttacgctggacagctgaagacgacac

SEQ ID NO: 11666 - DNA, 265 bp, Homo sapiens
ccggtgcaatctagttgggaaaatattttagatccccagggctacatactgttatatataccctcctctttgtgtcagagatggaaaaggtgtcaatctgctctgaatctctctgaacacctcaggaaataggcttttggctcgcagagaggggatgagaaatagatttgaaccaccaagtctcttggagggtgtcagcagccccttgaagcaaaagtgtggctgcaaacccagctctctgcattagccaagtgaacctgagccg

SEQ ID NO: 11667 - DNA, 484 bp, Homo sapiens
  misc_feature (1)...(484): n = A,T,C or G
gcgttgcccttatagaccttttgaaggcgtcggaanncgcaggcacgtgctaccaccacgcctggctaatttttagtttttttacagaagcgggcttttgccatgttgtccaggctggtctctactcctgggctcaagcagtcctcctgcctcagtctcccaaagtgctggaattacaggggtgagttgctgcgtctggtgttggtgactttctagagattactttttggtttacatcattttccttgtgactatttttacttttttggggggcggggggacagtcttactctttttagtttacatcattttccttgtgactattctatttttacttttttagggggcggggggacatgagtctcactcatgttggtcaggctggtctcaaactcctgacctcagttgatccacgcccttcggcctcccaaagtgccgggattacaggcgtgagccactttgcccggccttgtattttacgttn

SEQ ID NO: 11668 - DNA, 478 bp, Homo sapiens
  misc_feature (1)...(478): n = A,T,C or G
tcnaaatcgagatcccttgtccagtctggtggaattcgtttctgaggtgtggtcatcaccctcatgcccaaattctggaccaagagaggaagatacagcagttagaaaggacttggaacagtggctttgcggctggtgaaccagagtgaagaatctggccgtgacctggctgccacactgctataggccccagaacagaggtggtgacagtctcacagcccttgaatgtcccccaccctcagaggaatctgggccaaagagtggaaggtgatgtccttgggtcagccagaataacatggagcaaagataccaactactcttccagaaccccaagagggtagaacccctgcttaatggtttgagcagggacagtggagaatgttctcatgagagggggtggcctgactttcgttgctaaggtgggctggtaacgcagtaggcagggctggcgaagtaggttccacccaggatgaaacct

SEQ ID NO: 11669 - DNA, 434 bp, Homo sapiens
ggtggtttaaagtgagagtatgcattgccctggtagaagaggaaaacagccagcatcacgtcaaggcagaaataacagcccatgttgaactcggaatggggacctcttgctaagtcattccactcctcaagagaccattccacagaggggggatggatcattcagctctcctggtcccaagattgtgctgaagggaagaaggaatagaatctggagatctggactgctgccccttatatatgcagaggtccacatctgcctggggctacagcttgtgggactccatcaaaccaggccgaaatggcaaagacagtctatgaggaggaggaggtagggtgtgaaacagccatgctctctgcaaatcccaagtgttgacacagtcatcttgtcccatccctggaagcctctgtggaaaccacatagagctgtgctgg

SEQ ID NO: 11670 - DNA, 462 bp, Homo sapiens
  misc_feature (1)...(462): n = A,T,C or G
tggcgtgagnttttaaaccgtacacatctgcatngngcaggaacncggngatccacccacctaggcctcccaaagttgtgggattgcaggcgtgagccactgcgtttggtctaatttttcaattttttggtggagatagggtgtcaccatgttggccaggctggagttttgcctgttctagaagcttgtatcattcatacaacacccctttgaggaaccgtttgaggtgtggcacgatacagaacgtcagctgccaaagaggggcttagccacaggaagtgcgtgcccagaacgcatctaccgtgtccctcacagcagttctatgaggctggctgccctgtttgacaactgacgcccgcatctttcccggaatcaccgacgtgtggctctgagccctgtcccacggattttctccatcagagaagacgagcactttgagctttgagaggagcagccctctgc

SEQ ID NO: 11671 - DNA, 472 bp, Homo sapiens
  misc_feature (1)...(472): n = A,T,C or G
gcgggctnnnnaggatcgcgtccgctagaccangcggnggaattcctggaggggagaaccagccacaggagcacagcataagtgacatcctcacgacctcacagactctggaaacagtgcccctaatcccagaggtagtggagcttccaccgtcactgcccaggagctctccttgtgtacatcatcatggttccccaggagtggatttaccagttaccataccagaagtttcttcagtccctgatcagatcagaggagagcccagaggctcatcaggacttgtaaacagcagacagaagagctatgaccactcaaggcaccatcatgggagcagcattgctggaggactggtgaagggggctttgtctgttgctgcctctgcatacaaggccctgtttgctgggccaccagtcactgcacagatggagtctcgctctgtcacccaggctggagtgcaatggcgcgatctcgn

SEQ ID NO: 11672 - DNA, 464 bp, Homo sapiens
  misc_feature (1)...(464): n = A,T,C or G
tggactgccgnganancctggaatcgatagcnctcgccangnccnggaattctggagtaagagcccacgccctggatagagatggaaatctggtagaagattttgtattttatgcaggagttggggatattggaaatcgcattcttcatgtgagaaatgcaccttctcctgctgctacttcttccattgcaatttctggaatgattgcagatgaagtacaacaaagatttgaattataaataatgaaaggagctaggtcaaagataaccactgcattgttaaaatgatgtaacatagaaataataattttctacaaaaattagccaggcatggtggcgcatgcctgtagtctcagctactcaggaggctgaggcaggagaatcaattgaaccgagcagacggagacggagtttcactcttgttgcccacgcttgagtgcaatggtgcgatcttggctcactgcg

SEQ ID NO: 11673 - DNA, 468 bp, Homo sapiens
  misc_feature (1)...(468): n = A,T,C or G
gagtnccannnnaagcaaaaactgagatctggaagctgangaccctcgagacancaanctatgtataaaatttatcggcctttctcatttacctgctctagtattattgtattgtgtgtgcgtgcgtgtgtgatgtcaggctgccacgtaaaacttcagagaaaaatcttaaaagcagaccatccttttttgcatgctctattctaagtagaatgttcaatgtaactgactaaaattgcatgttaaagatattgaggcttttttgttttctttatttttatttgctgtcagtgtcctgtatatttgcttactgcgccgttttagtggttctatgataaaaatgcactggcgaagcaaatgtagtgccaacagaaggtgattttccagttgtaaatgtcatgcagcatttgaagggactgtgttttcttaaaaaaaaatcacagttacttctaaaccagatttcatttn

SEQ ID NO: 11674 - DNA, 496 bp, Homo sapiens
  misc_feature (1)...(496): n = A,T,C or G
catcgacccccctnnnaatgatgaccactaggacagngcggnggaattcgacctgtccttgacaagcagatgtaactccttgattgaggctagtatgtttttaagacctgaataattgagtttgcagaaacctactgtgtgccttcaggtaaatggagagtggggtttggtctagcaacgaagcatctagaaggtctctttggccttaccggctctgttttaggtaagtccacgtctgagtaccagtgactgcagctcttccagttgtgctgtcatgcttatatgttagaaatgatcatcaaaggactcaaaagttttgccactaattgtattaccggggactgtcacaaccaagatttctcttaatttattcaccttacttatctcctggaagggcatattgaagtgctcttggagttctctaaaagggtttttgttggttgtgtatattcacttgggtgccagcgattgattccaaataagtaaatctttcttn

SEQ ID NO: 11675 - DNA, 413 bp, Homo sapiens
  misc_feature (1)...(413): n = A,T,C or G
cagaataagcactccccaagcattagaagatgctctgtatagtgaatatctctatcaggaacagtatttgtatcctttcgtctgatatacccattagcactgaaaattagacttcttatggataaagtgttgctaacttattgatcattcttggtatactagaagcatgtttattgcttcagaataagcactcctcaagcattagaagatgctctgtggagtgaatatctctatcaggaacagtattttattaaaaaggatagcaaagaagaaatatattgccagttaccaagagatactaaaattgaagactttggtacagtacccagatctcgctatccattggtagcgctattgaccttagctgatgaggatgaccgggaaatttatgatattatttccatggtgtcagn

SEQ ID NO: 11676 - DNA, 468 bp, Homo sapiens
  misc_feature (1)...(468): n = A,T,C or G
natcgagatccctagtccagtgcggtggcattcgagtgtaccacagggggacagagtcattagaacaaagtatggccaggcttgagcccaggtggagcagcaaagcctggaggcccggcagtgggacctggcagtgggactccggggaaggctttatggcccctgcactgggggagagggggcagacaggagggggatgacactgaggaggaaggtggtgttgagaggctcgcagttaccaggggagcagagctcccacctgcactggggaagacccaggagatggaaggcaggccctgagcggggccatgggtcgcgggcagacacaggagatgcctctggagcttgacccagtgcctgggagccagatgccctctaacctggtcaggagctcaggcgggtagaggtctctgttgagttctgctggaatctggtgaccagaaagtctcggcgagagggatttgagct

SEQ ID NO: 11677 - DNA, 562 bp, Homo sapiens
  misc_feature (1)...(562): n = A,T,C or G
natcggatcactatccagngncgnggaattccncctctggtggctctctcaatccagcagaatgatctgactgaggagaccaggaagcaggtgttgggaacgcagctctgcacgcggcacctactcccaccctaccaccatgggaacagcgggcacggacgcctctcctgcgggaaggcagagcccttgcgttggagcctctatctggcctatcctgttgcagctgctctgctctgagtgccagtgtcacccaaatccatatattaagacctaagtcccaaggggatggcactgggaggggggccttggggaggtgatcaagtcacgacggctccactctcatgaatgggagtagggcccttagaaaacaggcttgagggagcttgcctgccccttccaccttctgtatgaagatgcaagaggcactgcctgagtcaaagggccctcgccagatgcccaatctgctggccccttgctcttggacctcccagcctctagaactgtaagcaatagggttctgttgttataaatggccagactagggaatcgctatagcagctgn

SEQ ID NO: 11678 - DNA, 569 bp, Homo sapiens
  misc_feature (1)...(569): n = A,T,C or G
nattggagnccatcgaacactagtccangtggngcaattcatttacttagacggatgatcatagctgagaataatgatactgtcaatttgagatagcagaagtttcacacatcaaagtaaaagatttgcatatcattatactaaatgcaaatgagtcgcttaacccttgacaaggtcaaagaaagctttaaatctgtaaatagtatacactttttacttttacacactttcctgttcatagcaatattaaatcaggaaaaaaaaatgcagggaggtatttaacagctgagcaaaaacattgagtcgctctcaaaggacacgaggcccttggcagggaatatttaaagcaacttcaagtttaaaatgcagctgttgattctaccaaacaacagtccaagattaccatttcccatgagccaactgggaaacatggtatatcatgaagtaatcttgtcaaggcatctggagagtccaggagagaagactcacctctgtcgcttgggttaaacaagaagacaggtntgtagaatattgattgggtatagtaaatcgttcttcttacaatcaan

SEQ ID NO: 11679 - DNA, 496 bp, Homo sapiens
  misc_feature (1)...(496): n = A,T,C or G
tggcgctcccgggcgggccnggattgatcccaactgagaccctaggccanngcgnggaattctgatggtctcaaaatggaaaggagcaaaacttgaccagggtgaatatgagagagcagctattgatgctgttgataacaaaaaaaacacacccttgcactatgctgctgcctcagggatgaaagcctgtgtagagcttttagtaaaacatggaggagacttgtttgctgagaatgaaaataaagatactccttgtgattgtgctgaaaagcaacaccacaaagatttggccctcaatctggaatctcaaatggtattctcacgggatcccgaggctgaagaaatagaagctgaatatgctgcattagacaaacgagagccatatgaaggattaaggcctcaggatcttcgtagactaaaagatatgcttattgtggaaactgcagacatgcttcaggctcctctctttactgctgaagctttacttcgagctcan

SEQ ID NO: 11680 - DNA, 493 bp, Homo sapiens
  misc_feature (1)...(493): n = A,T,C or G
aggcggggnncgggggnntnnnnattgagaccctggacatgcggtggaattcggagacggngaggtctgggggtgccacgcaagtccctttcctcccgacacgagtgcagtaaagaaaaacggttatgagcgtaaagtgacagcctcggccgatgggaatagggggaagtccgacactgagcaacgaacgcattcccgcgcctccaaaacctaggccgggggcgctggaaacccttaccggcacccggccaccgcggcagacgcttgctcctgccacgccccgccctcccccgcatcacgtgtctgcactcgctttcctcggattcccggatgtggttgccaaaacaaaggggatttggtgatggaggctttgttagaaggaatacaaaatcgagggcatggtgggggatttttgacatcttgtgaagcagaactacaggagctcatgaaacagattgacataatggtggctcataaaaaatctgaatgggaa

SEQ ID NO: 11681 - DNA, 483 bp, Homo sapiens
  misc_feature (1)...(483): n = A,T,C or G
aatgaaaccctggaannnccactgagaacctaggccangncgnggaattcgtagaaatggctgggaaccgtggcgcatgcctgtaatcacagcactttgggaggccgaggcgggagaattgcttgaggccaggagttccagaccagcctgggcaacatagcaagaccctgtctctgttttaaaatttaaaaattagccaagcattgggtgtgcgcctgtggtcccagctactcgggaggctgaggtgagaagatcgcttcagcccgggaggtcgagtctgcagtgagctaggatcgcactgctgggccacagagcaagaccctgtctcaaaacaaacaaaaaataaattcatgtatgttagcaacaattactatttaatttaaaacttccccattccgattccatcctcaccaagcacgttccttcgcctgcagcttcggtctagagcctgagcgagccgagctgcggatgccaggggctggg

SEQ ID NO: 11682 - DNA, 452 bp, Homo sapiens
  misc_feature (1)...(452): n = A,T,C or G
nttgangaccgtcngaccctagtccagagcggtggaattccgaacaagtgatcctttgcctaagcatccccagtagctgggactataggccacaccaccacacccggctaatttttaaaatttttctgtagaaatgaggtctcactatgttgcccaggctggtcttgaactcctgctctgcggtgatcctcttaccttgctctcaaaagtgctgatagatgtgagccagtgcttcaggcctttgtctttatttacacaggcatattttattttatttatttatttatttatttatttatttatttattttgtgagacgagtcttgctctgtcacccaggctggagtgcagtggcatgatcttggctcattgcaacctccgcttcccgggttcaagcgattctcctgcctcagccccctgagtagctgggattacaggcgtgcaccaccacgc

SEQ ID NO: 11683 - DNA, 591 bp, Homo sapiens
  misc_feature (1)...(591): n = A,T,C or G
nattaggaacccccnttagagngnnncnnnnnnttttcgaatcactattcgagagtggtggaattcccgccgcttcacccaggtgagcaccctgatgaaggccacggtcctgatgcggcagcctgggcgggtgcatgagatcgtgggcgccctccgcaagggcggcggagaccggttacaggtgatttctgattttgacatgaccttgagcaggtttgcatataatggaaagcgatgcccttcttcttacaatattctggataatagcaagatcatcagtgaggagtgtcggaaagagctcacagcgctccttcaccactattacccaattgagatcgacccacaccggaccgtcaaggagaagctacctcatatggtggaatggtggaccaaagcgcacaatctcctatgtcagcagaagattcagaagtttcagatagcccaggtggttagagagtccaatgcaatgctcagggagggatataagaccttcttcaacacactctaccataacaacattccccttttcatcttttctgcgggcattggtgatatcctggaagaaattatccgacagatgaaaagtgtccn

SEQ ID NO: 11684 - DNA, 487 bp, Homo sapiens
  misc_feature (1)...(487): n = A,T,C or G
aggtggaattgagacttgatcacngtcgnggaannccctgaccctctgtgttggtctgctctggctctcataagaaaataccagagactgagtggcttaaacaaaagacatttattttctcacagtcctggaggctggaagtccaagaccaaggtgttcgcagggttggtttcttctaaggcctctctccttggcttggagatggccctggttggtcttctgagtgcaggtgtccctggtgtctctttgtgtgtccagattttctcttataaggacactggtgagattggatgaggggccccctgacggcctcatcttaatgtaatcacctctcttatctccatatccattcacatacgggccattgcgagctaccggggattaggggttcaacacataaattgggggtgggggggtgcagctcagcccataaacatgccccctctggctcgctctcccagggcatccatcgtagcacttagaanan

SEQ ID NO: 11685 - DNA, 509 bp, Homo sapiens
  misc_feature (1)...(509): n = A,T,C or G
aggggaanagaaccccttcgatatcctttgnagtttggaggacttcagaagagccaatcctccccagaagggcacccggagaccactaaggaaggagggaggataccttctgttcccgtgttcaggctccaatgtatccaggtcacaggaggctgcctctccaggcagagaaactgatccgtccctatcagtgccaggcagagggcaggggatttcgcacctgagcaagggttgggatgactcccaagcttccattctccctggagttcctcccgagggtctctgtgacacagaggaggaagcaggagctttctttgcataatcatggccaaatatttatattcgtttaggatttgcttctataggatgttttcgtcattcaaatctatttccaaaataaatctggatctcttttataagaaaatgcaatgaaaacaccagaatgatagagtaagaaaatagaactgaaattactgaaaaggagctgaggaattagatgttgccaggcn

SEQ ID NO: 11686 - DNA, 493 bp, Homo sapiens
  misc_feature (1)...(493): n = A,T,C or G
ggacggggncggggnnttttncctgagacccatggaagtgcggtggaattcaactgcgtgtggggccggcacatcctagcaggcagcccctggcgcctgctgcctcagggatgctccaaccaccctcgttctcctcgcagtggccctggctcccacctcccgccccagcctgccgtggggcccgtcagcctggtcccacccccatggagaacccaaagtcttactgtatataactccaggtgacgtttctatatttatagcagtgttgaaaacccacgtgttttacacagaaccaccctctccaacccctcccttcccgaccccaacaaaacgttttcaaaccccttacagttcctggggcaggcggaaacaggctcacagattgtgtgtcggctgcagcagtgattccaacaagcagctattgggggggaaacacagcatttaaaaagatcatcattaaaaaacaagatttatacaacaattacttaggatg

SEQ ID NO: 11687 - DNA, 557 bp, Homo sapiens
  misc_feature (1)...(557): n = A,T,C or G
caatagattaatctatccagagaggccgaattccagccagccagcagctgagtggaggttacggaggcggctactgtggccagagcagcatgagtggatacgtttaagttttacaggaaaactccagtgattttcaatcagacattgcataggtaaccaaggagcagtgaacagcagctactacagtagtggaagccgtgcatctatgggcgtgaacggaatgggagggttgtctagcatgtccagtatgagtggtggatggggaatgtaattgatcgatcctgatcactgactcttggtcaaccttttttttttttttttttttttttaaaaaaactttaagttaaaaagtttctgcaaaacaggctggggattatgccttcttttaacggaaaacggggatgtttttaaaaattaagggcccatttttttgaaaaccatacctcttctaggagtgcccgggaaacctggtaaaactataccgtgaaacctaaagtccagatttctctcaggttngttttgagaggccctaaaccggaggggtgtttatgtaaacn

SEQ ID NO: 11688 - DNA, 468 bp, Homo sapiens
  misc_feature (1)...(468): n = A,T,C or G
tgcgcggcttctcnctttggtaatgcccagtacgtcggngcanttaacactgaaaaacgatcagggaaattgttattgcagtcaactcttacccttcctcggagtacagactcaatgctaagaggcatagaaactctaatttcccactgttcaaatttctacatttattttctttcaatattaatatcatctctaacccctaatttcttcaaagcatgtagaataacaagcacttcaaaggaaaggtgagtaaaaagagccatcagaagacctatccattttaagcaaccgtagtttgaaattttttaaattgaagtatgacatatattcagaaaagcagaaagatcattaatgacatgtcataaacatcagtattcctaatttgatctaactcgggtaaaaacagctttctgtgccagacactggggcggngacatctgagtttccctgggggctgagggtctagaa

SEQ ID NO: 11689 - DNA, 451 bp, Homo sapiens
  misc_feature (1)...(451): n = A,T,C or G
gtttagctgagaccntntaancctgattnctctggccangtcgtggaattccaagagcccctccgtgacctttcccaagtggctctcccacccagtgccctgtgagcaacctgcactcctccgtgagggtctcccagaccccagcagggtatcctccgaggtgcagcagatgtgggcactgacagagatgatccgggccagtcacacctccgcaaggatcggccgctttgatgtggatggctgttatgacctgaacttgctctcctacacttgaatggttgctcctagccaagatgttggcctttctgtgcccacccagacttggtttgggccaccagaggctgaagtgtatttcctgtgcattccaagtgttgcctgcatgcctgttctgtctgggccacattcacagattcaggattctcaggggcttaccgtgttacttcagcatgag

SEQ ID NO: 11690 - DNA, 451 bp, Homo sapiens
  misc_feature (1)...(451): n = A,T,C or G
ntcgcgactgtagtccatgtggnggaattcatttaaaagcatccatgaaacagttcctttatgccttctgtttaggatttccagaattaggaagggaaaccaggcttgtgccttggatccaaaagcagcaaaaatactacacttgccaaaagcaaactgaggaatgagcattggccagtcctagtatgaagtcaagaggtggacttttgttaagttagcccttaccatttagtgcttactgaatgccaacaatgcacttagaaaaataagggagacaagaatttacagaccataccctaaactggaaggtacaggaaagacacatctcctagagctgggaatgtgtccctaacatttcaagaagaagcagaaagtaggagagatcacgatctcagtctttttaggattccaacacaaaatggaagggagccctctgtggggtgatattacn

SEQ ID NO: 11691 - DNA, 490 bp, Homo sapiens
  misc_feature (1)...(490): n = A,T,C or G
gggnnaganccnggnnnnnnnnnnattgtagaccatattgaagtgcggtggaattcctctatgctacattttagttttcttcatatttggatcagatattcctgtatagccttttatattttgtgggatttttaatgccttttcttttttgttgctatcgttattaataataaaactgcgccttcactatgcccttaagtttatataaatatgtagttgtgtatgggattatttattgttttaatttaaatttttattttaaattggcaaacaaatacatattgtgggggacaatgtgatgtttagatacgtgtatacattgtggaatgattatataaagctaattaacatatccattacatcacatacttattttttatagtgagaacatttaaaatctatttgcaattttgaaatatgcaatacatcattattaagtatggtcaccacactgtgcaaatcttgaaaatttattcctcctgttgaactg

SEQ ID NO: 11692 - DNA, 470 bp, Homo sapiens
  misc_feature (1)...(470): n = A,T,C or G
gagtatccaaactgagccatcgctaggtacctnagnaagngcggnggaantcgncgcctccgctcttcgcccaaaaggggatgcagctccgggaaagtaaggccgccgcggttgcggctatattatgtatatgtcttagagacgcgagtctatctctgccttcaagctttcctgggctctcgtcgctcctcctcccgacccgcccatcccatctggggatgagaagattgagggtgcagagccctgtcctgcagcggggatttgcgagctcaacccggcaccccactgattacaggattacgttggacgaatatttgagcttagtattccctgttcactgtgtggggtggtggtgggtcggctaggaatagtcttgaaggtctacctctgacatctcatttcagtaacctcgcatcttcagggacagttatctgctttttaaaggagcaagtgaattcatggtattttac

SEQ ID NO: 11693 - DNA, 466 bp, Homo sapiens
  misc_feature (1)...(466): n = A,T,C or G
aggcggcgcgngnnnnnactgaacggcataccntatgcagngngcnggaattccacgtgaccagaagttaggggctgcagcggcgctggctttagaaaattactttttccattgaaacacacccaagtatatgcccagccttcatgaaagtgaacagagaaacgaagcgcctttatgtgggtggccttagccaggacatttctgaggcagacctacaaaatcagttcagcagatttggagaagtttcggatgtggagatcatcacacggaaagatgaccaaggaaacccacagaaagtttttgcatatatcaacatcagtgtagcagaagcggacctgaaaaaatgtatgtctgttttaaataaaacaaaatggaaaggtggaacattacaaattcaactagcaaaagaaagctttctgcacagattggcccaagagagagaagcagcaaaagctaagaaagaaga

SEQ ID NO: 11694 - DNA, 475 bp, Homo sapiens
  misc_feature (1)...(475): n = A,T,C or G
gcgaggggnnnnannntttaacctgagtcccctntnagnattgcagtccactagtccatgtcgtggaattcgaggatttgtaaatttttttcacgagctagttagaaaaactaaacccctatgcaatgttgtacttctcaaaataatatccaaaggaacagcagttctagactaaatactaaatccaaatggggctagattccatcttcattttggaaacagctacagctgtggccagcccagcagctgatggaatgcagttgagggtttgatatgggggaaaggaaaggttttctgcacaaaggcagttggtgcatagaccctgcccttccctgcccctgcatcctgttcccaacgcctcatcactacccaggaaatacattggtgatcttgccaagatctggcaattggattctgtactgttgggaatatcatggtaaagggcctcaaaataaaatctaagatgacaatatta

SEQ ID NO: 11695 - DNA, 450 bp, Homo sapiens
  misc_feature (1)...(450): n = A,T,C or G
tccctttgagcctgagacgtcggagaacncatagagntgnggaatttaatcctcatgttccaaaatatttattagagatgaattgtttaattttacctccagaacacattctgaaacggggtgatagtgaagcaattgcctatgctttctttcatcttcagcactggaaacgaatagaaggtgctcttaatctgttacagtgtacatgggaaggcacttttagaatgattccatacccgttagagaaaggacatctattttacccttatcccagctgcacagagacggctgatagagagctattacctacctttcatcatgtttctgcttacccacaaaaggagcttcctttgttcatccatttcacagcaggattttgctcttttacagcaatgatagccattctcactcaccagtttcctgaaatcatgggtatttttgctaaagctg

SEQ ID NO: 11696 - DNA, 459 bp, Homo sapiens
  misc_feature (1)...(459): n = A,T,C or G
attagaagaccctagacagngccggggaattaattgtatacacctagttaaacttatccatctaaaagctgcacacaaaacttgatgttagattcttttaaaattacaaaatttttacttccaaaagaatcttgttgaataagagtaaaagaaagacccttactcagtaaagctgcgtaatactttggcagtttgaacccatggccatgcctctctgtgtgataaggatttggcaaaaccatggaagaaacatgcatgtttttgaattgtctttccatggtaacttaaaacattttttcatgaaacatggatatatatccttagaaaactgcaaaacataaagcttgtaagttataagacaagatttatctcttttttttttttttctgaaaaaaagttttgttttgttgcccaggccggagggcaacagtgggatttttgttcactgcaccttccgcg

SEQ ID NO: 11697 - DNA, 468 bp, Homo sapiens
  misc_feature (1)...(468): n = A,T,C or G
aatggagaactgaagncagtgcggnggaannntggagagaaaccatatgagtgtcatgattgtggaaaatctttcatccagagttctgtccttattgtgcatcagaggatacacactggagagaaaccatatgaatgctgtcagtgtgggaaagccttcatccggaagaatgacctcattaagcaccagagaattcatgttggagaagagacctataaatgtaatcaatgcggcattatcttcagccagaactctccatttatagttcatcaaatagctcacactggagagcagttcttaacatgcaatcaatgtgggacagcgcttgttaatacctctaaccttattggataccagacaaatcatattagagaaaatgcttactaataaatatgggaatttttcacaaagagcaatgactttattttgcattggagaactcctggagataagctgtacaaattgaat

SEQ ID NO: 11698 - DNA, 389 bp, Homo sapiens
  misc_feature (1)...(389): n = A,T,C or G
nctgaaccctttgagtttgggaacctactccgcgcggtggaaatcgctccctgccccaaataacttcagtcctgctccagaatttggaaatcctagtttcctctccttcgtatcccgagtctgggacacaaaactccgcccccagcctatgagcatcctgagccccgccctcttcctgacgaaactggccccggatcatagcaggacctcccttgcgaccctctgggaacctcccagaggtccagcccatctcggagcatcccggaggaaatctgcggagggttaggagtgggtgacaagagcctgatctcttcctgttttgtacatagatttatttttcaggtccaagaaagatgaatacattttgctaaaaaaaaaaaaaaaaaaat

SEQ ID NO: 11699 - DNA, 468 bp, Homo sapiens
  misc_feature (1)...(468): n = A,T,C or G
nattgacgaccacattgaagngcggtggaattcttggggagagtggagtccagagagagaaggagcagcacctggaagaggctgaacgtgtgtgcgagagtcagtcagtgctccccttgcatccattcgcatgcacggccgggtctctgccgacctcctccaggcccccagcccttcccaggctatcctgcctcctgcctcacagaggaaaatcacacgcgcaaccgcagctcgtacagcaggtgggtccatggccacgttgatgttaaaacgttcatttttggaaggcccagaggccagaagacagctcaggcagcctccccacggcggcgcacgctgtcagatgcgacccagcctcacttaaaacttcaaagacacgcgtttcaaggtgggcctggagtgctgttcttttcactgatttttctcagtttgtcgtccgttgagtggattcggagctctttcatctgg

SEQ ID NO: 11700 - DNA, 453 bp, Homo sapiens
  misc_feature (1)...(453): n = A,T,C or G
nttgaaacccatgatgacatctagacacccggnggaattcgccttttgtttctgtcataggtcttaccacaatatgtaattgctttatttgttcttcacaaaagaatgtaagagaccatgtatgcttgtttaccagtgtgtccctagctcttaaccgcatgcctggaacataactgttcaatatttatttgttggatgaatgagaaaccaaatattgttaacaagcttgttagattgtttaagattttcttctatagtagtctgagttgcatgaactttatgatatctacctcattagggctgtcgggctcacgaccttttcagatgattaatgttcccaaaatttaatattcaaataagagaaaaacaatacaaaagcaccattgggttgagcatggtggctcatgcctgtaatcctagcactttgggaagctgaggtggacagatcacttg

SEQ ID NO: 11701 - DNA, 455 bp, Homo sapiens
  misc_feature (1)...(455): n = A,T,C or G
gttagaactgtgaacctntnaaaaactgantgtcctctgaagngncgnggaattcctcaaacccgggatggcggtcacctttgctccagtcaacgttacaacggaagtaaaatttgtcgaaatgcaccatgaagctttgagtgaagctcttcctggggacaatgtgggcttcaatgtcaagaatgtgtctgtcaaggatgttcgtcgtggcaacgttgctggtgacagcaaaaatgacccaccaatggaagcagctggcttcactgctcaggtaacaatttaaagtaacattaacttattgcagaggctaaagccatttgagactttggatttgcactgaatgcatatcttttttccaaggtgattatcctgaaccatccaggccaaataagcgccggctatgcccctgtattggattgccacacggctcacattgcatgcaagtttgctgagcn

SEQ ID NO: 11702 - DNA, 521 bp, Homo sapiens
  misc_feature (1)...(521): n = A,T,C or G
attgtttagaatttgcttcccattttgcaccagcctttaaacacttttcgtgaagaaattttgcacagtagtttaaatcttttgttaatgctcctccgaagtttttcagggggtaaaagtaacatcagtggagggtattattttaaataaattttaattgagaatttgttgcattttcagcaaattttaaaacatttttaggttttacagagattttaacctttaaacaacagatctttaaaaaacaggtgaatacaagtgagtttaacaaagaaacatttagaatagatctgaatgtaagaactacagaactgtttcagaaataaaacatactaccttgatgtgacatttttttcttaacctttgtgagctggtttgttcagcttaatttactgttcaaaggcattatctgttggtcacaccagtgggtatatgattgaatttanggaacanggttgacacagcaggggctagcctgcatatttttcttaatatttccccatgtgttttcattattcttn

SEQ ID NO: 11703 - DNA, 470 bp, Homo sapiens
  misc_feature (1)...(470): n = A,T,C or G
ntttgagaccccatcgagnagcactaggacagngcggnggaattcaatactttgacttcctttatggcctcgcgtatgtcatgggatgctattctagagacaggttggaatttgttatcttattgctacaaagagtctgttgtggcagccttatgatctttattttaatggtaatgctggtcaggtgtgcctaaactccaaagggaggaggtataaccaggaatatctgacctttcttcccataatgggctgaactagttttttcaggtttttttggggatccccttggcctgggggtaggtggttcttcagtcagttggggggcttagaattttatttttggtttaccatatcatccaagtttttttttttttttttttttgaaaaacacttttgcttcactgaccaagttggaatgaattgtcatgaattattaatacaaaaaacacctacctccggcttgattggat

SEQ ID NO: 11704 - DNA, 464 bp, Homo sapiens
  misc_feature (1)...(464): n = A,T,C or G
aggtgttaaatgagacatcgctganggcatcgaanaaacnggagaggagatgagcttggtctctgctctggtctcagcctttatgtactgtcttggtgggatgaccgtggttgggtcctgcctccaagggtatcccagagggttctagaaactcccacatggacaggcacttgaaggatagtgctggtgattgggcaggtgcctggatggaggtgaggcctaaagcacacccggggacagaaggcagcacccacacgggagcccagcttcgtgccagggactgtattttaggtgctggatcttgtttaaatcttccggctggctatgattatcctctaagctggggaaggaagaaaagcattccagtactatacctctgtttgggttaaaggaggggaaagtattttaaataaaacctattagagttaaaaggatgagtagcaataaaaatatctttgaatctg

SEQ ID NO: 11705 - DNA, 468 bp, Homo sapiens
  misc_feature (1)...(468): n = A,T,C or G
gatagaaacccctngnncnnnatagaggaccctctgnccgngcggcggaattcctgcgttctggccatgacccccgggcccaggggaccctgtgaaatactgtaaaggtgacaaaatatctgaacagaagaggacttaggagagatctgaactccagctgccctacaaactccatctcagcttttcttctcacttcatgtgaaaactactccagtggctgactgaattgctgacccttcaagctctgtccttatccattacctcaaagcagtcattccttagtaaagtttccaacaaatagaaattaatgacactttggtagcactaatatggagattatcctttcattgagccttttatcctctgttctcctttgaagagcccctcactgtcaccttcccgagaataccctaagaccaataaatacttcagtatttcanannnnnnnnnnnnnnnnaaaaaaaaaaa

SEQ ID NO: 11706 - DNA, 448 bp, Homo sapiens
  misc_feature (1)...(448): n = A,T,C or G
ccctacaattagttgaggaacatagtaaangcggnggaatttagtatatangaccaaacaccccactgtttaggatgtatagatggcaaataagcatttttggtgatatgtaacattattagctatcagttgaaatgcaaattaaagccacagtgagagaactacctcaggatgactaaaataaaaagtagtgaaaatacgaaatactggtgactgtgcagggaaactatgctcatggattgctgataggaatgtgaaatggtacagccactctggaaaacagatctggcagttaccatcctgggtatttatcccagagaaatgaaaactactctgtatacgttagccaggcatggtgatgcgtgcctgtaatcccagctactccggaggctgaggcacaagaattgcttgaacccgggaggcagaggttgcagtgagccaagaatgg

SEQ ID NO: 11707 - DNA, 403 bp, Homo sapiens
gccttgtctgaataggcttaaacatgaaagcgagcgttcttgagttctggtttctctctctgatgctggcccccacaggtttggcccttactacactgagccagtcattgccgggttggacccgaagacctttaagcccttcatttgctctctagacctcatcggctgccccatggtgactgatgactttgtggtcagtggcacctgcgccgaacaaatgtacggaatgtgtgagtccctctgggagcccaacatggtacgttggtggcatggagaggggctgggctctgagttacccacccttggtcattaggaaaaaagtgtgtttatgtggcaggtaatggggagaatggtgcaggtgggagagaaagccacagctgctgctccttggaagggtatccag

SEQ ID NO: 11708 - DNA, 455 bp, Homo sapiens
cggctggcatagtagacattagttagagcggcgtaattcgaaaaggcttttcaatgaagcactgtctcatggtacatcaacgaactcatactggagagaaaccttataaatgcaatgagtgtggaaagggcttcgctttgaagagcccactcatcagacatcagcgaacacatactggagagaaaccctatgtatgcaccgaatgtcgaaaaggtttcaccatgaagagtgacctcattgtacatcagcgaactcatactgcagagaagccatatatatgcaatgattgtggaaaaggcttcactgtgaagagccgccttattgtgcatcagcgaactcatactggagaaaaaccctatgtatgtggtgagtgtggaaaaggctttccagcaaagatccggctaatgggacatcaacgaactcatacaggagagaaaccttatatttgcaatgag

SEQ ID NO: 11709 - DNA, 465 bp, Homo sapiens
  misc_feature (1)...(465): n = A,T,C or G
gcgtgttaaatgagacttcgctgangccatcggatncnncggncaacacaggttaatgcctgaaggcctctacgcacaggacaaggtatgccgtaatgaggagcagctcctgagccaactccaagagctgcagctggacgatgagctagtgcaaacactgcaaaaacaatgcatcttactgctggaaggaggtcctttcagcggtctgggagaagtcatccaccgagagagtgttcccatgcatacctttgccaagtatttgttctcagctctgctgcctcatgatccagacctgtcctataaattagccttacgtgccatgagttcctccccagcaaagagcaagcttctctaaggtggctcggaagcccagggtctggatggtggctgatgattcttcctgggtcttccaggttacctgttttagaaaactcagcttctgcaggcgacacatcccaccctcan

SEQ ID NO: 11710 - DNA, 460 bp, Homo sapiens
  misc_feature (1)...(460): n = A,T,C or G
nttggggaccattagtccagngtggaggacttcgcgcactcctgattacgtggaatagagtaggactgtctaactttaaagtgcttgtgaaccacatggggatcttgttaaaatacagattctaattcagtaggttcctggagtaggctccaagattctgcatttcttttctttttcttttcttcttcttcttcttttttttttttttggaaagggggtttcattttgtgccccaggcgggagggtttgggggcaatttgggttaatggcacccttggcctcccaggtcaaggggattttccggcctaaccctcctttaaaattaatcggtgaaaaaacccaacctgtcccccctggggagggcccaagcctggatttggcggattccatcggcggggcagttaaccaggcccctcggccctcggaancccttctttctcctcccctttttttttaacgg

SEQ ID NO: 11711 - DNA, 470 bp, Homo sapiens
  misc_feature (1)...(470): n = A,T,C or G
nnaagcggcccgctgnaaaannnggatccganagacagnctcttnaatnaggagactcctcgagtccgagctactcgggaggctgaggcaggagaatttctttaacccggggggcggaggttgcagtgaggcgagagtgcgccactgctctccagcgtgggtgacagagcaagactccatctcanaaaaaaaaaaaaaaaaaaaaaatttttttgtttttttttgcccacaaattccccagggacaaaggggtttttggggtttttttaaaaaaaattcccaaaacccctttttaaaaaaaaatggttgttttttcaaggaaaatccaataaaagggcgcccaaaatttatttaaatgtttgggctaactaaatgcctaaggacctaaaaagggttcccggagggggaaaggccttttccggtttttgttaaggaaaagggatttttaatggcgggaaattaaaattggn

SEQ ID NO: 11712 - DNA, 484 bp, Homo sapiens
  misc_feature (1)...(484): n = A,T,C or G
tgatggnnaggaaacgancctgatnaccttaggnactgatgaccatagtacagngcggnggaattctggaagtgtaagaaattgaagagttctaaggctttcaaaaacactcagtcaaaaatttttaatcttaaatgtgtaagtcacccccaccaaaaacaaaagagaagaaaaagaatagaaagaattatccagtgtcagcttccaatccctagtacatatataatagaaaagggccaagaaaaatatgcatcttgatttggagagaggctaatattatgcacactgtaagagaagccattttggaaattcacgaaagtactgctccaccccagttgagttatttagaattttatctcaagtgaaagctgatggattcatctgctttggctgaaattaaacttatcattagtctagctagcatttcagcatgatattgcaagcacttctcattgctaaaaataaataaaccaaagtttaaccg

SEQ ID NO: 11713 - DNA, 424 bp, Homo sapiens
  misc_feature (1)...(424): n = A,T,C or G
gggtgcagccacggaggttggatcctctgctccgccgcctcgtcctcgtcccgcttctgctgggttccgctttgtccctggttttttcctttttttttctgtgtgcgtgcgaatggtgcggcccctcccctctcaccgtggttaacgtgacgaaggcacgattcctgtaaatgtgtaaactaaggggatggttggattttttttcaatgtaaacactaaaaacaaaatggacaaaaaaacacacaaaggttttatgaacagcagactctatgtaaaggcattttagtatcaaattttttattgataacttgcttaagaataaatatatggactattgtnnaaaaaaaaaaaaaaaaaaaaaaaaaaaaaaggggcccttcgattttaaagggcccgttaaaccccgttgataaccctcgggggg

SEQ ID NO: 11714 - DNA, 452 bp, Homo sapiens
  misc_feature (1)...(452): n = A,T,C or G
nttcgagtacactagcncgngcggnggaattcaattcaagccaccagatgctttccaactaacagggaccaaatgggaccgttctaatatatcctaaaagatttgggagttagaggaggtaaactaagataattatattacaaagggtacaagaccacaagacaacaaccgactccggaattcttggacctccgccttccgtacaagatggagtcttgctctgtcacccaggccggagtacagtggcacaatctcagctcactgcaacctctgcctcccaggttcaagtgattctcctgctgcctcctgagtagttgcgatcacaggcgtgagccactacgccaggataatttttgtatttttactacagacggggtttcaccatgttggccaggctggtctcgaactcctgacctcaggtgatccacccgcctcggcctcccaaggtgctg

SEQ ID NO: 11715 - DNA, 460 bp, Homo sapiens
  misc_feature (1)...(460): n = A,T,C or G
nttcgtagaccattagnccagngcggnggaatttatttgattcatctttatttcaccaaccttgttttattattcctcttgtctatgggtttacttaaaggtgcatgttcaatgcagatatgtatctatctccttatggtttttgtattttttgtcttatagaagtataatcttacgatattttatacctaaatatttatgaattgtatctcataaattggagccattttccaatttaatgctctttgccttgaattaattcatgtttaactggattggttttttgctgtcttttctttccgtgacttctccatttacaagttctgtattgcagttcgtcttgtgattggctagattgactcttcaattttttattgaggactcagagaagcattatgtagacgtgactttttttccctctgctgatattttactttaatcaaactacattgttgactta

SEQ ID NO: 11716 - DNA, 468 bp, Homo sapiens
  misc_feature (1)...(468): n = A,T,C or G
nattgtagacccatttgaagngcggtggaattcgattcagaaatctaaactagctcccatgggataaaaagatctaagattgttttttaatccctaggagcattgattgtttttcaatccctaggagcattgtctatttaatgatggttgagttcctccgacaaagtcaagatggtagtttccatataattgttggtaactttttaactgtagtttgactcaaatgggcaggatgacacttccagggatgctgaaggcccctgggaacatttattgttccattacctctggtaatctaatgtgtattaacttatggaggcatttgtcagggagtccctcattagccaggagatttctctcagattctgaggagggggtaagtgtcagagctgcagtgtgaaaagtgatgcaaagtgctgcagggccggaagcagcttttccacacgggtctcttgggggaagcatctg

SEQ ID NO: 11717 - DNA, 452 bp, Homo sapiens
  misc_feature (1)...(452): n = A,T,C or G
cgcgccggttttnnttcgaggacccttagtccagngcggtggaattcattgaagagcctaaagtactttccgaagctggatctgcagcaaggttttcttgtatccagcctcagtgccctgctgttttttatacattcaacaagttgaagcaccacttgatggaacagcataatattgaaggggaaatacattcagattatgaaattcattgtgatcttaatggctgtggccagattttcacccatcgcagtaattactcacaacatgtatattaccgacataaagactattatgatgatttgtttagaagccagaaagtagcaaatgagagactactaaggagtgaaaaggtatgtcaaacagctgatactcaggggcatgaacatcagaccaccaggagatcatttaatgctaagtctaaaaaatgtggcttaatcaaagaaaagaaagcn

SEQ ID NO: 11718 - DNA, 474 bp, Homo sapiens
  misc_feature (1)...(474): n = A,T,C or G
caatgagaccattggaatttgcaggccattccggggatcagggatgggacgcatccccgggggatgctcctccaaagcttttatcgggcgagcgcagtggctcacgcctgtaattcctgcactttgggaggctaaggatgaaaggcttcctancacaaacaccacccctggagttcccggtacatcaataccagcctggggatcacgttctcatcaagagttggaagagggaaagcttgaaccagcttaggaggacctcatctggtactcttgatgaatgaaacagcaatctgaatggctgaaaaaggatggacccagcactccagggagaaaacttggcattctttgggaatctaacaggatgcagtgaacccaagccttttgaagagctcaccaatcagactgcccttgtctatccatgagcagatgtttgatagtattgcggaggccctctagtgggtatgctgccaagcn

SEQ ID NO: 11719 - DNA, 466 bp, Homo sapiens
  misc_feature (1)...(466): n = A,T,C or G
atagaagcccctcggnnnnnnatgatgaccattagacagngcggnggaattcgtttggaaaaggagttgcagatatgaaaagagagaatgcttgaatgtggattcgatttggagttgttggtgtgaattcattgatctagtttggatgtttgtccccacccacatctgatgttaacttgtaatccccagggctggaggtggggcctggtagggggtgtttgggtcatgggggtggatccctcatgaatggcttggtgctgtcttcgtgatagtgagttctcgagagatcttgtcattttaaagtgggtggcattccccccgccccgacacacacactctctctctctctctctctctctctctctcgcttgctcctgctttcgccatgagatacacaagctcttgctttgcctcccaccacaagtagaagcttcccgaggcctctctagaagctgggcagatgcca

SEQ ID NO: 11720 - DNA, 461 bp, Homo sapiens
  misc_feature (1)...(461): n = A,T,C or G
nttcgagaccattagtccagngtggaggaactcggcattttccaatgttttgtcaacaaagctgcagggtcctgctacttttgtgtgtagatcagagcccaaaccaggatctttgcttggaggagaacctccacaaaagcccctcttagctgtgtccctccgcaagatgagtgggcagccttgccctgcgagcttggacaaaactaaaactccaagctccccggagacagggtggttccgtgtgcattcctcctcggaggccagcttcctctggatttgttcttaggcttttgcagctgagggccactgcaaagaaaggttatccaaggagatgacatggcggcgagggctctagctggccctgtagatgagcctaaaaggcgagattagagcagctcagtgtgcgtccatgacctcagtggggatctgaaccatcatgaaaaccatcctatttgtgggcn

SEQ ID NO: 11721 - DNA, 473 bp, Homo sapiens
  misc_feature (1)...(473): n = A,T,C or G
nttgagaccctggccaggcggttgatcacgttgtggcgccatctcactgcatcctccgcctcccgggttcaagcgattctcccgcctcagcctcctgagtagctgggattacaggcacccgccgctgctaatttttgtatttttagtagagatgggggtttcaccatattggtcaggctggtctcgaactcctgacctcaggtgatcaacccaccttggcctccctaaatgccgggattacaggcatgagccaccgctcccagcctttgattttttaaggtggattttggttgttataaatggagaaaggtaagagttcaagttcaacccgtgtgtgaaagcaaaacaatggaaaacaggattggcttcttcaaaggctcctcttgtagaactgcctctttgaaatttcgaggtaatctactttggagactctgcctggagagggtcagttcctaagttaaaagcatcgctta

SEQ ID NO: 11722 - DNA, 468 bp, Homo sapiens
  misc_feature (1)...(468): n = A,T,C or G
gggagcncgnnnnnntattgatagagtncntaggcagngncgnggaattcacctaatgtagatgacgggttgatgggtgctgcaaaccaccatggcatgtgtgtaactatgtaacaaactgcacattctgctcatgtatcctagaacataaagtataataaaaaaaccatagtgttaaaatgtgcataacagaaatttttaccattttaaccatttttaagtagatagttttgtgacatttagtatattcacattgttatattcccagtatacaggtccataacattttcgtcatcccaaactgaccctgccaattactcctcatattccacccctccccattcctggcaaccatcgntatactttctgtctctatgagtttgcaaaggccatgtttaatagtgccaaaacttgatatccactattaataggagcagcatgatatggtaagaaaaattttggactggg

SEQ ID NO: 11723 - DNA, 466 bp, Homo sapiens
  misc_feature (1)...(466): n = A,T,C or G
gggagccnnnntnntatcgatagcgtgcgtangnggnggcattccaagtatacacaacttcccagtaaatggttgtggggaggaaggaggtggagcctccccagccgtttccctgcagaatcagctctgtctcatgtggaagtggagaatcagccttgcctggcctttaggaacttttgtggggaagagagctttgaagagaggagggggactttagagagggatgaaaatgagccctgggagggaggaagggacgaggaggggtggctgcatgttaccgtcccctacctctccccacgtggagggtggagcagttatgagggaggaagtcaactgctgttcagcctcagaataaaggtgccgttcactggctcagttacctcctgtgtaccggcatcttgtgttgggaatgttcccccctccctagggaccaaggaccacccctacaaaaagagtaatgggtggn

SEQ ID NO: 11724 - DNA, 460 bp, Homo sapiens
  misc_feature (1)...(460): n = A,T,C or G
gtgcgggnngnccaatgaaacctacgactggagcttcgancnacnannncnttattctctttttaaagatgaaaaatggaagcttacagaagttaacgtcttattacactagacagcagtgggtaaaactaaggtctcacctaaaatcgatagttgtgaaggtttagtgatactgataatagcagaatgtactgggagctgattgtatgccaggcacctttctcagcactttgtgtacattaattcatttaatcctcacaataactttatgaggtgtaggttttcaaagtaaaggttttcttattatcaccatttttaagtaaggaaattgaggcacagagaggtgaagtaacttgaccaaagtcatataactaataagtgatatctccgtattttttcctcttttgaatttgtcattaaaatctaataaataagttgatattcataagattctttattg

SEQ ID NO: 11725 - DNA, 486 bp, Homo sapiens
  misc_feature (1)...(486): n = A,T,C or G
tgggtccnaaggggnnnntnnnaatagtagatcattagtccagggtggaggacttcggacagacctcccaaggcaaaaactaccttctgacttgggttgaggctgggttcccctctattgttcccctatcataagagctaggccaagcctatgggaccttgagtcatgcaggatgggatctgtggtcaaaggacaggcgaggagctgtgggcgcagggcctgccgccactgcctacatcttctctcttccccatcttgcattggaggtcccagaaaacaattagcttctggcaaagggggtacccacttctttccctgttgactttgctgtttcccaggctcctttttgtgtttttataactgtcaccagttagccactgtttaaattgtatatattgttctgaggcgcctggcctgtcccttcagtgagccatgcccacccttgtgttgtagtgagaagctgttgtcacgactaaccttcttgtt

SEQ ID NO: 11726 - DNA, 488 bp, Homo sapiens
  misc_feature (1)...(488): n = A,T,C or G
acgtacatagacngctcgtagagncgtggnaaacccacattccagtcaatctctttccctcccttgcaaccatgtttaccaccatgtttaccactctccattatttttgtctgttgtgctttgttataaatggaattaaacagttagtcagtttgtatctgttttgtttaacacactgtttttgagatccattcatgttgttccagtatttccgtttgatggctgagtaatataccatggtatggatgtaccacaatatgtttatcctctatattcacagctttacttagcactttacaattggctcttgaagcaagtgggcatttggtattttctttgtgagatgggaagatttggntttgggtaactcattggtgtgattgaaggctgctctacttattcaggtggttcatacagggatgcctgctcacattagctcctaatggtattgcttttacatgtggaagaaattangtacaaaacagggg

SEQ ID NO: 11727 - DNA, 448 bp, Homo sapiens
  misc_feature (1)...(448): n = A,T,C or G
aattgacctgcattacactagcccangcggnggaattccaagaatgactttctcttgattgttgaaaaatcattacctgtggaatggctatgaatattggaagcagcatagtgttgatgtacgcaaaacaagacagcttggtcagctacaatcttggaatccctgtcttcttaattttatttatttatttttgacgtataatgtagtatatcaatcctttcaaactatttagataaccacttgatgcacaaataggaaaaagcagattgtggcagtgtcgccttttgtggttttatgattttcaaattgaatttaatgattacaccctttcccttcatagatcttttttcttttttttaagccatgctgtgacctacaagcaaactaaatagccaacatttctgaacccctaagtctcctgtgccaagctgctccctgaaatggactt

SEQ ID NO: 11728 - DNA, 481 bp, Homo sapiens
  misc_feature (1)...(481): n = A,T,C or G
caatgatccgtctcgnntaatgagaccattaggacagngcggnggaattcgactggtccacacatggctgaagcatgaggaagctcatcatgggattcatttttcttaaattttggacttatacaggaagggcttcaactgaccttactcaaactggggactgttcccagtgtattcatcaggtcaccgaggtaggacagcaaactaaaacaatctttctgttctatagttattatgaatgtatgggaacattaaaagaaacttgtttgtataatgccagtcagtacaaggtatgtagcctgggaaatgactgacctgatgtgtgttataacccatctgagccccttgcaaccatcgtttttaaaataagattaagaaatggccttttcctaggtgatacaaggaaaataataactagaacagaagaaaaaaggaacccccaaacaaataactttaagatgtgatgcttgtgcagccattn

SEQ ID NO: 11729 - DNA, 481 bp, Homo sapiens
  misc_feature (1)...(481): n = A,T,C or G
cattatcagcacttcganataganngacattagnacagagcggnggaattcgctaaattgatttaattacactttcctttgtactttaaaaaaaagtatgctagcactattgtaccttgaaaggattgccaccagactgtcttgagtagtgacttctttggtgaggcaagaaggatatacattattttagaatcatttactatttaaatgagacaatcatattattttagaatcatttattttaaatgagacaatcattttaagttttaagataacagaagtgaccaatgtaatttcacaacacctaaggattttttggttgatcaggttactgtagatttttactgattgtcctggatgaatagactgtgctttttctttttctctcccttccttcttggtttcccatagtataataagcatgcatactttaacttctatagttttctcctttagagggtcttcttcagttttagaggtt

SEQ ID NO: 11730 - DNA, 458 bp, Homo sapiens
  misc_feature (1)...(458): n = A,T,C or G
actcgagaccacatccgagngcggtggaattcgatgagcctccttttagcagagtgaacccctttttaaaggccactttaacaacaaccaccaatatattgtttagagacggtttctgtctagtgtaaaacttgagtggtctgactctaataaatggttttgaaatgtgtgactggtattataaaatttgtgaataaaacatataaaatatgaaaaaaaaaaaaaaaaaaaaaaaaaaaaaaaaaaaaaaaaaaaaaaaaaaaaaaaaataaaaaaaaaatgaaaaacctaaatggggccttttagtgggaagccctttggggttgacctttccctggtgtttttttttaccttggaagggccccttcccactgcccttccttaataaattgggaaaattggactacttgccatagataggtgtatttttatttgggatgnnnngnaatatttacacc

SEQ ID NO: 11731 - DNA, 446 bp, Homo sapiens
  misc_feature (1)...(446): n = A,T,C or G
aactgagctgcataccactcgcagnggcantctttggttattttgttaatgttgtcattatatttaagacttattgtaggaagtaattttaaatctatttcataacctgttttgatctgtctgcatactgctatatgttaatttattacggccttttacaattcacttgtcatctgagattgttctagaaactgatgaggaaagagtcgtactaaccaaaatgaatgggcaattgacataacattctatttcaggtttccttgtacttggggagccaaagcacaagatctaaggaaatcttattcacatttgtccctcagagcatcttaccctaagccacagaggtataaatagtaagatgagaattgctcattgtctgactccttgcacagcatgaatttaattctagttggaaacaaagttagtgttgactactggttacctta

SEQ ID NO: 11732 - DNA, 443 bp, Homo sapiens
  misc_feature (1)...(443): n = A,T,C or G
nctgaattgcattacccggcggggaattccagagtcttcagtcattcctagagaggagatgaaatggtgttagttgcatttgttagtaaaaatcatttatctggctatattcctgaagaaccacagaatttcaaatgctaaaataaactttcatttgctaaatggatgcatagttaatgcttagtcatgagattgattcatgtttgggttctactactgaaattaagccagtcctttaggaggaggcaagcaaaggggagttgattcagtgttgtgtaaagtgttatccatcagtatgagtatttttcatgttttattcatgagtaatagattcaaagaagttttaataaagtgcccaattttatttgcataggtcagaataaactttgtaaataagtttgtgatacctgggtacaaactaaaaggctaggaatgaagttatt

SEQ ID NO: 11733 - DNA, 496 bp, Homo sapiens
  misc_feature (1)...(496): n = A,T,C or G
cggcgacctgagctctatttgagantcctaggacagngccgnggaannccgggcccccgccagcctccctcctcgcgtacctcggtgtcctccgctgtccggcgcgattcggctgggcccgaggaccgcggcgttggggctgctgctgctgtgcgccgccgcggccggcgccggcaaggccgaggagctgcactacccgctgggcgagcgccgcagcgactacgaccgcgaggcgctgctgggcgtccaggaagatgtggatgaatatgttaaactcggccacgaagagcagcaaaaaagactgcaggcgatcataaagaaaatcgacttggactcagatggctttctcactgaaagtgaactcagttcatggattcagatgtcttttaagcattatgctatgcaagaagcaaaacaacagtttgttgaatatgataaaaacagtgatgatactgtgacttgggatgaatataacattcatatgtatgatcgcgcg

SEQ ID NO: 11734 - DNA, 474 bp, Homo sapiens
  misc_feature (1)...(474): n = A,T,C or G
aggccccagtccnaatagagaccattgtcagatggaggactctggagccgcgctcgcccgcccgcccctcgactcgcgagggcgtaaaagtttgtctcagctcgagcattcctagcgccaacacgccctcaggtaaaggtggaagtaaatggccacgctgtattgacagagacagggactgagaaacggaaatactaccatcctccagccaatctgttgggaggactgcttgcagaggactcgtgctccagatgttgcactagaggcgctgcaagtgtgagcagcaggtagatgaaactcaagagaaaaggtgtggataaatgaaactagcccatgatgaacctgttttctccgtgaccacaatattaaccaggatgaatggcggtggcagtgggcctgcatcacaggttgcagcagatgttctcaatatttctattaaaatttccttatttccatatgcaagaggagccccaa

SEQ ID NO: 11735 - DNA, 446 bp, Homo sapiens
aatcgagatttgtagtacagtgcggtggaattctattattatagtaatatggacagtttttttattttaaaaatagaattcacacaactttacagcatccatgaacattttgctatcccaattatgtgtgtgtgtgcatgtgtgtaaacaagattctgaaagtcttgcatgagaaaaatctcaaaggaaattaatgacataacctaaacagttttgaagaacatgtgcacagtggacacaggaattgaacaaaggttaccatgattaacattatgttttcttaattatatatcacattgaattcctttatcaactctaaaaagaatctactgattagcgctctacattctgctttttaaagaaaaagttttgaaacaatctgacttaacagaagggttggaaatactgttcaaataaaatttttcccttttgagaaaaaaaaaaaa

SEQ ID NO: 11736 - DNA, 468 bp, Homo sapiens
  misc_feature (1)...(468): n = A,T,C or G
agggagccgngnntnntatagatagcgtaccntgngncgaggcangcggatcagcgtccacccggactaccgtcaggatgagtcctacaattttgagggggacatcgccctgctggagctggaaaatagcgtcaccctggggcccaacctcctccccatctgcctccctgacaacgataccttctacgacctgcgcttgatgggctatgtcagcggcttccgggtcatggaggacaagattgctcatgacctcaaggttgtccgtctgcccgtagctaatccacaggcctgtgagaactggctccggggaaagaataggatggatgtgttctctcaaaacatggtctgtgctggacacccatctctaaagcaagacgcctgtcagggggatagtgggggcgtttttacagtaacggacccaaacactgatcgctgagtggcctctggcatcgagcactgaggcatagg

SEQ ID NO: 11737 - DNA, 481 bp, Homo sapiens
  misc_feature (1)...(481): n = A,T,C or G
nttcgagaccctagcctttgtggcggcattcaaacaggttaaaataattttgtggtatattaaagaaaggaagcatttggattcatgggaaaacaaagacttcttgaaattatgtattttcaaccagaaaacaataaaaatttagcttttttcctatatctgttattttattctgtaagagataatatagtacattttattttaattagtttttttaaatttccttaatgctaataaaactaaataatataaattttgatactggaaagagttattaaaacacatcattctctctcaaatccttatccctttagcagtaaacactggtgatgatgcagtgttttcctgtgcataaaaattcatgtaagcatatctgaatatcggcaatttttagttaacattcttatataactatgtccatgctttataagcttattttgttttcttcccgacttaatatcttggagacattttgtgttac

SEQ ID NO: 11738 - DNA, 464 bp, Homo sapiens
  misc_feature (1)...(464): n = A,T,C or G
gtgcgcgggganccaaggaaaccctccgactgangcctgcgnacaaacancgnnttaggntatttgcacataggatcaggagtaagatgaagacagattatcaaaaatatcaaccctatccttacctaatgattggaagaaaacagagtaacggcattcatagagtgaaaacagatactgccgaactgctggaagactgtgcaacacttcaagaatctctgctcctttaatgacctaggtattttaaaaaacatatatacaaaaaaaatgtacattttaatgatttgtgtatttaaacaaaaaaaacaagtctttaaatttgagtattaaagtttggtcattaccttttccctgagatctggtctttctaaggcaatcatactgacatagacagtataagtcacaaatgttttataatccatgagttcataggatgtaaatgttgaaacagtgtcaaggaaaag

SEQ ID NO: 11739 - DNA, 469 bp, Homo sapiens
  misc_feature (1)...(469): n = A,T,C or G
gggcgaggggggccgttgagnccatngccatgncagctncgtacagngcggnggaattcggcaaagggtagggcttcaactgaaataggtttttattattgcgataacagtgactgttaaaacaaaagtacaaggtcatcaaagtccctcccagaagttccacacaaaacatgcaatgaccaggatatgggcagactctgtggctgcgtttctatttcatattgaatttaggccgggcgtggtggctcatgcctgtattcccaacactttgggaggccaaggcaggcggatcacctgaggtcatgagtttgagtccagcctggccaacatggtgaaacctcatctctactaaaaatacaaaaatttgcagggcatggcagcgcacacctgtaattccagccgctcaggaggctgaggcaggagaatcgcttgaaccccagcctgggcaacagaacaagactccgtctan

SEQ ID NO: 11740 - DNA, 475 bp, Homo sapiens
aatcgtagacattagtccagttcgatggcattcgacaccgggttgattattttattgcttcaaaagcagtggactgtcttttggattcaaagtgggcacaggccaacaaaggagaggaagctttatttacaaccagggagtctgtggttgactactgcaacaggcttttaaagaagcagttttttcaccgagccctaaaagtaatgaaaatgaaatatgataaagacataatgaaagaaaactataaaggaaaagctgaaagtggaaaaaaacaagattaaaagagcaagaaagataatttcccggatgagaagacaaaaaatgattcagagaaacatcatgatggtgaaaaggaagaactcccaaaggaggaaactccatgaactcctatactgaaggagactaagataaaattcaaacttgagcacacatgatgatcaggtttttctggatggaaatgaggtgtatgtatgga

SEQ ID NO: 11741 - DNA, 466 bp, Homo sapiens
  misc_feature (1)...(466): n = A,T,C or G
gggcgaggggnnccaaggaaacctaagcctagccggctncgnanangcgnnggaattnggacactggtgagccatttttccatttcatacatcaagttggtttcatacatcgtgacatttcatccctagaaactgcgtcatgcatgcactaagactaaggacattttcttcaagaatcatagagcttttattacacttaagaaaattaacaaatgcattattataacatcttatatcctgtctaattttacatttcccccattgtcctaagaatgttctttacagttttttttaaaagccaggatccaatcagcgctcatactttacatttagctgttatgaaaatgacaacttttcttagctattagagattcaatatcagttattcaaggtctgctattatttctactgatttacagaatctctcacagttttcaagaaaagggcttaagtagcatttcttatg

SEQ ID NO: 11742 - DNA, 467 bp, Homo sapiens
  misc_feature (1)...(467): n = A,T,C or G
ggggggcgngnnnctttaggtagcgtccactaggccgngnggtggaattcgaaacgtgccttccatcataaatcagtccatttgtttacaactgtgttccaagcaggtttcataaagaaattcttaaccttagaacctcggatatcctctatgttttagttttcatttttttaaaatgcttcttaaaattcactaaattgggctaggtgtggctcatgcctgtggtcccagcactatgggaggctgaggtgagaggatcacttgagcccagaaggttgaaaccagcctgggcaacatggtgagaccccatctctacaaaaagttttaaaaccaggtatggtggtgccctcctgtggtcccagctactcgggagtctgaggtgggaggatcacctgagcccaggagactgaggctgcagtaaggtgtgattgcactattgctctctagcctggaaaacagagtgagac

SEQ ID NO: 11743 - DNA, 469 bp, Homo sapiens
  misc_feature (1)...(469): n = A,T,C or G
agggagcgcgnnntnnncccgaatagcgtatcnagtgtcgtggaattcgttaatttttacatagtatttgacactcatgcaaaataatgtgaaaacatctagatttagtagtttattctgcgccttttgttaaaactgaagattttggaaaatggttgtcactgctcttccagcctatgaatatttttgtgaaatggaaccatggatttatgtctggatcatccatacagaaccaacaattttattcaaaaacaatgtgttcatcaaagtaattgctcacattgtgcagtactatgttgtacagaccacgtgaaagggaatgctggtctagctggcgtggtatgtttataggcgaatttcagcagaaggaagccaaaatagttttttccttttgaaagttttttaaaaattatttcatgggtcttttttttaattaatatgtgtgcattgttacaatgtatgttggatg

SEQ ID NO: 11744 - DNA, 485 bp, Homo sapiens
  misc_feature (1)...(485): n = A,T,C or G
ntttcgaganccctagnccagtgttgaggaacactgccaaggaaagggggttagtacagaacacaatgaggctgggctcatacagtggctcacctgtaatcccagcactttgggaggccggggccggcggatcacgaggtcaggagatcgagaccatcctggctaacatggtgaaaccccgtctgtactaaaaatacaaaaaagttggccaggcgtggaggcaggcacctgtggtcccatgtgctcgggaggctgaggcaggaaaatgctgtgaacccgggaggcggagtttgcggtgagccgagattgcaccactgcactcaagcctgggtgatagagcaagactccatctcaaaaaaaaaagaaacacaatgaaatgtcaggggatgggtgcctataatttctaagggaaatagagtataatccaagaattttatagccaggtaaattattgcccaatcaaaataggcaaaagacactatcat

SEQ ID NO: 11745 - DNA, 462 bp, Homo sapiens
  misc_feature (1)...(462): n = A,T,C or G
cggggaannattgnattcgattaccattagtccangcggtggaattcgagaattcaaataaaaaaaacaaaaacaaaaacaaagaaacaaaccaaaactaaaatcagagcatcaatgagtcgtggaaaaatccgatcagtctaataaacacataactgaagcaacagtggccaaaaattttccaaattggattatggctataaacacacagatccaaaagaacctcaatgaatcccaagcacgagaaacatgaagaaaaccagactaaggcagaatcaaactttccagaagcaatgacaaagagaacatcttaaaataatagaaagaagacacattgtgcacagaggaacagtagtaaagatgacagcagatgtctcatcagaaataatgcaagtgaggagacagtggagaaacatgtttaaaatactgagaggctgtccacatagagcctatgcggactga

SEQ ID NO: 11746 - DNA, 468 bp, Homo sapiens
  misc_feature (1)...(468): n = A,T,C or G
attgaaaccccttgagaacctaggaagngcggnggaattcgctatacttgacattatactgcaaacaaaacttaaagagataagcattaaacctattgtgctgttaacaacgttagtggacacttgtaagtcaatcagtgttaaagtatttgtaaatagaagcaagctattattaacaacttttgtgtacttataatgttcacctaaaaatgttgtagcataattctgtgttttatggttgcttctgtccttctttttatttacctctttgttgttatttttgttgtttctttcagtgaggtgtttctgtgttagtagtctgtcttgacacacattgttcaaacaatctcaagcacttgtgtttaaaaaaggttctgaaatcttgcttctcatatgatagcttatgatgccggaattctgtaaacaataaagatgaaagaaaaaatgataactttatacaaaaaaggg

SEQ ID NO: 11747 - DNA, 446 bp, Homo sapiens
  misc_feature (1)...(446): n = A,T,C or G
nttggagaccctagtgcatgtcgtggaattcaatttttgtagctccctaacaaaaataggtattttaattgagatgatgttaaatgcattaacttagggagaactgatgctgctgcagtgatgtttggtcttgctagctaagaacatgctatgtctttatatttgctcaagccatgttttgtgtctttctggagtgctttcatggcttactcttgtagatactggatgttaccaattttaagcttatgcttaggtattttctgtatttttagacaattacgaaatattttataattgtaaatattttttacattatcttattctataattacggttttgtgtttgtacatatgaacactgatttttatctgtcgattttataatgtgccctttactaactatcttatagctcttccagatgtattcttgcatcatctgtaaattga

SEQ ID NO: 11748 - DNA, 467 bp, Homo sapiens
  misc_feature (1)...(467): n = A,T,C or G
catcgaaatcgatcccatgcgcangngcnggaanncgaaggatgtatttaaatgaatgctggtcagngggacattttgtcaactatgggtattgggtgcttaactgtctaatattgccatgtgaatgttgtatacgattgtaaggcttatgtcactaaagatttttattctgattttttcataatcaaaggtcatatgatactgtatagacaagctttgtagtgaagtatagtagcaataatttctgtacctgatcaagtttattgcagcctttcttttcctatttcttttttttaagggttagtattaaccaaagggcaatgagtagaaaagttaacatgaagattttagaaggagagaacttacaggacacagatttgtgattctttgactgtgacactattggatgtgattctaaaagcttttattgagcattgtcaaatttgtaagcttcatagggatggaca

SEQ ID NO: 11749 - DNA, 448 bp, Homo sapiens
  misc_feature (1)...(448): n = A,T,C or G
actgaagtcgttagcnctngcggnggaanncaaagtaaccttgaaaactaagttgtcactcatggtgaggtgagaggtcagacatgcctccttatatcctctccctcactaaccaggatcaggctttcttccctaaggcctaaacagaaaccagccctttcaaaagactccaccactgacatcaaccaactgcctgacactgcccctccttttttgcctaataagagactaccaagcatggagtggttcttgtcagtctgtggaggaggtactgtaaaggtttttgtgtcctctgcttcacccttttttttcctctgagacaaagagcctcactctgttgcccaggctagggtgcagtggcgtgatcatagctcattgcagcctcaaactcctgggctcaagcaatcctcccacctcggcctccagagtagctgggatgacaggctca

SEQ ID NO: 11750 - DNA, 486 bp, Homo sapiens
  misc_feature (1)...(486): n = A,T,C or G
aaaatttgagaccttnccatgtcgagaccatatgcagngnggnggaattcatcttaacctctgcaccaactgcatcttaagaattttccagcatataacaatacacaccaggaacaacaatagaaacttcaaactaatgattaaatagtgggctgctgatcccttcttatatactgcaagaataacacttaataaaggatgaagaaagatttgtactgagtctaataaagaaaatttcaacgactggttttgttttggtttggttttctgaaacataatttcccaatgcacaaaaaagcactgagcaaattgttgagttatggatataattaagttaggtttctcttatgcacaaataatagctttcctagtcatttatactaaaaatcaccacgaatttcacaagatctaagtgatcaacattgaaagtggaaagattgctttgccaggattcttatggaacctcttgctctgctgttactcaga

SEQ ID NO: 11751 - DNA, 472 bp, Homo sapiens
catggagaccctaggattgagggcgtttgcgaagagggacgggtcccgcggcgagcgagctcctgagcataagctgtggccatgactactgaagtaggctctgtgtctgaagtgaagaaggactctagccagttaggaacagatgcaaccaaggaaaaacctaaagaagtagcagaaaatcagcagaatcagtcttccgatccagaggaggaaaaaggttcccagccacctcctgcagctgaaagccaaagtagtctacgccgccagaagagagagaaggaaacatcggagagcaggggtatttctcggttcataccgccatggcttaagaagcaaaagtcatataccttagtagtggccaaagatggaggagataaaaaagagcctacccaagctgttgttgaagaacaggtcttagataaagaggaaccccttccagaagaacagagacaggctaagggtgatgctgaag

SEQ ID NO: 11752 - DNA, 520 bp, Homo sapiens
ttcttcctaattttttatatttccttacaattttgggggccattaatttaactttaggcttttgggcatatgctagtctgagcttccgaaaagatacatatatgtttcccttttcattagctgaatgaggatattttaagaagttgaaagagaatttattttcaagttgtgagtaaatcctcctttgaaattcacctgattattagataacttaaagtttatttttaaaagctgacaactttttatgaatcttcgagttgacagttcctaaaagcgtaactcagatattaatgggctgtgtattaaatggttttattttcagttttgcagcacagaacactgttgaaatatccatatcaacttgatttttttaacctaattcaggtgtcctttgcatctcttaaatgttgggggtgggggtcagagccagttatccggcttctgttttgtcgattgcttagatttgttcctgttggcaaaactgttacccccaaaatgggtgtgacacatgctcatgcat

SEQ ID NO: 11753 - DNA, 479 bp, Homo sapiens
aaaaattgaaccctatccaggtggggaacctatgcatagctgcagaaaccatgataggtagaggacttttcttttggttttgttttgttttgttttgttttgtttttggttttacagagaagagatttttattacaaagaaaaaaattccagtgaattgtgcagaaatgctggtttttacaccatcctaaagaaaaactttacaagggtgttttggagtagaaaaaaggttataaagttggaatcttaaattgtaaaattaaccattgagtgtcaaagttctaaaagcagaactcattttgtgcaatgaacataaggaaagactactgtataggttttttttttttctccttttaaatgaaaaaaagctttgcttaagggttgcatacttttattggagtaaatctgaatgatcctactcctttggagtaaaactagggcttaccagtttccaattgtatttagcttctggttggaatt

SEQ ID NO: 11754 - DNA, 420 bp, Homo sapiens
ccggctcgaacagaggcccgggtttccacgggagacagcagagccacggtgtagcaggcatccagctctcccccgatcagttccgtgacttgtcggaaggccctccctcccggtcagacgaagaaaggactggtggcctctggggatcctgagcctgtctccatgggaaccagctcacccaccccctctctggcaccagaacattcttccagagcttcactggagccttcctcttcagcatgaccgtccctggccacctgatccagagctggcggctcccaggcatagcccatccctgctgcggctctgcactgccccagtcctcacctgcatgcaggggactattcacatgctgaccgtctgtccatctcccgtaagaacgtcggctccttccacgtctgctgggcgtggaggatccct

SEQ ID NO: 11755 - DNA, 501 bp, Homo sapiens
  misc_feature (1)...(501): n = A,T,C or G
tggaagcccccncagaggggncctagaaaactgacaacntcggcnagagngcnggaattcatccgctccctgtggcgcggcaatggtattaatgtactcaagattgcccccgagtcagctatcaagttcatggcctatgaacagatcaagagggccatcctggggcagcaggagacactgcatgtgcaggagcgcttcgtggctggctccctggctggtgccacagcccaaaccatcatttaccctatggaggtgagaaggagggaccccagcggaggccccatggcagggtggggggcctgctgtacccatctcactctgcatttcacaatatccattgggattttacctttgtccctctctgatttggagtatagctcatcagagtaatgcaatttcatgtgtagcctgtctgggtattacaactgagatataatttctggggaaggtagtgtcggctatccttggttggatggtagtcataggagccagctgtttata

SEQ ID NO: 11756 - DNA, 451 bp, Homo sapiens
  misc_feature (1)...(451): n = A,T,C or G
ntagaatttaatgnccctcannnannnnnnnaattcggagtttcggtccagcctggccaatatggtgaaaccccgtctctactataaaaataaaaaatacaaaaattaccccggcgggggggggggtgcctgtagtctgggctactcaggaggctgaggcaggaaagtcgcttgaacccgggaggcaaaggttgcagtgagccgaaatcgtgccactgcaatccagcctgggcgacagagcgagactgtctcaaaaaaaaaaaaaaaacctgggggaaggggggcttgtttgaatccccaggtctttggaaggttagggttggggggccagggacctaaaatcgccccaaattcctcccccctggataataaagggaaactccttttaaaaaaaaagttttttgggccggggggagggttcccccttataaaccccggggcggttttggtg

SEQ ID NO: 11757 - DNA, 519 bp, Homo sapiens
  misc_feature (1)...(519): n = A,T,C or G
cctgcctaaaatcttaggtcatacacagaagagactccaatcgacaagaagctggaaaagaatgatgttgtccttaaacaacctacagaatatcatctataacccggtaatcccgtttgttggcaccattcctgatcagctggatcctggaactttgattgtgatacgtgggcatgttcctagtgacgcagacagattccaggtggatctgcagaatggcagcagcatgaaacctcgagccgatgtggcctttcatttcaatcctcgtttcaaaagggccggctgcattgtttgcaatactttgataaatgaaaaatggggacgggaagagatcacctatgacacgcctttcaaaagagaaaagtcttttgagatcgtgattatggtgctgaaggacaaattccaggtggctgtaaatggaaaacatactctgctctatggccacaggatcggcccagagaanatagacactctgtgcatttatggcaaagtgaatattcactcattgggtntagcttc

SEQ ID NO: 11758 - DNA, 418 bp, Homo sapiens
ccctgctaacgggaatgctaatgaggaaaatggggagcaggaggctgacattgaggtatacgaagaagaggaagaaggtggggaggaagaggaggaggaagaagaaggtgatggtgaggaagaggatggagatgaagatgaggaagctgagtcagctacgggcaagcgggcagctgaagatgatgaggatgacgatgtcgataccaagaagcagaagaccgacgaggatgactagacagcaaaaaaggaaaagttaaactaaaaaaaaaaaggccgccgtgacctattcaccctccacttcccgtctcagaatctaaacgtggtcaccttcgagtagagaggcccgcccgcccaccgtgggcagtgccacccgcagatgacacgcgctctccaccacccaacccaaaccatgagaatt

SEQ ID NO: 11759 - DNA, 412 bp, Homo sapiens
  misc_feature (1)...(412): n = A,T,C or G
gtttgagggctcaaaggctcttcccactgcttgttactgtgttgcttcccactcccccttgaccccaggcccctgcttctccctctaggagcctaaagaaccctcctggcctccagctcagccttctctcacctactatgtctgtccaacaggtctgcatgggtccctgataatgagaacagctgcctggtcttctctcccagtctgcctagcccagccctgggactggaatttgagtaggggatgaggggaaattgtaatttcattccttaacttccttttccccacccctgctcttcaacctctttatcagttctgaggctggagggtttgggcaaggcaacatccccattccaattccattttctgatgcagattttagctgagggatttggaagccatttggggaggn

SEQ ID NO: 11760 - DNA, 485 bp, Homo sapiens
  misc_feature (1)...(485): n = A,T,C or G
cctgaccncctcnatgagnaacctagtacagngcggaggaattcgncaaaagacaacaaagcactgtgtggctgaataagcggtggtcatgatttcttttattctttgcacaacaacaacaacaacaaattcacggaatcttttaagtgctgaacttatttttcaaccatttcacaaggaggacaagttgaatggacctttttaaaaagaaaaaaaaaatggaaggaaaactaagaatgatcatcttcccagggtgttctcttacttggactgtgatattcgttatttataaaaaagacttttaaatgccctttctgcagttggaaggttttctttatatactattcccaccatggggagcgaaaacgttaaaatcacaaggaattgcccaatctaagcagactttgccttttttcaaaggtggagcgtgaataccagaaggatccagtattcagtcacttaaaagaagtcttttggacagaaat

SEQ ID NO: 11761 - DNA, 479 bp, Homo sapiens
  misc_feature (1)...(479): n = A,T,C or G
cctgagaacactgtgagtgacgcggaattcgngtcttcctggaaaccctgtcaaaggccttaccgcctgcctggagaaacacagagcctgcccttggcaaatatatgttggtgtatctgaaaaacagctcctggaagctttttctcattcaggctttaagggttaccccatctttccttatgtgtgtaatattggagaatgtacactctcactgaactggggatgtttgacttaaaatgatggacaataagatagtgagcagtaagtgtgctctaggctaggctacgagaggccatgagctcctcatctcttctctgttctgagctctctgatccactgcacttggggcagggggtgcattctctgtgcctctcctgagtctactttctgcatcattggttctcccagctcacttccataatgtcctcctaggctgcattggaattgtgtgttggctacacccatggccaagactgtct

SEQ ID NO: 11762 - DNA, 469 bp, Homo sapiens
  misc_feature (1)...(469): n = A,T,C or G
ctttgacatccatanccatacgcagngngcnggaattcggcatgctttcagatacagacccctttaaggtatcatagttggcttatagaaataatataagctcttcgaacaagctggccttacacctcttctacacagttcctgtgcaggttccttacctgtggtaagtaaagaattccactttctgacaggccaaggagcccaagttttttgtaacctgggggtgttttgctgaaagatttactttcatcataggtttgaggattcatgagcaaaagaaaccacaatattacactcaaatgcagttaggagaaaagtttaatgattaatgtagtaaaacagtataatggtaaacttagcaaaggctaaagtgggagaaaaggaaaatatgtacgtatatacacatatatattcaccaagttcgggaggatacctacatccagatcaagcagtgctgggaagttccaan

SEQ ID NO: 11763 - DNA, 467 bp, Homo sapiens
  misc_feature (1)...(467): n = A,T,C or G
tgcgcggcgngnnttttncaaccgttcnagcatngcatngngcnggacnncgccgggtccgcaccaactgtctccccctcccagcttcttacctcggcttcctactcctttccccgcccgcccagcaccgccagcccgggagagctgccgggagttccccgggagcctcaggtggtgactatcctgttgagaagcaaaagatactttgcaagtaaaaaatatgcctcccaagtttaagcgccacctcaatgatgatgatgtcacaggttctgtgaaaagtgaaaggagaaatcttttggaagatgattcagatgaagaagaggacttttttctaccgcagttgaccatgggtaactgaaactgtggaaagcaaaaccatgggtgagagagagcttactgtaccgtgtacctgtgacatcatcaccaaaatcaaataatgaaccatctgtcgccctgcaagtttcctc

SEQ ID NO: 11764 - DNA, 417 bp, Homo sapiens
attctaccatggcggctgggaccctgtacacgtatcctgaaaactggagggccttcaaggctctcatcgctgctcagtacagcggggctcaggtccgcgtgctctccgcaccaccccacttccattttggccaaaccaaccgcacccctgaatttctccgcaaatttcctgccggcaaggtcccagcatttgagggtgatgatggattctgtgtgtttgagagcaacgccattgcctactatgtgagcaatgaggagctgcggggaagtactccagaggcagcagcccaggtggtgcagtgggtgagctttgctgattccgatatagtgcccccagccagtacctgggtgttccccaccttgggcatcatgcaccacaacaaacaggccactgagaatgcaaaggaggaagtgaggg

SEQ ID NO: 11765 - DNA, 448 bp, Homo sapiens
  misc_feature (1)...(448): n = A,T,C or G
attgcagacccctttactgatacacttgcagnggcnggaannctcgnatttacaaatttaccctgaatcctataacttcatgacccccttttacatggaatttctgttacagtccctcgcgataggcttgcttgggctcaaatccttcttaaatgaagagctgggctctgaggttttgaacctactgacaaataaacagtatgagttgctttcaaagaaccttcgcaagaccagagagtagtttgttcatggcttacctggatcagggaagactatcttggctcttaggatcatggagaagatcaggaatgtgtttcactgtgaaccggctaacattctctacatctgtgaaaaccaacccctgaagaagttggcgagtttcagcaagaaaaacatctgccagccagtgacccggataaccttcatgaaaaaccacttttgacacatg

SEQ ID NO: 11766 - DNA, 452 bp, Homo sapiens
ctccacaaaaaattttaaaaagtgggtgaatgtggtggtgtgtgcctacagtcctagctgcttgggaggctgaggcaggaggatcgcttgagtccaggagttcgaggatgcagtgagctatgatcatgtcactgtactccagcctgggtgacagagcgagatcctgtttcttaaaaataaataaataacgcaattgggttttagctggaaaaaagcagtgaaggaggagggaacctatgactctcatgctccaagatgacgtgcctggtagctgccagatgttcacatgcctgagggtttgttttatttgcagaatgttttagctggtgccttgtttgggccatggctggggcttctgctgtgctgtgtgttgacctcggtgggtgccacatgctgctacctgctctccagtatttttggcaaacagttggtggtgtcctactttcctgata

SEQ ID NO: 11767 - DNA, 418 bp, Homo sapiens
  misc_feature (1)...(418): n = A,T,C or G
tagtactagaaaggaaggaagtgtttaaacacacacacaaaatgataggggcatgtcataggggcataggagccaactaacagaactcctaataaccatagctggaagaatttgagcaacgaaataaatgacatagtgttggattataatccaaagtataaaacaaatatctgcgagtccatattgatatattaataagtaaatgattgaaaaagtcagtaagtgaggagaagagacacatctccagtgcagaattccaaataatttatatggatactctaccctcaaaaagctggaacatacttcccactccttaagtgtaggctatgcatagccttttacagtatgttaagatgggaaaaagaataactatagtggaaaaacttgacaaacaccacctcagccaggtgatcagatn

SEQ ID NO: 11768 - DNA, 414 bp, Homo sapiens
cttggtccagcttcttccaggtctgcgcgtctgttgttcccagcgctctgcgaagcctgaaaaggaggagcaacctgtccagaatccccgcaggacaggaaaaggaggggaaatctcgacatggaaaaactctacagtgaaaatgaaggaatggcttcaaaccaaggaaagatggaaaatgaagaacagccacaagacgagagaaagccagaagtaacttgtactctggaagacaagaagttagaaaacgagggaaagacagaaaacaagggcaaaacaggagatgaggaaatgttaaaggataaaggaaagccagagagtgagggagaggcaaaagaaggaaagtcagagagggagggagagtcagagatggagggaggatcagagagagagggaaaaccagagatagagggt

SEQ ID NO: 11769 - DNA, 418 bp, Homo sapiens
attccgtccaagccggtccacctcacagccttcctgggatacaaggctggcatgactcacatcgtgcgggaagtcgacaggccgggatccaaggtgaacaagaaggaggtggtggaggctgtgaccattgtagagacaccacccatggtggttgtgggcattgtgggctacgtggaaacccctcgaggcctccggaccttcaagactgtctttgctgagcacatcagtgatgaatgcaagaggcgtttctataagaattggcataaatctaagaagaaggcctttaccaagtactgcaagaaatggcaggatgaggatggcaagaagcagctggagaaggacttcagcagcatgaagaagtactgccaagtcatccgtgtcattgcccacacccagatgcgcctgcttcctctgcgcc

SEQ ID NO: 11770 - DNA, 491 bp, Homo sapiens
  misc_feature (1)...(491): n = A,T,C or G
nttgacaatgatnacactaggccagngcggtggaattcgttaaagccgcttgaatgcagcatgcacattcatgtaaacagacaatcagggtaggcctagaataaccacaaaaattctattggccttactgcagccacctatatgtagaacaatggaggagatagtttgtggttcattattgtaccctgtttcatccattagcatcagaatctctctttcaggtcatttattaaatatgattgaaatgtttaaaagttcctgaacatgattcatgatgattaaaatatcatacaactgataaaagactttaagaactttatatatttcctgttgcctcaaaatgtaacagaaattattcttagagctttgattttagctatcctaattactgcaaataaatatttgttcttatagttttaaatcaaaaagaaaagtcttgttataaaaccttaagcttgaaatcatattaataaaatatattgtacatagtg

SEQ ID NO: 11771 - DNA, 484 bp, Homo sapiens
  misc_feature (1)...(484): n = A,T,C or G
cttttgagaacactggttgatgagcgggaattcaaagcttacctacataaaatttcaatgttttgacacttaattgttgtttggcacaatagtatggaagtaattcaaactggtaaatagtttcctctcatatctcgggtatatatacataccatattttattgatccagagatacttatttcactttgtgacatctctgaattaggatgcatcttacaactgatggcttattaggtttaatgaaatacagaagatacacagtataaaaagggttttcctgtggttggtttgtggtttgtgataggtgttctgtgatgtttatgctttgaaggccttaagactcatggttgcaaccatggaagcaaaatgaaatttttagctcttaacctaacaacctgaccatgtttatccatttttattgtttagaagtttatttactgatacttggcggagggtgtgtgaattanttaaattttaaatgtg

SEQ ID NO: 11772 - DNA, 487 bp, Homo sapiens
  misc_feature (1)...(487): n = A,T,C or G
ccctgagcaaccctcttttgagagcactagncagngcggnggaattcccggaaaggcgtttgggatgccaacgatgaagctgctgtcatttgtggtgttggctctatttgctgtcactcaagcagaggaaggagccaggcttttggcttccaaatcactgctgaacagatacgccgtggagggacgagacctgaccttgcagtacaacatctacaatgttggctcaagtgctgcattagacgtggaactatctgatgattccttccctccagaaaactttggcattgggtctggaatgctcaatgtcaaatgggaccggattgcccctgctagcaatgtctcccacactgtggtcctgcgccctctcaaggctggttatttcaacttcacctcggcaacaattacttacctggcccaggaggatgggcccgttgtgattggctctaccaatgcacctggacagggaggaatcctggctcagcgggag

SEQ ID NO: 11773 - DNA, 457 bp, Homo sapiens
ttttaatacgagaccattagtccactgcggtggaattcaaaaatcaataatatgagctgatacctaattttattttaggagaagaaaaataaaatagttgatgtgtgtttcagtgttgcctaaatgtttgaagaatcaaataaagaaaaatatattattttattagtgttagaatatcaaaatcttaggcttttatagtttagcacttgattttttaattgtatttttttcattgttttgttaaatattattttgtagactgtcaagtccttgtggacaaaattttgtcttaaactttttgtatttcttaagagtactgaagaattcattttaattaacaggataaaatatggtcttgtattcttaaaaagaaacaattttttctatatttactttgcctcatcttatggatcatgatacagactaaacacaggaaaatggttatttctgtgattag

SEQ ID NO: 11774 - DNA, 471 bp, Homo sapiens
  misc_feature (1)...(471): n = A,T,C or G
attcgaaaacatcttgagaacctatgnaagngcggnggaattccgggagcgcagccgccagctccggaaggcgcgggaccccaggacccggtcccaggctttctttgaccctggcgcactgtcctaacgcctggaaaatggtttccgctagtgggacatcattttttaagggtatgttgcttgggagcatttcctgggttttgataactatgtttggccaaattcacattcgacacagaggtcagactcaagaccacgagcaccatcaccttcgtccacctaacaggaacgatttcttaaacacttcaaaagtgatactcttggagctcagtaaaagtattcgtgttttctgtatcatctttggagaatccgaagatgagagttactgggctgtactgaaagagacctggaccaaacactgtgacaaagcagagctctacgatactaaaaatgataatttgttcaatataa

SEQ ID NO: 11775 - DNA, 454 bp, Homo sapiens
  misc_feature (1)...(454): n = A,T,C or G
gattgantccccattgacgacccctagtccatgtggtggaattccgcgctgtaagaagcaacaacctctcctcttcgtctccgccatcagctcggcagtcgcgaagcagcaaccatgcgtgagtgcatctccatccacgttggccaggctggtgtccagattggcaatgcctgctgggagctctactgcctggaacacggcatccagcccgatggccagatgccaagtgacaagaccattgggggaggagatgattccttcaacaccttcttcagtgagacgggggctggcaagcatgtgccccgggcagtgtttgtagacttggaacccacagtcattgatgaagttcgcactggcacctaccgccagctcttccaccctgagcaacttatcacaggcaaagaagatgctgccaataactatgcccgagggcactacaccattggcaaggagg

SEQ ID NO: 11776 - DNA, 456 bp, Homo sapiens
  misc_feature (1)...(456): n = A,T,C or G
ntcgannnccattgtaggacctctatccatgtggtggaattcattagaaaataagagcagcagatcaaactgacctgctggcactcgactgttgagtccactgaccagccctaccaatggcaatgtttgtgcttcatatggaatgaaaaaaacaagttgttgaaagatataaacaacacggtgttacctattgaatacaggatgtatatcaaacacggaatgaaaagatacggaccaaatccttgatagctgttgcttctggtgaatgggaatgagactggggaaggtgtgggagggaacacagatgacctcaatttcattagcatcatttgtgtaaaaaaaaaaaccaaaaaggtaaatattacaaaatgctaacatttgttaattctgaatgataaatgcacaggtgtttgttaaattagctttcatacattattttccaaattaaaaaaaaag

SEQ ID NO: 11777 - DNA, 432 bp, Homo sapiens
  misc_feature (1)...(432): n = A,T,C or G
aaaaaagtcganacccttatcgagtccctattcagtgtggtggaattcgcgcaggccaagcaatggggctggacacaaggtcggtggcccaaaaagagtgctgaatttttgctgcacatgcttaaaaacgcagagagtaatgctgaacttaagggtttagatgtagattctctggtcattgagcatatccaagtgaacaaagcacctaagatgcgccgccggacctacagagctcatggtcggattaacccatacatgagctctccctgccacattgagatgatccttacggaaaaggaacagattgttcctaaaccagaagaggaggttgcccagaagaaaaagatatcccagaagaaactgaagaaacaaaaacttatggcacgggagtaaattcagcattaaaataaatgtaaaaaaaaaaaaaaaaaa

SEQ ID NO: 11778 - DNA, 454 bp, Homo sapiens
  misc_feature (1)...(454): n = A,T,C or G
ttttnctggagacctttggacagcgctgtggaattccgggatgcggtttaatattttcatgtgattcctaaaagaatctgaggctcaagattagagggcatcttaatatcctgcactttcagtcattgagggcatgatcacaaagatcaaagccatttttaggcagtgcacctatgatatgtgttttagaaatagccgttaaactttggtttgaatgaagaatgtctctcaatccacctatatttctcaaacgaagtgaagaaaatagttcaaaatttgtggaaacaaaacagtcacaaactacttccatagcttcagaagatccccttcaaaacttatgtttagcatctcaagaagttcttcaaaaagctcagcaaagtgggagatcaaaatgtctcaaatgtggtggttccagaatgttctactgctatacatgttatgttccagatgaaan

SEQ ID NO: 11779 - DNA, 443 bp, Homo sapiens
  misc_feature (1)...(443): n = A,T,C or G
gtggccttaacccagggaaactgatngcngngaaancnnannaanagggtgatagccatgtagcattatttgacggattggtttccaaaggagataaaattgtatctgcacatactcaaaagacatacgaagttaatgaagtaggagtcttgaatcctaatgagcagccaactcataaattgaatgtatcctctagaccaatctgaatataacaatctgaagagtgctatagaaaaactgactttaaatgattccagtgtgaccgttcattgggatagtagccttgctctgggtgctggctggaggctaggatttcttggacttttgcacatggaagttttcaaccagcgactggagcaagaatataatgcttctgttattttaacaacccctactgttccatataaagctgtactgtcatcatcaaaattgataaaggaacc

SEQ ID NO: 11780 - DNA, 483 bp, Homo sapiens
  misc_feature (1)...(483): n = A,T,C or G
cctttgatgaccctatttgttggcggtaatntcgggcttgaagtcatatttaaggaaaactaggagctaacggcagataaaaggaggtggggtggtgattggaggagaaataagtctttatccagagatggccctgtgctatgcagtggctaagtctttcctagtatcacccaaagtaggacagtgggtggataagacgtggactcagctgcgtgtggtggctcatgcctgtaatctcancactttgggaggctgaggcgggtggatcacctgaaatcaggagttcaagaccagcctggccatcatggtgaaaccctatctctactaaaaatacaaaaattagccgggcatgatggtgggtgcctgtaatcccagctactcggggggctgagatgggaaaattgcttgaacctgggggacaggttgcagtgagctgagattgtgccatttcactccagcctgggtgactgagtgagactccat

SEQ ID NO: 11781 - DNA, 412 bp, Homo sapiens
atgcaatgagccaagatcacaccactgcactccagccttggcgacagagggagactctgtctcaaaaaaaaaaaaaaagggggggcccggccccttaccctttgccttgtccccgcccaaaaacccaaattagggggggggtttccttatcacacaaaaaaaaggctagggctacccaaggacccttttgttttaaaggaaaaaaaaaaccgggggtccttttggcctttcccagggacatttgttttttaaccattttttttttagggaggaacccaagggggctgggtaaaaaccctaaaaaaagggttttttttattctggggggagtggggaggggtcacattcccagcccccccttggaagggctttgggggacctgggaacaaggttttttttactacatagggcg

SEQ ID NO: 11782 - DNA, 470 bp, Homo sapiens
  misc_feature (1)...(470): n = A,T,C or G
catcgacgacatttngaagagcgtcggaacncgacaggaaaaagggaaaaaataacagcatatgtcaaagaaatacaaaataggcatgtgttacgactttaacagaaattatagaaaaacacttttagttaaatacctttacgttgttacaacagaactgatgaaaccataactttcgtagataactgagaattatgactatatcctttgcttcaatacttttgctctaaaatatgaccataagtaaaacatatgtacataaattctttccatgaacagcttgattccagaaaaccaaacatattttagatatatcttgactaaatactgaactatttcagtgccttcagttacaatgtgttgctcacactggcaccaagtggagactgataatctaaaagaatagcattaagtgttattcanactggtccataaacattctcagtggttcttaggttctcacatttgag

SEQ ID NO: 11783 - DNA, 493 bp, Homo sapiens
  misc_feature (1)...(493): n = A,T,C or G
gagagggcccnaatgaggacctatggaggatcctagcgaagngcggcggaanncggacaatactccagttcctgaccaactatttctacgatgtggaggctctgagggattacttgctccaaagggagatgtacaaggtgcatgagaaaaatcggtttcgagacaaggagtggatcacgccagataagtatggccatttctctcaagagttctggaatttctgtgaagtgcctgtcgaagctgtggatgccggtgactgtgacatcaactacgagggcctggataacctcctccgcctgaaggagctccagtccttgtcgctgcagcgctgctcccacgtggacgactggtgtctcagccgcctctacccactggccgactcgttgcaagagctctcgctggccggatgcccccgcatctccgaacggggcctcgcctgcctccaccacctccaaaacctccgcaggctggacatctcggacctccctggcgt

SEQ ID NO: 11784 - DNA, 477 bp, Homo sapiens
  misc_feature (1)...(477): n = A,T,C or G
cccccccattgangaccattagnnaatggagttccttagtccgcgtggtggagttcaaatacgtacaccagaaacacagtcgcttattgtcaagtattgtgtactgtacataattgtatgtgctattcttttatatgactgagagcacagtaggtttgttcacaccagcattacgagcccaaacgtgaggaatgcattgggctaagatcgctaaacaatagtaatttttcagctccattataatctgaccacctggaccaaaacattgtcatgcatgactaaattgttctcttttattagttattttttacagtgcctactttataaattaaactttatcataggtatgtataaagaaaaacatagtatatgtagggttccttgctttccgtggctttaggcatccactgggggtcttggaacatatccctctcagataagaggggactactataattatagcacactgacaggtcc

SEQ ID NO: 11785 - DNA, 467 bp, Homo sapiens
  misc_feature (1)...(467): n = A,T,C or G
gaaacgaaaannnnnngtnnngttgannccctnntanacctgagaccatagtccatgtcgtggaattcgatcatgccactgcattccagcctgggcgaaaatgccactaatatcacttacataatattaatatatatttgaagtaggggaaaacctggaagattcctcaccaaagttttgacagtgactccagagactgggataactttgtgactttcatttcctcttaaatgttgtgccagggtctgaccggcagacccaggctgcacgatggatgaataatgtactcagacaccgatattcagtgaaagagtgcaccagagggccaggccactcacagaaagggttgtggcagctgcgtgccctgactatctggccctgtgggcctttattcagcacagatttaatgacaaaggctttgagtcaacacacctgtgggtaattaatctggtcgcagtcccccggan

SEQ ID NO: 11786 - DNA, 484 bp, Homo sapiens
  misc_feature (1)...(484): n = A,T,C or G
nntttgaganccctattccagngttgtggaaccccggccaggttgactttaaagtaaaaagtttaagtggaatttttagggttatatgtaattattttataatacatagacaattaggttatctaccttagtagtaaggatctaccttttattatttgtgccatagcccaggctgcagtacagcggcgcaactcactgtagcctgtatctcccaggctcaatcctcccacctcagcttcctgaatggctgggattacaggcacatgccaccacacccagttaatttttgtattttttgtagagatagggttgtgccatgttgcccaggctggtctcaaactcctgggttcaagccatctgcctgcctcccaaagtgcaagatctaccttttaaaatcatgttatttatctgttggaggacacggttctaacaattaacagttctatctttatggaacagcttttcacctgagtcaactatggat

SEQ ID NO: 11787 - DNA, 471 bp, Homo sapiens
  misc_feature (1)...(471): n = A,T,C or G
attggacacatattgtagacatctagaccangcggnggaattcctaagcagcccttctgcctatgcctcccagagtgctgggattacaagtgtcagccaccacacctggcctaccttttattgttatatggctcatgctgaagattcggttatggaccatcatttccggaagccagcaaatgatataacgtctcagctggagatcaattttggagaccttggccgcccaggacgtggcggcaggggaggacgaggtggacgtgggcgtggtgggcgcccaaaccgtggcagcaggaccgacaagtcaagtgcttctgctcctgatgtggatgacccagaggcattcccagctctggcttaactggatgccataagacaaccctggttcctttgtgaacccttctgttcanagcttttgcatggcttaggattccaaacgactaaaaaagtacaaaaaaaatgactgcattt

SEQ ID NO: 11788 - DNA, 467 bp, Homo sapiens
  misc_feature (1)...(467): n = A,T,C or G
nattgtagaccactagtccgtgggaggccattcgttctgctgtgttctctggccaccttggatgatatataaaaatacaggaaatagataaacatgaatgtgattaataatgctgaaaaagtattagcctaccaaagacacactcaggctttagtgaataactttacataacctcagtttttaacacatgcatatcttctccaaccatgaaatcaaagcacggtgcagaacttgtaccaagtacaaaaggtccatgtatgattagcattattttcttttgcttttgtttatggacaatgttcagctgacataagcagaagttggccaaaatactgcctgtactgttaatttcctgtataattcacttaaataaaagcaggttaacctcaatgatagcagttaaaatgttctatcttatgtatttcttttaagtattaccattatggngctactgagcgttttctttt

SEQ ID NO: 11789 - DNA, 466 bp, Homo sapiens
  misc_feature (1)...(466): n = A,T,C or G
attgctgatgacttagacangcggggaaaactaataccatcggaggngccngggacagcgtacctggagggatgcaagacttcaattaccttagcagcaactgttttgagatcaccgtggagcttagctgtgagaagttcccacctgaagagactctgaagacctactgggaggataacaaaaactccctcattagctaccttgagcagatacaccgaggagttaaaggatttgtccgagaccttcaaggtaacccaattgcgaatgccaccatctccgtggaaggaatagaccacgatgttacatccgcaaaggatggtgattactggagattgcttatacctggaaactataaacttacagcctcagctccaggctatctggcaataacaaagaaagtggcagttccttacagccctgctgctggggttgattttgaactggagtcattttctgaaaggaaaga

SEQ ID NO: 11790 - DNA, 472 bp, Homo sapiens
  misc_feature (1)...(472): n = A,T,C or G
cttcgtagacattttgaagagcgttggaantccgccgggaacaggaatttcttcacatggctcctggagaagtgaccatcacagttcgcctcatccgttcctttgaacatcgcaatttcaaacctgtagtgtatcacggagtgaatttggaccaaactgtaaaggaatttatcgtatttctaaagcaagatgtccctttaaggaccaacctgccaccaccattcagaaattataaatatgatgcactaaagattattcatcaagcacataaatcaaagacaaatgaacttgtgttgagtttggaagatgacgaaagactcctgctgaaagaagacagcactctgaaagcagctggaatcgccagtgaaactgaaattgcattcttctgtgaagaagattataagaactacaaagctaatcccatttcatcctggtgaaaacatctcgagggcttcctttatgcatacctgtt

SEQ ID NO: 11791 - DNA, 449 bp, Homo sapiens
  misc_feature (1)...(449): n = A,T,C or G
attcttaatgaaaccttantntgaggcccgtagnacgcgcctnctccgcaccagggaagccccacccaccagaagccaagatgtccagcaagcggtttcaaagccaataccaccaagaagcggccacagcgggccacatccaatgtcttcgcaatgtttgaccagtcccagatccaggagtttaaggaggctttcaacatgattgaccagaaccgtgatggcttcattgacaaggaggacctgcacgacatgctggcctcgctggggaagaaccccacagacgaatacctggagggcatgatgagcgaggccccggggcccatcaacttcaccatgttcctcaccatgtttggggagaagctgaacggcacggaccccgaggatgtgattcgcaacgcctttgcctgcttcgacgaggaagcctcaggtttcatccatgaggaccacct

SEQ ID NO: 11792 - DNA, 476 bp, Homo sapiens
  misc_feature (1)...(476): n = A,T,C or G
cgccccccccagngannnaatgagaccctaatcganggtgtagaacgnccactattggccgtacttgatgatggaagcgagagtgaggtggtgactgctgtcgggaccacacttgacagtttttggacagaaccagctacaaccatagtgcctaccacatctgtgacttcagttttccagacgggaatcagaaacctagttgtaggtgatgaaactacttctagcctgcgggtaaaatgggacatttctgacagcgatgtgcagcagtttagggtgacctacatgacagctcaaggggaccctgaggaagaagtcataggaacggttatggtgcctggaagccagaacaacctccttctgaagcctctgcttcctgatactgaatacaaagtcacagtgactcccatctacacggatggcgaaggcgtcagcgtctccgctcctggaaaaaccttaccatcctcggggccccagaa

SEQ ID NO: 11793 - DNA, 476 bp, Homo sapiens
  misc_feature (1)...(476): n = A,T,C or G
gccccccattgtagatccctagnccaattgagngccattcccacantactgggatggatgactggtatggaggtacaaacaggtacttcaggcaagtggcatctgaatttgtattaaagatttcttttgttgattgttccaaaatcaaattactagaggcagcaattacaccagaaaccaagcttgtttggatcgaaacccccacaaaccccacccagaaggtgattgacattgaaggctgtgcacatattgtccataagcatggagacattattttggtcgtggataacacttttatgtcaccatatttccagcgccctttggctctgggagctgatatttctatgtattctgcaacaaaatacatgaatggccacagtgatgttgtaatgggcctggtgtctgttaattgtgaaagccttcataatagacttcgtttcttgcaaaactctcttggagcagttccatctcctatn

SEQ ID NO: 11794 - DNA, 473 bp, Homo sapiens
  misc_feature (1)...(473): n = A,T,C or G
aatgatgaccatctgnncgatggaggccatctagacatgtggtggaaggatgactggcgtggagtgtgcacatcggtgctctaggctctgtggcgcattccaaccttacagcctgcgacctgcggagaaaaaaaattacttattttcttgccccatacataccttgaggcgagcaaaaaaaattaaattttaaccatgagggaaatcgtgcacatacaggctggtcagtgtggcaaccagatcggtgccaagttctgggaggtgatcactgatgaacatggcatcaaccccaccggtacctatcactgggacagcgacctgcatctggaccgcatctctgtgtactataatgaagccacaggtggcaaatatgatcctcgtgccatcctggtggatatagaacctgggaccatggactctgttcgctcaggtccttttggccagatctttataccagacaactctgtatttgg

SEQ ID NO: 11795 - DNA, 473 bp, Homo sapiens
  misc_feature (1)...(473): n = A,T,C or G
gacgcccaattgagnccccnaatcgtagaccctagtccangnggnggaattctcgggagccactggggccaaagtgagagtccagcggtcttccagcgcttgggccacggcggcggccctgggagcagaggtggagcgaccccattacgctaaagatgaaaggctggggttggctggccctgcttctgggggccctgctgggaaccgcctgggctcggaggagccaggatctccactgtggagcatgcagggctctggtggatgaactagaatgggaaattgcccaggtggaccccaagaagaccattcagatgggatctttccggatcaatccagatggcagccagtcagtggtggaggtaactgttactgttcccccaaacaaagtagctcactctggctttggatgaaattcgactgcttaaaaaggaccttggtttaatagaaatgaagaaaacagactcagaaaaaag

SEQ ID NO: 11796 - DNA, 454 bp, Homo sapiens
  misc_feature (1)...(454): n = A,T,C or G
nctcgagttcactagcccagngcggnggaattcatacaatttatgaacctacagaggaagaatgtgaatggaaaccagatgaagaagatgagatttctgaggagttgaaagaaaaggccaagactgaagatgagaaaaacgatgaagaaaaagaagaccccaaaggaattcctgaattttggttacctgtttttaagaatgttgacttgctcagtgatatgcttcagaaacatgatgaacctattctgaagcatgtgaaagataccaaagtgaagttctcagatgctggcctgcctatgagttttgtcttagaatttcaatttgaacccagtaaatattttacaaatgaagtgctgacaaagacatataggatgaggttagaaccagaaccagatgattctgatcacttttcctttgatggacaagaaattatgggttgtacagggggccagaa

SEQ ID NO: 11797 - DNA, 444 bp, Homo sapiens
  misc_feature (1)...(444): n = A,T,C or G
nttaaactgagaacctgtgttngtggcggacntcgcaaagacatggnagnagtgcagaggaccctgatggctttgggcagcttggcagtgacctagaatgatgggcactaccgaggagatcccagactggtttatgaagaaagctcatgtgcataaaagggaattcacagagagccatctgcaggagggaaagcatgtcattggccttcatatgggcagcaacagaggggcctcccaggccggcatgacaggctacggacgacctcggcagatcatcagttagagcggagagggctagccctgagcccggccctcccccagctccttggctgtagccatcccgcttagcctgcctcacccacacccgtgtggtaccttcagccctggccaagctttgaggctctgtcactgagcaatggtaactgcacctgggcagctcctacn

SEQ ID NO: 11798 - DNA, 484 bp, Homo sapiens
  misc_feature (1)...(484): n = A,T,C or G
cgccccccccgcccaccnatcgagaccctnatcgagatctctagncagngncgnggaattcccggnggtcctgtgtctcaatctgtctaacacaactatcaccaacaggacgatgcgactcctgccgaggcacttccacaacttacagaatcttagtttggcttattgcagacggttcacagacaaagccttacagtacctgaacttggggaatggatgccacaagctcatctatctggacctctctggctgcacccagatttcagtccaaggcttcaggtacattgcaaacagctgcactggaattatgcatcttaccattaatgacatgccaactctgacggacaactgtgtaaaagctttagttgaaaaatgctctcgtattacatcgctggttttcactggtgcaccgcatatctccgattgtactttcagagctctttctgcttgtaaactcagaaagatccgatttgaaggaaataaa

SEQ ID NO: 11799 - DNA, 483 bp, Homo sapiens
  misc_feature (1)...(483): n = A,T,C or G
cgccccccccngnngannnaatcgagaccctaatcagngngccgtaattcgaactgatggtttctatcattatttagccccacctttgtattttaaaatccttcagaatacatttatgaaccaatgcgactggacttagccacacacaatggaaattcagaccttgactatttggtgtttccagttcacaaaggtgatgaagactgtcttgggagcagcttaatcccaaaatttgtacatttcttgctgctcctggcgtggaaacttaagtgagaccaccaaatacattggtcctgtccaattctactgaatgggggtggacctggcatttatctggccaaaaacaggagccagagaaatatgaatataccaaagttgtttgtttagcctccaacttaaattacattagtcaacttatagatactcatatgatcacttttctttttagatactacatcaactagattcaggagtatatcattn

SEQ ID NO: 11800 - DNA, 559 bp, Homo sapiens
  misc_feature (1)...(559): n = A,T,C or G
naatcgaacactatcgagngncgnggaattcgacggaggccgtcaagcgctataatgactacaagctggatttccggaggcaacagatgcaggatttcttcctggcgcacaaagatgaggagtgagccagaactgggaactacacccgctcatcgacggagctcggagcaaacccacctccacccccaccatacccagcccatacatgagcccctgggctgagctgcgcggccccggccaggcagacaggccagggcactgctgtgcacaatgcagcggtttagctgaatgtgattgctcaggcagctagccagtcaggccccactgcggagtcccgcgtgggcatctcggccgggcgcccagccaggagccagccggtggcccaccagccagcatgggccctgggcgccgctagttaaatcttgagctctgtttgaccaagcggcccaaggtttcggtctaagtaccacccagatgaggtggggaaagcgtcgcaggagggcctgggggcccctgcaaaaccgacttggggtctttctgtccctcatggagaccggct

SEQ ID NO: 11801 - DNA, 476 bp, Homo sapiens
  misc_feature (1)...(476): n = A,T,C or G
catcgaggccaatcgtagaccactaggacagngcggnggaattcctggcacttccattgttcatatattgatatgcttaatgatgtttctgaagatttattcatttttcctttattcctttttattctgttcctcagcccagatcatttcaatgcacatatcctcaagtttgctgattctttcatttcctgctcagatctgctgttgagcccctctagagaattttttatctcagttattacacttttcaactccagaatttctatttgccctttaaataacttaatctgttgatattctgaatttggtggtgcattgttcccatactttcatttaattctttagacatggcttcctttagctcattgaacatatttaaaatagatgattggcctggcacggtggctcacgcctgtaatcacagcactttgggaggccgaggcaggcagatcaccggaggtcaggcgtttgagact

SEQ ID NO: 11802 - DNA, 449 bp, Homo sapiens
  misc_feature (1)...(449): n = A,T,C or G
tgnccatctgaaacttactataganacttacgcagngccngnaannncaaaagtggaaatctttgccacatcatgtagaacaaaataaaacggtttcaaattttctttttattaacagaggttgcagaggtagaggaaacagaattagagaaaactaggtcaataacaaacaaatagaaacattaaagcacttttaactgatgatttttctaatatttttaagaatagtggtctacaatgcatgttttaacggtaaaactgcaatgaaaccccactgttaatacagatcattttggatctcatctatgattatatactatcacttatgaggcaatttcatggtataaatcctaagaaactatagaagcttgcaaatttatcttgcttttttaaaacagagaaaaataagaactttggtattcaattattttaatttttataaaatgcaa

SEQ ID NO: 11803 - DNA, 473 bp, Homo sapiens
  misc_feature (1)...(473): n = A,T,C or G
cccccccccngngnnnaatgagacctgatgatggcgtaagacgagcccaggggttccattagcaagcaattgggtcacacccccatggtcctgatggcatcccttaaataccagtgctgttctgatttatacatgcttacagatatatttgtaggaactgaaactgctcatttaaaatagcagataagccaggtgtggtggctcacacctgtaatcccagcacttcggaggccgaggtgggcggatcacaaggtcaggagagggagaccacccaggccaacatgtgaaagcctatctctattaaatatacaaaagttagctgggcgtggtggtgggcgcctgtagtcccagctactcaggaggctgaggcaagagaattgcttgaacccgggaggctggggttgcagtgagccgagatcatgccactgcactccagcctggtgacagagcaagactccatctcaaaaaaaaag

SEQ ID NO: 11804 - DNA, 467 bp, Homo sapiens
  misc_feature (1)...(467): n = A,T,C or G
nattgangacccctagnccgttggagggcattctcgaactcctggcctcaagggatccgcccactcggcctccaacatgctgggattacaggcgtgaaccaccacatccggccataatttccgtattttttgtagagatgaggtttggccatgttgcccaagctggtctcgaactcctgagctcaaatgatccgcccactttggcctcccagagtgctggaattacgggcgtgagccactgtgcctgaccttattaattctttaggacccagaaacatcatcacttctgttgggtcttcctccaaagagatgtcacttacaccttcactctttcctaccattttatacaagactacaacctctatttaacgcttcttattatttaagtacatgtttttcccaaccactctgagtcctgggacaacatatctttttctttctgttctagtttagagcttggcacatag

SEQ ID NO: 11805 - DNA, 460 bp, Homo sapiens
  misc_feature (1)...(460): n = A,T,C or G
agttaaagatcgatagccntnntaannactgaggtaccctccgaagngtcgnggaattccggagctccagataactaatttcaagcatggctgtctagcgtgcctgtcactcctattgtccttccaaactctttcagacattttgagcagggagtattaaagctatgagttagaaagggttgtgacattaatggtccacaaaggctttaggcacaagaggtaatgatgattaccggtggctatttggaggactgcaccggatcgctgtcattaaaaattaagcgtggcttttgaggaagatgtgacaactaccggaggctcactctggcttccatggtgagaatgtctgtgagagtgagaagcgtgagaagagcaaaagcagagagaccaattacgaagaaattacattaacctgagcaagaaattagtgtggaagcagtgaagatggtgggaagttgcn

SEQ ID NO: 11806 - DNA, 474 bp, Homo sapiens
  misc_feature (1)...(474): n = A,T,C or G
nattgagaccaattgacagncnctcggaanncgcactaatactacatttcagtgtaatcatcttggggtggtttggccaggatttcccaattccttgatatctggagtttcttcaccattgtccggcatcctgcggaggcttaatatacaggcgtaaggtcagcagcaatttgtctaataagtgatgagatcagtagctgaagtctctaagctgggccattactaaataccatagccatgttgatctggaaatttatccctctagtgtcttacctcacataagccatttgcccactgtgcaatatagaaaggtgttttcaaaagtatttggccgtagattttcacatccatcataaggttggcattcaataaggaaaaagttctaactccagtattaaattgtacataaatcccaaatgttcttaaagaacactcagggacatgtttgttgcctgggattggtaatgaaaggtn

SEQ ID NO: 11807 - DNA, 438 bp, Homo sapiens
  misc_feature (1)...(438): n = A,T,C or G
natgacgacccctttgacgcccggtggaattctttcagtccaagttgacagtgtttctgctgatataacattgttagaaaccttgtgggtctcctatgtatattttgggggttcttgtcattagacaagagggttctctatagagcttttctggataatcccatctccattcctaccttctgcttatggttggctgaaggaattcatgagtcacactcctgatcccttcagcatgactaagaggttgtcctgcaacatgcttgactttctctccacagcatgcttttcttaacagtgaatttcctaattttaacatattttgttggctgggtgcggtggctcatacctgtaatcccagcactttgggaagccaagccaggtggatcacctgaggtcaggagttcaaaaccaccctggccaatatggtgaaaccctgtn

SEQ ID NO: 11808 - DNA, 461 bp, Homo sapiens
atcgacgaccctagtcagtgtgctggaattccttcgaggaggttggccgggcggcctatgtctcctttggacctcatgccggaaaattggtcgcgattgtagatgatattgatcaaaacagggctttggtcgatggaccttgcactcaagtgaggagacaggccatgcctttcaagtgcatgcagctcactgatttcatcctcaagtttccgcacagtgcccaccagaagtatgtccgacaagcctggcagaaggcagacatcaatacaaaatgggcagccacacgatgggccaagaagattgaagccagagaaaggaaagccaagatgacagattttgatcgttttaaagttatgaaggcaaagaaaatgaggaacagaataatcaagaatgaagttaagaagcttcaaaaggcagctctcctgaaagcttctcccaaaaaagcacctggtactaagggg

SEQ ID NO: 11809 - DNA, 481 bp, Homo sapiens
  misc_feature (1)...(481): n = A,T,C or G
ntttcgtagnaccactagtccagtgtgggggatgtccaaccttaatgatccaggctgcagaagaaagttgtcactccagtgagttacccagggctccagggagcccacagcagcatcagacccatccaggggctacagggcctgcccccctgcaggtagaaacacagtatacccgtttgtcatctggtttggcaggacccaggaccctcagcaatgagtctgagtgttcaaagcccactttagaacctaaagcattttgggttaataaagcaaaattttgcttatgttatttggtggtgtcaccgcagcttataccaagacaccatggctcagacatgggatcaggacacacctttgagatcccactgttagcaagaaaaggctgtccaaggcaggcagtgtggtaattgtctgattttgtttaccacacgccaggtcccagggaagtcttgcacagactcttatcagacaagcagggaaa

SEQ ID NO: 11810 - DNA, 484 bp, Homo sapiens
  misc_feature (1)...(484): n = A,T,C or G
nttttgagaccttagnccangcggnggtttgtagacatctagtccatgtggtggaattctgtaattttctagttgatgaatatttacttttaatatgtatattaaggaaagaattgaagggattattttgtttgatctgagcaagtactgtcagatggtagcttattaaaattctgacctaatatatatattaccggataaaattgtttcaacatgatctgtgctttgagctgaccagcgtgtcttccagcgttgttttatttttccctaaggaatagatactaataaatttgttgtttggggaaaaatcattaaatgaataagtacaaacctgaaggttgtatttggatttaatgcagttgataagttagtgagagaactttcttaattcatctctctattctttccttatactgtgcatttagacatttagagagttatgggcaggttcctgagtttgtaataaactcatcttcagatcttt

SEQ ID NO: 11811 - DNA, 450 bp, Homo sapiens
  misc_feature (1)...(450): n = A,T,C or G
agatttgaactgaaaccntctaaaactgagtacctagtaagnngcgnggaattcccctggagtgacaccccacttacttggagggaaggagaggtgggcagggttcccaggaccaacaacctttcccagtgctgccacagtgtcgtctatcttttggggacaggggttgtgacaggaaagattatttttggtacattttcttttttgttgaaatttttagaaagccagttgttgcattattgttttccacagttaacaaaacacagttttcaaattcagaatctttcacagtgactgttgtagtctatttacgtgccaaaagagggatggtattttctttcagtgatattggtgaaaatgtgtcggcagtcttctgtgaattcatgtattgctgatatccatctgtgacttttatgaacaaatgaatagttcctaccaactccagcaggc

SEQ ID NO: 11812 - DNA, 471 bp, Homo sapiens
  misc_feature (1)...(471): n = A,T,C or G
natgagaccctagccangcgttgaataccttgcannaacaagccattaaaaagtaagttttaaagataattttactatattttcactacaatgtgggtatcataatgtgaatttagtataaatccatttccttgttaataaaaggaatgtatctaaacatatatctagtgattttagagaaattgctaaactacttgacagcataaagttccctgttggcagtttggtgagctctattttattgtaagttcttgtactataactgaatattgttgtttttctcccaaatgcgtttaccttttgtgaccgaagtctaggagagtaagtagttcagtattttaataaattgcagaattttgcatgttttattcgtgaacatacatatatatattccttttatatattaatggttagtagcattttttattttaacccctcacctttcattgttgtagactttattaaaggctn

SEQ ID NO: 11813 - DNA, 448 bp, Homo sapiens
  misc_feature (1)...(448): n = A,T,C or G
cgggtattcacactgagagccttttgatagccgtcgaanncccncccnnnncacctttcacctttgacatctcagacatgatttgtgatcaccaccatctgacgacatgacagcctgtctggagactgagagcagctgcagttagcggtgctgggcaggcaaagcaccgcaagcacaaagtttggccagccacacattggagaaacaaaagcaatgtttaaagtgttccatgtaacggattttttcccaagatatggacaaagctggtttttactctccagagtgttgcacggagtagggcgggcttgggggttaagcgcatgcgagagctctgtgcgctttacaggacctctggaagcaactactcctgattaacctcggtgaagttaaggaaaacttcgtggctgaagatgtgaatgaagaacaagattactatcctctgccagca

SEQ ID NO: 11814 - DNA, 553 bp, Homo sapiens
  misc_feature (1)...(553): n = A,T,C or G
cggaacccnnaaaatcgagcacattgagngtcgnggaattcgttaattcttggatggtctttatgaaagactgcatgaggttttttgtttttatttctgcttaaattatttgctgatttatttgcacttaggatacaggcctaaatccttagctttgctgacatcatgaaagatgtgggccctccctagcactccagtttcatcttacatcatgccactctttggtactttatccttactgtccagcttcatttcctagagtgtcctgtgaccctcttgactcagagcctctgcacgtgctgttccctgtgtttgtctcctttgtccagctctaccaacttcctttatctctcagtgttcaggtgtcatctcatctccagcatgaattagatgtcttatcttgtgcttctcattgggctatactggaatgcttagcacattagtcagttccctcattgctataaagaaatacctgaggctgggaatttataaagaaaggaggttaatgcctacagtctgcagctgacaggagcatatggctttgttctgggag

SEQ ID NO: 11815 - DNA, 485 bp, Homo sapiens
  misc_feature (1)...(485): n = A,T,C or G
atttgatgacactagaacangcggngnctgangtaccttanaaagngcggnggaattctccggaatgaccagcatgatattttcagagtcttgtccccggggtattagcacctctttttgaacagggaattgattcaagattggacatggtctcctctgattatcaggtactggggctgagggcattaaaaatagtaagcctccctcctcgtcccctgcctcaagaaattgcctccttatttatcaacatctttttcctccctttccctgagagctcacagtacaatgtttcagaagccccatttgcacaggttttcagcaactcagaatgctctacttctttttctttgagaaaggattaagatacactcctgctgtgcccccatctttcctccaaactcctgcctgtgtttgtgtggatacccagtcccagaaccacactgttgagttggacacactgtaaacccctgggtaactgtcaagtn

SEQ ID NO: 11816 - DNA, 456 bp, Homo sapiens
  misc_feature (1)...(456): n = A,T,C or G
aattgancttcagtgaccctagtccgtgtggtggaattcaaattacaaaccccctccagtcagtcagtcagtcagtcaacaaacagtaccacccaatggcaagagtcaggccaggcagcatcgcccactgcctgtgtctccttacataggtggttaaacttcttaaaagctcattgtaccccagggctgttgggggtgatccctgggattagtaaggtctcataatgggatgctgctgagctcctcacagaggaaaggaattacagggagaaggaggtgagcattcttggagagctcctacaataggcatggcatgtttgtgaggcctccctgccaagaagagagcgcatactccatggagaactgagggctgaaaggtcggcccgactctgctcaaaatgggccttgaatgcccagtccagatatctagacttaaaagagcaatgggacgtcgtn

SEQ ID NO: 11817 - DNA, 488 bp, Homo sapiens
  misc_feature (1)...(488): n = A,T,C or G
cgcgccccccccccccccccaatcgagncccctnatcgtagaccctagtccangtggtggaattcgttgtaacatgaaaggtcacctgcagtggaaatttgaaactacttcaagggtctatgcaacaccgtttgctttccataactacaatggcagcaatgaaatgttgctggcagcagcatctactgatgggaaagtgtggatcttggaatctcagagtggacaattgcaaagtgtttatgaacttcctggagaagtcttctcttctcctgtggtcctggaatcaatgctcattattgggtgtagagataattatgtttattgtctggatttattgggtggcaatcaaaaataatcaaatacagtccttatttgtataacaaatgtgagatatttgaaaatattttaccattatacatcatgtggacttattttatattaaagaagattatattttggctaagaaaaaaaaaaaaaaaaaaaaaaaa

SEQ ID NO: 11818 - DNA, 456 bp, Homo sapiens
  misc_feature (1)...(456): n = A,T,C or G
aggaaatttantttgtagacactagttcgagcggcgtaattcataaaacatgaaacgatttagtgagaaaagcggccggttttttggggggaattactttctgtcataaagaagatagatgggttctcatgtcttctacattcagtctgttgtgcagtcacatatcatgtagactctggaaaacacctctgtatactggtgaaagaatgaaaagaagcaaataatgccttagtatgattatgaaaaacgttttgacttcacagtgccctgaatgggtcttgggaatctccagggatccctcaggcacactttgagaaccaatctatataaagtgatggttcacaatgattctgaagccttagtttcagaatcatttggggcagcttttcaaaaatgccattcctgccacctaccacaaagattctgattcactgtatctgtgatgggtctcagatc

SEQ ID NO: 11819 - DNA, 470 bp, Homo sapiens
cccccaatagagatccctagtcctgtgtgcgcgaattcgttaaaagtggcagaacaggaaagacgaattaaaaataacattttttaagcgacataaggatgaaatactgatgaatctctgtgacattacagggaaaaaaatatagttttctatctctttcaagggcagaagagttttcatttttatttttgtaattttatctgtaagtcataaatattacttaatcaggcctgattctacttttgaaaattacagttcttgaaatgcagataatgtttactttgaaaacaaatgtcatgaatgatttccagtttttaaagctatatgtttcactgcttcatatctctgtccactttctgaatgagaacttattttgtgcctagagctctcactcactgataatgcttattaccttctgggcatttattccaaagtgggatcaactgtacgcctttggtatctgaccataa

SEQ ID NO: 11820 - DNA, 484 bp, Homo sapiens
  misc_feature (1)...(484): n = A,T,C or G
gggtcccnnnagtccacnaatcgagaccatgatcgangcctctgaaaacaaatcaggtacaactccaaaaggagacattggagaagaaccaagctgggtctataaggaattgcacatgagatggcacacatatttatgctgtctgaaggtcacgatcatgttaccatatcaagctgaaaatgtcaccactatctggagatttcgacgtgttttcctctctgaatctgttatgaacacgttggttggctggattcagtaataaatatgtaaggcctttctttttaaaaaaaaaaaaaaaaaaaaaaaaaaaaaaaaaaaaaaaaaaaaaaaaaaaaaaaaaaaaaaaaaaaaaaaaaaaaaaaaaaaaaaaaaaaaaaaaaanannnnngggggaanaaaaaaagggggggggaaaaaaggggggggaaannaaanagggggtgtttttagaggggccatttattttattctaccaaaaaagaga

SEQ ID NO: 11821 - DNA, 559 bp, Homo sapiens
  misc_feature (1)...(559): n = A,T,C or G
nattgaaccctattggatcccctatccgagnggngcaattcgngcatttcgatgcaaccagaggatggttactgacttctggaactgacaaggttattaagttgtgggatattaccccagtcgtgtcttgatgactctcccaggaatcagaaagatagtatttactaaagaaacggttgttttaacccaaatcattaccagagtggtaaagcagacatgtgagaagtaagaaagaaactaaagaccctgaatgaatttgcagattacccatgtgcacagtggggacctggccagtgagcactcgcaaggggactcttccaacttgttcatacaatataaaagaagctatttttttaacaaatggtttatacagtctggctgtgctgcattgttttgagtgtaccgaaaaatctgtgtggggtgtttaatttttatacttttcaacaccccattntacttgttgctttgtcagagaaataagggaaggatctactcagagtaatttggtcattatactttctgtgttacttcaacatgtgtcacgtggccagccgctttt

SEQ ID NO: 11822 - DNA, 467 bp, Homo sapiens
  misc_feature (1)...(467): n = A,T,C or G
nnnnaatcgagatccctagtccaagtggtggacttcaaagctagtgctcacaatgacttacaagactctaccacgtcatgtctccagttacatctcttaacccctcttcttgagaagagtggacccctcacatatgcttctatgttaggagatttacattggcagttctttctgctagcagggtctttcctggagatccaccttccttagtttctcatatatgaagtctgttcaagtatcactttgtcagtgaagcctgctgtgccccctactttatttaaaattgcaatcccccgccctcccttactgcacatttctggtctcttatcctctcctattttttttttccatagaatttatgacctattttattacatactctttattttgctcattgcctgtctgcctctacccctacactggaataaaagctgttatgtaagaaacaaaaagaacaaagaaaaaaa

SEQ ID NO: 11823 - DNA, 453 bp, Homo sapiens
  misc_feature (1)...(453): n = A,T,C or G
gtttgataccattgacgacccttagtccagtgcggtggaattctacaagaccttaagaagagctaaacgggctgccacctgtagctgaagagtgccttaacgccgaggcccacggctccatgcgagagatgcctgttccttctctgataaatttggcagcttcacgtaccctaaggcccagaaaggacctgtttcctcaacaccctgaccagcacagaacattgtaataatgacaattatcagtcatttagctccaactaagccccagatattgtcataaattctttacatatattgagtcatagaataatctcaataatatataaggatgttcatataatccacattttacagaaaagaaaattggagttgtgaccgattaatcacataatcacagtcgtctaaatcacatagattgtagatggaggaataagaatgtcagtgcctgtgatn

SEQ ID NO: 11824 - DNA, 461 bp, Homo sapiens
  misc_feature (1)...(461): n = A,T,C or G
natcgagtgccntacgnagngncgnggaattcgtttatctctcttgttagagatttttgggatcctgtgcccaataaataagaagagatgaaccttgagtctcattagatgacagatttttgagaagctcaaatgtatgggaaggctccacttcttcacttaaagggactgcagatggtgtgaagcaggtgggagagaccccagtgctaagagggttattacaacagggcttggcaagaatttttcagggaaaaatgaactttgggaggcgggtgctgttttttgccccattttgggttcccagggaaaggtaacaatttaaacacacaccacctgaacagagacatagcttcctctcaagagccttggaaggctgggagagtggtgttgggtggagagaatgagagcaggctcagatgttgaaacaaccctatgggatcggagttggaattgctgaactg

SEQ ID NO: 11825 - DNA, 459 bp, Homo sapiens
  misc_feature (1)...(459): n = A,T,C or G
gggatatgactgcgtncatggaccngncgnggaattccaccctgcgtgcccgggcctgtccctcctgaccccaggattatagtggcgaggttggttgttagccaagcggattgagccaggacacggcagcgcggagccctgcaggcgagtcctccggaggctgagagcaaacggttgcactaggaacccagcagtcagaccggcccccaccctggagtgaacacatcgccactgccaggcatcgcagggaggattaccccaatggcacctggctgggcgacgagaacaaccccgagatgcgggtgcactgcgccatcatcccctccgacatgctggacatcagcaccaactgccgcacggtcgaggagatggtgctcacgctgctggactacctcttacaccgagaggtgcaggctgtgtccagcctctcggggcagggcaagcacgggaagaagcaac

SEQ ID NO: 11826 - DNA, 479 bp, Homo sapiens
  misc_feature (1)...(479): n = A,T,C or G
aggccgcggccgggnnnnnatattgaattgagatcccctggccangncgtggaattctaatgaaataaaaccagaatagaagagacgatctacatatccaaaagttggtttgtttaaaatactagtagagctgacatacctgtggtgagactgatggaaataatgcagttacaactaaccaatatcataattggaaaggaaatcactataggtgctgtaaaaattaaaaagataatagaatattatgaacaattttctgccaatattattgaaagtttacataaaatggaaaattcatttaaaaatataatttgacagtattatgttatgtgaatactataatgataatgctgtaatcattaaatgaaccagtagcttaaaatttttccatatagggaaggtcagggccagatgtgtctaatggctggttctactagacattcactgaaataataattcaagtctacacaaactttcct

SEQ ID NO: 11827 - DNA, 452 bp, Homo sapiens
  misc_feature (1)...(452): n = A,T,C or G
gcggtcaattcgagacactagnccgttggaggcattcacatggtctgctatacagctcagactctcgtccgaatcctctcacatggtggctttaggaagatccttggccaggagggtgatgccagctatcttgcttctgaaatatctacctgggatggagtgatagtaacaccttcagaaaaggcttatgagaagccaccagagaagaaggaaggagaggaagaagaggagaatacagaagaaccacctcaaggagaggaagaagaaagcatggaaactcaggagtgacattcccttcactccttttcctacccaagggggaagactggagcctaagctgcctgctactgggctttacatggtgacagacatttccgtgggatagggaagatagcaggaagaaaagtaaactccatagaagtgtcattccactgggttttgatattggcttn

SEQ ID NO: 11828 - DNA, 464 bp, Homo sapiens
gatagaagaccattgtcagagtggtggaccttacacacacagaggaggagaccagtgtgcccaaagtatcaggttgggaacagtgcgcgcgcacacacacacacacacacacacacacacacagagttggaggcctgtgtgcccaaagaaacaggtatgggaacagtgttcatgcagggtattcatgacaaggacgttccattttgttctaagagccacaggtgggaaaaagagggtctgggccgggcacggtggctcacgcctgtaatcccagcactttgggaggccgaggtgggtggatcacaaggtcaggagtttgagactagcctggccaacatggcaaaaccccgtctctactaaaaatacaaaaattagccgcgcatggtggtgggcgcctgtaatcccatctacttgggaggctgaggagagagaatcactagaaccgggaggcggagggttgattg

SEQ ID NO: 11829 - DNA, 484 bp, Homo sapiens
  misc_feature (1)...(484): n = A,T,C or G
aggtaggggcccnnnnnagggattaacctagcccgcttcgnctagnnnccgtcngnananacnnnannnnaaanannnaagaagaggaaggnngnngntgatggnatnttnaattctgaactgaatgagtttnttactcgggagctgggtgaagatgggtgctttggagttgaggtgcgagttacaccaaccaggacagaaatcattatcttagccaccagaacacagaatgttcttggtgagaagggccggcggattcgggaactgactgctgtagttcagaagaggtttggctttccagagggcagtgtagagctttatgctgaaaaggtggccactagaggtctgtgtgccattgcccaggcagagtctctgcgttacaaactcctaggagggcttgctgtgcggagggcctgctatggtgtgctgcggttcatcatggagagtggggccaaaggctgcgaggttgtggtgtctgggaaat

SEQ ID NO: 11830 - DNA, 465 bp, Homo sapiens
  misc_feature (1)...(465): n = A,T,C or G
nactgagacctgaagncagtgcggnggaattcaagccaaataccccatcgtcggctacactgcccggagaattctcaatgaggatggcagccctaacctggacttcaagcctgaagaccagccccattttgacatcaaggatgagttctgatgttccccctgcaggagcaggttcttgggagcgtgaggcaggaagacactaggtgctgaatctcctgcaaaactggctgcctggaggccctgagccacccagatctgaataaaacagatgcttacccannnaaaaaaaaaaaaaaaaaaaaaaaaaaaaaaaaaaaaaaaaaaaaaaaaaaaaaanaaaaaatttaaaaagttaactggtttaataaacttaaaaatttatttgtaaatgttaaagaaagagggtgggcaattcaatttggananngnnggggggggtttacgggaatggtatttcttttatat

SEQ ID NO: 11831 - DNA, 437 bp, Homo sapiens
  misc_feature (1)...(437): n = A,T,C or G
natgacgaccactggaagncgttggaacaccggggagcatgactacttacagccttgctgagtctgtgtaggaactggcagaagcttcctcttgcttagaggatggaagaagatcacggtgggtgtgttgcgcccactgtgtcaggaggagagaagtgagcgggggtgtttcactaccttgcctgggctttaaatggggaggggcggggagaagctggcaatggaccctcacttgacgggcccttctgtgagctgggggctttggctttcatggcatggtcccccgcacttggtataaagcgcaaggctcctgtgggtcctaggactcagtgctgctaatcagatgttcttaattacaatctgattttgtgtaattttcagtaagaattttagacatttcagtttatcttctagactcagtttttctctcagttaag

SEQ ID NO: 11832 - DNA, 393 bp, Homo sapiens
  misc_feature (1)...(393): n = A,T,C or G
attgannnccctaattgaggactattagtcagtgtggtggaattccgacctacgcacacgagaacatgcctctcgcaaaggatctccttcatccctctccagaagaggagaagaggaaacacaagaagaaacgcctggtgcagagccccaattcctacttcatggatgtgaaatgcccaggatgctataaaatcaccacggtctttagccatgcacaaacggtagttttgtgtgttggctgctccactgtcctctgccagcctacaggaggaaaagcaaggcttacagaaggatgttccttcaggaggaagcagcactaaaagcactctgagtcaagatgagtgggaaaccatctcaataaacacattttggataaaaaaaaaaaaaaaaaaa

SEQ ID NO: 11833 - DNA, 473 bp, Homo sapiens
  misc_feature (1)...(473): n = A,T,C or G
cccccgccnnnnnnnntttgatgaccttcgagacattcggngaaagcgaagcaacaccctgaacagagatgaagatgaaggaattcctagtgagaatgaggaataaaagaaaatgttggacaccagagcccgagaattaaaagaacaacttcaccagaaggaccaaaaaatcctactcttgttggaagagaatgagatgattttccgggacatggctgagtgcagcacccctctcccagaggattgctccccaacacatagccctagagttctcttccgctccaacacagaagaggctctcaaaggaggacctttaatgaaaagtgcaataaatgaggtggagatccttcagggtttggtgagtggaaatctgggaggcacacttgggccgactgtcagcagccccattgagcaagatgtggtcggtcccgtttccctgccccggagagcagagacctttggaggatttgaca

SEQ ID NO: 11834 - DNA, 462 bp, Homo sapiens
  misc_feature (1)...(462): n = A,T,C or G
natggagatcgtagnccatgcggggaattccggcgcttcgtggaggttggccgggtggcctatgtctcctttggacctcataccggaaaattggtcgcgattgtagatgttattgatcagaacagggctttggtcgatggaccttgcactcaagtgaggagacaggccatgcctttcaagtgcatgcagctcactgatttcatcctcaagtttccgcacagggcccaccaaaagtatgtccgacaagcctggcagaaggcagacatcaatacaaaatgggcagccacacgatgggccaagaagattgaagccagagaaaggaaagccaagatgacagattttgatcgttttaaagttatgaaggcgaagaaaatgaggaacagaataatcaagaatgaagttaagaagcttcaaaaggcagctctcctgaaagcttctcccaaaaaagcacctggtactaag

SEQ ID NO: 11835 - DNA, 464 bp, Homo sapiens
  misc_feature (1)...(464): n = A,T,C or G
ggcggccgggnngttattgatagagtccctaggccgngncgnggaattcccctgctgcggcctcctccgtcagcactgtgtgctcttgtgcggggtggacaccaaatcagtgtttggaaagtgttggatataaaatgaccaggaagacctgtctattcattcagcagatctctgctgagtatttgctgtgggtcctcctgtgtgcccggccctgtcctaagtgctgggaagatatgagtgaccaacagacaaaaatcctagaccttccgttgttggtggggagacagtcaacacagtcagtgagtgtctcagaggatggagatggagcagggttaggagagaggtgtctcgggcatggagggaagggccgatggcactggggtgatgcctgaaacacgaagtgaaggtgtgagggaatgaaccttgttgacattgagggaatgttttgccaaggcagcggactt

SEQ ID NO: 11836 - DNA, 472 bp, Homo sapiens
  misc_feature (1)...(472): n = A,T,C or G
aggagggcaggccggnnnnnnactgtacttagnaccctaggccangcggnggaattcgcgcaactctgtggacacggccacctccagctcactcagcaccccgagcgagcccctcagccccaccagctccctgggcgaggagcgtaactaagtccgccccaccacactccccgcctgtcctgcctctctgctccagagagaggatgcagaggggtgctgctcctaaacccccgctccagatctgcactgggtgtggccccgcagtgcccccacccagtccgccaaacactccaccccctccagctccagtttccaagttcctgcactccagaatccacaaagccgtgcctttctctggctccagaatatgcataatcagcgccctggagtcccctgggcctggaccgcttcccagaggccaggaatctgccattactctgcggtggtgccagaggttttaggaaacctggcn

SEQ ID NO: 11837 - DNA, 461 bp, Homo sapiens
  misc_feature (1)...(461): n = A,T,C or G
ggggtttgagacatctgncnatgtagacatctgtccgngcggtggaattccacattatggcgaagctcaccaatgaggacagtcaaaatcgccagcttcaacaattgctggcagcactcagccggcagattgatgagttagaagagacaaacaggtctttacgacaagcagaagaggagctgcaagatataaaagaaaaaatcagtaagggagaatatggaaacgctggtatcatggctgaagtggaagagctcaggaaacgtgtgctacatatggaagggaaagatgaagagctcataaaaatggaggagcagtgcatagatctcaataagaggcttgaaagggagacgttacagagtgaagactttaaactagaggctgaaaaactcagtaaaagaattatggctctggaaaagttagaagacgctttcaacaaaagcaaacaagaatgctactctctg

SEQ ID NO: 11838 - DNA, 458 bp, Homo sapiens
  misc_feature (1)...(458): n = A,T,C or G
nggggnatcgtagacactagtcattgagggcaattcctaggggcccctgactgaaccttgggcagaagacagtcccccagaccagcctcccccagcttctgcccgctcctcagtgggggaaggagagctccagtatgcatccctcagcttccagatggtgaagccttgggactcgcggggacaggaggccactgacaccgagtactcggagatcaagatccacagatgagaaactgcagagactcaccctgattgagggatcacagcccctccaggcaagggagaagtcagaggctgattcttgtagaattaacagccctcaacgtgatgagctatgataacactatgaattatgtgcagagtgaaaagcacacaggctttagagtcaaagtatctcaaacctgaatccacactgtgccctcccttttatttttttaactaaaagacagacaaattcc

SEQ ID NO: 11839 - DNA, 463 bp, Homo sapiens
  misc_feature (1)...(463): n = A,T,C or G
ggggaatcgagcccctngnnaactgatgaccactagtacagngcggnggaattcaaatcagaaggtgtagaataaagaacaaatgaaactagaaacgcctagaaagatgggtggcttctacatagccctttattctccctctgcttgtgctgcccgcctgcctgttggcttcgctgtggagctgatgtcccctgtacaaaggatgccctcctccccggctgtggcccattgttcttttaggcttctggactcctcctgggtcttcgctggttggcaagctctctcccctaattggcttttctcctggtgctccccaccttcctgtgggtcgaagcccttctgcccccagaagctcagagaagacaaggccaatatgagagcccataagtagtgagcacttgcaccgggctgtcagtgtgaatgatgaagatttgctggtccgaatacttcaaggaggccgtgg

SEQ ID NO: 11840 - DNA, 464 bp, Homo sapiens
  misc_feature (1)...(464): n = A,T,C or G
ttaaacctcgatgaacctnngncttgatcgacattagtanagngcggtggaattccttttgttgaatttgaagatccccgagatgcagctgatgcagtccgagagctagatggaagaacactatgtggctgccgtgtaagagtggaactgtcgaatggtgaaaaaagaagtagaaatcgtggcccacctccctcttggggtcgtcgccctcgagatgattatcgtaggaggagtcctccacctcgtcgcagagtcaccatcatgtctcttctcaccaccctctgaatctgcattagccagtcaactagccctttcagcgtcatgtgaccagcgcgccccattcagcttggctggtgtcgtttcacatgacccaggctggccagtcgtcaggttgcaccgccctttggttcccgagcatgctgttttctctcagccttctctccaaccttaaccaaatcggcagc

SEQ ID NO: 11841 - DNA, 457 bp, Homo sapiens
  misc_feature (1)...(457): n = A,T,C or G
taaaaactggagaacctaggcccgacggccgtaggatgntttttttcttaaaagtactttaaaaaggaaatttgtttgtattttttatttacattttatatttttgtacatattggtagggtcagccatttttaatgagctcggatgaccaaaccagccttcggagcgttctctgtcctacttctgactttacttgtggtgtgaccatgttcattataatctcaaaggagaaaaaaaaccttgtaaaaaaagcaaaaatgacaacagaaaaacaatcttattccgagcattccagtaacttttttgtgtatgtacttagctgtactataagtagttggtttgtatgagatggttaaaaaggccaaagataaaaggtttctttttttttccttttttggctatgaagttgctgtttattttttttggcctgtttgatgtatgtgtgaaacaatgttgg

SEQ ID NO: 11842 - DNA, 454 bp, Homo sapiens
  misc_feature (1)...(454): n = A,T,C or G
ctagacaataagaccatcgcccangcggnggaattcccacacataacttctcagtgtttctaaaacttaatgtaaactaatccgtttaaagttggctgtggttgactgggctgttgaaagaaaacacattagctttcaggtatcaaggaattcatgaaaaatataagtaatctattcttcaatgccaaagatcttgaactcacaggatttttaaaatacagataattttccaaatatttcttcattttctgttggtatttttgctattgctaattaggtgagacaaatctactgtattaccagaaccaatagaacatagtttcttttcctctcaattatattttaagcaacacacgtagatgacaatttctcttttaatatgttctgattcaaaagtttcctcccacatttgaagtggtcttcccaggtctctgcagctgaaagtggcactttg

SEQ ID NO: 11843 - DNA, 462 bp, Homo sapiens
  misc_feature (1)...(462): n = A,T,C or G
ccccgccccccntnnaatagatagcgtacntgnggcgggcatcatttttccacaaatttatttttaaaaatccacatataagtggacccatgcagcccaaacccgcattgttcaagggtcaactatacatatacatgaagtggaggtgacaaatggaattctaaaaacaaaaactgattaactcaaaagaagacaggaaaaaataaaaaagagaagaacaaggaacacatgagacaaacagaaaacaaatagcaatggtagacttaagcccaaccacattcatagttacattgaatgtaaaagctgaacactccaattataagataaagatgaacagactggatttttaaaaatgtactaacattgtcaggatgcagcggctcacatctataatcctagcattttgggagactgagttgggaggattacttgaggccagaagtttgggactagcctgcgcag

SEQ ID NO: 11844 - DNA, 466 bp, Homo sapiens
  misc_feature (1)...(466): n = A,T,C or G
nttgactttcgtagacactagtccgtgtggtggaattcccagggtgtcagtaacatcaggacattggacacaccattccggaagaactgcagcttctcaacaccagtacccttgtctctggggaaacttttgccctatgaacctgagaattacccctaccaattgggagaaatatcttcccttccctgtcccggaggaaggctgggtggtggaggggggagaatgactcctttctgaggggtgaggagggaagtggggtatggaatatggaatctatttctgtctgcactagagaggtcgggaggaagttaattctcactgtacttgaagaggctttacataaagggttctctctcatcccaagactgctnnnnnaaaaaaaaaaaaaaaaaaaaaaaaaaaaaaaaaaaaaaaaaaaaaaaaaaaaannaaaaaaaaaaaaaaaaaaaaaaaaaaggaggcgggg

SEQ ID NO: 11845 - DNA, 450 bp, Homo sapiens
agggtaattgagacactgtccagtcggtggcattcggttggggagaagagttcatgtcataacgtttctcattgtattgtcaggctgttggagaagtctgggggcttggaaatcatctttgatgtttaccaggccgacgctgtggccacattccgaaagaataaccctggcaaaccctatgcccggatgtgcattagtgggtacgcagtgagccagcactgcccctcccccagctgctgccagttctcctgtgaaccaagtgggactcctctgtactcccctggccagcgtgccaatctctgagaggaacaggaggtccagagaggctaagtgacctacacaaggccacacagccagtttgtgctgccctactctgagctcctcgttgctggcattttagggtagtctttctccaatgccattttagtctaggactcacccagcagaagg

SEQ ID NO: 11846 - DNA, 474 bp, Homo sapiens
  misc_feature (1)...(474): n = A,T,C or G
gggaggtcggggcccggnnnnnnactgaaaatcgatgatctagaccangcggnggaattcattcaatgaaaaggcttcaattgtgttaccctcccaggatgatttctcgcccacgagcaagctccagcgtttgctggcggaatctcgtcagatggtgacggacctggagctgagcacactgctgcccatcagccatgagaatctcactggcagtgccacaaatcagatttctcatctatgtggaaggcagaaagcagacaccaatactgaatgaatacttaaccgtaaaactgaaagaggattctagttcttcataaacggcacttaattccagctgggagcagaactagaaagttaatttttaaacatctacacttcattttcaagttaaccatttttgtgctgaagaaatattttcatgtgtaagaaagtagaccttattgtacatatagaaagttggaattatgctaagaa

SEQ ID NO: 11847 - DNA, 459 bp, Homo sapiens
  misc_feature (1)...(459): n = A,T,C or G
gggaaatgagcctctcgnanaactgagatcatcagtcagtgcggtggaattcttttaatcgagcgaggagatgctcataaacagcacgctatggcacgagcataaaaatgaacggtgcaaattagcactctgctatccctctgtaaggatactgatagcacaacctttaccctccaccccgccccgccttttggtcgttcatacctgaacctttatggccctcttcctggagcccagactgaggcttttctttgctgaagccctacagagttagggaatggagcccaggcaccaggggtctaaagtgtgagccactgagaagagagacgccaactgcacccttgccacttccaaagcaatagaggcagagtggtcccctctttgccacctaggccagttttgaccctggcattaactggccttagaagaaactgatcctggtagggggtggcattttgt

SEQ ID NO: 11848 - DNA, 485 bp, Homo sapiens
  misc_feature (1)...(485): n = A,T,C or G
cgccccccccccgccccccaattgaaaccntaatcgagancactaggcagngnggtggaattcgaactcttgggctcaatctgcccacctcggcctcccaaagtgctgggattacaggcatgagccaccacacccagccatccttatcttttttaaatacagaattagagaagcaagaatctgacatcatttgcaccagtggtacccaaatacttgctcaaggatgggttggtccacagtaagatttcactgggtccccatataaatcagaaaaataacaataatgtagtgagttttttatgaagctaaatttattcaatttaaaggactcctttttttttttttttggaaagggattttttgccccccgggggggggggagggggcaaaatttggtttattggaggtttcaaaggggagggttttttattgggaaaatttggccttttttaaatttgggggggaaaggggggcgaacataaagg

SEQ ID NO: 11849 - DNA, 525 bp, Homo sapiens
  misc_feature (1)...(525): n = A,T,C or G
agcatctctgcctctttggagtaggaaattcagacttgaaaaagatgactgcaaacagaagaaagaccaggacgcagcagctgaactttttcttcagagacggggtcttgctttgtcacccaggctggagtacacagtggcacaatctctgttcaccgcaacctccgcctcccaggttcaagcgattctcctgcctcagcctcccgagtagctgggatcacaggcgtgcaccaccacgccctgctaaccacctatgaaaaattcttgcccaaaatgtttaatctgtatattatcaagctgtcatacacaattccagtttttaggaaatacagaagaaagaagaacaagtcaaatagcgccaaaggaaaattatcagacaaatccagaaggtaggacttcctatgggacaactgaactggtttcatcaacaagtaaatgggaataaaaaacaaatggcttcgcagatataataatatgtaatacgtacaccttgtctgaaatctggttngattcaccttggggacn

SEQ ID NO: 11850 - DNA, 529 bp, Homo sapiens
  misc_feature (1)...(529): n = A,T,C or G
tacagtgcggtggaattcgggaagcaaaactgtttgccagagaggcagctgatcccggattagaagagagctcaggagtaagaaccagagtttaccgcagcatctgtgtctgaaagccaaaggagagagggaaagtagaggacagagaaacatgttgctttattctggcagcctcatctccttgcccttggtgacagcaggagggcactgctcctgctcttggtctgtggcaagcagaggatgaaagcaaaggaggatgctttctatggtgcttcagctcactgccaccaggagagcccttcccagagattgttatctgagaaatgagctgtataatctaaaaaaaagttcagccctcccattgaatgtacgtattttttagttggaaaatctctaacagttattaccatacttttttatataagtttttaaacaatttcaaggtaggatttatatacaataaatgcacccactttaaagggccagttcaatgagttctggacaatgataactcatgtgaccaccaccn

SEQ ID NO: 11851 - DNA, 449 bp, Homo sapiens
  misc_feature (1)...(449): n = A,T,C or G
nattgagctgcatagccttngcggnggaattccttanatccttcagtaacaacaaacaccactcacttcaagatgcattgccagccccgtggcttccctcagctcttggccacaacttgaaaactgtcttgaatgaagtacttggggagaagacaggccactgccctctgttccacagttttcttcatgcacggggtcctcctgttaacaattactgttgtgtacatataaggtatttttagagaagagaaacaggcctttattttcctatgtccttttttacgtttagaatagtcacctgaggggggatcagctcaactgtactgtgggagaaattcttttccaacaaacctcatgctcgtttttctgtggtgcaatttcaagggcaacgtgttctgtcctcacctcactctggtactcgcctcttggggcggctcagcccattcatg

SEQ ID NO: 11852 - DNA, 468 bp, Homo sapiens
  misc_feature (1)...(468): n = A,T,C or G
atagagaacccttgagaacgtaggaagngcggtggaattccaagtattaagggtattgttttatgaactgagaaatgtgtactctatctatgatggataattaccatcatctcaaagtacttgagttttagccgtgtatacatcagtagttccatgttgccgagtatggtatgctttcccattcatggaaacctgggccttttctggtttttggctttcatgcataaagttgctataaatgttctcacagtagcttttgtttttgtaattactgagatgaaaacgggtgtggaattgctgaatcaggatagatgtacattttttgagagatggctaggcattttttccaaagtaatactgtggaaacacttagccaatgatgtgtgagttattccatgccttgtcagtatctggtgttaacagtttagcccttatggtgaatttgtggcttatcctctcagcaatgag

SEQ ID NO: 11853 - DNA, 460 bp, Homo sapiens
  misc_feature (1)...(460): n = A,T,C or G
ggggaatcgtagacactagnncaccgatgtgccatttgcgacagccttattccaaccccaaatagaataccctggggtcagaactaaggagagccatgaagaaaagagccttttgtccctctgtgtccctccctccctttcctggaaagtataaagtgccaatttacctcacaggccccttgcaaagactcaacttatttagggcaactttattcttctccaggtctgtgcttgatgtagccccgcagttctcatcctaggttgagccgagcctggagtctaaaatttatgaccctgggagtggttttggtctgagcatatgccaggaagcatctacaatctgaaagtgtttgactgacaataaccagtgtctcacagcatttatgagcatgccaaataaacaattgaaaacattcaaggaaattcagttttatatacaagagatatgtttctgaaatgg

SEQ ID NO: 11854 - DNA, 523 bp, Homo sapiens
  misc_feature (1)...(523): n = A,T,C or G
agctgtacatttgcacatggaaatgccgaacttcatgaatgggaagaaagaagagatgccctaaagatgaagctcaacaaagcacgaaaagatcacttaattggcccaaatgataatgactttggaaaatatagttttttgtttaaagatttaaactaatatgctggcttttatgtatgatacctaatcagagcattgaccagaaaaattgaaagtgttctgaggcacatagcagaggagctgcagatttcctgcttgtattggcgtatatcgttcctcctgagcagcaacccacagtaggtaggaaaatgggctgtttcacaggcctggccacgctctcacggaaccactggcatcagatggtgaagtgactgctacccggttgccatctgttgaacagacttttggatgaagtgtgttggggaagaggataaggttatatctaggacaactctttgagttggtccttcatataagaatcgtgacggtaagagaatanacacttgtactgggatcagaatac

SEQ ID NO: 11855 - DNA, 530 bp, Homo sapiens
  misc_feature (1)...(530): n = A,T,C or G
ctcagtgcggtggaattcgtcacctagagagctttaaaaatgccgatgcctggccccactcacagaggttctgatgtaattgtgcagggtgctgactgggcttggggatttttgaaggcttcccaaatgattctgatgtgcagccagggttgagaagtgctaggatggcctgcactgagtgatatggaaaggatactttttgaaatatggcccaaacattgccggttaagggggagccacaccaccctccagggtggaggtagctggtggcttttctccgggtcttgtccagttccacagttttatcagtaataggaatcagtgcaaagtatactgatcagacccatggataacgcggttcacctgaaaggggagactagctgttaggttacaggtgccaaaggccttattgacgggtaggagggaaagatgagtgaatctaaggggaaggcaaaccttttagttactttaaataaaaccaactgagcaggtataggatacagaaagcttagctcaacagctgcatgaan

SEQ ID NO: 11856 - DNA, 471 bp, Homo sapiens
  misc_feature (1)...(471): n = A,T,C or G
actcgaaagaccactttgagagccntgnggaattncctaagcggagggaataattataagtcaatagcagagagattgttgtttgggtgtttatttttttcagtttttggtnagagagattgggttaacacctctagccaaaattgtttggttttagggaggctaacaataacctactgaatttggaaaatgcaaaggtaaaaaatgtatatagactgcctgctgaactggttaagtactactgcttctgggaaatactatttcaaaattctatgtattataataataaatttgtaagacattcattattctaccatcctaatgaaaactttcagaagtctttctttatccatggcatgcccagggttttacctgaatctgatacaggatctatataactttactaggacttttgattgttgactccaggcttaggtatatcagaaggttctttttgccatttggcctgtg

SEQ ID NO: 11857 - DNA, 458 bp, Homo sapiens
  misc_feature (1)...(458): n = A,T,C or G
nggggattgtagacattagnncactgatggtcatcgcacagaccaattcctgaagtttggcatgacaccttccaagggagttctgttctatggacctcctggctgtgggaaaactttgttggccaaagccattgctaatgaatgccaggccaacttcatctccatcaagggtcctgagctgctcaccatgtggtttggggagtctgaggccaatgtcagagaaatctttgacaaggcccgccaagctgccccctgtgtgctattctttgatgagctggattcgattgccaaggctcgtggaggtaacattggagatggtggtggggctgctgaccgagtcatcaaccagatcctgacagaaatggatggcatgtccacaaaaaaaaatgtgttcatcattggcgctaccaaccggcctgacatcattgatcctgccatcctcagacctggccgtcttg

SEQ ID NO: 11858 - DNA, 458 bp, Homo sapiens
  misc_feature (1)...(458): n = A,T,C or G
taaataactaacacttttgactgacaacantataaagngnggnggaattttattctgccaacgtgaaaacctcatgttcaaagaacacttctttttagccgacgttactgctggatttgtttttcatatgtgtttttcttacactcatttgaatgctttcaagcatttgtaaacttataaaatgtataaagggcaaaaagtctgaacccttgttttctgaaatctaatcagctatgtatggtttctgaagggtaattttattttggaataggtaaaggaaacctgatttgtttgtttttcctgagggctaaatgcattttttttctcacactcttaatgacttttaacatttatactgagcatccatagatatattcctagaagtatgagaagaattattcttattgaccattaatgtcatgttcattttaatgtaatataattgagatgaaatgttc

SEQ ID NO: 11859 - DNA, 464 bp, Homo sapiens
  misc_feature (1)...(464): n = A,T,C or G
ggccgccgggggnntatagatagcgtccctaggccgngncgnggaattcgcagaggccagatgctctgcaaggagttcctgtgaaatgagagctatacttttcagaccacctctagctgaatacatctaattgggagttgcaggtgcatgggaaataaaatttccctcactggggaatttgctgcagtgaggatggctctattaaatcagtgaggaagcaaacttccaggacttggacatacttacttaggctatacactttgtaggctgggcttgctctaagagccagtcctgagatgctttctggcctgatggttttcaacaaagccactatttttctttctctcttcttccctgtgtctctcattccttgcacatatactgttctagagatctaaggttttctccaggaatactcttcttttacttttggtttattcatttaagagacactgctaaactcn

SEQ ID NO: 11860 - DNA, 466 bp, Homo sapiens
  misc_feature (1)...(466): n = A,T,C or G
aggggncttcgaagaccantgnnnaattgtagatcattataccatgcggtggaattcctgaagcttaatgatgtgaggcttctagtgggataccctaccttgttttaacctgaagtgactcttccttagctaagagagccagacggactccatcgtgactccttcactcgcagcccctcacccacccccttcctcaaggacttaacttgtgcaagctgactcccagcacatcaagaatgcaattaactgataagatactgtggcaagctatatccgcagttcccaggaattcgcccggttaatagcacccagagcccctgcgtttgtgtccggttgataacgcccaaagcccggcgtccatcaccttaggatagacttaaagcctctgtacctggaactgtttactttcctgtaaccgcttatccttttaactttttgcctactttacttctggaagattggttca

SEQ ID NO: 11861 - DNA, 468 bp, Homo sapiens
  misc_feature (1)...(468): n = A,T,C or G
tttgagaccctttgagagccgtnggaattnccacccctacccccacccccagccttttctagtctgcatagaactttggggaagggtttaggaggatatggtctcttcagctttatagaggacatgagagagacaattcccagagacacttgccatgaggattggggtgcctgcaggaagacagcattagcattggattttctggttgagtgactgctcgggctgagttgccaacctgcccctgtgcctatctgggttgggaggagagaatggagaagaacagcaggaagaaggttgccaatggagcagcccacatatctccctttcagtttgtcaaggatatgcatggtctccaagggtgaaatggacactgggaatggtggttggtcctgagccatcttgctagaactttccctaagtggctggcttttgataatgggagccaaggcgtgggtggagaaagttgag

SEQ ID NO: 11862 - DNA, 475 bp, Homo sapiens
  misc_feature (1)...(475): n = A,T,C or G
ctttgatagacctacgctagngacgngcaattccaccaggatgagtctgccctctattcaccccatttgaagcctgtggtgtctgtgaccactgctgaaggtctgagcagcgttctggtgctcctaaaccccattccagtggttgctgaagcagcatcttctgcacaaagcccaacagaagggttcttatccccgtttggtataagaagtggattcaccacccactccctccacgtgcctttgttcctctctttggcccatttccccagcgtctactggcgtcaggattggcaggagcacaggcactcagcagagcatgcccctgcaagacctcagtgttagggcccccccttccagctccaggcaaaagggcatgagtcctggccccaaggggcctgtggctgcagttcaaaggagaagaaggtcagtgtttggaggtgcagcctcaggatgctgagaaaggaaactggcgacn

SEQ ID NO: 11863 - DNA, 503 bp, Homo sapiens
  misc_feature (1)...(503): n = A,T,C or G
tagcgtnnnnnnaacctaagacatacgtagngacgngcaattccatgggggtggctctgacagtataccttctctctgaaagagtcttttgagtccttctcttcatgttcagattcagaacaagaaagtggacatctctaaggtctcctccaagtgtgggtctaaggctaacatcaagcacaagcctggtgagtggtgcctcccttgcccactgggtctccagggtatgtcgtcctgccatgggtcagctgggcagccagctggctggcaagggtttcatctctgtgcctttagcatcccatgaagactacccaggacaccacagtcctcattctgtcagggagcaggagttcgggtgctaacctctaagtggaggaggagcagtttcttacagcagccatctgcacaggcattctcttgagtacctactgtgtgtgtggaactattgagctaggcctggggaagtggtgcactctgagctgagaacctggattggctctaan

SEQ ID NO: 11864 - DNA, 576 bp, Homo sapiens
  misc_feature (1)...(576): n = A,T,C or G
aatcgaacaccacttcgagtggccgcatttccttgaggaaactgaaacagcttgtcattttctctgttttgtttttgtatgttttttacccccatgtaacagtctcccttatggtcagtgattgatgacctcgatatggatttagattatcaaatgtgtttggttttggaaatataacttttgtcaaagaaatactctcagaagagaaatggggcttaattaagttgtttttgtggtcacgtttattcttgttacttcgctgtgtttttgaaatgttgggcatggcctcgtattttgctgttacctttgtgacctgattgttttttggaacacgtcaagacgtgggatcagaatcttccaactttagaggtgcaatggaagacactacgctacttggttgagcctggtgaagaatgtattaatgagactgctttgcataaaactgggaagaaagagaagacagttggagatggaagatggtttgtatatattttggaacttagttcctctgtgagacgaaagaggagagctatgttntgtgtcacattggctgatatatatggcgaaccctgcagg

SEQ ID NO: 11865 - DNA, 456 bp, Homo sapiens
  misc_feature (1)...(456): n = A,T,C or G
ctttggttagttgagcatcgcccgngcggnggaattcatttttctttgtattttctttcaaacctatatctagaataagttgataaattttttttaggttataatgtttctattttatattgaaaggtggagatatatatatatctatatctatctatatatatatatatatacacacacatatatatatcattaaaataccctaagaatgtaacatagaaaataattttacattaaggaataatcagtgttcatttttaaaaagaaaaattataccatatacgaaacctgtattctgtacaggaatttgaattacactgtgataaaaagaggaagccaaggaagtcaacttgcaatgttcttatcttgttttccctaagatagattgaaagacaaagggaattcacttttccttggtggcttatttaagaagctgattgtttgggtcacttcatt

SEQ ID NO: 11866 - DNA, 456 bp, Homo sapiens
  misc_feature (1)...(456): n = A,T,C or G
catcgacgtccattancncangcggnggaattccttaagctgtgggtgtcaggagcggtacttggagcctctctcggtggggatgggagaagtcacttctaaaaccggggagatggaggaaagcagttagaatgtctgttactaatttttgttaacgtgctgctgtttcctacatctcattcaggcattagtttcaagttccattttcccccagcaccgtgtggcaccttccccagaaccctcacatttttttttctaatattcacagggttattgtttgtaaaaaatctatttatttgctttattccatcaagtaatttattttcatgagatttcttggaaatgtggctctacatatcgttagtacaagtaatacattttgattgttgtttcctggaataacttgtattatttgatgagttaaataaaatgcctaattctaaaaaaaaaaaaaaa

SEQ ID NO: 11867 - DNA, 393 bp, Homo sapiens
gcggatgagaccggtgcgactcatgaacgtgttcgtcacccgcaggatacccgtctaggctgagaggtggagcagggggactcggaggagcccatccctgccaaagagctagagcgaggtgtggcgggggcccacgggctgctatgcctcctctccgaccacgtggacaagaggatcctggatgctgcaggggccaatctcaaagtcatcagcaccatgtgtgtgggcatcgaccacttggctttggatgagaccatgaagcgtgggatccgagatggctacaccccacatgtcctgacagataccaccggcgaactcgcagtctgcctgttacttaccacctgccgacggttgccggaggccatcgaggaagagaagaatggtggctggacc

SEQ ID NO: 11868 - DNA, 468 bp, Homo sapiens
  misc_feature (1)...(468): n = A,T,C or G
agggcctgccggacnaanactgaaacctgagacactaggacangcggnggaattcccgaggtcgcacgcgtgagacttctccgccgcctccgccgcagacgccgccgcgatgcgctacgtcgcctcctacctgctggctgccctagggggcaactcctcccccagcgccaaggacatcaagaagatcttggacagcgtgggtatcgaggcggacgacgaccggctcaacaaggttatcagtgagctgaatggaaaaaacattgaagacgtcattgcccagggtattggcaagcttgccagtgtacctgctggtggggctgtagccgtctctgctgccccaggctctgcagcccctgctgctggttctgcccctgctgcagcagaggagaagaaagatgagaagaaggaggagtctgaagagtcagatgatgacatgggatttggcctttttgattaaattcctgctcc

SEQ ID NO: 11869 - DNA, 464 bp, Homo sapiens
  misc_feature (1)...(464): n = A,T,C or G
atcgagaccatcggatagagcgctgtaggcaaagcacaccagngataatattcactcagcatcattatatacccgttggaatgggatctgccgagatgatgggaatatcaagtctgatgtcttcatgacccagttctctgccctgcagacagctcgatctgttcgaacaagacggttggcagctgcagaggaaaatattgaagtggctcgggcagcccgcctagcccagatcttcaaagaaatttgtgatggtatcatctcttataaagattcttcccggcaagcactggcagctccacttttgaaccttcccccaaagaaaaagaatgctgattattatgagaagatctctgatcccctagatcttatcaccatagagaagcagatcctcactggttactataagacagtggaagcttttgatgctgacatgctcaaagtctttcggaatgctgagaagtact

SEQ ID NO: 11870 - DNA, 479 bp, Homo sapiens
  misc_feature (1)...(479): n = A,T,C or G
cggacgacaaatggagacccatccgatcgagcactctaggccagngcggnggaattccgcgtgaaggaggagagctcattacttttcggggaatcctgagaacaggaccagtcgttggagaaccaaccaacaatgatggtgatgactcggaaggcacctgacatcacctggggacagctaaagaaattgaatcaacaagcatctatccagcttgccgccgtggaagcccctgcaactgcagacaatcggtttcttacatatctggtggcaattggggaaacttctgagaaagtaagacagacatggatgttggggtggcaggtaattcttgtcctttgctaagtgggatcagcttaaggacatgtttattggagtcatgttctaaatccccctgtttttaatgttattacatggtgggatgctgacccgcctttgtcatctaatgatacttcttgggcaggaggccgatggatgcctct

SEQ ID NO: 11871 - DNA, 468 bp, Homo sapiens
  misc_feature (1)...(468): n = A,T,C or G
nggaggtccangnctnnnnnnncctgaactgcatagcctgngcggngcanncagctgatccctggcacccacagggcacaagagggccagtctccgggatgtgttccagctatactgcagcctgagccctggcactaccgtgcgagacctcattggccgccacccccagcagctgcagcatgttgatgaacggtcagaggagaatttgctggggcatttgggagttacctgagggaagctagaccctttatgtctctcaggagccctggatcatggggcactgccaatccaagcaggcttcctggagatgatgggctacagagacaaaattgaagggagactacaggaaagggttggcctgcctgaaagaaggcctggccagggcgtcaccccgtcctctgatcctcaccctatgaagctgatccagttcgggcttatgaagaacctcatcaggcgactacagaagta

SEQ ID NO: 11872 - DNA, 451 bp, Homo sapiens
  misc_feature (1)...(451): n = A,T,C or G
ttaaactgagaccctcgnactgacggcgtattatgcaaaaaggaaatctcgcaaatcaaagaaaaaagttattttgtaaaatattttataataaccgacttgaaatcagccaggcacggtggctcacgcctgtaatcccagcattttgggaggccgaggcgggcggatcacgaggtcaggagatggagaccatcctggctaacacggtgaaaccccgtctctactaaacaaaatacaaaaaattagctgggcatggtggcgggcgcctgtagtcccagctactcaggaggctgaggcgggagaatggcgtgaacccgggaggcggagcttgcagtgagccaagattgtgccactgcactccagcctgggtgacagaatgagactgtgtctcaaaaagtaataaaataactgacttgaaatccaaaatactaaatgtttgacccttgctttt

SEQ ID NO: 11873 - DNA, 459 bp, Homo sapiens
  misc_feature (1)...(459): n = A,T,C or G
tttaaaactgaaacnactngttttgacacattagtaagtggggngtaattcccatgatcattgagaaacaggtcacgaaacggaaaaccattattattggaaggatcatctgtgtggacattgaaatcaccaagaattaagacatgacttgattattgttaaaatttcccattcagcaactggtagaattaatatattgttacatattagtggtgaacataaattatctaaatgtggtcataatagttgttaaaattttaaaagcattgatttttaacactttcttttaagtttaatgtagaattattttttctaaatttaaaattttacccaaattgttattacacagttttttttctatttgtagaatatgtttcgacagcaacaaaagattcttcaacaatctagaattgttcagagccagagattgaaaacaattaaacagttatatgagcagtt

SEQ ID NO: 11874 - DNA, 457 bp, Homo sapiens
  misc_feature (1)...(457): n = A,T,C or G
nctgcctncgtgagcactcgcccgngcggnggaantctgatggtcaaggggagagtgactctatcagtcccctcctcttgcacttggtttactttgacttttctgagaatgaaaaacaacttgcagaaccagcctctgagccagatgtccttaagattgttattgactctgaaataaaggattccctcctttccaacaagaaagctattgatggagggaagaatacttctggcctccctgcagagcccgaaagtgtgtcctcaccccccaccctacacatgaagactggcttggagaacagcaacagcacagacactttgtggaggcctatgccaaagttggcccctctaggtttaaaagtagctaatccttccagagatgcagatggtcagagtctcaaggagatgccttgtttggcacctatagctgccaaagttgggtcagttggacacaaaat

SEQ ID NO: 11875 - DNA, 455 bp, Homo sapiens
  misc_feature (1)...(455): n = A,T,C or G
ntaaaaattgatgaccctaggtcgagcggcggaantngnttggtcctcttgtcctgcagaggcaggctggtgtgaccctgggaacttgacccgggaacaacaggtggtccagagtgagtgtggcctggcccctcaacctagtgtccgtcctcctctctcctggagccagtcttgagtttaaaggcattagtgttagatacagctccttgtggctggaaaacacccctctgctgataaagctcagggggcactgaggaagcagaggccccttgggggtgccctcctgaagagagcgtcaggccatcagctctgtccctctggtgctcccacgtctgttcctcaccctccatctctgggagcagctgcacctgactggccacgcgggggcagtggaggcacaggctcagggtggccgggctacctggcaccttatggcttacaaagtagagttggcn

SEQ ID NO: 11876 - DNA, 481 bp, Homo sapiens
  misc_feature (1)...(481): n = A,T,C or G
agagggccccaaggagccccccaatgagnccaatgatgaccattagacagtgcggtggaattcctagagctatcctgctgccatccaggagtgccctgttataagccctaataaactcaactactcatcaagctggacttgtccaagttattctttggtctttcagcaccttcccagtttgggggtgggtactacagtcccaagtttttcctgtaacagctgagatctattggtgacaaagttacaggtactgctattaatactgtggtttgctgcctacattcatcatgggaggaaatgcttaatttcaggttgtggttagtgaaaataaataaatatatatgtatattttttacatccaagttcacaggcaccctgaatttctatacagggacatcgggctaagaatccttggtccacacaagtaatatgttctcgttgtgagcaagcaagtggcataacctcaggatggtgagaacag

SEQ ID NO: 11877 - DNA, 471 bp, Homo sapiens
  misc_feature (1)...(471): n = A,T,C or G
cggcacacactgggagctacgatagaggctgnaannangagcccagaagaatggcccagctaagcccagcctaaatttctaaccagctcaaccctgagctagtatgttttaggattgttatgcagttatagcttagtaatatatacacccattaaagacaggattccaggattccaggacagattgattacaaataacctgcaaatgcttggcaccctgtaagtattgatattgtgtttcctttatttaaagttaaatttgttgtaagatggtattgacttatatagaagtgaggcaagagaatagggtctggaggcagggaacttaaggccaattcgtgctgaattcctaaagaagaaacaccaaggtctgggagcagggaacctaaggccaattaacgtgaacttcctacatctaaaccaaaaggaaaacctcatctacacctgagtagcaaaggatcaaaggtgactg

SEQ ID NO: 11878 - DNA, 477 bp, Homo sapiens
  misc_feature (1)...(477): n = A,T,C or G
catcgacccccctngnactgatgtatctagaccangcggnggaattcgccagatgacctcaccttctagcattcacacccttgagtagtgccttcctcattgctccaggattggtctgaccaacagaaccaaacaacatatggcagaaatggtggtatatcacttccaaggttaggttataagagactgtgttttccatctcagcttctttctctcccctgccaaacccctttgcatcattcattctggagaatccagctgccgtgtcttgaggacaatcagatggcctataaagggcccctgggacaaggaactgaggtatttttccaacagccaacaaggaaccgaggcctgccaacaaccgtatgagtgagcacggaattgtctagctccagatgactgtggctttggccaacagcttgtcttgagacaccctgagccagcaccactcagctaagccacttccagattcctgcc

SEQ ID NO: 11879 - DNA, 551 bp, Homo sapiens
ttcggatccgaacactagtccagcgtggtgcgaattcgatacattgtatacatataaaaccacataaaacaaaatctttgagctatatatataaaagttgtatataatggtttcagagctgagagtaatacggcattttctattttatttaatcctgtactaaatgtctttgtgacttataagtatatttctgtaattaagtcagaattttaagttatgttatccactatagcttatttttaaatttagaaaatcagtttttaaaagtataatataaaaacaaatgcattttgctcataagaattattttctgaatacagtggcttactagtttcttttgaagatttttttccttatcaattctgtattagaaatccatagattggccaaattttggtaatctagggtttcagattttttaatcataatatagacttgggttaatgctaattgcatgtgatctttcctgtacctagaaaaatgaaattgattagacccaagtagcaacaactaatgcatgaaccagtcgaatcgagcagattataacctgg

SEQ ID NO: 11880 - DNA, 479 bp, Homo sapiens
  misc_feature (1)...(479): n = A,T,C or G
agagcggtnnnnnncctgagacctgagaccctcgcagagcggggaatacccgggttcatgccattctcctgcctcagcctcccaagtagctgggactacaggcacccgccaccgtgcccggctaattttttgtgtttttagtagagacggggttttaccgcgctagccaggatggtctcgatctcctgaccttgtgatccgcccacttcggcctcccagagtgctgggattacaggcgtgagccaccgcgcccggccaaaaaagccacttttatattaactagttggctgtaataagagaacctcatacttcttggttgtcacagatacactaaggagcaggggatggagaggggactcatgtaatgcctgggttcagctcaagaacacgtcattagaaatgaaaagagcgctctctttcttttttctttctttcttttggtttggtttggttattgaaatggagtctccctctgttgc

SEQ ID NO: 11881 - DNA, 518 bp, Homo sapiens
  misc_feature (1)...(518): n = A,T,C or G
aggggccnngnnnnnnnnnnnnttactgactgccgatcactagtgcggnggaattcggagatccagcacctcaccgaanagagcctgtacaaccagcgcctgcgcctacagaacgagcaccgagtgctcaggcaggcgctgcggcagaagcaccaggaagcccagcaggcctgccggccccacaacctgcctgtggttcaggcggctcagcagcgagaactagaggccgtggaacaccggatccgtgaggagcagcgggcgatggaccagaagatcatcctggagctggaccggaaggtggctgaccagcagagcacactggagaaggcgggggtggctggcttctacgtgaccaccaacccacaggagctgatgctgcagatgaacctgctggaactcatccgaaagctgcagcagaggggctgccgggcagggaatgcagccctgggactggggaggtccctgcagtcgcctgctgcccagtgtgaccagaaaggcagccctgtcccaccatagcc

SEQ ID NO: 11882 - DNA, 461 bp, Homo sapiens
  misc_feature (1)...(461): n = A,T,C or G
cggggntcnntnnnaactgagaccgaagaccatgcggaggaacncctgaaaacacatcatggcttccaaagaaaagcatgaaagggccatgctgagaattgtgtgtgtctgtgtgtgaaagagagagagagacagaggagagagagaatctatacactgagcactggttctggaaagagttaaagaactggaatcagcatcctaaatgtctttagggctcattaccagtccatgtgacttacgccacatttcttaaaccgcttaacctcagttttgtcatctctaagatgggaataattgaaatagatgccttgcttggttgtgagaactaaattaggaaatccatgtgatatagttaggatgtttgtcccctccaaatctcatgttgaaatgtgatccccaatgttggagatgggggtccagtgagaggtgtttgggtcatgggggcagaaccctcatga

SEQ ID NO: 11883 - DNA, 452 bp, Homo sapiens
  misc_feature (1)...(452): n = A,T,C or G
gcggaacttaaaactgaaancctgggtngttagcacaagcggnggaattnccccttatgtaggttataattatgcttctgtaactatttctgtatatggggggagagcacatcataattttttaacaacagtttgtcgattacattatagtgtgcaaagttttacataatttaatgctttttcccagggactactattatacagtgggaaccggtcttacagtgactggtcttagattatacaacagttaggaggaattgggattggaagccaagacatctgacctttaatctactatctttctcaccacaccagtattttgacctcagagtcctcaactgaaatgatggatcttgaattatttcatcttcagaactttatgtattgtgaagtactttttgcctgtggctatgttctgtaagttagctttacacaaaatactaaaggcacag

SEQ ID NO: 11884 - DNA, 450 bp, Homo sapiens
  misc_feature (1)...(450): n = A,T,C or G
ggggtttttaacccaggangcatgantatctggagaaancnnnanangncaaaaagggtataaaaacaaaacaaaaaaagcatagttttaaaactgcttattgggaagataagaattcactttacatttacgatctcatattttggcatattcggtatttcctccataacgcctactaaaattaaattatgtaaacaaagtacccaggccaggcgtgctggctcatgcctgtaatcccagtgcttttgagagccgaggcaggaggattgcttgagcccaggagttcaagactagccctagcaacataacaagaccccatctctacaaaaacaaagtacccagtacatatttgaggagtagaaaattagcatctactgaggtttatcaaatacccagccttgggccagatgctggagggacacagccaaatctgacagggacccgccctca

SEQ ID NO: 11885 - DNA, 465 bp, Homo sapiens
  misc_feature (1)...(465): n = A,T,C or G
atcgagacattagnctttgcggccgaattcgnggcgccacctgtggtctcagctgcttgggaggctgaggcaggagaatcgcttgaagctgggaggcggaggttgcagtgagctgggattgctccactgcattccagcctgggtgacagagtgagaccccatctcaaaaaacaaagttggggcagggggggatttgctatcctattaaaaatttttggatctttttttttaaaaacttaatgctatttcttgaacacctttacttaaagaaaatagatagctaaatattgcagtgtgaagaaaaaggtcaataaatatttgttgaattaatgtaacatttcctttgatcaccagctgcttctaattccctacttcaggtattgttgaatactacattgctttaggcaaaaagtggtttatttctcactggatcaaaaacaattaaggatgtcattttcttctctt

SEQ ID NO: 11886 - DNA, 486 bp, Homo sapiens
  misc_feature (1)...(486): n = A,T,C or G
gggaagaattgaganccatcggnaaatcgatgaccataggacagngncgnggaattacaataccaccgccaggctgctgagcgagcgcgacgcggccaagcacaggctggtggtgctggtcaaggacaatggcgagcctccgcgctcggccaccgccacgctgcacgtgctcctggtggacggcttctcccagccctacctgccgctgccggaggcggccccggcccaggcccaggccgactcgctcactgtctacctggtggtggcattggcctcggtgtcgtcgctcttcctcttttcggtgctcctgttcgtggcagtgcggctgtgcaggaggagcagggcggccccggtcggtcgctgctcggtgcccgagggcccctttccagggcatctggtggacgtgagcggcaccgggaccctatcccagagctaccactacgaggtgtgtttgaccggagactcatgggccggcgagttcaagtt

SEQ ID NO: 11887 - DNA, 404 bp, Homo sapiens
  misc_feature (1)...(404): n = A,T,C or G
agtcgatcaactctaggctccaactcgttatgaaaagtgggaagtacgtcctggggtacaagcagactctgaagatgatcagacaaggcaaagcgaaattggtcattctcgctaacaactgcccagctttgagtggcaataatattgaactgggcacagcatgcggaaaatactacagagtgtgcacactggctatcattgatccaggtgactctgacatcattagaagcatgccagaacagactggtgaaaagtaaaccttttcacctacaaaatttcacctgcaaaccttaaacctgcaaaattttcctttaataaaatttgcttgttttanaaaaagnaaaaaaaaggattacactataaaaataaattaattatattaannnttnnaaaaaaaaaggggg

SEQ ID NO: 11888 - DNA, 468 bp, Homo sapiens
  misc_feature (1)...(468): n = A,T,C or G
ngacaactcnnattgtagacattagacagccgtgcggaanncgtatgataatttttcaaactgggctttctttctgtgctgaaatctgtttccacagccctaaaaatctgaagttttcctcttcttttctaggaaacctcaaaggtagatctcctcaccattacaagaacaattatatttataattcaagctgagttgtgactccactttgccctacatggggtttaaagatggtaaaactgaactccattctcatttgaaagtacctgtgagtaaacattttttcccacagcacagcactggccattgctaactgactccctgccagcttctataacaatggattttggactcttctaatttttaaaatttaggtcctagaatatacttatcattttaattcaacatgtaagaaatcaaatggatttcgaagactcagaagtcattgtttcttcagtgttcacaccg

SEQ ID NO: 11889 - DNA, 496 bp, Homo sapiens
  misc_feature (1)...(496): n = A,T,C or G
agggtccnnnnnnnnnnnnnnaattgatgaccactaggacagactggatggccctcgcacattgctgacccttctgctttcattcacataaaactgattntctcagctctatcattaatcttggggatcacattttttttttgtgagacaaggtgctccctgggttgcacaagccagttttaaactcctgacctcaagcgatcctcctgccttggccttccaaagcactgtgtgagccactgagcctgacctcaaaattgtacattcaaaacaagctgacgtcctgggcacaggaggcacgtgcctgtagtcccagctactcaggaggctaaggcaggaggatggcttgaggccaggagtttgaggctgcaatatgctatgatcacacgtgtgaatagccactgtactccagcctgggcaataaagtgagaccctgtctctaaaaaaatttaaaaaaaaaagctggcagaaacttagttatttgggattgatttgc

SEQ ID NO: 11890 - DNA, 402 bp, Homo sapiens
  misc_feature (1)...(402): n = A,T,C or G
gagcattgccccagccacactttctccctggttttgcttaattccacttatgcatcagtcatttcaacagcatgaatgtggttctgtacagtgatgtatgtggagatttctaaaatattctatgtgtgatttctgttcccaactaggttctaagtgccatcaaagcacggttgggtctcccttgtatcttccacagtgtgtagaaatttgtgctgcccagagctgtgcctagttcatagaaactgactggaagcacattgctgagggaggtttgttgaattggtttttaaggtttattgaaattgatttgctgaatttttctgctagttcaaaatgtgaattacgacctggtcagtttgaaatataccaaattctatgccctttctcttacctatcatcaan

SEQ ID NO: 11891 - DNA, 332 bp, Homo sapiens
ttttactgccacgcgtctgtggaaagcggatcggagaggtcttacatgaccctgaaacgcgtggctgtgagtgggctttcctactaagatgacggaattgcatgcgaaagcatcatatatgtgacattactaagcaggggaattagaagaataaaaaccacaagagttggtgaagttgaagaggaaactccatgtggagacacggcgccgtacttcagacctcccggtctactaatactgatggtgtggctggaacctggggtgtgtacagccctatccagaggatgctcctgtttcggctgattcctctacaccttgtgtggggaaggtgg

SEQ ID NO: 11892 - DNA, 452 bp, Homo sapiens
  misc_feature (1)...(452): n = A,T,C or G
gtggtgctaaannaatttgngactgantaactggaanaanccnnggggccgnggcagcgccagtcggggcccttccctctaagcttcccaaacgtgctgaatgccccacaagattggatttgtagtcgtcagctcatctggacacgaagacggcttcagtgcccgggagctcatgatccacgcgccaactgtcagtgggtggcggtcacctagtttttgaggagatgcaacaaataagaccccctgtccctgcatttcccggaagtgagttctgaatgaactgagaaatgaagcaagagtcaagcagaaggggccagacagcgcctttgtcacccgcagagctgggattgcaggcgagccagcgtcctgatactgcccaggccgtggccgatgcactgcccatgcaggcagcattaacacggtccagcctgtggctggagggcaggaggaag

SEQ ID NO: 11893 - DNA, 474 bp, Homo sapiens
  misc_feature (1)...(474): n = A,T,C or G
tggtggtggggnttttntttgagaccctgaacactgtgctggaattcctggattctatgaggaaatacttggaaagcatgcagcacaatgcctggggtgcagctgaagctgagccactggtgtttcttcacagtatctctgtggggagggtgtattattcctttttatagggatctctataatgaagtgagaatcttgaaaatataagtgttatcctagatgggaggtgttaaaggtttttgccttgggaattttgtcatatttgttgcacagcaaggaaggactttcagaaaagcagggatgtggtgaggaagagcaggcaatagagagcagggaggaaaggctaagtagcatctggaacttgagaagtctaagggagccaaaatgagattttctattaaaaatgtctatcctcagccgggcgtggtagctcacgcctgtaatcccagcactttggggggtcgagatgggcag

SEQ ID NO: 11894 - DNA, 449 bp, Homo sapiens
  misc_feature (1)...(449): n = A,T,C or G
aatagacgactcgtanaccgtgcggnggaattccaagatcccagatgttgggtgaagatctgccattccccttggtgtagtatctatggcattttcatcttcgttttcaataccaagtgttaattccatcccctttggattgtataccaccttgttatcttttatggacacatttaacacctacctaatcaccagggaaatcagctctatcagtgtcattacaattcatttcagtaaaagagaaaaggaaaggtcaccctctttgagagattctagggctttcaggaggaggagaagcaggagacagagctacagtctattcaaatcacaactatctccaaatcatttgtgttatcaggagcaggtgtttatatatttgaatataaatgtaacagatgcattttcatttctttcattctggagtgccagaggagctgtcccgttttccn

SEQ ID NO: 11895 - DNA, 181 bp, Homo sapiens
  misc_feature (1)...(181): n = A,T,C or G
aannanaanaataaaaaccacaagagttggngaagttgaagaggaaactccatgtggagacacggcgccgtacttcagacctcccggactactaatactgatggtgtggctggaacctggggtgagtacagccctatccagaggatgctcctgtatcggctgattcctctacaccttgtgg

SEQ ID NO: 11896 - DNA, 488 bp, Homo sapiens
  misc_feature (1)...(488): n = A,T,C or G
tgggccannnnaagcnaaacctgatgaccctgtgaanactangtccntcggacagtgcggcggaattccttttggattacaagaacctatgtatcagccgggcgcagtggctcacgcctgtaatcctatcactttgggaggatgaggcaggcagattgcctgagctcaggagttagccaccaacttgggcaacacggagaaacaccgtctctactaaaaatacaaaaattagccaggtgtggtggtggacacctgtagtcccagctactcgggaggctgaggcaggagaattgcttgaacctaggaggtggaggttgcagtgagccgagatctcgccactgcactccagcctgggcaacagagtgagactccgtttccaaaaaaaaaaaaaaaaaaaaccccccccccaccaaaaaacaaaaccttttgtttttaaaagggcaaccttggattccaattcaaatttggggggacccaattctcctttt

SEQ ID NO: 11897 - DNA, 476 bp, Homo sapiens
  misc_feature (1)...(476): n = A,T,C or G
ccccacattgtcgnatccactagtctagtgtggcggaattccacagaagaaacaaacaggaaaaaagcaactggaaggaaaagatgagaagaaaactttaataacattaatataatcttagataaaggaacatatttctcaatacctgtgaaagtagtatatctttaaagaaaacaacagccgggcacggtggctcacgcctgtaatcccagcactttgggaggccgaggcaggcagatcacctgaggtcaggagtttgagaccagcctgcccaatatgatgaaaccctgtctgtactaaaaatacaaaaattagctgggcatggtggcatgtacctgtaatcccagatactcgggaggctgagacaggagaatcgcttgaacccaggaggtggaggttgctgtgagccgagattgcaccattgcactccagcctgggcaacaagagtgaaactctgtctcaaaaaaacaaaaaca

SEQ ID NO: 11898 - DNA, 486 bp, Homo sapiens
  misc_feature (1)...(486): n = A,T,C or G
cgatnactancacagccgnncccnnnattgagnacaattgtagacccttagaccangcggnggaattcctggcttccttctctgtttgtgcagtatttgtttttgttgtcttgttgagaaatatcccctgtgcaacccacccttggttgaggatcacaaattgaggtgccttccttgtatgctttttgttagtattttttgtttttgttccttaactgctgagcctcagccagcgtgggtcctgggggaaataccattccaaaggaagccatccctatggggaaattggttttactgggtaaattaatacttttatttcttcccctatcccttccttcctagttgtgataaacatgggagaggagtgactttgactgctggggaatttcctcctaagaaccttattcccaaaataagccagggattatgtcaaggcttctttcaaggaggctcataaaagcagtgacctcatccggggctttggat

SEQ ID NO: 11899 - DNA, 490 bp, Homo sapiens
  misc_feature (1)...(490): n = A,T,C or G
nactgagatcgataggccagtgcgnggaactcctaaaatacaaaaattagccgggtttggtagtgtgcgcctggattcccagctacttgggaggctgaggcaggaaaatcacttgaacccacgaggtggaggttgcggtgagctgagatcccgccactgcattccagcgtgggtgacaaagcaagacgccttctccaaaaaaaagtttcccctttggccccaaatgaagacttggctggcagcagaggcacagctggaagcatcgatcttccacctccctggcttttccattctctgctctggggcaaaggagtgctgtgaaaagggagacgagtagtttctgcaacagtcccgcacaggccaccagggaaatggattattccatcttctttaacttctctttccttggcaccattgctttgtgaatataaggcaatatgaatagtaggctcaggaagaagatgtggccaaggaaatagatggatttata

SEQ ID NO: 11900 - DNA, 457 bp, Homo sapiens
  misc_feature (1)...(457): n = A,T,C or G
ggggcccccgggattcaactgtacctacgnactgcggcgtagnaganggcaacnccagatgtgcgcattgacaccaggctcaacaaagctgtctgggccaaaggaataaggaatgtgccataccgaatccgtgtgcggctgtccagaaaacgtaatgaggatgaagattcaccaaataagctatatactttggttacctatgtacctgttaccactttcaaaaatctacagacagtcaatgtggatgagaactaatcgctgatcgtcagatcaaataaagttataaaattgcnnaaaaaaaaaaaaaaaaaaaaaaaaaaaaaaaaaaaaaaaaaaaaaaaaaaaaaaaaaaaaaaaaaaaaaaaaaaaaaaaaaaagggccccctttaaaaagggggggcccaaaaaaccccggaaaaacccctgggggttttttttttaaaccccacctttttgg

SEQ ID NO: 11901 - DNA, 459 bp, Homo sapiens
  misc_feature (1)...(459): n = A,T,C or G
cagaggnccnnnnnnaaatggagnactgaaggccgtgcggaggaacncccgnctgggaagaacccccgctgaagtcgtctcaacctgcgacatcactttcgcctgtgtgtttgatcccaaggcggccaaagacctggtgctgggccccagtggtgtgctgcaagggatccgccctgggaagtgctacgtggacatgtcaacagtggacgctgacaccgtcactgagctggcccaggtgattgtgtccaggggggggcgctttctggaagcccccgtctcagggaatcagcagctgtctaatgacgggaagttggtgatcttatcggctggagacaggggcttatatgaggactgcagcagctgcttccaggcgatggggaagacctccttcttcctatgtgaagtgggcaatgcagccaagatgatgctgatcgtgaacatggtccaagggagcttcat

SEQ ID NO: 11902 - DNA, 331 bp, Homo sapiens
aagaatatattcttttggaattttggaattttgattttcttagatgactttttagcaatttaatgataataatttctatttttcttccaaaactatggcatgttatagtagatcttactattaaagatcttttatattttaaactgtttttttcctattctgctttttgctgctctcaaagactgtgattgatgaacatcaccaaactttttttgtggcaaactgcttattttataagtagctttatataagaaaacttcttataaaactatgtggctggttggttccatttagaaactcttaacaggtatggctttcattcctccagttg

SEQ ID NO: 11903 - DNA, 491 bp, Homo sapiens
  misc_feature (1)...(491): n = A,T,C or G
nattgaaaacgntnngnannnnccaactgagtantcatccggaagngccgnggaattcgagcgaatcgagcgccagcgagggagaatcgcctgccttcagctctgcctccagcgactcaaacggcagcggtggcctcgtgtggccgcagcagctggtggcggccaccgcggcctctgggggtggagcaggtgcaggggcgcccgcaggccccgccaaagtcttcgtgaaaatcaaagcttcccacgcgctcaagaaaaagatactgcgtttccgttcgggttctctcaaggtcatgactacagtgtgagtttggggatttgcttgggctcccccttcatggcctctgcacctccacactcccaaccactgacccttccacatctaccttccaaagaccatcgttttctctgcttccaaagacccccctcactctccccactcctaacagtcttggntgaaaaagctcccccaccaccaccgagaggaatgg

SEQ ID NO: 11904 - DNA, 467 bp, Homo sapiens
  misc_feature (1)...(467): n = A,T,C or G
ctgcgggngnttttnaattgattccatatgcattgtgcnggaactcaattattgaagctgcagtaaggtcttgtgggacctgcagttagagagaagggacaactcaatttgggactgcagcagaaacccctacatcatggggttcctggaagggaccctctcccttcagcgacgcactgtgaggccatttctaggtaaaaaggtagaatttccttggattcctgaggtttattttacacttactgcttattctttgactttatagaagccaacttcagtttgaacatcttgcaattaattttttttggctctaagtggagaatttgaacttgtttctgaagaaaaccaggggctccttatgtgagcaagcacccctccctgtggcccccttatgcaataaacataagccattgtgagccagcaaaatttaaagcaaggaaagcagtaaaccctccatttcagcatgt

SEQ ID NO: 11905 - DNA, 483 bp, Homo sapiens
  misc_feature (1)...(483): n = A,T,C or G
ggggccannnanagcaaaaactgatgacctaggaagactgatggccntcccagcctgcgcgacacaacgagattccatctcaaaaaaaaagatagtgtaatattggcactgggtaggctaataatgatggaccaatagaacaccatatggagtccagaaacagtattatgcatagccagacacttgatttatgacctggaggcatggcagaaaggcaggcaaaacaataacacttttagaattaatataggaagatactcatgaccttagtatagagaaacatttcttaaacaagatgctacaggcactaatagaataatgggcaaaagtcttgaacagccacttcagaaaaggagaaatccaaatgtctaataaacatgaaaaggtgttcaaccatgttaatgaaggaaatgcacatttcagccacagtgccagaacactgtatacctaaattaaagttggatgttgaacagtagggacttt

SEQ ID NO: 11906 - DNA, 438 bp, Homo sapiens
  misc_feature (1)...(438): n = A,T,C or G
cttgacttccattaccactacccangcggnggaattctttttttcttgttctttccttctacaacttttattattctatgatggtcttcatgggctggccatttgaagtctgttcttttgcatgatactttgtttcatttttaatctacctactgggaaagctctcaactcttaaaacaaaaattcatgggagggttgaaatataaaattatgtttttattttctaaaagtctttcgtattctctgtggtctctgtgtgtcattgttcattatacaaatattcagtaaatctccccattttcagccctatttctccctgctgtcctcttaccaggcatctcagagcccctgaacctccctgtgtatctacagatcaatgggtcttgtctactctaagctgaggtttcctgtgcccacttcagcagttctaatctgttg

SEQ ID NO: 11907 - DNA, 331 bp, Homo sapiens
gtgagggccttgaacaagtcattttcttcacattctcatctgtaaaatggagataataccttacagattattgcatattaatagccatgtattcaaattatgtgactcggccgggtacaatggctcacgcctgtagtcctgcactttgggaggccgaggcagacagatcacctgaggtcgggagtttgagaccagcctggccaacatggcgggaccatctctactaaaaatagaaaaattagccgggcacgttccaggcacctgtgatcccagctacttggaggctgaggcagaagaattgctttaaccttggaggcggaggttgcattga

SEQ ID NO: 11908 - DNA, 330 bp, Homo sapiens
cccggactggggcacggcgaaactgggaaccaagaggccgcaccccgaggatggggacgggcagagcctcgagggcgtctctagctccggcgacagcgcagggctggaggccgggcagggccctggggctgacgagccgggcttgtcccgcgggaagccctatgcctgcggcgagtgcggggaggccttcgcgtggctctcgcacctgatggagcaccacagcagccatggcggccggaagcgctacgcctgtcagggctgctggaagaccttccacttcagcctggccctagccgagcaccagaagacccacgagaaggagaaaagcta

SEQ ID NO: 11909 - DNA, 325 bp, Homo sapiens
ctttttatcatgaaataaacacacaaggttttgttttttttcctggcagcttcggacgaaattacataggcatttcccatgcccaccacccgttaggaatgtccattcttgggctgcgtgcgcaggtccaacaaccagtttgtgcaggcgcctggcccggccagggaaattgaggcaaacccccacaagccctgaaccccagtttaaagttttttgcacgacctgtacttaagtcaccagacactcctccaggccggttttgcccgcctcccaaaccacctgcaaaaacaaaaggaggcagggtgagtcggccaccccccagatg

SEQ ID NO: 11910 - DNA, 454 bp, Homo sapiens
  misc_feature (1)...(454): n = A,T,C or G
gggcggcttaatctgatgactaccgttctntngnanaancnnnnnaantnnnacaagcctgagcaactacggtcgcaagccgattaccgtgctgctcttcgtccactaaaagacccgcgccatcggcctccgggttgcgtcgagaattcctggaagggccctgatatgactgtggttggactgacctgactgccagatggtgggacttggtctggagcagggactacttggaatgataaaggcaaaactcaacagcccctggagctgcgcttgtggtggagctggaccctgaaattacctggaccttttttttagagacagggtttctttctgcagtctcaaactcctagccttgattgatcctcctgccttggcctcccaaagtgctgggactacaggtgcatgcaaccacacctggctaattttcttttcttctttctttcttttttttttt

SEQ ID NO: 11911 - DNA, 452 bp, Homo sapiens
  misc_feature (1)...(452): n = A,T,C or G
nttgagatcgagacatctgcccgggcggnggaattccccggctcgtacggcctttcacgagtcttcaagccttcaggctttcttttagtcaagatgagtgataaaccagacttgtcggaagtggagaagtttgacaggtcaaaactgaagaaaactaatactgaagaaaaaaatactcttccctcaaaggaaactatccagcaggagaaagagtgtgttcaaacatcataaaatggggatctcctccaaagagcagatttcagcattgcctgacagtcttggttttaggcttgtttttttgtaaacctgtgtgtttgtagagatttcagacatcttctgatttcttctcacctatattccctggttaagaggtcaggggtagtgaatgtttccttaagttcctttttaaacttcccattggtatgtaaattccaaatggcagatgctgtcan

SEQ ID NO: 11912 - DNA, 514 bp, Homo sapiens
  misc_feature (1)...(514): n = A,T,C or G
agccacannnnngnnnaactgatgacctctgaannnactgantatcatcgtaangncgnggaannantttagntaaagnggtaatggaaggcctctcaggggagaaggatgacattggagctgaaatctaaatgataagaagttagctatggaaagatatggttccaggggatttaaataggtatggccagagctgcatacggccttttaaaaaaatagcattctagccaggtgcagtggctcacacctgtaatcccagtactttgggaggccaaggtgggcagataacttgaggttgggagttcgagaccagcctggccaacatggtgaaaacccgtctctactaaaaatacaaaaagaattagccgggtatggtggcccatgcctgtagtctcagctactcgggaggctgaggcaagagacctgcttgaacccaggaggctgaggttgcaatgagccgagattgcgccactgcactccagctctgggtgacagagtgaaactctgtctcaag

SEQ ID NO: 11913 - DNA, 453 bp, Homo sapiens
  misc_feature (1)...(453): n = A,T,C or G
natcgagattcgttgncagtgcggnggaattcctgatgaaaatggatcacactgcaatccacccacatctacttgatatgaaaattggtcaaggcaaatatgagcaggggttctttccaaagttacagtccgatgtcttggcaacaggaccaaccagtaacaatcgctgggtaagtcggagtgccactgcacagcgcaggaaagaacgccttcgccagcattctgagcatgttgggctggacaacgacttgagggaggtatgtggtctaccttcctggggtgcctcacagcaagcgccatgaactaggcttattccttccagcagatgtcattgtgtagattcttaatgttctttaaaaaaaaaactgtttagttatagtttaaaatattaatccttttgtacggacatatagcagaaaacacccttttttccatttttgtaatttcaagacn

SEQ ID NO: 11914 - DNA, 470 bp, Homo sapiens
  misc_feature (1)...(470): n = A,T,C or G
tgggggatttaatcgatagcatacgatagngcggngcaattcggcacgcagcaccctcaagtggacatttctagaaaccgcttcttacttgctcctaattgattacttttgcacattgcacagaacccaacctcgaggcctgctccctgccagttgcctgaaatcagccctgaaattctgaaaccaaagagctgcttcctgagaacaagttatttaccttagaattgaaaatgtatatccttttatgggcctttccaaatctgattagaaaaaccacaaaaggaaacagaagagaaaataagagccacagaaagtacaatatgttttattaacaggaaagccagaaataagatattttaaacatatttttaatgagactttattgctatattccaacaggtcactcctattcttagagaatgtgaatgacttgtgtcacttcggagtgacagaaaaatcaggaactgaaa

SEQ ID NO: 11915 - DNA, 470 bp, Homo sapiens
  misc_feature (1)...(470): n = A,T,C or G
ntgcggccgnntnnnaactgaatcgatagcataggccangnccnggaattcgtttttgatgatgtaccctgagttgatttggcactttgcatgtcttcttctgtttctgtagtacacaaagtttcaaggccagaaaatgagcagctcagaaatgataacaagagacaagtaggtaagttcttggatctaaaagtcatattctatgcttctcaacagggagaatattttaaatatatgatacataattactataaaaaaatgaaaggcgggggttgtgactgtaaaggaggagcacaggggagtgtcactgtggtgacagaacagtcctttatcttgattgtggtggtagttttgcaaatctatatatggtagaacatcatagaactatgcataaagacataccaaaaaatgagtacatgtacaaactggtgacatctgagcaaggtctgtagtttagttaattagattgg

SEQ ID NO: 11916 - DNA, 441 bp, Homo sapiens
  misc_feature (1)...(441): n = A,T,C or G
ntttgatgttcgattacaccagngcggnggaattctcaatatttcagttagttaacgttctagcacatttattttataatgcaatacttttttgtgaataggaagtaatactgtataagacaagacactaacttgttatgcagaaggaaaaaaaaaagatattattaccaaaaacagatgtgaagatttatggttggccagagggcctgggaaattcaaaactgttcaggtagggagaactcgtttcataagagaagaggcttcactcttaagtagcgggaaaggcagaattttgtggtaaccatgtacagagtgctttgtacttcaaatttcagaatgaagtttacagcccattcctatgatatatgttactgcccctagacatggcctattggatttattactgcagggccgcctttttgcctatcctgacactcaccg

SEQ ID NO: 11917 - DNA, 455 bp, Homo sapiens
  misc_feature (1)...(455): n = A,T,C or G
nttgaggaccttggaagngcgcggtttgactgcgtcattgatgagattntagatttcttttatggctatcaagtaatcccaggctcagtgtgtttaaaatacaatgaaaaaggtatgcccacaggtgaagccatggtggcctttgagtctcgggatgaagccacagctgctgtcattgacttaaatgacaggcctataggttcaagaaaaggaaaacttgtattagggtagccattcacatcattttttatagggtagatcttcatattgctgtgattaatgcatccagattgttttcctagtatttccaggttagaacctgtggattgtttcaattgcatatagcttggtttccataacatagagcattggttgactgtttacagaagactcactcaccaggataaacattgctgtatgttacagtaaagctatctggagagaacacataaatg

SEQ ID NO: 11918 - DNA, 459 bp, Homo sapiens
  misc_feature (1)...(459): n = A,T,C or G
ganaatnaattcgagatcactgttggtgtgccgtaattctttatttataacaacacttttttggcaatcagtttgtagctgtgcccttatttttatagatagtttgccatttcttgggtttaatgtttaacaaggctatagaagtttaaaatagtggacaaatgtttgtgaatacacttttaaaaaattgttttaaaagagaaaagcggtcttgctttgttgcccagactggagtgcagtggcataatcatagctcaccgcaagcctcaaatttttgtgctcagatgatccttttcatctcagcctcctgattagctgggactataggcgtgtgccaccatgcccagctaattttgaaatttgcttgtagagatgggatctcactctgttgtccaggctggtctcagaattctggtgagtgatcctcccacagtggacttccaaagtgctgggattaca

SEQ ID NO: 11919 - DNA, 316 bp, Homo sapiens
  misc_feature (1)...(316): n = A,T,C or G
gggcngaaaaccttgctgatttgattagtgcatccacaaattttcttggattttctatgggtaattacaaatctccacacaatgaggttgcagtgagccaagatcacaccactgtactccagcctgggcgacagagtgagacaccatctcacaaaaacacatatacaaactaaccagaacccacacaatgacaacgtatgtgngttcttttctctttctctttctgaatatttctttgcctatcttaactgaactgccagaaaccccaggacaatgataatacgagcagtgtcacagacatctcattcctttctag

SEQ ID NO: 11920 - DNA, 470 bp, Homo sapiens
  misc_feature (1)...(470): n = A,T,C or G
atgcggggcgnttttnnccttggctagcattccatngtgcnggaactcgtgactttgggatgagaccgcagagcctgtagaatcaagttgaacctcaaagtgccagtcttgtggatttcggcccacaggctgctccagcagaatgttcatgcagatgctctttgaacaaactccctcctcaaactgcaaattcagccttcccaaatggatttgtcaagttggaaatctcttatatatacccatcctcacccttcgtaggcagaagcaattctagagctgtcttctcagcgaattgttaaccaactcacagcctggtggtgtaccgggagtggcaagttctgtcagtttatttcaggacagccagaaggtgttcggtggaactggtcccgtgcctctgcagtgcaggtgtgggcctggtggggtgggaagtgcagccagggaaaacacagggcagaagcctgggcagaaac

SEQ ID NO: 11921 - DNA, 483 bp, Homo sapiens
  misc_feature (1)...(483): n = A,T,C or G
tgagcggtnnnnnnnnnaatcgtagtccctagtcctgtgtggtgcaattcgtttatgacaatagcagcacaaagactgggagtgggagaacaaatatactcttgtaagctttttacactacatgtgaagttgtataatgtcaattgaaggtagactgtgataagttaaagatgcatatgataaaatctatagtagcagagttatagctaatgagccaacaacaataaaaagttgggatataatcccagcactttgggaggccgaggtgggtggatcatgaggtcaggagttcgagaccagcctggccaacagggtgaaactttgtctctactgaaaatacaaaagttggccgggcatggtggtggcacctgcccgtggtctcagctactcgggaggctgaggcaggagaatcgcttgggcccgggaggcggaggttgcagtgagcggagatagtgctactgcactgtagtctgagcgacagag

SEQ ID NO: 11922 - DNA, 467 bp, Homo sapiens
  misc_feature (1)...(467): n = A,T,C or G
tggcgccgnnnnnnaactggatcgatagcntggccangngcnggaattcctgtctcaaaagaaaaaaaagttagcattttatcttaagcacaaaacttttttttttctaacaaaataatacatgttcactgtggagacttgaagaaatagagtaaaaaagaagaaaatagcaatcatctgtgatccttcactcacacagagaccaaactgctagttaacactgtgaggcatgtgcgtgtccttctgttctcttccaatacttacaagtagaaatttctattcagatgttcatgtgtatatgtggtgttatacacacacgcctatataccttttctgtttggggggctggaaggcaaagcacttcacatgggaggttctggggatcttgagaggctggcatagtcagccttggctgtgccaaggtcttgggcctgggggccatgtctggaggtgaggagaaaatccag

SEQ ID NO: 11923 - DNA, 456 bp, Homo sapiens
  misc_feature (1)...(456): n = A,T,C or G
nattgaggaccgagncccatcgcgccgngcggnggaattcgccatataaaagatgagatgtccattgcatgtccattggagggacgtggtatggagctggaggccattatccttagctaactcaggaacagaaaaccaaataccgcatgttctcacttatgagtgggagctgaatgatgagaaaacatgaatacatagaggggaacaacacacactggggccttttggaggatggagggtgggaggagggagaggatcaggaaaaacaactaatggatactaggcttaatacctggctgatgaaacaatctggacacaaacccccatgacacaagtttacctatgtaacatacctgcatttgtacccctgaacttaaaatgtttaaaaagaagaagaaataaaactttttcagggcaaatttgtaaaaatagcaaaagaaataaagggcatccaca

SEQ ID NO: 11924 - DNA, 473 bp, Homo sapiens
  misc_feature (1)...(473): n = A,T,C or G
nnttcgatgaccattaggaagngccgngnntttgatgtcccttagtacangcggaggaattcaatttataaatgcagcttgccagacccactggattagaacctttgggagtgccatgaagtgacattttaaaaataagctaggcaggttgcagtgactcacacctgtaatcccagcactttgggaggccgaggcgggcggatcacgaggtcaggaggtcaagaccatcctggctagcatggtgaaaccccatctctactaagaatacgaaaaattggctgggcgttgggggtgggcgcctgtggtcctagctactcgggagggcaaggcaggagaatggcgtgaacctgcgaggcggagcttgcagtgagctgagattgcaccactgcactccagcctgggcgacacagcgatgctgcaactcaaaaaaaaaatattaaaaataaaaaatgaaaaaataaaaataagctcag

SEQ ID NO: 11925 - DNA, 441 bp, Homo sapiens
  misc_feature (1)...(441): n = A,T,C or G
ctgagccacactgtaagaccaccgcactaggctggaacatctccattactttggacatgacctaaaatgatacatcctggtcaccaccaacctcaagaaagcaatacgaggtttggagtggaaaggctgggtgcaacactttcccacccactcctacctttccactctccctcatgctatgtgggagagaaaagggagtgctaggctggagcccttgcttgcccacttgggatttcaattttccaatttaaaaagttctctaagacccttctaacactctagtaacactgaacctagaatggcctccctctcaactccctaagtctcttctgttgcccaagctctagtgccacttcctccaggaagccttcctgacctttagctgcatctactctactcattcggncttacagactngaagccctacattatgagncagca

SEQ ID NO: 11926 - DNA, 450 bp, Homo sapiens
  misc_feature (1)...(450): n = A,T,C or G
ntttgagacctaaggcnatgcggggacttcaggngtacgtggaagaaccacagaaaaataagagagcttgtgtcaggcataactttaaatgttaagtgaaaaggtgagagggtgtagtgaaagaggggtcctgcacccaaaatcctagagatccagcaaaggcagcagccattaaaggttgtaatggggattgatggtgcaactgcgtagagggaaggttcagttctcatggtgtataagaaagcacatagtatctgtgagtagtctttcactactattcatggggctgggtataagcaagcaagaggaggggtcaggaggagagtcaaatgagcagggcgagggtagccaaagatggagtgagatgcagggtaggtgtcttcctaagcattagtgactgccaatgttttttagtttgtcagtaatgatagagagcttatcagtaatgtg

SEQ ID NO: 11927 - DNA, 466 bp, Homo sapiens
  misc_feature (1)...(466): n = A,T,C or G
ggggaaattgatgaccatctgtcaatgcagngcaattctactgtacaaattcagtttgttgctttaaagaaacaaactgatacctgaattttgctgtgtttccattttttagagatttttatcatttttttctctctcggcattcttttttctcatactcttcaaaaagcagttctgcagctggttaattcatgtaactgtgagagcaaatgaataattcctgctattctgaaattgcctacatgtttcaataccagttatatggagtgcttgaatttaataagcagtttttacggagtttacagtacagaaataggctttaattttcaagtgaattttttgccaaacttagtaactctgttaaatatttggaggatttaaagaacatcccagtttgaattcatttcaaactttttaaatttttttgtactatgtttggntttattttccttctggtaatcttttg

SEQ ID NO: 11928 - DNA, 469 bp, Homo sapiens
  misc_feature (1)...(469): n = A,T,C or G
ggcncaatgagnccntngnnnattgatgtccattagaccgtgcggtggaattctgactaggaaaaaatgtaggtgtcagttttaaataaagtttgtttaaccaggcacatgaaagctatttttttcttcatcatgaggctagcttaaaaactttgcatctgttttcatggacattagtttatttgaaggattaaaaccctaaaattggtcaggtctgttttacactgtatctttcctgcagccagactgttgatctcctcatgcaagagtcaggatgtcgtttagaacatccttctgctaccaaattccgaaatcatgtcatggaaggagactgggataaggcagaaaatgacctgaatgaactaaagcctttagtgcattctcctcatgctattgtgagacagagttttgctctcgttgcccaggctagagtgcagtagcacaatctcggctcactgcaacctccacn

SEQ ID NO: 11929 - DNA, 400 bp, Homo sapiens
acagaggaagacatgggacgcaggaagcagataatccaatacaggaaagaagtgaaggaatcacttagatcagggctggcagacttttcctgtaaagggccagatagtcagtatccctgtctcagctactacactgtccttcaggtctgtcttaaagaaaatgctaagtgccaggtgtggtggctcatgcctgttatcctagcactttggcaggccgaggcaggtagatcgcttgaggtcaggagttcaagaccagcctggccaacatggtgaaaccccatctctactaaaagtacaaaaaattagctgggcctggaggcgggcacctataatctcagccacttgggaagctgaggcaggacaatcacttgaacccgggaggtggatgttgccgtgacct

SEQ ID NO: 11930 - DNA, 550 bp, Homo sapiens
  misc_feature (1)...(550): n = A,T,C or G
gatcgaatacgatncgagtggngcaattcgctctcagaggcagcgtgcgggtgtgctctttgtgaaattccaccatggcgtaccgtggccagggtcagaaagtgcagaaggttatggtgcagcccatcaacctcatcttcagatacttacaaaatagatcgcggattcaggtgtggctctatgagcaagtgaatatgcggatagaaggctgtatcattggttttgatgagtatatgaaccttgtattagatgatgcagaagagattcattctaaaacaaagtcaagaaaacaactgggtcggatcatgctaaaaggagataatattactctgctacaaagtgtctccaactagaaatgatcaatgaagtgagaaattgttgagaaggatacagtttgtttttagatgtcctttgtccaatgtgaacatttattcatattggtttgattaccctcgtgtactacaagatggaataaatactatgggattggttgtataaaaaatttacattgcttcttactattcagcagtagaaactttttacacagtan

SEQ ID NO: 11931 - DNA, 509 bp, Homo sapiens
  misc_feature (1)...(509): n = A,T,C or G
aggggccgnnnnnangnaccctggtgcctangnanngnactgantatcatcgtaanancaannagangaagaggagagacggaggagagtctttgatgttcccattcgcagacgccgctgctcacgccttttttagcaagccttctgctgatggaagcactaggatgattctaggctgttaaatagatttctcaataatgtaaataactaaattgttctctgcatatagcaggaaaactagcatgaaatattgtttcaggccctgggttctatgtgacactacattaggaattggattggttgggtttgctttgtgtttttgaggtagaggaagaaatgggaatcttttttttctcttccaggagtcagtggaagaatagttctctagctaaggaacggacatacctttgttttaaaatattttatacttacaaaaatctagaaatggagagggaacctgtttgaataaaggattaaaatacctcgcacaggatagagagaaactatgn

SEQ ID NO: 11932 - DNA, 466 bp, Homo sapiens
  misc_feature (1)...(466): n = A,T,C or G
ccccccatcgagacttctgtccgagtggaggacttccggaggcggtagtgacggtggcgtttccttgaggaagagtgagggttccaacttttctgcttatctgggaggtgttgggcgcggacagtcgagatgtcagagaaaaagcagccggtagacttatgtctgttagaggaagacgacgagtttgaagagttccctgccgaagactgggctggcttagatgaagatgaagatgcacatgtctgggaggataattgggatgattacaatgtagaggatgacttctctaatcagttacgagctgaactagagaaacatggttataagatggagacttcatagcatccagaagaagtgttgaagtaacctaaacttgacctgcttaatacattctagggcagagaacccaggatgggacactaaaaaaatgtgtttatttcattatctgcttggatttnattgtgtn

SEQ ID NO: 11933 - DNA, 443 bp, Homo sapiens
  misc_feature (1)...(443): n = A,T,C or G
nttgcngaccctagtccttgtggtgcgaattaaagaggaagacatgggacgcaggaagcagataatccaatacaggaaagaagtgaaggaatcacttagatcagggctggcagacttttcctgtaaagggccagatagtcagtatccctgtcacagctactacactgtccttcaggtctgtcttaaagaagatgctaagtgccaggtgtggtggctcatgcctgttatcctagcactttggcaggccgaggcaggtagatcgcttgaggtcaggagttcaagaccagcctggccaacatggtgaaaccccatctctactaaaagtacaaaaaattagctgggcctggtggcgggcacctataatctcagccacttgggaggctgaggcaggagaatcacttgaacccgggaggtggaggttgcggtgagctgagatcgtgcca

SEQ ID NO: 11934 - DNA, 471 bp, Homo sapiens
  misc_feature (1)...(471): n = A,T,C or G
gctgggtgnntattgattgagtacataggacangcggnggaattcgaattcagtaaagagcttactcctgtagcgaaacaactgctccatctgcggtatggcaactgtcagctgtaccaaatgaagtgtgaagacaaggccatccaccactttatagagggtgtaaaaataaaccagaaatcaagggagaaagaaaagatgaaagacaaactgcaaaaaattgccaaaatgcgactttctaaaaatggagcagattctgaggctttgcatgtcttggcattccttcaggagctgaatgaaaaaatgcaacaagcagatgaagactctgagaggggtttggagtctggaagcctcatcccttcagcatcaagctggaatggggaatgaagaatagagatgtggtgcccactaggctactgctgaaagggagctgaaattcctccaccaagttggtattcaaaatatgtaatg

SEQ ID NO: 11935 - DNA, 455 bp, Homo sapiens
  misc_feature (1)...(455): n = A,T,C or G
tgtaaaggctgngnngtgatgtccattagtacangcggnggaattccaggaatttgaacttaggtgcttctgactcatatccatactcttacagtagactatctctctgttgcacatggtgaggatctttatgttcattgtggagggaaaagggagcccaagtctagagattgagtataaagtttgggccaaaagcaggagtagagtctgctggaagactcgctagcagccttagcattggcaccacctccttactaaaaccacatcttgcttcctggcagagcctattactgttatagttggcagagcattacagggagcttggaagaacttccccggtaccttccaattttccctatttggtcagttcagacttgcggtagtgcaataacctcctaaccaatctcttggcccctatgcttgctttacctccagtcttgtcttcgcgttgcacg

SEQ ID NO: 11936 - DNA, 448 bp, Homo sapiens
  misc_feature (1)...(448): n = A,T,C or G
nttcgagacactagnntttgaggacccttagaccaagnggnggaattcgcagactccttctccagcatgggctcgcctgtcaacgcgcatgacttctgcacggacctggccgtctccagtgccaacttcattcccacggtcactgccatctcgaccagaccggacctgcaggggctggtgcagcccgccctcgtctactctgtggccccatcgcagaccacagcccctcaccctttcggagtacccgccccctccgctggggcttactccagggctggcgttgagaagaccatgacaggaggcctagcgcagagcattggcaggaggggcaaggtggaacagttatctccagatgaagaagataaatggagaatccgaagggaaaggaataagatggctgcagccaaatgccgcaaccggaggagggagctgactgatacactccaag

SEQ ID NO: 11937 - DNA, 449 bp, Homo sapiens
  misc_feature (1)...(449): n = A,T,C or G
nattgacgttcactagcccagngcggnggaattcgccccttcccgtctgccctgtgtcctcactgcgtgtgggtatgacctctgcctggtggctggtgtatcccaactgggcaagagatggcagagggtcccccttgtgggtgcgcttggatgtgcagagccttctccatggattttcttccctgtaagtgccgggcccctcaccccagctgacaggctgttgctgtgcctgctcacacctgctcctgcaggcacactgggctagggacgaggaaggagcagccacaagtggtagaactgccttggtggacaccagcctcgccctgtctttatttcctgaatggtttgtgaacttgctcacctggaccactgtatcctgccactgtccttcctggtctcgcactgccactgcatggcctcctgtcactgtgaatcgtggcccagtctcn

SEQ ID NO: 11938 - DNA, 470 bp, Homo sapiens
  misc_feature (1)...(470): n = A,T,C or G
gccccccatggagccccttgnnaactgcgaccactagtccgtgcggtggaattcaactaagtgaacattgcctttctaattgatggctccagcagtgttggagatagcaatttccgcctcatgcttgaatttgtctgcaacctagccaagacttttgaaatctcggacattggtgccaagatagctgctgttcagtttacttatgatcagcgcacggagttcagtttcactgactatagcaccgaagagaatgtcctagctgtcatcagaaacatccgctatatgagtggtggaacagctactggagatgccatttccttcactgatagaaacgtggctggccctataagggagagccccaacccgaactttctagtgattgtcacagatgggcactcctatgatgatgatcaaggccctgcagctgctgcacatgatgcacgaatcactatcttctctgacggtgtggc

SEQ ID NO: 11939 - DNA, 400 bp, Homo sapiens
  misc_feature (1)...(400): n = A,T,C or G
gtgtgttcttgactccgctgctcgccatgtcttctcacaagactttcaggattaagcgattcctggccaagaaacaaaagcaaaatcgtcccattccccagtggattcggatgaaaactggaaataaaatcaggtacaactccaaaaggagacattggagaagaaccaagctgggtctataaggaattgcacatgagatggcacacatatttatgctgtctgaaggtcacgatcatgttaccatatcaagctgaaaatgtcaccactatctggagatttcgacgtgttttcctctctgaatctgttatgaacacgttggttggctggattcagtaataaatatgtaaggcctttctttttaataaaaaaaaaagngaaactttaaatgcaagggcggccg

SEQ ID NO: 11940 - DNA, 452 bp, Homo sapiens
  misc_feature (1)...(452): n = A,T,C or G
ntttgnttagaagaccacttgtacagcgcggtggaattcaatcagttttggaatctaagctgtttgccaagctgaagctacaggttgtgaaataatttttaacttttggaatcatactgcctactgttactctaaatagaaatatagggttttttttaatgtgaatttttgcctatctttaaacatttcaatgtcagcctttgttaaccttaaatacactgaattgaatctacaaaagtgaaccatctcagacctttactgatactacaacttttgttttctgatggccaaaataccaaatgcctgttgtatttatggattaaaaactgcttataaaaccctgtgttactactcctactcttggagatgataatattctatgtggtcaaatatttggactcatttaggacttagatatttcagtgtacttgattttttaatttaactctttt

SEQ ID NO: 11941 - DNA, 446 bp, Homo sapiens
  misc_feature (1)...(446): n = A,T,C or G
gtggtccttaacctagganaactgatngcnggaaaannccgctttttagattttttttaaattttatcttactgtttttataatttctattgggaagaggcttgtgaccagtaccaatcttgagtttctttttctgtccacaagtaaattaatatctgctctgaaatgtcatttatctactcacacattcttggggaaaaaaatcaaatgtcagtcctagcagatgttgcatgtaaattggtagcaagtaatgattacaacccagaggattaagaattttgtaacagaaagctctatgttttaattttttatatacaattaggataattagcattgtcagactataaacctttgctttttaaagtttatttttactatttctttatcactttattgtatcatcaccattggtttcataatgtaaatactatatgttgaacaaattn

SEQ ID NO: 11942 - DNA, 472 bp, Homo sapiens
  misc_feature (1)...(472): n = A,T,C or G
nttgacctctggctatgtggtcttggaagcgcgcagaacgaagccgacccggaggagctgtcgccttaatcctcctggctgctgtcgtcagctgtgccgtcgcgcagcacgcgccgccgtggacagaggactgcagaaaatcaacctatcctccttcaagaccaacgtacagaggtgcagttccatgggacaccataaatcttgacttaccaccctacaaaagatggcatgaattgatgcttgacaaggcaccaatgctaaaggttatagtgaattctctgaagaatatgataaatacattcgtgccaagaggaaaagttatgcaggtggtggatgaaaaattgcctggcctacttggcaactttcctggcccttttgaagaggaaatgaagggtattgccgctgttactgatatacctttaggtaaagttcacttagaagctttaaaaaaaacaagtaattaaattgtttt

SEQ ID NO: 11943 - DNA, 442 bp, Homo sapiens
  misc_feature (1)...(442): n = A,T,C or G
gccatctcggctcactgcaagctccacctcccgggttcacaccattctcctgcctcagcctcctgagtagctgggactacaggcgcccgccaccacgcccggctgattttttgtatttttagtagagacggggtttcaccgtgttagccaggatggtctcgatctcctgacctcgtgatccgcccgccttggcctcccaaagtgctgggattacaggcgtgagccaccgcgcccacccctccatgaagaaagtttttctaaatgaaaaatgtttaggacgctcaggagagaaagaacagattaaggaatgatctccaccgcacagacctcaaggctgttatgcatgcagggcacagttccagtgcanatgtccgcaggcacggcatgagggcccccactgggtggcctcggctcctttcanggcangcagtgaagcgggtcn

SEQ ID NO: 11944 - DNA, 509 bp, Homo sapiens
  misc_feature (1)...(509): n = A,T,C or G
ntttcgaaaaccccnttnnnnanngnggttcgtagaccactantcagtgtggtggaattcgagcaactgcccatgctgggccggcgccctggggccccggagagcaagtgcagccgcggagccctgtacacaggcttttccatcctggtgactctgctcctcgctggccaggccaccaccgcctacttcctgtaccagcagcagggccggctggacaaactgacagtcacctcccagaacctgcagctggagaacctgcgcatgaagcttcccaagcctcccaagcctgtgagcaagatgcgcatggccaccccgctgctgatgcaagcgctgcccatgggagccctgccccaggggcccatgcagaatgccaccaagtatggctacatgacagaggaccatgtgatgcacctgctccagaatgctgaccccctgaaggtgtacccgccactgaaggggagcttcccggagaacctgagacaccttaagaacaccatggagaccatagg

SEQ ID NO: 11945 - DNA, 478 bp, Homo sapiens
  misc_feature (1)...(478): n = A,T,C or G
gggcgggnnnnntnacactgatgacancttgaagngcgttggaantcgcttcagttttgcaacacgaatagagtactggaaatggaggctggtgatggttgcacaacagtgtgaatgtacacaatgccactaaactgtacgcttaaaaatagctcattagcaaattttatgttacgtatattttactacattttaaagaaacgaaactttctgagctccctttgttaacatgtgtggctgcaggagggtttccagcattcgtagatgacaagggacccttctgctcttgagattctccggctctgcatcacagagccaatgttcttctgggatggacttgctgagccacggaagcagcctcccagcaccccacgcgcatggatgtcctctttctgtgaggctttggctctgtgctgttgccttcactaaacatagatgcttgtcaagagggacaaaatcccccaaatacaatgaaaaa

SEQ ID NO: 11946 - DNA, 448 bp, Homo sapiens
  misc_feature (1)...(448): n = A,T,C or G
atcgaattcgatgacactagncagngtggtggaattcacaacagctgtcgtctctgggactgtgaaacagtctggagaggtgttggtgaatgttaaggagcactcccggcagatcaacgacatccagttatccagggacatgaccatgtttgtgaccgcgtccaaggacaacacagccaagctttttgactccacaactcttgaacatcagaagactttccggacagaacgtcctgtcaactcagctgccctctcccccaactatgaccatgtaagagaaccccacctgccttcctgctgaagcctcaggaagcttccaagttctagatgcttgtccagaagttgggctacaacattgtgggggaaatgatgtcaggcagagaggagatgcccagaggagtgacaaagctggaaggattgaatagccccagggcagccagcaggaggt

SEQ ID NO: 11947 - DNA, 430 bp, Homo sapiens
gcttcatcaccagtgcctaaagcagtgtctgacctatagaaggtactcaagagatactttttaagtgactaaaagtagggaagaagttattcatacacatgcaggtttatttttatggccttggcaggaagttgaagtgacttctaacttctctctaaaattatatatgacatcattggctaacagtgaagacctaagtgggttaattaagggttgggagagtagagaaggtttgaaatagtggattggacagagtggcaaaaggatatgaaacacacggaagaaagaacacagcattgaaggagcagtcaaatcgatgacagtgacattataacggtatcaggcttcattgtgtgatttttctacaaaagacgtaccttagtcatacaactggttgagatagatactattttttactattttacagatg

SEQ ID NO: 11948 - DNA, 456 bp, Homo sapiens
  misc_feature (1)...(456): n = A,T,C or G
gatggaannccccattgtcggacccctagtccatgtggtggaattcgtgcgccatctgaaaactttctccacacttccacgcaaccccaaaggctgattttacctccaagagcctcccggacccagcagatgaactcctttctcagggacagagcctgcagccccttgcaccgggcctcgctgatgtcctggagcagctttttggcctggatgagctcctggttgatctggtccagtgtttcacggcgaaagtcgtcgaagttatcagtctgcaagaaaaagctctactgtggactggaactcattaaccagaaccccagaatctgtgagctgcaagcactgaccgtcccagcagccccaccctccctcaatgcctagatttgccactgctgtgacaacaggcacaccaagctcttacccctgaattggatgatcaaacccccatggctgtttctc

SEQ ID NO: 11949 - DNA, 463 bp, Homo sapiens
  misc_feature (1)...(463): n = A,T,C or G
taaatttgaatcctttcangctgagaacctcatgcagtgtgctggaattccaattgcatattaacagctgtgattttgttggacagcaagtattatggccaaagccagtttcttggcatttcaaaaataatgcaataaaaactagttgaggttagctgaggctggaaatgcctttttcatggtaaatgattcacttctatatttttctttctttttctttttttttctttgggtttcatcctggattcatcccctgatcttaaatcaaaacgtcagatcaatgaactatgaactaaagtatttttcttaagcctattgagtgatttattttttaaaaaatgtttaaatgcatatgcttttctttcagcacaaacaacagcaaaaacttttgtaataactaacttacctttgcatgtatgaagaactgagtcatttatttccctaacttactcctctttcaagt

SEQ ID NO: 11950 - DNA, 493 bp, Homo sapiens
  misc_feature (1)...(493): n = A,T,C or G
cattgactgacgtacactagtccagngcggtggaattcccccgtctctacgaaacatacaaaaggtagccaggcgtggtggcgggcacctgtggtcccagctgctctggaggctgaggcatgagaattgcttggacctgagaggcagaggttgcagtgagctgagatcgcgccactgcactccagcctgggcgacagagcgagactccatctcaaaaaaataaaaataaaaataaaaataccaagggagtgaagggtttttgaatcaggctgagcaccagaggatgtgctatcagggaagccatggaagaattttcaaagtggcctccatgtcaggtgtgacagacaccctctggtctcttgggcttggcagtgttaccaggtgtgtccagggaccgccagcgtgttgtgaatgctgcctccagggttccgccccagcccctctcatggatctgggtgaaggacttgggnttttggttgtttggttgtttgtt

SEQ ID NO: 11951 - DNA, 461 bp, Homo sapiens
  misc_feature (1)...(461): n = A,T,C or G
aaaattagaaaccctttccagngtggaggaaccttctgatattacggaccaggacattagttcggatgatttcatttttatttctacagtgttaaaagtgcacttatatgctggtttatttacgtcttgggaaaagagactgcaaattgaagggatgattgttactttttctttttttaaaaaaaaaaggttaaggagattttaagacttataaatgtttaagaaattataaacaaggttagaccctttgaaaaaaagtttagaagatattcttaaagtaaatttttatagtgttaattttggaataatttatgttttactatattacagagctaactgaccagaatagtttcagaaacaatatgaaacttaggaaagtttaagcaatgtttatatttttaaaatgttctttgaattatgtttttattgtacatttcttcagactgaaaagtatgtacata

SEQ ID NO: 11952 - DNA, 463 bp, Homo sapiens
  misc_feature (1)...(463): n = A,T,C or G
atcgacccccctnattgcagaccattagaccangcggnggaattccagagtgtcctggaacattggaaataggcttaaagcttaaatgatgaatcagaagagttatgctgtattctaatgctgccactagggggttttcttccactcttcttctcatggactaggaaacctggggacttatttttgaggtcacaaaagaggaaaaaccgagactcctcaacccagacccaaccactggctttgatgacatcaggaaagagggaggaatgttctcttcagacttgggaagctggcaggcgactctcctggaggctggtgtgcttgaggtctctgaggggggcccagtcgcagcccctacagaccaggatagaacaatgagatgttttcatgccacgacctacagaaggaaccattcatctcttgctgcttcaggcaatagtccagcttctcttggcagggagcg

SEQ ID NO: 11953 - DNA, 405 bp, Homo sapiens
ctcccacagttcccttcctggttaattaaaccctcagactggtgctgtgttcctagcctctggcctctctgtggggaaaggggactgcagggggaagagccgggaagggacagtcaggcttctccctgggaaggtggggccagcaggagatgaccaacagggggcaggacctggggacctgggctggagggaagggcagaagcttcctacttggctgacagccccggttcccccaacatgttcccgttcactctgcccccacccccaaaggctcagcctctaaatctcagactccaccacctcttaatggctcagtccccttcaccccatttccaagtgcccccaggactcctgggccctgcttccctgaaccctgttctccaaaaccctgccccaggctaaggg

SEQ ID NO: 11954 - DNA, 506 bp, Homo sapiens
  misc_feature (1)...(506): n = A,T,C or G
nggcgcggcnnnncnnncaactgatgcatacatagngcgggcaattcgccgcttccccctttntgagtccattgctgcagctaagacctgggctcagcactctgagaaaggtttgctattccaaagacagccaaaaacatttgacaggcattttctaactgaaccaccctgagaggaagccatcacattctccacagcacgtgtgaggaaactgaagacctgcctggtcaagtagcttgccagtggtcacacagcaagtgagtgagaaagcacagccacacaaccacactccaaggtgtgtgtgtgtgtgtgtgtgtgtgtggtgtattttccgtgagattcacaacagcttacattcaaactgctccagatatgtaattacaggcttccaanaatcttaatatctttctctttagtaaagctaagtgtaggtgaatttaagctaaatttatgaatagaacttgcacacaaacgcttagaacaagtagagctccaaagactcagtg

SEQ ID NO: 11955 - DNA, 484 bp, Homo sapiens
  misc_feature (1)...(484): n = A,T,C or G
gcgccccttcgagactnttaagatctgnggaaanncgngnggccttctactctgacaaccggcagattgtctctggatctcgagataaaaccatcaagctatggaataccctgggtgtgtgcacatacactgtccaggatgagagccactcacagtgggtgtcttgtgtccgcttctcgcccaacagcagcaaccctatcatcggctcctgtggctgggacaagctgggcaaggtatggaacctggctaactgcaagctgaagaccaaccacattggccacacaggctatctgaacacggcgactgtctctccagatggatccctctgtgcttctggaggcaaggatggccaggccatgttatgggatctcaacgaaggcaaacacctttacacgctagatggtggggacatcatcaacgccctgtgcttcaaccctaaccgctactggctgagtgctgccacaggccccaacatcaagatctg

SEQ ID NO: 11956 - DNA, 450 bp, Homo sapiens
  misc_feature (1)...(450): n = A,T,C or G
ngggattgtagaccccttgtacagcgcggtggaattccttctgtccaggctgggggaaaagcagtcacccagctgaacagggctagtgaggaatcttggggcctgtatgtacgtatgggtggatggatggatggattgtgtaactgcttgagatatatatatatatataattttatttatttatttgagatggagtctcactctgtcgcccaggctagagtgcagtggcatgagctcagctcgctgcaacctccacctcccaggttcaagcaattctcctgcctcagcctcctgagtagctgggattacaggcatgcaccaccacacccaggtaattttgtatctttagtagagatggggtttcaccatgttggtcaggctgttctcgaactcctgacctcaggtgatctgcctgccttggcctcccaaagtgctgggattacaggcgtn

SEQ ID NO: 11957 - DNA, 475 bp, Homo sapiens
  misc_feature (1)...(475): n = A,T,C or G
gagtagccnnnggtngnnnccctgagacatcgctagaggcgtgaanncgacaatccggaggagaaggagactgcaaggataggcccaggtcggtgcgagggacggtggtggggcgggggtcggaacgtaaggaaagcccagtctgagaccccaaccccctccaccccatcccccactcctataccggtcctccattttggtgcctgcaaagctctgggaaagaatcccgggaaacgaaaaatggtgggtttgggggaagggaggtaaggggagaaagctggagggaggggctttaattggaggccccgtataggacgcgcggaacttctaaggtgggaaaaaacgaaattaaaaaatcctttgatatcagggctctgaatcctgctggtcagagcaccaagcattcagnctctctccttgcctttgtcttacttgtgttcaaagaaaaacaaccagaaaaaaaaaaaatctcatt

SEQ ID NO: 11958 - DNA, 480 bp, Homo sapiens
catcgagaccattagatagatggccggtagtcccctacaagtccttcttgatcctgaactgggttaggtgccgctgttgctgctcgtgttgaatctagaaccgtagccagacatgggactggaggacgagcaaaagatgcttaccgaatccggagatcctgaggaggaggaagaggaagaggaggaattagtggatcccctaacaacagtgagagagcaatgcgagcagttggagaaatgtgtaaaggcccgggagcggctagagctctgtgatgagcgtgtatcctctcgatcacatacagaagaggattgcacggaggagctctttgacttcttgcatgcgagggaccattgcgtggcccacaaactctttaacaacttgaaataaatgtgtggacttaattcaccccagtcttcatcatctgggcatcagaatatttccttatggttttggatgtaccatttgtttcttatttgtgg

SEQ ID NO: 11959 - DNA, 485 bp, Homo sapiens
  misc_feature (1)...(485): n = A,T,C or G
aggggnnattgagcccatgagacactagncagngcggnggaattcctcgccggccaggacatacagatttttaaaaccatatagaattttaaaatttcttttacaaaattttgttccatatatatttagtacatataatagttttttttttatcattgccagctaagcaacagatagctaatatataagttaaaatgccagagattttacttttatgagcaactgcaatgattaatataaaaacctaattttaattcctctttcactttagtgcaataagaaaaaaaaattatatatatagtttccatagtaatacttgtaaatttgtgattccataatgatgttataaatttgcttgtgatattttggggagctgtaagttccatgctctcactggaagagttcaagtggattggcagcaaatctgagatctatttggtgtgacctggtgagatctaaatatggagtcagcacatgattttttn

SEQ ID NO: 11960 - DNA, 448 bp, Homo sapiens
gttgactccccactgtagaccttagacagtgtggtggaattcgccaaaatgacgaacacaaagggaaagaggagaggcacccgatatatgttctctatgccttttagaaaacatggagttgttcctttggccacatatatgcgaatctataagaaaggtgatattgtagacatcaagggaatgggtactgttcaaaaaggaatgccccacaagtgttaccatggcaaaactggaagagtctacaatgttacccagcatgctgttggcattgttgtaaacaaacaagttaagggcaagattcttgccaagagaattaatgtgcgtattgagcacattaagcactctaagagccgagatagcttcctgaaacgtgtgaaggaaaatgatcagaaaaagaaagaagccaaagagaaaggtacctgggttcaactaaagcgccagcctgctc

SEQ ID NO: 11961 - DNA, 464 bp, Homo sapiens
  misc_feature (1)...(464): n = A,T,C or G
ggggaaatcgaattcatcagcactngngcnggaantcccggagcccaaggtgcggcctcgctagcgggagagggagcggcatcaccggcccggagagagctctcacggccagagcggtgcaggaggatgctttcccagccccaccatggagctgcgctgtgggggattgctgttcaactctcgctttgattcatggaatctagcccacgtggagaacgtggaatatttgtccaccgatggggaaggggaaggaggtggggcgtcagccctgaccagtggcattgcctcttcccctgactatgaattcaacgggtggacccgatcagactgtgctgaaacggatatttgagaatgggaacaggtcatggctctacttcagcgtccgaggaggaatgccacgacaactcatctagatcagcattatgaacatgaacatgcagagtcagcttattaccatggcatgn

SEQ ID NO: 11962 - DNA, 491 bp, Homo sapiens
  misc_feature (1)...(491): n = A,T,C or G
nattgatagacatacgccagngcggnggaattcggttgtttggcctttggactcttggacttaacaccagtggcttgcctggggcttttgggccttaggccacagactgaaggctgcactatgggcttccctactcttgaggcttttggactcagactgaaccactactggcttctttcttcctcagcttgcagacggcccaccgtaggactttgccttgtaatcatgtgagccaattctccttaataaactccttttaatataaaaaaaaaaaaaaaaaaaaaaaaaaaaaaaaaaaaaaaaaaaaaaaaaaaaaaaaaaaaaaaaaaaaaaaaaaaaaaaaaaaaaaaaaaaaaaaaanaaaaaaaaaaaaaaaaaanaaaaaaaaaaannnnnanaaaaaaaaaaaaaanaaaaaannnnnnnnaaannggggnnnnnaaaanannnnaaaaaaaaaaaanaaaaannnattnnnntttaaaaaaaaa

SEQ ID NO: 11963 - DNA, 499 bp, Homo sapiens
  misc_feature (1)...(499): n = A,T,C or G
cgccgcgccccccccccttgagnncccttttgagatatctggcagngcggnggaattccgaaaaacaagaacaactaattcagaatcaaatagagtttttgagcatttgactatttttagaatcataaaattagttactaagtattttgatcaaagcttataaaataacttacggagatttttgtaagtattgatacattataataggacttgcctattttcatttttaagaagaaaaacaccactcattttataaaatatagtacagctactataaggcttgtttgatcccaaatggtgcttatcttgattgaacattcagaacaaggatattattttcagtgattttgtgagatcagctgaaccacttatgataataataataaaaaagactgctttgccctcacgtcagttgtacatggcatggaactttaaaaattttaatataaactttcatccagttagcttcataacttttacgttccagaattttgtttan

SEQ ID NO: 11964 - DNA, 484 bp, Homo sapiens
  misc_feature (1)...(484): n = A,T,C or G
gggggnatatgagactngttaaccgtcgggaanncccaggcagaggaacaggcccgcataaggcaggaggaaagggagaaggaggccgcatagcaagctgagcgcagtcagagcagcatcgttcctgaggaagaacaagcagctaacaaaggcgaggagaagaaagacgacgagaacattccgatggagacagaggagacacaccttgaagaaacaacagagagccaacagaatggtgaagaaggcacgtctactcctgaggacaaggagagtgggcaggagggggtcgacagtatggcagaggaaggaaccagtgatagtaacactggctcggagagcaacagtgcaacagtggaggagccaccaacagatcccataccagaagatgagaaaaaagaataagtgttgccttgttttgtgtgttctaaatactttttttaatgaaaaaatgttttttggttttaatggcggtacgtggtttgag

SEQ ID NO: 11965 - DNA, 403 bp, Homo sapiens
gttgattccttggtgacaagtgcaatggggtatgggtagaatttattttcagagccaagaggacttgatggttataaataaagttgcctttagcaatggaatttacagatcgatcatgttgttccgaaagatgtgaataggatccacaataacaagttgattcagactaatgtagatatttagattagcaagtattgaacatttgatttcttagactgaggttttaaatgaatttcattatttctcccggtaatacacagagcatcgggattaggaaattagccattttggattctgtctgccacaaacagacctattctaaacagtgctattaaattttagactgttgttcaaatattttattttctcctaaactactttttatggtgatgaataattaaga

SEQ ID NO: 11966 - DNA, 445 bp, Homo sapiens
  misc_feature (1)...(445): n = A,T,C or G
gggccgggattganncccatcgtagacattagtccatgcggtggaattcgttgcataagcagtgctgtcagaattggtttggtgcaggcaatagattttgccttcaagggttcctgtggatctcaggaaggcatcagtgttgattaacactcataactagggagtgagtggtagttacttaagtaattgaccaaatggaaaaggggaagtaattaaggaaattggtaagtggaggtagtcaggaggttctcgtggtcctttacacagattttacagctttgggtttcattttgtttagctaaagtcatggggacaactcttcaatttagaacttaagatgaattataaaaatgatggatataagtggtagctctatctggtgaagtgtcttgtcagtaagtgaaacatttttttgtggtggcttatccacaaacagtttagttgn

SEQ ID NO: 11967 - DNA, 473 bp, Homo sapiens
  misc_feature (1)...(473): n = A,T,C or G
tagggggaccctggacangcggatgattccttagggcttcgcgcccaacatgcaggttgaaggtgttttctatgtgaatgatgctctggagaaattgatgtttgaggaattaaggaatgcctgtcgaggtggtggtgttggtggcttcctgccagccatgaaacagattggcaatgtggcagccctgcctggaattgttcatcgatctattgggcttcctgatgtccattcaggatatgggtttgctattgggaacatggcagcctttgatatgaatgaccctgaagcagtagtatccccaggtggtgtcgggtttgacatcaactgtggtgtccgcttgctaagaaccaatttagatgaaagtgatgtccagcctgtgaaggagcaacttgcccaagctatgtttgaccacattcctgttggggtggggtcaaaaggtgtcatcccaatgaatgccaaagacttggaggagg

SEQ ID NO: 11968 - DNA, 501 bp, Homo sapiens
  misc_feature (1)...(501): n = A,T,C or G
tgantgcncccncggggngnnnnttttgagaccctgttgagnaccattagaccangcggnggaattcggcagaatatggttgggaaatcattgccatatgcagaaggggtcactgaggggttttaaacaacagtgacatgctcagttctctgggttgaggcatcatcaccctggtggccatgtggaggatggactggaaaaggcattcagttagaagacctctgcaggagtccaaggaagaaacaggcaaatctgcaggaggcaggcatgtccaggcagagggcaaggagtaggtttagagagggggctgaggtagaatccttgggcagtgctgactgatgggttgagggaggaggcgtggatcaaaaatgggggacagggaaggaactggcttatggtggaaaaatcagtgcatgtagtttggggcatgccaagtactatgggcctggaggcatccaggtagtaagagttggctggaggcctgagagaaaactgagtcan

SEQ ID NO: 11969 - DNA, 464 bp, Homo sapiens
  misc_feature (1)...(464): n = A,T,C or G
aatcgaagacatcttngaagngcggtggaattcctggaatgataatggtaaccattgcattgaaatgttatgagcattaaaaacatgaatgagtgacaatacttacaacagtgtctaccacatggtaagagctctgtaatgtgttaattatattatcattttcattatcacccaggcaagtcacttgaatgctgtgggtatcaggccacagccaaacaaccacttgcaggttatcacaaagttccctttggcctattggaataaggattaagagtaaattatgttgtaccctggagggaaaaaacccaagtagtcatacctctagggccttagggaattcaactttcaccaaacctcttctaattactctaaaaagattttttggagggtggaggtggtagaaggtagaaagccacaatagtcgggacccagatgaccacacttggtgagtgaaggtgaagcca

SEQ ID NO: 11970 - DNA, 492 bp, Homo sapiens
  misc_feature (1)...(492): n = A,T,C or G
aggggnnaattgannccactgatgaccactagcacagngcggnggaattcgagacagggagaaagtgaaaggaaagagtcaaggattctcctagtctatataaacactgcctcttttgaaggcacacgttcatctgctccaagggctaaattttccctgcaaaatacagactttggttccaactttctcatgctgtcttccccctggtgtggcagataaatatgttagtgggggtgcatgtgtatatgtatgggaaaatgatcagtgacaaggtattgggatagtcattcagggagagagagtcagtgagggtgttagaggtagctgaaggagtggaagggagttagctagttgaaggaacactggaggactgtcggggatttgggggattaagtaaaaggtttataaggagagggtggaaagagtggttgatggctgatattctggtcatttatactagctactcagtctctactttttctagaagtcccc

SEQ ID NO: 11971 - DNA, 501 bp, Homo sapiens
  misc_feature (1)...(501): n = A,T,C or G
ggacggggnaggggcggggnngngttttgtatcccaattgtagaccactaggccangtggtggaattcgtctgggctgctgcgcgccgcctaggtgtctgggcgatctatgggcaagagcaagggccacgatgacagattacggcgaggagcagcgcaacgagctggaggccctggagtccatctaccctgactccttcacagacatatgggacttgggattcagctccagctgagattgagagagcagaagattacttgtattatcagaaaatccacccagcttcaccattactgtgacgtctgaggctggagaaaatgatgaaactgtccagactaccctcaagtttacatacagtgaaaaatacccagatgaagctcccctttatgaaatattctcccaggaaaatctagaagataatgatgtctcagacattntaaaattactagcattacaggctgaagaaaatcttgggatggtgatgatntttactctagtgac

SEQ ID NO: 11972 - DNA, 486 bp, Homo sapiens
  misc_feature (1)...(486): n = A,T,C or G
tggggcaaatgatncccatgatgacactagnccgngcggnggaattccacgcctccatgcttgtgaagcatagaatctttgaaaatggacacaatacctcctggatgtggccttcattcatttttctgttttcaccagctctcaaatgtgagtgatgaagagttccctcctaaccagacagcatggtaaggtatcctcatccatatgatttgagggcaagatatccttattactggcacctgaatcccatcctagtctttgttcctttggattaagacttgctttgcttctaaattaggggtcctcttaggagggataagccacacatttctagtcctcagcgtgaatgaagtcatgtgatccagtggcaggggatgcaggtcagatgcatcttccagaagtctgggcacccaggaaagaaggggacacacagataggtagtgtcagaccaaacaatgagcttcagtgaccccataggttgttgan

SEQ ID NO: 11973 - DNA, 477 bp, Homo sapiens
  misc_feature (1)...(477): n = A,T,C or G
tggcggaccaaaagacaaactgaaaccttcgaannnctgagaccctcggaagngcggnggaattcccattttttccaaattttgctgtgccaaatgtttaaaattttataaatatgaatctattttaatttccttaatcaagagcttcttcgtgtaaaggttgcttttttagctatagaaaaagaaaacagtaaatatctcttaatggcatccagccttgctgagctcaccttttttcctgaagaatgggtaggagtgaaatatttaatgtaaacatttcaccaagtccctttaccctaattttgaagctgcattaaacccaactcactaacacagggaatgattgcaccctagtcctctgtgggccaagaaactttcagaagcattaaaaaaatagttgaagtatatcacttctcaccaagtgggtagagtcagttggctgtttgtcccttgttttttatttattccataattatg

SEQ ID NO: 11974 - DNA, 455 bp, Homo sapiens
  misc_feature (1)...(455): n = A,T,C or G
actgagacctttggaanggtgatgaaccctcccattcagcagctcctgaactctgcgtgaagggccttaatgtcacccaccacaaatcttactccaaataaacgcttaccctttcctttaggattctttgttttggtggtgagcacaagagatcggtagtgttgtgtgtaggccattcttctggagagccacaagcatgaagagcagcgctgtgttgcagaatggagtttccatggatttctaccagaccactgaaggagttcctggatgccctgcggtagctagcactgaagactatttttctattggtataacccgcccacctgaaggggaaagggaaatcaaattaatttttctcgttagacataaggaaatttaaggaaaaacagctttaagaacagttactcagcgtagatgtgtgttcacacaaattgctctgcattcagcgttcattg

SEQ ID NO: 11975 - DNA, 471 bp, Homo sapiens
  misc_feature (1)...(471): n = A,T,C or G
tgagtccngnnttnnngnagatgagaccctagnccactgatggcattcgncgcgcccgagctggacgagctgcgcctggagctggaccgcctgcgcctggagaggatggaccgcatcgagaaggagcgcaagcaccagaaggagctggagctggtggaggatgtgtggcgaggggaggcgcaggacctcctctcccagatcgcccagctgcaggaggagaacaagcagctcatgaccaacctctcccacaaggatgtcaacttctcagaggaggagttccagaagcatgaaggcatgtcagagcgggagcgacaggtgatgaagaagctgaaggaggtggtggacaaacaacgcgacgagatccgcgccaaggacagggagctgggcctgaaaaatgaggacgttgaggctttacagcagcagcagacacggctgatgaagatcaaccatgaccttcggcaccgggtcacg

SEQ ID NO: 11976 - DNA, 406 bp, Homo sapiens
ggatggacatcatatctataatgcccttctatatgtgctaccatagatgtgacatttttgaccttaatatcgtctttgaaaatgttaaattgagaaacctgttaacttacattttatgaattggcacattgtattacttactgcaagagatatttcattttcagcacagtgcaaaagttctttaaaatgcatatgtctttttttctaattccgttttgttttaaagcacattttaaatgtagttttctcatttagtaaaagttgtctaattgaacaaaaaaatattcactatacatacaaacataactatgaataaaaaaccggccgtctgaaaatgacaatttgtaaaagtgggtgggctatttccgtatgtctgcctctatatgtgacgcgcttactttcttcc

SEQ ID NO: 11977 - DNA, 489 bp, Homo sapiens
  misc_feature (1)...(489): n = A,T,C or G
tgacatgtacacagggaagnnnnnnttttgagacccttttgatgacactaggacagngcggnggaattccctgaattcccaattgcacctgaaattgcactggaactgctgatggctgcaaacttcttagattgctaaataaaataaattataataaactgttaactcttttgaggatttaatacctgtagttcagttagtaactttttcatatatagcatgttgcctgtatgcagttgaactatataaagttcattgcaaagcagattatcttgtttttttgcatagcaatcaaagctgaaatttgtttgctacatcaacaaattaaggacattttcacaaactgagaaataaacaaatatgccaattcataggtggttttgccttattctttgaatgtgacttacaatcagcaatgatgatatagtaaatactgaaatttaggtgtaaatcaatacgttctacagggaaataatgaggctaagtatt

SEQ ID NO: 11978 - DNA, 476 bp, Homo sapiens
  misc_feature (1)...(476): n = A,T,C or G
nattgtagaccactgttgagngccgtggaattcaacttgtacagctagttcctgtcccacaactattaagtggtttattaagtacattaggcagaatgtgcacttcatcaccaggttctagctctggcaaaggagtgctgtctacagcaagatttttgcttttagaattttattaactacatcttttgggttcatccatctacaaacactgattaagggcccctggggcaaccaattgatcagattactaaaaggacttgggaaaaagcaaaaaggtcccattgtactggactgaggattagaagcaattgaaatacaagcctgtaccaagcaagcagcctggccccacacaggtattagcaaatatgtggtaaccaaggttttaggccttggcctttaggtttcctgttttttttttgtttttgtttttggttttggttttctgcaacaggttattcttatctcactggctttac

SEQ ID NO: 11979 - DNA, 486 bp, Homo sapiens
  misc_feature (1)...(486): n = A,T,C or G
cggggcntttgaaccactgagtactctagcccagngcggnggaattcttcttgactccgctgctcgccatgtcttctcacaagactttcaggattaagcgattcctggccaagaaacaaaagcaaaatcgtcccattccccagtggattcggatgaaaactggaaataaaatcaggtacaactccaaaaggagacattggagaagaaccaagctgggtctataaggaattgcacatgagatggcacacatatttatgctgtctgaaggtcacgatcatgttaccatatcaagctgaaaatgtcaccactatctggagatttcgacgtgttttcctctctgaatctgttatgaacacgttggttggctggattcagtaataaatatgtaaggccttccttttaaaaaaaaaaaaaaaaaaaaaaaaaccggccgttaatttaaaagggcccgtaaaacccgtgatcaccctgcgggggctttttatg

SEQ ID NO: 11980 - DNA, 461 bp, Homo sapiens
  misc_feature (1)...(461): n = A,T,C or G
ntttgagaccaccttgaagagcggtggaattcgcgcgcccctacggccggctgccgggtgtagcaggaacgctgtcgcacgttctctctggaaggcaggaatgggggcgtaccactgttcccacacccgcccatcttccgagaatgatgatatgcaatgagtgaggcagctggggactgaagagcaccctgactagatacacaggcgtggactttcacagacatcacacacccccccaaaaacgtatatatttaggtaatgacatagcacacacatacccatacacaccccaagaatgatactcaatgtcacacaaacagcgacatgcaccgagtcacgtgaagatcctgacacagaaaaataataaactaagggaaatcaccctaaagctgaataagactggggagcgatttctgtgggaaaaaaatacngtttgggggcccctcttttttttaagggcc

SEQ ID NO: 11981 - DNA, 486 bp, Homo sapiens
  misc_feature (1)...(486): n = A,T,C or G
tgggaccnnnnnnnnagnaagcctgatgaccntcngnaanactcgagactctagtacangcggtggaattccatttctcaaagacaaactgatagcagtaggtggtacttaggaatatatgagaaatacagggctggaacatgagagggatgccctcagctagtgttcaaactaatacaattgccatgaaaatacttttctaagtctgtgtgtatgttatgctcttctctaggttatttacatggccttagttgatggtagttgtaacctttttgagagtctctgtaacacacctcttataaattggtgcatttgtaatcagatgaaagcaattttatttagtctagatcttgcagttattagcctccttttgtcttatattgcttttctgacttatggggatagatccttaacgggtttcttggacttctaattttgtcatctcgtanaacttggatttatgacccagaatgacaataaaaagat

SEQ ID NO: 11982 - DNA, 472 bp, Homo sapiens
  misc_feature (1)...(472): n = A,T,C or G
tgtgcaggnaaanaagcaacactgagaccnctggaagngctgaagacactccgtacngcaggcagngcagggcagacggcggcaggagaagcaagatgaatgcattctcatatcctgtgggcattttctcggcggcgcggaccatcataggttccttcaatggtgccttatctgctgttcctgtccaggacctgggctccactgtcatcaaagaagtcttgaagagggccactgtggctccggaagatgtgtctgaggtcatctttggacatgtcctggcagcaggctgtgggcagaatcctgctaaacaagccagggtgggtgcaagaattccctactctgttccagcatggagctgccaaatgatatgtgggtcaggcctaaaagctgtgtgccttgcagtccagtcaatagggataggagactccagcattgtggttgcaggaggcatggaaaatatgagcaaggctcc

SEQ ID NO: 11983 - DNA, 476 bp, Homo sapiens
  misc_feature (1)...(476): n = A,T,C or G
tgggccnnnnnnacnaaaactgatacataggaagatcgatggccntcgagagagacggcgtctcatgtctcgggcgcgcgagggggtggcggagaggacagggagattccccagcgctggctctgaaatctggggcaggctttccttgccttactgccaatcccaactgtgcctggtagggtttgtccctggcgtcaaaggtaggaacagctgagcccttagatgtacccctgacggcgagagcccaggagtgggcgtttcacttttcctgcgtttggggagtccctgaggctatgccctttgacctttgacatgtgtgcagcttctgcttctccagataatctggtattccatatgaaaaatgagatgagaaacatcaagtacaaaccagtagactatcaacaattgcgtgcattaactgaagcaaagaaattggcttctgcctctgcaaagctaaagatngtaaatggaatctg

SEQ ID NO: 11984 - DNA, 443 bp, Homo sapiens
  misc_feature (1)...(443): n = A,T,C or G
ntagaattcgagacattacnccangcggtggaattctctattctggcatttcttgtcattattttgctgagaatgtgtctctcttgactttgaacttattgagagcaggaatcatgactcagccatatatcccagcacttggcccagggcctgtcgtttccagggtaggtggtctaggctgattgaaggaatggcatttagtctttaaaatgaaagcatgttgcctagcttggttatttttgaactctataatcaaggactacgtttacctgaatagcctctgcagaacaccaattccgtaaggtgcttcacacacacacaccaattctatcatttaatacattttggaaaggctacatactactacagcctcttttacagattagcaatgtccatgagcgcactaaaggttgagacattctgcagtgaagaagcctatttcn

SEQ ID NO: 11985 - DNA, 458 bp, Homo sapiens
  misc_feature (1)...(458): n = A,T,C or G
gcgtgntttgagactattagtccagtgcggtggaattcctatatagtgcatgtcagtagcacaaaatgcagtcttagcattagcctgtctaatctgaatagtttactcaaaagtacttctttgtgttaagtattcagccagccactgtttttagatctagttaataggttctatttaatttgctacaacatttactgaatggtggagtgaaaaaactgatgcatactgggaaatatctaccattttttaaagataatgttaattaggaaaagaacacttttaaggaatttatagcagtgatgaaatgaattcagttatatcagatacaccaaactgttgatggtatttaaatgtgacttcaagttagtatttctgtatatattattgattactgggttgtttttagatatgtaagtctgttctaatctacagttcacatatcgacagttactctggtn

SEQ ID NO: 11986 - DNA, 491 bp, Homo sapiens
  misc_feature (1)...(491): n = A,T,C or G
aggggnnaattgagacctttgatcagcgttgnggaantccctgaaagtcacagaataattttttagagctgaacaagaatccaagcctgcaactgcagagacgagagatctttctgctgtctatactcttggaaagcacatcctaagatctttgcagattatcctgtggaaggaaaatgcctaaagtcaaaagaagccggaaagcacccccagatggctgggagttgattgagccaacactggatgaattagatcaaaagatgagagaagctgaaacagaaccgcatgagggaaagaggaaagtggaatctctgtggcccatcttcaggatccaccaccagaaaacccgctacatcttcgacctcttttacaagcggaaagccatcagcagagaactctatgaatattgtattaaagaaggctatgcagacaaaaacctgattgcaaaatggaaaaagcaaggatatgagaacttgtgctgcctgcggtgn

SEQ ID NO: 11987 - DNA, 478 bp, Homo sapiens
  misc_feature (1)...(478): n = A,T,C or G
tgggcngannanaagganactgagaccttngaannnactgatgacactagtacaagcggtggaattcgagagaagagcattattcaaagccaaggagctgcctaagcttagctccctggcaggatttgaaatctatggatcagagctctggaaagaaggccagtgtggctggaaaagtgggggacatggtgttgaggctgaaacggggctgatgccaaaccacactgggcctctttgaccatgtagggatctctcactttaccaagagcaatagaagcccctggaatgttttaagcaaggaatgtcacacgatcagatttggttttcaaaaacatgactctggctgctttgtggagggggactgaaagggaagagtgtggctgcacaaccagcgggaggctacagcacagctacacaagcaacaagttgttccaactgaggttgtggcgaggggatagagataactcagcagatcccn

SEQ ID NO: 11988 - DNA, 544 bp, Homo sapiens
  misc_feature (1)...(544): n = A,T,C or G
gggaaagannttttgaccccantttgtgtggccgaattcgnctgngcgnctcagagccaccaaggaggagcaggggagcgacggccggcgcagaagttgagaccacccagcagaggagctaggccagtccatctgcatttgtcacccaagaactcttaccatgaagaccctcctactgttggcagtgatcatgatctttggtaagagctgaccctgacctctgagcatggggggacagccccagaagggaagcactcttgtcccttagttttctctcccattgcagtgatcctctctcagggggaaaaaagaagccatttgggaggaaggagagtagcagagaggggcagagagggagggcacagaaccccatgccccatcaccagacaactcccaaatttccttccaggcctactgcaggcccatgggaatttggtgaatttccacagaatgatcaagttgaccacaggaaaggaagccgcactcagttatggcttctacggctgccactgtggcgtgggtggcagaggatcccccatggatg

SEQ ID NO: 11989 - DNA, 448 bp, Homo sapiens
  misc_feature (1)...(448): n = A,T,C or G
nttagtacgactacaggcattgcggnggaattcgtgtgtgtgcgtgtgtgtgtgtgtgtgtgtgtatgattttctaattcctagtcatttttctattgattgttttgcaaaagccatttacatcttaaggatattgataatcttttgttatatttgatgcaaatatttttttccagtttataggttgccttttaattttgtgtttcaggtagataaaagttaaacgattttcttaggttagtttatcactgtggtttctgaacttgttatgtgtagatcttttccaccccaagagtacataaatattaatccatactttcttatgaaaaaaaaaaaaaaaaacaaaaaagaaaaaaataaataaaaataaaaaaatattttattaataaaaagggccccttaaaataatagaggcccctaaaaacccctgtgaaaacctttttgtttn

SEQ ID NO: 11990 - DNA, 447 bp, Homo sapiens
  misc_feature (1)...(447): n = A,T,C or G
natgatgccatcgagccacnganangcgnggaanngnggnaacngctgagttcatatagatactgtaataatacatacatttagtatctttaagggagacaaattttgctaaaattcacattatcttaaatgctcttcttgaggatgaaactgctttaaaaatataagggaatataccattaaattaaaagcatttacatgtatttcttttattaactgtatattgcgcaagacagcaaggaaacttttataggagattctccaacctgaacactgaaggcagttttataaaccttgataaaaccccttaggattaagtaacagtatagcttgatagaatatcttacaacaaaattataaatatgaatactataacactgaaaaatacactattttttaaaaaccaggttagaaattgcactaattagtgcataaagctaattaatg

SEQ ID NO: 11991 - DNA, 461 bp, Homo sapiens
  misc_feature (1)...(461): n = A,T,C or G
ntttcgagaccactagtccangcggtggaagtccctaaaacgcccagttgctaagggtgcaacttacggcaagcctgtccatcatggtgttaaccagctaaagtttgctcgaagccttcaatccgttgcagaggagcgagctggacgccactgtggggctctgagagtcctgaattcttactgggttggggaagattccacatacaaattttttgaggttatcctcattgatccattccataaagctatcagaagaaatcctgacacccagtggatcaccaaaccagtccacaagcacagggagatgcgtgggctgacatctgcaggccgaaagagccgtggccttggaaagggccacaagttccaccacactattggtggctctcgccgggcagcttggagaaggcgcaatactctccagctccaccgttaccgctaatataagtaaagttgtaaaattn

SEQ ID NO: 11992 - DNA, 504 bp, Homo sapiens
agggcccccactgagatcctagtccgtgtggtggaattctagaaagaacatttccatcatcacagaaacttctcttaattctggtctagaagataaccttagtacttggtagaaattttgacaggctaatgacgaaaagtttgtaaccctgagctttgcatgcccaagaaaaataaggtattcttttttatatatcagaccagagaagctgtattcagcacattttgaaatgctagtttttggctatggccataccaccctaaatgtgccagatcttgtctgaaatgctagtttctgactacaaaaactacaggacatagtagatatgctcagtagagctgcttaaaataattccctttttttttctgttgaattctgttacaaaaccaggtctgtgttataatagaaaacacacttatgaataaaaatctttaaaaattataatttgcagaaattagttttatttctagatttctaggtggtattaatgtgatagcattaggt

SEQ ID NO: 11993 - DNA, 474 bp, Homo sapiens
  misc_feature (1)...(474): n = A,T,C or G
tggcgagnnananagaaagctgagaacctaggcagngctgtataaccctcagagcgagatctgcgtgaaaaggaggaggaggaggaagaggagcagccaatcacggtgcccagttccgaagaatagagagaggatgatgcttcctgtcagggcaaggacagcaaggtcggcgctgcctcagggcagagccccactggaagggatgctgctcccaagagctctgccctccctgctgtctcgaatgccagctcgcagggaaagccgcttctggttggcactgcaggcgggaccacctggcacagtgggtcctctgggtctgaggccaccccatctgccctcctgtcaccccctgcctcagctgctcggccctcctccgccacaccaggctccctgaaggtgtcaccgaccatagacaagctgccctacgtgccccacagccccttccacctcttctcctatgactttgaggactcn

SEQ ID NO: 11994 - DNA, 487 bp, Homo sapiens
  misc_feature (1)...(487): n = A,T,C or G
cggggnnnattgnnccattgagacattagtccgngcggnggaattcattctgaaccccatctttggcaggcatacatatttcactgtttccaaagctatctactctgccaaacaacacccagtcctattccaaactctcaacgattctatcttgttcctgtttttctatgtatttatggttgccgtttgtgtctgatttgattttactgttttttccctgattttatggagtagcattgtgacctgttttcctttgtcttatataactttagtaaactaaccactgtcaatgattgagggcaggtggcacgtggggaagaggggacttggcacgcagtggctacctgggcatttgtggtcatttcagtttccatctccccagcgggggctccctgggtgaaaggccacagtattttgggttggtaggcaaattgcaacattctggacatggcctgaggaaggcctcttcttataagattctcagacn

SEQ ID NO: 11995 - DNA, 486 bp, Homo sapiens
  misc_feature (1)...(486): n = A,T,C or G
cggggnnaattgagaccatagaccacgtctgggaanncgacattntatgcttcatactttctgtaattatcttttgtagcttgattacatagagtaccctctcttccttaagttgtagttgctatttatcattgtagacaaattctgttgcctttcagcaacgtatgctgaactagtatcataagatggtgcatcagttcataagctagtgcataagttttgtgtcaaaacttttaaatcctgaagttctgcagttatcatcttagttattttctatctaattagcttataattgcaaacactagtcagcttgtgatctctgtgtttcaagttcttttcttcacgaggttcagtacctgctatgttgatctttggcagtgccagaggcttaaattttgacctgctcaattaaaaataaacactggcgtttataatgaacaggtttttttgtcggggggggggggggcaaaaaatttattttgggaa

SEQ ID NO: 11996 - DNA, 441 bp, Homo sapiens
  misc_feature (1)...(441): n = A,T,C or G
ttcctatggaaacgattgaatganaccatcgcaannccnangctttggtgtatttggtcttcctatgggctcctcaaatcaagagatttctccaaaaattaattgagataggaatatcctggtttatcaaggcttcttgagactactatatcatttgttctcctgaagcctaatcaaatgagacataaaggacagccaacataaataccacttactgaatgtgataacaaaggtaaaattagttgaaacaacatgttccccagtgtccagcctctccgtggaagagtgagaagtcagaagtggctgctgatgttatggaaagttcatggcctttaatgggagacagttccagcggacacagattttcatccaggccctatgattagctatgtggccttgagcaaaactttaggttttaggggttttcatgtcctcatggga

SEQ ID NO: 11997 - DNA, 507 bp, Homo sapiens
  misc_feature (1)...(507): n = A,T,C or G
ngaggccgcccaatgagnaacttgagancactacgccagngtcgtggaattcgggaattggaattaaaaagcagcatggcatatctggacttgtacacacttctttgagaaaattacacccaattcccaaatagtattcaacttgtcagaaacaaattctgagattgtttggaaattcttttttaatatgcaatatcccttaacaaaattttatcttaaaattctagataagcaactatttcaattggtctaaattttaagtttaatctaaattatattgaatttctttgagaatttctaggttaaaactgtaatctgagtaaaacattaagttagagtaagtttgttggttgattttggatatttacataagcaaacatgtatatatagcttcagtttcctcctctgtgcaaagctctattcatagggctattatgagcattaagtgagatcatccatttaaagtatttaccataatacctgactatacaagatatataagggatt

SEQ ID NO: 11998 - DNA, 447 bp, Homo sapiens
  misc_feature (1)...(447): n = A,T,C or G
nttcgaagactgaaggcactcgcggaggaattccactgcaacgtctgcctcctgggttcaggcgattcttctgcctcagccacccaagttgctgtgattacaggtgttagccaccgcacctggctaatttttgtatctttagtagagacggagtttcaccatgttggtgaggctggtctcaaactcctgacctcacgcaatccgcctgcctcagcctcccaaagtgctgggattacaggcatgagccactgtgcctggcccatttgtctatatatgagtaccacacatttaattattttgctaaataatagattttaatagctaaattttttagaaatgataaaattagaatcagtcttccttcacaacttacctggttgcactttttaaccacatctggcccaggtgtggcattgagaagtgctataataaggtaacgatttaccg

SEQ ID NO: 11999 - DNA, 473 bp, Homo sapiens
  misc_feature (1)...(473): n = A,T,C or G
gggccgannaagcaacctgagacctctganactgagccctcgtanagccgcgcaantngnnttttacttgcccaatccagaaaaagcaaagtattcttcaactacttgtttactacaccttcctctcctactgggcttactgattcagctcagtttccttccttccttccttccttccttacttccttacttccttacttccattctttcgttctttctttctttctaatgaaggccactgccatctcttttctggattacttaacatacttccttatttgctttctgtggtgctagattactttgccaatgaattcttatactgtagctggagtaaatgacttacaataaaaccgactctttaaaatgaatcattgcatgatttttaaacatgtcttttactggctgcctctcactctacattctattccaaatgaaacttgatttccttagatccttaataatgtactctc

SEQ ID NO: 12000 - DNA, 476 bp, Homo sapiens
  misc_feature (1)...(476): n = A,T,C or G
ggagggccccaggagcccccaactgagatttagagagcgttnggaattcgttttcatgattcagttgattttccaaaaatgaagctatctcacccagctgggtttggaggagcaatctgcttattattctgtcgttaccacttactcaagcgagctgtgatatgaatacaagcaaccagtgggctcgggaaggtccgggtctcttctgccatcttccagataagagatttcagtaaaaaactgccatgctgagctgccttatagagctcttcgaaaatgttcgagttgataaagctctttgaggacaaggtacttcgtgcacctcatgctgaagattgcaccgtgttggaaaataaatatgaagcaagtcaaactagatgcatacacttgtgtagaaatcaataatcaattaatagaagtgaaaaaatagacattaaaatgatttatttctaaaaaaaaaaaaaaaaaaagcggcc

SEQ ID NO: 12001 - DNA, 457 bp, Homo sapiens
  misc_feature (1)...(457): n = A,T,C or G
nattgtagacattagtccangcggtggaattccgcctgcgcgttgtgtcgccgacgttgtgtagtctcccctgggaaaggagggtcatgaggaggttcgagtgaagatcaaagacttgaatgaacacattgtttgctgcctatgcgccggctacttcgtggatgccaccaccatcacagagtgtcttcatactttctgcaagagttgtattgtgaagtacctccaaactagcaagtactgccccatgtgcaacattaagatccacgagacacagccactgctcaacctcaaactggaccgggtcatgcaggacatcgtgtataagctggtgcctggcttgcaagacagtgaagagaaacggattcgggaattctaccagtcccgaggtttggaccgggtcacccagcccactggggaagagccagcactgagcaacctcggccttcccttcagcagg

SEQ ID NO: 12002 - DNA, 462 bp, Homo sapiens
  misc_feature (1)...(462): n = A,T,C or G
nnnaaattgaatagcattccatcgngcggngcaattcggcgtggctaatatgaaagctgcatctttactagttagctaccatgcgtcattatttatcaaaagatatatgctgcttaaacacaaatacgttttaaaatatattttaggcagtagggttttgggtttttttttttgcaagttcttttggggagtaaatttagggataaatgatttttttttcttttgaaacagtttgctctgtcgcccaggatggagtgcagggcagtggcgcgatcctgcaacctccgcctctcgagttcaagcgattctcctgcctcagcctcccgagtagcttgggattacagacgcgcgccaccccacccagatgatctttttaaatgcaaaatgccatcgacgcaaaaaatcaaagaatcagcttaagttccagaaaaaagaaaaaccaaccaaatgaacaataagact

SEQ ID NO: 12003 - DNA, 467 bp, Homo sapiens
  misc_feature (1)...(467): n = A,T,C or G
aggcgacttttnatcggacccattgagtgcctggaattccccaagttctgggattacaggcatgagccactgcgcccagccaatatttcttaaataaagaaataataaatattttgttcaatgttatggccatgttggccaggctggtctcgaactcctgacctcgtgattcacccgtcttggcctcccaaagtgctgggattataggtgtgagccaccgcgcccggcccaacctgatgtttttaagtgcaaatgatctaaacagatacttagtaaagaaaatatacaaatgacaaataagcacacgaaaagatgctcaacattatttagtttttagggaaacgcaaattaaagctgcagtgagatgccattacatacccactggaatggccaaaattataaagactggcagtaccaagtgttgacaatgatgtggagcagctggaactttaattcattgctgggag

SEQ ID NO: 12004 - DNA, 446 bp, Homo sapiens
  misc_feature (1)...(446): n = A,T,C or G
tttgagnctgagacattacaaagngcggnggaattctgaaaacttggaggtgccttctctaaagtcatcaggaattctgagttgtttttgtttaaataggaggcacaagagggcaccagactgaacaaaatgttaggtggaaactgaaaaacgttggttagcatgaacaatttcagttttcagtcacactgaccagtatctgtaagttaggattgagatgggcttgttttatttatttacttttaaatttgtgctgctacatatcccaaacaaatgtggtctttatcatcactggcaagccattttacttattggttaagctggaattttattacaccaccccagcaagatagaggagaaaagcgaaaattaagtagtaaatggttattatgccttaagggaaggtgtgaactggcaagacaaaagagccaaatttagtagtaaag

SEQ ID NO: 12005 - DNA, 477 bp, Homo sapiens
  misc_feature (1)...(477): n = A,T,C or G
gcgggcnnnnncctgaganactgagaacctacgcgagagcgctgatttatctgaaacaaaggcatggcttattcattagaagttaccctcgtgttgcctacattttctcaattgtaacagggggatgatgataatctcattttcttaggactgttgtaacacaaacatggaaatgttgtctggttttgctattttcactattactgatttttttcttcccccccgagttggagtcttgttctgtcacccaggatggagtgcagtgacacgatctcaactcactacaacctccacctcctaggtcttcaagttattctcctgcctcagccccccgagtagctgggatttacaggcacatgccaccacacctggctaatttttgtatttttggtagagacggngtttcggcatgttgcccaggctggtctcgaactcctggcctcaagtgatccacctgccttggcctctcanagtgtn

SEQ ID NO: 12006 - DNA, 451 bp, Homo sapiens
  misc_feature (1)...(451): n = A,T,C or G
ntttgaagatcgttagnccagngcggnggaattcgccgtcccgctcctaaggcaggaagatggtggccgcaaagaagacgaaaaagtcgctggagtcgatcaactctaggctccaactcgttatgaaaagtgggaagtacgtcctggggtacaagcagactctgaagatgatcagacaaggcaaagcgaaattggtcattctcgctaacaactgcccagctttgaggaaatctgaaatagagtactatgctatgttggctaaaactggtgtccatcactacagtggcaataatattgaactgggcacagcatgcggaaaatactacagagtgtgcacactggctatcattgatccaggtgactctgacatcattagaagcatgccagaacagactggtgaaaagtaaaccttttcacctacaaaatttcacctgcaaaccttaaacctgcn

SEQ ID NO: 12007 - DNA, 451 bp, Homo sapiens
  misc_feature (1)...(451): n = A,T,C or G
nttcgaaattcgaggacaattagnacangcggnggaattcggcaggggcatgatgggggagggggccggaggctgagagacaaaagttccagagcctccctcgaaggttctctactactgtattctgtacataatgtaccatcccatgtggaatctgtgagtgtcctcttaagtagcgtgggctagccaatctgccgttcatggtgtattgtaaactccgaattccatatgtaataggatgcaagtctaagcgtttcatgtggacataaatgtatctaaataaaactttccctagcactgtggctgacctcacccttacctttatactttagtatgaaactgatgagaactttggtagtgagtattttttttatatatatacatatatatgtactatctatatatatatctcaagcatctttcaggtctttgtgtgtggctttcttaaagg

SEQ ID NO: 12008 - DNA, 478 bp, Homo sapiens
  misc_feature (1)...(478): n = A,T,C or G
gcggtcnnnnnaactggacctgagancgctacggagagcgtgtgagtcgaacaccacatggatgacaggaacatctctatatatcaaaaattagcagatgcacttatttattttttgatttttgtgatggagtcgcactctatcacccgtgcagtgccgcgaggttgtctcactgcatcctctgcctcttgagttcaagtgattctcctgtatcagcctcccaaggagctaggattacaggcgtgtgccaccatacccagctaatttttgtatttttattagagatgggacttcaccatgttggccatgctggtctcaaactcctgacctcaaatgatctgccagcctcagcctcccaaaatgctgggattacagatgaagagatacacttctcagtaatctatatgtcgagtaagacacaatgaaattagaaaatatttttaagtcaatgatattaaaccatactacacatcanaac

SEQ ID NO: 12009 - DNA, 497 bp, Homo sapiens
  misc_feature (1)...(497): n = A,T,C or G
ggtnagcnccnattgtagncccctnattgagnatcactagaccagngcggnggaattcgaagccagtgcgccgcccacctggaaagattctctctagatccaaagaaaaacaagagggttctttttgccttctactcctcaaaacacaccagcagctcagcaattggaggggaggctgaaggacaaaaacattgctatcccatagagcaacggtataagagccgatagagactcctggcgctggaagtcacggatccgaaagaaggcgcccaatcatttggtttctttggatcgttattgagtcttctgtcatcatagttctaccctcctactcgaatgcctcccgtggggcccttacccttgctctcctctgcctggaatgcccgcctcttctggcattcaagcccctgggttctattcagatgctccagttacaaatgatagatccaaaattgtcttctggaagaaacatcacaaaacttcaaagaaattagaan

SEQ ID NO: 12010 - DNA, 467 bp, Homo sapiens
  misc_feature (1)...(467): n = A,T,C or G
naatgagagcatacgaagngctgagaacctcttaangcgatacatttggccaagtgcaggctctgacctggaggtataagcatataggaggcgtggcccttgaccccaaatagatgagaatttggtggtaaatacataacctgtgtattagtccattttcatgctgctggtaaagacatccctaagactgggcaacttacaaaagaaagaggtttaattggacttacagttccatgcggctggggaagcctcacaatcttcatcgcggaaggcaaggaggagcaagtcctgtcttccgtggatggcagcaggcgaagagagaatgaggaaaatgcaaaatcagaaacccctgataaaaccatcagacctcttgagatgtactaccacgagagcagtatgggggaggaaccgccgccatgattcaattatctcccaccaggtcccttgcacaacacatgggaattatg

SEQ ID NO: 12011 - DNA, 446 bp, Homo sapiens
  misc_feature (1)...(446): n = A,T,C or G
nttgagatcgtagaccttgcggaggaattccgcttcctggatgtgtttgtctctcttggctgcactggcctgctctgctggagacacatgggcttcagaagttggcccagttctgagtaaaagttctccaagactgataacaacctgggagaaagttccagttggtaccaatggaggagttacagtggtgggccttgtctccagtctccttggtggtacctttgtgggcattgcatacttcctcacacagctgatttttgtgaatgatttaaacatttctgccccgcagtggccaattattgcatttggtggtttagctggattactaggatcaattgtggactcatacttaggggctacaatgcagtatactgggttggatgaaagcactggcatggtggtcaacagcccaacaaataaggcaaggcacatagcagggaaaccca

SEQ ID NO: 12012 - DNA, 422 bp, Homo sapiens
  misc_feature (1)...(422): n = A,T,C or G
cctgagaatcaaatcaagaactcaaccctttaacaatagctgtaaaaaataatataaaatacgtagaaatatacctaaccaagaatgtgaaagatctctacaaggaaaactacaaaatactgctgaaataagtcatagatgacacaaacaaatgggaacacatctcatgctcatggatgggtagaatcaatattgtgaaaatgaccatacagtcaaaagcaatctacaaattcagtgcaattcctgtcaaaataccatcattatttttcacagaactataaaaataaaatcctaaaattaatatggaaccaaaaaagagcccacatagccaaagcgagactaagtgagaagaacaaatctggaggcatcacattacctgacttcaaactatactacaaggctatagttaccanaacagcatg

SEQ ID NO: 12013 - DNA, 461 bp, Homo sapiens
  misc_feature (1)...(461): n = A,T,C or G
nggaaaactgactgcctacaatgggcggngcaannnctgcagttttattctctccagagtgataaacagttatacaatttagatattatacagcaagaatatattaatgattatggtctgatccaaattgaactaacaaaggctgcatttggctgctttggtaactggcttgcaacagtggaacagcggcaagaaaaggaaactgagcttgaattgcaaatgaaactgtggatgtataataagaaaacacaagggtttattcttaacactaaaattaacatgccacacgaagactgcattacagctctctgtttctgtaatgcagaaaaatctgaacagcccaccttggttacagctagcaaagatggttacttcaaagtatggatattaacagatgactctgacatatacaaaaaagctgttggctggacctgtgactttgttggtagttatcacaagta

SEQ ID NO: 12014 - DNA, 486 bp, Homo sapiens
  misc_feature (1)...(486): n = A,T,C or G
nggcttgccaatcgaggaccccngnattgtacgaccactatccatgtggtggaattccccgatttgagggcttggagaagatctctgcctacatgaagtccagccgcttcctcccaagacctgtgttcacaaagatggctgtctggggcaacaagtagggccttgaaggccaggaggtgggagtgaggagcccatactcagcctgctgcccaggctgtgcagcgcagctggactctgcatcccagcacctgcctcctcgttcctttctcctgtttattcccatctttactcccaagacttcattgtccctcttcactccccctaaacccctgtcccatgcaggccctttgaagcctcagctacccactatccttcgtgaacatcccctcccatcattacccttccctgcactaaagccagcctgaccttcaaaaaaaaaaaaaaaaaggttgttttatggaaggcccaaatggttaaatacataca

SEQ ID NO: 12015 - DNA, 462 bp, Homo sapiens
  misc_feature (1)...(462): n = A,T,C or G
naaaaacggatagacgacatcgganagngcggnggaattntagcaagagctagcaagaactagcaagagcttgaacaaacgcctggactcatattggaagactgctcatttgtctactgcctcattcctggaaattgcactggaactgtctgattaagaaaaacagaataattctgaaagaaagaaaacaaagaaaaacatactccagaattcctaatagaacacttcacctgaacctaaaatggtgagcgagagtcaccatgaggccctggcagccccgcctgtcaccactgtcgcgactgttctgccaagcaatgccacagagccagccagtcctggagaaggaaaggaagatgcattttctaagctgaaggagaagtttatgaatgagttgcataaaattccatgtgagtattctatattagtacttgagtaaaaataagtggttgaaaaataccccat

SEQ ID NO: 12016 - DNA, 453 bp, Homo sapiens
  misc_feature (1)...(453): n = A,T,C or G
cgggtantttgtttcattactccgtgcggnggaattcccaaaaaatatagacagttatattaattattttttcctactctatgtatgcacattgtggaacatgaagatcgatatgaaataaattggcattggtttgctttttctttcatgtagttgactgtatgtatatattttttctcatatttaagaaatactaagaaaaccacattaaacaaatctggcttaattgtttgctctgtttataattaaacaaatgtaaaaaaaaagtttgaaatcacttagaaccacttagatgtagttaggagaaacattccttgattattctgagtctagtttgataaataagattatgaagttaaaactatgactttcatcataaggaatctttgcaataaatcttaattaactgacttctacagttcctaagatctatatttgcaacctttctgtttt

SEQ ID NO: 12017 - DNA, 397 bp, Homo sapiens
  misc_feature (1)...(397): n = A,T,C or G
cggganntttgattcatntccactatccatgtggtggaattcggaggcaggtggtctaagtgctgactggctacgtagttcgggcaaatcctccaaaagggaaagggaggatttgcttagaaggatggcgctcccagtgactactttttgacttctgtttgtcttacgcttctctcagggaaaaacatgcagtcctctagtgtttcatgtacattctgtggggggtgaacaccttggttctggttaaacagctgtacttttgatagctgtgccaggaagggttaggaccaactacaaattaatgttggttgtcaaatgtagtgtgtttccctaactttctgtttttcctgagaaaaaaaaataaatcttttattcaaataaaaaaaaaaaaaaaaaa

SEQ ID NO: 12018 - DNA, 421 bp, Homo sapiens
  misc_feature (1)...(421): n = A,T,C or G
cccctgatgcagtgcttcagatgaagaatgtggacttgaaaatacagactgggctagtccagtgtctatatttaaacttgttcttttcttttaataaagtttaggtaacatctcctgaaaagcttgtagcacaaaggctcagctggggatggtgtttgacttcggaggaaaaaagttgctattgcccgttaaaggcactagagttagtgttttatccctaaataatttcaatttttaaaaacatgcagcttccctctccccttttttatttttgaaagaatacatttggtcataaagtgaaacccgtattagcaagtacgtggcaatgttcattccaatcagatgcagctttctcctccgtctggtctcctgtttgcaattgcttccctcatctcagtagggaanaaattgagtgggagta

SEQ ID NO: 12019 - DNA, 418 bp, Homo sapiens
cgtcacaggtaatcataccctatcggtgtgataaatatgacatcatgctcctttgtcccatgggtgacctgggccagcttctgtttctggaatgggacgcgagagataaagattctatccgacgagtagtacaacacagcaatgtggtcatcaatcttattggacgagactgggaaaccaaaaactttgattttgaggatgtttttgtgaaaattccccaagcaattgctcaactgtccaaggaagctggagttgaaaaattcattcatgtttcacatctgaatgcgaatattaaaagctcttctagatatttgagaaataaggctgttggagagaaagaagtgagagatgcatttgcgaagccattatcgtaaagccgtcggacatcttttggagagaggatagatttcttaattct

SEQ ID NO: 12020 - DNA, 421 bp, Homo sapiens
  misc_feature (1)...(421): n = A,T,C or G
gatgaccttactctaaaatcctggacttttaaccattgtaccacactgtttcccagttattttcttatactcattatataattgatccagttatatacataaaaccttttaaattgtatttttttgttattttctttttcttcttttaaaaacaaacaaacaagcaaacaaaaaaagagagaatgggaactcttgagttgcttggcatggcatggcatcttagccctgctatacaaaaggaccgtttacagtcacaaaatgtgtggcctttccagaatttcttccaagacaagggagtaattgacaaaattcctgtaaatcttttgctcactgtaatttatgaccatttatcttctttgatgtccatagctcccttatatcaagaatatcangccccagaaccttgcatatttccatctcc

SEQ ID NO: 12021 - DNA, 475 bp, Homo sapiens
  misc_feature (1)...(475): n = A,T,C or G
agcggttnnnnnnaactgatgaccacttgaccagcgctgtggaattcgcagccgggctgagaggagcgtggctgtctcctctctccgccatggcgtgtgctcgcccactgatatcggtgtactccgaaaagggggagtcatctggcaaaaatgtcactttgcctgctgtattcaaggctcctattcgaccagatattgtgaactttgttcacaccaacttgcgcaaaaacaacagacagccctatgctgtcagtgaattagcaggtcatcagactagtgctgagtcttggggtactggcagagctgtggctcgaattcccagagttcgaggtggtgggactcaccgctctggccagggtgcttttggaaacatgtgtcgaggaggccgaatgtttgcaccaaccaaaacctggcgccgttggcatcgtagagtgaacacaacccaaaaacgatacgccatctgttctgccctggg

SEQ ID NO: 12022 - DNA, 494 bp, Homo sapiens
  misc_feature (1)...(494): n = A,T,C or G
tgcgggtncncccaatggagaccanatagatagcccgtcggaanncgcgaagaccatgacaggaggccgagcgcagagcattggcaggaggggcaaggtggaacttgtgaggaactctagcgtactcttcctgggaatgtgggggctgggtgggaagcagccccggagatgcaggagcccagtacagaggatgaagccactgatggggctggctgcacatccgtaactgggagccctggctccaagcccattccatcccaactcagactctgagtctcaccctaagaagtactctcatagtttcttccctaagtttcttaccgcatgctttcagactgggctcttctttgttctcttgctgaggatcttattttaaatgcaagtcacacctagtctgcaactgtaggtcagaaatggtttcacagtggggtgccaggaagcagggaagctgcaggagccagttctactggggtgggtgaatggaggtgatggcn

SEQ ID NO: 12023 - DNA, 494 bp, Homo sapiens
  misc_feature (1)...(494): n = A,T,C or G
gggggttgccccatagaaaacccatttgagactataggaagngcggnggaattcaaaacataatttttcccatatccctggactcttgagaaaattggtacagaaatggaaatttgccttgttgcaacatacaattgcaaaagatgagtttaaaaaattacatacaaacagcttgtattatattttatattttgtaaatactgtataccatgtattatgtgtatattgttcatacttgagaggtatattatagttttgttatgaaagtatgtattttgccctgcccacattgcaggtgttttgtatatatacaatggataaattttaagtgtgtgctaaggcacatggaagaccgattttatttgcacaaggtactgagatttttttcaagaaacagctgtcaaatctcaaggtgaagatctaaatgtgaacagtttactaatgcactactgaagtttaaatctgtggcacaatcaatgtaagcatggggtttg

SEQ ID NO: 12024 - DNA, 472 bp, Homo sapiens
  misc_feature (1)...(472): n = A,T,C or G
agcggtgccngnactgagnccaactgagacatctgtcagngcggtggaattctgctttaacaatttctaaagttcttttatccatttgttcactgctatgtgatccaaacccagatgaccccctagtgccagagattgcacggatctataaaacagacagagataagtacaacagaatatctcgggaatggactcagaagtatgccatgtgatgctaccttaaagtcagaataacctgcattatagctggaataaactttaaattactgttccttttttgattttcttatccggctgctcccctatcagacctcatcttttttaattttattttttgtttacctccctccattcattcacatgctcatctgagaagacttaagttcttccagctttggacaataactgcttttagaaactgtaaagtagttacaagagaacagttgcccaagactcagaatttttaaaaaaa

SEQ ID NO: 12025 - DNA, 470 bp, Homo sapiens
  misc_feature (1)...(470): n = A,T,C or G
natcgtaccttggnantganagtctaggaagngncgnggaantcattnatttgaggctgctggaggtaccacatcccatcaagttagtttctcctattttaatggatttaattcgctccttaacaacatggaactcattagaaagatctatagcactctggctggcaccaggaaagatgttgaagtgactaagggtgagtgagaatatatctgaattctagcctgcaagtattgtggtgtattattattagggtgaagaaggcaactagtactttattatttttctatcccattgacacatattaactatatgataacgtgtgtttttcatcctttgatcagacaaacaaaagcaaacaaaacaatcttcaccaagttttaaacaaactgggcccggcttggtgactcacacctgaaatcccagcagtttgggaggccgaggtgggtggatcacctgagatcaggagttt

SEQ ID NO: 12026 - DNA, 505 bp, Homo sapiens
  misc_feature (1)...(505): n = A,T,C or G
agggaggccnnnnnnnnttgaaaatgagatcactagtcagtgtggtggaattccgaattcaagttccccaaccgcctcaacctggaggccatcaactacatggcagctgacggtgacttcaagatcaaatgtgtggcctttgactgaaatcagccagcccatggcccccaataaaggcagctgcctctgctccctctgannaaaaaaaaaaaaaaaaaaaaaaaaaaaaaaaaaaaagcgccccttaaattaaaaaggcccctaaaaaccccgtgaaaaaccccgaaggggccttttaattgccaacccatttgtggttggccccccccccggcctttttttaaccgggaaggggcccccccccccggcctttttaaaaaaaaaaaaaaaaaagccccccctttgccggaaagggggggaattattttataaggggnnnnnnnnnnnnnnnnnnnncttcnnnctgnnannnncnnnnacanacnnnnannncnacacccccnct

SEQ ID NO: 12027 - DNA, 469 bp, Homo sapiens
  misc_feature (1)...(469): n = A,T,C or G
gcgggactgngattgatncccatcgagaccctagtccatgtggtggaattcggacagccgatgacagggccgggcctcggtgcagtctgcccgtcattccccgcgtggggttctgtgatcctgggcgcgaggcttcgcacatcaggcccagcacggggaggccgagtcgtgtttcgccaacgacgtctgtccttatcccatggctggcacctgctgggcaggctgcagggcccgtggccattccagcctccgcttcggccttccagccttggaggccctgagaggccctgggctggttgctttctcacggagcgtgagggttcttcgtgtcttcaggatacaaaccctttatttgcgacgtgttcgcctttttcccagtttgtgacgtatgttttcaccccctcttcacgtggtgtctcagagatgttctgaatttggaggaggagacactgactggttatttttacag

SEQ ID NO: 12028 - DNA, 462 bp, Homo sapiens
  misc_feature (1)...(462): n = A,T,C or G
nnaaacctcggctagcattacattgngcggnggaattcctctaatcaatagtggtttagctttcttttctatttcactcgtttctagggttttttatttgcagtttaggaactattaggaatgtcaggactttatcagcaggggtaaaactaccacctggcctagcctaagtaggaagtgaaaagataattcaccaaacaatgattaatcagatagaagttctagtcaagagggatattgttgaagttacctcttttagcctagatacatggattcttttcaaatcaggaaagattagaaaaggaacccaaaaaaccctttaacagtgtgaatctttatagtatttgaaaatgagaagaagcagcagattgtaatttggtttattggatgtgatggacgttctgtaatagaaaacctgaaacgatgattgaatgggaaaaagagactacaaaatttgtcgta

SEQ ID NO: 12029 - DNA, 461 bp, Homo sapiens
  misc_feature (1)...(461): n = A,T,C or G
ccacattgaatgcctaccttaggccgngcggnggaattaggaatactctctatgtatatggagaagacatgacacccacccttctccgtggggccttctctccttttggaaacatcattgacctctccatggacccacccagaaactgtgccttcgtcacctatgaaaagatggagtcagcagatcaggccgttgctgagctcaacgggacccaggtggagtctgtacagctcaaagtcaacatagcccgaaaacagcccatgctggatgccgctactggcaagtctgtctggggctccctcgctgtccagaacagccctaagggttgccaccgggacaagaggacccagattgtctacagtgatgacgtctacaaggaaaaccttgtggatggcttctagggaacagagctggattccttgtgcctcatatgccccaatgctggtctcagtaaaacactg

SEQ ID NO: 12030 - DNA, 442 bp, Homo sapiens
  misc_feature (1)...(442): n = A,T,C or G
attgcngaccatagtcattgtggtgcaattcgagctcccaacaacacagagaagaatattagggatgtgggtgctgttacatgcattagtgtttcttgattgacaatacccgccagatggacacccagaaacacacctgtaaaacaaagttaagtttattggcttgttggaatttgagaaaaccacaccaaagggagccatgtgttgtctcagtaacaaggtgctagaaagaacttacaggaattgggcttgtgtgaggtgattttgaagtagattcaaaaaagtggaagtttgctctcaattgggcactgtgagtaaatggacgcaattctatgattgtgtatcttagcatatctgatctatggggggacagacaactgtgaggtttcagctgtgattggcaaggaagctgcagtcaccatattatctgggaaagagggac

SEQ ID NO: 12031 - DNA, 419 bp, Homo sapiens
aacagtcattgtcctgtaagtggaggtgggctcaactggcagagttaatgcctctttaaactggttggtgagcacacttgaagggagatagtgatgtctctgggagacggtgttcccccctctgtatgcttaattagtgtctgactaccaattaaaagttttatgtatacatttctgaattatacagtaaacctctaatgttcagacaactcttaaccttattatcaccatgttgtggaaatgcatgaaaagtttcttcagaaagtatctttttaagccatacagtatacacatgttagccacttcatcccaaatttctggagaaacttggttggctatattggcttatagagtaagaattttgatctgatttcacttggttctgaatcaagagcccccatgactaagcagttaaatat

SEQ ID NO: 12032 - DNA, 531 bp, Homo sapiens
  misc_feature (1)...(531): n = A,T,C or G
tgtccctagtacagtgcggtggaattcctggagtgcaatggtgtgatctcggctcactgcaacctccacctcccaagttcaaccgattctcctgcctcagcctcccaaatagctgggattacaggtgcccaccaccacgcccagctaatttttgtgtttttagtagagatgggtttcaccatgttggccaggctggtctcgaactcctgacctcaggtgatctgcccgcctcggcctcccaaagtgttgggaatacagatgtgagctaccacgcccaggtactcccttagctttaatatttactcatctgtatctgcatgtgctgccccagacgatgatgatgatgattgagacatgatctcactctgtcacccaggctggagcacagaggtgagatcatggctcactgcaacctcaacctgtggggctccagtgatcctcccacctcagtctccagagtagctgagactacaggtgcaggcaatcacgcctggctattaaaaaaaaaaatgtagagatggggtctccctn

SEQ ID NO: 12033 - DNA, 460 bp, Homo sapiens
  misc_feature (1)...(460): n = A,T,C or G
nattgatgacccttgnnnnnatcgatgacccttataccangcggtggaattcgatttgagttgaaaagagtcaggatgcacatatttccactatttcaggattttcatatgactaggcacatgttgtggatgatactgggaccaactaccaatgaccaactataaagtacccctgcaataagggagacttcctttttgtagaatagtcctgaaaatactgacagatctgcggttagtttgttattttattgcataaaaaacagtttaaacaaattttatagccaaagttttatccttgatgggtctggccagactgcaatttcttgactaaagcttttaatgccaggttaaacaggagaaactttttccactagaagaaaatccttgctatctattttttccaatagaagaaaatccttgctatttattttatttgatgaataaacaaatttattgcagg

SEQ ID NO: 12034 - DNA, 450 bp, Homo sapiens
  misc_feature (1)...(450): n = A,T,C or G
atagaaacactggagtcctcagaacangcggnggaattccagtcttcctcttccccccaaaacccaaggacaccctcatgatctcccggaccctttaggtcacatgcgtggtggtggacgtgagccacgaagaccctgaggtcaagttcaactggtacgtggacggcgtggaggtgcataatgccaagacaaagccgcgggaggagcagtacaacagcacgtaccgtgtggtcagcgtcctcaccgtcctgcaccaggactggctgaatggcaaggagtacaagtgcaaggtctccaacaaagccctcccagcccccatcgagaaaaccatctccaaagccaaagggcagccccgagaaccacaggtgtacaccctgcccccatcccgggatgagctgaccaagaaccaggtcagcctgacctgcctggtcaaaggcttctatcccagcg

SEQ ID NO: 12035 - DNA, 459 bp, Homo sapiens
  misc_feature (1)...(459): n = A,T,C or G
natcgagaccctttgaagngcggtggaattcaggagatctccaagcgaactcagcctcctcccaagctccctgtgggtcctagccacaagctctccaacaattactattgcactcgcgatggccgccgggaatctgtgcccccttccatcatcatgtcgtcgcagaaggcgctggtgtcaggcaagccagcagagagctctgctgtagctgccactgagaagaaggcggtgactccagctcctcccataaagaggtgggagctgtcctcggaccagccttacctgtgacactgcaccctcacggccacccgactactttgcctccttggatttcctccagggagaatgtgacctaatttatgacaaatacgtagagctcaggtatcacttctagttttactttaaaaaataaaaaaatagagacagagtctcaccatgttaaaaaaaaaaaaaaaaaag

SEQ ID NO: 12036 - DNA, 493 bp, Homo sapiens
  misc_feature (1)...(493): n = A,T,C or G
nctcgagatcactaggccagtgtggnggaattcccaaatctgggccaggctccctttcttcccacgagtgctacagatcagcctccacaaaaccagccactccccaggctcaagctcaagctcagagggacacaagccaaccaaggctacagttagagaccggtcctcagaggcctcgtgtagtgcgacgcccttgtgtggcagtaagaaaacgagggtcctggaaaggccccggacactgcttgtggacaccagtgcttctggcagacccacgcaggggccccgagaagggcgctgctccacgggactcaggtccacacggggagctcttgcctttctccggacccaagatctggcccgcaagcaaaaataccaaagaaaaacatgctagcacaaaaatattaaataacaactttgctaccttttaagtgcaggtttcaccaaataccacctagagactctgctacttttcaaagacatccacaaatagcag

SEQ ID NO: 12037 - DNA, 468 bp, Homo sapiens
  misc_feature (1)...(468): n = A,T,C or G
nggggaaatcgagacactagtcattgaggagcatctgctgacgtgccgtcattggccctatcctttttgcttgtgcattagctatccaaatcccaccgattttcaaaatctagctgtttcatcatggtgtcagtgcctcctacgataaaagtcatctcttctcagtttttcagggcaccttttgttattttccaagggcactttttaaagcttctaatacaatgtatatcacattctgctatccatacagttacttagacatgcatctttctattaaattttatcttaaattttaatgaaagggaatggttattattcatctttgaattatgtacaatgctgtgtataatagccaatcagtaaatatttgttgaattaagttgaatacacactcatctaatgactgctaacttatgactcaatatgaattaactcatttaaatccccaagcattcaaatgttactttt

SEQ ID NO: 12038 - DNA, 466 bp, Homo sapiens
  misc_feature (1)...(466): n = A,T,C or G
natgagaccatggcattgagggcattcncaanncgctcaccctgtcgcatgggtgacttcacagnngggcgattgctattctgcagctgatttagagagatccaagcatttgcccaagttcagatcaacaaacatgggtgccaggcctatgatgggtgccggatgggttacagggaggaaggatcctgtcctccagacacctgcctacctatggagaaggaagggagccaatattcccttttctaggaaatataaattgcttatttgaataaaaaaatcatatgtttagccacattgctcactgattatcacagttgacatagtaagttgaggtccagctaattttcttttaaagtgtgaaataaatttaaagagactcaccagtatgatttcaagtaccttcagacttaaatgtgctggcctcatctttgcaaatggaacaaaaattcaattctgaatttgcctg

SEQ ID NO: 12039 - DNA, 465 bp, Homo sapiens
agctgccttttaatcggtccctttgagtgcgtggaattccactagcaatgggaggagaaatcctccctctgtgggaggcactgactacattccagttctccctcctacgcccagagactggaccagggtttgatgactggcaacttctcaaggggccggtctgtcttagttgatgattttagaggtatatagaggtatttatttacaaataaacaaatatttatttataagtagatgtttacatatgcccaggattttgaagagcctggtatctttgggaagccatgtgtctggtctgtcctgctgggacagtcatgggactgcatcttcgtccttgtccacagcagatgaggacagtgagaattaggttagatctgggactacaaatagcttctctttcaagtgccattacagctgaacattagtgaatcttgggccttctttgggctcagggcagagcaggtg

SEQ ID NO: 12040 - DNA, 490 bp, Homo sapiens
  misc_feature (1)...(490): n = A,T,C or G
agggccnnnaactgatanactgagtggtcntncgnggaagccangctaccatatctgcagttggtgatttaaagtgagcttatgtacagtttgtggcgtatgtgttaatgatgtactttttaaaaagaaagaagagatatttcaattcagtcagatttattagtctggtgtttttgcaccctttttcaagtacaaaatcgtactataattttatgcaagatggtactgtaacattccatattatctataaccagcctttgttaacaaagggaactgatatacttgtgtgtataataaatggtacagatctgtataaaatagtgcatttatttaaattttaaaagtattgataatgttaaatgcttaaagctctatttattattaatacaaaattgtttgcttacatttttacttataatctgccttcatatgtggcggataagctcaccatatgatcatgcagatagcttcatgcttattttaaatgttn

SEQ ID NO: 12041 - DNA, 423 bp, Homo sapiens
cggctttcctcctggtaaaggatagactctgtatctctctccagattcttaccctgtctcttcagggatctgacttcagaagaaatctatttcctgcctcttgtcctgtagcctatcagtatgcttggttttctccagtttaaaaaaaatgacgaccttttcttataccatacacaaaaattgactccaaatggatcacagacctaactataagagctaaaactataaaattcttagaataaaacatgggagtaaatcttcatgatctcaggttagatgaagccttcttaagtgttacaccaaaagcacaagtagcaaaagaacaaacaaaacaacaggaaaaaagcacaagcaacccaaatcacaaaccaacaaagaagacaagctgggcttgcatcccagcactttgtgaggccccgcagg

SEQ ID NO: 12042 - DNA, 455 bp, Homo sapiens
  misc_feature (1)...(455): n = A,T,C or G
tgcgtgagnttttntccgtaccgtcngtctcgacngnacnnnnaggatnaaangcagggcggttaggttgctcttgatatgtttgctgggtgtaccttttttatttcagcgttccctcccactaaccactactttcaggtatatatggtgtcattttaggtccatttcatttagtgacagtcctttccataagaaaaaataaagtcaagctgtattttttagaatatgtctagggaagattaaacattgtttggacatttaggctgggcacagtggctcacgcctgtaatcctagcactttgggagtccgacggcaggcagatcacctgagggcaggagtttgagacaagcctggccaacatggcgaaaccccatctctactaaaaataagatgcaaaaattagccaggcgtggtggtgggcacctgtaatcccagctacttgggtggctgaggt

SEQ ID NO: 12043 - DNA, 474 bp, Homo sapiens
  misc_feature (1)...(474): n = A,T,C or G
ggcccgttcgagaccataggcattgacgngcaattctgcanagctccatctggacagaggtagaaaaaattatattcactttgagttttggatttttttctcttaattttcaaagataaagacaattgcttttggcttttaagagacacatctggtatgccttgggctggatgccagatatttctgctgttgagtttttataacattatataggcctcaatattttagaactagtatacatttgataaaagtgacttttctaaagttttagggagaatcttttgcttaggtgcagctgagtatttttagttcagtactacagatggcataccaaatttaagaggagttgagtgactgcttcaaggttgcacagctagttcttggtagatctggaaaaggaccaacatctcttggccctttgtcagatattctttctttgatttcacactggttttaaagatgcttaatacattt

SEQ ID NO: 12044 - DNA, 527 bp, Homo sapiens
  misc_feature (1)...(527): n = A,T,C or G
atcgcgttttctctgcgcgtgtgcgttttccctcctccccgccctcagggtccacggccaccatggcgtattaggtgcagcagtgcctgcggcagcattggcctttgcagcggcggcagcagcaccaggctctgcagcggcaacccccagcggcttaagccatggcgcttctcacggcattcagcagcagcgttgctgtaaccgacaaagacaccttcgaattaagcacattcctcgattccagcaaagcaccgcaacatgaccgaaatgagcttcctgagcagcgaggtgttggtgggggacttgatgtcccccttcgaccagtcgggtttgggggctgaagaaagcctaggtctcttagatgattacctggaggtggccaagcacttcaaacctcatgggttctccagcgacaaggctaaggcgggctcctccgaatggctggctgtggatggggtggtcagtccctccaacaacagcaaggaggatgcnctttctccggacagattggatgtgggagaaaatgg

SEQ ID NO: 12045 - DNA, 464 bp, Homo sapiens
  misc_feature (1)...(464): n = A,T,C or G
nnaaaatcgaatagcgtacactcgngcnggacnncctattatagatggccttggaattagctcttgggggtctgaatataacgtaggaaaatgtcctttctcagggagtgggcgctttaaagttcgttcgttcgtcactccaattttagctgtgcactgcacctttctttgcacccctactctcttcatcttgtctcatatccccagttattgaagtagccctgcgatcataagttgggtttctgatctgatctcttgcattctggtgggtactgggggcagaatcagctttgttaatgattttctgggcagaaggtaaattcagctgcatctgaaggggcttcacagtccaatagccgtccttttgttttacataacagagagtgatggtcaaggccacccacatctttagtggtagagccaggacaaaaagtcaggttatctgcctcttaagtctcatgctg

SEQ ID NO: 12046 - DNA, 466 bp, Homo sapiens
  misc_feature (1)...(466): n = A,T,C or G
aaaaaatttagaaacccctattcagagtgccgtaatacgngattctcctgcctcagcctgttgagtagctgggactacaggtgcgtaccaccaagcccagctaatttttttatatttttagtagagacggggtttcactgtgttagccaggatggtctcaatctcctgacctcatgatccgcccaccttggcctcccaaagtgttgggattacaggcatgagccactgcccctggacagatctaattttttaatagtgtaagagagatacactgtgcattccatctatgtcctgagttagtaattcaagtaccaaaaagtaatttaatatgaaactccttgaaaattcagagcttacacttgaattcaaaatgcctatttttgattgtttaaaagttacttaaacctgagctttaggacctttaaaatctcagcatgccttttaagctagtacttttcctgttttg

SEQ ID NO: 12047 - DNA, 438 bp, Homo sapiens
  misc_feature (1)...(438): n = A,T,C or G
gaggaaaggagagggtgctcaggcagcgagaacagggcgcagctaacgccggggaggaggatcccgtcctcatgggtgcgggagcaacgtggcgtgggagtgatcgttctgggggagagtgggcagaagagagcgcgaggcgagcccggggccaggggcgcagggaatagtggctttggagctagcgctctgccgaccagacagtaggacacatgctggtttcgcctactgagatggcttcccacccgtaacctgcttggagattcttgacactgcctgcccctctgacatcgctgccctgagatggctctatagagccagaggactggacaggacctgccttccgctcgtttggttccggcctcaggcttangacaatggggtgttcctagcacccgagcgggccttctggtcacagtgcgccttttaggtggctct

SEQ ID NO: 12048 - DNA, 474 bp, Homo sapiens
  misc_feature (1)...(474): n = A,T,C or G
natcgagaccaatcgnnattgacgaccctagtccangncgtggaattcggaaaaggtgctttttaattttaatccctttgatcaatatggcttttttccaaattggctaatggatcaaaatgaaacctgttgatgtgaattcagttattgaacttgttacttgtttttgccagaaatgttattaataaatgtcaatgtgggagataatagtatggcgtctgtcctagaatgctttgtgtcagttactaattctaaaatcaaattggtagaaggtggtactacatacgatgtctatgatttaggagagggagccggggcagcctatatatgtggagcctcttgactgaagctatgattcatcttaatgcttgtatccacttcctttaatgagcaatttaaatattagggcatacaccacctgtcttttttgaaagttgtatgtgttttattttcccaggattactctcttaacan

SEQ ID NO: 12049 - DNA, 486 bp, Homo sapiens
  misc_feature (1)...(486): n = A,T,C or G
cccgcgcccccccccccatcgtagaccattatagacgacccttagnccatgcggtggaattcgaagatatgaccttggaagagaacaccccactgtagactgagaagaggagaatactcaggataatttttttaatggatttttttatttctatataaacttttcagaaaagtattatatccatacatcaaagctatacataagtgatagcttaaatgtattttcacaaagtgaacatacccatttgaccagcacccagatcaagataccgaatattattagtgtcccagcagctcctctcttgcccccttccagttcagtccctataacctttatcttgattggatcctagggtatgcatatgttcggctgtagtagatactaccaatcagtttctcaaagtagttgtactaatctatagttctaccaacagaatatgagaattctggttgtttcacattctaactacacttggtattttcatat

SEQ ID NO: 12050 - DNA, 527 bp, Homo sapiens
  misc_feature (1)...(527): n = A,T,C or G
atcaccttcatgcacatccttactacagaatccgtcctttcatttcaacttatagcaagctatgatttttatatataaatattatataaataatgtataaaacattaaaagttaactatgtaagatattatttctgaaacaatttagctatatccactatgattataaactgtgtctcgacctgtgttatttacattagctgcttaaaaaagcattgagttaatttttttaaatatcaactaaaatatcatagttctgtggtagacattgttttataatgaaataactgcaactagagaaaactgtataaaaacattaaattgtcagtatttttgtaaggttccattttgtaaagagaataatattcaaagacttttgtagcatacaaagtgaaaacttgtatctgcgaaactatacttgtattaaatgtgctttttaaataaaagctcgtaacacaactnnnnnnnnnnnanannnnnnnnnnnnnnnnannaannnnngcggcgccttccatctaaaggggcccg

SEQ ID NO: 12051 - DNA, 464 bp, Homo sapiens
  misc_feature (1)...(464): n = A,T,C or G
acgcggggnnnttttnaaacggattgcgccgcatngngcnggacnnncgatttcttagaaatggaacgcttcgtcacacggaactgtatggaatgccactagcaatgagggagaagacaagtcccctggtgaggagccggagcccttgtattcgcttctgcctgctgctgtgtggcccctctgttgcctccaaatgtgaggctccccggggtgcggtttaaaaactagtgcccgttttcaaaattcataccagcagaaccaaatgcaatttatagccaatgccaaagcaaagtggtattttattaaaataaatatatgaaaccaaagtgaaaatttaataaagtaaaatttagtttacatattcacatttgtaacatttacttattataaacaaacctaaagatctctatggctatattgataagaacaaaattggaattcagtggtcttagatgacggttgag

SEQ ID NO: 12052 - DNA, 476 bp, Homo sapiens
  misc_feature (1)...(476): n = A,T,C or G
naactgagacatctagatagatggccngtagttctaacagggagactcctgaaaatctgacttgagactggactctttaaagatgcgtatatgctctagtgggcaggacctatggcttaaaggggaacttcctttctccatttctaagaactgggactctaaaatgagaagctggttgtctgaagtaaccctgcaggtgtggttggggaaggtctgttttcttggatgaaggaactaaactaagcatatcagagcactgtcttaaccagttttatttccctggagatagaattcttttaaaaagagttagggagctggtaataggaagtgcctttcattataactacattntgcagagcttcatatttatatacaagcctcctaggtgatacactgttagcttgcagactttcctatgcttcatttctcctgttgctttcanagaaggcaggagacacgtttaataacggagtatn

SEQ ID NO: 12053 - DNA, 483 bp, Homo sapiens
  misc_feature (1)...(483): n = A,T,C or G
aatgataccctcgaaannccactgagaccctaggaagngccgggaattcggggaggtgctccgcctcccagcttttctcaaaatagtcctatagatactggtaatctggaaatgaagaagtaattctgtctctgcacctacttttgcagaatgttcaaggaagtattctgtgttagtattaatgccaaaaagttgtttttaaaggttttgtactcagcacatcatacaaaccacattacttctgtcacttcagggcatcgggactggctggcgcccttgttatgtgctattttaatcagtgtaacattggtcaagttgttacccatgtatgctgtgtttatcatgtgtatatcgtccagaaagtattaaggctttaggtagatgcaactggcgaaccttggagagggaatgctgattgtcttgaccaaacccacagcctgtctcttctcttggttagttacttacggcaataaatcatctatg

SEQ ID NO: 12054 - DNA, 447 bp, Homo sapiens
  misc_feature (1)...(447): n = A,T,C or G
nctagaaatcctnancnnnncnnnnnnnnnnnaagacagtgtggcataccaatgataatgcaacttcatgtgatgttgtggaggatacgggatacaggacattgcctaagatactgagccatatcgccccagcattttgcatgagcagctgtagcttcgtagtggaaaaatctaaagaatccacagcacgtgttgtagtttggagggaaataggagtacaaagaagttataccatggagagtactttatgtggctgtgatcagggaaaatacaagggtttacagattggtacccgagaactggaagagatgggagcaaaattttgtgttggtcttttacgtttgaaaagactgacctctccattggagtataatctgccttccagcctgcttgactntgaaaatgatttaattgaatcaagctgcaaagtaactagccctaccactt

SEQ ID NO: 12055 - DNA, 459 bp, Homo sapiens
  misc_feature (1)...(459): n = A,T,C or G
natcgagaccctagaaantttgatgacccttataccaggcggtggaattcatcgagacttcatatcatggagtcataactgagaacaattacacagtcattttgtacccaccactggtagccctggataaagatgcaccggttccttttgcaggggaaatctgtgcgttcaagatccatggccaggagctgccctttgaggctgtggtgctcaacaagacatcaggagagggccggctccgtgccaagagccccattgactgtgagttgcagaaggagtacacattcatcatccaggcctatgactgtggtgctgggccccacgagacagcctggaaaaagtcacacaaggccgtggtccatatacaggtgaaggatgtcaacgagtttgctcccaccttcaaagagccagcctacaaggctgttgtgacgganggcaagatctatgacagcattctgg

SEQ ID NO: 12056 - DNA, 454 bp, Homo sapiens
  misc_feature (1)...(454): n = A,T,C or G
ntttgaagatcactagtccagttggtggcattccgccagcgcttccccgaccactcgggttcggctatgcgggagccgtgaggaggaggcttgcagtcgtggacctgagacctcgggaggtcatgctgtcttgcttttaagtggcttggggaaagtgaagaaaccccaaaatggaggactttgctaccaggacctacggcaccagtggcctggacaacagacctctgtttggggagacgtccgccaaggatcgaatcatcaatttagttgttggcagcttaacatccttattgattctagtaacgctgataagtgcttttgttttccctcaactacctccaaaaccgttgaatatattctttgctgtctgcatctctttgagtagtattactgcctgcatacttatctactggtatcgacaaggagacttagaaccgaaatttagaaagctaan

SEQ ID NO: 12057 - DNA, 456 bp, Homo sapiens
  misc_feature (1)...(456): n = A,T,C or G
aattgaaaacccctntttgtagatcactatccagtgcggtggaattcgttttcttttattgagttaatgctggtaatttacattttccgtcactgtgctagtgtagaattctagaccattttcatacaagttgttttctttttttctgttttttttttttcttattccaaattgtatatgttggggctttctcccagtttcttcccctcttttaaataattatcttgaattttattgccttcccaaccccctggaaaaagcttggtttggagatttttttggggtaaaaattagctggctccctagctttgctccaaagaatggccatgaaattaagggttgctgatactcaacctggagcatgcctgttgttggtcttttgagaagcaggcgtatttcaaacctgcccctgcattgcccagctggggcttttcttttattatttttttaaggaga

SEQ ID NO: 12058 - DNA, 464 bp, Homo sapiens
  misc_feature (1)...(464): n = A,T,C or G
agaaagaaactgatnccccttactgagntcactagtaagtgcggtggaattcctctgagcgaaaccctggatcagagcactcaacttaccgccacctgcctccagcgcccggccgagttggctcgggatccactggcctgggagaatctgcagtgcctgcgcgagcgagctgtgcagacgttcttgcagaggaaggagaagtccacgtggcattatgtagaggacaaggtggaactcctgcggataagccccagagagaatggcacaacagttggcaagtggttgccatggcagccctgggggggctcattttaagcgacgtgtatccattcagctgtaaggctgtggcagggtacaagtgcactggatataggagtcaagataagtcctttcatgtagaaggtgctttgaaccatatcttcaccaggagcttaccttttgaaggatctcaacccagaatcttg

SEQ ID NO: 12059 - DNA, 471 bp, Homo sapiens
  misc_feature (1)...(471): n = A,T,C or G
gagggcagggggggccccaataganncccactgatgacctctagtccatgcggtggaattccacggggtcagggctggagggcacaggcagagggcagctcccaggctggctggcaccccaagggaagagctggtctccctcagaagccccttcctccacagacttctgatcatctccctcttctcccctcctttcacaccgaggctcctgctctcctgtgcctccgaggcccccagctggaagtgccttgttgcctctgccctttgaagtcggaacaattcctagcacctgtcggaaggtcaaggccaaaggcaaattcaaggccagactgtgacaaacccagggctgaggcctgccccatgaagaggctgagccccctgaaacccctgccccttgttggtacattccagaggcgcaggggcctgggggatatgaagctagggaagcccctgcttcgattccccactgcc

SEQ ID NO: 12060 - DNA, 472 bp, Homo sapiens
  misc_feature (1)...(472): n = A,T,C or G
attgaccccctatcgtagacattagacagtgcggtggaattcccccagggcaagtcagcctcctccctccatgcctctctggtcagtgtgccttagggtggcctctcactcccaccactctgggccccttgggggaggactggggagggggccgtgggagagccctgacgctggaacctgtatacacaataaaggacagtctcacagaaaaaaaaaaaaaaaaaaaaaaaaaaaaaaaaaaaaaaaaaaaaaaaaaaaaaaaaaaaaaaaaaaaaaaaaaaaaanannnnntnngggccgttgggattaaaaaggcccccaaaaacccccttatagccccccttgggggtctttaaaaaccccgtattttgtttggccccccccccccttcttttttttgggggggggggggcccccctctcgtttttttttaaaaaaaaaaaagaaaattcctctctttttggagtaatgt

SEQ ID NO: 12061 - DNA, 496 bp, Homo sapiens
  misc_feature (1)...(496): n = A,T,C or G
cgccccgcccccgnnnnnttagaaaacatgagaacctaggccagngncgcggaattccctccatatggcatttgacagacaagaagcgagagaggatgcaaatcaagagaaatacgaacagtgttcctgaaaccgctccagctgcaatccctgagaccagaagaaacgcagagttcctcacctgtaatatacccacatcaaatgcctcaaataacatggtaaccacagaaaaagtggagaatgggcaggaacctgtcataaagttagaaaacaggcaagaggccagaccagaaccagcaagactgaaaccacctgttcattacaatggcccctcaaaagcagggtatgttgactttgaaaatggccagtgggccacagatgacatcccagatgacttgaatagtatccgcgcagcaccaggtgagtttcgagccatcatggagatgccctccttctacagtcatggcttgccacggtgttcaccctacaagaaact

SEQ ID NO: 12062 - DNA, 460 bp, Homo sapiens
  misc_feature (1)...(460): n = A,T,C or G
attcgaagacactaggacaatcgatgacccttatgccangcggtggaagtcgttttgactattttctgtcttttcctgtaaagtttatttttcagggccagcagattagggaaagctgggtagaggatcccaggcccatgtgggagaaggataggtcatggttacctccaagtacaccagatctgtaggagtgatccaggtggtctttggggaagattaatttgggggcaggaatcaatatggagactacagtgatgataaacactcgagaaaaactggggaaagccagatgagagagaagaaactgaattcgaataggaagatgaattatcaagattcagtgattgaacagggtgtgtgttatggatcctaacaggcaagatttcaagtcttggtcactcacaagctgcaccagtagtgccattgctcttgagaagacaatcagtttacgaaactttcg

SEQ ID NO: 12063 - DNA, 493 bp, Homo sapiens
  misc_feature (1)...(493): n = A,T,C or G
ntatcgtagaccactagtccagtgtggtgctgtaccaccattaagatcttaggagaggcccagaaatgcatcaccttgtcatgacaaaagagaaggcagtagagtagggatagttacaaatgcatccatcttaattattttcaataggcttgtaaatcttatcgatggaaggagaaaggagacaagatgtggaagaattgacatgtatcccaccataaaatggtagaagatgagttttcaatgagtagtcatagttgaaattttacaaccaaagctcccatttgattgtaatcttgccaaaatataatggatgtataaatgaacttggggtataagcaataatatccactagtgttgttatcagctactgtaaccaagtggctggttcatttggttgatgctgattatggcctttaaccatggtggtttggtgtgtgttttttatttcacaaaaagccaataaaattgtttagctataaaaaaaaaaaaaaaa

SEQ ID NO: 12064 - DNA, 454 bp, Homo sapiens
  misc_feature (1)...(454): n = A,T,C or G
nttgangatnactagtccatttgagggcattcgtgagtctgaattcccacttgagcctcttcaccttttttgtgttctctgcaatcaggggctggtgacgctcaccacaaatcatgtcttctataaaaacagtcattgccagctgtggagtagctgttccactgcctttcctctcctgaaagatggcacaaggagtgttagaaagccactggcaggttggagcccccacagttgaagagccgttttgaaaaagggaaagggtgggaacggaatggctgggattgaagaagaaggttgacgagcaagaagctcttgccatagaagtcacattgaacatcccgaatgataccctttcatctctttgtgccatggatctgtgccatttgaacactcactcccctttgttttcctttggagcagagaaccttctgcattcaagactctcagttctttn

SEQ ID NO: 12065 - DNA, 460 bp, Homo sapiens
  misc_feature (1)...(460): n = A,T,C or G
nttcgcgnaccactagnccagtttgaggacccctagtccgtgtggtggaattcgttgacagaaggatatactttgttataacttattattttgttctctgtaaatacaagatgtttataggaaatatgtattctgaactctatctgcagaatgagtcactacaccaaaatagttctattatttagaatgtgttaattttaaagggacctgataggtatttatttacatatgcgatccacatttgtgtgaaagcatgtgatcatactaacccagcctcctggaatgtcgctgtacgatgattgatgtctttttctcagtccatagttacaattgtttagtatgctaatcagtccagttccctgaggtttaagatcaaatataaattactctgcttttcgactcattcaggtagcattgtacctgaacctgattgctactttttcatcttaaatattatatt

SEQ ID NO: 12066 - DNA, 445 bp, Homo sapiens
  misc_feature (1)...(445): n = A,T,C or G
nttgagacactagcagttgggacatatggccagaggctccccaaggtcagaaatgctaaaatgtgaaagcaacgtgcactttagaatccattaaataaaatattactcctattttacagatgaggacacaggctcagagaggtcaagtgacttgaccaaggtcacacagcaagtaaatactgtgcagcctcactgcttccctaacatacctttatgaacagtacaggagcccccatgagagggtagctatcctttttcttcttttctttcttctttctaaagagacccgaattctagtggttgtaaagcagcagcctcctctgaagaaactcgggaagagaggagaggtgcatgtgtttggcgactttcccgatgggatttaatatcttaagctcctgtaggaaacaggcagaaagtgagatgatatcttgagatctcggtggan

SEQ ID NO: 12067 - DNA, 460 bp, Homo sapiens
  misc_feature (1)...(460): n = A,T,C or G
ggcgcgcgngttttcctgaatacatancntaggccangngcnggaattcgtggcaaaacggagttcaaattttgctctcctattgctataattctgctagcattctgttgaggtgaaacttgggatctgactcttcagcaagcagcaaatgacctagtaactcagggacaactatttttgaactttaagtgccactttaatgcagttagtttgataaaaccatgtgggttttttttttagggctagctctacgggagtggaagtgagagccaggcatgagtgcgtctccacatgcttttccacctgccctgagtgtgttacatactgaaacaggcctacatagatgttacaacttcccttcctctgtcggagatgtcatctgtgcctttctcagggttcatctgataatgtaaatttaaatgcctctacatttgatacgaaacccacattcaggtgacag

SEQ ID NO: 12068 - DNA, 473 bp, Homo sapiens
  misc_feature (1)...(473): n = A,T,C or G
catagatattcgtacgcagtcgcgggaatccttttataacctggaaaatcttgttaatgtcattgctaaaaaataaataaaagctagatactggaaacctaactgcaatgtggatgttttacccacatgacttattatgcataaagccaaatttccagtttaagtaattgcctacaataaaaagaaattttgcctgccattttcagaatcatcttttgaagctttctgttgatgttaactgagctactagagatattcttatttcactaaatgtaaaatttggagtaaatatatatgtcaatatttagtaaagcttttcttttttaatttccaggaaaaaataaaaagagtatgagtcttctgtaattcattgagcagttagctcatttgagataaagtcaaatgccaaacactagctctgtattaatccccatcattactggtaaagcctcatttgaatgtgtgaattcaan

SEQ ID NO: 12069 - DNA, 477 bp, Homo sapiens
  misc_feature (1)...(477): n = A,T,C or G
cccgccccccnccccattgtagaccatttgaagtgcggtggaattctagaaatggtgactatctggatgttggcattgggcaggtgtctgtgaaatacccccggctcatctataaaccagagatattctttgcctttggatctcccattggaatgttccttactgtccgaggactaaaaagaattgatcccaactacagatttccaacgtgcaaaggtttcttcaatatttatcacccttttgatcctgtggcctataggattgaaccaatggtggtcccaggagtggaatttgagccaatgctgatcccacatcataaaggcaggaagcggatgcacttagaactgagagagggcttgaccaggatgagtatggaccttaagaacaacttgctaggttcgctgcggatggcctggaagtcttttaccagagctccataccctgccttacaagcttcagaaacaccagaagaaactg

SEQ ID NO: 12070 - DNA, 508 bp, Homo sapiens
  misc_feature (1)...(508): n = A,T,C or G
tgcgnaannnaaganaancctggattccctattccangtggtggaactctgagcccagaagaatggcccagctaagcccagcctaaatttctaaccagctcaaccctgagctagtatgtttcaggattgttatgcagttatagcttagtaatatatacacccattaaagacaggattccaggattccaggacagattgattacaaataacctgcaaatgcttggcaccctgtaagtattgatattgtgtttcctttatttaaagttaaatttgttgtaagatggtattgacttatatagaagtgaggcaagagaatagggtctggaggcagggaacttaaggccaattcgtgctgaattcctaaagaagaaacaccaaggtctgggagcagggaacctaaggccaattaacgtgaacttcctacatctaaaccaaaaggaaaacctcatctacacctgagtagcaaaggatcaaaggtgactgttgctacaaccctctcctttgcacc

SEQ ID NO: 12071 - DNA, 490 bp, Homo sapiens
  misc_feature (1)...(490): n = A,T,C or G
natcgagatcgactgtccgtgtggtggaattcgaaatcaatcaaagggaaacttgaagaacagagaccagaaagagtaaaaccttttatgacaggggctgcagaacaaatcaagcacatccttgctaatttcaaaaactaccagttctttattggtgaaaacatgaatccagatggcatggttgctctattggactaccgtgaggatggtgtgaccccatatatgattttctttaaggatggtttagaaatggaaaaatgttaacaaatgtggcaattattttggatctatcacctgtcatcataactggcttctgcttgtcatccacacaacaccaggacttaagacaaatgggactgatgtcatcttgagctcttcatttattttgactgtgatttatttggagtggaggcattgtttttaagaaaaacatgtcatgtaggttgtctaaaaataaaatgcatttaaactcaaaaaaaaaaaaaaaaaa

SEQ ID NO: 12072 - DNA, 480 bp, Homo sapiens
  misc_feature (1)...(480): n = A,T,C or G
gagacgganngggggccctttcctgaaatccccaactccanaccgtcagnananngcggnggaattnctagtgcagggcttgatattttaatcatgctccctttcaacttcatccagtcacagtacatcagaataagattataaagagggagaatggactatctcatgcagataaatataatacacttgtaatagtggtggttgcagttctaaaggcatataaaaaaatcagaaattgtgtgaatcgactaaatatcagatcattaggcatgtggtacattttaaaagtgaaagtagttttaaaacctccttaaaactgcaaatgctctctcaggcctatctgccagttgaataatttggagttagaattacatagatttcttttttccctgaagcttattgtactttacaaattatagctaataattattgagtacttgtgatgttccagacaccttatttaatcttcacaatgactct

SEQ ID NO: 12073 - DNA, 507 bp, Homo sapiens
agggcccccaatgagatcatagtccctgtggtggaattcgacaccaaaagcataggcaacaaaagaaaattagattccttggattacatctaaatgacagacacttttgtgcagcaaaaaacactgtgaactgagtgaaaagataacccatggattaggaacaatatttgcaaagcatatatctgaaaagaggctgatatccatcatatataaagaacagctacaactaaacaacaagaaacccaaagcatcccatcaacaatggtcagaagacttgagtagacgtgttcctaaagaagatatagcaatggccaataagcatctaaaatgatgttcaaagtcactcatcatagggaagcacaaatcaaaccaagaatgtcataccacacattaggatggatatgataaacaaaaaagcattggtgagactaaagggaagtaggaatgctcgaatatgattggagggaatgtaaaaccatgaaggaacggggaaaatagtatggcatc

SEQ ID NO: 12074 - DNA, 453 bp, Homo sapiens
  misc_feature (1)...(453): n = A,T,C or G
nattgaagaccattagtccagtttgatggccctcgattcttcctagatactttattgtttcataacattccaaaaaattaaaactcatgacttattcaccttaacttcaactatttatgtttctgtagcatcttttgatctttagcccatgaaatcagcttatagatggttccaatcatagtgtttatacaattgcttatttttttcaattactgttactttgcaaagactttccactgacctgatacacaatgtttatatttgccgggttagtgaagagggattatgccatgatgtaccatcactgggttaactgcttcctgattgttggacgcctgggttgcttcctgtttttcagtattatgaatagtgctgccatgaacttttttgtacctgaaggctttttcttcttttgaattgtttccttactataaattctaggaagtaagttat

SEQ ID NO: 12075 - DNA, 503 bp, Homo sapiens
  misc_feature (1)...(503): n = A,T,C or G
agcncaagcggagagccacgnnnnntttagaaaactggagatccntatccagagncgnggaantcaagagttagagggaactaacattttaggaatgcttattcagaaaaaaatcctagagttgattcattgttttcctccatcctgcaaaagaagatccctttgttaagcagctcacttggaaatatgattcttggagtcaatgatctctaaacaaactggattatcaactatttacaacgtctatacagtataaactacctcacttgcctttcttgggaaaaaaaaaatgaatggactttaacaattgttgttacaaactgtgcctgaatcttattatttaaatcacttcagttagctttcagggtatgtttaataatatacatttaatgatgaaaaatattttcagcaaagctttaaaaccagaaatactgtgtaactgtgatctatgtggtatactctgagagaattctgtgtcctgctcattgtcttgagtttctaan

SEQ ID NO: 12076 - DNA, 472 bp, Homo sapiens
  misc_feature (1)...(472): n = A,T,C or G
tcgaggccggnnnnnttagaaaacctgagatcactagccagagcggaggaattcgccaaataagcccaagggattcaaatcttggactaaccctgcccggtattaagaataaaaaccccagtgtgatacttggaaaccacagcctattattatttatctgggcactcattgcgtgcgggaggatggaagggttgggaataatcgaacatctattgccttgaataagagaatactaattgttttggtatgatgatactcacaaatggagatattataggaaaaagaaatcctttggaattttaactaaaatcactgcatatgggaaattaagagatccaggaccatatttgataagagttcctaaaaataatgtaattattaatgctaaagactgctcatgtatcttgatctaattactaaataattacatatttatttacctgataaatatgtatctagttctacaaggtcn

SEQ ID NO: 12077 - DNA, 505 bp, Homo sapiens
  misc_feature (1)...(505): n = A,T,C or G
gagggccccncaactgagcctctagtcactgtggtggaattcgttcttttcacagaatatatgccttttgtaacttcacttggttattttattgtaaatgagtacaaaattcttaatttaagagattgtatgtaatatttatttcattaatttctttccttgtttacgtaaattttgaaagattgcatgatttcttgacagaaatcgatcttgatgctgtggaagtagtttgaggaacatcctatgagttttcttagaatgtataaaggttgtagcccatccaacttcaaagaaaaaatgaccacatactttgcaatcaggctgaaatgtggcatgcttttctaattccaactttataaactagcaaaaaagtgtttgcttattccaccagttctactgtgacatactcgagtataaagacatgtagcaataacggggagtggggggaggtctcacagtgcctttggagggcccgaacttgccttaaatcttcctcaaccaaata

SEQ ID NO: 12078 - DNA, 468 bp, Homo sapiens
  misc_feature (1)...(468): n = A,T,C or G
ctcgaccccccnnnattgaagacccctatccagtgtggtggaattcgccaccagctgctgaatactcacatatatttttcctaggtattttttattttattttttatatataagccttgagtctatctgtgatttattttagtaaatgctattagataaggtacttattttaattttttctaaatggttaattatcccagcttttttattgaataatttttctgtcttaacactaatctataatgtactgttaccttactaaaggcttctggactcaattttctttctttatgttctctgttcttctggtaatactatactacttagatattttagctattaaatgtttaaatagctgacaggacccatctttcctccttatacctctttttcacaagtttccttggttttattttctgaccagttaattttttttataggaagttgcgaatcagttttctgattttn

SEQ ID NO: 12079 - DNA, 310 bp, Homo sapiens
  misc_feature (1)...(310): n = A,T,C or G
ggcnggaattgangnccnttngnaattgatgacccttagtccatgtggtggaattcggcagagcaagcattcccctttaagagcttccactgcaccccctcccaagggacacagcggtaggaatggtgcttaaactccacaggtatcagagagggtgtaactaggacatcctcaagggcagctaggccccgaatgtacaatgttaagacagggaattttgtgttccattgacttttttttttttttttaagggagtttcattattttgcccaggctggagtgcaatggtaaaactcctttaaaaaaaaaa

SEQ ID NO: 12080 - DNA, 444 bp, Homo sapiens
  misc_feature (1)...(444): n = A,T,C or G
ttaacctgaagcctatcagnctgaggactttccaggccacggcatctactgtgcgctagccacaggtgctgggcctgggcaagcctggcccccactccctgtagtggggcaggtgcaggcgggggtggctgctcggaggaggtggcctgagggatgtatatgagtttcccaggcagccttaggagggagggtgtggatgagaaaggttacccttctccatggagggtggtgaggggctgagttttatcccaagggccgtgggaccctggaggctttgaaacaggacaatgggctggctagacaggtgcaggctatggccaggaaaccccccaaatacaacggaattgaaagactcctgttggaatgctggcccccgcaggaaccaccatgatcccgattcacccaggagggccaccctcccgtccagccccccaagagcagcag

SEQ ID NO: 12081 - DNA, 421 bp, Homo sapiens
gaccagacggcggagaagctcatgacttactttggtcacttcggcggtgccaaccatgcccataccctgggggagctggaggcctgcattgccatgctggtggagcagctgaggactcagggctgcggtgggaggaccctggggacctctgaggaggaggtcagcagagcctagagatcaaaggctggagcaattctagaggatctcacagctggaagggtctgagggattgcagccaagtcttgtgcctcattcccagatgagtaaaccaaggcccagagggaggtgatttcctctgatttaaatttaataagaaatattttggttgcaaattaaaggatcccacctcaaattagcttgattgcaaaacagatattggaacatggagctgagaagaagatggtctgggcttcaggcacag

SEQ ID NO: 12082 - DNA, 457 bp, Homo sapiens
  misc_feature (1)...(457): n = A,T,C or G
nttgangacattagnncntttgttgaccactatccatgtggtggaattctgaacttcgaggaatgtttaaatgggtgagaagaacattaattgccctcgttcaggtcacttttggaagaaccatcaacaaacaaatccgggacacagtcagctggattttcagtgagcaaatgttggtttactacatcaatattttccgggatgctttttggccaaatgggaagttggcaccaccgaccacaatcagaagcaaagagcaaagtcaggaaacaaaacagagagcacagcaaaagctgcttgaaaacattccagatatgcttcagagccttgttggacagcaaaatgcccgccacggtataataaaaatattcaatgcactgcaagaaacaagagccaacaagcatctgttatatgcgctgatggaactgctgctaattgaactgtgtcctgagctgag

SEQ ID NO: 12083 - DNA, 445 bp, Homo sapiens
  misc_feature (1)...(445): n = A,T,C or G
nttgagaccctatccggtggggcatatacttcccggagacatcggacaagagtgtgattgagctgcagcagtatgccaagaagaacaagcccaacctgcacatcctcagcaagctccaagaggagatgaagaggctagctgaggaaagggaggagactcgaaagaagcccaagatgtccattgtggcgtccgcccagcctggcggaaaacaatgttggcctgtgggccgcccacaacatatccttccctcactacctgtgtgaccaaggttggcttctgttgacctttaaaaaagaaaccctcaactcaaattgctataattagacacttgcttctgtcttgcctcctgtctgcagctgtgaatagtcatttgactgtgactgttgcccttagccagccagatgcgcctgtgaaccaaagcttcgtgcacatgtgttcccctaaa

SEQ ID NO: 12084 - DNA, 463 bp, Homo sapiens
  misc_feature (1)...(463): n = A,T,C or G
nttcgacggcccttaggnnngtttgtcgnacacctagtccagtgcggtggaattcatacttcccaggagacatcggacaagagtgtgattgagctgcagcagtatgccaagaagaacaagcccaacctgcacatcctcagcaagctccaagaggagatgaagaggctagctgaggaaagggaggagactcgaaagaagcccaagatgtccattgtggcgtccgcccagcctggcggaaaacaatgttggcctgtgggccgcccacaacatatccttccctcactacctgtgtgaccaaggttggcttctgttgacctttaaaaaagaaaccctcaactcaaattgctataattagacacttgcttctgtcttgcctcctgtctgcagctgtgaatagtcatttgactgtgactgttgcccttagccagccagatgcgcctgtgaaccaaagcttcgtgcacat

SEQ ID NO: 12085 - DNA, 453 bp, Homo sapiens
  misc_feature (1)...(453): n = A,T,C or G
nttgangatccctagtccagttggtggacttcctcccgacctaccaccccactggctggttgcagaacgtctctcacctagaccttgcctcccctcctctcctgcccagctctgaccctgatgcttaataaacgcagcgacgtgagggacctgattctccctggttttaccccagctccatccttgcatcactggggaggacgtgatgagtgaggacttgggtcctcggtcttacccccaccactaacagaatacaggaaaatcccttctaggtatctgctctccccaacccttccacacgtgtgatttcttcctgcagaggtccagccacgtgtctggaataccacctccgctgcttactgtcggcgtcccctagggatgtacctttcttcactgcggacttgtcacctgtaagatgaagataacgatgatacagcctccataaggcagcgn

SEQ ID NO: 12086 - DNA, 465 bp, Homo sapiens
  misc_feature (1)...(465): n = A,T,C or G
attggagaccatattgaagngcgtcggaannccggatctcaaagcttaatggagacatcaattcagaaacaatgtatctttttaaccagaggaagagctattcctttctaaatggaagttttcccattttactagagaacgtgaaaagataagtttgttttagaagaaagacatactttaaaagcttttaatctgtttattcaactcttcaattaccttaacaaattactatttagcttttttaacaaaaatatttttagcacctttatatcttgaatatgtattttcactttaaatattctgctagccccttcaggcaccaccttctagaatggaaatgtactgccagaaaaacactgagagaaaaacactgaaattgaaaaacactttcaatttatttgaaagataactttcaaagaaattttcataactcaaatgtgtttcttttttccagagaagtatatn

SEQ ID NO: 12087 - DNA, 479 bp, Homo sapiens
  misc_feature (1)...(479): n = A,T,C or G
cgcccgcaatgagaccctggcaatgaaggctatcgaaccacctctttttggaatcccttttctctccacttttagtctctattttacattccaaagaggatcgtgctctgaaaatttagcctcttgactggtccatttatagtctccactgaatttatttgaccgtggcatttgcagtcttttacttacacttgttctgtggatggagacatttcagggaagaactgctgacagaattggctttcagacactgcctgacctaactaccgctcccatctccccaggtatcgcccaactacctgaaagtagaatgaggtgtatcttagcccagtgaaatgctgtcttcgaaccctgcttgctttcattagaagcagggcagaaagtggcagcagagctagggaaagaaatcatggtagcacattcactcccagcctcctgccttggtttgttttcctgttttacgcacttggtctagatgn

SEQ ID NO: 12088 - DNA, 476 bp, Homo sapiens
  misc_feature (1)...(476): n = A,T,C or G
nttgagaccctatcgcaggcgttgaattccaacttttaatcacatgttaaagttaataaactgactgagcttcaggtccctcataggtaagctgggttaagcatagtacctaccttacatgattgttgtaaggtgatcataactctagaaaatcaaatattactttttgaaagtattacaatctaatatatatcagtgaatcatttattatatatcgtttgtgtttccagacctggtggacactctatataaatagatagctacaagtagaggtataaataggtaatgtatagattcgtgcttgaagcttagtaagccttccagacgtgttagccactattattatcaacatgataattattgccattattttttataaaagttgtagtgataatgcaatctggaagaactttttaaaaacattcatttgccgccatttggacagtattctttcaaaataaaatgttaatctgtgn

SEQ ID NO: 12089 - DNA, 510 bp, Homo sapiens
  misc_feature (1)...(510): n = A,T,C or G
agcgccgccaattgagnaactcgagaacactaggccgagtcgtggaattcgcccgacatagcttctgctctgtcttactgactcaatacctttaggatttgtatcagagtttggatactagtgttagtggtggtgtcaccactacttaattgggagataatgaaaccaatcatggatgctgtttttattgggcatgtcatctaagagaggagaaatagctgggttttgggtctaattatgaataaggactgattcagaaaacgagtttatggtaggtagactaaagcttcacatcagactgtaccattgtgatttagacctatctaaaattcagagcatatcatctgggctacctcagggtcaccacccatgtattgggcttagtcaggattgacagatacattctcagctggcctgtcatataaaacatactgtcattgagcttaagctccgcttgttctgaggtttcacctccatgtgtttcattggtgcaaaagtggatctcttatn

SEQ ID NO: 12090 - DNA, 494 bp, Homo sapiens
  misc_feature (1)...(494): n = A,T,C or G
tggnagtcccaattgagnaccctaactgatgaccctagaacagngcggnggaattcgaagttgtccatgttcacactgggtgaaggaagctgaaaccacagacatgactgagttttccatgaagaagctggcctccaccctgctggacgccatcaccgataaggaccccctggtgcaggagcaggtctgcagtgccctgtgctccctcggggaggtgcggccggtggagacgctccgtgcctgcgaggagtatctgcggcagcatgacaagctggcacacccataccgagcagcggtcctgagggccatggagagggtcctgagcagtcgcgccagtgagctggacaaggacacagccagcaccatcatcctcctggcctccagcgagatgaccaagacgaaggacctggtctgggactggcagcaggcggcgagtggcgtcctggtggccgtgggaagacagttcatcagcaaggtgatggaggagctgctgg

SEQ ID NO: 12091 - DNA, 462 bp, Homo sapiens
  misc_feature (1)...(462): n = A,T,C or G
ggcgcggggctcccactgatagcgtactctgngncgnggaattccaagatttagagtcaaagttagcagccattacttgagcatctactttgccaggcactgtgctgcgtgctttccatgtgatttcttgtttagacctcagagaatggcatcaaggtggctggcaaggaggaaccctttagaactctccacctaaccctgttcatcagtgggtgctgaaaggtgtttgttaaagataggctgatttaaactgagacaattgcctatgctgttagcagatacagaactacgtttgctctgtatgatgggttgttgaagggtgggtgtaaatatcccatgtgctcacatttagaatctatccctattttttttttttttttggaaacggagtttcgttttgccccccagtttggaatgcggaggcccaatctcggttcacgtgaagctccgcctcccaggttc

SEQ ID NO: 12092 - DNA, 455 bp, Homo sapiens
  misc_feature (1)...(455): n = A,T,C or G
ngcggtccttaatctctgctatccctctgatcgnanaaacnnngnaantnnaacnganantgccatgggtgttaaataagctttttttcaaatttctttaaagtgtctgaatatacagccaccttttatgaggtgagtgtctgtgttactgggtggcatgactgattgaggtgaagctcacggggccaggctgaccgtcttgaccgttccacttgagataggttggtcatcgtgcagaaggccccaggacctcagcacacacagcctcctcttggtctgagtaggcatcatgtgggggccagatctgcctgctgtttccatgggttacatttactgtgctgtatctcagatgttggtgtctggaagtttattcttaagagactgctacccagctggtctgtattattggaagttgcagttcgtgctttggttggccttctggactaaagctgtgt

SEQ ID NO: 12093 - DNA, 464 bp, Homo sapiens
  misc_feature (1)...(464): n = A,T,C or G
nggggacgcttttnactggagaccctagtatagagtggcggaattcgttaccaaatatcagagaatttagagtcaattgtaaataaagctgaatgttaagtccctcaaatgtcagccagtagtatggtgcttttctaaagcagtgacgtgcactagttaattcactttttttttttttttttttggaaagggggttgggttctcttgcccagggtgggggggaggggggccttttggggtaaccggaaccaaacccttcgggggtcagggggattttctggcctaaccctccaagggggggggaatagaaggctggcccccccaggggggggaatttttggggttttggggggaaagggggtttccccgggggggcagggggggggcgaacctcccaccctaagggaaccggcccccctggggctccaaaagggtggggaaacaggcggggaccctgtgttcag

SEQ ID NO: 12094 - DNA, 468 bp, Homo sapiens
catcgaccccctatgcgaagtctctctggaacgcgaggaagctgagcgctgtatcaagctttgtccttattgatatccagagcaaccagttcgaccgggcgctccgcttcctgtagaaggcacagcggctgtatccgacaccgtgagttcgcgccctgattgagtccctctaccataaaccacagactgccggtgaccaacccccacccacagacacaacccatgctactccacaggaaagcaggtgggaccgatgccccctctgtcaacggagaaactggaggagagagcaccaaaggctacactgcagaacaggttgcagctgtgaaaagggtctagctttgttaagattactatgagatcctgggggtgagcagaggggcctcggatgaggacctgaagaatgcctaccgcagactggtccttatattccacccagacaagaaccacgcacctggtgccactgag

SEQ ID NO: 12095 - DNA, 485 bp, Homo sapiens
  misc_feature (1)...(485): n = A,T,C or G
ggtcggccnaatgacgacatattgcaggcgttgaaatcaggcatggtggtgcgtgcctgtaatcccagctacttggaaggctgagacaggagaatcacttgaacctgtgaagcagaggttgcagtgaaccaaggtcgcactactgcagtccagcctgggcaacagagtgagactccatctcaaaaaataaaataaaataaaataaaataaagagataggaaacaaagtcatcaggtgagggtgaagatggcagaagaggcatgtggaggtttgaggaataagaaggtaagaaacagttgttcaggagagtggcagaaaaagtggacgagagaatgtaccaggctagctgggaagcacttaggacccacctaaggccaatggtaacaaagttaaaattagcccagttagcacagttgtgtatgtactgggagggtctaagttagcctaggagtgggagtgccaaggaggccttcccttcgaagtga

SEQ ID NO: 12096 - DNA, 482 bp, Homo sapiens
  misc_feature (1)...(482): n = A,T,C or G
gatgcgagnannnnnnaatcgagatcatagtcattgtggngcaattccagtcatcgtgcaaagaaatgccacctgactcaaaggcaaagccagagtgcagcttggagcaaagaaggagaaactaacaatgaaaatggacttgttgacggaagaaaagtaggaatgcagcctctggtgctgtttgagtgatccctctgccccaggcctggctgtgcgctgctgtgttctggaaaggcgcattgtgccctcgctgtggcagacccagtttcgctcttgttgcctaggctggagtacagtgatgtgatctcagctcaccgcaacctctgcctccaaggttcaggcagttctcctgcctcagcctcccaagtacctgggattgcaggcatgtgctaccacacccacctaatttgtgtatttttagtagagatgggatttctccatgttggtcagtctggtctggagctccctacctcaggtgatcn

SEQ ID NO: 12097 - DNA, 470 bp, Homo sapiens
  misc_feature (1)...(470): n = A,T,C or G
caggaccccctttgattgaggacccttanaccangcggnggaattcgcctcgcagcggctccagaggaggcaggcgagtgagcgagttttaggggtggccgttgcaggtggtggcgccgcgaagatggtcgccaagcaaaggatccgtatggccaacgagaagcacagcaagaacatcacccagcgcggcaacgtcgccaagacctcgagaaatgcccccgaagagaaggcgtctgtacgaccctgggtattggctctcttcatttttgttgtctgtgggtctgcaattttccagattattcaaagtatcaggatgggcatgtgaagtgactgaccttaagatgtttccattctcctgtgaattttaacttgaactcattcctgatgtttgataccctggttgaaaacaattcagtaaagcatcctgcctcagaatgactttcctatcatgcttcatgtgtcattccaag

SEQ ID NO: 12098 - DNA, 463 bp, Homo sapiens
ctcgaccacctattgaggtccactagtccatgaggaggaattcgctgcaatggagctttgtaaatctttattggaatcatgtcctattaactgccagttgctggaagctcttgttgcattatatttgcaaacaaatcagcatgacaaagccagagcagtgtggcttactgcatttgaaaaaaatcctcagaatgcagaggttttttatcatatgtgcaaattcttcatcttacagaatcgaggcgataatcttcttccatttttgcggaaatttattgcatccttctttaaaccggggtttgagaagtataataacttggatctgtttcggtatctcttaaatattccaggaccaattgacattccatctcgtttatgtaaagggaattttgatgatgatatgtttaaccaccaagttccttatttgtggctgatttactgcctttgtcatcctcttcaatca

SEQ ID NO: 12099 - DNA, 455 bp, Homo sapiens
  misc_feature (1)...(455): n = A,T,C or G
cttgaaactaagatcatagcccangcggnggaattccactgggatctgctgagagctggtgtttgactgtctgtttctgagctgttttacttaacacagtgtatatggtgcatctttaggaaagcatgcttgtattttcctttcaaagccagatatgggcgggtgtggtggctcatgcctgtgatcccagcactttgggaggccgaggcaggaggattgcttgagcccaggagtttgagagcagcctgggcaacatatcaagactctgtctcttaaaaaaaaaaaaattagccgggcatgggggtccacacctgtggtcccacctattcgggaggctgaagtgcgaggatcacttgagcccaggaggttgaggctgcagtgagctgtgattgtgccactgcactccagcctgggcaacagagcaagaccctgtcttaaaacaaaaaaaaaaaaaa

SEQ ID NO: 12100 - DNA, 452 bp, Homo sapiens
  misc_feature (1)...(452): n = A,T,C or G
attgagaccctagctgagggcgtatgcagngncgcggaantcgagacctacagagttgaaacagtgaaacctggaaagattgtctggttggaagaccctcgtttacaagacagcagttcagaagaggaagatgttactgaagaaacagatcacagaaactccagtcctggagaagcatcattacttgagaaagagaccactagatttttctttttctctaagaatgatgaacgacttcaaggttctgacttattctggagaggagtaggaagtaatatgagcaggaactcttgggaggccagaacaaccaacctgcgtatggattgtcgaaagaaacataaagacgcaaaaaggaaaatgaaaccaaaataataaatgtcagctggttttgatactgaatgtgaacaaggctcacctaaggaaactgacccagaaaacagttttagctgaca

SEQ ID NO: 12101 - DNA, 464 bp, Homo sapiens
  misc_feature (1)...(464): n = A,T,C or G
ngtancannnnttcgtagacactagtcagtgtgctggaattcaggctggtctcaggctggtctcaagtgatctgcctgccttggcctcccaaagtgctgggattacaggtgtgagccgctgcgcccggcccagtgaagacctttctagctctaaaagcccttaagatgattattcaagtctccaaaaagacacatattttaggatctcagataataaaaaaagaaaaattgaataaacattatcttatgagcctcatctttatttaaaatattttgctcactcttgataaccttaatttcatagttaagggggaaatcctagttcaaataacactaatgtacaggccgggcacaatggttcatgcctgtggtcccagcactttgggaggctgaggcagaaggatcacttgaggccaggagttcgaggctgaggtgagctacgatggcaccactgctctccagcc

SEQ ID NO: 12102 - DNA, 483 bp, Homo sapiens
  misc_feature (1)...(483): n = A,T,C or G
ggcggcgccctttgagcccctcgtacaatgactcctcgaccgngcggnggaantctccttttttaaaagaaggaatcaaaagttcatggaaatcagttatatttaatgagtggaattacttgggctcagtcctggattaactgagtgaccttgggcaaaccccttccctctctgagcctctgtttttctagctgtaggaggaagagtgtggattaatatctctcataggatttagaatatgtatttcctgccagtcgccatggctcacgcctgttatcccagcactttgggaggccgaggtgggaggatcatttgaggccaggagtttgagagaagcctggccaacatggagaaaccctgtctctactaaaaatgcaaaacttagccaggcgtgttggcgcatgcctgtaatcctagctacttgggaggctgaggcacaggaatcatttgaacctgggaggcaaaagtttcagtgaaccgagg

SEQ ID NO: 12103 - DNA, 450 bp, Homo sapiens
  misc_feature (1)...(450): n = A,T,C or G
nattcgagtcgatcacncangcggnggaattcgccccttcccgtctgccctgtgtcctcactgcgtgtgggtatgacctctgcctggtggctggtgtatcccaactgggcaagagatggcagagggtcccccttgtgggtgcgcttggatgtgcagagccttctccatggattttcttccctgtaagtgccgggcccctcaccccagctgacaggctgttgctgtgcctgctcacacctgctcctgcaggcacactgggctagggacgaggaaggagcagccacaagtggtagaactgccttggtggacaccagcctcgccctgtctttatttcctgaatggtttgtgaacttgctcacctggaccactgtatcctgccactgtccttcctggtctcgcactgccactgcatggcctcctgtcactgtgaatcgtggcccagtctcagtt

SEQ ID NO: 12104 - DNA, 472 bp, Homo sapiens
  misc_feature (1)...(472): n = A,T,C or G
cggcgganggggngccgattgaaaccncaactgggaccttcgnaagngcggnggaattcgcggtgccttgcatgtatgctgcggtcgggagcaccaaccggggacttaccccgggcgggagaagtccacaccgggaccaccatcatggcagtggagtttgacgggggcgttgtgatgggttctgattcccgagtgtctgcaggcgaggcggtggtgaaccgagtgtttgacaagctgtccccgctgcacgagcgcatctactgtgcactctctggttcagctgctgatgcccaagccgtggccgacatggccgcctaccagctggagctccatgggatagaactggaggaacctccacttgttttggctgctgcaaatgtggtgagaaatatcagctataaatatcgagaggacttgtctgcacatctcatggtagctggctgggaccaacgtgaaggaggtcaggtatatg

SEQ ID NO: 12105 - DNA, 492 bp, Homo sapiens
  misc_feature (1)...(492): n = A,T,C or G
agagaggccccccccttgagacccattgtagagcgttgganncagaaatcccagtaggaggaactctgtgaccattgtctgatttttcaccatttcactactaaaaaacatacaaagaaacaaacaaaaaacaagcagctgtgtgacacgcttttttttaaagtctattttatttattgttttataaatttttagtttgtggaaaattgttagtaaatgtctttaagaactcattcagttatacataagtaaagttttacttgaaaacttgctgttaattcaagtccttcatatttgtaacaatcactatacctgaaatcccaaatgcaagaaattgtttttcaaatagaaaaagtggagctgacttcagcaacatgaattgccatatactatattagctaccaacggaaggaaattattgacaaatcaataattctatttggcacttgacaaatggcagcatcaatgaattagcagtaagatgcttatcct

SEQ ID NO: 12106 - DNA, 453 bp, Homo sapiens
  misc_feature (1)...(453): n = A,T,C or G
atcttatnaacatagctggtggcggtaattanaactgacttgggccgcacataaaatatgctaacactgatgatagctgacgagctttttaaaaaaattttaagaaaaatctcatgttttaagaaagtttacagaaaatgttaagtatttgagaataagttcatgtaattgtcttaagttttttatgcctttatatacttagctatattttttcttttgacataaccatctttttgaaagcaatattatactgacagaggttcactgagtgatactttaagttaaatatgtagatcagggatgtccaatcttttggcttccctgagccacattggaagaagaattgtcttgggccgcacataaaatatgctaacactgacgatagctgatgagcttaaaaaaaaaaaaaaaaattgcaagaaaaatctcatgttttaagaaagtttacagatg

SEQ ID NO: 12107 - DNA, 481 bp, Homo sapiens
  misc_feature (1)...(481): n = A,T,C or G
gagcgcgnnnnnnnntttgagatcatagtcattgtggtgcaattcatttaatattaaccacgtcatagagcaagatggcccccagtccctacaagcaagtgcaattaaaaataaaagcaaatgttactgagccctgctgaactcctgataaaaaaaattatgtttatggtacatataaatgtctcaatcatgcaaattgtcactcttgttaatgaaacaattttgtaaaaagatagtcctctaaaagggtttaatgttttttacctatctaactgtctaattagatttacacatcccgcaaggcaggggagcctgaagcttttccaaaccaaatcgtttgccactagaaactattttcagctcttcatgatttattaggaaatagtttaacccggactgtagtgtcttataaaatacaaaacgagaaaactgacacaccaaaatgaagtctgtgaaattgtcatcctcttaatattacctg

SEQ ID NO: 12108 - DNA, 423 bp, Homo sapiens
  misc_feature (1)...(423): n = A,T,C or G
gctgctaccacctctgcctcagataccccaggcaactctaagaggatgggtgtctcctcttagctggttattcacgccttcttcccaggtcagggaagtagagttactcggccaccagagaccagtcaggaagcccgtgccctcttcaagtaggctacagctaagaaggcctaggttctcggtggctcacttctctcccacttctgctccatttgtagcaggtgacaggggtctgtgtgtcccagttgcatgcacgtttatttccctgttccttttgtgatgttgggattgttgctggtgagtagatcctgtttcctttgggaaaagaagctgtgaggtagaggaatgaaccccttttgcttctccttttgccatcctccctgagattgtttgccagaatcctggccctgtgcacacatgtgn

SEQ ID NO: 12109 - DNA, 472 bp, Homo sapiens
  misc_feature (1)...(472): n = A,T,C or G
gggagttgaatttgatnncccctntttgtagatcattagtccatgcggtggaattcgagaaattaaaaaatggcaacaggaaaaaaaagaaatccaagaaagactaaaatcactgaagaagaaaattaaaaaggtttcaaatgccagtgaaatgtatacccagaaaaatgatggaaaggaaaaggaacatgaattacatctggatcagtcccttgaaatcagcaacacacttacaaatgagaaaatgaaaatagaagagtatataaagaaagggaaagaggattatgaagagagtcatcagagagctgtggctgcagaggtatccgtacttgaaaactggaaggagagtgaagtgtataagctacagatcatggagtcacaagcagaagcctttctgaagaagctggggctgattagccgtgatcctgcagcatatcctgacatggagtctgatatacgttcatgggaattg

SEQ ID NO: 12110 - DNA, 455 bp, Homo sapiens
  misc_feature (1)...(455): n = A,T,C or G
tatcgagaccactgtccgngcgttgaattcgtatgctgctgaaggaatcttgtggaaatgtttttttctctgcagtgagaataaggaggagcaggaaacacagcataattagcatcatcattattctggctggagcaattgcactcatcattggctttggtatttcagggagacactccatcacagtcactactgtcgcctcagctgggaacattggggaggatggaatcctgagctgcacttttgaacctgacatcaaactttctgatatcgtgatacaatggctgaaggaaggtgttttaggcttggtccatgagttcaaagaaggcaaagatgagctgtcggagcaggatgaaatgttcagaggccggacagcagtgtttgctgatcaagtgatagttggcaatgcctctttgcggctgaaaaacgtgcaactcacagatgctggcacctan

SEQ ID NO: 12111 - DNA, 469 bp, Homo sapiens
  misc_feature (1)...(469): n = A,T,C or G
agaaaactanncctcgagnaacactagccgagtgcgccgtaattcccaccgttgacaccaaaaggcggaccgagacagtgcagaagctgtgcccaggggggcttctcccattcctgctgtatggcactgaagtgcacacagacaccaacaagattgaggaatttctggaggcagtgctgtgccctcccaggtaccccaagctggcagctctgaaccctgagtccaacacagctgggctggacatatttgccaaattttctgcctacatcaagaattcaaacccagcactcaatgacaatctggagaagggactcctgaaagccctgaaggttttagacaattacttaacatcccccctcccagaagaagtggatgaaaccagtgctgaagatgaaggtgtctctcagaggaagtttttggatggcaacgagctcaccctggctgactgcaacctgttgccaaagttacc

SEQ ID NO: 12112 - DNA, 417 bp, Homo sapiens
ccttcactcaggagcagctgaagaaagtcatcttgccacaggttttgctgggcctgcgtgatactagcgattccattgtggcgattactctgcatagcctagcagtgctggtctctctgcttggaccagaggtggttgtgggaggagaacgaaccaagatcttcaaacgcactgccccaagttttactaaaaatactgacctttctctagaaggcgatccattttctcagcctattaaatttcccataaatggactctcagatgtaaaaaatacttcggaggacagtgaaaacttcccatcaagttctaaaaagtctgaggagtggcctgactggagtgaacctgaggagcctgaaaatcaaactgtcaacatacagatttggcctagagaaccttgtgatgatgtcaagtcccagg

SEQ ID NO: 12113 - DNA, 480 bp, Homo sapiens
  misc_feature (1)...(480): n = A,T,C or G
gcgcggcnannnanaatcgagatcatagtcattgtggtgcaattcgcctcagcttcccgagtagctgggattacaggtacgggtcgccatgcctggctaagttttgtatttttagtagagatggggtttcatcatgttggccaggctggtctcaaactcctgacctcaggtgatctgcccgccgcggcctcccaaagtgctgggattccaggcatgaaccatcatgcccagccaagattctgatccagcattcactcaacaaacattccaagtatgttctaggcactaatgatacaggtgctccctgtaaattcttcataagttaaaagtattgtaagttgaaaatgcatttaacacacctaacctactgaacatagagatatgggagttaagaagaaattacttgggcagatagtgagggtacggaagtccttggtaaggcttttatccttaatgaaaagcagccccaaattggttttt

SEQ ID NO: 12114 - DNA, 454 bp, Homo sapiens
  misc_feature (1)...(454): n = A,T,C or G
nnnaaatcgagaccctagtttggagggcggaattctggaatgatccttggatatgcctacttgtttgaaatcatctatatcttgcctcagacatagagaaacaatcaaatcagtagcctcagatgagaccttacatgaggatactgtacatccattcgtggaagtttctttccagcacactgtatacaaaaccaatacagcaagtggatctcatccatgctggaatgaagaaattaaagtagattttgtgatcactgtctcaagagctgtagtggtcactcatatataagaaagaattggcttggatgcattgtcttccctttttctgctcttctgcaacaatctgaggatcgaaaggactctgaagagtaaagtgatggaatggcgacctaaacacccaacacattggaatcgacagtgtacttttattttgcgacaaatccttcctaagctg

SEQ ID NO: 12115 - DNA, 431 bp, Homo sapiens
  misc_feature (1)...(431): n = A,T,C or G
cagtgaagaaaagggatccacttttagaaaccagcattgtttgctttcaactttcatactgtatgctaactcctacgttccaaaatgtgctcatttgcagacacaggtatgcctatatacatggaagtctcaaatctgaatttttatccatctcaatatgaccatttctctctgttgtgagctgaacagattaagtatatatctgccaggttgggaaatattttggtctatcttttcctgtcatcagaacttaatttaaaaaaattatcaaaggtcagatgtgactactacagtaagttggctatcataaagaatattccataaaatgttttatctgccatacaaaattactgggtttatggccggatgtggtggctcatgcctgtaatcccagcacttcaggattacaggttatatacaggttataacan

SEQ ID NO: 12116 - DNA, 439 bp, Homo sapiens
ttgatttcgagccttgcccaggcgggaattcctgctgcaactccccaagaacaggaacaggtgcagcaatgggcatttacaatcaagggccaaacatgcaaccctgttcaagctcgtgcctcaactccttcaattcctcgtcagcttttattccttcaaagctggtattcatctttctgaagtaatttccatccttctggctcttcttttctgaaggcagcacgctttagaaagagcagggcttgacatctgactgtcactcacgagctcaagtggcttcgcctctctgggcctcatctgcaaaatggagataaacacagtaactcccagaatcattctgaggatcaaggcagtcatgtgtgaatgcattttgtaaaatacagagcactggggaatactgattttactttaacaaaataaaactctagctctctttctg

SEQ ID NO: 12117 - DNA, 475 bp, Homo sapiens
  misc_feature (1)...(475): n = A,T,C or G
catggcgggccctnggtatagatgatcatagaacangcggnggaattcatagggatgcagatgggggaaggggaagctgagaaagcagtgattacagaatgagctggggaagaggcagatggacggggctgcagcagaggagtctcagctgcttacatccaggtccaggattatgtctgctaacagacgctggtgggtaccacctgacgatgaagactgtgtgtctgagaagctcctgaggaagactcgggaatctccactggtgcctataggcttaggaggctgcttggtggtagcagcatacaggatttaccggctgaggtctcgtggttccaccaagatgtccatacacctgattcacacccgagtggcagcgcaggcctgtgcagtgggtgcaatcatgctaggtgctgtgtacacaatgtacagcgattacgtcaagaggatggcacaggatgctggagagaagtatgac

SEQ ID NO: 12118 - DNA, 447 bp, Homo sapiens
aagaatttcgagatccctagtcttgagtggcgtattcattaaataatgattcacagaatttagtaacagaatcaaactaagccatgtatgagggtaatcgagatgaggatattaactcaaaagaaatagggtgatttttaaaggattaataaaattctgaaatgttaagtagaagattacattgtctagtcttgtatttcctccttctgttgctctctttcattcacacactctcagtttctcatatttgtagctcatttatttggttatttcctaagaatattgaaagtgaagcaactatgtgactgtattcttcaggtaaacactgactgcacttgttggattttccctatttttgtgacttcaagaataatatgccctgctgaatacatgccatttcacattctgaaactgggtagagtggctgggtgttctgccaacaattgc

SEQ ID NO: 12119 - DNA, 453 bp, Homo sapiens
  misc_feature (1)...(453): n = A,T,C or G
nnnaaatcgagaccctagtttagagggcggaattccctggatgaaagagttttttctggctcatatatacacagagttgcagttgatagaggaggccctgcaaaagtatcagaatctcattgatgtgggcttctctaagagctcgtatattgtttcccaaattgcagttgcctatcacaatatcagagatattgacaaagccctctccatttttaatgagctaaggaaacaagacccttacaggattgaaaatatggacacattctccaaccttctttatgtcaggagcatgaaatcggagttgagttatctggctcataacctctgtgagattgataaatatcgtgtagaaacgtgctgtgtaattggcaattattacagtttacgttctcagcatgagaaagcagccttatatttccagagagccctgaaattaaatcctcggtatcttgg

SEQ ID NO: 12120 - DNA, 473 bp, Homo sapiens
  misc_feature (1)...(473): n = A,T,C or G
tggttacnnacctgagaccccatgagacctaggacangcggnggaantcaggggttcaaaagttgctttcacttgaaaaactatttctgataataaatttatacattactgattgctctctgagaattatcaatcagtgtcttgtttttgagacagaatttcactcttttgcccaggctggactgcagcgatgtgatcaccaggtcattgcagcagccttgacctccctggctcaagagattctctcacctcagcttcctgagtagctgggactacaggcatgtgcctctgtgtccagctaatttttgtatgttttatagagacagagtttcgccatgttgcctaggctggtcttgaaatcctgagctcaagcgatcctcctgcctcagactcccaaagtgttgggattacaggtgtgagccacggcgcctggctgagaattattaatgttttattttgaattctagtatgtn

SEQ ID NO: 12121 - DNA, 472 bp, Homo sapiens
ccccccttcgcggatcactttcgtcgatccctagtcagtgtggtggaattcctggacttgaactcctgacttcagatgatccgcccacctcggcctcccaaagtgctgggattacaggtgtgagccaccatgcccaccatgcctaaaaatttttgtatttttagtgaagatggggtttcaccacattggccaggctagccttgaactcccaaactcaaatggtccacctgccttggcctcccaaagtgctgggattacaggcatgagccaccgtgcccagccaatgctatgctgcttctatgatgtcaactttttagctcccacatatgtgtgaaaacgtggtatttatctttctgggcctgaatttacatcactcaacatcatgttctccaaagcttatctttatcttgccataaatgacagaattttattattttttatggttaaatagtgtacctttgtgatgtatgcc

SEQ ID NO: 12122 - DNA, 470 bp, Homo sapiens
  misc_feature (1)...(470): n = A,T,C or G
attcgaggccccttnggnnnattgatgatccctagnccgtgtggtggaattcagcgccgccgccaccgccgcctttgctgtcccccggcctctagttccccgcaggtgggaggtgggagccatgtcgaaacggctccggagcagcgaggtgtgcgctgactgcagcgggccggatccttcctgggcatcagtaaataggggaacgtttttatgtgatgagtgctgcagtgtccatcggagtctagggcgccatatctcccaagtgaggcatctgaaacacacaccgtggcctccaacactgcttcagatggttgagaccttgtataataacggtgctaactctatatgggagcattctttgctggaccctgcgtctattatgagtggaagacgtaaagctaatccacaggataaagtacatcccaataaagcggaattcatcagagccaagtatcagatgttagcggtcg

SEQ ID NO: 12123 - DNA, 465 bp, Homo sapiens
  misc_feature (1)...(465): n = A,T,C or G
tggttcnaacctgatagcatgaaacgctgngaancctctggccggtctagcttagcttccctggtgtggggtgtttttcaagccttccagccacagctgtctcccctcaggctggacggctccggggtgacagggcttcaccctctgcctgcagacccctggtgggcacatctcacaggcttccgtcttgctgagttgggtacggaggcagaagtggggtgtggaggaaagtcagagggaaatctgcttcagaaaggaagggtctttagacacaaagactggaggcccttccccgcccgcacgggagctgccatcgtgggtctcatgcacgtcaagaccttcccacatccaaactcagcttccagcagggattttgactttggatgacaaggctttatttgtaaatatgctcttaatatgcaactttgagaataaaatagaaacatcatgtattttaaaatatan

SEQ ID NO: 12124 - DNA, 480 bp, Homo sapiens
cgccccccccccgccccccaatgagaccatagatggagcgccgtaatacgaactcttgggctcaatctgcccacctcggcctcccaaagtgctgggattacaggcatgagccaccacacccagccatccttatcttttttaaatacagaattagagaagcaagaatctgacatcatttgcaccagtggtacccaaatacttgctcaaggatgggttggtccacagtaagatttcactgggtccccatataaatcagaaaaataacaataatgtagtgagttttttatgaagctaaatttattcaatttaaaggactcctttttttttttttttagaaagggagtttttgccccccaggtgggagggcagggcaacaattttgtttaattgcattttctaaagggacggttttttaatgggaaataatggccttttttaaagttgggggggtaaaggagggcaacaataaagggctattgt

SEQ ID NO: 12125 - DNA, 503 bp, Homo sapiens
  misc_feature (1)...(503): n = A,T,C or G
naatcggagtaccctagnnnanngnggngatcgagnatcattagaccangcggnggaattcgtagaaggatggccaacgcagcctgttgacccttcctggccatcacatgaaaatcagcgactcttccttcttacaaaactcggagcttctcaggataacttggtgaaacgtcccccgctgtgaacctcagtgagcccacctgtaatatacaggtgagggagaagaccagaaaagctcagtcagagtgacactgacccctgaaatgatgggcacaatggagtgtgtggcttttcctgtaggacagggaggtacttagttgtagtttgaactttaaaggattccagtcctccgaaaaacaggattagactcaaatcaccttgaaccttatcatctcacggctttgacccacctacatggctccgtgtcccctgcaggcctcgccccggagctctacaatcctgtgtgcagttgtctccgcagctctctgctgggacatcaaacn

SEQ ID NO: 12126 - DNA, 487 bp, Homo sapiens
  misc_feature (1)...(487): n = A,T,C or G
natggagacctanccagggggatgagcgcataggaataacccaagtcgctatatatctggactttctaaatgggtacggcagcatattcagcaccattcaacctttgaaagtgcactggagtccttggctgaattttccaaaaagcatcaaaaagttcttaatgtatccataaaggacagaaccaatatacaggacaatgagtctacacttgaagtgacctctttaaagtacagtaccccaccttatttactggaagcagcaagtcatctatcaccagaaaattttgtggaagatgaagcaaagatatgtgtccaggaactacagtgtcctaaaattattaccaaaaattcacctctaccaagtagcattatctccagaaaggagaaaagtatgaaaagttcttcccatttacctttgatagagaagtctttcattatatttagtgaaatgatatttatttgggtatagattaattccttaaatatg

SEQ ID NO: 12127 - DNA, 478 bp, Homo sapiens
  misc_feature (1)...(478): n = A,T,C or G
agggggcctnnnaactgatgaccctcgagcagcgcggnggaattcagttgcccttaagaactgagaaaggacaaagtactctaagcagcagagcccacagaggctcgttcctttgacccttgtctcctggtggctatacgaaaccttcacaatctgcatgctggactttattacagcttcccaagccccatcaataaagcccctgttcacgctgcactggtgcatgaaggtgaagtaaggaggcagctactccctccacaaataagaattcgtgcagcagcagttcactccttaggaaaatgaagagtatttttaaggagatggtatctccccagtcaagggcaagtttacagagatgaaaccgcgatcccaccatcactcaatgagccagaagccaatggtgacgtactgttacctgaacttactgaacttgctgttggaaagatctttgtgaggattaagaattaggttaaaagaa

SEQ ID NO: 12128 - DNA, 479 bp, Homo sapiens
  misc_feature (1)...(479): n = A,T,C or G
agagttcannnaaactgagaccactgatgaccactatgcagngcggtggaattctccaggaagaattagggagtgggggtaattatagttcctaggtctaggggtgagaggtgggagtagaaccagaagtgccctggaatccagccgtgtcagccctcaccccagggcccccaggaaagcatggcctgcttgaagccctctgctccctgcagaaactggggcgaggaggagctttttccttcagttagatctttcccttccctgctgcctcgctcccttagctttggagccctaaagttagtggacaagacactgggataaagctctatggctgctggaaggaggtctgagtctgtgtgtgtgcatatgcatgcatgtgtgtgtgtgtgtgtgtcctcatttgcagaagtcttgctaccagttagggtgttaagagcatctccactgggcggagacctggcatttgttttccactgtan

SEQ ID NO: 12129 - DNA, 450 bp, Homo sapiens
  misc_feature (1)...(450): n = A,T,C or G
aggcgnctaccaactgagaccccattgangagtcgtcgaananncncccggacgtgcgcgaggcagcatgatgaggcgcaccctgtaaaaccggaacgctcaaacgaatcaactgcaaacagctgtctcagatgtggagaagcattttggagaactgtgccaaatcttcgctgcctatgtgcggaaaactgccaggctgagagacaaagcagacctcctggtgaatgaaattaacgcgtatgctgctacagagaccccgcatttaaagctgggcctgatgaactttgcagatgagtttgccaaacttcaggattatcgacaagcagaggttgaaagacttgaagccaaagtagttgaacccttgaaaacttatgggaccattgtgaaaatgaaacgggatgacctcaaagcaacactcacagcaaggaatcgagaagctaagcaattaac

SEQ ID NO: 12130 - DNA, 468 bp, Homo sapiens
  misc_feature (1)...(468): n = A,T,C or G
atcgagacattagtccgngcgttggaatccctaccgcaaaagacgaagtgaccccaacttcaagaacaggcttcgagaacgaagaaagaaacagaagcttgccaaggagagagctgggctttccaagttacctgaccttaaagatgctgaagctgttcagaagttcttccttgaagaaatacagcttggtgaagagttactagctcaaggtgaatatgagaagggcgtagaccatctgacaaatgcaattgctgtgtgtggacagccacagcagttactgcaggtcttacagcaaactcttccaccaccagtgttccagatgcttctgactaagctcccaacaattagtcagagaattgtaagtgctcagagcttggctgaagatgatgtggaatgagaaacaaatgtcaacataataaaatctcagttaaaaatattttaaaaattcttggtagttgagcagctctg

SEQ ID NO: 12131 - DNA, 475 bp, Homo sapiens
  misc_feature (1)...(475): n = A,T,C or G
actgaaaacatttgagacactaggaagngcggnggaattcgcgcaagagccgcagggccgtaggcagccatggcgcccagccggaatggcatggtcttgaagccccacttccacaaggactggcagcggcgcgtggccacgtggttcaaccagccggcccgtaagatccgcagacgtaaggcccggcaagccaaggcgcgccgcatcgccccgcgccccgcgtcgggtcccatccggcccatcgtgcgctgccccacggttcggtaccacacgaaggtgcgcgccggccgcggcttcagcctggaggagctcagggtggccggcattcacaagaaggtggcccggaccatcggcatttctgtggatccgaggaggcggaacaagtccacggagtccctgcaggccaacgtgcagcggctgaaggagtaccgctccaaactcatcctcttccccaggaagccctcggcccccaagg

SEQ ID NO: 12132 - DNA, 482 bp, Homo sapiens
  misc_feature (1)...(482): n = A,T,C or G
aattgatgnccnctngnnnnnnncnattgatgnaccattagtccagtgcggtggaattcgatgcctgtttccaagggaagaagtgaagtcaagaaacaagatatccttaagctactcttaggatcagtgtctgcatagatctggcacacagaaatgcaaggaaacaatttgtgcaaagcattaaaaaaaaaaaggggggaccctgagagtataacaagtgctcctgagagaggacagacggagaggacgcatgggcagggatggccgccctgagcagctgatgttcgagctaaaatctgaaaggggcatgatttcccacttacctcccgcaaccactaccacccacgttgtccacagtattcagctgtctcagggaggatcacaattattctaatgggactgcaaagagtgaaggacacagcttttaacatcagattcgaatcctacaatttggaacccatgggcacttctagattggatct

SEQ ID NO: 12133 - DNA, 453 bp, Homo sapiens
  misc_feature (1)...(453): n = A,T,C or G
nccgaatagagngcactcatcaggcggggaattccgatatgagaagttgtagctctgatgtctagctgtagtctccttgatctgctgattgcattattttaatttgcttttctgggaaagcagttttgctaaaagctgtacagactttttcttttgtacctagcagtactttatatagtatagctttgggccatgtagcattttaagactcaattttaaaaaattattaatctgttgctgactcttaattcctatttcaatatgtgtttccttgaagaatacaggatacaacttcttgtgtatgacagctttccttcacacactatttttgtgggtgtgtatatatctgatttgggaagaatttaaaaaacacatagctttttaatttggttgaaacagactttctgcctgttacatttttgcttttaaccaattacagaagccaatggcttt

SEQ ID NO: 12134 - DNA, 477 bp, Homo sapiens
  misc_feature (1)...(477): n = A,T,C or G
tgggtacnnnncctggagaccctgatgacactagtgcagngcggnggaattcggcaataattcatcagttgattttaaagcttcatgttatgcaaaaaagaatcctgctgttatacatgtgacagtgactttgtgctgaaatttcagctattccagataaacattgtatatcttgtaaattaatgtttaaaggtagttttgttcttacagaaagtgttgattgccaggttgcttatagcactttaagttattctaaaaatgaaattataagccaaatatttggcttaagtagatttagttgtatagcacttacatatttagttcttttgaaagtttagataattatttaaagaaagcataatgctaatggaaaagaaaatctgatgttctattataatatgctattgctgaatatgaatagaaatacagggcatcatttccttgtctcattataagttagtaacaatatatagatta

SEQ ID NO: 12135 - DNA, 465 bp, Homo sapiens
  misc_feature (1)...(465): n = A,T,C or G
nattggagatcatctgaacangcgattgtagatccctagtccgtgtggtggaattccaggcattgcaggcttagtcgtggctactgttctcctgtgccgctgcatcgctctctcccgggaaagaacaggtcgtgtctcctcctagcagtgcgcgccccgcctgtgtttgcccttccagcagtgaccctaccttctagtctttatttatgggcgtgcccttccctctcctcagcccagagtgttctgcgtgggtggtgatgggggttcacctgaacacagagtgtattttcttattgaggccctgtaccttctgctgtgtgtgtgtatatataaagcaccagtctgctcccccgaaagagccgaggccttggaaagggccacaaattncncccccctcttggtggttataggggcgccattaaaccagggagcaaacctcggggctctttgttaccgcccctattg

SEQ ID NO: 12136 - DNA, 473 bp, Homo sapiens
  misc_feature (1)...(473): n = A,T,C or G
atttgagaccactcgagagccncttggaattcgcttgttagttttaagcattcttttaatggctcctaagacatgcagatggactgaggagcattggttaatcatgcacctttgtgccatgtttaactcttttatttctttttacttaatctaatgttagtgaatttgtcttatgtaaaaggatatttcagggaaatattttcagaaatctatttagagtctctttaacacagtgtcccattgaaattttaatttttagagaatttatgaatcactgtttcaagaaccagattggaaagacaatgaagcctttattgagccactacattaaaagtatatattgctttactgccttcaataccagtattacataaatgcatgtatcagaaacttcacagaaattacatggcaactcttgtagctaagaaagtaattctgaggtgtacatttgtcttgccttcttaaatttataa

SEQ ID NO: 12137 - DNA, 471 bp, Homo sapiens
  misc_feature (1)...(471): n = A,T,C or G
attggagatcactagtccagngngttggaattcatcataatcctctctcaaggacttcaaactctactcccactaatagctttttgatgacttctagcaagcctcgctaacctcgccttaccccccactattaacctactgggagaactctctgtgctagtaaccacgttctcctgatcaaatatcactctcctacttacaggactcaacatactagtcacagccctatactccctctacatatttaccacaacacaatggggctcactcacccaccacattaacaacataaaaccctcattcacacgagaaaacaccctcatgttcatacacctatcccccattctcctcctatccctcaaccccgacatcattaccgggttttcctcttaaaaaaaaaaaaaaaaaaaaaagcgcccgttcaatttaaaaggccccgttaaaccccgttgataaccctggattgtcctt

SEQ ID NO: 12138 - DNA, 457 bp, Homo sapiens
  misc_feature (1)...(457): n = A,T,C or G
nnggaccagagtgccttacatcgngcggngcaattcataaaagtccagcgatccagcgaaagaaaagagaagtgacagaaacaactttacctggactgaagataaaagcacagacaagagaacaatgccctggacatggctccagagatccacatgacaggcccaatgtgcctcattgagaacactaatggggaactggtggcgaatccagaagctctgaaaatcctgtctgccattacacagcctgtggtggtggtggcaattgtgggcctctaccgcacaggaaaatcctacctgatgaacaagctagctgggaagaataagggcttctctctgggctccacagtgaaatctcacaccaaaggaatctggatgtggtgtgtgcctcaccccaaaaagccagaacacaccttagtcctgcttgacactgagggcctgggagatgtaaagaagggtg

SEQ ID NO: 12139 - DNA, 570 bp, Homo sapiens
  misc_feature (1)...(570): n = A,T,C or G
nttcgaaccactagttcgagtggcgcgaattcggaggctaaggctgngtcctcccctctgaggtttctcaggtggcaatgtaactcatttttttgtcccaccatttatcttctctgcccaagccctgtcttaaggcccagggggaggttaggagactgatagcatgtgatggctcaggctgaagaaccggggtgctgtttaagtccctgcttttatcctggtgcctgattggggtggggactgtcctactgtaacccctgtgaaaaaccttgaaatataacactccatgcaggcccnnnnnaaaaaaaaaaaaaaaaaaaaaaaaaaaaaaaaaaaaaaaaaaaaaaaaaaaaaaaaaaaaannnnnnnnnnnnnnnaaaaannannnnnnnnnnnnaaaaaaaaaaaaaaaaaaaaaaaannnnaaaaaaaaaaaaannnnaaaaaaaannaaaaaaaananannnntttttttaaaaaaaaaaatttatttttccccccccccctttttttttataaaagggaagccccctcctcttttttttataaaaaaaaaacatccctccccct

SEQ ID NO: 12140 - DNA, 474 bp, Homo sapiens
  misc_feature (1)...(474): n = A,T,C or G
tgggaccnnncctggagaccactgagagcgttgnggaatgccagacactcagggatggagctgctgctgaagggacttgtagggagaggctcgtcaacaagcactgttctggaaccttctctccacgtggcccacaggcctgaccacaggggctgtgggtcctgcgtccccttcctcgggtgagcctggcctgtcccgttcagccgttgggcccaggcttcctcccctccaaggtgaaacactgcagtcccggtgtggtggctccccatgcaggacgggccatgctgggagtgccgccttcctgtgccaaattcagtggggactcagtgcccaggccctggccacgagctttggccttggtctacctgccaggccaggcaaagcgcctttacacaggcctcggaaaacaatggagtgagcacaagatgccctgtgcagctgcccgagggtctccgcccaccccggccggacttt

SEQ ID NO: 12141 - DNA, 479 bp, Homo sapiens
  misc_feature (1)...(479): n = A,T,C or G
tgggtaacnnnnactgtagaccactgatgacgttagggagngcggtggaattcatcccttcaaaggaaattccattatcagagttagaattgaaagtaaaggctgggcacggtagctcacgcctgtaatcccaacactttgggaggccgagacaggcggatcacgaggtcaagagattgagaccatcctggccaagatggtgaaacctcacctctactaaaaatataaaaattagccaggcatggtggcgtgcacctgtagtcgcagttgccaggtaatttaagtgctgcttggtgaccagcttgtagacagtcactctatttatacctgcagactgaacaggtgcagccttttgccaagtctacccaacaaggcagccagctttgtattttaaaaagcagagttcggccgggcacagtggctcacgcctgtaatcccagcactttgggaggctgaggtgggtggatcacaaggtcaac

SEQ ID NO: 12142 - DNA, 454 bp, Homo sapiens
  misc_feature (1)...(454): n = A,T,C or G
nttgagaccttgnacagggctgtagtcatctgacaagcggttggaatactttctgatgatactgaaactgattttgtagccccaggtgaaaacctcaaaatcagactgaagggaattgaagaagaagagattcttccaggattcatactttgtgatcctagtaacctctgccattctggacgcacgtttgatgttcagatagcgattattgagcacaaatccatcatctgcccaggttataatgcggtgctgcacattcatacttgtattgaggaagttgagataacagcgttaatctccttggtagacaaaaaatcatgagaaaaaagtaagacacgaccccgcttcgtgaaacaagatcaagtatgcattgctcgtttaaggacagcaggaaccatctgcctcgagacgttcaaagattttcctcagatgggtcgttttactttaagagatg

SEQ ID NO: 12143 - DNA, 474 bp, Homo sapiens
  misc_feature (1)...(474): n = A,T,C or G
atcgagaccncttgagacgctaggaagtgcggnggaanttggaccaccatcatccttaaagcccagcatgatgaccagcagccagtggtcttacgactccattcctcctctgaccttgcccgtcagaagtttggcactatgcctttgctgcctatccgtggggatgacagtggagccaccctcctctctgccaatcagaccctgcggcgactacacaaccggaggaccctgtccatgttctttccaatgaagtcatcccaggggtctgtggaggagcaagaggagctggaggagcctgtgtacgaggagccagtgtatgaggaagtaggggccttccctgagttgatccaggacacttctacctccttctccaccacacgggagtggacagtgaagccagagaaccccctcaccagccagaagtcattggatcaaccctttctctccaagtcaagcacccttggccaggaggag

SEQ ID NO: 12144 - DNA, 422 bp, Homo sapiens
atgggtttctctcatagaaaaagcatacatgaaagtcatgggaggatatgattttccaggatccaactccaatattgatcttcatgcactgactggctggataccagaaagaattgctatgcattcagatagccaaactttcagtaaggataattctttcagaatgctttatcaaagatttcacaaaggagatgtcctcatcactgcgtcaactggaatgatgacagaagctgaaggagagaagtggggtctggttcccacacacgcatatgctgttttggatattagagagttcaaggggctgcgatttatccagttgaaaaatccttggagtcatttacgttggaaaggaagatacagtgaaaatgatgtaaaaaactggactccagagttgcaaaagtatttaaactttgatccccgaa

SEQ ID NO: 12145 - DNA, 471 bp, Homo sapiens
  misc_feature (1)...(471): n = A,T,C or G
gagtgcnnnnannagttaatttgagacccctntaannnctgtagaacactagtccatgtggtggaattcggagaccaggacattctgcagatgttcatgccttttggaaatgttatctctgctaaagtcttcattgacaaacagaccaatctgagcaagtgctttggttttgttagctacgacaatccagtctctgcacaagctgctatccaagctatgaatggctttcagatcggcatgaaacgcttgaaggtgcagctgaagcgttccaaaaacgacagcaaaccttactgatcctaaccccagaggctccctgctctcattttagctttcttaggacatcttcatgcccgttagttcatcgtttgcctagcatgtccctgtggcgtctcaaaaaaaagtttcatcgtcccgtcattgtttctgatgtctttctgacctcacatcatatttggttctcctactgacctt

SEQ ID NO: 12146 - DNA, 469 bp, Homo sapiens
  misc_feature (1)...(469): n = A,T,C or G
attgagacccctgacagcgctnggaattncgagcgcctccaaaattaattactcctctgcacctttcccagacatcttaattagcttgagggcctcattttttatgaacaagagttaagtatctgttaactttttaaagcttgatagagatataattaacacatactctggaaagttactctctttcactgtcaaaaaattgattgatcacagttttccaaaatatggttctggataagatcccttaggtttcccgaaatttcagcctggcttgttttgtaccacgcaggaggtcattttgggagtttgctctttggattgttcttggtagaagtctggaatctgaatagttcaaccacagttgcatggaacactttgagtgttcaactgcattatgtggtcttgataaatttttaaaaatcctattttgatagtttttaaaagtggaaaaccattacaagagttgagg

SEQ ID NO: 12147 - DNA, 476 bp, Homo sapiens
  misc_feature (1)...(476): n = A,T,C or G
attgaaaacccctggagaccactaggaagtgcggnggaattcgttggtaaatattttcagtttatgagccatagagtctcttgttgcagctattcaactgtgccgcaaaagcagccacagacagtaaggaaatgagtaggcatggccagttttggcccacaggctataatttgctgacccaggtgtaggcaaggctttcttatgcggtctaattggaatgttttcaagggaatattacttaaaggatgtaaataaagaggcattttcttttttcagttcttgtcatctctcactgtttttcaaatatgttgagtcttattccatgctttactatatgtaaatatatattttctaaaattacattttcaccatccacaagtttagtcattttcatctccaggtaagatttttctttgcatttataaattcctgcttaaacagctctgaaatcactttgtaaattgtaagctttgtan

SEQ ID NO: 12148 - DNA, 472 bp, Homo sapiens
  misc_feature (1)...(472): n = A,T,C or G
atcgtagacacctgagagcgctnggaaanacaggaagntgtgctcaattaccccatgtgagtgcgtggactcctgggagctcctgctccctacagtgggctgcaactcctgtacttgaagctgagacctcatatgacgtggccttcgtgttgtcagagagtgtctggaagctgctgttgccatcttgaacaactcaccaacctccaacccagagccccagtgagagaggagcatttggcctcctgcttccttctgtggcctctgccgggctccattcccaaggaaaagagaggagcttgggctcacagaaagagaaggggatgaaaccccaaggggccctatctttgggatttacatggaattttattttctacaagtttgaccttagccatggtttgcaagtgaacagaacattctgaccaaaaaaaaaaaaaaaaaaaaaaaggggccgtgtatatcttaggggcccctn

SEQ ID NO: 12149 - DNA, 478 bp, Homo sapiens
  misc_feature (1)...(478): n = A,T,C or G
aattgatnnccnctcgtagaccactaggacagngcggnggaattcgagaaaagagaggtccctcatttgctgtcccccacccacaagggctgcctggtgctataaccatccaatttctccaggcccagaaggggccatggactttgagttctaggctgcttggccaagccagaactccactattgccctgcctcctgttctgtccccaccatggctacagagggcccacaggatggattctgggacatggactcatggttgctgtaccatcttcttatttatttatagccagggtcgttcattctttcttttcttttcttttcctctttctttctttctttcttgccagggtatttatttatttatttatttagagccagggcctccctctgtcacccaggctggagtgcagtggtgcaattatagctcatggtacccttgacctcctgggctcaagtgatcctcccgccctaccctg

SEQ ID NO: 12150 - DNA, 414 bp, Homo sapiens
acaaaatggaatgtggtctgttaggagcattctgtttgttcttttgtccctgatgtgatgaatcattgccacatgctagatggactcttcatatccaggttttgtccctcagggctgagcactgtattaaagagtttttgttgagtcatttaaccttagtgtccacatccagatcagctgtaaaatggggaagacgtgtgctgatttggaatgaatgcaaaatatcactaccattttcctaattacagaggagcaaaggttatcttcagccctttcagttctatgctcacatattcaaatatcaaatgtaatttagctgaagttatttaataatcaagtctttcaatatctgttcaaagaaaaagaacacactttgaaaattctgcaaagctgtctcccagtctttaaaatgtc

SEQ ID NO: 12151 - DNA, 475 bp, Homo sapiens
ccccccccccccccccccatcgaccacatctgttagacgaccctctagtccgtgtggtggactgactatcaccatggtggccaggctgagcatgaagttcggacttttgtgcgtgacacaagcatttgtctcccaaagcgctgggattataggtgtgagtcactgtgcctgacaaatataagcctttaaagagaagaaggttttcattttgaagacaaacattacgtacataaagagggttgtagtgtctttactagtatcacagattttattgtacacattatgtactataggaaaatcctgaagcagtgctcaaactttgatcaacatcagggagtttatattggagaaaaactgcaaatgtaatatatttggaaaaacatttttcaaaaactactgcttagaaaacaccaggggatttatactaaaatatatttttgcagatgcagtaagtataaaagaaatttaatccaga

SEQ ID NO: 12152 - DNA, 457 bp, Homo sapiens
  misc_feature (1)...(457): n = A,T,C or G
gcggatttaactgagcctcgctgaggctttcgannncagnnannatttagggaagggccgcatccttgagggacttaccctttctaatcagctttgcattttttgttttgagacagagtctcgctctgttgggcaggctagagagcagcggcaccatcacagctcacggcagcctctgcctcccgggctcaagcaatcccacctcagtttcccaagtagctgggactacaggcacacaccacactcagctaattttagtattttttgtagagacagggtctcgccatgttgcccaggctggtctcaaactcctggattatctccctggccctgcattaaaaaagatgtgcaacaacttagtgatgtgtctgaaatgttttcagaaggtggcccaagtcagagtcaaaaaatttttttatttggaaaattagaggaaatacagaaaatcaaatttcag

SEQ ID NO: 12153 - DNA, 424 bp, Homo sapiens
gtgggaatgtggccctgcagttgacctgagctgcttcacatggttgtccattctggggcttaaagaactgggaccagaccaagtagaggccttggtgctggttggggtggggcctgcagagtcttagttactgatttcattttcaataaatgtaggtttgttacatgagtttcccaattaaaaaaaaaatgacttcttgtccaaaaaaaaaaaaaaaaaaaaaaaaaaaaaaaaaaaaaaaaaaaaaaaaaaaaaaaaaaaggggcccttttaatttaaggggccctttaaaaccccgggaaaccccctggggggttttttttaaacccccccttttttggggtccccccccccccgttttttttttgggggggggggggccccccccctttttttttttaaaaaaaaaagaaaaatttccttt

SEQ ID NO: 12154 - DNA, 473 bp, Homo sapiens
  misc_feature (1)...(473): n = A,T,C or G
tggagggccggnnnnnttagaaaatagattaacattactccagngcggaggaattctgctatttggacagtcacttcattgttcattagtacatgactttggtaaatatatctcctgtgaagagaaatattataactactatggcattcaacactggtatttcagttactcaactaatccacccactgatggagtgaaccttgaattaaatgctttgaagaataaagtgaatcttgataaaaatcaaaggctgaagaaatcttgtttgacagaaggcatgaacaaaaatgctaaaattaatactgtttgtggagaaacactcattccaccgcagactaaatggagttcatgagtatcaaaatgcctatgtgatcaaaaggcagaaacagcttctttttactaggtctgttaatattccaggactcataatattgtgcctacatgagcacctgtgtttgtggtaactcaaagtn

SEQ ID NO: 12155 - DNA, 485 bp, Homo sapiens
  misc_feature (1)...(485): n = A,T,C or G
aaaaagtgataaccttcccangtttgataatccctctatctattgtaaggaggtgggaggagaagtactaaggttataagaatttctcttcatgtatgcaagcagaatttctaaatgtttgctggtgttttcctgctgtaacttgttggtgcctgcacatagctgtattactgaggcactgtgcaagcacatggcatggatgcacctggaaatagtcattcatgggccactggctctagagaaagctttcctctcaggtggcctagcacactattaaccccctctcctatattatttctacagaaccttgagagataaaagattttaaggaatgtgaagaagactttgaactttcttcattttatggtgccagatacagctctgctgtcatcggctaaagtatagaaatgttgatgtgacctacagcttcagtgtggtatggtcaaatggaaatagcattgaatatgggattaaagcaacctcgn

SEQ ID NO: 12156 - DNA, 476 bp, Homo sapiens
ccgccccccccgcccccattgagaccatagttagtgcgacgctagtccagcgggtggaattcgggcgcggtaacttccccacgctcgagctgcagccgagcctgatcgtgaaggtggtgcggcggcgcctggccgagaagcgcattggcgtacgcgacgtgcgcctcaacggctcggcagccagccatgtcctgcaccaggacagcggcctgggctacaaggacctggacctcatcttctgcgccgacctgcgcggggaaggggagtttcagactgtgaaggacgtcgtgctggactgcctgttggacttcttacccgagggggtgaacaaagagaagatcacaccactcacgctcaaggaagcttatgtgcagaaaatggttaaagtgtgcaatgactctgaccgatggagtcttatatccctgtcaaacaacagtggcaaaaatgtggaactgaaatttgtggattccctccgg

SEQ ID NO: 12157 - DNA, 486 bp, Homo sapiens
  misc_feature (1)...(486): n = A,T,C or G
ggagcgtccnnnnncactgagaaatcgataacctacggaagagccgcggaattcaagacttactgcagtcgatttgggatttgctaagtagttttacagagctagatctgtgtgcatgtgtgtgtttgtgtatatatacatatctagggctagtacttagtttcacacccgggagctgggagaaaaaacctgtacagatgtctttctcttatttttaataaaatagaaaaatcgcgcatttgcgcgtccccccccccccacccccttttttaaacaagggttacttgggccgggaaaattttgctgtctttgtaattttaaaactttaaaataaattggaaaggggggaaaaaaaaaaaaaaaaaaacaaaaaaacaaaaaaaaaaaaaaaaaaaaatccccnncnttntgggtgggggggcgtaataaaccccccaaaaaacccccgggggggcgctgtaagtgcaccaccttttgggtccgccg

SEQ ID NO: 12158 - DNA, 473 bp, Homo sapiens
ccgcccccccgcccccccttcgagacactagttagacgggcgctattccgccgcttttcctttcttcaagctgcgtagcacggggcctttagctagcttctcccgagaggggcgggaagtacagctggtggagacagtgctgggagatgatcagaaatctcagggcacagcctcaggtctacctggacactcatccactgttggagatgctcaacagctagacacagatgctcacagccgacctgtggcctcttgctctgaagccatcccccatcttccctagacacagcagacatctgagaaagcttcagcatttctcttgctaacagattcagaaaagtgtctcaaagcagagcacagagttatttggtgtttgctgaagacagcctttgtgccacaatcacttattaaataagcgatcaatttcccattgaactgaacatgcaacatttatcatacattcagttctcatt

SEQ ID NO: 12159 - DNA, 470 bp, Homo sapiens
  misc_feature (1)...(470): n = A,T,C or G
nactgagaccctagaacangcctgagaactctctcgctgcaccctccgtctcccaagttcaagtgattttcctgcttcagcctccctaatagctgggactacaggcgtgcaccaccacaccgggctaatttttgtattttttagtagaaatggggttttaccatgttggccaggctggtctcaaactcctgaactctggtgatccacctgcctcagcctcccaaagtgctaggattacaggcatgagccaccgtgcccaaccaagaatgattttattatcattaataatcatgcttttcccaccttctgtagggatctcccctgttcttttagaacttactttcttttattttttgcatcttcatccttcagagctgggttcatatgtcatgtctttagaaaaaccgtccttggccttcccatttctgcagataaacagaaagttaggtcaggtcatcctgtacgatata

SEQ ID NO: 12160 - DNA, 546 bp, Homo sapiens
  misc_feature (1)...(546): n = A,T,C or G
cgtaacaactacataagtacttaataaaataggataacgatgatcacttatatctggtttcattgagcacaaaaaaaaatttgagacactcgacaccccttggaannnnctacactcaagactttattaatagaacttttccccccaaggtggaggtacattataattattttattttgctatcaatttccagctttacttactgcatacgatcgaagtgttgtctgtaattgttctactttatgaaatttagtgatgctttgtgaattaatatttgatttatttttgtgaatgttccatatgtggtacattctctactatcagggattaaaggtataggtataaatgtagatagagatagatttgtaagatctatcaattaaattctttagtatgttttcctcatttttgtccattttagctgtctcggactgaaagtactgtgttaaatcttttatcaccatgatactataatatcatgtgtccttccatctgctatagcttctgcttttaaacgcgagcgctttataacatgagttataaatn

SEQ ID NO: 12161 - DNA, 585 bp, Homo sapiens
  misc_feature (1)...(585): n = A,T,C or G
cattaggaaccaccgnntcgngnnnnnccnnnnaatcgaatcacctagtcagagtggtggaattcgggcccaacccagtcccttgccaggtttctatgctccactttgccactctaactcccgaaattcttcacctaggctggtcgtccccaataaaggctactcctcacttgaccagagccctgatgagaagccactggtagcccttgacacggacaggtgtgtatgggggcttgggggtagctgggcagcccaaaggaacctgtatagcacaagtgggctgtacaggccacacctgctatattgtcagaattgggatattcttcagccagaatctctccaagggtgaattctccagggatgggaatttttttacaccacggactgggggttgaagagaggtggcagagagaggaaaggggggcctgcgctgtctgctgtcatcctgggacaactgatccaatggttgccctaattggcctgtgatgttgctctggacagcagatatgatgcttaatgccccacccctcaggaaggagcctactccctgganacacctggctagaatagactnntggatatcct

SEQ ID NO: 12162 - DNA, 436 bp, Homo sapiens
cagtagcagtggatgttagcctgcaaacaacattaggggattcttcttttgtgtcctgctctgtttggcgggccatatgcctacagccctcactaacaaagaacccctctgtcttcaaggactacaacctatctttaaagccgtgctcttttaaaataagctttctcagaatgttggcaaatcacttcaatcctcaaatcagtcttccttgtggaatgctgcctttattatattcgaattgacaggggaacttggtttagggttaagacgttggaaggaaatctaaggaaaattaatcctcacagaggtccgggtttagtatatgtcttgagaggagacttatgaattcccagactctgcctcctgggttcctttctcatttctttctaactgtagctatcattactggctgtggatagcccatagctatcttcct

SEQ ID NO: 12163 - DNA, 472 bp, Homo sapiens
  misc_feature (1)...(472): n = A,T,C or G
agagattgccggacttnnnnnnaaactgagttgcatagcatcgngcggnggaattcgtccagaacagggccagggacatgggacagagaggaggggaaggattcaggagacactcgggaggcaggacagttgggcttggtgagcagccggcttgggaaggaaaatacagggcagtaataaatagcatgggtcaagtggtctgagtgaggctgggagtggtggcacgcacctatggtcccagctactcaggaggctgaggtgggaggattgcttgagcctggaagtttgaggctgcagtgagctatgatcgtaccgctgcactccactttcggtgacagagtaagaccctgtctcaaaaaaaaaaaaaaaaggggaaaaaaaaaaaaaaccccttgcttttaattaaccctttttttaaaggggcctttttttaaggtatttttaaaaaaaaaaaaaaaaaagggggaggggg

SEQ ID NO: 12164 - DNA, 459 bp, Homo sapiens
ggccttccatcgagaccattagatagagcgccttagtccaggcggcggaagtcggcggtttccctgatcctctctcccaaattttccggcaggggattgatcgaggcgacatttaggactggggtgggcgagggagtggcggttctcgtcccaagttacaggtgaggacgttcaggccaaggcgtagccaagatcgcgccgccctgtagcttgaggaggcgccgggattcgaaccaaggctgtgcccaatcctaagccctgcgaggtcttgtggaaccgacatgacccactctttggtttgtccagagacagtgagcagggtgagttcagtgctgaatcgcaacactcggcagtttggaaaaaaacatcttttcgaccaggatgaggagacatgttggaactcagaccagggcccctcccagtgggtgacgctggagtttccccagctcatccgtgtct

SEQ ID NO: 12165 - DNA, 451 bp, Homo sapiens
  misc_feature (1)...(451): n = A,T,C or G
agtgcggccnnctttcccaaattcgagagcatatgcagnggcattngaantangccaggggcccttggagcccgtgggacctccggagcgaggtctcctcgcagcctcgctgtcgcccacgctgctgtccacccgtagacccttctccctggagctgattggccaggacgcagcggggcggcgcctgcacagggctgcccctcagcctagcactgtagtccctgtccttctggaggtgagacgccaggggaaagtgcggctggggctggagagagttagagcggccccttccctgaagaacccttctctgcagcttagtggcccctcgggtttcttggccccgggcagcaaattcccgctcagtctccgcatcgccagcttctcgggccctcaggatcttgaccttaggactttcgtcaaccccagcttctccctcacctccaacctctcc

SEQ ID NO: 12166 - DNA, 508 bp, Homo sapiens
  misc_feature (1)...(508): n = A,T,C or G
cagggnnnnnnttctgctgacatctgtagaagcngcgtggaattcgttctttttggccatgaaggtcagaagccactggagctgcgctgtgaggaggagtttgttggtaaagagtggatggaggccattcaccaagccagttatgcagacattttgattgagagggaagtattaatgcagaagtacattcatctagttcagatcgtagagacagaaaaaattgcagctaaccaactccgacatcaacttgaagatcaagacacagaaatcgaaaggcttaaatcagagattattgctcttaataaaaccaaagaacgaatgcgaccttaccaaagcaaccaagaagacgaagatccagacatcaagaagattaaaaaggttcagagcttcatgcgaggatggttgtgcagaaggaaatggaagaccatcgtgcaggattacatttgttctcctcatgctgaaagtatgaggaagagaaaccagattgtgttcaccatggtggaggcag

SEQ ID NO: 12167 - DNA, 506 bp, Homo sapiens
  misc_feature (1)...(506): n = A,T,C or G
gaggccggnnnnccnnncactgatgcatacaccagtgcggtggaattccggccgcagaagcgagatgacgaagggaacgtcatcgtttggaaagcgtcgcaataagacgcacacgttgtgccgccgctgtggctctaaggcctaccaccttcagaagtcgacctgtggcaaatgtggctaccctgccaagcgcaagagaaagtataactggagtgccaaggctaaaagacgaaataccaccggaactggtcgaatgaggcacctaaaaattgtataccgcagattcaggcatggattccgtgaaggaacaacacctaaacccaagagggcagctgttgcagcatccagttcatcttaagaatgtcaacgattagtcatgcaataaatgttctggttttaaaaaataccccnnnnnnnnnnaaaaaaaaaaaaaaaaaaaaaaaaaaaaaanannnnnnnnnnnnnnnnnnnnnnnnnnnnnnnnnnnnnnnnnnnttttttttttt

SEQ ID NO: 12168 - DNA, 481 bp, Homo sapiens
  misc_feature (1)...(481): n = A,T,C or G
gacgtccnagnagaaannnaatgagaccatagatgagcgcgtagnccgcctccgcttcggtcgctcctgtgcggtcatactgctgggatcctggcagagacaacctaccttccatagaggggacacgtcaccccaggattctgccacaggacttttggaggtaaagctgaagtggggcccacagcctcacgatgacagcactggccaccgtcatggagagtagagtcagtgggcaggtcaaagagtaaggctggacctgtcagggttccggggtggaatcctcaaagatccccaatcacatcattgtcagcaatggctgggagcatccaccccctcctcacagcagccctaggatgtcggtgccagtgttacccccattttcagacaaaaacaggagggaaatgtgactcatgaagttgggctccagagcctgagccctttctcggctttgctgcactccctcccactcctgccctttggn

SEQ ID NO: 12169 - DNA, 492 bp, Homo sapiens
  misc_feature (1)...(492): n = A,T,C or G
gggagtcgcggncccngannaaaattgtagactgagaatcatcgcgaaggacnncgcaactagtgacttttgtttagagatagaagatttggggaggacccaaaggactcagaactttctctccatacctccttttactcttttctttctgtgtaatgtatcaacaactgtttaatctcccttctaacaaaccttgatataagctttctgatatcaaagtatattgacagttaacccttactgattttaaacttgactatccagtctgttaattacctaagagtttgttttcatttcatctctaattgttttgatcattggcagagaaagagtatttgaaattcatatcagntttgctccttattttaatctctttgaattaaaaataaaactttttcaaaatggaaatttgaaattataagtagacttcaattatctttgctaatcctctctttaattagncagctagttaaaagttgttatattcatatn

SEQ ID NO: 12170 - DNA, 491 bp, Homo sapiens
  misc_feature (1)...(491): n = A,T,C or G
cattgatgctgtccactagnccagngcggtggaattcgtgcttcctgttaggtagaaaatttcacctctgctttttactagacctacagaccactgcaattgaggaacataaaaatgaaggatatccttcaactggtgcatagataaaccgtagtatatccatgcaatggaatcctactcagcaataaactaatgaaatacacatgcaaccacttggatgaatcttaaatgcattttactaagtaaaagaagccaaactcaaaaggctgcttactgtttgattccattcatattattttctcaaaaagcaaaacaatagggatggagaaaaaacttcagtggatgtcaggggttaaggttggaatgctccttgtctacaaagtggtagcatgaggaatttgtcttaataattgaaattttccgtgtctttattgtagttacataagtatatgcatttgtcaaaacccatatgcttgtacactaaaaaggat

SEQ ID NO: 12171 - DNA, 467 bp, Homo sapiens
atttgagaccctttgcagcccttggaattcgggaccctgaggcgggcgacgtggaggccgaccccggactggccgacctcccgcagcagctgctgttcgtgcaccagggcgagaccgagctgaaggagctgcactggcacccgcagtgcccagggctcctggtcagcacggcgctgtcaggcttcaccatcttccgcaccatcagcgtctgaggcgtcccactggctctgatcttgcttcctgcttggaaactgaagtcgaattgggctcccctggaaggggttcattcaggtctgttgactgagactggccggcctgtgggctgccgtgatggattctgtttgacgtattgttctctagaaggcctggctctgatccagtgacccctctcaccaaagaactcggtttaaccagggctctgtaagaccactcccacccagagacttgtgtggcctggtgtggactgt

SEQ ID NO: 12172 - DNA, 470 bp, Homo sapiens
  misc_feature (1)...(470): n = A,T,C or G
ntttgtagactcgtagtccatgtggnggaattcaccccggattaaacatgtctgcagaagagcagctgttgcccttggccgaaaacgagctgtgtttcctgatgacatgcccaccctgagtgccttaccatgggaagaacgagaaaagattttgtcttccatggggaatgatgacaagtcatcaattgctggctcagaagatgctgaacctcttgctccacccatcaaaccaattaaacctgtcactagaaacaaggcaccccaggaacctccagtaaagaaaggacgtcgatcgaggcggtgtgggcagtgtcccggctgccaggtgcctgaggactgtggtgtttgtactaattgcttagataagcccaagtttggtggtcgcaatataaagaagcagtgctgcaagatgagaaaatgtcagaatctacaatggatgccttccaaagcctacctgcagaagcaagctn

SEQ ID NO: 12173 - DNA, 510 bp, Homo sapiens
  misc_feature (1)...(510): n = A,T,C or G
gtggccgngnngnnnnnncattgaatagcgtacattagtgccgngcaattcgaaggcttcagatgatcgaactactctgagctacaggaggaaattcaaaccgatgtcatagaagttaaaaactttgaaaaacaattgggcgaatggataactagaacacccaatgcagagaagtccttaaaggagctgatggagctgaaagccaaggctcaagaactacttgaagaatgcagaagcctcaggagctgatgcaatcaactggaagaaagggtatcagtgatggaacacgaaatgaatgaaatgaagtgaagagaagtttagagaaaaaagaataaaaagaaatgaacaaagcctccaagaaatatgagaggttttagtgtccatttagggatcggaaagtaaaagtgatgcatataaaggcaaaagaagtactaggcatataactgaaataccatggctctgtctccagggtttacttgtaactcacactcctaccctcttgtaggtggn

SEQ ID NO: 12174 - DNA, 441 bp, Homo sapiens
  misc_feature (1)...(441): n = A,T,C or G
ttttnattgataccttagatagaggctgtaaaaccaccngcctttcccaggggtacgtgataacatatgaatggccatactcttgccactgctggatattgtcagtgttttttatctttatcagctgggaagaaattaacttatttttatttgcatttctttgtgcaacttgttatgtgtcccttaaaaactttttttttgttcattttttgtccttttttctactgaggtgatgatctttgtattagtgtgtagaaagtctttttatattaagaatatctacttcgggtctgttatataagataaaaatatttttccagtttgtgtatatttcatatttatttatggngattttttcccattgcacaaaagttttaaatttttgcatagtcatatttgttacttgaaaacatccatagaaactcggctacattccaaggg

SEQ ID NO: 12175 - DNA, 459 bp, Homo sapiens
  misc_feature (1)...(459): n = A,T,C or G
ntttgactgattaacctaggccangncgnggaattcgtccaactcacacctcatcttgggcatcacctcctccaggatgacctcctggcttcctgcagctgcctgctcagtgccacccctcaacatacactgtgtatgctgcccactcttgtctccctgactggcctttcacctggctgttagctgtgtgcacggggccctcagagcggtgaccattcacttgggcatcagccaagggctgggctttgtgccagtgctggggacatgatgtggccctctcttcatgggtgacaggttagtggaagaagcagacccaaaaaacccaagtagacaagacacagaaatacagtgattttgaattctggtgaggggagaagccagcagaacgctgagacgggaggtggcagggggtcctgtgtcctctgtggaggcaagttctcaccacctcactctgtcccc

SEQ ID NO: 12176 - DNA, 466 bp, Homo sapiens
  misc_feature (1)...(466): n = A,T,C or G
nttgtagactcgtagaccatgcggnggaattccgtacatggaccaggcccccttctcagttgtgtgtccccaggctcactataacatgtacccatagaaccctgactcagtccttgacaccgatggggacttcgatctggaggacacaatggacgtagcgcggcgtgtggaggagctcctgggccggccaatggacagtcagtgtatcccgcacgcacaatcgtgaccccgcgacctctccatcttcagcttcttcatcttcaccagaggaatcactcttgtggatgttttaattccatgaatcgcttctcttttgaaacaatactcataatgtgaagtgttaatactagttgtgaccttagtgtttctgtgcatggtggcaccagcgaagggagtgcgagtatgtgtttgtgtgtgtgtgtgtgtgtgagtgtgtgtgcgtgttcgcacgctatggtgtttctcc

SEQ ID NO: 12177 - DNA, 489 bp, Homo sapiens
  misc_feature (1)...(489): n = A,T,C or G
gaacggccgggccggnnnnaattgagaactgananctacagcaangcggnggaattncaaaagattaaaatgtctccaaaaatgatttgtattatgttttagtataatgcatttaaaagatttttaatgtaacatggaaaagttgtgcctgtattataggaatggatatgtgggttcatgaatatggtaccatctatactgttttcactgttttcattgaatttacttaatacacagattaggttcagttttcagtacttatagactattttcttttggaccgtaagcctagaaagtgaattgatttgattggtaacaagactgtagtcacccaagcatgtcattatcttttgccatgtttgtttcagatttgtgtgtaaagaggtgtagccatttatcagcaaagctaactgatatatctcattcatattagaaatgacagagagcctttgcatcaaatcaaagaaatcagatggcttatattctatn

SEQ ID NO: 12178 - DNA, 458 bp, Homo sapiens
  misc_feature (1)...(458): n = A,T,C or G
cgcgccgatccttaatgtnaccttctaatganacnatacgcagngnccnggaaancttctgaaagaatataaacactctctggacagatttcaactttgcatttttgatgcttttttagtatctattatgctagctgggtttctaggggtgtaactttacacagaaagaagatgagatagttatttgcgcttaatgaatacatagtggtatgccctggctgattatttttttcttttccaaacatcttcaaatcatgtgtctgattttcattttaactttattcgtcaatcgtcagtcttactaatctgcactttgtggaacctgtttttttcctttccaaaatcagggaattttttgatcaagtgtttgctaactcttctgttgtcgaaaatttctcagaaattacttacctgcggtttttattattagattatttctgaaccctaaattgtgattg

SEQ ID NO: 12179 - DNA, 453 bp, Homo sapiens
  misc_feature (1)...(453): n = A,T,C or G
nttcgagatccctagtccgttcggtggcattcccgaaatcagacttgccacctggactgtcgaggtgcagaccctgggagcaccactggcccatctcttacacaggctgaccgatttctcctggtgttcagagtctgtttttgtctagcaccatttgaaatcggttatgatgtagggggaaaagcagcagcctcgaagcctcatgccaactctgggcagcagcagcctgtggtttcctggaagatggatgggcagagaatagggaaggaagatcatgcttttccctactaacttctgtaactgcatgtatgatacattattgcagaggtaagagatagtttaatggatttttaaaaacaaattactataatttatctgatgttctctagttgcattttgctgaaatgtagtgctgttctaaattctgtaaattgattgctgttgaattatctt

SEQ ID NO: 12180 - DNA, 486 bp, Homo sapiens
  misc_feature (1)...(486): n = A,T,C or G
gggcggccgggccccgaaaaatcgtagactgagggcatcgcggnggactacgntctattaatgtttgtctcatgtaaattgaagttcttgtattaattaggtgaatagtgtttttagaatgtcatatccttttggttaattgacccctttatcattatgaaatgacattttaaactctctagtaacagtgtttgctctgaaatctagtttgttggtcattaatgtacccatttattctttcttttgttaaagttaacttttttttttcatttttaaacttaacctattggtgtttttcatatttaaagtgtattttttatagatagcatattattgccttacttttttatccaatctgataacttctgtcttttaattaggtgtgttcggaccatttcacattttttcttctatttatttatctttaatggacaaataaaaactgtatatatttatggtgaaaaacttgatgntttgaaacatgta

SEQ ID NO: 12181 - DNA, 430 bp, Homo sapiens
  misc_feature (1)...(430): n = A,T,C or G
ctaaggcaggagaatagcctgaacccgggaggtggaggttgcaggttgcagtgagccgagatcatgccactgcactccagcctggcaacagagcgagactctgtctcanaaaaaaaaaaaaaaaaaaaaaaagggtnctttgggggtacccctaggggaagggcccttcggggggttttaaagggggatttccctgggaagaaattaaaggggtgggctcttaaaattgggaaaaaaaattttttttcatttttaaaaaaccttttcaaaaaattccccattcaaaattgggggttttttaccggggggttttattttggggaaatgggaaaaaaaagttttggtcccggcccccccaaattttttttttttccccttttaaaccggaagggggaaaaactggtttgggtcctcacccccaccttaaatt

SEQ ID NO: 12182 - DNA, 470 bp, Homo sapiens
  misc_feature (1)...(470): n = A,T,C or G
nattgagactgagnagcactagcacagngcggnggaattcaggttgattcttcccggttctgtagggtcgggctaacttgtatccccatttgtgacatttgatcctgggaagagccgccacgtggggtgacagtgactccagaccagtgagcactctggggggcgggccctgccccttaatgggctggtgctggcagtgttggatgatggatttgaggtaaatgttgtcccagtcctgggacaacggcgtggccccgaaggtgcagtacttggagccacaggcagtttgggaatggtccctgggaattcccctaggtggcactgggtgccagctgagacccgggtctctgccctcaggacccagctgtgatccagcaccgacccagccggcagtatgccacgcttgacgtctacaacccttttgagacccgggaggtgagctactggagagcatanngagtcaagggagg

SEQ ID NO: 12183 - DNA, 468 bp, Homo sapiens
  misc_feature (1)...(468): n = A,T,C or G
ntttgcagactcctagtccatgtggtggaattcgactgaggtggtcccctgcccaggaggaaagtttcaggcagatggttgtcatccataaggaaattcccacagggaagaaagaccatgaatgtagtgaatgtggtaaaaccttcatttataactcacatcttgttgtccaccagagagttcattctggagagaaaccctataagtgtagtgactgtgggaaaactttcaaacagagctcaaacctcggtcagcatcagagaattcatacaggagagaaacccttcgaatgtaatgaatgtgggaaggccttcagatggggtgctcatcttgttcagcatcagaggattcactcaggagagaagccctatgagtgtaatgagtgtgggaaggcctttagtcaaagctcatatctaagtcagcatcggagaattcacagtggagagaaaccttttatatgtaaagaat

SEQ ID NO: 12184 - DNA, 458 bp, Homo sapiens
  misc_feature (1)...(458): n = A,T,C or G
ctccctttagaagnactactagtttagagcgctggaattctgaatttctaaatcatgttgaagatggtttgaaggaccattatgatattaagatgctgacatttttaatgttggtgagactgtctaccctttgtccaagtgcagtactgcagaggttggaccgacttgttgagccattacgtgcaacatgtacaactaaggtaaaggcaaactcagtaaagcaggagtttgaaaaacaagatgaattaaagcgatctgccatgagagcagtagcagcactgctaaccattccagaagcagagaagagtccactgatgagtgaattccagtcacagatcagttctaaccctgagctggcggctatctttgaaagtatccagaaagattcatcatctactaacttggaatcaatggacactagttagatgtttgttcaccatggggaccattacatatga

SEQ ID NO: 12185 - DNA, 429 bp, Homo sapiens
cccggacactggtaaagtatttcattgtggggaatgagatgcattttcactttgtactgctcagcagatgcccctatgccttctatcctaactttcccaaggataaaaagtatctaaaaattaatgtcatttcttttctctttttcccatactttttttccaaaccaccccccacccaccccaatagctttaggagtacaagtggttttggttacatggataaattgtgtagtggtgaggtctgggcttttagtgcacccatcacccaaatagtgtgcattgtacccaacaggtgatttttttgttcctcaccccttcttttattgttgacttaattttctttttcattctctcactcaacatttccttaatatactccagtccatcatccagattaaactttagaactctcttaaactaaacaaaatg

SEQ ID NO: 12186 - DNA, 486 bp, Homo sapiens
  misc_feature (1)...(486): n = A,T,C or G
ggnccgccnnaactgagaccatgttgtaggcattagacagtgcggaggaattcgtgaactctgcgatctggtggagagggaagaaggggagagagctgtggcagaaacaggaaccaccactgcggcaccagaggccgcaatgggtggacaaggttgaaaggaggcagctgaggaaacacatagatgaacccgcagcaggtgcccagccaggggttctcagcaaggccctgtgcactgccaactatgaacttattaagactgactttccaatagttcttagcagtgtgtggagtagaagacagaacaatgtataccttcagaatgcacagagccaatgcatttttggattacaaataaatcaatttaagacctattgcttctgacaatgatttgcaaattgagaaaattctggaaaaatagacatccaacaaattaacagtgattatacctaatgacagggttacaggtggggatttgtttatttgt

SEQ ID NO: 12187 - DNA, 446 bp, Homo sapiens
  misc_feature (1)...(446): n = A,T,C or G
atcnctaatttacnacctaagagggcatcccaacgnncncacangaagacaccgncttcctttattaatttagtataattattctatcaatttatacatttttatgtaaatgtgcattgtcacaatcctgggcacaaagtgcctgatgtcaaaatgaagatagtaaaacaagggaggaagcagtggatggaccaggattaattcctttcatttcttagtaaattaaaacctgcagctggtggattgtgatcacacattcccgaagtaataagtgaggacgaatgcactgctctggaacataacccagtgctaactgggggtttcatttattcagtcaagcacatcttactcacatccagatttattttcctacagtgcaaacacaccagatgaaactttaaaatgttactttttgtaagcttatcataaatgagttgcagtaattt

SEQ ID NO: 12188 - DNA, 467 bp, Homo sapiens
  misc_feature (1)...(467): n = A,T,C or G
nttgaagactcgtagtccatgtggnggaattcagctttttaagcagtcttcaggcctcactatacataagagaattcatactggagaggaatccagaaatgtgaagaatgttgcaaagccttttactggtccttaagctttactaaacataagagagttcatactggagagataccctacaaatgtcaagaatgtggcaaaacttttttttgttgctcaagtttacttgacataagagagttcatactgaagagaaatcccacaaatgtaaagaatgtgggaaagcctttaaccagtcctttagccttactaaacttatgagaattcatactggaaaaaaatcatacaaatcggaagactgtggcaaaatcttttaagtattgctcaaatatatccagccataattcatactaaagattatgcctatgaacctaaaaaagtttggcaaagcttatgaatacacctca

SEQ ID NO: 12189 - DNA, 542 bp, Homo sapiens
  misc_feature (1)...(542): n = A,T,C or G
gatcgaattacagtgcgagtggngcaattcactntntttgcactgcagcatatacactaactagcttattaaaatttacaaaatgtctttttgaatgtatcaaggatatatttagtttgagtggaatttgtcagcagatatcagtaacttactgccgcttatattgtacaatgttaaacttcaattcctgtaacctggttagtattaatgtcagtgactaaaaaacttagagttagttttagggcactttttattttgagagcatgaagtgtggaatgtgtcactacgattgttgataaagctgaggccacttgcaacttgattttttaaatgaaatagataaagtctttttgaataatatagtatgcactgctatttgcttgattatgtaatgtcaaaaagttaactatattccaagtacaaaaacatactggattacattgaggatgttgaatagcattcatgatggctttgtttggttggngcagctgcaccagctaaagcaatggtgtaaaatagctcaataaaatgtcttaaatgaa

SEQ ID NO: 12190 - DNA, 467 bp, Homo sapiens
  misc_feature (1)...(467): n = A,T,C or G
catcgcattcatacccatgcgcagngngcnggaanncatccaggngggtgaagggaagaggaggccctcacctgcatacaccacattgtaggtgtccctggccatcactgcagtggggagcctggggctgggtgtcactgcaattacagtcacacagcgtgtgcaactccacaatcagctcctctgagaagccaagggcccggagcctcaggagatggggctctgggaggcagtgggtggcttggagagaaacccagaaagtcacctgagaagaggcaggaatcaggccatggttatacacatgcacacacacataccccaaactcaccaatcatccagaacctcaccccttagtaaatgaagggatggggtcatgttaacacccaactcctagaaacatgcctgaggaagccactcagactgctccaagaaggatggaaggaggactacctcaggctcttatgtca

SEQ ID NO: 12191 - DNA, 559 bp, Homo sapiens
  misc_feature (1)...(559): n = A,T,C or G
ctctatggtctaaccgcccatcacactctggctggctcagtccctacttgctgcatctgtatcactcactcccctcccgtccccgcgcgnnnnnnnttttgattctatcgcatgnngcggnaaccgnnangnaggaaggggcnggggaaagaagggaagaaaaaggcctactntaagagaaaccaagtgaattnnagaagacgacgagagggnaaaactggttattatgctcggaaacgcttggtgatacaagataaaaataaatacaacacacccaaatacaggatgatagttcgtgtgacaaacagagatatcatttgtcagattgcttatgcccgtatagagggggatatgatagtctgcgcagcgtatgcacacgaactgccaaaatatggtgtgaaggttggcctgacaaattatgctgcagcatattgtactggcctgctgctggcccgcaggcttctcaataggtttggcatggacaagatctatgaaggccaagtggaggtgactggcgatgaatacaatgtggaaagcattgatgggcagccaggtgcct

SEQ ID NO: 12192 - DNA, 490 bp, Homo sapiens
  misc_feature (1)...(490): n = A,T,C or G
gaaggacggcgggccannnnaaactgagaactagaggcatcgcgagggacnnccaattgtgaacatgatagataaactaccactttttttaaccattattatgcaaaatttagaagaaaagttattggcatggttgttgcatatagttaaactgagagtaattcatctgtgaatctgctttaattacctggcgagtaacttataaaagtggtgtaaacttgtacatggaattttttgaatatgccttaatttagaaactgaaaaatatccggttatatcattctgggtgtgttcttactgacaccacgggtccgctgccccatgtgtcctggtgagaaaatatatgcctggcacagcttttgtatagaaaattcttgagaagtaactgtccgctagaagtctgtccaaatttaaaatgtgtgccatattctggttcttgaaaataagattccagagctctttgatcgcttttaataaactgcaagttcan

SEQ ID NO: 12193 - DNA, 485 bp, Homo sapiens
  misc_feature (1)...(485): n = A,T,C or G
ccccccttgcagaccnttggcaattgagagccttagtccagngnggnggaantcgcgaattgaatggtggcggagaaaacatggtcctgaaggatgattcttctcagataatcagtaccagcagtagttcctcacaagctgatgatgaataagcggacggcgagagtagtggggagctccctcgggccccgaaggaagatggagtgctgggaagcaggagccccatgacagaggagagcaaagcagacagttcacccccatcctacccaacacagcaggctgaacaagctccaaacacttgtgaatgtcatgtttgtaagcaggaagcttctggactgacaccatctgcaatgacagccggagcccttcctcctggccatcagttcttgagcccagagaagcccacacaccctgcactgcacctttaccctcacatccatggacatgtgcctttgcacactgttccacacctgccacgccctctt

SEQ ID NO: 12194 - DNA, 443 bp, Homo sapiens
  misc_feature (1)...(443): n = A,T,C or G
tggtatcccaatgaaactcgctgaggcgctcaganangcgcnggaattngngaataatgaaggtgccttaaaatatttgatactttcaaatgtttctcatgttattttcttattttctaaaaaagatgtattcactaaattatatacactcatataataattaaatataaaatacattcttttattgtgtacctttctatctagaaggtagcacattattacagtgtttcctgctggtcaaagttgcctattacagaaatagaatggtaattttaatatattcacaaaataccttattgatatcatcaaaccaatttatacattgagtttgtaccaactagtggaattgtcttaggtctattaagttatggaatattatatccataattacagtctgagtcatagctgaaaaaatctgctttaaaattattctcactctttga

SEQ ID NO: 12195 - DNA, 444 bp, Homo sapiens
  misc_feature (1)...(444): n = A,T,C or G
nctgacgaccatattgacagcccgtgtggaattcggactgtgaccgcagcttctcccgttctgaccatcttgccctccataggaaacgccacatgctagtctgattgcctctgtgtcctgcctcagcgtgactccccactcacctggctctctctctgtcctgcctcccattatctaacacattttttacatgtacattttaatttgattcagctggtctgaatctctgaatttatatcatccaaaacttccatatggtcagtagtagatgttctctaatcctccctctccttaccacgggtcagacctaaagaatgtgaacactttttttttttttttgggggatgctaaacaaacccttcttacagatacgttaaatgtaataaaaacaagggaacatgtaaactaacatacccaattgtcagttctccatgtattcctcaa

SEQ ID NO: 12196 - DNA, 461 bp, Homo sapiens
  misc_feature (1)...(461): n = A,T,C or G
ggggaanaatttaaactgttacctatcagngttcgggaactctcgctgcctacggaggtggcagccatctccttctcggcatcatggccgccctcagaccccttgtgaagcccaagatcgtcaaaaagagaaccaagaagttcatccggcaccagtcagaccgatatgtcaaaattaagcgtaactggcggaaacccagaggcattgacaacagggttcgtagaagattcaagggccagatcttgatgcccaacattggttatggaagcaacaaaaaaacaaagcacatgctgcccagtggctttcggaagttcctggtccacaacgtcaaggagctggaagtgctgctgatgtgcaacaaatcttactgtgccgagatcgctcacaatgtttcctccaagaaccgcaaagccatcgtggaaagagctgcccaactggccatcagagtcaccaaccccaan

SEQ ID NO: 12197 - DNA, 441 bp, Homo sapiens
  misc_feature (1)...(441): n = A,T,C or G
aaggttcttccaactagacccttcngagagcgtggaaancacaacatgataagttttcttagaagtttggagatcatcatcttaaatcataaatgaaaacttttttgttgttgttgttttgttttttttgagatgagtctcagctttgttgcccaggctggagtgcaggggcgccatctcgactcactgcaacctccgcctcccgggttcaagctattctcctgcctcagcctcccgagtagctgggattacaagtgtgcaccaccacaccggctaatcttttctatttttagtagagaaggggtttccccgtgttagccaggatggtcttgatctcctgacctcatgatctgcctgcctcagcctcccaaagtgctgggattacaggtgtgagccaccgtgcatggcctaaaacatccttttctatctagtataagcagt

SEQ ID NO: 12198 - DNA, 471 bp, Homo sapiens
  misc_feature (1)...(471): n = A,T,C or G
gagggggnaannagtttacctgaatccntnntnannactgagatccactgtccatgtcgtggaattctgagccctgctggcatgagccactccagctgcacccctccccctctcagagatccctagggcagaaacagtccccaggttcacataaagcccccaacttcagggaccacatgtcaagcaccccctatttttaccatgagtggaagagcacttctagactcccagaatacacccccaaaactctgcgagctctgttgctgtattgcacacgtgtgatggatctgcagaaagattggttggaaataagatgcccacctgccctcctggcaggtccccacaatcttgacgaatgactctcttaaagcaccttcatttggcttgggtacgacaaagtgtgaaggaagggagaaaatatcttctgactgtgaactcagcaccctctaaaaggtggcttctgacccctcc

SEQ ID NO: 12199 - DNA, 471 bp, Homo sapiens
  misc_feature (1)...(471): n = A,T,C or G
actggagaaccctggacagccgcttggaattcgtttggatggattatttacaatataggaaagaaagccaagatttaggtaatgagtggatgagtaaatggtggaggatgggagtcaaaatcagaattatagaagaagtatttcctgtaactatagaaagaattatgtatatatacatgcagaaatatatatgtgtgtgtgtatctgtggatggatatatgtatatctcttcctatatatatccatagtggacttattcagaacatagatatgtattcagcttgtcttcaaatacggccaagcagaaaatgttttatattttataaatcatcttttgactctgtatttaaattctatgatactgaaaataaaggcattctggaaaaatannacaaaaaaaaaaaaaaactaaaaaaaaaaaaaaaaaaaaaaaaancgcgggcccctctatataaagggggcccttatacg

SEQ ID NO: 12200 - DNA, 590 bp, Homo sapiens
  misc_feature (1)...(590): n = A,T,C or G
nattaggatnagctttccggannngnncnnnnnnnattgattcactattccgagtggtggaattcaaggccccgggctgcactggtgtgggctgcacaggcacagacgcagacggccccggccgtgtcctgtggtcccctgtcggatggatgcgtgccgtttgtagagaagagcctttgggcccattcactcgttcagcagacacgcatgggactgatgctttgagttttcttctgtggggttttcctttctctggtctctgtgcagcccctgccctccctcgggtgctgctggcctcaaaggaggaactcgtggggggagggtgtgatttgcagacctgggtctctgctctgctctgggggtggggcttgctttcacagagaccctccttccctctcacccctcctctcccggcctcgccaggagtcttggctgttggcagctcaaaggtggaggaggcctgtggtgtgaggtgccctgcacctgctcctgctcctgtcaccccttcctgctgcctcctccatgcccaaggaacacccatggtgcagtcctcaggcaaggccaggacggggctgaagccctgcgtggan

SEQ ID NO: 12201 - DNA, 456 bp, Homo sapiens
cccccttcgagccccctagatagaggacccttagtccgtgtggtggaattcgtttattctctctgaatggagatgttattctctcggcttttgtatacatttgatattttgcgtaataaaaagggtttgttttgtttttgtttttgagatggagtctcactgtgttacccaggctgaagtgcagtggtgtgatcttggctcgctgcaacttctacctcctgaatagctgggattacaggcacccacctccatgcccggctaatttttgtgtttttttagtagagacgaggtttccccgtgttggtcaagccggtcttgaactcctgacctcaggtgatccacgcaccttggcctcccaaaatgctgggattacaggcgtgagccaccacatccctggcctaaaaggttttcttaagggtagtgttgaaagacttgccaaatagaatagaaatcgta

SEQ ID NO: 12202 - DNA, 465 bp, Homo sapiens
  misc_feature (1)...(465): n = A,T,C or G
atcgacattcatagcatacccangngcnggaattccacttccctaaacatctagttatggcggctcaagcccgtacctgcctacagagaagtgtctgcagttactcactattagtttcctaagggggcactgctggctccttctctcccaggaatgggcttctcctattctttaactcttgccttctccctggagaggctaccaaaccctggcctctgccgctgttcaggctgccatgtgggtatagctgtttgctagactccactctggcctcaggggccagagaacagctgtccagcatttctgttcatcccagcaatccaaaaaaaaatttttttaagctacaaagatcactccattttcaaattcagactctgccacttattagctgtttctcattaggcaagttatataaccttgcagtgcctcactttcctcatctataaaatgagattaaaatagtcn

SEQ ID NO: 12203 - DNA, 477 bp, Homo sapiens
  misc_feature (1)...(477): n = A,T,C or G
nattgagacctctggatgtagcgcggaatncctcagtctcattctccgtggtcacgccgcctccaccgggttaaaaataaggaaaataaataaataataatgataattcactttattttacttcctcaaagatttagtgacaggtgatctctaccgcggtgcaacacagctgagtcgattgaaacaggggccaaaagaaaaaaggaaaaaaaaatccactctatttaagattatttcttcttctgcaataagcttagaacccagcgaattgctgcatcccgagaaaaaaagctgcttccctggtcagcatcatgcggcaaatttcaagcaaatgtgttcaaactgaagagaagagtgtatgataaaaggcttcctccgtcaggcttactctggtaggtaatttagctccagtcccaggcattagcaatgatcagtttccccggcaagataacagaatccccgaagtcctgcatagag

SEQ ID NO: 12204 - DNA, 474 bp, Homo sapiens
  misc_feature (1)...(474): n = A,T,C or G
tgaggacccnnnaggggggccatcgagacatgactgatgcgtcagacncncgnnnnnggngnnnactgaaatcttacaaaatgatgtgcaagaatttattccatacgtctttcaagtgatgtctttgcttctggaaacacacaaaaatgacatcccgtcttcctatatggccttatttcctcatctccttcagccagtgctttgggaaagaacaggaaatattcctgctctagtgaggcttcttcaagcattcttagaacgcggttcaaacacaatagcaagtgctgcagctgacaaaattcctgggttactaggtgtctttcagaagctgattgcatccaaagcaaatgaccaccaaggtttttatcttctaaacagtataatagagcacatgcctcctgaatcagttgaccaatataggaaacaaatcttcattctgctattccagagacttcagaattccaaaacaaccan

SEQ ID NO: 12205 - DNA, 582 bp, Homo sapiens
  misc_feature (1)...(582): n = A,T,C or G
ccatagtaacactgctcagagagggcaantcgaatggattatctatgccctaatccaagagagcttttggagccactatttanacaaagcagttgttcctacagaattgagtcttattggacttacgaagtatgtcatggaaaacacattcggcagtaccatgaagagaaagaaactggtcagaaaataaatattcacgagtactaccttgggaatatgttggccaagaaccttctatttgaaaaagaacgagaagcagaagaaaaggaaaaatcaaatgagattcccactaaaaatatcgaaggtcagatgacaccatactatcctgtgggaatgggaaatggtacaccttgtagtttgaaacagaaccggcccagatcaagtactgtgatgtacatatgtcatcctgaatctaagcatganattctttcagtagctgaagttacaacttgtgaatatgaagttgtcattttgacaccactcttgtgcagtcatcctaaatataggttcagaagcatctctgtgaatgacatantnntgtcatcactggcaggatctncatttaagccccctcacctgagg

SEQ ID NO: 12206 - DNA, 595 bp, Homo sapiens
  misc_feature (1)...(595): n = A,T,C or G
naataggatnagccantccgcnnagggcncnnnnnnatagaatcactattcgcgagtggaggaattcagagactgcttgctgcggcagagacgccagaggtgcagctccagcagcaatggcagtgacggcgttggcgtcgcggacgtggcttggcgtgtggggcgtgaggaccatgcaagcccgaggcttcggctcggatcagtccgagaatgtcgaccggggcgcgggctccatccgggaagccggtggggccttcggaaagagagagcaggctgaagaggaacgatatttccgagcacagagtagagaacaactggcagctttgaaaaaacaccatgaagaagaaatcgttcatcataagaaggagattgagcgtctgcagaaagaaattgagcgccataagcagaagatcaaaatgctaaaacatgatgattaagtgcacaccgtgtgccatagaatggcacatgtcattgcccacttctgtgtagacatggntctgagttaactaatatttggctgtgtgctactaacagattataataaatggtcatcagtgaactgtgaaaaaaaaaaaaaaaaaaaaaaaaaaaaaaa

SEQ ID NO: 12207 - DNA, 467 bp, Homo sapiens
  misc_feature (1)...(467): n = A,T,C or G
gcagcggggnnnnnattttaacctgagaaccctntcagngctgaggaaccctggctctttccctccacctcctacaatgcacggctccaggccatgtggggccagagcctcctgccgcccgtgtccacctctttcaccacgggtgggctgcggatccccttccccagggactgcggggaggagatgcagaacggagccggtgcctccaggaccagcaccatcttcctcaacggcaaccgcgagcggcccctgaacgtgttttgcgacatggagactgatgggggcggctggctggtgttccagcgccgcatggatggacagacagacttctggagggactgggaggactatgcccatggttttgggaacatctctggagagttctggctgggcaatgaggccctgcacagcctgacacaggcaggtgactactccatgcgcgtggacctgcgggctggggacgaggc

SEQ ID NO: 12208 - DNA, 407 bp, Homo sapiens
  misc_feature (1)...(407): n = A,T,C or G
catgcccgtagtcgcagctactctggaggcagaggcaggaggatcgcttgagcccatgaatttgaggcagcagtgagctatgattgtgccactgtactccagtctgggtgacagagtgagaccccatctctaaataaataggtcaaacccttaaaaatatttaaattcttaaaaaattgaaaagattattcttctcaaatttagttgagctttctaagagaagcaattggctttttcccacttcaataatcattttcagtttgactcatacagttaacacaatgtgaatttcttcctcagcataacagagttatagaatgacagggctggaagtgaccttagagagtatccagttctttcattttacaggtgaggcaactgagactcaaaggtgatgtaatttgtgn

SEQ ID NO: 12209 - DNA, 481 bp, Homo sapiens
  misc_feature (1)...(481): n = A,T,C or G
naattgaagaccactaattgagnatcattagtccagngcggtggaattcttttaattgctctattttatactggcacttatatatttggggatttggagggtcattgaaatatattccttacaaataaatggcaaatggattactgtggtcatcctgggagataatatactcgctatatctgattgatgttcaaaacattttcaaaaccattctaaatcacttgagtcatgagaagactaatctctgtacttgacagtggtctaatttgtagccctaaaccagaagataatgtggtttaattatagtattcatcgtcgtttctaagttagtttgggcttaaaaaaaagtttggcttttctagggataatggtagccatacataattttaagtacctctagggtacacagaaagagctgtaagggattctcaggcataattaagagaaagaaaacctaccagaagcaggattgaatagaccn

SEQ ID NO: 12210 - DNA, 453 bp, Homo sapiens
  misc_feature (1)...(453): n = A,T,C or G
cttcgatagcagacatctgnccangcggtggaattcgaaatcctaaaggccgcggagtcggcggtgttgtaggtagcggtaccttgagtggcaacagaattcgattaaattacaatgggaaacatttttgaaaagctctttaaaagtctacttgggaaaaaaaagatgcggattcttatattgagtttggatacagctggaaaaaccaccatcttgtataaattgaagctgggggagactgtgcctgccgtccctacagtaggtttctgtgtggagacagtagaatataaaaataacaccttcgctgtctgggatgttggcagccacttcaaaatcagacctctgtggcagcattttttccagaacacaaaagagctatcagcttcccagtttgcacaattcatcaagaaattatgcggggtcactggcacaaatgatgaggcatctcctggg

SEQ ID NO: 12211 - DNA, 477 bp, Homo sapiens
  misc_feature (1)...(477): n = A,T,C or G
nnaagggcgccngnctgnnccccnaaggttcccaganagacagnccgcttgaattaagngaatctttacaattcagttttacatgtttcgggcagtattttgtcttaagatatattttttaaactttttataccttatcggttgagattttttcagctattttcttaaaagtatattttttctataaacatcctttgctgctacattagaacttttatagcctaaacaattgcagttggtgtgtttcatttttttaaggtttaaataagggttttttgttttgttttgttttttgcagtgagcatcactacagtctcagtcaacagtgtgaatgtatcatgttttactttaaatgtgtgtgtgatacttcttcattatgtcctgcgctgcagtgagacctgggtgaaaatcaggaaccgcacacagccacatcttcctagacctaagagtaaattatggaggattttatttatgtct

SEQ ID NO: 12212 - DNA, 463 bp, Homo sapiens
  misc_feature (1)...(463): n = A,T,C or G
tttgaatacatcngcatgngcanggaaccgttatggttagagacataatagnctaggtcaggggttgacagactttttctgtaaggctagagagtaaatatgttaggcttatgagccatacgcaatatgccaagatgccatattttggggtagtgtgtcctgaactccctcattgccaaaggaaacagttgtcatcagaagaatgaagaatgaaaaaaacaaactgaagatccaggtaatatcgtatgctatgttattacattgaagaacaaattgacatcagtaggagtaggactaagtgatgctcaacctcagatggactgaggtttagtccctagtatgacaagagtagattcacagaaaataaatgggtccatcaactcaggctttcattttaaatcagtttgttaatataacacctctagtagaaagcaagcaatagttaaggtggcaggaaggcaat

SEQ ID NO: 12213 - DNA, 480 bp, Homo sapiens
  misc_feature (1)...(480): n = A,T,C or G
agcgtggtcnnaattgaagcccattgcctagcnngcctttcgntnngngcgaagnaaatcntgagaaagngacctcatatttctaaggttaagattcccttttattgcacctagattagtgctatgcacagagcgggtgcttgagttggggtcgctttttgtttgttttttaaatgtaaactggtaaattttgtgcttatcttcaaggctggcttaagtataaaattgttttttaaacacttgaaaaattaaaggatttgttttatattatgacaaaaaaaaaaaataaaaaaaaaaaaaaaaaaaaaaaaaaaaaaaaaaatataatctccatntccttgtataaaattatatttatatatcctttaatatatttttcttttattttcctcctctttctctattcttgttctctctcttccctttcctttctcttctgtntcgcctcttttttttcttttaaaaattcaaaaaaatgaa

SEQ ID NO: 12214 - DNA, 466 bp, Homo sapiens
  misc_feature (1)...(466): n = A,T,C or G
ntttgagttacatcngcagtgngcagcgaaccgaagaatccggaacagcagatgacaagaggagaaactatggaggagtatatgttggcctaccatctgaagctgtcaatatggtgtccagtcaaacaaagacggttcggaaaaattagaagaaaataacatcatgactcaagaatcaagagcttgctcatcagtttggaaggaatttggctccgtgggacgttgtaatgtgcacagacatttccaaggaaattctaaacagtcacccttcccttttgcattcccccaaatcttaagtgtatacataaaaccctgggtacatattgttgtggtaatagaagggaattggttaaacagtacacttgtttatggaactttctgtggccacctacgaaagacaagttaacaaactgtcatggagggctgtggtgcccaaccagggccgctgcattttgacaacctttcn

SEQ ID NO: 12215 - DNA, 456 bp, Homo sapiens
  misc_feature (1)...(456): n = A,T,C or G
ctagacatcgatgacactagcccangcggtggaattcgtttctaatttggaagttaagctgttatgatgcttaattttatgtttcattttggctaggccatgtggtgctcagatatttgttcaacattattctggaggtgtccttgagggtatttctgtatggactagtatttgaatcagtagacccaggaaagcagattgcccttcccagtgtgggtggacatcatcctatccattgaggcctgagtaaaacaaaacactgagtaaaggagattttgcacagtccttccctgctcctggaatcagactggcacttacactatcagccctcctgcttatcaagccttcagactcagactggagctatacccttgggttttctgggtctccagcttgcagttagcagatcttgggacttctcagcctacataaatgcgtgagccaattccttaaaan

SEQ ID NO: 12216 - DNA, 462 bp, Homo sapiens
  misc_feature (1)...(462): n = A,T,C or G
agaggcctccnnatagagattcgtagaccgctgcggggaactctgagcaggaggagccaaacaatttcatgttctgtgttagtgaagttttgataaaaaggaatccttctttggttttgacttaaggcagatgttctgtaaaatcgcatttgaatctttcctgggctgctgggtctgtctttgctgcctccttgtcctttttccacggaaatgagcacacacagtctctgtggaggtctgtaccttcccaaccctttctgccagggccacccctgcaaatcgcgctcgtcactgagggagcctcgggcacgctgtggcatcacgaagaacccttcaaacgacagagggaagaacccttgggaggcacggacgccggctgccagccaaggctgcaaggaatcttccagaacggggctgctctgcatctcatcaacatgagaagggacagtcctgtgctgcgtg

SEQ ID NO: 12217 - DNA, 420 bp, Homo sapiens
  misc_feature (1)...(420): n = A,T,C or G
gacaaataatcaacagaaaacccgtattcttcagggtgctctggaacagggctcaaattctcagctgatggctgttcaatacacagaaaccactagtagtatcagcaggaactcagggagtgagctacaagtgtattatgcttcacccagaagttatcaagacttttttgaagccatccgcagaaggggagacacattttatgttgtgtcatttcgaagggatcacctgctgttaccagctaccacccataacaagaccacaagaccaaaaatgtcaattgtgttaccagcaataaacataaatgagaatgtgatcaatgggcaggactacgaagtgatgatgcagattgactgtcaggtgatggacaccaggatcctccatatcaaaagttcgtcagttcctccttacctccgagatcn

SEQ ID NO: 12218 - DNA, 413 bp, Homo sapiens
  misc_feature (1)...(413): n = A,T,C or G
gttggtgagaaaggcaaggcacctgtctggcctatcaggcaatttttgaaaaacaaaacaaaacaaccccaaaacacaaaaaaactgtagtgaccctatgtctgaggtgtccctataaaagttagtggggtgataagaccttaatagaacttagatatcatatagcaaaggcttgattcattgtgtagaatctgaaagggttaaaaaaaaatgatgtgaagtaggtttggaagaattatgacacttgaaaagactatcaattcaccaacagaaactgtccctcatcacagttgtcccccttctcaaaacacacagatccaaatgctctaatagcagctatgatcttcactttgaatctcaacagaatgtaattcagagactacaggaggtaaattctattccatgagttctgn

SEQ ID NO: 12219 - DNA, 471 bp, Homo sapiens
  misc_feature (1)...(471): n = A,T,C or G
cgcggggcnggnatgnnaatgatacctattgcagattgatggacctccatacctaacgtaaatgaggagttaatgggtgcagcacaccaacatggcacatgtatgcatatgtaacaaacctgcacgttgtgtacatgtaccctagaacttaaagtataataaaagatatatatatatttaaaaaaaaagaatatctttttggagcacatggacctcctgttttaatttgaatagatttctttcaaaccccactgcaagcagtcatcctggggtttctttttattagattaacagggttagtactatcatcttctgttttctacatactcctcacacttggtttcctggccaacatattcaattgtctccttcagatagcataaatagtagataaaccctgaatccttacaggtgtaagaatggctttagtttgtcctcagtcttgatagctagcttgtctaagtttggatn

SEQ ID NO: 12220 - DNA, 463 bp, Homo sapiens
  misc_feature (1)...(463): n = A,T,C or G
gaggcnctcnntttggtnactggagaccattagcccagngcggnggaattcctctgcaatgctgtgattggctacctgagtactcgcggttcctcagtagatggcagtcccctactgctatttctccgagatcagacgagttccagactcctggagcaggtcctgctggtgttggagcccccaagactccagagcctctttgaggagcacttgcaggggcagctgcagaccctggctgcacatcccattgccaacttccctttgcagcgcttactggatgcagtcactacccctgagctgctgtcccctgtgtttgaggagctgagccctgtcttggaagctgtattggcccagggccacccaggggtagtcattgccctggtgggggcctgtcgcagagttggggcctaccaagccaaggtcctacagctcttgttggaggcattccactgtgcagagccct

SEQ ID NO: 12221 - DNA, 453 bp, Homo sapiens
  misc_feature (1)...(453): n = A,T,C or G
ntttgatagccgtccattagaccangcggtggaattcgcgggacctggagagcttgtggacaaatgtataggatcaagaattcacatcgtgatgaagagtgataaggaaattgttggtactcttctaggatttgatgactttgtcaatatggtactggaagatgtcactgagtttgaaatcacaccagaaggaagaaggattactaaattagatcagattttgctaaatggaaataatataacaatgctggttcctggaggagaaggacctgaagtgtgaatgagtttccttgacttacactagattttgttttggcttataatgacaagaaaatggaatttttttcccactttctaatgtttaaatcccataaagctaagtttcccgttaaagggaagtgctttgaagatgtgtacccatttttgtaagttaatcatgattatcctggaaan

SEQ ID NO: 12222 - DNA, 470 bp, Homo sapiens
  misc_feature (1)...(470): n = A,T,C or G
agcgccgaaanaaaagtaaacctgagaccntcgtannactgagaacatagtcagtgtcgtggaattctgtacacttaaaaattcgttaagagggtagatctcatgttaccttcttaccatatactcaaagaaagtaaacagtatagactaatgaacctcatagacctataggataatcaacactctacttttgtcattcttatttcacttctactcttacccattccctactgtacctcaagttataatatataatttttacagttattttttgttatgctttatatacattgaagtatatgtcttagctatataattttgacaaacggataaactcttaaacatccacattcatctcaaggtagaacatttttatctatccagaagttttcctcatgtcccttctcagtcattctctgtcccagcaatcacttttaagaattttttcactttagattagttttgtttga

SEQ ID NO: 12223 - DNA, 455 bp, Homo sapiens
  misc_feature (1)...(455): n = A,T,C or G
ccccaccagattaccctacatcgngcggngcaattcgaacgccttatttcctggaagaaggcaagagtaacctcttgaaacatgtttgaggaggacaaatatatcaggcagtgattagtaacatctgagtaataatgaatttatcagattttttttttttctcctgagagggagactcactctgtttcccaggctggagggcgggggagcaatctttgctaactggaccctctacctcccgggttcaaacgattctcctgcttcagcctgctgagtagctgggattacaggggcctgccaccatgcccggttaatttttgtatttttagaaaagctggggtttcactgtgttagccaggatggtctaaatctcctgacctcgggatccgcccacctcagcctcccaaagggctgggattacagacatgagccaccatatctggcctttatcaaat

SEQ ID NO: 12224 - DNA, 480 bp, Homo sapiens
  misc_feature (1)...(480): n = A,T,C or G
ttttgagacactagccangcggtttgattcgcactgggccactgtcatacaggcctttagggacatgaacagattcaccgtaaatgagacagtgctttccaccaaggacgtccttgtcctcttgcacaagtggagcctcattgaaagagacctcaagctccaggaagacctgagagcagccattgagaaggcccaagcccgggagctcatgaaaatgctcaaggataagaacaagcctgtcatgccagcccgagccaaaggcccacggggccgaaagaggaggcctggggaggcagaggagatggctgaccctgagctgatggcatctaccttggagacatgcaagggcctcctgaggtccatcttgacttactggagaccagtgatccctggtcctgaccccactcaggagcctgtggactcagccagccccgagagcgatgcgccaggccccgtatatgctgccgcttccctggcagn

SEQ ID NO: 12225 - DNA, 460 bp, Homo sapiens
  misc_feature (1)...(460): n = A,T,C or G
gagcgcaanaaaagtaaaactgaaacctgtaagnactgagaacctccagaggggcgggctcctgggtccccagcctcgccattctgtggggggtggtgactgggcgaactctcagatgcctcagcaccctcccaccccttcctcaggcagaacgagatcttgtggcgggaggtggtgacacttcggcagagccacggtcagcagcaccgggtcattggcaagctgatccagtgtctctttgggccacttcaggcggggccgagcaatgcaggaggcaagagaaagctgtccctgatgctggatgaggggagctcatgcccaacacctgccaagttcaacacctgccctctacctggtgcccttctgcaggacccctacttcatccagtcggtaggtttgtcttcttcccccttcccaagggcatggctgggcttatggagagcctgttccttctccccat

SEQ ID NO: 12226 - DNA, 462 bp, Homo sapiens
  misc_feature (1)...(462): n = A,T,C or G
gcagccctcnttaatgataacctgagaacactgcgaggaacgccagaaggatggaattgtatatttaaggaaatgtttctggcacaaaggcagcaaatattatagttaggggatagacccaggggatccattttgggctctaacatctaacagttgttccaaggccgagaacacagaatgggaaaaggaagggggaggcggtgctccaactgattttatgattccagaagccttctatcttaagatgtataggatgtatcttagggtgtataagagaagcgcaagagaaacatttaggctgttttatgtttgagtagagacatgaaagttttagataaagcagcagcacaatgagtccagcggcacatcataaagcaaatcaccatgatcaggtcaggttcagggcggctttatgtcataacatatgtcagtgtgctttacctattagtggaccaaaggcan

SEQ ID NO: 12227 - DNA, 470 bp, Homo sapiens
  misc_feature (1)...(470): n = A,T,C or G
atcgggatacgtgtgcgtgngcaggaatccgagcacagctttgattatttgaggatttaggtctgatgcatctgataaggctgccagtacttgtatattatggaagatgtcatgttgatttctattgattgcttgtctccccagtagaaagtaaactcctttagactaaagaccatgtctttctattatatacctagcagccagagtggtaactgctaatgctaaatccctaatatatactagctgaatgaaaaaagtgaccttttagtatttctttttcttaactttttctttttctgggtcagaaagaaaacaagtagtattgaggatcctcagaataggaaatgcaaatactgcattccaattattggcagggacatgaagaatatctgtttctatagtaaggaggagttagggtccaaaatagaaacagaagtgatactctggctaaagatgtacacaaagttcac

SEQ ID NO: 12228 - DNA, 465 bp, Homo sapiens
  misc_feature (1)...(465): n = A,T,C or G
agagccnntnnnttagaaaatagtagaccattacgccagngcggnggaattcgaagagcttgccacttctgctatatgaccacggtgaagccagcctgtcaccctcctgccctggatgaccccagggagctctacagaggtccttggctgggggaggccagcaattgtctaggagagctcagtgccacttgcaaagacgacagatctctctacaaattctgggctgagcaggtgaaggaggctgggcaggcccatgaaggagcctagtcagccataaggaaaggttcactgtggggcccccgacttcccattcctgatctcctttgtacctctgctgcccacttcctttcctctttccctccaagtataccttatactctgctcctgatgacactcagatctccccccgcccccccgcccctgtcaaataaaaagagcctagtgacttttgtaaaaaaaaaaaaa

SEQ ID NO: 12229 - DNA, 466 bp, Homo sapiens
  misc_feature (1)...(466): n = A,T,C or G
gcgggtccaatgagaccctgaatgataccttcagaagngcgnggaatncagnaactttgaaaattcaaacgggcacatgatacccatcggtagaggaatctacccgagaggaaaatgtagtaaagtctgaagaagggaatggctctgtatctgaaaaaacaccacctctggaggaacaggcagaagataagaaagctggctcctctcattcaaaaaaaacaactggctctaaagcatcagcttcgccatccacttcatccacctcatctcgtcccaaagcttcaaaggagacagtttctagcaaagcagggacagtggggaccaccaagggcaagagaaaaactgacaagcagccaataacttctcacctgtcctcagacacaacaacttctggcacatccgacctgaaaggagagcctgcagagaccagagtggagagtttcaaactcgaacagactgtccctgg

SEQ ID NO: 12230 - DNA, 488 bp, Homo sapiens
  misc_feature (1)...(488): n = A,T,C or G
gtaagtccggccggnnnnnnaaaatgagatcgtaggcatngcggnggaattcggctgcagaagatgagatccagagccagtggcagcacctgaaggagacccttttcatcaacaactgcctgtgagaaaagctagaacgtcatcacagcagctttgatgaagaaaatggatgcacctctaacctctacaggcaaatcatagattccattgtccagctgtataatgaaaacagagttctcagagaagaataccggagactcccccgacttgcctgaatcaaatttccagagctaaacaagcactggccttgagataagcaatgctgaagcacttgcagctcacctattaccataaactgactgagccctccctacacaagccgtaactactgctttgattggacaagagactgatttcagtagttttctcttgataagagaccactggccgtgggcgggttctggacagtttacagaagctatgcactt

SEQ ID NO: 12231 - DNA, 480 bp, Homo sapiens
  misc_feature (1)...(480): n = A,T,C or G
gggtgggcgccngncttttnccccaagtttccanganagacagngcgcttgaattccagattctttgcgctacatatatccaaaacttaagacagatgtgctggtgctgatctgtgatctgataacagacgttgccttagatgaggttgtggacctgtttagagcttatgatgcatcacttgctatgttgatgagaaaaggccaagatagcatagaacctgttcccggtcaaaaggggaaaaaaaaagcagcggagcagcgtgacttcattggagtggacagcacaggaaagaggctgctcttcatggctaatgaagcagacttggatgaagagctggtcattaagggatccatcctacagaagcatcctataatacgtttccacacgggtcttgtggatgcccacctctactgtttgaaaaaatacatcgtggatttcctaatggaaaatgggtcaataacttctatcctgagtgaacg

SEQ ID NO: 12232 - DNA, 456 bp, Homo sapiens
  misc_feature (1)...(456): n = A,T,C or G
ctccatttgatgccctgagaacgtgcggaggaacncatagngnggngcgggatgctcctggcgcggcaagcggttcttcctcagctctcttctgcatgttaaagatacctgctttcttcaacctatgtagacagccacaaatgggaagcaagacaaaaagaacattactgtcttgctgatcttgcatctttaatggataaaacatttgagagaaagttgcctgttagttctttaacaatatcacggcttatagacaacatttcctctcgggaagagatagatcatgcagagtattacctttacaaccaagaatatgaaattttggtcttccgaaacaattttcatgaaacccatgcacatgaatcttcatgggagcagtggaaccaccagattcaactgatggaggattatggatgaacgtagcaaccatagcagtcaatttttcactagcagccc

SEQ ID NO: 12233 - DNA, 463 bp, Homo sapiens
  misc_feature (1)...(463): n = A,T,C or G
attgaaaagatacctttcgcagattgatggcctctgcagngngcnggaattcatcaagcaaacgattctgcagcagactccagctagatgttctctaattcaattctgatactatctacctggagagagagcatcggatcacacaggttcagggctcagtttcataaaactgccccgccctcattttcaatgctaactgaaagctccaggttcttttgcctctgcttcttacagactggttataaactggggttcccacaaccccctggggttcaagtaatttcctagggtggcacacagaactcagggactaacacatttaccagttatataggatattttaaaggatataaatgaacagccagatgaaaagatacttatatatcttttcctttataggtgaggtcttgaagggtcccaagcacaggagcttccattcctgtggagctggggtgccccaccc

SEQ ID NO: 12234 - DNA, 467 bp, Homo sapiens
  misc_feature (1)...(467): n = A,T,C or G
gggcgggnnngtttgnnattganaccttttccagttgagggccttcattgctcataggtaccttaagttcatattgccatctctgagtcagtagagcccaaattggatgaatctggatgaatggggcaggggaaagaggaaaggaaaagttgcaggtcatagtgctgggtgttgcagaccagggctttggggcacagcagagaaggagttaaattgtggtgccaccgtttattagcttagtggctctggggcaaggtttgacatctgtgaaatcgataataatagctcgtgtggttgctatattagaaataatttctataagctatttagcacaggggctggcatctaataggtgctcagaaaaaagtaactggtggtattattattattattaggatgaagcaaataagtagtaagtggcctgggatgatcagttttttactgtggtttcctgaccacgaccaaat

SEQ ID NO: 12235 - DNA, 462 bp, Homo sapiens
  misc_feature (1)...(462): n = A,T,C or G
agagccnctcnnnatagagaactagagaccgtgcggaggaactcattaaatcatatctggcttttcagtgacatcacaaatagtgtgttgctagaagagctatttcttggtcactggacaaacaggccacaatgggaagatgacacctataaatgtttaatggcttctacatccattcttttttaaagctgcatcttaaaatagaccaatttaatcattgtgcatgtaacaagcagattaatgagttctgaagttagctttaaagttaaatagacttaagataacactgtttttaaaattttggccaattcatcaaacttgaatgacgtccagtaacattcactaacatttcacaaaaggtaccattttattgtcaatcacaaaaataaccacttaaaattgaaatcttaatttctagtaccttggcttagagttcaggccatattatgaaccaattcaaat

SEQ ID NO: 12236 - DNA, 471 bp, Homo sapiens
  misc_feature (1)...(471): n = A,T,C or G
nnaaggccgcgttttnnnaaggcctttagacagtacgngcatttnnnataactgnctagaggctgaggaatttggcagtgaaaaaaagatccctgccttcatgaagctgacatttggttgtagagagggagaccaggaaaataatgaagaatgtgggttggagttggggatcagtagtgaggtgaggctgttactgtaaataaggtgggcatttaaaacttcactgtaagatgacagttgagtagaggtttgagccatgcaggaaactgagggaagaacatttcagacagaaagaatagcaaatacgaagacactgaaatcagcttgtttgatgtatgccagggagtgcatggagcagagcgaacaaaaggaaaaaatggatgaagttgagagattatcagatcgaataaagcttatagaacattgtaaggactttgacttcaactccaggggaaatgagaactcatttgn

SEQ ID NO: 12237 - DNA, 469 bp, Homo sapiens
  misc_feature (1)...(469): n = A,T,C or G
natagagnatagangaccattacgccagagcggtggaattcagcctctgtggctcctgcaataaacctattgctgggcaagtggtgacggttctgggccgcgcctggcaccccgagcacttcgtttgcggaggctgttccaccgccctgggaggcagcagcttcttctagaaggatggagcccccttctgccccgagtgctactttgagcgcttctcgccaagatgtggcttctgcaaccagcccatccgacacaagatggtgaccgccttgggcactcactggcacccagagcatttctgctgcgtcagttgcggggagcccttcggagatgagggtttccacgagcgcgagggccgcccctactgccgccgggacttcctgcagctgttcgccccgcgctgccagggctgccagggccccatcctggataactacatctcggcgctcagcgcgctctggcacccggg

SEQ ID NO: 12238 - DNA, 453 bp, Homo sapiens
  misc_feature (1)...(453): n = A,T,C or G
nttgaggcccatgatgacatcagacagcccggnggaattcgaggacatctctagagggaagctcacagcatgatgggcaagatccctgtcctcctgggccctgaggcccctgccctagtgcaacaggcattgctgaggtctgagcagggcctggcctttcctcctcttcctcaccctcatcctttgggaggctgacttggacccaaactgggcgactagggctttgagctgggcagttttccctgccacctcttcctctatcagggacagggtgggtgccacaggtaaccccaatttctggccttcaacttctccccttgaccgggtccaactctgccactcatctgccaactttgcctggggagggctaggcttgggatgagctgggtttgcggggagatccttaatattctcaagttctgggcacacagggataatgagtctcttggcccn

SEQ ID NO: 12239 - DNA, 479 bp, Homo sapiens
  misc_feature (1)...(479): n = A,T,C or G
ggggggggcccggattgtttttgagaccctacgnagtanttgatggacattcgcagagccccggaactccgggatccaggcaagtcgcactcaagctgcgtggatacccacgtgcctcgtgggatctgtaaacagcttaggccaatggggattctcattcgcctgggaaagaacttgattctcaaatagcgaagcaacacagctgagaggtagtgagatccctgcagggactccctggagattcaggccctggaatggggctgaatggaggtcccgttcgacccttgatgctggggcatccgggttgggatggagataggaggatctcattatatttgtttcgtagttttttatttattttgcaaataccaaaggaatgtaaaaaaaactcaggtgatctagaagtgtttattttcttcccttcccttcccttccctttccttttccctttacctttccccttccccttccccttcccc

SEQ ID NO: 12240 - DNA, 490 bp, Homo sapiens
  misc_feature (1)...(490): n = A,T,C or G
ggggnnnnnnnaggggaggggcccaggggaaattaattcagcnangcttgccgatggccctcgaannaacncatggntaagntcaatggttaagggtgtcaaagtggctcccatccaaaatcgggttaacatttgcactttgcctaaagtgggactcctagataaaattcaaacgacctttctggtaatcccagcgtgtgggttttagcatcaccagctggctccaaatgggccactgctctctctacaaagaggagggagccttcaacacaggggccatgcttgtccattcaactgtgtctaaattcacagatcagtgtttctctcagtccctagaccagcaacatcagcatcccttgggaacttgttagaaatgcagagtctcaggccttgcctcaccgaatcagcacctctggggttggacctagcaatgtgtgttttaacaaatcctccaggtaattctgatgcacacctaagtttgagaaccact

SEQ ID NO: 12241 - DNA, 441 bp, Homo sapiens
  misc_feature (1)...(441): n = A,T,C or G
ggggccnaatcgagacccatagatagccttgtggaattcggaagatggatgaatgatggaagatggatggatgggggacagatgaattgatggcggaggatgttaggatgggtggatggatgtattaacatcccttctccatgcctcagtccccatcataaggagaaagagcctgtcgtccctctatgatactgcactgaaccaatattcccctcacttcatgggtgttacaaacctcttatcatctgtttacgtctcactcttactgtagaacctctagaaaggcaggtggcttccagctcctcgcttttcctgagggatgatctgaccacccattcttacacatgtcatctttcccacagtggcagtgcagaggagacaaaagcagaacaaaagcagacagcggccaggtctgagggtgataggctactcactgggtcc

SEQ ID NO: 12242 - DNA, 548 bp, Homo sapiens
  misc_feature (1)...(548): n = A,T,C or G
gttcgatcacanttcannnnnnttccggtcncctatccgtgtggtggaattcccagtgccatcttcaaaatttcaggtcttaaatctggtaattattgaacatctacttgctgcctactttcaacatctgcatgtgtgtgtgaatattaaatatcacaccaagacattgttcagaggagacagaatagtgagctgagataaatgagaatctctctatggaagattagactggagcatgaacttgaaatatgagagaaggaagccaacatccttttggagccatgaatattgtccgaactccatctgttgctcagattggaatttcagtggaattattagacagtatggctcagcagactcctgtaggtaatgctgctgtatcctcagttgactcattcactcagttcacacaaaagatgttggacaatttctacaattttgcttcatcatttgctgtctctcaggcccagatgacaccaagcccatctgatatgttcattccggccaaatgtggtctgaaatgatatttcttttcactttgagtatcn

SEQ ID NO: 12243 - DNA, 474 bp, Homo sapiens
  misc_feature (1)...(474): n = A,T,C or G
ctttgagacccttttgtacgacattagnacagngcggtggaattcggtgggactacagatgtgcaccactgcacctggctacttttgttcctttttataggggaacatgctcaggttcttttgtggcttgaagcagctaatgggacctttgttcttgatttctcagatcaaaatattatttttatatgcttttttgcacagagaattgggatcttaattgagcaaataaatgagacgcagataaatactccattacacatttgtctatatacataagtagatttgtttcttttcttgttaaaagaactttagtctgcccataaatacccttgtggtcttttcataattggttttgaactgctttttaatttcaaaattacagattgggctcctgcatttccccgagataacctttagttgtttttcatgcatacggtccctgaagcatgtggactctttaaatcatcagcaaag

SEQ ID NO: 12244 - DNA, 478 bp, Homo sapiens
  misc_feature (1)...(478): n = A,T,C or G
gggcccccccnttttttggctttgtagaccatagtccatgtggtggaattcgatgaacaggaagggaggggaaatgggtctgcttagaggctggactttccatggccaagagcccagagtccaggaacctgggttggttcccctttaaggtgcctggggctgtggggtgccaggacaggggataaaagggggtggactagagcctgggaagcgggtgacttcaccccccagcccattgtgcttattgtcatggcaacccaatcctcgcttggaatgcggctggtgctttgagatgcaaaaggagctggacaaagagctaggggccccaggcctgagaaaagcaccccccttccctctccttcctgcctccctttccctccctcccttctctctcaggcctggtgagctcaaggggggctggggaaaagcaaggccccaggcatggtggcacagtgcccactggcaccctagcaccaat

SEQ ID NO: 12245 - DNA, 452 bp, Homo sapiens
  misc_feature (1)...(452): n = A,T,C or G
taaatcctagaacctaggctcgacgacgtagaaannacaagcttggaagtattcaaatagaaaatcaaaggtgtttcaatacagtataatcccaggactgtattttaaaattgcctcacagatcacactcgctggtggcaaatatcatcatcgttgctaaaggacagaaaatactgatgtgtgttttaactaactggtatattgatccatgggaggctgcacagaagaccctgcggccaggaggggcattgtcagtggctgcttctcctgagctccacgccttcattgcagctgcatgttcgatacaatacacctgcttcacagccccatggacatccctacaggtactgtcatgtgaagccttgcctagtagttctctccagggcaaatgaagctcacagttttgcaaggtggaaacctcttattcacatttgctttgattccccgatgga

SEQ ID NO: 12246 - DNA, 480 bp, Homo sapiens
  misc_feature (1)...(480): n = A,T,C or G
caatggagaccantcggaatttgagngccattcgaagaacgaagnttccatgtgcaggctatacgtgagagcatgggcaagtgaggatttgtatgctccctgtagccagaggtgaaatattcaacgcttttattttttctcccgtcttcaatgacctcccatttggacccatagtttatttatagagagcacacactccctaattgtcagatggtttttttgggaaaactcttagacagtacagtgagttgtgaccctccaaaggatcacaagtacataaacagatacaaagtatttatgtggtattaaaatttcatggtgatggtgcaagggagagatgattaggaagaaaatgtcttaaacggctgtaattgagaaatactgatctagagtcatttcctgcttcttaaattgttcgttttctcttccctgggtattttctcatttccaaagacccagagtctcagagccaggttaagg

SEQ ID NO: 12247 - DNA, 452 bp, Homo sapiens
  misc_feature (1)...(452): n = A,T,C or G
atcgagacccttttttgaganccatatcagngtggnggaattcccagcccgagaggagctagagccaaagagggtacggagctcagggccagaggctgaggaggtccaggaggaggaagagctggaggaggagactgggggtgagggcccccctgcacccatccccaccactggcagccccagcacccaggagaaccagaatggcttggaaccggcggaagggaccacttcaggcccctcggcccctttctccactctgactccccggctgcatctgccctgcccacagcagccgcctcagcaacagttgtgacagtggctgagcctagcacagaccctgacagagacccccctcggcctcaaggatcctctttctgaccatcaagcctgctttctggggggtggnnnnnnanncnnnntccatcctttnnnnaaaaaannnaatnaactcc

SEQ ID NO: 12248 - DNA, 466 bp, Homo sapiens
  misc_feature (1)...(466): n = A,T,C or G
gggagccgngngnntatagatagagtccctacgccgngncgnggaattcagaggacagccattgcccctctgccagattctcagaacccaaggttctgtgcctccagtgggctcattctaaagctgggactgtgtgagggggtgggcatgctgcgtgcccaccgtgaggggcacacccgcctcttcactgccttgcagggctgtatccccaggccctgtaaccttgcagcgatggagggcaaaggagggggtgggataaagagtcagcccaccctttgccatctttcagagaccagccccggagctgtctgcacattttattttctcgttaaataaacaccattagccttcctgagaaattggtgcaaacatgacctcgcaaataaccaattaaaagggtagggttgaaggggaatgtgaatttgaaaacatgtagaggaggccattaacgattcctgtagaatct

SEQ ID NO: 12249 - DNA, 469 bp, Homo sapiens
  misc_feature (1)...(469): n = A,T,C or G
ccgccgcgccccnnnnnaatagaatagcgtaccnagngnggnggaantcaaaatactgaggtgtggagagagagacaggatcaggagcgatagagagcaggccctcagtgttgtactatttgtctcggtccttgtgtctaaggagcaatgcacaaaaaaaggtgaaataaatggaagagatagccatggactctggatcttttaaaaatctgcacttccagctgggattgggaagggagctgaggctaaagaggtgctcggcagaggaaactagacacattcatttcataaatcactctggctggaaacagtgaactctgcaggaacctcacaaaactccttttgcgtttgtgagcttgttgatcttccagctcactatgcaggttatggggacaagaggccagaggccaaggaaccaggcggccccagcaggacgttccctagctgtgcatcctatgcacagccatga

SEQ ID NO: 12250 - DNA, 419 bp, Homo sapiens
aatttgttgaacattttttatcattaaagaatgttgaattttgtcaattttttatgcgtctattgaaatgatgaatttcattgattcattagcttatgttgaaccatccttacacacatggaatgaatctcacttgatcacagtgaatgattttaatttgctgttgaatttgattttgttgagaatttttgtatgtatgttcagatacattggcttgtagtttttaatttttttgtagtgtctttggctctggtactgggataatgttgctattgtaaaatgagtttggaagtattccctcctcttcaatttttggaagagtttgaaaagaattaatattctttgaagatttggtagtattcagcagtgaagccagtaattcctgtgttttttttcctaagttatccaatttgttagtg

SEQ ID NO: 12251 - DNA, 433 bp, Homo sapiens
cagagtcctaagcacgctcggctatagcaactactccaagctccccagcctgcccctggagcaaggggagcttgtaggaggcctcacctgcctcacagcccagacccactccctgctccagcaccagcccctccagctgaccaccctgttggaccagtacatcagagagcaacgcgagaaggattctgtcatgtcggccaatgggaagccagatcctgacactgttccggactcgtagccagcctgtttagccagccctgcgcataaatacactctgcgttattggctgtgctctcctcaatgggacatgtggaagaacttggggtcggggagtgtgtttgtcacttggttttcactagtaatgatattgtcaggtatagggccacttggagatgcagaggattccatttcagatgtcagtcaccggcttcgt

SEQ ID NO: 12252 - DNA, 461 bp, Homo sapiens
  misc_feature (1)...(461): n = A,T,C or G
cacggacncgtactacgctcgngcggngcaannncanaagnctaggcccagggatggctccagttggggatccagcaggagaccctctgtttatttggctggtttaccaacatctactccctcaggatgagcgtgagccagaagcagctgtgtatttaaggaaacaagcgttcctggaattaatttataaatttaataaatcccaatataatcccagctagtgctttttccttattataatttgataaggtgattataaaagatacatggaaggaagtggaaccagatgcagaagaggaaatgatggaaggacttatggtatcagataccaatatttaaaagtttgtataataataaagagtatgattgtggttcaaggataaaaacagactagagaaacttattcttagccatcctttatttttattttatttattttttgatggagtcttgctctgttg

SEQ ID NO: 12253 - DNA, 467 bp, Homo sapiens
  misc_feature (1)...(467): n = A,T,C or G
natagaagaccattagnccagttcgatggcattcgancaatgcccgcacagagntggcggtccgctacaatgacatctcaccgctggataaccaccactgcgccgtggccttccagatcctcgccgagcctgagtgcaacatcttctccaacatcccacctgatgggttcaagcagatccgacagggaatgatcacattaatcttggccactgacatggcaagacatgcagaaattatggattctttcaaagagaaaatggagaattttgactacagcaacgaggagcacatgaccctgctgaagatgattttgataaaatgctgtgatatctctaacgaggtccgtccaatggaagtcgcagagccttgggtggactgtttattagaggaatattttatgcagagcgaccgtgagaagtcagaaggccttcccgtggccccgttcatggaccgagacaaaatgact

SEQ ID NO: 12254 - DNA, 468 bp, Homo sapiens
  misc_feature (1)...(468): n = A,T,C or G
naatgagccatcggaannctgatgacgtcatctgaacagngcggaggaantcgatcccttctctgtggggagcatcccccaacgatttgcagctcatgagcaaaattctgcagacagtgagctttatcattctccaagccttgattattcaccttcccactaccaggttgcccaagaaggtcatttgcaatttttaaggtgcatctctccacattcagattctacgttgacgcctctgcagtccatttcagcaactctctcatcttctgtctgctcctcttcggaaacatctttgcacctagttctcccaagcagatcagaggagggcagcttcagtcagggaactgtgagttccttcagtctggaaaacttaccaggatcttggaaccaggaaggaatggcatcagcttctacaaaacctttggagaaccttccactggaagttgtcacaagcacagcagaagtgat

SEQ ID NO: 12255 - DNA, 480 bp, Homo sapiens
  misc_feature (1)...(480): n = A,T,C or G
ggcgatgagcctttgaggcgtgaaacngccngngngggctgtaacccgggtcccatgaccctccaaggcaccaacacctaccttgtggggaccggccccaggagaatcctcattgacactggagaaccagcaattccagaatacatcagctgtttaaagcaggctctaactgaatttaacacagcaatccaggaaattgtagtgactcactggcaccgagatcattctggaggcataggagatatttgtaaaagcatcaataatgacactacctattgcattaaaaaactcccacggaatcctcagagagaagaaattataggaaatggagagcaacaatatgtttatctganagatggagatgtgattaagactgagggagccactctaagagttctatatacccctggccacactgatgatcacatggctctactcttagaagaggaaaatgctatcttttctggagattgcatccta

SEQ ID NO: 12256 - DNA, 466 bp, Homo sapiens
  misc_feature (1)...(466): n = A,T,C or G
natcgtagacattagtccagngcggtggaattcgtatcatctggctggaagactcagagactagtggtgccatgcttggggagggtagtacaagctgaggcagctgtgaaatgggtgggctgagctgttgtggccctagaaggctcttgggcagagaagctaagaagcgaggctgggagatctaaagttagcaatccgtttaaaagtgctggtggctttcttttgcaagccgaggtgggactgctctaggctgtagtggggtctgcagaattgcctcctacagagtatgagtcagaaaggcaagcggggaaagaagtaagtgaggagaggagagagggagggaaactcaggcaagatggtatctgggcagccttctgaggaggggtcaatgtctggccatcanggtactgtatcagtgatgggatttgctcatgaantttccagttcccgtagtgtctctagaagg

SEQ ID NO: 12257 - DNA, 450 bp, Homo sapiens
  misc_feature (1)...(450): n = A,T,C or G
natcgaattcgatgacatagtccangcggtggaattccaagcacggtgtgccctggcctgccttcttcttgtgtctttggtggggatggggaggcctattcctgctggccccttctgggggtggcgggcaggtgacacggagtggcttgagcttctggggatgcaggtccaccgagcccctgacccctgtctgtccccgctcccctaacaggtgcggttcctcatctgagaggctctccgtgcaggcgatggggcaagacagaaaagtgcctgagctggggaagccggggtgtaacttcctgctgcaccctgcgcctccagaggtcctccgtagggtctttcttgggatagtgttctgctcctgcttttctgtcctgggcatgggtccagggcctgacaccccctccccgcccctgtggccctggccactaaagcttcagactcaagtac

SEQ ID NO: 12258 - DNA, 465 bp, Homo sapiens
  misc_feature (1)...(465): n = A,T,C or G
natagaggactatagnacagngcgattgaagtccnatgggananncancangnattccatcttgttctagaacctactatagttgaaatccaataaacagttgtagatcaattttcttactgttatatactcagattatgccttaagttcaccctacaagtaaactttccgtcaatttcatagtgttgtgaaaactctctagtagctcagaacgttcttggtggtctcaatatattaaaagtatgcagtcagatactgatggccctgagtcctgcagacagctaacaaagctgaagcccacaggctagtgagcaccagctgagagcactttctatagagtttgtgggcagtccaagagagacaggatctgagatgtgatgatatgtcctctggcagcagcaatatctgatattgagctctgctaggtggtgctgagcgtggacacctgctttccttcacggctgg

SEQ ID NO: 12259 - DNA, 487 bp, Homo sapiens
  misc_feature (1)...(487): n = A,T,C or G
aaaagtcgantccctttcagngtcgagaccctatggagagccgtggaagtcctcgcatgtcactttctccaggaaacatctcctacacacactgttcagttaggcagccccattgccagcctccacctcctccagccaactgcgtcatgaaaacagggaccattctgttctgctctccatccctggggacagacagaaatcatctttcgagattccagagagtcttaagttattttataaagggaagcgaaagtctccactttcatgttaaaaagtactatatgctgcataacatttttcagaaagggttattatggaagggccgagggtcaaagttccaaggtcctgaaagtattacactgcttccctgagcagtgtcagaccagaaaaaccaacaccggactcttgactcagggaaatattgcaccctactgccaatttatgtggttggcttttttatctttttaaacaggcaaagagagctttg

SEQ ID NO: 12260 - DNA, 608 bp, Homo sapiens
  misc_feature (1)...(608): n = A,T,C or G
tgtgncnnnagggnnccnnnntttcgaaccactagttagagtggcggaattcgganacctctgcgccatgagagccaagtggaggaagaagcgaatgcgcaggctgaagcgcaaaagaagaaagatgaggcagatgtccaagtaaaccgctagcttgttgcaccgtggaggccacaggagcagaaacatggaatgccagacgctggggatgctggtacaagttgtgggactgcatgctactgtctagagcttgtctcaatggatctagaacttcatcgccctctgatcgccgatcacctctgagacccaccttgctcataaacaaaatgcccatgttggtcctctgccctggacctgtgacattctggactatttctgtgtttatttgtggccgagtgtaacaaccatataataaatcacctcttccgctgttttagctgaagaattannannnaaaaannaaaaanaaanaaaaaaaaaaaaaaaaaaaaaaaaaaaaanaaaaaaaaagggggccttttaatttaaagggccctaataaacccgcgaatacaccctcgggggttcttttataggggcacctcttgtgtgggtcccctcccccccct

SEQ ID NO: 12261 - DNA, 448 bp, Homo sapiens
  misc_feature (1)...(448): n = A,T,C or G
ggggcggccnnctcnnccagaatcgagagtcatgtgcgggccantncgggntaccgnggaaaccgcggccatggcggcaccgcggcaaatccccagccacatagtgcgcctcaagcccagctgctctacagactcgtcgttcacccggacgccggtgcccaccgtgtctctcgcgtcccgcgagctgcctgtctcgtcgtggcaggtcaccgagccgtcaagcaagaatctgtgggagcagatctgcaaggagtatgaagctgagcagcctccctttccagaaggatataaagtcaaacaggagcctgtgattacggttgcgccagtagaggaaatgcttttcatggcttcagtgcagagcactattttccggtttcccatttcaccatgatctcacgtacaccctgtcctcaagataaatcggaaacaatcaacccaaaaacatgtt

SEQ ID NO: 12262 - DNA, 491 bp, Homo sapiens
  misc_feature (1)...(491): n = A,T,C or G
aggctgtttgagncctactgagaccctaggcagngncgnggaattcggaaaagtgaggtgtacattaaacatcttttggtcaccgtgcctcactaagacctttcacattccagcttgtccgactagtgtaatgtacctctcacttctgttttacgttgagcattacgaattaaaatctttacagtctagggggaaaaaaaggcttcaataccagttggcttatgaggctctgcatataattttctctaaaatatgtaactattttgtagtctgtggggactttcaaagccaatttttaaaattagtagtagtaaaggtttttccctttcctgaatgaaaaatcagaaattctaatctttgctataaagtacttaaacacaatacattgcctcagcataaataaaaacatttttattaagatgatttatgaacatggatttctaactggaccaacactaatgttgcaacctgataaaatttgagatgtaaat

SEQ ID NO: 12263 - DNA, 471 bp, Homo sapiens
  misc_feature (1)...(471): n = A,T,C or G
ttgagacattanccattgaggacctctaccagngcggtggaattcttttgacggcgtctcactctgtcgcccaggctgcagcgcagtggcatgatcttggctcactgcagcatcgacttccctggctcaggtgatcctcccacctcagcctcctgaatagcttggactataggtgcctgccaccacacctggcaaacttttgtgttttttgtagaaatggggttttaccatgttgcccaggctggtctcgaactcctagactcaagcaatctgccagcctcagcctcccaaagtgctaggattacaggcctgatccaccgtgcccagccccaggatttctttaaatagcaaattcacaaaaatcaaaagttttcaaattcaaaaaccttgctcccatcttatccccatccatgcctttcccatattctctgcaagtagcaacttgtaaacacaagcaaataagaatatatg

SEQ ID NO: 12264 - DNA, 460 bp, Homo sapiens
  misc_feature (1)...(460): n = A,T,C or G
tggggacaantttgagnccctnnncttgtcgtccctagtccgtgtggtggaattcccagtcctcggccctgcagccaggtttctggtcagtggacagtggtggggggccaggctttctcgatatcggggtgcatggcctgtggaagccactcacagtactcagccagcaggtctgcaggggagggaaggaggacagtgtcagggtgaccctgggcccagggactctcctcaggtggcaaaaagctggccagcagccgtggggccagatccttctgccaagccagggctgaccgtgcacaaagcacaaagcccctgcctcagtgaccccatcctgtctactcccaccccctggccctggtcaaactcacatttggggtttttcttccaagcagccagcaaggcttcatggcagtcagccttctctgcaaccagggctcgcagaaggctctccgtacggngc

SEQ ID NO: 12265 - DNA, 465 bp, Homo sapiens
  misc_feature (1)...(465): n = A,T,C or G
cgcgcgggnnnnnnnaatagatagcgtaccnagagacgaggaattctgagtttgtaattttttttcccccttctgggagtggaggtctcaggctcaatccggaaccatgtacgtacagttttgcttattatttgatgtgacatgaactcaaaatcctgcatttttagattccttttagttctaattgaggcctcactagatgctcttcagttctgtgtattttgaggctgggtggagaagtatatgattctgctgttgattctttcagtcttccccccttctccttttatcaatcattccagagttattttctattagtcaaacttttttgtagaaccttctttcccttaccctggcaaattgcttctttacttgctggnttccttacgtttggggcacatgttgtaagaaactgattggaaggggaaatgtgcagctctccactggaaaggaactctccacccn

SEQ ID NO: 12266 - DNA, 452 bp, Homo sapiens
  misc_feature (1)...(452): n = A,T,C or G
atggangacccatagaggacccttagtccagngcggtggaattcaaacaacatttgcacaaacctgatggggagagagaatgtggggtggggatggatgatgagactgaagaagaaagccaggtctagataatcagtggccttgtacaccatgttaaagagtgtagacttgattctgttgtaaacaggaaagcagcacaattcatatgaatattttagaagactcccactggaatatggagaataaagttggagatgactaatcctggaagcagggagaacatttttgaggaagttgcactattttggtgaaaatgatggtcataaacatgaagaattgtaggtgatcatgacctcctctctaattttccagaagggttttggaagatataacataggaacattgacaggactgacgaaaggagatgaaatacaccatataaattgtcacac

SEQ ID NO: 12267 - DNA, 512 bp, Homo sapiens
  misc_feature (1)...(512): n = A,T,C or G
agagcncccnnttttgagacctcgtagaacactagtccagagtggtggaattccgagagtatcacagccaggatgacccttgggtcccattcctaagacatggttactttattttccccttgttaagacataggaagacttaatttttaaacggtcagtgtccagttgaaggcagaacactaatcagatttcaaggcccacaacttggggactagaccaccttatgttgagggaactctgccacctgcgtgcaacccacagctaaagtaaattcaatgacactactgccctgattactccttaggatgtggtcaaaacagcatcaaatgtttcttctcttcctttccccaagacagagtcctgaacctgttaaattaagtcattggattttactctgttctgtttacagtttactatttaaggttttataaatgtaaatatattttgtatatttttctatgagaagcacttcatagggagaagcacttatgacaaggctattttttaaaccg

SEQ ID NO: 12268 - DNA, 484 bp, Homo sapiens
  misc_feature (1)...(484): n = A,T,C or G
agggcccgagactnatcgcaggcgctggaaacggccatcaagttctcagagctctcctatctggacgccttctggggcgactacctgagtggcgccctgctgcaggccctgcggggcgtgttcctgactgatgccctgcgagaggctgtgggccgggaggctgctcgcctgctggtcagtgtggatgaggctgactatgaggctggccggcgccgtctgttgctgatggaggaggaaggggggcggcgcccgacagaggcctcctgatgcaggactggcaggattgatcccacctccaagtctccgggccaccttctgctgggaggacgaccatctctacccctagaggactgtcactctagcatctttgaggactgcgacaggaccgggacagcatgccccttgacagcccctcccacaggatgagggctgtgaggcctacaccatttgcagctgagattgcgtcccagactgctcctacccg

SEQ ID NO: 12269 - DNA, 464 bp, Homo sapiens
  misc_feature (1)...(464): n = A,T,C or G
aggcgccggggggntatagatagagtccctaggccangncgnggaattctgagtttgtaattttatttcccccttctgggagtggaggtctcaggctcaatccggaaccatgtacgtacaggtttgcttattatttgatgtgacatgaactcaaaatcctgcatttttagattccttttagatctaattgaggcctcactagaagctcttcagttctgtgtattttgaggctgggtggagaagaatatgattctgctgttgattctttcagtcttccccccttctccttttatcaatcattccagagttattttctattagtcaaacttttttgtagaaccttctttcccttaccctggcaaattgcttctttacttgctggtttccttacgtttggggcacatgttagaagaaactgattggaaggggaaatgtgcagctctccactggaaaggaactctcca

SEQ ID NO: 12270 - DNA, 484 bp, Homo sapiens
  misc_feature (1)...(484): n = A,T,C or G
ggtgatacccttgcaggttcgaagaccctatgccagagngcnggaattcctacactggagctgaggggacgtgaatgataaaaatagcactctgtggctgagcagctgctccttccattcatggatcattgaggtctctggctgccctgagtgggactttccttgacatcacttggatcccttcatagctcaccaggtcttacttggagccagctatttgaagcctgattaactggaagtggaatttatatctttcatttaaggaatttctaaatacaggaaactcaatgcattttaccatccataagtgtttgacatgcctaaggaaatggagcatgaggttatattatatatcacaaccgtatgggacaagtgctgttctccccattttatgaagcaggaaattgaagctctgaaagggtaatgaataggcccacaaggacacagttggtaaaggaagggcctgaaatttgaacctactgta

SEQ ID NO: 12271 - DNA, 478 bp, Homo sapiens
  misc_feature (1)...(478): n = A,T,C or G
ctcgagtttcatagcccatgnggaggaattcccctgatgctcccaagatagaggacttgaagtggcattctgcattcttcagaaaacaaatgggtacttccttggttcattcgctgaaaaagccccataagcgagatcctttgcagaatagccctggaagtgaaggcaaaaccctgctgaagcagccagacctgtgtggtagaagggaggggatggtggtcccagagagctttttgggtttagaaaagacctttgcagaagcacgtctcatatcagcacaacagaaaaatggtgtggtgatgccagaccatgggaaaagaagagacaatcgttttcattgtgatctcattaaaggagacttaaaggacgaatcttttaaacagagtcacaagcctctcaggtccacagatgtgtcccagaggcatctggacaacacaagagctgccacctcccctggagtggggcagtcagcacctgg

SEQ ID NO: 12272 - DNA, 482 bp, Homo sapiens
  misc_feature (1)...(482): n = A,T,C or G
gaaagtgatacccttgcagngttgatgaaccctattcccacagcccaaaactgttggagagtgcgtagattttgtaatttatagtaaagcaattgggtagtatttatggataaatacttatgaatacttatgaaacaacaatcccagttttaggagcttactgtgtataaatacttgttcaagtaggaaaaatatgtgtataaggattttctctgcaaaagttttcaaataggaaatagctgggagaaaatccagatttcatcatgaaaggaatgagcacacaaacacagggcactgaacattatgcagctgtttagaaacatgagggagctctattattcactttggaaaaaaatgttcataatatggttaagtggaaaaatatgtgcagaataatataataatgtataatagcgctttctgaaataaaacacatgtaggcatatagatgtttgtctaagcatacaaaaaaaaatcttaga

SEQ ID NO: 12273 - DNA, 489 bp, Homo sapiens
  misc_feature (1)...(489): n = A,T,C or G
ggtgaccgatgacccnatcgagagccgtggaanacgggcgacagagccagactacatctcaaaaaacaaaacaaaacaaaaaaccccattaattgtacatttcaaaatagctagaagagaataatttgaatgtttctagtgtaaagaaaagtaatttaggtgatgcatatctcatttaccctgatttcattatatgaatatattattacatataccttgaaaatatgtacctctaatatatatcaataaaattaaaaaaaagtcttaaacagtcccatcatggttcttatcaactgcctcttagacatgtttgttttctctactagactatgaaatccttgaaagcagggattacattttattccttgatttctagatttctgtagctttagtcctatggaaacatattctgaactgaactagaaattatcactaccatcacgcttagacctcatgttaatacagagatggccacagtgtgatggtcan

SEQ ID NO: 12274 - DNA, 473 bp, Homo sapiens
  misc_feature (1)...(473): n = A,T,C or G
ntttgannacttgangactattagtcagtgcggnggaattcggcagagctgcgcctcgacatcaggccctgccatccttgtcccctcacggctgggctctgcacaggtcatcaccatcttcagcctggtggaggtggtcctgcaggcagagtccacagccctcaagtacagcgccatcctgaagcggccaggcacccagggccacctgggccctgagaaggaggaggaggagtctgacggtgagcccgaggactcaagcaccagctgagctccaccagccgcctgccccgcctgccccgcctgcctgtcccgccacactggctttaggacctgttgacacggaggggggtttttaatttggtttttaacaactcaggggtttgtttttatttttatttaatttttgcagctcaacttttaaacaaactgcangggagagggtggggctggaaggaaggctgaggcctggtcan

SEQ ID NO: 12275 - DNA, 477 bp, Homo sapiens
  misc_feature (1)...(477): n = A,T,C or G
agactcgaaaccntcttgagaccctaggacagngcggtggaattctgatttcagaactggaagtgcggctaaagaaggaagagaagagccgactggagctggttaagctgaaacggaagctggagggtgatgccagcgacttccacgagcagatcgctgacctccaggcgcagatcgcagagctcaagatgcagctggccaagaaggaggaggagctgcaggcggccctggccaggcttgacgatgaaatcgctcagaagaacaatgccctgaagaagatccgggagctggagggccacatctcagacctccaggaggacctggactcagagcgggccgccaggaacaaggctgaaaagcagaagcgagacctcggcgaggagctggaggccctaaagacagagctggaagacacactggacagcacagccactcagcaggagctcatggccaagagggagcaggaggtgacggtgg

SEQ ID NO: 12276 - DNA, 463 bp, Homo sapiens
  misc_feature (1)...(463): n = A,T,C or G
ngcggatttaactgagaccctagactgagcccgtagaacgaccacagcggggaggacctggccgtcaacatcatcttccccgagaagatcgacatgaccaccttcagcaaggaggccggcgacgaggagatctaagcagcgttcccacagccccctctagattcttggagttccgcagagcttactatacgcggtctgtcctaatctttgtggtgttcgctatctcttgtgtcaaatctggtgaacgctacgcttacatatattgtctttgtgctgctgtgtgacaaacgcaatgcaaaaacaatcctctttctctctcttaatgcatgatacagaataataataagaatttcatctttaaaaaaaaaaaaaaaaaaaaaaaggggggccgttcaagtttaaagggcccgttaaaccccggtgaccaccctggacggggccttttagtggccacccttctgtn

SEQ ID NO: 12277 - DNA, 471 bp, Homo sapiens
  misc_feature (1)...(471): n = A,T,C or G
nttcgtagaccctagtccagtcgagggcattccccggctcgagcggcctctcggtcctgtaccacgtgagtataccagagtatagctgactgctcacctgccccatccacctggcctagatctggcaggagtgggggtgtggagtggtgcagccagagaggaaaacatgcagctgaggagagagcgagctttgcaagatggtggtgaatgttcactcaacaggagtcatggctgtgggcaccagtaatgtgctgggacaggtacccaaaccagactctgaagccatccctgtactggtggtacctcttggagctgggtttctacctctcactgctaatcaggctgccctttgatgtcaagcgcaaggatttcaaggagcaggtgatacaccacttcgtggcggtcatcctgatgaccttctcctacagtgccaacctgctgcgcattggctctctggtgctgctgttacat

SEQ ID NO: 12278 - DNA, 489 bp, Homo sapiens
  misc_feature (1)...(489): n = A,T,C or G
gcaccccaattgtagaccattagnccagttggatgacccttagcccagtgcggcggaattccttgcataaggactatgctggcagagaaaaaggcagttttcctgaggtcaaaggaggtgtttcaggcactcctggctccagacagtccctttctggcagagagggccagaaggagagctcagcagcgcagggccacctttctgcagccatcatcacaagtaagggcgagtgcttttgaaacctcaaatgcatccagctccaggaaggggataagtggctagctaaaagaaaaagtctttcaggtttcagtcacattgctggttacctcagcaaaatgttcccagaacacccactcaggtccctgtgtgtcatagtaatgatgcatctagtgactggtggtggcagaattctaagtagacccagctcttaagaaagcagtgttattccccttacctgtagnttgtctttattacttttaaatttttctn

SEQ ID NO: 12279 - DNA, 524 bp, Homo sapiens
  misc_feature (1)...(524): n = A,T,C or G
ttcagctgcttcaagatgaagctgaacatctccttcccagccactggctgccagaaactcattgaagtggacgatgaacgcaaacttcgtactttctatgagaagcgtatggccacagaagttgctgctgacgctctgggtgaagaatggaagggttatgtggtccgaatcagtggtgggaacgacaaacaaggtttccccatgaagcagggtgtcttgacccatggccgtgtccgcctgctactgagtaaggggcattcctgttacagaccaaggagaactggagaaagaaagagaaaatcagttcgtggttgcattgtggatgcaaatctgagcgttctcaacttggttattgtaaaaaaaggagagaaggatattcctggactgactgatactacagtgcctcgccgcctgggccccaaaagagctagcagaatccgcanacttttcaatctctctaaagaagatgatgtccgccagtatgttgtaagaaagcccttacatatagaaggtaggacaccttn

SEQ ID NO: 12280 - DNA, 525 bp, Homo sapiens
taagtgcggtggaattccggccgctcttttttttcctaggtctttatataaccttacaatactgggggccattaatttaactttaggctttggggcatatgctagcttgagcttccgaaaagatacatatatgtttcccttttcattagctgaatgaggatattttaagaagttgaaagagaatttattttcaaggtgggagtaaatcctcctttgaaattcacctggttattaaataacttaaagtttatttttaaaagctgacaactttttatgaatcttcgagtggacagttcctaaaagcgtaactcaaatattaatgggctgtgaattaaatggttttattttcagttttgcagcacagaacactgttgaaatatccatatcaacttgatttttttaacctaattcaggtgtcctttgcatatcttaaatgttgggggcgggggtcagagccagatatccggcttctgttttggcgattgcttacatctgatcctggtgcaaaactgctccccccaaatg

SEQ ID NO: 12281 - DNA, 486 bp, Homo sapiens
  misc_feature (1)...(486): n = A,T,C or G
aaaaaataggtaccttcgcangtcctagatccttcgccangngcgggaattcctgtcttgcttttcatatccttttaaagctatcacatctgactgtcatgacattctgttttctccttagcttttttactttgctgctactatgtggggcgtgaagcaagacgatgacacagttctgaccaggttaaataagtagactgaaaagtcttcttttctaggaataaaagacgtggattcggtgttacacttcattcagtgtgaatatctgtgcctcatttgggccttgttaataaaataaattgtgattacaaaattacgaatgagggtattttataatttctaggaccctgcctttcttaatcaagttaaattttcatgattgaacagattttcaggtactgagtcagttttaaactaaacttattagtaattcagttcatatacagagaaaccaggaaggtgcatgtacatgtgaatagagccagg

SEQ ID NO: 12282 - DNA, 474 bp, Homo sapiens
  misc_feature (1)...(474): n = A,T,C or G
catcgatatgacctacgccagngacgngcaattcgtccagttaatgaatctggacccctagaatgaaaatgagatgagaaaccgaaatctgcagctcccctcagttggtgtcattcctcttgtgtttctggtttagaaatattcttggtcaaaccaaatcattcatttagtgtgtgtcctgaagaaaagcagtctatcccagcagtaaaggaaaaaatagctttgttggacttgctgagaaatttaaaaatactgtacttttataggtgatttgggagcctcttaaaggtaattttcattatatgtgattttcttgtcttgggtgctcacttgggtactcacttaagacgtgactccactctacttgggtgccaagaatttaaactcatgcctttggtcttactttttaattaatcaaatggcaacaaataacatctttcttgaaagtaaaattttttgtcatatagttctttt

SEQ ID NO: 12283 - DNA, 537 bp, Homo sapiens
  misc_feature (1)...(537): n = A,T,C or G
accaccactacgacttgatcacgtagcacttgagattaactttgttagtccttatgcactacttgtaggtaacaacctcacttatctaccncacccannttttatttgcagtcccttagnacangcggnggaattctgtagatcttttccttgccatgtcacctcccttggcctttgatcctggaaaggtttcagagcctccactgagccaggcccagagctccttgcagtgccttcttccttgtttacctgtgggaggaaacactttttttgtcaggggcagcctggttcagagctcagaggtcacactgtatcaaagatctcaaacagcaaagtcagcatttgctgtatagagctgccacccaactctaagcaggagaaactgtacagaaagggctttgctatttttcccttttgggaaaacaatgaagtgttttaagtcctgggtggactgagagatggtttgcctgtccagacttgctctcaagcctcatccagagaaggagctgcagatgagggagcccgtacactccctgg

SEQ ID NO: 12284 - DNA, 469 bp, Homo sapiens
  misc_feature (1)...(469): n = A,T,C or G
attgagacactagnccgttgagggcattcgaaggatcgcaggcgagattacgaggcgaggctcgcgcgcccgcccccgccctggcccccagtgcccacccggtcggcccggcacagccatgatcaaggcgatcctaatcttcaacaaccacgggaagccgcggctctccaagttctaccagccctacagtgaagatacacaacagcaaatcatcagggagactttccatttggtatctaagagagatgaaaatgtttgtaatttcctagaaggaggattattaattggaggatctgacaacaaactgatttatagacatcatgcaacgttatattttgtcttctgtgtggattcttcagaaagtgaacttggcattttagatctaattcaagtatttgtggaaacattagacaaatgttttgaaaatgtctgtgagctggatttgattttccatgtagacaatgttcan

SEQ ID NO: 12285 - DNA, 485 bp, Homo sapiens
  misc_feature (1)...(485): n = A,T,C or G
gctcaatgaccaggnagnnccnaattgaaaacctcattcgagaccataggacagngcggnggaattcctttgtttttcattctcagaattttttttagctatttggttccatataaacttttatggttccatataaactttgggatttttttcctatttctgtgaagagtgtcatttggattttggaccctttatttttaaaactattttaaagaagtaggtaatttagatgcttgggaaatccgaattagagtatccttcaaaagaaatagacaggaatgactttttgaattagaattctttgttttcagggtttgatttataattgaaacataagagtttctttctctacatcagggttttactacccttgacgctgttgacattttggtctaggtaattctttgttgtggaggatgtcctatatgccattatgggataaatagaagcatcactggcctctacccactagatgccagtagtac

SEQ ID NO: 12286 - DNA, 408 bp, Homo sapiens
ctttcgagttcgattacaccagagcggaggaattcaccagcctgaccaacatggtgaaaccccatctctactaaaaatacaaaaattagccaggcgtggtggcatgcgcctgtaatgccagctactcaggaggctgaggcaggagaattgcttgaatccagcaggtggaggttgcagtgagccgagattgcgccacggcactccagcctgggcgatagagcgagactgtcttaaaaaaaaaataaaaaaaataaaaggacacaaataaatggaaagatattccatgtccatggattagaaaaattaatgttgctgacatgtctaaaccatccaaagtgatctacaaattcaatgcaatccctttcaaaattccaatgtcattttccatagaaaaaaaaaaaaaaaaaa

SEQ ID NO: 12287 - DNA, 550 bp, Homo sapiens
  misc_feature (1)...(550): n = A,T,C or G
gtgctagccgctactgtttcgcgtgttagattcaaatcctccatctacttctatgtcgagtaattaacnaaaaanaaagggttcgaagacacttgtacaaccctnggaannccctttcctttatccgtcgccatccatggcaggccgagcctgcgggggctacttcgccttcagcccgatgaatatggagcccgcaatgcctgctggcccaaaactagcagagccgttcgagccaaggacgcagggttgaattctgtcactttccctgccatcgttttaggagcggctccgggcacttgcccggagtgctcagaagcacgggcaggaggctgcagcgggggcagatggggtgaatggagggttctgaggcaggggggtccgggccttttcctggtcccggggacttgagacttgctcggtgctaggaaaccttagtcggttgctccgcttaaggaaggtgccagcctttagacagcttccgaataggatgctggacgtcgcataaccacgtgtttcctgttaactgagcaattaagttctggttcttcgg

SEQ ID NO: 12288 - DNA, 475 bp, Homo sapiens
  misc_feature (1)...(475): n = A,T,C or G
nattgatagacgtccctacgaagnngcgnggaattcggggataacaagttttggaagagaaatgcaggccatatgtgcgcatgaccgagattttgaaaaaagatgtacatagtgacatgtttggtgcatggtttttgaggagggcttttgtcaaaaaggaggtataacctttcccccacagacctgagagctgtgccttttctatgcaatattacagacgttacatcggaacccagatggctgtattcacatgtaggtttgggctgtaatctaaacaattggacagattaaatgtacatggaaatgagcagtcttacttttgtagttttatattatacaataaacagttaanngatgaanaaaaaaaaaaaaaaaaaattaaaatccancgtttggaattaaaagaggaaccaaaaaaacggggtgccccccccgaagtgggtgcttgcgttcccctctctattttgtgccctcg

SEQ ID NO: 12289 - DNA, 481 bp, Homo sapiens
  misc_feature (1)...(481): n = A,T,C or G
nttttaaatcgtagaccacttggacagtctggtggaattccctgttcccactagccagactccttttccctaattaggactccacagtaaatccaaatatattctgaaggctatctatgttacaggttttcttaccacacctgacagaaagaaaaacaaagaaaaggtataaaataacttacagggccgggtgcggtggctcgagcctgtaatcctagcattttgggaggccggggcacgcggatcaccaggtcaggagttaaagactagactggccaatatggtgaaatcccgtctctactgaaaagacaaaaaaaacttagctgggagtaatggcttatggctgtgatcccagctactcgggaggcagaggcaggggaattgctggaacccgggagaaggaggatgcagtggggcaagatcgtgctactgcactgcagcctgggtgacagactgagactccgtctcaaaaaataataaa

SEQ ID NO: 12290 - DNA, 490 bp, Homo sapiens
  misc_feature (1)...(490): n = A,T,C or G
agggcccccnnattgacgaccactagtgagagccgtggaattctttgtttgaaacctgaacatgaaatataacgagacaaacttatgataaagtatttggcttgtagatcaggtgttttgttttgttattttaatcttaaaatgcggccctgccccctccccagcaaagacacagctccatttcaagaaagggtggagtcaatatgctctggatggcaggcaaccctgtagtcatggagaaaggtatttcaagatctagtccaatctttttctagagaaaaagataatctgaagctcacaaagatgaagtgacttcctcaaaatcacatggttcaggacagaaacaagattaaaacctggatccacagactgtgcgcctcagaaggaataatcggtaaattaagaattgctactcgaaggtgccagaatgacacaaaggacagaattcctttcccaggtgttaccctagcaaggctagggagggcatgan

SEQ ID NO: 12291 - DNA, 393 bp, Homo sapiens
actctgcccgggtcgggcgactctggccctggcacggcttctctcggcccgggcgttgcggagactgggacgaggcggctcagcgagctgcgggtgatcgatctgcgggcggagctgaagaagcggaacctggacacgggcggcaacaagagcgtcctgatggagcggctcaagaaggcggttaaagaagaggggcaagatcctgatgaaattggcatcgagttagaagccaccagcaagaagtcagccaagagatgtgttaaaggactgaagatggaggaggaaggcacagaagataatggcctggaagacgattccagagacgggcaggaggacatggaagcaagtctggagaacccgcagaatatgggcatgatggacatgagtgtgcta

SEQ ID NO: 12292 - DNA, 478 bp, Homo sapiens
  misc_feature (1)...(478): n = A,T,C or G
ccccctttgagaccttttgagaccctaggcagngcggnggaattccctgttaccactagccagactccttttctctaattaggactccacagtttatccaaatatattctgaaggctatctatgttacaggttttcttaccacacctgacagaaagaaaaacaaagaaaaggtataaaataacttacagggccgggtgcggtggctcgagcctgtaatcctagcattttgggaggccggggcacgcggatcaccaggtcaggagttaaagactagactggccaatatggtgaaatcccgtctctactgaaaagacaaaaaaaacttacctgggagtaatggcttatggctgtgatcccagctactcgggaggcagaggcaggtgaattgctggaacccgggagaaggaggatgcagtggggcaagatcgtgctactgcactgcagcctgggtgacagactgagactgcgtctcanaaa

SEQ ID NO: 12293 - DNA, 479 bp, Homo sapiens
  misc_feature (1)...(479): n = A,T,C or G
nnnnnaatcgagatcccttgtccagtctggtggaattccatttggcgtgttaagtatgaaatatagtgcagacttttatcttggttttaagtggggctcaataaaaaacaccagccacttttgtaataatggcatcacagtgtcatcatgtatgcaagcaataaaactctttagggtatggttttatactgaaaatttaatatgaaggccccttcccacaagaatatagataattattaactttctagatgtgatacggtaattcgaattgcagagtataaggaagggaaatgggaaggggcatcattccttggattttaaataactatcaagaacatttttactttaacaaagaaaatggatagaaaaagcacattttgttttccctgaagtttaatttgacatcaggtttgtgtacttatcttcactaggtgacttaacttaccccaatttttttaaaaattattaaactttttaca

SEQ ID NO: 12294 - DNA, 456 bp, Homo sapiens
  misc_feature (1)...(456): n = A,T,C or G
aggggnctnnncctgatnccgtcttcnctncnnnnnnnnnnacctccacttgcctgcaggacccccatcctgacctgggccctctctcctcacctgtgggccccatcctatcttggatcccctcctgacctgggggccccttcctctgatccgagcctccctcctccccattctgggcccctaattctgactcaccatccccaattccttacccaggacccccgttcttatccggggttggccctgacctctctctacccacagaacacgaccctggacctcctagaccgggggctgcaggtccatgtggtggtggacgcctgctcctcacgcagccaggtggaccggctggtggctctggcccgcatgagacagagtggtgccttcctctccaccagcgaagggctcattctgcagcttgtgggcgatgccgtccacccncagttcaaggagatc

SEQ ID NO: 12295 - DNA, 450 bp, Homo sapiens
  misc_feature (1)...(450): n = A,T,C or G
gggcgcggggacccctaggacctcgattgtcgctccgaangcacngggcctagagggctgaacctancagcaaacacaaataagcaaaagaggaatttctccggcctcttataaagtgcactgctgtaggcatcgtgatgtgggccgtacagctctgaggccatgtgtcagaagacaagactttggctagagcccacctttctgttgcctgtgaacttctccaaacagagtggttcccagctctacggtaccctcgtcttcacagctggggctgttagaggaactagagaagctgttttaaaatttattcaaagtagtggctgggcacagtggctcacgcctgtaatcccggcactttgggaggccgaggcgggtggatcatctgaggtcaggagtttgagaccagcctgggcaacaaatagtgaaaccctgtctctactaaaaaataca

SEQ ID NO: 12296 - DNA, 468 bp, Homo sapiens
  misc_feature (1)...(468): n = A,T,C or G
gcgcggggnatnccaatgagacctctggctagncagccnncgnacagngcggnggaattcacagcttgatcaaggaaatcaaaaggattttataaaggcccaagacttaagtaacttagaaaacactgtcgctgccttaaagagtgagtttcagaagacacttaatgacaagacagaaaaccagaagtcactggaggagaatctggcgacagccaagcacgatctactcagggttcaggagcagctgcacatggctgaaaaggaattagaaaagaaatttcagcaaacagcagcttatcgaaacacgaaagagattcttaccaagaagaatgaccaaatcaaagatctgaggaaaagactggcacaatatgaacctgaagattaaaactgaagatttcctctggaagctaccacatgcaaacatacaagcagtctcacctcaggcatgtattttgaaaagcattttgt

SEQ ID NO: 12297 - DNA, 477 bp, Homo sapiens
  misc_feature (1)...(477): n = A,T,C or G
ttccaattgagacccctggaagncctaggaagngnggnggaantcccacgactttggaaggctgaggcgggcagatcacgaggtcaggagatcgagaccatcctggctaacgtggtgaaaccccgtctctactaaaaaaatacaaaaaaattagccgggcgtggtggcgggcgcttgtagtcccagctactctggaggctgaggcaggagaatggcgtgaacccgggaggcggagcttgcagtgagccgagatcgtgccactgcactctagcctgggtgacagagcgagactccgtccccaaaaaaaaaattctgagaatatggtgtgttccagcctcttcaaagctctgctcttctgcacacgttttttgaaggccttaaaaaggccaccagtgtgaccagggagcaccctctgcctccctccctgcactgggaccataaacataaacagctctaccagcaaagtgacccatcccg

SEQ ID NO: 12298 - DNA, 459 bp, Homo sapiens
  misc_feature (1)...(459): n = A,T,C or G
agggccctnnncctaatccctanntcactacannnncnnnnagtccagaaagactgtgatccatcaccttttgcatgtgataacacattaactttttttccaggatatgctgcaggctgctagtcgtgatcgccaaaatagaaactctttgtatagaagagaagaatcactagaaaaagaacctgaatatgttccatggacggcaacaagtggtcctggtggcatccgaacggtaataatacgccagcatgagattgtcctgaaggtggcttatccacaggcagacagcaacctccgaaacatcgtgaccgagcagctggtagccctgatcgattgcttcctggatggttatgtttctcagcttaagtctgtggataaatccagtaatcgggaaagatatgacaatctggagatggaatacctacagaaaagatcagatctcttatctcctcttctttn

SEQ ID NO: 12299 - DNA, 473 bp, Homo sapiens
  misc_feature (1)...(473): n = A,T,C or G
cgcatgccattgagcccctnnatcgtagactctaggccanngcgtggaattcctttgttttattttcatgtggttattagttggatctagcaaaagaaaagagggacaaaaataactagtggcaaagcactttcttggcctgtgtgacattaggtttgtagtcacagccagtatttcagatgcttgctgctgctagcattgtatttgacacagatctgaaggccacataaaatgctctttatttttacctggtacaattatcttctaaccacatttctgcgtatcatagatataatctcttccatgtagtaatagggcatttttcagcgctctgatgtttctgtgtctttcttgtaataaagtgtatctgtcattagtaattattatctattcttccagtaggatgcagttgggaggttattttctctcattcggntatcgtgcacttttactttaaatccagtttctcttga

SEQ ID NO: 12300 - DNA, 491 bp, Homo sapiens
  misc_feature (1)...(491): n = A,T,C or G
agcnnagtgcnnnnaattggannnccntaatcgatgaccactagtccagngncgnggaattcataagagataacagagtcaaatacaacctcttggctactctgagcgagatgagaagccattgggggcttttcaagtaaggaatgatatgaattcacattttaactgcgttactttggctaccttgttgagataagaaaagactacgatgaggcaaatgtgtaagaaagaaaactctttacgaggtcattgcaataatccagacaacaatggatggtggcttggagagagtggtagcagtggaggtaataagaagtagtcagattttttggatgtatgttgaagataaaggcaacagaatttgctcactgattggatatgaggtatgagacaaataggagtcaaggataattctaagtttttgtcctaagcaactaagaggatgtcattagcattaactaagatggggatagtctataggaagagcaaga

SEQ ID NO: 12301 - DNA, 444 bp, Homo sapiens
  misc_feature (1)...(444): n = A,T,C or G
cttgacatcgagaccctagcacagngcggtggaattcgctttgaccttggagctttgtacagcttgagaaaacattagaacaaattttattatttgccggtgcctcaacaaatggaaatacaatccaatgaaagtacttcacctgcaagatgcacaataattttcaactctgtgcagaagaatatttatttttggttttaatttatcatggttttttgttgttttcgttttgaacttatccttcctcccacaaaaaaagaaaagaagaaaaaattccaagcagcaaaacttactttgtttgtaaggtattcatttaggtttgaaaatactatttaataagggcagaagggctatatatgatttggctattatttctagacactccatccacatgattccactaacaaggattaccaggaataaaggtaggtatgcaaaatgtat

SEQ ID NO: 12302 - DNA, 491 bp, Homo sapiens
  misc_feature (1)...(491): n = A,T,C or G
gggcggggncgggnnnnntnnttctgagatcatatccgtctggtggaattcaaattacaagtaatcaagggtcattatgggttaggcattaatgtttctatctgattttgtgcaaaagcttcaaattaaaacagctgcattagaaaaagaggcgcttctcccctcccctacacctaaaggtgtatttaaactatcttgtgtgattaacttatttagagatgctgtaacttaaaataggggatatttaaggtagcttcagctagcttttaggaaaatcactttgtctaactcagaattatttttaaaaagaaatctggtcttgttagaaaacaaaattttattttgtgctcatttaagtttcaaacttactattttgacagttattttgataacaatgacactagaaaacttgactccatttcatcattgtttctgcatgaatatcatacaaatcagttagttnttaggtcaagggcttactatttctgggg

SEQ ID NO: 12303 - DNA, 477 bp, Homo sapiens
  misc_feature (1)...(477): n = A,T,C or G
ntttgatagacgtccatacgacagngccgnggaantcggtgaaaccccatctcttccaaaaaataaaaaaactagacggacacagtgactcacgtcggtagtcccagctactcgggaggcggaggttgcagtgaacccagatcgcaccactgcactccatcctgggcggtgagattctgtcaaaaaaaaaaaaaaaaggtcccaaaggaaaaacaaaaaccttaaatggcccagtttttttaacaaacccacccggggcccttttttattatataacaaaccagactttttaaaaacccaggggaaaaggggaccttcaaaacccacaaaattttttcattttttgaaaggcaacccctaccaatataccggcggcccagccttcaaaaaagtttaaaaccccatattttttgcttaaaaggggccaaccttctccctaattccccaaaaaagcaaagaaaggtatatatgtgtgtt

SEQ ID NO: 12304 - DNA, 450 bp, Homo sapiens
  misc_feature (1)...(450): n = A,T,C or G
aactgagaccctttgacagacntgtggaattcccagctgggattacaggcacctgccaccacgtccatctaatttttgtatttttagtagagaaggggtttcaccatgttgcccaggctggtctcgaactcctgacctcaagtgatccacccacctcagcctcccaaagtgctgggattaccggcgtgagccaccacacctggcctcatctgtcttctcttccagagcccaaagtctttaatggtggcttgggcaggaagctgccagtcagttcagcccagcctctcttccccacagccggtaaggggtctgcggggtcagtgcggggcgggcttcccaggtgtgtgaccgtacagtcacacaagtccccacactccgaagcgccctgtcttttaaagttctgctgtctctgtcttgaaattcttaatgccttcgagcatactgtcctgt

SEQ ID NO: 12305 - DNA, 448 bp, Homo sapiens
  misc_feature (1)...(448): n = A,T,C or G
nctaatnttcatcgnacnnnncnnnnnnnnnnnaagctgagcgtgaacgtggtatcaccattgatatctccttgtggaaatttgagaccagcaagtactatgtgactatcattgatgccccaggacacagagactttatcaaaaacatgattacagggacatctcaggctgactgtgctgtcctgattgttgctgctggtgttggtgaatttgaagctggtatctccaagaatgggcagacccgagagcatgcccttctggcttacacactgggtgtgaaacaactaattgtcggtgttaacaaaatggattccactgagccaccctacagccagaagagatatgaggaaattgttaaggaagtcagcacttacattaagaaaattggctacaaccccgacacagtagcatttgtgccaatttctggttggaatggtgacaacatgct

SEQ ID NO: 12306 - DNA, 452 bp, Homo sapiens
  misc_feature (1)...(452): n = A,T,C or G
acccttaatgaaaaccatctactganacgtcacgaagngncgcggaannctnggacggnagcgctgagaattttcatttgaagatctcgtcttaactttcccaagtgtattcagaggcggcgttttccctgcgagagtgcgctggaacaaagcaaggatagcgtgggttaaacatacctgaaatgaaagcgtcttactttatctaggtacatatttgcgtcagtaaggcgcaacgccatttctctcttggaattcagaagtgaaatatggtgactgggacgcctgtacattgctttgacttaaaaattgaagtccattattctgaccgaaagttaatctgatgattaattggttaaacatactatcgttgctaattagcataattattatttacaataaagtgagctaaatagctacaactaaaatatatttaaattactgtgatattgtga

SEQ ID NO: 12307 - DNA, 450 bp, Homo sapiens
  misc_feature (1)...(450): n = A,T,C or G
nctgatttcgtcgaccctncnnnnnnnnnnnnattcgttctctcactgcccagtgagctagcccaggcaaggaaggacatgccccatatacaaacacttcttaggactctgtttgcatcacatttgctagtgtccctttggcaaagtgagcccatggctaagcccagaatgaggaagtacaatacatcctctgagtatctcagtgagctggatactgaggcttccagagtctcatagacacagaaagtcatgattccctgggggccataattgcaaagtttattaatatattatcctatatgtattaatcctgtaggtcctaaggaaataattcaaatttggggaagggaacaaagctctatgcataagattttcatcagtagcaaaatatgcaaaccactaagatgtccatccattggagaatggacacatggaagacggtgcatccat

SEQ ID NO: 12308 - DNA, 476 bp, Homo sapiens
  misc_feature (1)...(476): n = A,T,C or G
ntttacatcgagacctatggaagtcgggtggaattcggttccctgggtctgaaaccctgaccccagtgaccctgaaggtgccatggcaagacagacagctcctcccaggctgggtttggggcaaagtggttgctattgggcaccctgatggaaggggagagacgggtcctggagtgaggtgggaggccaagtagaaacatggagggggtcccggtgtccccagaatccagatgtctgtctgtctctccacctgtgcataggtgtcctctgcctgtgtggcctggatggtgatctagccaagggtgcatgtggccacgtgaccatcaggcacatccggtgttcataagggtcccttgtgtgctggtgtttgtgttttgcagagggggtggtcatgctgggggaggtagggctgcaagaaggagtagttgtctgtgtgcacacatggagctgtttgcatcttttgtgcacctgcagtn

SEQ ID NO: 12309 - DNA, 485 bp, Homo sapiens
  misc_feature (1)...(485): n = A,T,C or G
ggacggcccgngtttgagaccaattgatgaccctggccanngcgaggaantctgctgagatgaccctgtcgccacttctgctgttcctgccaccgctgctgatgctgctggacgtccccacggcggcggtgcaggcgtcccgtctgcaagcgttagacttctttgggaatgggccaccagttaactacaagacaggcaatctatacctgcggcggcccctgaagaagtccaatgcaccgcttgtcaatgtgaccctctactatgaagcactgtgcggtggctgccgagccttactgattcgggagctcttcccaacatggctgttggacatggagatcctcaatgtcacgctggtgccctacggaaacgcacaggaacaaaatgtcagtggcaggtgggagttcaagtgccagcatggagaagaggagtgcaaattcaacaaggtggaggcctgcgtgttggatgaacttgacatggagctagcn

SEQ ID NO: 12310 - DNA, 453 bp, Homo sapiens
  misc_feature (1)...(453): n = A,T,C or G
catagacnccccactgatgacatctggacangcggnggaattccttgcatacttggcctcacacacccatctgctcactcaccctggcacattcagcccccctaacccaccttgaacattgaccaccacacactccctggcacgctcttctcaccctcaacttctgccacctctccctgggcaatactgccagcctttccctaatctcagagctgcagccctgccctgtcactcacctcaaacctgccatgtccctggggctactgaaattccaggcagtgggtgaagaggacgaggaggatgaggagggggagagcctggactctgtgaaggcactgacagccaagctgcagctgcagactcggcggccctcatatctggagtggacagcccaggtccagagccaggcctggcgcagggcccaagccaaacctggaccagggggacctggng

SEQ ID NO: 12311 - DNA, 453 bp, Homo sapiens
  misc_feature (1)...(453): n = A,T,C or G
nttagattttagtcgnccnntacnnnnnnnnnnnnattccagctatgagtcccttcgtgtgacgtctgcgcagaaacatgttctgcatgtccagctcaaccggcccaacaagaggaatgcgatgaacaaggtcttctggagagagatggtagagtgcttcaacaagatttcgagagacgctgactgtcgggcggtggtgatctctggtgcaggaaaaatgttcactgcaggtattgacctgatggacatggcttcggacatcctgcagcccaaaggagatgatgtggcccggatcagctggtacctccgtgacatcatcactcgataccaggagaccttcaacgtcatcgagaggtgccccaagcccgtgattgctgccgtccatgggggctgcattggcggaggtgtggaccttgtcaccgcctgtgacatccggtactgtgcccaggatgg

SEQ ID NO: 12312 - DNA, 484 bp, Homo sapiens
  misc_feature (1)...(484): n = A,T,C or G
cgatggagccgaccnnnnaaattgagacttgagacctagcacagngcggnggaattccgaacctaaaaccattttcagccttttagatatgtcatgtgctgctgcttcccgaagtggtcttgctttctgtttcgtaagatgtcttgtttacacactgtatcagggatttggtgatacttgaaaattcctttggagaaaaaaacaaatttaattgccacactgcctgtcccacatgagggctgttaatttggaacccaagtttgaacccaacttgtgatggacccgcaggtaaccacagagcttcctttttgaaggcatatggttggagagaaccattttcccagctctcggttccggaagattccacgtcttggaggctgtgttcaccactagaactttaataactacccagggagggagaagctcgttgaaaggaagacaaagatttaaacagttcccacctctctccccacatacttacagg

SEQ ID NO: 12313 - DNA, 448 bp, Homo sapiens
  misc_feature (1)...(448): n = A,T,C or G
ntagatntcatnancnnnncnnnnnnnnnnnnatacaaaagctctttgttgtggatcatgtaattaaaatcacgagaattgaagtgggagatgtaaacccttcagaaacacagtatatttctgagcccaaactctgtccagaatgcagagaaggcttattgtgtcagcagcagagggacctgcgtgaatacactcaagccaccatctatgtccataaagttgtggataataaaaagatgatgaaggattcggctccggaactgaatgtgagtagttctgaaacagaggaggacaaggaagaagctaaaccagatggagaaaaagatccagattttaatcaaagcaatggtggaacaaagcggcaaaagatatcccatcaaaattatatagcctatcanaagcaagttattcgccgaagtatgcgacatagaanagttcgtggtgagan

SEQ ID NO: 12314 - DNA, 447 bp, Homo sapiens
  misc_feature (1)...(447): n = A,T,C or G
natcgagttcgattacccangcggnggaattcctcctaataacaaagctttctcccagacagtagaaaggatgaaccacataagcctttatcaattacacaaagcacagcagcttcatcaatgggacaaaacccttctgtacagtttctatgtacaagatgaatagggccagctctaagaccaaggtcacatggggatgtcttgcaggtttgttttctatgttcacagcatttgaatctttttctctactcagcaccacccttcctcagccacaaccactcccaccccaaacacacacacccagaggcaccctgtgggagtccctcttaagctctccccactggctcattcgctactgatgacatgtggacccagacactttcatcactctcaaccagtcttttatgtgtgagtcagataggctcttacctttcctaaagaaatttc

SEQ ID NO: 12315 - DNA, 455 bp, Homo sapiens
  misc_feature (1)...(455): n = A,T,C or G
ntttcgagtacactagcccagngcggnggaattcagcaggcaaactctcagtcaactcctgagccttcaccatcacagacatttcccgagtctgtggtagccgagaagcagtattttattgaaaaattaacggcgacaatctggaagaacctttctaatccagaaatgacttctggatctgataaaattaattatacatatatgttaactcgttgtattcaggcgtgtaagacaaatcctgagtatatatatgctcctttaaaggaaattcctcctgccgacatccccaaaaataaaaaacttctaactgatggctatgcttgtgaagttagatgccaaaatatctacttaactacaggttatgctggcagcaagaatgggtccagggatcgagctacagagctagctgtaaaactcttgcagaaacgtattgaagttagagttgtccggcggan

SEQ ID NO: 12316 - DNA, 480 bp, Homo sapiens
ccgcccccccccccccattgtagaccaatggacgtcccttagtacagtctggaggaattcgttcatatagatatgaaattgcttgactttattgttttggggagattttttttccttacatgattatattaaacactttaaaatagccttccggtttctggattttgagaagcctgatctgttattgttgtggttgttggtgtttgtaatattcattattgtttgtatatacacggtttagtcttactgatttcaaatgcattttgttattgctcaacccaactggtaacactgtttgctgggagcattatacttaactttgattcaccatggttgatgccactgccatgatcgctgggtcttaaagagctttccctagccactgacagccccgtggagatcataatcagggccccaggctggttccaggatcaggcagcctatagagtgtgagcatctatgtgtagctacccttgttgg

SEQ ID NO: 12317 - DNA, 462 bp, Homo sapiens
  misc_feature (1)...(462): n = A,T,C or G
atttgaagagccattagnnnnttttgtagacccactatcagtgtggtggaattcgtttgcaaggggactgtttaaaaaaagtggcttatacagcatgtgcttgcaacttaaatataagttgggtatgtgtagtctttgctataccactgactgtattgaaaaccaaagtattaagaggggaaacgcccctgtttatatctgtaggggtattttacattcaaaaatgtatgtttttttttcttttcaaaattaaagtatttgggactgaattgcactaagatataacctgcaagcatataatacaaaaaaaaattgcaaaactgtttagaacgctaataaaatttatgcagttataaaaatggcattactgcacagttttaagatgatgcagatttttttacagttgtattgtggtgcagaactggattttctgtaacttaaaaaaaaatccacagttttaag

SEQ ID NO: 12318 - DNA, 455 bp, Homo sapiens
ggttcgatgatcactagtccagggcggtggaagtccctacttaaatgaatgataaaaacacctgtaaagtgataggacctctactttttctcatgtccaatgttcagtttcttataaaccaggcatgaagagaaacaaaaagtaattaattctccagatcatgaagttgtcttcaacctaagcacagaggtataataattacatttctcagaagttccccctctgttttgagtctcaagggcaattgagatgtcagtgaggctgtgattaaatgtattggatattagaggattttaaatacaaacaagtattataggtgttaccactgaccccgaaggtaagatttactgtgaaaatttataatgcaaggaagaatgatcaagttggctgtcagaacaacaaaatattacaaaccaggatgtctaagagcagaagtccgtggttgccacctctca

SEQ ID NO: 12319 - DNA, 481 bp, Homo sapiens
  misc_feature (1)...(481): n = A,T,C or G
agagtgccannannaagnnnaagctgatgaccntcngaaanactcgagatcctcggacangcggnggaantctggattgcaaaaaccatgggaaaagcgtagtacccagcctgggtagcacagtttgttcctcacagcttctcttggctgggggagggaggccccccagctgcttgcacttcctgggtgagtgacgccccatcctatttctgctggctgtccgtgcgttgcacccactgcctaaccagtcccagtgagatgaactgggtacctcagttagaaatgcagaaatcactcacgttctgcattggtctcgctgggagctacagactggagctgtttctattcagctctcttggcccctcccaaattttgacctcttatctttattgactttgacttaaagtgttactatataaaattttcttgaactgcgttttataccataccaaaatattttgctatgctatacagaggtttt

SEQ ID NO: 12320 - DNA, 493 bp, Homo sapiens
  misc_feature (1)...(493): n = A,T,C or G
ggtntggacgggcgcgccggnnnnaatggagaactgagacgctagcccangcggnggaattcggaagaggctgcatggcgcggtagtcccccgagtggaggtcggctgcccctgggaaaccagagagtcggagggagtccatctggagcggccaacttctcctcttaagaacaatgatgaaggctcactggacatatacgctgggttggacagtgctgtttctgacagcgcttccaaatcctgtgtaccatcaagaaattgtttggacttatatgaagagatcctgactgaagaaggaactgcaaaggaggcaacatataatgatttgcaagtagaatatggaaaatgtcaactacaaatgaaagagctgatgaaaaaatttaaagaaatacagacacagaatttcagcttaataaacgaaaaccagtctcttaagaggaatatttcagcacttatcaaaactgccagagtggaaataaaccggcaggatgaa

SEQ ID NO: 12321 - DNA, 448 bp, Homo sapiens
  misc_feature (1)...(448): n = A,T,C or G
attgacattcgatgaccctagtccgngtggtggaattcattgcttatatcctttcagaggacataactttcagagtttgtccattggtgggattatttgtcaagactcaacaggatgaaagatgaatacttacctacctactgccaattgcctaccacatatcttggtagcatttgagtcatcagaattctgggtggggattcctccctcaattctggaaaggaatcctgaaccacaccttgacctcacattcctggtggtaggtttggtttaggaaaaaagaatatctaggtgaagttacatttgttttgtgaaggcaagagagacacttcattttatgcaagagatacttcattttagcccctgaatgcttggggttaagaggaagccaatgatgtccaatcaacacctgatgaacctgaggcattttttccacggggcatttaag

SEQ ID NO: 12322 - DNA, 454 bp, Homo sapiens
  misc_feature (1)...(454): n = A,T,C or G
gatcgagacactanccangcgttgtagatctctagtccgtgtggtggaattcctcataactctaacatgtaacttttagtggggaaaataaggtacttttgctagttatccacaagggggaagactgattccatttcttctggaaggtatccattgggccatcattactgatcatttatttttatttttatagatttagagagtacatgtgcagttgtgttacatggatatattgtgtagcggtgaagtctgggctttagtgttctataaattacaataatttgttaagatatcttttgcggtctatttttcatacatgtgctgtctctttaccatatgtagattcagaacttttttttttcctcaggaaagatttcttgattatagttttacaattagccctaggctattattgggtttttcttcttcaggttctctaatgatacttgtgtac

SEQ ID NO: 12323 - DNA, 453 bp, Homo sapiens
  misc_feature (1)...(453): n = A,T,C or G
ntttgtagaccactagtcagtgtgcgtaattccaacatttattatcattattgaacctacaacagagatctatgtgtagatttacgaagcctacagttctatacagataggaatgaactagtggcttactgaatggtgattactttctgtggggctcggaactacatgccctaggatataaaaatgatgttatcattatagagtgctcacagaaggaaatgaagtaatataggtgtgagatccagaccaaaagtcatttaacaagtttattcagtgatgaaaacatgggacaaatggactaatataaggcagtgtactaagctgagtagagagataaagtcctgtccagaagatacatgcttcctggcctgattgaggagatggaaaatttttgcaaaaaacaaggtgttgtggtcttccatccagtttcttaagtgctgatgataaaagtga

SEQ ID NO: 12324 - DNA, 554 bp, Homo sapiens
  misc_feature (1)...(554): n = A,T,C or G
gattcgaactactagtcccgagtggngcaattcgngtgtctgtgtgtgtgtctggtgtttgggggtagaagtgataaccaggaaatgtcccatgaaatgtctcatgaagcaaaggcaggggtattttctatgaactatctccattaatctgtgggcctgcattcctggaaaatcttcactcaggatccctaaggcttcctagagcaaaggtggcccagcctgggtcttggcatagtatgacctcagggtgtccaggctgaggacaaggtgaatgtcctgcctctgctgcgctgggtctgggtgccctggtgtgctcctgccctctccttgtcagggaaccttggactgggtctggggcctgagctcaattcccagacccacctctattgagctatgtgaccttgggtcctatgctccctgggccatctgtggtgagtgggccatatgacaggccatctcanggaggtgggcagggatggtgtcaccatacagggcctcctcacttctcttcacctccaatngtatgcagaagacttcagtattacacaatcttn

SEQ ID NO: 12325 - DNA, 448 bp, Homo sapiens
  misc_feature (1)...(448): n = A,T,C or G
natcgagttcactagcccagngcggnggaattcggctggtgtggattccgccggtgaaggctgaaggcagttaccttaaagatgccgggatccgcagcgcaaggctcggagttgtcatagaggatcgagagcttcgtggagaccctgaagcggggtggtgggccgcgcagctccgaggaaatggctcgggagaccctagggttgctgcgccagatcatcacggaccaccgctggagcaacgcgggggagctgatggagctgatccgcagagagggcaggaggatgacggccgctcatccctccgagaccaccgtgggcaacatggtgcggagagtgctcaagattatccgggaggagtatggcagactccatggacgcagcgacgagagtgatcagcaggagtccctgcacaaactgttgacatccggaggcctaaacgaggatttcn

SEQ ID NO: 12326 - DNA, 492 bp, Homo sapiens
  misc_feature (1)...(492): n = A,T,C or G
agagcgggnccccnttttgagaccctttgaagccgtcggaannctcggagngagaatatcagctctgtttggatggtggaaggtctcattttattgagatttttaagatacatgcaaaggtttggaaatagaacctctaggcaccctcctcagtgtgggtgggctgagagttaaagacagtgtggctgcagtagcatagaggcgcctagaaattccacttgcaccgtagggcatgctgataccatcccaatagctgttgcccattgacctctagtggtgagtttctagaatactggtccattcatgagatattcaagattcaagagtattctcacttctgggttatcagcataaactggaatgtagtgtcagaggatactgtggcttgttttgtttatgtttttttttcttattcaagaaaaaagaccaaggaataacattctgtagttcctaaaaatactgacctttttcactactatacataaagggaaa

SEQ ID NO: 12327 - DNA, 447 bp, Homo sapiens
  misc_feature (1)...(447): n = A,T,C or G
atcgaattcgtagacactagtccagngcggtggaattcccagactggttctggttggacagctaatctgatttggggattcactgtttcagagtacacagacaaaagctgttgcatcaaaactggactttaggagtaatttctattgaactcctgtcaatatgtttatttcctctgtctacagcagatgggagtcttctcttttagacaggggctttttgtttttaaccccaattgtaataaagggtgttctttttcttctttagagtttacaaaactataaatatttgtgtctccacataccatcttcatcttcacacattcactgtgctttcctccccatagtgggagctgtcatcaccaacagggtttactctcccctggagaggttatttaaatagctgtccataagccatccagatcaacaccctttcttccatacagaaaa

SEQ ID NO: 12328 - DNA, 487 bp, Homo sapiens
  misc_feature (1)...(487): n = A,T,C or G
nggctgatgnaccactagtccangcggnggctggagaccttagtacaccgcggggaattcaatttttgtatttttagtagagacagggtcttgtcatgttgaccagttggtctcgaacttgtggcctcaggtgatcctgctgcctcagcctctcaaagtgctaggattgtaggtgtgaaccactgcatctggcctcagtatggacttgattttctcgtaatagagaaaaaagatgtatgcagtagacctaccagcatgaaacagcagcttttggccaatttttattaggccagcttatcattcactctttaccagcgtttatggataggaatttgtgaatataacaataaaaatagcaaccagcctacattacaaagccatagtaattaaagcagtatggtaatatggtactggcataaaaacagacacatagaccaatggaacagaatagagagtctagaaataaacccacacatatgcaataaac

SEQ ID NO: 12329 - DNA, 450 bp, Homo sapiens
  misc_feature (1)...(450): n = A,T,C or G
gttcgagaccctagtccgngcggtggaattcatatcattttgattaacatttgcggcctgataggggaaatggtgaagcaatggaaaagaacagacaactaatgatttgcttctatgtccagaatattttacctttaaaagaatgtcattggcaccataaataaggactgtgagagactgtttaaaagctgtgaaagtctgaaacctataagccaaggtgttccctgcctaaacttattgctgttcccacaaaggactaagcctgttcataagttaccaaagttgccattttggagatggaaattgacgaggagggaaggtcttttattggagagtatacagtacaagcagatcattctgccttagaggtgctaattcccgaaattagaagaccctttcttttccagtaatgaagctataaatatcagcttgttcatccaagccactggg

SEQ ID NO: 12330 - DNA, 463 bp, Homo sapiens
  misc_feature (1)...(463): n = A,T,C or G
agaggaccngnnnccccccctgagactcttgaagncgtgggaattcgacgggcctggcgccggagaggagcccgcactctgcccgaagtctcgccgcccgccggctgttttctggcggagggtgcgccccggagggcggcgagcgcgggtggaggcgtcgccggggtcgggccagcaggctctgggatcgggcttgtgggacaccccgacaattggacgactgattattggacagaatggcgtcttgtcgacacctgcggtctcctgcattatcaggaagatcaaggcagctggtggaatcattctaacagccagccactgccctggaggaccagggggagagtttggagtgaagtttaatgttgccaatggagggcagacttcttggaggaagtgaaatttgaactgcgatgtgaagaatgagcaggagttagtgagttgaagatgagagaaggagtgttgg

SEQ ID NO: 12331 - DNA, 447 bp, Homo sapiens
  misc_feature (1)...(447): n = A,T,C or G
natcgagttcgattacccangcggnggaattcctttcactttattctttaaacatgttcgttccttttcatttgcctatggaaaacacctacttatccttcaatgctcagctcaaagatcctctcaagacagtatccggctctgctcctttcatctgaaatgactcacatagttttcgcccgtgaaatccataaagtaaatcagccacaaggtggcggcataatgccaggtaattaacggatcgaagcatgacacctgtggtttcagtttataacctagcattgatctgaaattccatcttaaaaaaaaaaaagatgaaaagattgtggaattattgaataacaagggacaagctctggacctcatttgtagttttcatcgaggttttcaagaactgcttggtgaatccttgggagttcctaagaactctgtctcctgtttcagcct

SEQ ID NO: 12332 - DNA, 497 bp, Homo sapiens
  misc_feature (1)...(497): n = A,T,C or G
cggaagtacgccaggggnnnnnnnnaatggagaccctcatcgagagtatctgcacgngcggnggaantcancagcatagccgagatgggaacggagctcttctgacttcaagcccctgcacttttttcttaaccacattaattttatgaatatctatgtggtcaaagtctcttttgtaaaatctgagtataagctgaactagatcatgtctctgtaagctaagatggcagaaacacattgtcatgttagtttggaggagcaaacagatataagtatgtgttgtaatgttatagtgagctgttatgtatcccccagcaatgtccaaagtgatcagagctactagatgacttattacaatgttcagatcccactccttcattcctcctctctcagggacctgtctacccccaagctttagaactgagctctctccaacttagaactcattagagtttgttgcattagtgattggatctcctcatgaaagttttttgacg

SEQ ID NO: 12333 - DNA, 446 bp, Homo sapiens
  misc_feature (1)...(446): n = A,T,C or G
nttgagacttatccggcgttgaattcctcatgccatccttaaggctttcgctatgatcatcgacaagctggaggaagatatcttcagctccatgaccaactgtaccgcggccagcgggcccccggtcaccctgaggctggtggtgccggccacccagtgcggctccctgattgggaaaggcgggtgtaagatcaaagagatccgcgagagtacgggggcgcatgtccaggtggcgggggatatgctgcccaactccaccgagcgggccatcaccatcgctggcgtgccgcagtctgtcaccgagtgtgtcaagcagatttgcctggtcatgctggagacgctctcccagtctccgcaagggagagtcatgatcattccgtaccagcccatgccggccagctccccagtcatctgcgcgggcggacaagatcggtgcagcgacgctg

SEQ ID NO: 12334 - DNA, 450 bp, Homo sapiens
  misc_feature (1)...(450): n = A,T,C or G
catagaccccccactgagaacatcgcacangcggnggaattcctttttcttttcttctgctgcttctttttctctttctttccttcctttcttttcttttcctttcttcctttcttctcttcctttcctttccttctttcctttctttttctttctctctttctttttttctttccttatttcctttccttccttcctttccttcccctcccttcctccctccctcccttcctcccttcctgttttcttcagagttttgcctaggagcccatggctggccaagagggtcatatatgatattcaggagtcagcaaactacagtccatgggccaaacccagcctgcgtttgcttttataaataaagatgtggctttttggtggttttttttcttttactggtttattacaaaagatacgactcaggaacagccaaacggaagagctgcatga

SEQ ID NO: 12335 - DNA, 483 bp, Homo sapiens
  misc_feature (1)...(483): n = A,T,C or G
ggtcccanannnaggaagactgagacccttgaaaaactgagacactagtacangcggaggaattccccggctcgagcggccctgccccctcccactcttgaagaggaggccgcctcctcggggctccaggctggcttgcccgcgctctttcttccctcgtgacagtggtgtgtggtgtcgtctgtgaatgctaagtccatcaccctttccggcacactgccaaataaacagctatttaagggggaaaaaaaaagaaaaaaaaaaaaaaaaaaaaaacgagaagcataccaagaaaaaaaaaaataaactaaataaattggggcggcctctggagtggatgaggccaaaacaaacgccattatcacctcctttggtgttttttgtggaacacttttttttgttcccccccccccacttttttttttattttggggggggagcccccacctcttgttttttatataaaagagagagatgaatgct

SEQ ID NO: 12336 - DNA, 450 bp, Homo sapiens
  misc_feature (1)...(450): n = A,T,C or G
tttgntttgtagaccacttgtacagtctggtggaattccaggctcttgaccctgactctgcctcttagcagctgcatgagtggtggccactggccatggagcctcagtttccacagcggacagttgaagggctggattttcagctgaaatatcattaaagctgcgtgagtggaggccactagccacggagcctcagtttcctcagctgacgcttgaaggggcggattttgagctgaaatatcgttaaagcctgtttcagctccaaatttgcgtctttctgaccagtttcttaagttttcctcctttagcctgggcaatatagtgagacccctgtcttttcaaaagagaaaaaagaattagccgggcgtggtggcacgcacctgtggtcccagttactcagtgggctgaggtgagagcattgtctgagccctggaggttgaggctgccatg

SEQ ID NO: 12337 - DNA, 555 bp, Homo sapiens
  misc_feature (1)...(555): n = A,T,C or G
aatcgatcactttgagnggcggcaattcctccacctcagtctcctgagtagctgggactaccagtgtgcgccaccatccccagctaattttttgtaatttttatagagagggttttatcctcttgcccaggctggtcttgaactcctgggctcaagctgtcagtccagctcagcttcccaaagtgctggggttatagggaagagcccccgtgcctggccaagtgcaaagcttttaacaatagaagtttcaagggctcaggaaggaccagggggccatctaggctctccatgagttcacgcttaacattatgtttacgtctgtcagataacaattttggttttccacatcaggtgcattgcactgttagatgggtcatcataaaggtcatcaatctagtggcattcattcaatttgcacatcctaacttgttcagcactatctgatttagcatgaaaatctgccagggcagtcccttgatattcagggtcagctatccatgtatgggcttcaatcttataagaagttgtatttatttttcacctttactcaggatg

SEQ ID NO: 12338 - DNA, 467 bp, Homo sapiens
  misc_feature (1)...(467): n = A,T,C or G
aatcgagattcgtagccctngcggnggacttctgcacacgaaggcccatctgttggaagagtaatctttttaaaatcccaaggcagcataatgggggcagaggttgatgcttttgttccctggatgaattccctcttcagaagctcctgctcccctcgacctgagcatctggacaggctctctgtgtgaatcggcatgaatattgaacagtccacactccctccctgcttcagtccatggcaaaggaaagctttcgaaagtcaccgttctccagggacgttaagcatttcgagctggtttttaaaacagtattaagtgactttgacaaactggagctatttggtatttgcacaattagaaagaatcccccatgggggttgtttggctttgtgagtaaatgctggcctctcacttgaattccaatacagagatctcattcaaatgagatgggtggtcttatgcaattt

SEQ ID NO: 12339 - DNA, 479 bp, Homo sapiens
  misc_feature (1)...(479): n = A,T,C or G
nttttgagacactagtccatgtggtggattgttcgaccatcggacgccggtctctgttccgcaggatggggtttgttaaagttgttaagaataaggcctactttaagagataccaagtgaaatttagaagacgacgagagggtaaaactgattattatgctcggaaacgcttggtgatacaagataaaaataaatacaacacacccaaatacaggatgatagttcgtgtgacaaacagagatatcatttgtcagattgcttatgcccgtatagagggggatatgatagtctgcgcagcgtatgcacacgaactgccaaaatatggtgtgaaggttggcctgacaaattatgctgcagcatattgtactggcctgctgctggcccgcaggcttctcaataggtttggcatggacaagatctatgaaggccaagtggaggtgactggtgatgaatacaatgtggaaagcattgatggtcan

SEQ ID NO: 12340 - DNA, 460 bp, Homo sapiens
  misc_feature (1)...(460): n = A,T,C or G
ngttggagaccanttgannnnnnaattgatgtcccttantccagtgcggtggaattcgcaccgacttctcctctgccccagatggtgtaacctgggctggccagacaggcacctccccagtgggcgtgtcttcagacaaaggtggctttgctttgttgaagttactgatataaagatcagcgcctgaaacagattctccgggatattaccggagacggagtgttttattattagcctttcttaggtggacatttccatttgaattacaagtcctttaggctgggcgtggtgcatggctgtaatctcagcaccttgggaggctgaggcaggaagatcacttgaggccaggcgttggagagcagcctgggcaaggtggcaagaaccttgtctctacaaaaaaaaaagcgtaagagtccttcagcatttgaggggaaaacgtgtgctgacggtagaatagtcn

SEQ ID NO: 12341 - DNA, 462 bp, Homo sapiens
  misc_feature (1)...(462): n = A,T,C or G
cttcgccacaatagagaacattagacagngcggtggaattcgctctcataaccctacatcaacagaagaacaacagttatattgggtcaaagggactggctttggaacaggctctacagcttctgggtgggatgtggaacaagccttaactaagcaaaggctggaagaggaacatgttacctgccttctgcaggttcttgccagttacataaatcccgtcagtagtgcggtaaatggagaagctcagtcatctcatgagactagagggcagaacagtaatgcccttccttctgtacttctcgagcttctcagtcagtcctgcctcatcccagccatgtcatcttatctacgaaatgattcagttctggacatggcaagacatgtgccactctatcgggcactgctggaattgcttcgggccattgcttcttgtgctgccatggagcccctattgttgcccct

SEQ ID NO: 12342 - DNA, 494 bp, Homo sapiens
  misc_feature (1)...(494): n = A,T,C or G
ggggagcnaggccggnnnnnnnnaaaatcgagnactggaggctatcgcggnggacttcgaattccacccagagcgaggtgaagctcagcgtcttgagcagtggctgcaggtaccaggaaggccccgtccggctcagccccggcaggctccagggccacctggagaatgaggacaaggacaggatgattgtgcatgtgccttttggaactcgcgggggagaagctgttctttgccaggtgcacttagaactacctcccagctccaacatagtgcaaactccagaagattttaacttgctcaagtcaagcaattttagaagatacgaagtccttagagagattctgacaacccttggcctcagctgtgacatgaaacaagttcctgccttaactcctctttacttgctgtcagctgcggaggaaatcagggatcctcttatgcagtggcttgggaaacatgtggactccgagggagaaataaaatccggccagctt

SEQ ID NO: 12343 - DNA, 458 bp, Homo sapiens
  misc_feature (1)...(458): n = A,T,C or G
tttttaattgaagacctcgagtacgtgcggnggaactcttgggtcccgtcgtctgtgatactgcagtgcagccatggcagaaccgcagcccccgtccggcggcctcacggacgaggccgccctcagttgctgctccgacgcggaccccagtaccaaggattttctattgcagcagaccatgctacgagtgaaggatcctaagaagtcactggatttttatactagagttcttggaatgacgctaatccaaaaatgtgattttcccattatgaagttttcactctacttcttggcttatgaggataaaaatgacatccctaaagaaaaagatgaaaaaatagcctgggcgctctccagaaaagctacacttgagctgacacacaattggggcactgaagatgatgagacccagagttaccacaatggcaattcagaccctcgaggtttcggtcatattg

SEQ ID NO: 12344 - DNA, 483 bp, Homo sapiens
  misc_feature (1)...(483): n = A,T,C or G
gagaccccnaannnnagnaagaactgaaaccnctggaaanactggagacactcggacangcggnggaattcgacgttacaagtctaaaaagactggacaccattattttttatgaataatgcacataaccattttaaaaaacattgtacttggccgggcacggtggctcacacctgttatcccagcactttgggaggccaaggcgaggtggatcacaaggtcaggagttcaagaccaacgtgacgtgaccaatatggtgaaaccccatctctactaaaaatacaaaaattagctgggcgtggtggcacgtgcctgtaatcccagctacttgggaagctgaggcaggagaattgcttgaacccgggaggcagaggatgcagtgagccgagattgcgccaccgcactccagcctgggtgacagagcaggactccatctcaaagaaacaaacaaaaccactttacttactgtattgtgacatgttt

SEQ ID NO: 12345 - DNA, 489 bp, Homo sapiens
  misc_feature (1)...(489): n = A,T,C or G
gggaagacggcgggcccccnaaaattgagacttgagacctcgcacangccgnggaattccagaaatctgcaacataattttataaatatataaatacatgtatgtatgtcaaaacactacatatacactttcagaaagaataaactttctcaagtcattttaaagttacctaacgttcttcttgaataactaatacagtgggtcaaatattataaaataggcaaacaccaaaatggtattaaatattgaactcctgaccttttcgacacttacctagtaaagtattcttaggcatcatcataacttttcctcacctttattcgaatagaggaataaatgtcttcagttgtctctccattacccctaagttattagtttgtctagtttatatataaagaccatgttttaaagtacataaagtggaggtttatttatcatacaggctttgaaacattaagaagcagtatttttattaactttttgagacat

SEQ ID NO: 12346 - DNA, 487 bp, Homo sapiens
  misc_feature (1)...(487): n = A,T,C or G
ncctggatgacactagnaagngcggnggctgacgacccttatacagngcggtggaattcctgctgctgctgtggagaatggcggtattgttcttatgccagtggagttattttcccagggggtttatggctgcctctgctgcctcatgcaggtcgccagggaagcaggggaaagctggcagttacaggcctcacccagctcccgtgcagcccaaaagactggtctcactcccaccatgccctctcccaagagcactgagtttatttccaggcagccaggtgagcagggctgagaacttgccccaggctgcaagcctccccactgagaaagcaagcaagcctttccggttttgcacttccctgcctgccttggcttctgagctatgtttgcactcctgattcacctcctcctctgagttctgtccaggaaacttcccattcagccgaaattgttacaaagttcagctggaagtttccttttccctgtg

SEQ ID NO: 12347 - DNA, 478 bp, Homo sapiens
  misc_feature (1)...(478): n = A,T,C or G
atttgatncccttnnnnnnnnnnnnnnnnncctgaggacccttagtccagngnggtggaattcgccagaggagaatgtgctccctggtgcatccagcctggggggtcccttcggctgcctgaacaacgcccggtacggcatcgcgtggggcgtgcttggagcttcggagttctgcttgcacacagcccggcagtacgccctcgacaggatgcagtttggtgtcccactggccaggaaccagctgattcagaagaagctggcagacatgctcactgagattaccctgggctttcacgcctgcctgcagctcggccgcttgaaggaccaggacaaggctgcccccgagatggtttctctgctgaagaggaataactgtgggaaagccctggacatcgcccgccaggcccgagacatgctgggggggaatgggatttctgacgagtatcacgtgatccggcacgccatgaacctggaggcn

SEQ ID NO: 12348 - DNA, 451 bp, Homo sapiens
  misc_feature (1)...(451): n = A,T,C or G
atggttctaacnctgagacccctcagatgagcgtcggaantcccggccccgaacggagctgaagaagaagctgttcaaacgccggcgggtgttgaatcgggagcggcgtctgaggcaccgggtggtcggggctgtgatagaccaagggctgatcacgcggcaccacctcaagaagcgggcgtccagtgcacgtgccaacattacactgtcagggaagaagcgcagaaaactcctccagcagatccggcttgcccagaaagagaagacagccatggaagtggaagccccttcaaagccagccaggactagtgaaccacagctcaaaaggcaaaagaagacaaaagccccccaggatgtagaaatgaaggaccttgaagatgagagctaaacctcttccactagaagattctcaactggagccagccttcagactcagtggttgtttcagagg

SEQ ID NO: 12349 - DNA, 450 bp, Homo sapiens
  misc_feature (1)...(450): n = A,T,C or G
atcgcattcgagacactagtccangtggtggaattcccaggtgggatgctggacaacatcctggcctccaaactgtaccgcccaggcagcgtggcctatgtctcacgttccggaggcatgtccaacgagctcaacaatatcatctctcggaccacggatggcgtctatgagggcgtggccattggtggggacaggtacccgggctccacattcatggatcatgtgttacgctatcaggacactccaggagtcaaaatgattgtggttcttggagagattgggggcactgaggaatataagatttgccggggcatcaaggagggccgcctcactaagcccatcgtctgctggtgcatcgggacgtgtgccaccatgttctcctctgaggtccagtttggccatgctggagcttgtgccaaccaggcttctgaaactgcagtagccaagaan

SEQ ID NO: 12350 - DNA, 461 bp, Homo sapiens
  misc_feature (1)...(461): n = A,T,C or G
attgactgcttaacctaggccangacgnggaantcaacagaaatgctttcagaacagacagcagcgctggggacaggatgggaatcaatgaatgtacagctggatggagcagagccccacgtggaaaggggaagccaggaagagcggccatggagaacagtaccaggacctctggagcacctgtgctgtgaccttgaagaggagccacagtcccttcaggagaaggctcagtctgctccctgggttcctgcaattccccaggaggggaacactggagactgggagatggcagctgcacttcttgcggctggatcacaggtgagctctgcttcccttggcgtctcctgtggtcccatcactgctgcctttgtattgctttcgcatcagcccattgatgagttggctcacatgatcatcaatggatttccaattcccaaactggacatgctttctcaactaag

SEQ ID NO: 12351 - DNA, 499 bp, Homo sapiens
  misc_feature (1)...(499): n = A,T,C or G
ggaaatgtncncnaggnnngnnnnnnaatagaagacccnatcgagngccctcgaccangacgaggaattgttcaaggcactcataaaactactaaacagagtactgcagnggactgtaaaataacatcgtctacgactggagataaacactttgataaaagtcccactaaaacaaggcaccctcggaaaattgatctaagagctcgatactgggcatttctttttgataatcttcgccgagcagtagatgaaatctatgtaacttgcgaatcagatcagagtgtggtcgaatgtaaggaggtgctaatgatgctggataactatgtaagagatttcaaagcattgattgactggattcagcttcaggaaaagctagagaagacagatgctcaaagcagaccaacatcattggcatgggaagtaaagaagatgtctccgggacgccatgtgattccaagtccatcaacagatagaataaatgtaacatcaaatgctcgac

SEQ ID NO: 12352 - DNA, 452 bp, Homo sapiens
gttcgtagacactagtccatgcggtggaattccgagggcgggcccagggagtgacccctgccaggtgcagatacaaaccagacacggtctgtggctactttgtgttattataagatatgagctcaaaccgagatatgaatgaccttggggagccatctgaggccaagatattgacgggggggattcctgggtcccattttcagcgcccagggtcacagatccacagtgggaagttctgtgggacacattggcactgagccacaaagaaggtgtggccagaacaacttgggctcctgctgaccaatgtcctctagggcctaggggacagaggaacacagagtcacagcttcaggggccgaatgagcatggcggccttcctgagagaatatgccccaccacgaaactcagcccagtagacaccatcctggtagcggcttcggtagtggccgccg

SEQ ID NO: 12353 - DNA, 488 bp, Homo sapiens
  misc_feature (1)...(488): n = A,T,C or G
nactgatgnaccactagtccagtgcggnggctgaccgacattagtccagtgcggtggaattctctgatgtcactgcttgggctctagttcatgtctgctgttaatgactggattacatattgtaattctgtgattttttattttctatacaataaaggaattaaatttaatgatctcttaggtcccatatcactccaaatactctgttaaatgcagttgttttacaaacatatgcatttaatgtaaaatgtgcttcagaacgctttttccgtataggtattgaaatagatatgttgtttgcagacagattgaggcatttccagttaatgattttatgtaacctgtcataactcgtataatgaaacaaaccttgtgctaaaagtctgacatattggattaatgtcccagtcccactgtggatgaggtgattaacctctctatgcatcagttttgttacctataactctaaacagtcatctctgcacagg

SEQ ID NO: 12354 - DNA, 453 bp, Homo sapiens
attgatttcgatgaccctagtccgtgcggtggaattcgggactacaggtgcccgccaccatgcccagctaatttttttgtattttttagtagagacggggttccaccgtgttagccaggatggcctcggtctcctgatctcgtgttccgtccacctcggcctcccaaagtgctgggattacaggcttgagccaccacgccccgccttatttgtacttttctaccaaaaatatcacagttgttttccttacctgagatgccctgaaagccttctcagttctcttaagtctgagataacatcttcctaattatacggtatactcagcaattaatcattgaaagttttgtgttatctgttagatcatttgattcttcaggaattttcttaaaatattaatttcatgctacttgtggacagggtctgtgatggaatcttgtttccatttcactttgg

SEQ ID NO: 12355 - DNA, 452 bp, Homo sapiens
  misc_feature (1)...(452): n = A,T,C or G
atcgaattcatcacactaggccangcggnggaattccaggaagtcaggtagtgaaacttccttttatcaactttatgaagacacgttggacttcctttctgaatgcctacacaaactctgcaatttgttgcccatcacgcgcagcaatgtggagtggcctcttcactcacttaacagaatcttggaataattttaagggtctagatccaaattatacaacatggatggatgtcatggagaggcatggctaccgaacacagaaatttgggaaactggactatacttcaggacatcactccattaggcacagtgaacgtgggtcaactaatcaaagaagtgaaaaagtttgagaaagtaatcgtgtggaagcgtggacaagagatgttgctttcttactcagacaagaaggcaggcccatggttaatcttatccgtaacaggactaaagtcagg

SEQ ID NO: 12356 - DNA, 454 bp, Homo sapiens
  misc_feature (1)...(454): n = A,T,C or G
gggannnattgtttcgagaccttagtccatgcggtggaattcggtgtcatcaatgaatccaaagcaggtgccattatttttttaaataaacacttgatgttagctttggtgttaaataaagaggtagatttcttaaattttcacatttgttggagcccatctcagtagcaaatgtgtgtgtgtgaccaatttttttaatagattttattttttagggcactttcaggttcacagcaaaattgagcagaaggtacagagatttcccttataacccctgcccctagacaggcatagcttcccctccacattagcaatatttcccaccagaatggtgcacttgttacagttgataaacctgcattgacacacatcattatccaaagttcatagtttagggttcatggtgttgtcattctgtgggtttggacaaatgtatgactacatgtatccccca

SEQ ID NO: 12357 - DNA, 460 bp, Homo sapiens
  misc_feature (1)...(460): n = A,T,C or G
aatcgagtagcgttcactaggccanngggtggaattctctttttataaatacctagattcaatttgctaatattttgatgagaacttttgcatctaagttcatgaaggatactacactgtagttttcttttttgtgctgccgttgtctccttatggtatcagagtaattctaaccttataaaatgagttggagcgtatactttccattttctggaacaggttttgtaaaattggtgctaattcttcttcacatgtttggtagaattctccagtgaaggcatctgggcctgatgatttggaaacttttagattatgaattcaatttctttaatgattataagactactcaaactatctgtttcatcttggccacctggactttttgaagaattggttcatttcttctaagctgtcaaagttatgagtgcacattttcaaatctacctttatgatccttcaa

SEQ ID NO: 12358 - DNA, 561 bp, Homo sapiens
  misc_feature (1)...(561): n = A,T,C or G
natcgaacacttagcagtgtcgtggaattccaattaccaagaattctcaaaacaattttctgcaggatgattgtacagaatcattgcttatgacatgatcgctttctacactgtattacataaataaattaaataaaataaccccgggcaagaaaaaaaaaaaaaaaaaaaaaaaaaaaaaaaaaaaaaaaaaaaaaaaaaaaaaaaaaaaaaaaaaaaaaaaaaaaaaaaaaaaaaaaaaaaaaaaaaaaaaaaaaaaaaaaaaaaaaaaaaaaannnnnnnnnnngggggcccctgttaaaagggggggcctaaaaaacccgggaaaaattttttttttttttttataaaaaaaaaaaaaggggggggcccccccccccctcttttttaataaaaagaagggggggcccccccccctttttttttaaaaataagaaaagaaaaaggtcctcccttgttggggggggnttttttttttttttttggggnnnnnnnnnnaaaacncacacgaacaaccaaccgaatgaagaacaaaataaacgctaattctcaccgatcag

SEQ ID NO: 12359 - DNA, 467 bp, Homo sapiens
  misc_feature (1)...(467): n = A,T,C or G
agggcgcgcggnngntatagactgagtccatacgccgngncgnggaattcgatagaaaacacagcatgccattattttaacttgccttttctctgattactatataagttaaacaccttactgactgactgcgatcttcttgagtgaattcctgtgctcctttaactgacttgattctacaacctgtgcccatcttcctaccaagtaggcttttaaaaaatagttcataggcttaaatatttaaaaaacaattattagcctgctatactgacttatctttcctttatcactcattttaaaactcaaactacattcctaggacaaagactatgactttcacatcttgaatgcatcaaagaaacaacccctttttcacatacgctggctcagaagcactgtcttagggacatactctgcaaaacgaatgggctggcagggtcattcatatactggaattaaggctttca

SEQ ID NO: 12360 - DNA, 455 bp, Homo sapiens
  misc_feature (1)...(455): n = A,T,C or G
atcgaattgatgaccaatggaaaaactganacgtcacgaagngngcnggaattcatctgaaaatgtaagcaagtttctatggggtagatgtatgatgattttaggcttttcttttcatctgaattttgtttccactgctattttaatgagttaggaaatatgagatatttaaatatggcttggtgaagttcattgaacactttaatgttggttatattatttatatcctctatatagtttaaaaaacagctagcatattttatagatatatttgcaagactgattttaaaataatatattttcattgttttgttaacaaatcaaacttttcaagctatttctgactgttaaaactttctggaaagttgttccatatccttccggtcatctaaatttatcacaaggttttaactaagaaggttggcgaaccctctttccttttgatcttgcatccn

SEQ ID NO: 12361 - DNA, 446 bp, Homo sapiens
  misc_feature (1)...(446): n = A,T,C or G
attgatnnccntattgaggacccttagtccgtgtggtggaattcatttttacatgattaacgacccaggcaatttgcatagcgtgaagcggagagcagctgcccttagcacatccccaagctgcacacccctctcagtgcagggcgggggaagaaggcagccccagttttctccccagaatagggcaggggctcctgctgctgagttctccggctgatgctgcccacctccacttgcctaagaccccattcctggcttggaggtccgtggatacaacccagcattctgtgtatgcaaaaacagtagccattctttgcctaaggaaaaaaaaaaaaaaaaaaaaaaaaaaaaataaaaaaaaaaaaaaaaaaaaaaaaaaaaaaaaaaaaaaaaagggccccctttttattaaagggccccttaaaacccctttttaacccctttgt

SEQ ID NO: 12362 - DNA, 576 bp, Homo sapiens
  misc_feature (1)...(576): n = A,T,C or G
cgggggtcccccnnaattgaannccattcgaacacctatccgtgtggtgcaattcccgaggaggcccgcaccgcgtagccagtgaaggttgnggagcaagcttatgcgggaaagagggagggggactccaggaaaagccgttgagaggaccatcacaacctgagcaacacaggttccagttacagccatcccttgtcataacttttgaactgtatttggaaaaatactggccaggaaagaaaaatgataaaatttttcctcatggtgaataaacaagggcagactcgactttctaagtactatgaacatgtggatattaataagcgtacacttctggaaacagaagtcataaagagctgtctctctcgatccaatgaacaatgctctttcattgaatataaggattttaagctgatatatcggcagtatgcagctctcttcattgtggttggagttaatgacactgagaacgagatggctatttatgaattcattcataaactttgtgaagttttagatgagtatttcagccgagtgagtgaattagatataatgtttaatttggataaagacacn

SEQ ID NO: 12363 - DNA, 557 bp, Homo sapiens
  misc_feature (1)...(557): n = A,T,C or G
natcgaacactatcgcagaggcgggaagncgngacccgtccncggcaggggacaatgagattgagcgtgtgttcgtgtgggacttggatgagacaataattatttttcacttcttactcacggggacatttgcatccagatacgggaaggacaccacgacgtccgtgcgcattggccttatgatggaagagatgatcttcaaccttgcagatacacatctgttcttcaatgacctggaggattgtgaccagatccacgttgatgacgtctcatcagatgacaatggccaagatttaagcacatacaacttctgcgctgacggcttccacagttcggccccacgagccaacctgtgcctgggctctggcgtgcacggcggcgtggactggatgaggaagctggccttccgctaccggcgggtgaaggagatgtacaatacctacaagaacaactgtggtgggttgataggcactcccanaagggagacgctgctacagctccgagctgagctggaagctcttacagacctctggctgacccactcctgaggcactana

SEQ ID NO: 12364 - DNA, 461 bp, Homo sapiens
  misc_feature (1)...(461): n = A,T,C or G
nttcgagcctagaggaccctagtccgtgtggtggaattcctggcaaagaagtttgtgcacttgggaagctaaggaaaaaacttggtcctgggacaggtggaggatcgagcgacagagtagatgtggagttgggggtgattgtttcctaaaaattctgatccttctgggtggagaggaagctctccatctcagaagggctgcttctagggtgtgattactgatgggaagcaccgttatttatgtaaaggtcatctcagagaaggggaagagggtgctaatttaaacacatgtcccaaaggaaaaaaatgtcacaaagggcatcatagggctgtgggggcaaggagaaggcagatggtaatacacaagtcattcccatcactaatcccctggttgatcatggccagctcattcaagattagctctagacctttctgggtctcagatttctcatttggagatga

SEQ ID NO: 12365 - DNA, 453 bp, Homo sapiens
  misc_feature (1)...(453): n = A,T,C or G
nttgtagttcactaccnttggcggnggcattcgaaaagaggattaagcaattttccctgtctccttttctctgcattgctggagcctcatcgccctgtctcctcttagccaggcacaagggctagcttgtcttgggtaccagccattcatgtcctgatttgcagggtgtcctagtggtgatgctcatcttcactgtgctggagctcttattagctgcatacagttctgtcttttggtggaaacagctctactccaacaaccctggggtgagtatgctgacatgtcgcctgatacctgctgtgtctcaggtccaggctacaataatccaacctcaaaaagtggcaaaaagaagaatcaattattgttcatgaggtgcatgtggaaggccacttttataattaaaaaaatgagtttaacagtgaaaccccatctctactaaaaatatgaaaaact

SEQ ID NO: 12366 - DNA, 447 bp, Homo sapiens
  misc_feature (1)...(447): n = A,T,C or G
attttaatgatacctatgcagtattaggaccttccgnanacacaaaaacaaagaatatgtgagtattgccagtggaggatttatggcactgtttcagcacctggcagacattaatgtggatggaccagaaaatggatatggccattggattgctagtacctcaggctcaaggagcagtatcaattctgttgatggtgaatctcctaatggctcaagtgatagaggaatgaaatcactagtaaataaaatgactgtggctttgaagacaaaatccgttaatgtcagggaaaaagttatcagttttatagagaatacatcaactcctgtggatcggcatgtgagcagcagtgacagagtgggcaagccttaccgtggcgtaaagcctgttttcagcattggggatgaagaagaatacgacacagatgaaattgacagttcttcaatgtc

SEQ ID NO: 12367 - DNA, 443 bp, Homo sapiens
  misc_feature (1)...(443): n = A,T,C or G
gttgaagnccntattgangactcttagaccangtggtggaattccaaaaaaagaaaaaattagctaggcatggtggcgaggcctctggtcccagctacttgggaggctgaggcaggaggatcgcttgagcccatgaggtggaggttgccatgagtttagattgtgccactgcactccagcctgggtgacagagtgagaccctgtctcaaaaataaaaaaaattaagcagattcagagttttccctgtaacgtcttctctcactgacttgcattccaatcctgtttcctgggttggaaagaaacagggagtctcacggctgacatgcctagaggagcccggcatcctgcctctgggcatcactgtcatgcccatatggaagtcagaaaaaatggacactcatggcctgagtgcagccgacttccctttccagcaaggcgatgat

SEQ ID NO: 12368 - DNA, 460 bp, Homo sapiens
  misc_feature (1)...(460): n = A,T,C or G
attgacgccccnaattgaagatccctagtccgtgtggtggaattccggcctcagtaaacttcttagtgagttcctaatagttccctaaggtgaggagagaagaaagttcctgctgctcctgctgcttgcgtcagcctcccttcttcctccccagggctgcaagtggaattcatcaaccccatcttcgagttctccagggccatgaatgagctgcaactcaatgatgccgagtttgccttgctcattgctatcagcatcttctctgcaggtgtggaggaggggcaatgggaaacagcaagagacttacaccaaggagggctgcaggtcccacaggaatcggtggggggagagggggggtgncttgngaggntgnangcatttgctgtgttattttaggatgagagagcttggctggagcatgtctctatattttggttgccatttggggtatggaactgga

SEQ ID NO: 12369 - DNA, 441 bp, Homo sapiens
  misc_feature (1)...(441): n = A,T,C or G
natgacgaccatattgacagcctgttggaattccctggactccaggcatctgagggctctgtctccccagtggcctcaggacagagcaaggcccccagcaggtgcctcgagactgccacacacctgccagaagcattcagaggagtctgtgagccctgagcctgggctcctgaggaggaggatccaaggctgggaaaccagggcccttccctaacctctggccagccatacctgtgttggccctgacagcagctgggtagctgactgcccggccccgctccgctgtgacagtcaccacatattctacgcctggcatcaggtcagtcagcagcgtcccgtctgcttcagggggcacttccagcctcaccctctggttgccggcactgacgtaggacaccacaaatcggtccacctcagcctggggacgcagccagccaagct

SEQ ID NO: 12370 - DNA, 562 bp, Homo sapiens
  misc_feature (1)...(562): n = A,T,C or G
nattcgaccactatcagtgtgcgggaattcgttactgcttctaatattacacttctaanaagctgaatttatactcatgtcctaaaggagaatatgtggtaataaagtatatttgttaagtaactaattgaaataggcttggttttaagagttccagtatataataatcacaaattgaaacctgacagtatcttgggagttccagtaatgtcacaaattagtgaataagcatgccagtgtgcaagggtaatgtaaggattgttagcctatctaaatattcaaaattactttaaaacttaagtatgttttctgatttttaagaattcagaagtgttctgtaatggattcagatgtttcatttgtagtataatgaaatgtttacagaaagataactttttcattaaaatatttttagaaaanannnnnnnnnnnnnnnnnnnnnnnnnnnnnnnnnnnnnnnnnnnngggcggcccttaaaaaaataggggcccttaaaaccccgtgaaacccccttgtgtgtgtttttattggcccacccttttgtggtcccccccccccccg

SEQ ID NO: 12371 - DNA, 481 bp, Homo sapiens
  misc_feature (1)...(481): n = A,T,C or G
tgcggatannnnnnaatcgtagactctgtcattgcggtcgaattcgggagatggcatacatgatggtgccactatccaagttatgactgaggagaaaaaagatttgagaggcaagaagacagattataggttggaatgttgactgtgagatgtctggggtcatcgggtagaaatgtccagcaagcctttggttatactggtataaagtcacacaggcctaggcaagtcaaatgtaaccacaagattaacttggaagtcctcagcatatagggcctctgcctccttataattataccacattgcctcatttattcattaaactacttaaagtccctcccaaaaaatatttacagtccctacttactttgctacgcaaaaggatatatgggttaatatttgaggtggtggatatgttaattagcttgatttaatcattccacattgtcttcataaatcataacatcactttgtaccccataan

SEQ ID NO: 12372 - DNA, 489 bp, Homo sapiens
  misc_feature (1)...(489): n = A,T,C or G
gcggcggcnngnnaattcgagncccttnnnntttcgcgnatccctagtccgtgtggtggaattccaaaagctctgctggatgcttcatcgcgtcactgcacctatttagaaaatgggatgcaggattcaaggaagaaattagaccagatgagaagtcaatttcaagaaatacaggatcaacttacagctactataagatgtactaaggagatggaaggcgacacacaaaagcttgaagtagaacatgtgatgatgagaaaaattattaaaaaacaggatgaccaaattgagcggcttgagaaaatcctgcagcattcaagtttgatgctgcaggtgtttgagagctagatgaagatatggacatttctggaattaagagccccctctacattgagcacaagacagtgacgaatccacattcttcagccagaaagtcacctctgagagccaaatgtctgactatagaaaggagagtcaaagaatgataac

SEQ ID NO: 12373 - DNA, 448 bp, Homo sapiens
  misc_feature (1)...(448): n = A,T,C or G
tggtgntnaccctgagaccccattgatgagcgtggaanncccgaggaggggtgctgggctctggccttctcatgcagagaggtccgggacagggtcagtatcgtgggcatgtgtatagcttcccaagttcttttacagtccctgctgggactccctgacttactttggttggttcctagtgctacttgttttacaaactacactttgtagaattgattagattaccttgtttatttaatgtgagtttgtgcctttttgtctcaatcttccaatacaggtatattgagaaaaaaagcagtctaataaaatcctagacagaaaaaaaaaaaaaaaaaaaaaaaaaaaaaaaaaaaaaaaaaaaaaaaaaaaaaaaaaaaaaaaaaaaaaaaaaaaaaaaaaaaaaaantnnnannaaaaaaaataaaatatttaatttttattttttttt

SEQ ID NO: 12374 - DNA, 452 bp, Homo sapiens
  misc_feature (1)...(452): n = A,T,C or G
ntggtgcttcccctgagaccccgactgagatccctcgacangcggnggaattcacgaacactgctttgaacttctatttcaccttaaaatgggggttataattcatgtgataatacaaatgacattgcgtatgtaaaatctctttgcaagaaggtgcagtataaataagctgtaagtaatgacactattttaaaacatggagcggctttactgaggaaatgtttttcttaggtgtgtgaaaaccaaaattattaagaatatatacacatttgggtttagaggagacaggccccggcttcaacccattttgataaacatgccccgtggctggcagagatctgggcgtgggaggatgctacagccgtgggtataacctctggcctcgccgccatcttgaccatagccccaaaggcacttgtgcccactgagaattacctgagaaaggtgccacn

SEQ ID NO: 12375 - DNA, 445 bp, Homo sapiens
  misc_feature (1)...(445): n = A,T,C or G
atggaggcattgaataggagaccatgggagnnggcnggaattcggngactgaagaagggccatgtaggggctcagcttacatttgtggcctgaatgaaaaactgtgtgggaagaagagccagccctgatcccaccccagtgggtcagagaggcctgacttcccacacagttatatgtgacaatgaggaaaacagggccaaagaggtgaagtcaggcttggaactggactcagattgaaaagctgactccatcccccaagcagcagggaagagggatcagggaagagtaattacttacatgtgtacagcacttgagagtttatagccatagacgttatgtcattcaaccctggcacagcctcatgacgtaggcattcttattttcccctacctgacacgtaaggaaactgaggcccaaagagccaaagtcacttgcccaaagacaa

SEQ ID NO: 12376 - DNA, 451 bp, Homo sapiens
  misc_feature (1)...(451): n = A,T,C or G
atcgaattgatanccntctgcagattgcaggaccttctggcatctcaatctctgcatctgtaaaaatgaagaaaataatccatctccctggatgacttcatgagattttttgtagtcatcagtgaggtactgtacatagacgtgctgtaaggacgaaaagttcttcacaataggatgcatgggaaagcaagcagggagcagtggaggaggctgaacccagaacgtgggctgaggatgctgggagggaacagggttgggggctgaatcctaacaggaggaagctactgagctgcttctgtaagttgggcctggatggaaaccctggaagcagtaactccaagaaagattcaaaagtgggacaagaagagcaagaaccaggaatggaaaaactccaaggaacatgagtgaagagcctcgaaaaaacaggacattcacagttcaggaaactacn

SEQ ID NO: 12377 - DNA, 438 bp, Homo sapiens
  misc_feature (1)...(438): n = A,T,C or G
actgagacatatgaagncgtgggaattccttaacataataaaggtcaaatatgaaaagaccacagctaacatcatacggaatgatataaaatagaaagcatttcaggaaaaggcacagatgcctgcttttgctacttgtattcaacacagtactggaagtcctagctagagccattggcaagttaaagccatccaaattaggaagaaggaaaaattatctatttgcagatgccataatcttatatttaaaaatcccaaaaatttcacaagaaactattatgactaataaacaaattcagcaaagttgcaagatacaaaatcaacactcaaaactcagttatgcttcactaacaaagacccatttacaacagcatcaaaaacataaaatactcaagaataaacttgaccaaggaggcaaaagacttgtacaatgacaac

SEQ ID NO: 12378 - DNA, 445 bp, Homo sapiens
cactggtagcctacatcaggcgggaattcgtacatagcttatttctagcatacagctgcctgtttatacctacttttttgttgttgatgttggtgcagcgtttctgccaaaatggaacatctataacaataaaaggagggtcaaaaactgaatttactatttgtatagaccatttcaattggctttcttacattcgtacctaaaaattttgtttggggcatgtgttttgtatttaagacattttgtcattgtagtgtatttaaaaaagaatgctggcaccattaaattatcttctaaggatatctttaacaattgtggggatagtgttctctgtggagctaaattttactttaccacaatgttttatatgttgaacagattttccttaaaaaaaagatccttaagtatttctatgtaaattaattacacattgtgctcccctacg

SEQ ID NO: 12379 - DNA, 475 bp, Homo sapiens
  misc_feature (1)...(475): n = A,T,C or G
ccgccccccnnnntttgagatccatatcagtgtggtggaattcgtagtggggaagagctacttatgtctctttaagccaagatatatttaagataacaataaagataaaatatatatttcactatctagatttgattttgacacaatgaaaagctgattggttcacaattaaatggacaaattttccacaagtaagagatgaaactcctggcttggaaatcctggggattgacaggttgaatgtccttggtctgtggtgagcatgttcacatttcaacacatgagatctggtgtgctttccgtatcagctcctcagattttgtgaaaaactagaagataattttttaaaaagcaatgttgaatacttagaatcatatttctaataaaaataagtcaaactatttaattttgataaacagtttcaaaacaaacatgaactgaacttatacttgatgacataattttgtaaattcan

SEQ ID NO: 12380 - DNA, 469 bp, Homo sapiens
  misc_feature (1)...(469): n = A,T,C or G
gaaaacactgagaacctaggaagngactgagaacctcggaaggngcgcggaantcaattcattggctttttgttcctcttttctctgtaatttgtttctaaacaaactccattttttgtttattagctgagtgttcctgagttgcctagtagcgtttatacaagtgaataggaaaataattaatatattattctatttagcttgtaaaacacatggaatctgtttaagatagcccttgtaaaattgaacatttacctgtattgtaagtacccacatctgtgtctctgaagtcctttgaaacatctcattatcttgaaatttttttaatgtttgagaacaccataagcagaatattctaacacctttggcccctgaaaatcctttaattagtttatggcttcatctccttatctatttaaaaaacatagtaaataatgtttatgggtttcagtctgatttttccttccct

SEQ ID NO: 12381 - DNA, 461 bp, Homo sapiens
  misc_feature (1)...(461): n = A,T,C or G
ggtgcnanaantttgagactcgtagacattagtccgtgcggtggaattcggaaactacctccgtatgttccgaggttctctgtacaagagatacccctcactctggaggcgactagccactgtggaagagaggaagaaaatagttgcatcgtcacatggtaaaaaaacaaaacctaacactaaggatcacggatacacgactctagccaccagtgtgaccctgttaaaagcctcggaagtggaagagattctggatggcaacgatgagaagtacaaggctgtgtccatcagcacagagccccccacctacctcagggaacagaaggccaagaggaacagccagtgggtacccaccctgcccaacagctcccaccacttagatgccgtgccatgctccacaaccatcaacaggaaccgcatgggccgagacaagaagagaaccttccccctttgctttgatg

SEQ ID NO: 12382 - DNA, 461 bp, Homo sapiens
  misc_feature (1)...(461): n = A,T,C or G
atagagacctgaggccgtgcggnggaactcgcccattcttgagaagaggacctcctttccccccacctcctccaggagccatgtttgtagcttctcgagattattttccaccaggggatttcccaggtccaccacctgctccatttgcaagtatgcttttttaaactttttttttaaagctcaatatgtgttttattaatcggagatttaattttactatctgttaatgtagtaacacagtggaggaaagttttttctagcattctgtgaatctgaaaattctcattacttttccgaattgggaaggcagccagccataagtggactgcaatgaggtttcagcttgattcatcttaataatatagaattatttctgtattttggcagtcaagaaaataattgactttttgcaggtcttacgataaaactaaaattatctgtaccttatttggtagcaactg

SEQ ID NO: 12383 - DNA, 448 bp, Homo sapiens
  misc_feature (1)...(448): n = A,T,C or G
ttactatggaaacctccgcagtantgtgaactatgcgaaaagccgggagaagcangcaacagttactggattatccagaagatgacatacagttttcattttgtcttttttttacgatcacaggtgggaactttggtgcggcagaagtgaaagagctggttctaaatggtgcagacacagctgttaacaaacaaaatcggcatgagtttgtcgatgcttatgtggattacatattcaataaatcagtggcttccttatttgatgcttttcatgcgggctttaataaggtctgtggaggaaaagtccttctgctctttcagcctaatgaactacaagcaatggtcattggaaatacaaattatgattggaaggaactggaaaagaataccgaatacaaaggggaatattgggcagaacatcctacgataaaaattttttgggaagtatg

SEQ ID NO: 12384 - DNA, 479 bp, Homo sapiens
  misc_feature (1)...(479): n = A,T,C or G
aggggggnnnnnagnaggctgagaccctaggaagactgatgaccctagtacatgcggtggaattccagaagaggaaactgaggcccaaaagaaagggccgtatttgaggtcgtagggattcacagtacagctgcagaacaggactcctcccctggtccggggctgcgactgtgtcacatggacaggctcactggttatgtgctccaccaagttatatgcacaaacgttttgacactacagtcccgcctctggaaataaccttccctatgctcgcacaagattcaaagatgggcatttaccatagcaccatctaatagcaaaaacaacaaaaaacaccccaaacccaaatcctgaatattcgtgaagagaggaatggtgttaggaagtatgatacatccataccgtggaacactatgcaaatgcatcagtgaaaccagcaagatgcatgtgtaactggtcccatttgttaaatacagatg

SEQ ID NO: 12385 - DNA, 457 bp, Homo sapiens
  misc_feature (1)...(457): n = A,T,C or G
cgcatcgttaatgagaccattngaatactgatacctaggcagngngcnggaattcgcctgatgttgggagaagcatgcaacagttactggattatccataagatgacatagagttaacattttgtcttaattttacgatcacagttgaaaactttggtgcaacagaagtgaaagagctggttctaaatggtgcagacacagctgttaacaaacaaaatcggcaagagtttgtcgatgcttatgtggattacatattcaataaatcagtggcttccttatttgatgcttttcatgcgggctttcataaggtctgtggaggaaaagtccttctgctctttcagcctaatgaactacaagcaatggtcattggaaatacaaattatgattggaaggaactggaaaagaatacagaatacaaaggggaatattgggcagaacatcctacgataaaaatttn

SEQ ID NO: 12386 - DNA, 461 bp, Homo sapiens
  misc_feature (1)...(461): n = A,T,C or G
cggtaattgagcccttgnnntttgacngtccttagtccgtgcggtggaattccaacctctgacgttctgcgccttcctaggagagtcttacatgtgttgagatttcacaagcaatgcgagttgtaaaataccagctctacaagaagctaggctctgtgacggcatagttttcagtagctttatcacaatattcacaatggagaattatatgacatggtagcagaaataggcccttttatgtgttgcttctattttacctcaaattgtagatatagggtaatcaataaaatccatccatgcctttcacacactannaaaaaaaaaaaaaaaaaaaaaaaaaaaaaaaaaaaaaaaaaaaaaaaaaaaaaaaaaaaaaaaaaaaaaaaaaaaaaaaaaaaaaaaaaaaanngggggccccccctaattaaaagggggccctaaaaaccccgtttatctccccc

SEQ ID NO: 12387 - DNA, 460 bp, Homo sapiens
  misc_feature (1)...(460): n = A,T,C or G
aggggaacnnnnttcgagacctgattacatgcggaggaattcccccgccactgccagaaagtactgtgcccttcagcaatggggtgctgaagggggagttgtcatacttgggggctgaggatggatggaccatggatgcggaagcagatcattcaggaggttctgacaggaacagcatggattccgtggatagctgttgcagtctcaagaagactgagagcttccaaaatgcccaggcaggctccaaccctaagaaggtcgacctcatcatctgggagatcgaggtgccaaagcacttagtcggtcggctaattggcaagcaggggcgctatgtgagttttctgaagcaaacatctggtgccaagatctacatttcaaccctgccttacacccagagcgtccagatctgccacatagaaggctctcaacatcatgtagacaaagcgctgaacttgattgg

SEQ ID NO: 12388 - DNA, 475 bp, Homo sapiens
  misc_feature (1)...(475): n = A,T,C or G
cctagaacccgagagccgtgagcgagaaccccccccangtctnctgacattgtgttccaggctgcgggctaagccagacagagtttgcctctggttctttccaccgtgggaagcgaacgccacccccacccgcctttgcctgcgagtctccctcgctggcagaagggaagccggcccggtcccgggaggaagatggcgctgcgaattcgcagaattttagagttggatctttgtctcatggatgctcttaggagacccaccaaccaccaactccttgtattgcaactggaccccctcgacctgggtgaatgtactcttttcagcaaccatatcctccctcctgttgccaggtaaggtgagaagcaattcctctgcctagaagctctgccgggtgaaatatcaggagatcccacccaagctttctcttgcgtgtagcctatatccagcacgggagcataggctaatcctgcagttg

SEQ ID NO: 12389 - DNA, 465 bp, Homo sapiens
cttcgacatcgtagaccactagtccaagcggtggaattcaaaatttcagaaaggtgcatattaaagtgctttgtaaactaaagcatgatacaaatgtcaatgggctacatatttatgaatgaatgaatggatgaatgaatattaagtgcctcttacataccagctattttgggtactgtaaaatacaagattaattctcctatgtaataagaggaaagtttatcctctatactattcagatgtaaggaatgatatattgcttaattttaaacaatcaagactttactggtgaggttaagttaaattattactgatacatttttccaggtaaccaggaaagagctagtatgaggaaatgaagtaatagatgtgagatccagaccgaaagtcacttaattcagcttgcgaatgtgctttctaaattataaagcacttgtaaatgaaaaatttgatgctttctgtatg

SEQ ID NO: 12390 - DNA, 465 bp, Homo sapiens
  misc_feature (1)...(465): n = A,T,C or G
cccccgcccngngnntatagatagcntncntaggccgngncgnggaattcaagtgatccacctgccttggcctcccaaggtgctgggattacaggcttaagccaccatgtccagccagccaagtatttggttttaaacatttgtattcctttgtgcaagggattgtattcctctgtacaagacctttaagcacctcttcaagaaatttagtctttgtgtagctgctaaccttactgcaatatttattttcccttattttcccatactacttagttgacaaatggcaatcaagctcacttgttctccctctctctgtctcccccccatgtacacatatatatatcccttcagcttgacttgctattatttttcattgtataaatatgaaattcttggcatttcaatatggcatttgtttagggaaaaaatatgtaggtcactagagaaaaatgttaatttttttcc

SEQ ID NO: 12391 - DNA, 459 bp, Homo sapiens
  misc_feature (1)...(459): n = A,T,C or G
tggcacanntttgtagactcgagtacattaggccagagcggtggaattcctccagcctgggtgacagagtgagactccatcataaataaataaataaataaatgggtcacattaagcctttaagtttgtggtaatttattattcagtaatagaaaacaaatacagatactctcccatgatgtttttcccatgatgatttcccatgatatttacaggttttgcccacatttgaggggtatgtggaaattatacagagcatgtacagcgggaggcttatagtgtacgtactgaaatgtggggttggagccccaacacagagaccccagcaggacactgcctagtagagctatgggaagggtgctgccaccctccagacttgagaattgtagagccaccagcagcttgcactctgagcttggaaaagccacaggcactcaacttcaaccatgagggaagccc

SEQ ID NO: 12392 - DNA, 451 bp, Homo sapiens
  misc_feature (1)...(451): n = A,T,C or G
atagtagactagtaggacctgtggagagagtgcagacttanaggagctgagtctaggcccccgggatgcagggacacgtggtcgacttgagagtgcccaggccactttccaggcccatcgggacaagtatgagaagctgcggggagatgtggccatcaagctcaagttcctggaagaaaacaagatcaaggtgatgcacaagcagctgctgctcttccacaatgctgtgtccgcctactttgctgggaaccagaaacagctggagcagaccctgcagcagttcaacatcaagctgcggcctccaggagctgagaaaccctcctggctagaggagcagtgagctgctcccagcccaacttggctatcaagaaagacattgggaagggcagccccagggtgtgggagattggacatggtacatnctttgtcacttgccctctggcttgggctc

SEQ ID NO: 12393 - DNA, 444 bp, Homo sapiens
  misc_feature (1)...(444): n = A,T,C or G
gatgaggcccctatgatgactcttagaccangtggtggaattcccgcctcctgagtacctgggactacagggtaactccacacgtaaagacgtccatcctccccaaactccgaagaattaagaagaaaattctgtgaaatctgacaagctgagtgttgcatacagacctgcaaaaggcccatttgccatgacagacacctgaaggaaaaagaggagagtgaggtccaccagataccaagacagaatgatgatggtgcagtgggaggaagacagacaacgggcccagagtggggagcccatccccagacccccacagacacaggacccccacgtgggaccagagacagaggtggaggctcaggaccctggagaaagaatgcagtatccccagatgggacaggatacttaatgggaaagaataaaactggacccctgcacaacact

SEQ ID NO: 12394 - DNA, 477 bp, Homo sapiens
  misc_feature (1)...(477): n = A,T,C or G
cgccgaccaaatgataccctacatcgagngcataagacacancanaccanggntgatgcaacaggggacatgtgcaacgtgcagactccacgttttgctaccagaagaattccctggtcaccccagccggcagttgcccaagatctgatacaaggtacccatgaagagattatgaactacttgaaggtggagactgtacggtggtgtgttggagctggcttgtaatgtcttatgagtgacaatcgttagtttgaggaattttgtgagacagttgtcaaattgttgctagcttgaaatctgcggcaattggagtatttacaccatagaaatgctataagtgaagacctacctttcccttaagagctagttgttaaacctttaccagcataccactggaccttgtctaaaatttctttgtgttcccagtgtcttgcccagtagatacaagataaatattgccagaatcagatatcaggn

SEQ ID NO: 12395 - DNA, 432 bp, Homo sapiens
  misc_feature (1)...(432): n = A,T,C or G
cacaggttatgatctttttaattactggcttctgatttctttcacttctgatccttttcctttttctcagatgtagctgagtcttgatcattttaagacaacgatgggtagaattttgagattaatgttaattttccctttttgttaatttcagtcccctctcactatgcttttgtccagaaggatcaagaattctaccatcccttgggtctttgtgtataaacaatgttaaataaaggtagactcagtctttaagatattagacagtttttttagtccatgggattgtaaatataaacattaactttcctataagaatattttggctttgtaatctatagcctcaaattggtatttattatggattcactagacaaacagctggttccttattgtcttttttctttagtggttctgatttgctatcagtan

SEQ ID NO: 12396 - DNA, 431 bp, Homo sapiens
  misc_feature (1)...(431): n = A,T,C or G
aaaccatgaatcccctggcttaatgccaaattatagccttagaagaataattgttccccaaatgggcaagaaaggttctaattgtcaagagtaacccaagtaagaacttttggaatatcaaaaggaaatgagcaaaatgtaaatagaggggatatgtactttgctgagtattaaattggaactacctggtgtgtacctggactaaatattctgttcactggctcagttgagtacctatacttttcgttttttgattgggtttaggtggttatgtcaaagttaaatggcaaaattaggaatttaacccaggtctggctggttcctttacaatacactgctttcttaagtacaaataatttaattgcaatatttaggaaaagtaggtacctttgaataatgataagaaacagtcttggttaagaatatgagtn

SEQ ID NO: 12397 - DNA, 466 bp, Homo sapiens
  misc_feature (1)...(466): n = A,T,C or G
ggcgcgccgngntgnntatagatagcctncntaggcccngncgnggaattcctttgttgaggactcacagacacagtctcctttcttcaagatctttacaatgcatgacctcactaacacacagggatggtctcccagagggtctgtgctgttccttcactcagaacatcaagatgcactgaagtaaggatcctctattctacagttcctgctagctgagctattccatgggggcttcagcaggaaattccaaggttggctttgacaagctaaggccggctggtggagcacatcgagttctggaggttcatgtgtgttttcatgaagatctgtctgcccgtagcagataaagagttgctgccccactcctcctggggtcttctattttcctgggaggaatttctggattaactgaacacacacacacacacacacacccttttgaagcatcaacagtaattctgag

SEQ ID NO: 12398 - DNA, 460 bp, Homo sapiens
  misc_feature (1)...(460): n = A,T,C or G
gagnagtaantttgtagacattagattgtagacattagtccagtgcggtggaattcatcgcaactacgctccgctccgcgggccaagaaactggagaaactcggagtgtactccgcctgcaaggccgaagagtcttgtaaatgtaatggctggaaaaaccctaacccctcacccactccccccagagccgacctgcagcaaataattgtcagtctaacagaatcctgtcggagttgtagccatgccctagctgctcatgtttcccacctggagaatgtgtcagaggaagaaatgaacagactcctgggaatagtattggatgtggaatatctctttacctgtgtccacaaggaagaagatgcagataccaaacaagtttatttctatctatttaagctcttgagaaagtctattttacaaagaggaaaacctgtggttgaaggctctttggaaaagaaac

SEQ ID NO: 12399 - DNA, 470 bp, Homo sapiens
  misc_feature (1)...(470): n = A,T,C or G
nggcgatgaggcctttggncggctgaggacctctatcagtgcggcggaattcgaactgtgggctgggcttacaccagtgcaccatcagcagcacccggccgagcccccacagcaggcgctcaagaaatgcttgtctctgaatgacataagcatggtattccccagccagccgtccgtccgtcctggtcaacggctgatcctgcaggattccctaacgggcctccatgggactcagccaagagtaatagcatgaagtggggtgtggacttgagactacgagccacgtgagagtctgtgcacccaagtttaacacccattgggaaatgttcacttgaacacttcggatgaaagctaatagagcactttgattaatagatgcacgcttgattatgtgatctcccttgctcataaacaaaatgcccatgttggtcctcttgcctggacctggaaantccgggcgcttgtggctt

SEQ ID NO: 12400 - DNA, 463 bp, Homo sapiens
  misc_feature (1)...(463): n = A,T,C or G
ggcgcgcgngtttttactgatagcntncatagcacnggcnggaattcttttttttaaatatagacagtctccctctgttgttcaggccaaagtgcagtgtcgtgatcacagctcactgcagcctctgactcctagggtgaagcatcctcccacctcagcctcctgagcagctgagaccacagatatgcgccactgtgcccagctaatttatacacacacacacatatgtatatgtatatatagatagagatgggttttgccatgttggtcaggctggtcccgaactcctggccccaagagatcctcccatgtccaccttccaaagtgctgggattacaggcatgagccaccacactcagcctccatttacactttttaaattctgggggtattttttaaaattcagaaatactaaaaccaaaataggatatatttttgatggtttcttttagcatataaagct

SEQ ID NO: 12401 - DNA, 463 bp, Homo sapiens
  misc_feature (1)...(463): n = A,T,C or G
cttcgagacccctagtcagngngctggaattcgcacgtgaaaacaattagggccagtggtattaactactttataaaattttatttttgtttgtaagaagtcatctacttaaggcccagttaatataagtggaatcatcatagtttaaggaatacccagagattgctgctgttctatttattttacagaaaggatagctagattgaaagctcttcagtggaccttgagctaatagatcttttaccactaaaagagcattattctcatgtcataatgagaataataatttacatacttggcataataaatgcctaaaagacattttattttctgaatctatttttttcttgctataatggggatattgtaaattatgcatttgtattaatggtatttcttaaagcaatctatgtaactgtaaattaaaccaatctacaaactattgtaggcatctgtaaattcn

SEQ ID NO: 12402 - DNA, 467 bp, Homo sapiens
  misc_feature (1)...(467): n = A,T,C or G
cttcgacnccattaattgangacccttagtccangtggtggaattcgtggtgaacgtgtatgcagatggaaaggaagtggaagacaggcagagtgcaccatatcgagggagaacttcgattctgcgggatggcatcactgcagggaaggctgctctccgaatacacaacgtcacagcctctgacagtggaaagtacttgtgttatttccaagatggtgacttctacgaaaaagccctggtggagctgaaggttgcagcattgggttctgatcttcacattgaagtgaagggttatgaggatggagggatccatctggagtgcaggtccactggctggtacccccaaccccaaataaagtggagcgacaccaagggagagaacatcccggctgtggaagcacctgtggttgcagatggagtgggcctgtatgcagtagcagcatctgtgatcatgagaggcagctctg

SEQ ID NO: 12403 - DNA, 456 bp, Homo sapiens
  misc_feature (1)...(456): n = A,T,C or G
gattgtagacattanccangcgttgtagtcctctatccgtgcggtggaattcgcttggacaatttttcataagctcaaatactttagaattgtaaagtctctggctatcgtcagcctggcaaggagaaaaaaatgaaggaagggggttggactaaatctaagtcagcggttttcatctgtgttaatcagacacccaggttccacagagctgcctggatagctgccagaatcaagcagtaagagaccttcaggctgtggctccagtccccagctccaaccctgcttaactcacagcagctctttcattatctgttttatacgtgagttccaagtatgatcacatctgaaaatttgtaccattaccctaagaaaaaagttcaaaaaccattgttaggtgactttttaaggtcctcattagctctaaatttttaatcctttggactctagtaatatagt

SEQ ID NO: 12404 - DNA, 505 bp, Homo sapiens
  misc_feature (1)...(505): n = A,T,C or G
cggggcnnnnnnnnanctaaagacntcntcagagacgngcaannccactgttctaggcttggggaatagagacaaccaagatagataaaatccttacctcatggttcttacaatctagtgaaataacttcttaggaaacattaaagtttcttaagtggcatttgataattttcatatgccaaactcctcttaaaggaatacttatctttgggccttgcttcctcatttgttaagtgaggaagatgaactagatgatctctgaggttcttttatgttcagaacttgtattacgtttttctatttttattttttttagagacaggggtctcgctctgttgcccaagctggagtgcagtggcgtgatcatggctcaatgcagcctctacctgctgggcccaagggatcttcctgcctcagcctccccagtagctgggactgcaggtgcacaccaccacacccagactaattttttttttttttttaagaaaagacaaagtcttgcttg

SEQ ID NO: 12405 - DNA, 413 bp, Homo sapiens
  misc_feature (1)...(413): n = A,T,C or G
ctaatggttctgccttcagtgcagacaatatggaagagtgtgacagatgttatcattgctccattgtgtacgagcgtaggacgatgcttctcttctgtcagcctgcaactgagccaggattgaatacttggaccccaggtctggagattgggatactgtaatacttctttgttattataacataaaagcaccactgttctgttcatttcctagctgttctaattaagaaaactattaagatgagcaaccacatttagaaatgtttattgacaggtcttttcaaataatgcttttctaattaatagccaaagatttcatatctaactttgtaaccagaattatacagtaagttgacaccacttagatttaaaggcagacagttttgctttagtacaatagtatacattntataa

SEQ ID NO: 12406 - DNA, 493 bp, Homo sapiens
  misc_feature (1)...(493): n = A,T,C or G
natggagacattgacangcgggnacctgagaccataggacgngcggnggaattccaagaacatttttcaaatgtggtcagaggtgattagattcttccggtatttgatgagtttccatatccaaccaatgtagaagagagtttgaagagaactatagaaaacgatgctcatcttgttgaagttaatttgaataatataaagaatattccaattccgaccctaaaagattttgctcaggctttggaaaccaacacacatgtgaaatgttttagtcttgcagccacccggagcaatgaccctgttgctactgcttttgcagaaatgctgaatgagaacacaactttgaagagcttaaatgtggagtccaactttatcacgggagttgggattccggcactgattgatgcgttaagagataatgaaaccctggcagagctcaagattgacaattagaggcagcagttggtgacagcttgtaaattgggaatggccg

SEQ ID NO: 12407 - DNA, 489 bp, Homo sapiens
  misc_feature (1)...(489): n = A,T,C or G
agcccnagacanagcnaaatacctaatacccttcggaataccgttggacctcggaaagngcggnggaattcccgctcccagcgcgggattctggagggaaattgagggagacttggaaaccgcgccaggcccaacgggtacctagaagggagacaaagccaggcctgctgcccagtttgagctctgggaagaagaggagcaggccgggacgcccaccgaggtatcccagaggtgacagaacttgatctgggcctggaaggggaagaattcgggaaaagcaacgtggggcattccaggtaagagaaatgtgtgctgggtgcggggggaggtttctggagtggctcangagaaagcagaggtcattatcaattcatttggtgagatggtggaagagtaagaaatgaaataggtaaatgatttacggccagattctggaggggagtttagacttcgtgacgttagtttacctgtgtgagttgaatgttgctt

SEQ ID NO: 12408 - DNA, 458 bp, Homo sapiens
  misc_feature (1)...(458): n = A,T,C or G
ggggnatcgtagacactagtccattgaggtgcaattccaggaagcaaacttggactttacaaaaacaagagtatcatctgtgactataacacctaccacgtggttcaattcaatcgtttacctttggtggcgagtttcatagccagcagcacctgccaatacgggactaattgtgagcctacaaaaggaacttgctccattgattgaagaactgagacaagttgtggaagtttcttaatctgacagtggtttcagtgtgtaccttatcttcattataacaacacaatatcaatccagcaatctttagactacaataatacttttatccatgtgctcaagaaagggcccctttttccaacttatactaaagagctagcatatagatgtaatttatagatagatcagttgctatattttctggtgtagggtctttcttatttagtgagatctanggatac

SEQ ID NO: 12409 - DNA, 466 bp, Homo sapiens
  misc_feature (1)...(466): n = A,T,C or G
natgaagacatattgaagncccgtggaaacgcagcaggtgttaaaagctccaagaactggcctgtagccctacttaaaaagggaaactgaggcagtaatagataccctccccacccccaacaccaccactaccataggtggtgactcttcctgctcaggggcctgcagccaccatagagtctgcctaaaggcacatgctacccacgtgcgtgggggagaggctgatcagctgcatcccctgtcctcataggagtgcctcctccctgggcacatgggccagaccctggggagagcaggggaaggtgtgagcattgtccatgccagctgtgtgccaggcactgggccccacatgtttcccacaggagcacccttcatcctggacaattccctcccctcctgccaccgcacacctgctgtgtgcctggcacattcctaggcatcactaggggtttgcagaacaatagan

SEQ ID NO: 12410 - DNA, 445 bp, Homo sapiens
  misc_feature (1)...(445): n = A,T,C or G
attgatnacctgaggaccgttcggagagagcgcattagttctattcagatccattggatacagtgcttccaaatgtactgatttataattgcaatttgaatattatgtgtttaaaacctgggccccatcacctaaaggataaaattcaaactggattctgtctacctgtttaaccaaaactactttcaattcttagaatttattatgtttcaaaactctttgtatatactggtaccgcttccctacttgcggctttcatactttctctctttcttctatccatttctcatggacaaatacctattatgtggtgagaattgtgaaagcagaggctatctttgggtttcttttatatccccagcggtaggataagaccacataatcgtaggcacagcagaacagtgtgttttacaatgtgtctatggacaagataattctggtcaag

SEQ ID NO: 12411 - DNA, 557 bp, Homo sapiens
  misc_feature (1)...(557): n = A,T,C or G
attcggattactantccgagtggnggaattcgaaagaaagaaaaaagaaaagaagagaggaaactggaacagataacctcactcacagctggaggttggtcggctgacagtttaagccatgagggtgactgagccatgtgcctctcacctttcaggctacctctggcttgttcacatgatggttaagagtggcaagatcagtgcaaaatgacaaagtagacagttccaagcccgcgtttcccacagaaacatcaaaaaacaagcagaaactgtcagatacaactttgtcagaactctgggaaacagtcaaaggtttacggtagtccagtgaatgctgaatcaagaagaaagacaacttcaaaatgatcaaaagcttttgatatttcgactttggcgtgccccacttgccactgccctcccttgtgtgacagcagtagtgggaagagggaagcccacactcccagcatgagactctcattcctccttccagagggagcagagcagactntattngtagatgatagtgatgtccgctctaagctgctgggagccactga

SEQ ID NO: 12412 - DNA, 464 bp, Homo sapiens
  misc_feature (1)...(464): n = A,T,C or G
gaaattaaatttgangaccactagnnncttgatgacccctagtccagngtggtggaattcatcagtgggaaaacaaaagtttatttcttatgagctctcagagcgaggtccacgccccctcctactgtcccccaacatactgttattcaaatgtgtaaaaggttgaactcccactctcccgtgatgccccaactcatacagacacaaaagcaaaggtgccatcatgacctacaatactgtttggcccctctgaccattttggtctcttggttttgagagggaccgaaatggctgtttttaaggactctctttttgtgtatataatttcatctgatgtgtggttttcagtctatacagatcagagctggggcctttgtagccctggctccagaacctattcaatttctattcctatttcttatacctgcaagaacttttcaggaaaatgggaaaacagtggctcc

SEQ ID NO: 12413 - DNA, 447 bp, Homo sapiens
  misc_feature (1)...(447): n = A,T,C or G
nggggctgnaacactgacttagtctaccatcgnanaacnnnnaaataanacgggngactggggtgttgagcagtgcattttctggtttttttctgcctccattcccttgacctctgatgccagggggtcattggaaacgtcaaagacgggattggccatgagtttagtggccgctttttccatgacagaagagagaggcgtctgggcggtcttgcttctcaggagcctggcgccatcattgagctgtttaacagagtgctgcagttcctggcttctgtggtgtcctctgaacagctgagtgacctgtcctggcctgtcactgagtttgctgaggcagggggcagacggatgcttcctcacctgcactggaatgccccagagcacctggcctggctgaagcaggctgtgctcgtgttccagcttccgcagatggaccttccacccctg

SEQ ID NO: 12414 - DNA, 445 bp, Homo sapiens
attagtagaccactagcacgtgcggaggaattccatttgtcctcttcaaatccattgaatacagtgcttccaaatttattgttttataaggcaaatatgattattatgtgtttaaaacctgtgccccatcacctaaaggataaaattcaaactggattctgtctacctgtttagccaaaactactttcaattcttagaatttattatgtttcaaaactctttgtatatactgttaccgcttccctacttgcgtttttcatactttctctctttcttctatccatttctcatggacaaatacgtattatgtggtgagaattgtgaaagcagaggctatctttggttttcttttatatccccagtgttagtatagtaccagataatcgtaagcacagtagaacagtgttttttacaatgtgtctatggacaagataattctggtcaa

SEQ ID NO: 12415 - DNA, 477 bp, Homo sapiens
  misc_feature (1)...(477): n = A,T,C or G
cgtggaactnnnaatcgatagacgtacattagtccagngcggtggaattcgaagagggacataagataaaatgatgttatacatcaatatgtatatatgtatttctatatagacttggagaatactgccaaaacatttatgacaagctgtatcactgccttcgtttatatttttttaactgtgataatccccacaggcacattaactgttgcacttttgaatgtccaaaatttatattttagaaataataaaaagaaagatacttacatgttcccaaaacaatggtgtggtgaatgtgtgagaaaaactaacttgatagggtctaccaatacaaaatgtattacgaatgcccctgttcatgtttttgttttaaaacgtgtaaatgaagatctttatatttcaataaatgatatataatttaaagttaaaaaaaaaaaaaaanaaaaaaaaaaaattcaacaaatatcattcttatat

SEQ ID NO: 12416 - DNA, 473 bp, Homo sapiens
  misc_feature (1)...(473): n = A,T,C or G
gaggggctnnaatcgatagcattacattagtgcggngcaattcgncgggagttcgaaaccagcctgaccagcatggagaaaccctgtctctactaaaaatataaaattagccgggtgtggtggcgcatgcctgtggtcccagctactcgggaggctgaggcaggagagtctcttgaacccgggaggcaaaagttgcaatgagctgagatcgtgccattgcactccagcctgggcaacaagagcgaaattccatctcaaaaaaaaaaggtgggtaaagggccatgagcccaaaccactaggtggttcaccttttcatctgaaaatgctttactctgactatgtgctatggggttttatttccagaaaatatagctctccttttttctgcatgagggatacatcgtggtgccacatgctttaggcaatttaaacaggagagatgagaggaaaatgcaaccaccacatctgacttg

SEQ ID NO: 12417 - DNA, 454 bp, Homo sapiens
  misc_feature (1)...(454): n = A,T,C or G
nattgaagaccgaggaccttgcgccgngcggnggaattccgaacctttcgttgattgcaaggagtgtggccggaagatgcatcagatttgcgttctgcactatgacatcatttggccttcaggttttgtgtgcgacaactgcttgaagaaaactggcagacctcgaaaagaaaacaaattcagtgctaagaggctgcagaccacaagactgggaaaccacttggaagaccgagtgaacaaatttttgcggcgccagaatcaccctgaagccggggaggtttttgtccgagtggtggccagctcagacaagacggtggaggtcaagcccgggatgaagtcacggtttgtggattctggggaaatgtctgaatctttcccatatcgaaccaaagctctgtttgcttttgaggaaattgacggcgtggatgtctgcttttttggaatgcacgtccan

SEQ ID NO: 12418 - DNA, 443 bp, Homo sapiens
  misc_feature (1)...(443): n = A,T,C or G
attgtgggaccctagtccttgaggngcaattcaatttaaaaattagctgagtattggggcatgtgtctgtagttgcagctactcaggaagaggaggctgaggcaagagtattgagcccaggagttggaggctgcactgagctttgatgacaccactgtactccagcctgggtaacaaagacagaccctgtctcttaattaaaaaagattgattctaggactgtggaagagatagttaaacagcatgggatatgaaggaaatcctcagcagtattaattttgcattccaatttcatgttgacttgatacctacgatggctttttgttttaaaggcttttatcttgagaacatgatgtctgtagttaaaggtattggcgtattccacacatctgtactattcttgagtatgatcgcttagggtgtcaaattgagaaccaggcaga

SEQ ID NO: 12419 - DNA, 487 bp, Homo sapiens
  misc_feature (1)...(487): n = A,T,C or G
agccnttgccccccgacgcccccccnattgatncccttttgagaccatctgaccangcggnggaattctctgaatgttactttatcatgattgcactgcaactttttccttaatataactgcttttgtaagaacggtgatattggagtgattaggataaattcaatggaatttgagaagcaatggcagcgggataatttacagtcactgatattacgagaggggtctttttgtaaacctccttttcaatgtcaaagcaccaatttataaaacgctgcagatgtagaggttatgtgcaactgatctgtccagtttgtgtatgaaatggatttgataaagtttttgctagttatttactacattttgggattaataagtgatttatatgcatatttttctgtaaatctacagttttttgtacaagatattctacaagttatgaagctaagggaagaaaatgccaaagatacctctagttatgttgaacn

SEQ ID NO: 12420 - DNA, 452 bp, Homo sapiens
  misc_feature (1)...(452): n = A,T,C or G
nattgaagatcgttagcccatgcggnggaattcactggaacccaaaggtaaagacactcaaggacagacatttttggcagagcatagattaaaatggcaagttccctggctttccttctgctcaactttcatgtctccctcttcttggtccagctgctcactccttgctcagctcagttttctgtgcttggaccctctgggcccatcctggccatggtgggtgaagacgctgatctgccctgtcacctgttcccgaccatgagtgcagagaccatggagctgaggtgggtgagttccagcctaaggcaggtggtgaacgtgtatgcagatggaaaggaagtggaagacaggcagagtgcaccgtatcgagggagaacttcgattctgcgggatggcatcactgcagggaaggctgctctccgaatacacaacgtcacagcctctgacagagg

SEQ ID NO: 12421 - DNA, 456 bp, Homo sapiens
  misc_feature (1)...(456): n = A,T,C or G
cattgacnatcgtangaccctctagtcagggcggtggaattcgtgggacgccaagactggagaggaagcgactgcggggagtatttccattttaaccggaaacaatccctgaacccacaggaatgaatgcctaatggtggagtttcagccatcagtgacaggctgaacccagactcccagggcacctgcttgcacctttgaatgatggcctgaactatgaacaaacgggactatatgaacacttcggtacaggagccccctcttgactactccttcagaagcatccacgtcattcaagatctggtaaatgaggagccaaggacaggactacgaccactgaagcgttcaaagtcggggaaatcactgacccagtccctgtggctgaataacaatgttctcaatgatctgagagacttcaaccaggtggcttcacagctgttggagcacccagagaac

SEQ ID NO: 12422 - DNA, 485 bp, Homo sapiens
  misc_feature (1)...(485): n = A,T,C or G
cgggcncnacctgataacttgggaacngtcgggaantcctggggctgtcagctgcatcgcaaatctgtgggctctgcctcctctggctctctccttattttgcctcacagatatgtcccccagtacacatcttgcccacatctaatcctggctcagtgtctgcgtctcagaggacgtggaccaaggcacttgccgtctcaggcttagttgacccttcaacctcctgagaactctgggcccaggcaaccctagagaactgactcctgtccatgttctcctttctctggaaaccacttagctgcctccgtcatgctctgggcaaaggcagggcaggttgggagaaggaatcagtgaggctgaagccccagcctagaggtcacagggccgcctggcccaggagaaatcccctgcaccaggcatttgcccacatggctacaagtgaacgttgggatacggagtgttcctttttgttatgaaactggagt

SEQ ID NO: 12423 - DNA, 453 bp, Homo sapiens
  misc_feature (1)...(453): n = A,T,C or G
ngtggtcttaanccagggngcctgnngngtttgcanaaacnnngnaantnanacttgcttgtcttatattaatactagtcaattatgtcaagtacttaaggtatactaatttctgttatttgtatcttacgtatagtgaacttgttccttatatgattgtaatttttgactgtaaaatcatcttcagcagaaattatttttctcactgagtactgtgtttcttgggttgtacaagtgtctctatcctgcaacacagggtagtggaaattgagagcctaaatacgtttgcatattccataggtttaggatttcagcttctcatatgggcctacttttttttgtttgtttgtttgtttttgttttttctacctggaattccaggtagatggcaagttccttttttacttccttgggcaaggggtagagtttttctagtctttcttacatgaaggg

SEQ ID NO: 12424 - DNA, 470 bp, Homo sapiens
  misc_feature (1)...(470): n = A,T,C or G
tggggctnnaatcgatagcattccatcagngcggngcaattcgggaggattgcttgagtcggggaggctgagccttcagtgagccatgatggagccactgcgctccagcctgagcaacagagtgagaccctgtctctcaaaagcaaaacaaaatgaaagagtaagaccttattttctaggcaagatggccagccattgacagtttttaaacgaaggactggtagataaaaattgcactgtagtattttggtggctagaagcctgactaaaagagaggcttgttttgatagtagaattactttcacccaaaattaactgtacagaatagcacaatggttggtgttaagtatttaatttttagtcaggttggggtcttctgtagtgttttaaagaataaattagccgggcacagtggctcatgcctgtaatcccggcactttgggaggccaagacaggaggactgcttgagt

SEQ ID NO: 12425 - DNA, 553 bp, Homo sapiens
  misc_feature (1)...(553): n = A,T,C or G
cttcgaattacgagtnccgtgtggngcaattcgctntgtggattttgtcagttactggtttacagtttgttactagacttttagtgacgcggggctatgagagaatataagtagatcagatatcacatcagagctgaaactagggcaatttagtcctaatcttagttctgatttttaactttgattctatgctctctggaggtaagaaaaacaccaactgtgactacatatacatctttttcatctttaagaacatactggcaaacaattactaccatttatataatagagtttataatgcatttttcacaaaccaaacctgaagtactttatcctattggatcatggcaaaaaccccaaataaactgctgaagtacacagacgagctgctcttctgttatcagcctgactgcgtaccagctctgtgtgaggcgtctggtgaattcccgacccacacatagtctcatagtctcatttttttttttttttttttgaaacggagtttcttttttccccaggtggagggcgngggcggatctaattactggacttc

SEQ ID NO: 12426 - DNA, 463 bp, Homo sapiens
  misc_feature (1)...(463): n = A,T,C or G
aatcgatgaccactaggcagtggagggccattcgccaaaggccgcaaggtgttgagcggcatgtccttcccatcctctggcacttcctgaacaccgccaccaggaatggcaccctgcctggacccagcgggaacatccgcggggtggtgtgccggctgtccaagagcctccaggagcacatgggctcccgcctgctggactttgccgccagccagccaaagcacgtcctcaagacgctccaggaactcttagactcagagtccttgggaggcagccgcaaggccactgacagaggggtggcccctgacagcaagacaactggcagctcatacccttttcagctggattaaagatggatctgaaatgggcaattattatttatcttatttttttgatggactattctcctggttactttcccccttagagttccagatgtacatggtatattttgaagtagaan

SEQ ID NO: 12427 - DNA, 485 bp, Homo sapiens
  misc_feature (1)...(485): n = A,T,C or G
cgggtcggaacacagcncnncnnnnaattgtagacattagaccaccgctgcggaannctggctgaggaccatcccattgaccttctcttaagggactttaagaaaaactaccatatgtatgtgtatcctgtgcactggcagtttagtgaacttgaccaacaccctatggatagagtcttgacacattctgaacttgctcctctgcgagcatctctggtgcccatggaacactgcataacccgtttctttgaggagtgtgaccccaacaaggataagcacatcaccctgaaggagtggggccactgctttggaattaaagaagaggacatagatgaaaatctcttgttttgaacgaagattttaaagaactcaactttccagcatcctcctctgttctaaccacttcagaaatatatgcagctgtgatacttgtagatttatatttagcaaaatgttagcatgtatgacaagacaatgagagtaat

SEQ ID NO: 12428 - DNA, 463 bp, Homo sapiens
  misc_feature (1)...(463): n = A,T,C or G
aatcgagaccttttgagacccttaggacagngcggnggaattcggctgatgatgtcaggagcaaagtcagcagagcaggccacggagattagcccctgtcacgggtttggtcactgggaggccattgctgaccttggtgaggacagcagagggtacagatgcctggccatagggagcacagtgaggtgggagggagcaggccgggacaaggagggagtgacggttgggggagagtgagccttttcttgctggagcagcaaagccagaaggaataacatcgcagcagagaggggccccacaggtcagcaggaggcaggctgagctgcccaccgaagcctccctgtgtcttgcagttattggcatgaagtgtggggcccaccatgtcggctacatgttcctgggtgaggtgggcctgggcagagagcaccatatcaacacggacaaccccagcttgaagagccct

SEQ ID NO: 12429 - DNA, 452 bp, Homo sapiens
  misc_feature (1)...(452): n = A,T,C or G
natagaagttcgttggccatgcggnggaattcgtagtaaattgaaatgagttgccagctgtgttgcccaggctggtcttgaactcctgggctcaagccatcccaccagagaaggatcttaaaccttttgctttccattgggcatctttatctacattttacctcatcaagctcatcaagtgaatcagacgctttgactcagtcataacatgttgatggagagtcacttagttggaaaatatatacacgaagatgggctctgggaagaactggtaggtaggcaatggctctgaaagtgtggggccctggtttacagtgtaatgacacccaccatttagtgcctcagccattattcaagtgtgctgtgcctttcctactggccacgttaatgagagggtggagatagcaagttcctgctgaaattttcacaggaaagctaagcccttaaatgat

SEQ ID NO: 12430 - DNA, 441 bp, Homo sapiens
  misc_feature (1)...(441): n = A,T,C or G
ntttgtagatccctagtctagtgtggcggaattccatgcatgcaaaagagtgtgtatctactgcttaataaagagaatgttgcctacatcaacaaatagcgctgaagcctacttattccttagtaataggattcccctgacgctctccccatctgaattttatgtttgcattccatataccttctttctagttattttatgtgctgcaaatatagtttagttttcctctttttgaattataaattatatattgaattcacatagtatatattcctctgtgacttccttttttgcctcaatattttatatttgtattttttctgctagatattattttattgcattgctacaccacaatttattgacctgatctattagtgattgatccttgattatttcctcccccatcccattttttgctctaaagaaaaatacagctgg

SEQ ID NO: 12431 - DNA, 448 bp, Homo sapiens
ctagaacatagtagaacattacgccagagcggtggaattcacgcccactgcactccagcctgggggacagagcaagaccttgtcttgaaatgaactagaggattaggattgagatgtttttgtttgtgtttgttttttaatttttctggagaaaggctcacttttcctagaggtatgaagtaagtggaagtagggctggattcctcacccctttttggcctgtctaggtggaagcactgcaggctcagctgggagagcagaccaaactttctcgagaacaaattgaagggctcatcgaggacagacggattcaccttgaggaaatacaagttcagcaccagagaaatcagaacaaaatcaaagagctaaccaaaaagtgagtgtctaagaaagctgtacctaacgggtattgtatttttctgagtgacttaaaagttaacattttgta

SEQ ID NO: 12432 - DNA, 454 bp, Homo sapiens
  misc_feature (1)...(454): n = A,T,C or G
attggagatcgatgacccctagnccgngtggtggaattccgaccacatttcactctcaccgctgtaggaatccagatgcaggccaagtacagcagcacgagggacatgctggatgatgatggggacaccaccatgagcctgcattctcaaggctctgccacaactcggcatccagagccccggcgcacagagcacagggctccctcttcaacgtggcgaccagtggccctgaccctgctgactttgtgcttggtgctgctgatagggctggcagccctggggcttttgttttttcagtactaccagctctccaatactggtcaagacaccatttctcaaatggaagaaagattaggaaatacgtcccaagagttgcaatctcttcaagtccagaatataaagcttgcaggaagtctgcagcatgtggctgaaaaactctgtcgtgagctgtata

SEQ ID NO: 12433 - DNA, 453 bp, Homo sapiens
  misc_feature (1)...(453): n = A,T,C or G
nttcgangtcactagtcagtgtggtggaattcctgatccaatattcaattcatttgtgtactcccacatgcaaaatgctaaattacaatgcagacattaagaaaaagtattgactggaggggttgaattccttgagaatttattttatagtctaaatcacaaatactttactcaatttagtttttaaaatagtaaactgaatatttttgttgtaagcctatcagagtcaatccttcgtttggaattgttttcctgtttttccttactataaatcatttaaaaactgaattcattttcttagatggcataagtctgtctcttgagaaataagtaaaatactcctattttcagtatctgtagcacctgaaataggtctttgtatagccagaaacaagttatgttgaagttagcttttctttgtcaacagttntggacaataaaaatctgaaagtn

SEQ ID NO: 12434 - DNA, 459 bp, Homo sapiens
  misc_feature (1)...(459): n = A,T,C or G
ntttgaagaccatctgnccattcgatgacccttaagaagtgcggcggaattcggccgattcattttgccaatgctattctatttgcatgccatttcttacataccactctttgtttgttctcatgatgagggtgggggggaagtactaatgcacatctttccctaagaaaacacttgaatccatttcatgttttagattaatgccttgtccagtacactgctgttctcgctataatctgtgcttggtaaacttgagctattacttacaggttgagaagcatttaaatattacaaattgctaggcatcttgaaggctgtggctacaaaagtgctaactgatatacaacatcagtagtaggatggcctcattaaatggtttccaaaaagcccatgctacaaactctcactccagtgccattggaggctgacagggactaagagactggcaacctgtaaagt

SEQ ID NO: 12435 - DNA, 455 bp, Homo sapiens
  misc_feature (1)...(455): n = A,T,C or G
ntttgatgaccattagtccattcgatgtcctttgagaactgcgactgagtcaacacgatgtttaaggaactagtcacatgccgcatgaccttttttaacgtccatgacctgctgcctgaccacgaatataagttccgtgtacgtgcaatcaacgtgtatggaaccagtgagccaagccaggagtctgaactcacaacggtaggagagaaacctgaagagccgaaggatgaagtggaggtgtcagactatgatgataacgagcccgaggttgattaccggacagtgacaatcagtactgaacaaaaagtatctgacttctacgacattgaggagagattaggatctgggaaatttggacaggtctttcgacttgtagaaaagaaaactcgaaaagtctgggcagggaagttcttcaaggcatattcagcaaaagagaaagagaatatccggcaaga

SEQ ID NO: 12436 - DNA, 471 bp, Homo sapiens
  misc_feature (1)...(471): n = A,T,C or G
atcttgagaaccttgctgatngtgcgtgggaaagngccgnaggaaaaangggctgnacatcacggagcatcctgaggacgatgacngngaaagtttacttgggactttattggagctcaacacgccgtttggccctatctaggactgggacaaggttgtcaagcgcaaggccctggacaaacatggggacatctacgggcgggagcggattgctgagctactgggcatggacctggccacactatagatcacagcccacattgagcgcaagcccaacccgccgccagggctgctgacctggctcatgtccatcgatgtcaagtaccagatctggaagttcggggtcatcttcacagacaactccttcctgtacctgggctgttatatggtgatgtccctcttgggacactacaacaacttcttctctgctgcccatctcctggacatcgccatgggggtcaagacgctgcg

SEQ ID NO: 12437 - DNA, 472 bp, Homo sapiens
  misc_feature (1)...(472): n = A,T,C or G
tggagccnganaaagnaaacctgagaccctaggaagttcgatggccttcgctgttcctgtagttttttgatgagagttatagttgttacatatacataaagataattttcttttcatttttaagagacaattctttttatcctaaatattttattatctttaaatttgtttctgtattattatatgtgctcctgaagcgagcactctttttatctatgatacttccataaaaatctcttctatttatagctattggtagttccccaccagaaaaaaacataattctggtgatagaaatttttatttgctgtttaggtttgtgactgaattgtgagaattcagttgtgatttttaacatgtctcagatatatatactaacacgtctaatacatactatctaatttattggtttattttgaaaaacatgggtatagaattatttaaatattattttatttattgaaatatttan

SEQ ID NO: 12438 - DNA, 478 bp, Homo sapiens
  misc_feature (1)...(478): n = A,T,C or G
ggtcacgcaagcggcnncnnnttttgagacctttgatagcgtgtaggaanncccaggccagtgaatgtcagttcgtcgggcactgactccgtctgctcttggccttgtgttcattttacaaatatttgcccacggcctcccaggcccaggcccatgccacctgggccccggcatctgtttgaggatctgccaatgtgctcttaactgaggacgaaggaagaacacctttctatgagtcttgcaaagattacctccttcaggccacaaatatttgagtgcacactacgtgccaggcactgtgcagggctgcaggcatagagacagaatgtaatctatctgggccttggaccccatagggagaggggaccactcaggtccatacttcctttggacttggggctttggccttgggaggggcggaggtggcgtggcaagatgaaaaagacatcctgcccccatccacttgggcagagcttct

SEQ ID NO: 12439 - DNA, 446 bp, Homo sapiens
  misc_feature (1)...(446): n = A,T,C or G
nccgaaggacactagtcattgtggtgcaattcgattaatacagagcttagcagaatcttgaaaagcccagagatccaaagagcccttcgagcaccacgcaagatgatccatcgcagagtcctaaagaagaacccactgaaaaacttgagaatcatgttgaagctaaacccatatgcaaagaccatgcgccggaacaccattcttcgccaggccaggaatcacaagctccgggtggataaggcagctgctgcagcagcggcactacaagccaaatcagatgagaaggcggcggttgcaggcaagaagcctgtggtaggtaagaaaggaaagaaggctgctgttggtgttaagaagcagaagaagcctctggtgggaaaaaaggcagcagctaccaagaaaccagcccctgaaaagaagcctgcagagaagaaacctactacagagga

SEQ ID NO: 12440 - DNA, 443 bp, Homo sapiens
  misc_feature (1)...(443): n = A,T,C or G
nctgtagatccctagtccttgtggtgcaattcgggaatgtttatccagtgcctgtaccaccattgtatcttggaagtaaataactttttttattttacaggctcattagtggtaggagatgagtctcttatgagacttatgactttagacttgatgctggaacaaggtaagacttttggggactttggggaaagtatgattggattttgcaatgtgaggacgagatgtggggggccagcggcagaatgatatggcttggatatttgtcccctccaaatctcatgttccagtgtgattcccagtgtcagaggcgggacctggtagaagatgattggatcgcagcagtggatccttcacaaatgggcttgcaccatgcccttggtgataagtgaattctcactcagttagttaatatgagatctggttttttgaaagagtcttgg

SEQ ID NO: 12441 - DNA, 210 bp, Homo sapiens
  misc_feature (1)...(210): n = A,T,C or G
ctacnggagntacttattaacatcaaggctggaacctatgtgcctcacacctatctgatgcacgagcacatggctattactgatcgcattgaaaacattgatcacctgggtttctttatttatcgactgtgtcatgactaggaaacttacaaactgcaacgcagagaaactattacaggtattcagaaacgcgaacccttgaattgtttt

SEQ ID NO: 12442 - DNA, 478 bp, Homo sapiens
  misc_feature (1)...(478): n = A,T,C or G
ccccccccaattgagnnccntcnnnnnaactgatgntccatgagaccagngcggtggaattctgtagttgtagggagtatcttcactaatgcaacaccagacagccatattatgaagaaattaagtggaaattagcagaaatatccattcatttgctgtactatttgtatgtaatatttgggttgatctataaacactgtcagactaaagtttttaaaatatacttatttctaagtatttatttcagcatttatgaatttgcaacattggcaagtgatttgggattttaaaattgcaaatgttcatttattcatatcattgaatacacgttgaacacatccacattgtataggatgtggtaattagcttgtaaccagggtatgatctgctattgttatttctcctctttattggaaaaaggcctcagttttaattattttcttcccaaaataaatcacacatttggttacaaaaaaaa

SEQ ID NO: 12443 - DNA, 468 bp, Homo sapiens
  misc_feature (1)...(468): n = A,T,C or G
ggggnaactgagaccatctgnccaactgagngcaattcggaacctgcgggcaagctgagctggaggaagaaaacagaaaggaggagggcctttgtaaccaagatctgaaatgtgctggggcacacaccccgccattatcttaacgtttgaagagcgggtcgggggagcctttgctgaaacccttaggtggtctctcaagttgccacatcaaacctctgtgcacaaagggcatttgtcgcctcctgtttccctggctggaagggaggaggcctccagtgtgcaggaggtcagatggacgcctgggatctcagctcagcaacccagcctggccgcatagcctctttctgaggagcagcagaacccccgagccacagcgggcttccacccacacaaatgtgcccagcagtctagcacctgtcacctggggtcatcctgctcttcttggccacgtgaggtgctggtcacctn

SEQ ID NO: 12444 - DNA, 440 bp, Homo sapiens
atcgaagacctctgatcgtgcggcgtaattccctgaaatgaagataaaacaatcatcagaacaactggaagataagaaaagaaaagctgctaagatgcttgaaaacattattgacttgtttaaccaggcagctggtgatgctatttctgacatgctgacgatcgaagcaatcttggctctgaaagacttgactgtacaacagtgggatgctctctatacagatcttccaaacagacaacttaaagttcaggttgcagacaggagagttattagcactaccgatgctgaaagacaagcagttacacccccaggattacaggaggcaatcaatgacctggtgaagaagtacaagctttctcgagcttttgtccggccctctggtacagaagatgtctgccgagtgtatgcagaagcagactcacaagtaagctgagatagtg

SEQ ID NO: 12445 - DNA, 472 bp, Homo sapiens
  misc_feature (1)...(472): n = A,T,C or G
cgtggggntnnnttttgatcgcgttcattagtccangcggtggaattcgctaaaagtgacacctgaaaatgcaggacagtggaaacctgatgaacttcaagttttggagaaattctttgaaacaagagttgcaggaccaccatttaaagctaatacgttaatagccttcaccaagctattaggagctcctacacacatcctcagggattgtgtgcacattatgaagctggagctgttccctgaccaagcaacacagctaaaatggaatgttcagttttgcctgacgatccctcccagcgcgccgccgattgcacctcctgggacgcctgctgtggtgctgaaatccaaaatgctattttttcttcaactaactcagaaaacatcggtccctccccaagaacctgttagtattatagttccaatcatttatgacatggcttcaggtacaacccagcaggcagacattcccaga

SEQ ID NO: 12446 - DNA, 455 bp, Homo sapiens
  misc_feature (1)...(455): n = A,T,C or G
attgaagactttgatgaccctctanaccaacnggnggaattcgtctgagggaggcaactggggccacttaggccggcaggtgcccactgtgattggttgacatgataccaagcaacaggatcatccagtcaccttcaatgcagggaggatggctgacaggctccctgggtgacacttcatgcaatcagatgtcgagttggactgtgacatagagccatgtggccacactaaattcccccccacccttcccctgtccacaaccgtcattgtctgttcttgccatccagtggccactgcctccaccatggctgaggctttctctaagacaacctctgaggaagaccagagcatccaggagcccaaagaggccaactccatgacggcccagaagcagaagaagtgagggctttgaggctcccgtaggcgccatgccaacagcggcggagatatcttcg

SEQ ID NO: 12447 - DNA, 398 bp, Homo sapiens
gttgttgcctagacctggtgcacactgcagtcctcgggactttctgttgccaccctcctgtattggacgtcttgtttctggatttcctatcctcttccttcttggtttatccctcattttttctgtagcacagcagttttctaattcaatacttttaggaggttgagtatggataattttggaaagtgtccccgggatgattccaatttatttaagcctgttttccagagagctgcgggtctcctaaggcctttctcatttctaacaagtctccctctctagaacactggttcccagtcgttgttttcatactagcaacattttaaaagcaggataggggtggctagtatgcaattgccaacttttgatttttccaagcaggagtatatcaaaaagct

SEQ ID NO: 12448 - DNA, 489 bp, Homo sapiens
  misc_feature (1)...(489): n = A,T,C or G
cgcgatgagaccctttgagngccgtggaattcctcccgcaccgacggtgcagcacttcctggctccccctctccagcgcccagtgactcgctgctgagtcacctgtggccctgccctggggagagcttccaactgcgccagtccacttgagaatggaggcaggcacctccttggaagggaataattaactttcacgttgcctaatcctgcatttctggtgttaatctagtggtaggtttatagctgaagctttctacttaagccgggtttaaaaacacgtccacaaaaggatattttcttataaaaccagagttggcccggcgcagtggctcacgcctgtaatcccagcacttgttcgagacaaacctggcgaacatggtgaaaccccgtctctactttataaaaaaaaaaaaaaaaaaaaanaaggcgcccgttcaatttaaaaggccccgttaaaccccgttgataaccctcgatggggcttttaag

SEQ ID NO: 12449 - DNA, 460 bp, Homo sapiens
  misc_feature (1)...(460): n = A,T,C or G
nncccactgatgacattagtccagttcggtggacttcccaacctgattcagtcctcactgcagctgagtgtgtgtgggtgcagatgacaagccaccacaacctgattcaggattcagttgggctactagccagtgccataaggaaaaccattctggggctcttgagaggggcaaagcataatttgcatgtgggagaaacgttaatagtttgtggccagaggacaagctgtggtttattaaagactgctgcaggttcctactatgcttctcatcaagaggtggaatctaatcacctttcccccttgaatcatggctggtctcagtgatgagtacaactggacagtgtggcaggagagatgctctgggacttctgagggatgatcatgagagaccttacagcttctgcctgggcctcttggacacacaccctgggagaagccagacaaacctgactacctgn

SEQ ID NO: 12450 - DNA, 463 bp, Homo sapiens
  misc_feature (1)...(463): n = A,T,C or G
ctaaccctgattnacctctgcangtggaggaacttgttcctggagacagaattacttttgatgctttcccaggagagcctgacaaggagctgaatcctaagaagaagatttgggagcagatccagcctgatcttcacactaatgatgagtgtgtggctacatacaaaggagttccctttgaggtgaaagggaagggagtatgtagggctcaaaccatgagcaacagtggaatcaaataaaatgcttccactaccaaaagacattagagaaaaccttaaaagtaataaagagaaatatatttgtcacttatacctaaaatatgagtggctcatttttgcattactctcttctagacttgactagtcatttacttggtatatattgttttcattgattggggaaacactagatttttacctcggtttttgatcatttataatggagagaggaagttgcctatgtn

SEQ ID NO: 12451 - DNA, 466 bp, Homo sapiens
  misc_feature (1)...(466): n = A,T,C or G
gagtnnattgattcactactccgtgcggnggaattcggcatggtggctcacacctgtaatcccagcactttgggaagcagaggcagttggatcacttgaacctgggaggcgttctggaggtcaggagttcgagaccagcttggccaacatggtgaaaccctgtgtctgctaaaaatacaaaaattagccgggcctcatggcacatgcctgtaatcccagctactctggaggctgaagcaggagaatcgcttgaacctgggaggcggaggttgcagtgagccgagatcacgccactgcttcttgctttaaaagaagagtaaagacaagagtgttggaccagtattgcagttctgtagtatcatttcttataaaaaacaaaacaacaataatttatcaaaattggcatataaagactgacaacattctaataaaggcacaaatttctttntaaaaaaaaaaaaaaaag

SEQ ID NO: 12452 - DNA, 467 bp, Homo sapiens
  misc_feature (1)...(467): n = A,T,C or G
ggggaaactggagacatctgnccaatgtagngcaattcaactcagcgaacattgcctttctaattgatggctccagcagtgttggagatagcaatttccgcctcatgcttgaatttgtttccaacatagccaagacttttgaaatctcggacattggtgccaagatagctgctgtacagtttacttatgatcagcgcacggagttcagtttcactgactatagcaccaaagagaatgtcctagctgtcatcagaaacatccgctatatgagtggtggaacagctactggtgatgccatttccttcactgttagaaatgtgtttggccctataagggagagccccaacaagaacttcctagtaattgtcacagatgggcagtcctatgatgatgtccaaggccctgcagctgctgcacatgatgcaggaatcactatcttctctgttggtgtggcttgggcacctctg

SEQ ID NO: 12453 - DNA, 492 bp, Homo sapiens
  misc_feature (1)...(492): n = A,T,C or G
cgtagatttanaaggggaannnaacctggagaccacnaccgatttccgtggaaaagngcggnggaactcggagagccgctggcttatatcgctcagccaccactcaaccgcaagacttgtccaagctttgctgtcaactcagatcgaagtgaagggaatgggaaatctaatcacaggacacagtctgcacatatctcaccagtgacttcaacatactgtctttcccctcgacagaaagaactacaaaaacaactagaagaaaagagagaaaaactgaaaagagaggaagagcgacgaaaaatagaagaagagaaagaaaaaaagagagagaatgacatagtatttaaagcgtggttgcaaaagaaaagagagcaggtcttagaaatgaggagaattcagcgagcaaaggaaattgaagacatgaacagtagacaggaaaacagagatccacaacaagcttttcgattatggcttaaaaaaaagcacgaagag

SEQ ID NO: 12454 - DNA, 448 bp, Homo sapiens
  misc_feature (1)...(448): n = A,T,C or G
nttcgcggacactagtccttgtggtgcaattcgatgagcctccttttagcagagtgaacccctttttaaaggccactttaacaacaaccaccaatatattgtttagagacggtttctgtctagtgtaaaacttgagtggtctgactctaataaatggctttgaaatgtgtgactggtattataaaatttgtgaataaaacatataaaatatgaaaaacaaaaaaaaaaaaaaaaaaaaaaaaaaaaaaaaaaaaaaaaaaaaaaacacccctcttaccaactataaaaataattcggcccccctcatttataacgggggcctttaaaccccccattaacccccaaggcggtttttttttaccccccctatttttttggtccccccccccctgttttttttttgcttggggggggcccccccccccgttcttttttaaaaaaaaaaaga

SEQ ID NO: 12455 - DNA, 452 bp, Homo sapiens
gcctttgtctctgcttcatgtggcttttccttttgtagctatgcttagtgacataatcttccctcttctagccttctcctttcaagcctgtctgttaattaaccatgtcagtattggcaagcatttatcttcccccaccctaacatgcaatcttctaagaattttgcaaaattctaaacaaatatagagatggtatatagaattcatatctagaaaactttgattttaatgtgagcttatcaaatttgttctggcttttttggcactaaggcaaaaacatgttaaccagaaataatttattcttcatgtatgtaaaatatttgagaatgtttagccttttattagaattttatttggaaaatatttatctttctacacattttacacttatgttcctttgcttataacccaatttcttaacttttttgttacttaagcaaatatcaattatg

SEQ ID NO: 12456 - DNA, 489 bp, Homo sapiens
  misc_feature (1)...(489): n = A,T,C or G
catcgatagcactacgccagngcggngcaattcgccttgagtctttcttttaacctttcttgcttaggaccagaacagcctttagttcatgtctaattttttcctacagagagcaatactttggagtattctacctgatactcagtgtattccaaggtttttccactctgacttgtggtcacatgtaccatttctagccttgggtgatcttcaggaattattctacctgttctttttctgaccacgggttgttccctcacatgcatgtgtggaggagtcctttgttgaagactcaaaaggaaaaccctgcagatctctggagttctctctcagtgtattcctctcctctcagtgcaactagcccttcaccatgcagccttctcctctctggtattctctgatccatgaattctgatagccttggcatctacacattctcaactctgtttccttagtgttaatttttcttaaaatatcgcaacaggttag

SEQ ID NO: 12457 - DNA, 450 bp, Homo sapiens
tttggtttgtagaccacttgtccagcgtggtggaattcaaggaaagaagacgaagtttgaatagcttctgtccctctgctttcccttttccatttgaaagaaaggactctggggtttttactgttacctgatcaatgacagagccttctgaggacattccaagacagtatacagtcctgtggtctccttggaaatccgtctagttaacatttcaagggcaataccgtgttggttttgactggatattcatataaactttttaaagagttgagagatagagctaacccttatctgtaagttttgaatttatattgtttcatcccatgtacaaaaccattttttcctacaaatagtttgggttttggtgttggttcttttttttggtttgaatttgttttttttttttttggcggccgggggggtgtaaaaaaaaaaaaggcaaatggtttt

SEQ ID NO: 12458 - DNA, 460 bp, Homo sapiens
  misc_feature (1)...(460): n = A,T,C or G
nattgagactntagncgatgagnggcattgcacccgctgatcctttaacaaggatttctggcaggaaactcacaaaaaggagaactgaaaatttagacatacagttggccattgtaaaaaacatcagtttcctctcatacattccaagtaaaccaagtaaaataagtgttggagtaacacttgcataaaagaatttaaggagtgatagctctttctgttctgccattcccaacattcctgggggaaaggagactcaatgagttaatactatttcactgagcccaagatggaaacttggtttgacctaaaacatctgattaatataggctagctgatttcttaaaaattcgttgcattgaaggatattttgcatgtctgtaacacctgtcaatacttgtttggattgatttctgatattcttgcagctgactacgtgtaattgggcagatcagctttgcag

SEQ ID NO: 12459 - DNA, 403 bp, Homo sapiens
tctctggatctcgagataaaaccatcaagctatggaataccctgggtgtgtgcaaatacactgtccaggatgagagccactcacagtgggtgtcttgtgtccgcttctcgcccaacagcagcaaccctatcatcgtctcctgtggctgggacaagctggtcaaggtatggaacctggctaactgcaagctgaagaccaaccacattggccacacaggctatctgaacacggtgactgtctctccagatggatccctctgtgcttctggaggcaaggatggccaggccatgttatgggatctcaacgaaggctaactcctttacacgctagatggtggggacatcatgaacgccctgtgcttcagccctaaccgctactggctgtgtgctgccacacgccccag

SEQ ID NO: 12460 - DNA, 483 bp, Homo sapiens
  misc_feature (1)...(483): n = A,T,C or G
cgtcgggccnnnnnaggaataatactgaaacctcagttcagncagctacgnagnggcnggaatnactgactagaagtctaacttaggactattcagtatttttgtaacaaatagctgccaatcacagcagcctagcttcaatcaatcacaggtggccatctgattagaccacattcaaataaggcaaagccgaggtgtaaccagtcaagctgtctctgtacctcacttcagttttgcccctaaatgttgcctgcccagaatgtggactggagctgtctgaacctcgtctggttctgagggctgcctgatggatgaattgttttttgctcagacttggctagatttaatttaacagcagagaccttctggcccacagtgcctaaaaatatttactctttggctgtttcctgaaacaaattgctgatccctgatttaaagcataaatgctaagtcagacctgagttctattcctggctctgacat

SEQ ID NO: 12461 - DNA, 489 bp, Homo sapiens
  misc_feature (1)...(489): n = A,T,C or G
cattgactgcagatcactagnccagngcggtggaattacaaagtccactttactcaaattggtgaacagtgtataggaagaagccagcatgagctctgactaaggttgacataatagtccacctcccattactttgatatctgatcaaatgtatagacttggctttgttttttgtgctattaggaaattctgatgagcattactattcactgatgcagaaagacgttcttttgcataaaagacttttttttaacactttggacttctctgaaatatttagaagtgctaatttctggcccacccccaacaggaattctatagtaaggaggaggagaaggggggctccttccctctcctcgaatgacgttatgggcacatgccttttaaaagttctttaagcaacacagagctgagtcctctttgtcatacctttggatttagtgcttcatcagctgtttttagttataaacattctgttaaaatagatat

SEQ ID NO: 12462 - DNA, 562 bp, Homo sapiens
  misc_feature (1)...(562): n = A,T,C or G
ntagatnactctacagacggnccannnnnattgggttaaaaggtccagtgttagagattntatctataggaacaatgagggagcaggtagtcagtgtgctacgtgacccttgaatagttagcaactgcagggaagtggattaaagtgcacctgtgtaccctgatcaatgtctaaccataattctgcctaaagcctggcttgtaattctcgttaaccctatgagggcaatttcagcctccttctggcatctcctgagtaatagagaagagttcaggaagttgccagtcaagcttctttccaaggggtatctcaggcatgcctggctggctgcatcataaagaacaggaagtccatattagatggtggccaatgtgcagatgtgcagtttagtgtggcagagccatgctggctgagcagtgctgacttctcccaagtcctagccccaaactctagacaacccagtaccactgtcctttctgcagacttatgggaccagtaattgggaatgccttttattttgcctttaccaagttgagttcagttagggaatctgagtgccagn

SEQ ID NO: 12463 - DNA, 511 bp, Homo sapiens
  misc_feature (1)...(511): n = A,T,C or G
nggaggcaggcgccggggnnnnaattgaactgagtccactagtacagngcggtggaattcttttcaacttgtctgtaggtttgaatttttcaaatttaaaattttgagggaagggggtttatcaggataaagtcttagtttggctccttcttgtggggtataaacagatacttactttccatttcagcttcccttagtttattactctttcagtaccagactattatcaatcccttagtttattcctcttttagtaccagattataatcactgaggcctcatttggtgaattctatcaagggtcatcttgggagtcacctccttcaggcaatttttcttgactttccagggtaggctaaggaccctgttaagacagtttgtgttttactaccatgtagaaatttccaactacttttttttgtcctttactaggctgcaggttctggaggttccagcatagttctgacacatggtaggccttccataaaggcttgtggaacatttaccatcn

SEQ ID NO: 12464 - DNA, 458 bp, Homo sapiens
cgaattgagacctaggaatttcgagaccattataccgtgcggtggaattcccggaagagctttggcggtaagaccctctgcattgggggatgtgacctacaagggaaacaggcctgctgtgctctactccctattgttctccttcagtcctttttaatcctcaagacctaggctgtttttccttttttcatttaacatgactcctgcctcataacaaaaatgttaacattatagacgatacatcaagcaaaacgaatggtatctctgcatatatgcatgacttcctttaacattatttgtatggaactatgctattatgcggcatttttctccttaatatacgatggaaatatactccatatgctgaattcctagcaatagaacacgatagactcatagaatttaaagatcgttcaggtatattgctaagctcttttctacttattgtcatttctagg

SEQ ID NO: 12465 - DNA, 404 bp, Homo sapiens
gcaggaagctagaagcctagttccttgatggcatccttgagcatctacagcagcctgaatagctgacccctggacttctttttaaacatgtgggaaaattaaccccttttatttaagtcattgcttgttggagtttctgtacttgcagcccagtgcaatcctaacactgagtaaaagtttgaagcagttttcattatattttggttgccaggctgtatccctatgactgggatactgcactgacagtgggccatatggaaccccagttatattcaggttacctatgtaggtactcaggcatgtacatgttaaaacacacatgcacacacatgtgcatacacatacaaataacatataaacaaacacacatgtacaaatctatactcatacatgcaaatgctctc

SEQ ID NO: 12466 - DNA, 465 bp, Homo sapiens
  misc_feature (1)...(465): n = A,T,C or G
ggggttttggattgcagtcccctggacangncgnggaattcccattgtggacagctacgagagacgcaacgagggtgctgcccgagttatcgggtccctgttgggaactgtcgacaaacactcagtggagggcaccaattgcttttcagtgccgcacaatgagtcagaagatgaagtggctgttgacatggaatttgctaagaatatgtatgaactgcataaaaaagtttctccaaatgagctcatcctgggctggtacgctacgggccatgacatcacagagcactctgtgctgatccatgagtactacagccgagaggcccccaaccccatccacctcactgtggacacaagtctccagaacggccgcatgagcatcaaagcctacgtcagcactttaatgggagtccctgggaggaccatgggagtgatgttcacgcctctgacagtgaaatacgcgtacta

SEQ ID NO: 12467 - DNA, 492 bp, Homo sapiens
  misc_feature (1)...(492): n = A,T,C or G
cgtcgggggcccannnaggaattaatttcagtnacctacagtcatgtcngctactgaagngncgnggaattcgtcaaatgacattacaaataagattgtttttacacgatcattgttttttaacaatgtcttccaattccatgagattaaatacttttatgtgataagaactcccaaatttatatctctagcccagacctctcttctgagttccagacccatttaatccaactgcccatttggatgtctcaagacattaaaaactttaaattatacctacccaaaatcaaactgttgatatctttttcccccaaatctgtttttcctgtttcaaaaaacaaaaataataataactctacccaattgtttatactaggaaacacagatatgcttcctgatacctccctttccttcccctactatagttgattattattattcatggactgtacgtgtgaattctccactcattaaaatgtatctgtaaccccc

SEQ ID NO: 12468 - DNA, 469 bp, Homo sapiens
  misc_feature (1)...(469): n = A,T,C or G
gtgggctnnnattgatcgcgtacattagtccangcggtggaattcgtgctccccaggccggccctgttgcagagcatattgagagacgtgctctgcaaagccagtgagtcccaggttttccttgtgctccccagggaaggaggagcctgctccttgcagcccccaggcccagtgcttcatgtatatttttcttacgtaatcaccacagcaaccttggacttttagactccattgccactgtgttataggaaactgaggctcagagaagtgaggtaacatgtccaagtcacaccgtaatttgctgagctaggcgtcatacagatttgatggattctggaaccatggtccaatcgccccatacctgctgcccagcaatcacattccggaaaacaagggtacaaggaagcacacatttgctgccccaacccgctctgcctcatgtgatactcagctaggtgctcttgctctn

SEQ ID NO: 12469 - DNA, 454 bp, Homo sapiens
  misc_feature (1)...(454): n = A,T,C or G
catgaaacatagaggcntccgcggnggcannnggactacacgcacaccagcaagccagttaatttttaattttttttgtagagacggtgtctctgtgttgcataggctggactcaaactccaggccccaacctcccaaagtgctgggattacaggtgtgagccactgcgcctgaccaaaaaggaattttctttacctgttatttttttgcttaagacttttattctgcgttttagattatgtgctttcatccaatgtttccgaattactcatttcttttgggttatactgtgattttttaacatcttagcaaatttctgtttttgagtatttggttgtaggcagttaatattgtttaatatattaaaatatctcactgccttctgtttggccggcccccagaaatctaaacagcatttgttatttttgctggtttcagagtgattcgtcatcga

SEQ ID NO: 12470 - DNA, 460 bp, Homo sapiens
attgacgaccactggacagctggtggaattagcaaatattctcttagtccctattacgaacaacttattgttctaagtgcagaagttcagatatcattgagactgagaatattcagtctacaagtgccaggggtctactgtatcctcttttccgtcttaatacagtgctttgcacccatatatatgccacccacaggaataaccttttttatagcaccagtccttcaacttctgggattaaacagattttttttcagggtataattgttctgatctaaattctttatagttgtacatagcaatctcacagggttcctaaaatataaattagagaatagcatgctgcctgcactgcactcctaaagcatgaccagtgcttgataaactctcctccatgcgaattttttaaactttttatgttgacatgatttcagacttacaaaaaaactatgagttgtag

SEQ ID NO: 12471 - DNA, 459 bp, Homo sapiens
  misc_feature (1)...(459): n = A,T,C or G
ggcattttatgantacacaggatgagtacntcgaacgctcgcgagaaaagttagaaatttaaattttctttatcataaaagaaaatgatgtactggcaattaaagcttcctccaaatggaagatatccaaattcccttttctttgagtggtttgagcaggatcgtcccaagatactggttttgcatttagactagagaacctgtaaggtaccttcagttctgagtttctgtaactgtattgaaaccactagatggacagattaaaattatctttattttgtttttttttatattacattttattttactaggattagatatggggttttgaaaaccaagggaaaattgtaagtagaagaaaatgattctttttttttgaaaatgatttattttaagcattttttttttgtgggaattttgctttggtttggtttgtttagcattatggttaagagtatg

SEQ ID NO: 12472 - DNA, 453 bp, Homo sapiens
  misc_feature (1)...(453): n = A,T,C or G
catcgacacccctnagttgagaccatatccangngcgcggaattcgcagagggagagtgtgaggaagacgagggtgagaagaggaggctcattagggaaaagctgggtgtatccatgcttcatgtttagcttgtgggtttgggcaatgtgcttctctgaccctcagtttttctcaatgtaaaagctataaactcagtaaaataacataactctgcaggggtgcattgttagagtaggtagtcaggaagacataagcagggcaggagaggtctacctccccaggaatgtcaggtggccatcaggcgatggtcaggtggttgttaaactgtctctctaaaataatacttggtcacagccagcaccagggaaaggcagtctccctatagagagaaacatctgaagctggtgatcagtagcttcctgataagatctcaggatttgggcaagcagacc

SEQ ID NO: 12473 - DNA, 462 bp, Homo sapiens
  misc_feature (1)...(462): n = A,T,C or G
ntttgagacactgtattnggtagagcctcggacagngcggnggaattcattttagaacgattattgcatttccctggaggttagaggaattgataaaattcatgtgtacttttataaatgctaaaaactttgatgaaaaaagaaaaccttgggatagtgtgtctatgtttcattctttttattcctaaaacaaagaatagctatgtactctggacctgaaagatccctggatacacattaggagtctctccttgttctagaaggcataataggaaataaagcatttactgacattctgatcgatttggtgaccctgaaccttggcacaaacaactttcctagtagttggatgcaccttacccaacctgaattacaggaattaacatctttattaacagtcaactccgagttcgtggactggcggaagttcctgttagtaacctcaatgccattggccattcg

SEQ ID NO: 12474 - DNA, 479 bp, Homo sapiens
  misc_feature (1)...(479): n = A,T,C or G
gggacgcgggcggggnnnnaattgccttgactccctaggccgngncgtggaattccctgtcgccaccgaggtcgcacgcgtgagacttctccgccgcctccgccgcagacgccgccgcgatgcgctacgtcgcctcctacctgctggctgccctagggggcaactcctcccccagcgccaaggacatcaagaagatcttggacagcgtgggtatcgaggcggacgacgaccggctcaacaaggttatcagtgagctgaatggaaaaaacattgaagacgtcattgcccagggtattggcaagcttgccagtgtacctgctggtggggctgtagccgtctctgctgccccaggctctgcagcccctgctgctggttctgcccctgctgcagcagaggagaagaaagatgagaagaaggaggagtctgaagagtcagatgatgacatgggatttggcctttttgttaaattcctgctcccn

SEQ ID NO: 12475 - DNA, 463 bp, Homo sapiens
  misc_feature (1)...(463): n = A,T,C or G
ggggcgttttngttgannccccnnaatcgtagtccctagtccgtgtggtggaattcgagaggaaaaaaatcaccttttatttgtttgggtctcattgtcagaattattattcagatcaagaaatctgtgtcgataaaacctaatctcatattggagagtgaatgtcgttaagtatttctgaaatgtttctaaaaaatgaacatgaaaaaaataaggtattttctccctagcttctcattacagtatttctaattgcttcacactttacagttttaatacaaagtacaagctctacttttataacgtgtactacaagtttctttaaaagtattgttgtatttcagctgaactcttgtatctgcagtcttttgttatttctgcaggctacacccttaatttgcagaggccattttgttgtttgtttgatgctgaagctgttgttaaaatgccccaaactccaagg

SEQ ID NO: 12476 - DNA, 455 bp, Homo sapiens
gggactttttttgagaccctaggcagagtggcggaattcgccattcgtgtctacctcatgcaaacttcaggtaacagtctctcctctcagggatgtgagtcatcctgaagaagatgtagagtcctgtgggtttgttcgggctcaaatctcatgtgctccaggctccattctcttcctctcttcctggcatcccattaagtggggatagagtccaatgactgcccagatgttggagttacagattattttagatcaagcactctcaactcttcttttatagttgaagttgagctgtaagggcaatcatgtcggtcttatgggaggtttgaaaataagcccctcgggctgggtgccgtggctcatgcctgtaatcccagcactttgggaggctgaggcaggtggatcatgaggtcaggagttcgagaccagcctggccaacatggtgaaaccccgtc

SEQ ID NO: 12477 - DNA, 461 bp, Homo sapiens
  misc_feature (1)...(461): n = A,T,C or G
cgtccgttttgttgaaaccctncctganaccatatccagtgtggtggaattcaaaggctttacatggttgtcacacttgattgtaggtaagataatttacattggagtaaacttctacaagtgtgaagaatgtggcaaaacttttaattaatgctcataccttattgcacaggaaagaatttttacttggaaaaaggtatatacacaaagaatgtggaaaagccattaatatgtgctcatatcttactcaacatcagagagtctgtacttaataaaaccattatagatgcaactagtgtcaaaagatctttcagaaaataaaagcctttaaagtgaagaagataattcattctgaagacaaacattacaaatattaagagggttgtagtaccattacttgcatcacagatcttattgtacacattttgtactaaagaaaaccctgaagcagttgctcaaat

SEQ ID NO: 12478 - DNA, 461 bp, Homo sapiens
  misc_feature (1)...(461): n = A,T,C or G
atcatgatgaccntnggtcttgatnacgctagtanagagcggtggaatttctcagctccattcctgctggacggagcaactctgtgcttcggttttcatctgtaatatgggtaggataatagtgcctttttgagttagaaccattataaacattagctattatacatttccatttcagacagaagttgtcaacaccatgtgtggctacaaaactatcgacaaggaggtaatgtctttgaaatgcctttccctggaaatgttgctcttcctggtccaccctggggtgatcggaggggtttattgaggtcggggtcctggccactgagattttcccacattcctggctgtgacccagagccaggactgctgtggttttccaccccagcacagaagggctcagggaaccaagaattcccccaggctgggagatgccgcctgtcagggtttgccgagcacctaag

SEQ ID NO: 12479 - DNA, 479 bp, Homo sapiens
  misc_feature (1)...(479): n = A,T,C or G
cggacggcggggggnnnnncctcggccgcgtagccntcgngcgggacttcgagataacggctctcaaaatcaagtacaatccttttgccaaagccttcttggatgccaaggaaagaaatcacctaagagacgtaccggaggctatctctgagagccagcatgtgacctattctcacttgggaggctggatcttttccaatccagatggagtgtgcacagcaggaaactccaattaccagtatgccgctcctctgcctctgcctgctccccacacccaccatggctgtgagcactattcgggtctccgaggacaccggcaggctccctacccttctgcgtacatgcacagaaaccattctccctcagtgaatttgatagaaagctcaagcaataatctgcaagttttctcgggacctgacagctggacttccttatcctccacaccccatgccagcatcctgtctgtaccccacaccaac

SEQ ID NO: 12480 - DNA, 449 bp, Homo sapiens
  misc_feature (1)...(449): n = A,T,C or G
nttcgaggactttagtccagtgcggtggaattccagtgcttgagagccatgcatgattagtggttaccctattgaataggtcagaagtagaatcttttcatcatcacagaaagttctattggacagtgctcttctagatcatcataagactacagagcacttttcaaagctcatgcatgttcatcatgttagtgtcgtattttgagctggggttttgagactccccttagagatagagaaacagacccaagaaatgtgctcaattgcaatgggccacatacctagatctccagatgtcatttcccctctcttattttaagttatgttaagattactaaaacaataaaagctcctatnnaatcnnaaaaaaaaaaaaaaaaaaaaaaaaaaaaaaaaaaaaaaaaaaaaaaaaannnaaaaaaaaaaaaaaaaannnanaacaaaaccca

SEQ ID NO: 12481 - DNA, 444 bp, Homo sapiens
  misc_feature (1)...(444): n = A,T,C or G
naaagatgaccatatggacagcccgttggaannccgagaaaaaatttatttacagctcttaatgcagttgaaaagagcaggcaaaagaatcctcgaagcttatgtatccagccacagacagctgccgatgcgctgccccctgagaaaacacttgaattgacgcaatataaaacaaaatgtgaaaaccaaagtggatttatcctgcagctcaagcagcttcttgcctgtggtaataccaagtttgaggcattgacagttgtgattcagcacctgctgtctgaagtaaggaggtgcatcctagaaagagcctttctacttgaggtcgggggagcacggggaggacttgctcacacgctggccttgggaatatctaggtaaatgatgggaaagatcaggtgtcattcatcccattacatttttgtcacttcaccagatacttgagtg

SEQ ID NO: 12482 - DNA, 459 bp, Homo sapiens
  misc_feature (1)...(459): n = A,T,C or G
actggaaaacctnggnctggatgacactagtaaagtgcggtggaattcgattcaacagacatgttgagcacctgcagcttgccacacgttgtctttgacatgttcaaacacattatcttacttaatcctcagaatattttacaacagaaattgcaagctgtgttttacagatgaggaaactgagtcagagagagctaaagcatgttggccaaaggcacaaggcaataaactagattccaagtctattacaggacagttgtcaggtcattgaaaaattgtgcttgatcagtattctgtttctgttcagtactatgataaattagcaatctttagaggtcatttagattgtgtttattccctacagagcaggttggtgaaaaagaaagaagaaatggattcgaaactgttgattgaaatcaatgcaactggcaattcaggacatcccccaaaaaaggaata

SEQ ID NO: 12483 - DNA, 468 bp, Homo sapiens
gcccgcaactgtagacattagtcatggcggccgaattcgagagaggccttacagatgtagtaaatgtggcaaagcatttcgagggtgttcaggccttactgcccatcttgcaatccatactgaaaagaaatctcatgagtgtaaagaatgtggcaagatcttcactcagaagtcttccctcaccaatcaccatagaattcacattggagagaaaccttacaaatgcaccctgtgcagtaaggtcttcagtcacaattctgaccttgcacagcatcagagagttcattcatgagagtccctacaaactgtatggcaaaaccatcatcatgagttctagcattaatcaacatcagtgagtccatactaagtggaaatcatataaatgaaatgtatgtgacacaggctttatcaaggcctgccaaatcactggacatcaccacatcactgtggaggatgaaagcacacaga

SEQ ID NO: 12484 - DNA, 543 bp, Homo sapiens
  misc_feature (1)...(543): n = A,T,C or G
gttcggatccgatcactagtccagcgnggtgcaattcattcaagtccccttcccagccttttagactcttatctcttgcctagacttttggaagaactgctaagccagtgttgattgatatattaataactagaacacgaacctgacattgaatgtgtgtttttttgtggggttttgtttgtttgttttgttttgtttttgagacagagtctctctctctgttgcccaggctggagtgcagtggcatgatctctgttccttgtaacctctgcctcccggattccggcaattctcctgcctcagcctcccgaatagctgggattacaggcgcctgccatcacacttggctaatttttgtgtttttagtagagacggngttttgccatgttgtccaggctggtctcaaactcctgacctcaggtgaattaaccccctcaacttcccanagtgttgggattacaggttngagccaccacgcccgggcctgatgtgtttaatgaaacttcttctacggtcacccaaagggaagggaggggcatttag

SEQ ID NO: 12485 - DNA, 464 bp, Homo sapiens
  misc_feature (1)...(464): n = A,T,C or G
atcgtagacactgnnattttgagaccatctggccagngcggnggaattcgcaaaatggaaggaagcgctggatctccgcggcggaagtcattcttatgccctgccaaagggtagagggcagcaaccgacttgtgcgaaaggagggaacgtgtgggtctgccagggtcctgcaggggggatgagaccctcgctccgctccggcgatcccttcgctctccaccctcggccagcccctcctgtcctccatcaggcctcgctgaggatacctcctgggttccaaagcgcgagttgaacctgagcttgacattcattccgtctcgtacaaaagccatgcctgcggggagagggagaaaatttcctacaggagcctcaagactgcgtttcaggaagccctacgacccactgatcctgcagctgcgcctctcactcgcctcagatcagcattaacagatgagcaattattt

SEQ ID NO: 12486 - DNA, 468 bp, Homo sapiens
  misc_feature (1)...(468): n = A,T,C or G
ganaggaaattgagaccactggcattttgaggccatcgcctactcgcctgctttacccacaactgctgggtcctgaaaggaattagaatccccatccgagtatgcgcaaggtcgcgctggccagccgtcttcacgcgtgtctctgtgtttgtggactggattcacaaggtcatgagactgggttaggcccagccttgacgccatatgctttggggaggacaaaacttgtaagtacagtcaaggacaagacttgtactcaaggttgagatttaataaaattaatatttttactacttcgaaaaagaaaaaaataacatatcgaacaaaaaacatgcctgcaaggaaaaggaaaaaatttactacaagagcctaaagaactgcatttaaggaagccctaaaacctccgggggcctgcatttgtgcttgtcactcgcctcacatcagtattaccagatgagctcttatttn

SEQ ID NO: 12487 - DNA, 463 bp, Homo sapiens
  misc_feature (1)...(463): n = A,T,C or G
ngatcgagacccttggacangcggtggaattcgcgggctggagaagcgggtcctacgcacgctttgttgtcgcgctttgcctccgtccttccccctactcccgccttacctgacttccttttcggaggaagatccttgagcagccgacgttgggacaaaggatttggagaaacccagggctaaagtcacgtttttcctcctttaagacttacctcaacacttcactccatggcagttcccgagacccgccctaaccacactatttatatcaacaacctcaatgagaagatcaagaaggatgagctaaaaaagtccctgtacgccatcttctcccagtttggccagatcctggatatcctggtatcacggagcctgaagatgaggggccaggcctttgtcatcttcaaggaggtcagcagcgccaccaacgccctgcgctccatgcagggtttccctttctatg

SEQ ID NO: 12488 - DNA, 465 bp, Homo sapiens
  misc_feature (1)...(465): n = A,T,C or G
cggaagaatanattcctgaaaacctaggtctgatgacntangaannaacattggaatcaaggctatggcaactatggatataacagccaaggttacggttgttatggaggatatgactacactggttacaacaactactatggatatggtgattatagcaaccagcagagtggttatgggaaggtatccaggcgaggtggtcatcaaaatagctacaaaccatactaaattattccatttgcaacttatccccaacagcgggaacttcattgcaggccctgtgtcgcgctgacttcacgattctcacaggcccgctcaatgcggacagggtacgagatgctcacgctctcgaatgctgccgtttggtggtgaagcagtattttccaatttgaagattcatttgaaggtggctcctgccacctgctaatagcagttcaaactaaattttttgtatcaagtccctgn

SEQ ID NO: 12489 - DNA, 463 bp, Homo sapiens
tttaaatcggaccctagaccactgtgcgtggaattcaatgaagcagatcaacttaaaggataataaaatttttaaagaaaagatattctaatgtactctcaataattctacagaaataaaactgtaaagtgcaatgtgaaatcaaagattatagtcattgtataatttggcttggaggctatgaaatgtctttttttctttttggtattttacattattcacattttagaataacaagaacaccaagaattacccctaaaacagagaccctgtatttaatctactttgatcagagaagtagaatttataacaggttagctaaaattgggagcatgccttaaaacttaaagattgtatgcatatatgtgtatatgttataaacgtgaaatatatttgacacacacattcacatataaattgttaaaaactgaaggcagaatggaactaatatatgtaacagaga

SEQ ID NO: 12490 - DNA, 554 bp, Homo sapiens
  misc_feature (1)...(554): n = A,T,C or G
atttgaattacaattactagtccagcgnggngcaattcgagaaaggtctgttgngagccgtggcaaaagtagagatagggagacaagttagaagacattgctgcttgtgactagagttcatagcagtgaagacagaattggtcatatttgggttctctgttggagcttgaactggcaggatgctgattaactagatatagggaaagagaaatccaaggtgattcctagggttttttggcctgagaggtcagtaaagatggggaagacaagtcattagaaggaatccagggaaacatttagtctttcctttactctgaagcaggtgtccttggagttaataataactggattacaaggaattctttgtagaaaatatcttgaacattntttgcctttcttagtaagtttgcccaattataaaagttacagcttttgggccagatgtggtggctcatgcttgtaatcctagcactttgggaggctgaggcaggtggatcacttgagcccaagaaattgagccaacctgggcaactggcgaaacctgctcttacagg

SEQ ID NO: 12491 - DNA, 488 bp, Homo sapiens
  misc_feature (1)...(488): n = A,T,C or G
gtaagtacccggncnannnnggtttgagacccattgaagacctctaggccgngcgggggaattctaaagaatcaagggattgatggatttagggagagagaaacgatcaaggggctggtagtattcaggaaggctaagagcagtttcagcaggaatcaagtgagagaagtagaatgcaaaaacttatgatcagaaagaggaacttcagaagttcaggatcctgaacaaattatcagttcagtattggaatagagaagatgagatggatattggaattgaggccagagtcctagaaaagtcattgcaagtgtttagttcatgaaagcagggaatgaagtagaaagtgaaaccatgcgccagttactgtcaggaaaagtacaggcatatcttggatattttcagaggtgattatgagtaatttaatgccatttgagaaaaaaataatttttttcgttactgatcactttgattttttttttttttttttn

SEQ ID NO: 12492 - DNA, 472 bp, Homo sapiens
  misc_feature (1)...(472): n = A,T,C or G
cgccccctttgangcccctngnntttgatgactattagtccgtgcggtggaattccaggctataagagaatatctccttacacttggtcttcagggcagaagtagcaacaaaaaagcacaagtcctctttgaaaccatatcttgatttagtgtcctcagcctaacaggtattgcagtgtggcccaacagagatgggtctgtgagatacttcaacacccggcagggctgctgggtctaacattggagtgttgggctgcagacactgactggggagaaatgttgtgaactttatttgcagttctgagagaaatgctgtgttgaaacaggagaggttttcagaagctgctctcagtagctggctccaggattggggtgatggtataatacttacaaaaggcagcacatcagatagagaatttgataggcagaaattaggtagctccggcaagttatttttcaatggaagactaag

SEQ ID NO: 12493 - DNA, 445 bp, Homo sapiens
  misc_feature (1)...(445): n = A,T,C or G
attgaggccattgnnattgacgacccctagtccatgcggtggaattcctccatggtcttcaagcagatggagcaggtggctcagtttctgaaggcggctgaggactatggggtcatcatgactgacatgttccagactggtgacctctttgaaggcacagacatggtacagtgcacaggaccctgatggctttgggcagcttggcagtgaccaagaatgatgggcactaccgtggagatcccaactgggttatgaagaaagcgcatgagcatacgagggaattcacagagagccacctgctggagggaaagcatgtcattggccttcagatgggcagcaacagaggggcctcccaggccggcatgacaggctacggacgacctcggcagatcatcagttagagcggagagggctagccctgagcccggccctcccccagctcctt

SEQ ID NO: 12494 - DNA, 467 bp, Homo sapiens
  misc_feature (1)...(467): n = A,T,C or G
cgcgtggannnnnnnttttaaatgagtccctattcagtgttgtggaactctccaaaatgacatcatcagtaccctgcaatccctcaatatggtcaagtactggaagggccagcacgtgatctgtgtcacacccaagctggtggaggagcacctcaaaagtgcccagtataagaaaccacccatcacagtggactccgtctgcctcaagtgggcaccccccaagcacaagcaagtcaagctctccaagaagtgagcagcctggcccctgctgtcggacctgagcctcctggctcccagcctgtaaatatgtatagacctgttttgtcatttttttaataaagtcagttctggtggccctggactttggaggggaaggggaaaaaaaaaaaaaaaaaaaaaaaaaaaaaaaaaanncggggccccttaaatttaaagggcccctttaaaccccgttaataacccttgtt

SEQ ID NO: 12495 - DNA, 459 bp, Homo sapiens
  misc_feature (1)...(459): n = A,T,C or G
nnnttttggaccttagtcactgtggtggaattcggaggagattaaagcctgatttttgcaacgagttggtaacattctctttgggagactaaagaggaatttatgagaagaccatcagaatcagttaggtgattattttcaattttgactacaaatgacatctaggaacacaccatgatgccactggactctgtagtggtctttattagaaaagtagcaacaagagactttttgtgatgtttaccctcagtgagctcagaggtcgaggaattgcccagaatcttgcagattttcatttaacagtcaaccattgagcatttctgatttgcatttaaaaaaaatgaacctggctggttttgactatttgtggtgatatgttagaatacagatcctcatgcaagtatttgtgattggcacgtctcactcagacatatgtctcactcagacatcttctttgtg

SEQ ID NO: 12496 - DNA, 459 bp, Homo sapiens
  misc_feature (1)...(459): n = A,T,C or G
atcgagaccctgagatccgtacccagagtgcnggaattacttggttctgctaaggaaaaggactcctcactggcttgctgagatgcgcatgcaggaagaattccctggtgtttcctctgagtgtgccctgggcaggtgatgttagggacacagcaatgacctagttcttgtctgcacaggcttctgatattcagggggaggccaaatgtagaatctagagaccgagctactcaggcccatgggctcatgacaatgtagacactgatgtttctgtctcctgattggaccctggatacaatttatctatccatccttgtcccaatgccacagtgtctttggntttcttttttttttttcctttaattaattaattaattttggaaagggagtctccttttgttgcccaggctgaagggcaatggcccaatctaagtttactgcaacctccatctcccaaag

SEQ ID NO: 12497 - DNA, 470 bp, Homo sapiens
  misc_feature (1)...(470): n = A,T,C or G
ngggaggattgagcccctngnntttgacgatcattagtccgtgtggtggaattcgcggggccttatgctgccatgcactgccctggctcctgccggacccccagggtgggccgtggcaggtggctgagcaggagctcccaagtgccggccaccgctgtcagggattgcccacccctgggcatcatgtgtgtggggccggggagcacaggtgtgggagctggtgaccccagacccagaattctcagggctctacccccctttcctggtcctaggtggccagtgggtatgaggagggctggaaggcagagctttgggccaaaagcaggcgttggggggtcccccctcaagtttggagccgtttccgtggttgtagcagaggatcggaggttgggttcctgattaaacttcactgtgtgttttctatctcgnggnnnnnnnnnnnnnnnnnnnnnnnnnnnnnnnnnnnnnnn

SEQ ID NO: 12498 - DNA, 469 bp, Homo sapiens
  misc_feature (1)...(469): n = A,T,C or G
gcgtgatttttacggaaaccttcgacnganacctnncgnaanngcggnggaantngnggagagcaagcagagggcagtgctgccttagagtgagtcattctcctggcatagggaaaagcacgaagggtacggatagacagttgggtaaaaaaagatgccagcaagtattttaaaaacgcctaaccacacaaagagagggaaatggaagtaacaacagtgatttttacccatgaaattgacagagactaaagtgattggtatctattgagtgagagcgtgggaagattggtggttccctctcagcaagcggtccagggaacacctttctggagagcactgggtggtaaaaccaaaagccacatagtctcagtccatcaagttcacattcagagacttaccctaagaagattaaggtacatacagaatgatttatgttgaaagaagttcatcttaacatgatttagaatag

SEQ ID NO: 12499 - DNA, 486 bp, Homo sapiens
  misc_feature (1)...(486): n = A,T,C or G
agtgataaccntcgcanntttgattacntcttcagtgtgccggaattctagaattcatactggaaagaaacattagaaatatgaagaatgtgactaagtttacagttgttaatcaagtcttgaaagacaggagaattcatactggagagaaagcttacaaatgtaagagtttgtgacaagaatcttgggcgtgattctcacctggcccaacaaactagaagtcacactggagagaaaccttacaagtgtactgagtgtggcaaagcctttagtgggcagtcaacacttattcaccatcaggcaatccatggtatagggaaactttactaatgtaatgattatcacaaagtcttcagtaacactacaaccgtttcaaatcattggagaatccataatgagagattttgaaagtgtaataaatgtggcaaatttttcagacattgttcataccttgcagttcatcggtgaactcatgctggagagaan

SEQ ID NO: 12500 - DNA, 472 bp, Homo sapiens
  misc_feature (1)...(472): n = A,T,C or G
cgcccggaattganncctnttnnntttgatgatcattagtccgtgtggtggaattccaagccaagattcatgtttgggccccatgacccaaacacctcccaccaggccccacctccaaacactggggatcagatttcaacatgaaatttgaagggaacaaatgtccaaacgatatcacatatggttacttttgttatccatatagagacgaatgtatctgaaaagaccaacccaggataagcagttcttttttccaatactcaaatatgaagtttggctttattttgcagctactatcaatgtttattacacccgtcaagtttattgtttctgcaaatatctggactcctaccttagtttagatcttctttacctgggctctctcttaggagatgtttcatgtcctcgaaattctttgcagaattgcttgtatatgagcatatttgtattttggaagaatgccggccagaga

SEQ ID NO: 12501 - DNA, 469 bp, Homo sapiens
  misc_feature (1)...(469): n = A,T,C or G
cggtgggaatcgagatccttagncatggtggtcgtattcgnctggacggagctggagcagaagcacacccatcagtacaagttagcatggcgaccccatccacacctttgacctgaacggcagcgaggtggacactggcaccgtgtacaacaagattggcggctgctccctgcttgagccaccctggcaggacaccacgaagctcagctctgagaacttccgcggtacgctcaccagcctggccttgctgcccactaaacgccacctcctgctgggctcagacaacggggttatccgcctcctggcatagactgaggcaggagctggccgggcaagggtgggaagacatctgcgggcgcgtgtccactcaccctgttccctgagcagcagctccctccagggaggccctgggtcccacgccctgggtgcccacatggcctgccaactagggcctgcaaatggagtgagg

SEQ ID NO: 12502 - DNA, 460 bp, Homo sapiens
  misc_feature (1)...(460): n = A,T,C or G
nttcgtagactagagtccatgtggtggaattcaaatattttgcggcattaaagccatatacaaggtctatatcagaaaaatatatttggggggctgcagcacaggactgagggagcggtacatgcttaaaaggcaacagggcctggttttcagtggcgatgatgattctctatgacagtcagggaaacgtggtctctgagagtgatgggcacataaagccttggtgccagagtgcatcgcatggtgtccaggccgagtctctgtcagatggttagaggcctgggtctaccctgccaggagaggcgtgtttgggtaacaggcagatggagtttggaacacatgaatggctcatcacacgccaaccctgagtggggcaggaggcaggaagggtgggctgccgcctctggttggcattctcagagatgcgcagtccatcagcttgttccaaagagtgaacacn

SEQ ID NO: 12503 - DNA, 459 bp, Homo sapiens
attcgtagaccactagtctagtgtggcggaattcattctaaaaatcttttgaaatatataattcaaacaccacttccataatatttcaatgcatgtttgttagttttaaataattaggtttgccataaatgaaacaaaattcattaaaggaaaaagtaggactttaaaaggagtgatgaattattttgtaaaattcagcaaaatatacaacactttagtttaataggcatttgtatacataacaatataccattttaatataattttcccatcaaggtggtattagctctgtgtgttagaaaatgcctgtttcattgtcacatgaagaatttcaaaaataataaaattttcatattaggaggaaatatctttgaagaataacaaacacaaatgtgaaaatccaagtaaatgcctataaaatcttatatgaggtaaaatatattttctggaagttatctg

SEQ ID NO: 12504 - DNA, 469 bp, Homo sapiens
  misc_feature (1)...(469): n = A,T,C or G
gcgncggannnaanattttaaatcgagacccctntnanngctgagaacatagtccatgtggtggaattcaaaaataggaaacggatatattatcatgttacgtgttcttgcgggatttaactttgaggcgcattatcatagcacctaacccattgtgtgaagcttccaggtggcttgcttatatttgttgagagactataaacttgttgatggctagagacttatcttgatcgctagagaatgtcatttattatgaacagcaatcatgtagttagatgcttaattagtggaaagaaagagagacataatatcaaaggtaaaaaatgattctctctaagtactgaagttatagctggtgattaatcattgttaccattttgaaaatggtgaaattaattcccagaaggaaagagaatacaaaaacacaagtcatggtgctttgccatgagtgttatctctgagtcttaac

SEQ ID NO: 12505 - DNA, 439 bp, Homo sapiens
cttgtgttcacttgtttatctgctgaccttccctccactattgtcctgtgaccctgccaaatccccctctgcaagaaacacccaagaatgatcaataaaaaaaaaaaaaaaaaaaaaaaatttgggaaaaaaatttaattttcaatataaaaaaactttttccacctaaggaaatactgtttcgggatatcaaagcaaatttctgattaaagaccaattaattaaaaagagaatcccccccaaattaaaaaaaaaaaattttccccggcttgggggcccatgcctttatttccacctactcgaaaggggggggggggagaaaaatttgaccctagggggttgaggctgggggaaactgtaaaaaccctgttgaaaccagcctgggaaaaaaagggaaaccctgccccaaggaaaggaaaaggaaaaaaaaaaaagggga

SEQ ID NO: 12506 - DNA, 552 bp, Homo sapiens
  misc_feature (1)...(552): n = A,T,C or G
gttagaattcgaaccacctatccagagtggtggaattcgaaggacacttgggtggagcactggcccgaggaggacgaatgccaagacgaagagaaccagaaacaatgccaggacctcggcgccttcaccgagagcatggttgtctttgggtgccccaactgaccacacccccattcccccactccagataaagcttcagttatatctcaaaaaaaaaaaaaaaaaaaaagcgcccgttcaagtttaaaggccccgttaaaccccgttgataaccctgaacgggcctttttagtggccacccttttgtggttggcccctcccccgggctttctttgaccttgaagggggccactcccattgtcttttcttaaaaaaaggagaaaatggcatccctttgccggagaggggggctttttctttttttgtnnnnnnnnnnnnnnnnnnnnnnnnnnnnnnnnnnnnnnnnnnnnnnncnnnnnnnnnnnnnncncnccnnncnnnnnnnnnnnnnnnnnnnnnnnncnccccccccccccccaaaaaaaaaaaaag

SEQ ID NO: 12507 - DNA, 465 bp, Homo sapiens
  misc_feature (1)...(465): n = A,T,C or G
ntttgagattcatgagaacctacggaagnngcgnggaantttnngncgaagggctcgctctcaattttgcgcaagttgaaaagtgcaccagatcacgaggtgagaatacttctcctgggcttggataatgctggcaagaccactcttctgaagcagcttgcatctgaagacatcagccacatcacacctacacagggtttcaacatcaaaagtgtacaatcacaaggttttaaactgaatgtatgggacattggtggacagaggaaaatcagaccatactggaagaattattttgaaaataccgatattcttatatatgtaatcgacagtgcagacagaaaaagatttgaagagacgggtcaggaactagcggaattactggaggaagaaaaactaagttgtgtgccagcgctcatctttgctaataagcaggatttgctcacagcagcccctgcctctgaaatt

SEQ ID NO: 12508 - DNA, 461 bp, Homo sapiens
  misc_feature (1)...(461): n = A,T,C or G
tactgagaccctgaggaacngtcggggaanctgnngtacatggatcaatgggttccagcgattaatctccctgaacggtgatggcatcttaatgaatttaactgaaccaaattgcactgaagtttttgaaatacctttgtagttactcaagcagttactccctacactgatgcaaggattacagaaactgatgccaaggggctgagtgagttcaactacatgttctgggggcccggagatagatgactttgcctatggaaagaggtgaaaatgaataaggaagctgtgttgaaacagaataataagtcaaaaggaactaaaattacaaagaaccatgcaggaaggaaaactatgtattaatttagaaggggtgagtgacattaaaataaaccaaatatgttataaggtatgtgtgcagccatagtttgggtatttttaggttatatgccctcaagtaaaaa

SEQ ID NO: 12509 - DNA, 465 bp, Homo sapiens
  misc_feature (1)...(465): n = A,T,C or G
ttttnatcgagaccctgatagcactgtgcgtggaattcgaaggataatgaggccttgaggtgttctgcccccaatttcaaggagcttatcaggcttcatgtgcaatttggggaggggagctttttgatggtgggtaaataatggctctacaaagattacctgactccactgacacaagaatatgtattctcagctgatataactgtgtgttcacatcccatccatagaactcactgaaggagattcatcaagtcagccttttggactgggttggggtttggggagtggatttggggatagagagaaaggtgtacttagtacacattttctaatgggcgttacgtgaactgtttgaacctgctgagtggcgctttgtagagctccatgttcacgttcagtgtcaacaccattcaacagctttgcacatcttcgtacaacataatctggctttggtgccccttgagg

SEQ ID NO: 12510 - DNA, 453 bp, Homo sapiens
  misc_feature (1)...(453): n = A,T,C or G
attgagnatcgagactttagtccatgcggggaattcctactttttataatagagaatgtggttgtgtgggctttttttgaacagaaaacacaacaatgacctataccgtgagaaaagccattttatcttcttcgtggtatttttacccccaaaggaactgaagatggaaaatatgactaataagttattgcagttttggtcttgaattctgtgccatctgaagttagcatccagcttcttaaaaagcagccacgcctacagcctgttttttgggaaggctgtaggtggagagatgggcttattttgcataccaccctcagggcccagagacccactgcattttccaaagttaagcaaatgacaccattttcttccatcagctaaactttacagataatagtgtttccacctcatatccttttctttgccccttctcaaatgagtcagaatagn

SEQ ID NO: 12511 - DNA, 490 bp, Homo sapiens
  misc_feature (1)...(490): n = A,T,C or G
gtacgggccgggnngcttttcactgaaaccntatccangncgnggaattccgggcacagggtgccgctgaccgaggcgtgcatagactacagaattggaggcatgatgaagactctgctgctgtttgtggggctgctgctgacctgcgagagtgggcaggtcctgggggaccatacggtctcagacaatgagctccaagaaatgtccaatcagggaagtaagtacgtcaataaggaaattcagaatgctgtcaacggggtgaaacagataaagactctcattgaaaaaacaaacgaagagcgcaagacactgctcagcaacctagaagaagccaagaagaagagagaggatgccctaaatgagaccacggaatcagagactaagctgaaggagctcccacgagtgtgcaatgagaccatgatggccctctgggaagagtgtaagccctgcctgaaacagacctgcatgaagttctacgcacgcgtctgca

SEQ ID NO: 12512 - DNA, 469 bp, Homo sapiens
  misc_feature (1)...(469): n = A,T,C or G
cgcgtgcnnanaaaaataaacctgagaccntngtaannactgtagaccctagtccgtgtggtggaattcgccaaaccctccttcttcctagagcccagccagcaggcaggagttcctggaccctcaggacagtgaacttccagacctcagggcaggtctatgggccactgcaggagatgagaccagccttctgtgttcacctaacgatttatactgtgtatctgtctttgatggaattttgtaactttttatatttttttatgcaaaagcagcttcttaacagatggcattttctgtgactctaggcctcacaaaagagccagagttctggacccatgtttggagcatttgtagccttattctcttgcgtgtgaatctcttaccctgaaaaaaagccataatgaattaagccagactgaccacttgcttggagtgtgtgcttgaaaaaaccagagcaatactgttgggt

SEQ ID NO: 12513 - DNA, 480 bp, Homo sapiens
  misc_feature (1)...(480): n = A,T,C or G
gggtcgtcnnattgagaccctattgaggcgttgaatacgacccggactcctgaacttcaatttcagtattatttttctgtaccaaactcattcaataaatacttgagattagggataagtttgaagttagaagattccagagtacactcaaatagtatttggcacatagcttgttgatcaaaagtattcactaagtgagtgacaaaaggcactagcaactttaaggattttgcctattagtatcatatggcatgtagctatcaagccagtttcgtttagttattttgtgttgccaagcatatgatacgtggtgtcacactgagcctttgggatcctttccctggatacataaccctagtagataatgttactgcaagatgtaatgaccaaatccaacctactgcaaatgttactatggaaatctcaatgcaaaagtagcctttgtgatttttttttttaaaccgtctccataacagaacn

SEQ ID NO: 12514 - DNA, 492 bp, Homo sapiens
  misc_feature (1)...(492): n = A,T,C or G
tgatgtttggcccgccccccttcgagaccattcgatggagcgctctaggcacagagcgcnggaaggcgactcttgcagcccaggctgcagtacaatggcgcaatcttggcttactgcaacctccttctcaggggttcaagcgattcttctgcctcagcctcctcagtagctaggattacaggcacccgccaccatgcccagagatggagtttcaccgtgttgcccaggctggtgtcgaactcctgagctcaggcgatccgcccgccttagcttcccaaagtgttgggattataggcgtgagccactgcacctggcacagaaatttccaaggaaactatatttcttacattgatggaaatgtatggaaagcatacagttggaccgagaaactaattctcaatcacaatcctctgacaactgttgaagatccatatctctttaaattgccagcattaaaatatctagacatgggaacaacgctagtcccacttn

SEQ ID NO: 12515 - DNA, 469 bp, Homo sapiens
  misc_feature (1)...(469): n = A,T,C or G
atcgaaaacccctcgagaacttgtgaagngcggnggaattcatgggccacgagcaaatcccattaatattttcctgctctccctacgggcttcatccttgccttggcttcagctgttgttcctgcactctctgcttctcccagttcacctcctccacccctttcccaggatccactactgtgttggctcctggttccccaatcacatgctctgagcctggccctatgcctctctcttccaagtttccagttgtgtggaccttgaatttctcaaagcctcttcacttctcacctctgctacttctcatccctactaattctcttatcaagcccttacttagtatgtgccaggtagtcttgtaggcaattgatatgaattatctcttttaattctcacgacaatcctgtgagtcttgctggacagatgagaaaacagctgcaggcaggtttaagtaactcagctaagctct

SEQ ID NO: 12516 - DNA, 454 bp, Homo sapiens
  misc_feature (1)...(454): n = A,T,C or G
nattgagnatagtagaccttagtccgagcggtggaattcctctactttcatgtgcctcctagctgatagtggggggctgcgcgtctttgttatttctttgggccgtctgctttttgggttctttgattttcttcttttgtttcttcttctggattaatcaaggattttataatattcagatttatctcctctgttggggttttagctgtacctctttattttttaagaggctgttctagggattacagaatgcattctcaatttatcataaaatagcaggaatattataccaccttacatgtttcacatgtaataaaacatactttcatatactattttcatcctttgtgcttttattgtcataagttttgcttctaaatgtattatagttattgtattttgtgattatttgtgcttcagaaagttattctttgaagaaactaagaaatgagaa

SEQ ID NO: 12517 - DNA, 532 bp, Homo sapiens
  misc_feature (1)...(532): n = A,T,C or G
tgattcatagtacagtgcggtggaattcggaaatttaaagcaggttcttgttggtgcacagcacaaattagttatatatggggatggtagttttttcatcttcagttgtctctgatgcagcttatacgaaataattgttgttctgttaactgaataccactctgtaattgcaaaaaaaaaaaaaaaggtggcggtggtttggtggacttttggagggctttaaagaaaaaacatttttttttataaaaatgggggcctttttaaaggggcgaaatttttttttttggggggaaagctagttttttgttttggcccttttggaaccaaatgatttataacggggtttttcttttattatagtaagcaaaaaaaaggttttggtttaccccccttgaatataatagggggggaaaggtaaggtggaaatatttttcttccttacctgaccttccaaattttggatcggtaaaaaatatttccattcccccttaacttttacaactggaagagattcattcactcagggcgtggn

SEQ ID NO: 12518 - DNA, 496 bp, Homo sapiens
  misc_feature (1)...(496): n = A,T,C or G
tggagatcccnnnaggggnnnnnncctcgtagacattagatagatggccngtagttctaacagggagacaccacgaaatcattctttgcctaagcgtaattcccatttggagataacaattccaaaggacttgaaactaaaagaagcagagaaaactgatgaaaaacagttgattatagttctgctcattaatcaccacgagtgtggatctgaagaagagtttattacctctctttttttgagtatgtttaacttcagatacacacaacgtagcttctccttccctattagattcttagaagggctggaagaaagaaagaattctggctgaataccctgatggcaggataataatggttcttcctgaagacccaaagtatgccctgaaaaaggttgacgagattagagagatggttgacaatgatttaagttttcaacaggctccactaatgtgctattccagaactaanacacttctcttcatttccaatgacaa

SEQ ID NO: 12519 - DNA, 497 bp, Homo sapiens
  misc_feature (1)...(497): n = A,T,C or G
ggaggttcnnnaagttnnnnnnaattgagncccttgnactgatgaccatagtccangcggnggaattccttcttgccaaatgcagacgaggggtgagcctgccagcgtttgcgacgtccccgcacgacaggctcatactttctgaggatcgtgcatagcataggacgtctgaacctttgtacaaatgtgtagatgacatcttgctacagcttttatttgtgaattaaagatgcatcgatggttaaaaaaaaaaaaaaaaaaaaaaaaaaaaaaaaaaaaaaaaaaaaaaaaaaaaaaaaaaaaaaaaaaaaaaaaaaaaaaaaaaaaannnnnnnnnnnnaaaaaannnaaaannannnnaaaannnnnaannanaaaaaaaannnnnnaannnnnnnnnnnnnnnnannnttccattttnnnnnannnnaannnntnnnaaaaaaanaannanatnnnnntattttatgaatggtnnnntntattanccttannnt

SEQ ID NO: 12520 - DNA, 482 bp, Homo sapiens
  misc_feature (1)...(482): n = A,T,C or G
agggagttnnaatcgaagaccactagattgtagcacgattagttcgngctgngctcaccctcatgagtnaggctgacgagtcgtgaacgggactcaggtgtgggaagaggcgagagggctgtggaggagctcgcacggcgccaggtgatgggctgcacaggcactgtcccctgcctgcgtcctggggcctgtgcactgttgcgtccatgctcagagtggctgagacttgtgtcctgaccaggccctgcttacctctgttttggtttttgtttttgatatttttttttccattgtgtttttacgtagtgtcatgttctgtgcatatagtgttgtattctcctttgcactgtttatgttacagtgaaggctctccttattaaaaatcttcgcaaaggtcactttttaatggctatctaacactccatatgtggtgggcaagtctggttggcctccggngggtttccaggtataggggatgtagg

SEQ ID NO: 12521 - DNA, 454 bp, Homo sapiens
  misc_feature (1)...(454): n = A,T,C or G
natcgagattcgtagaccagtgcggggagcggtgggaaacctggcacttcaaacacacaatttagaattaaagagacagctgcatagttttcatatttattttgaagttatttttgtggctctgttctcagagagagactagggatctagattctacagaaagacaccttcttgcatagattagtcataactcaactttttaatttacaattatgcaatcagtgctgtactggtaaaagaaattccaaatgatagtatgaattatattttagaaaatgagacataccttataattttctaggtttttgtttagttggctgattttcaaatttctaacgtgtttcactgattgtgtatgctaagggtattttataaagaaaatttgatatgggattatggttttttcctcaaagaatgtttcttgtaggtctcattttaattcattagcaagaan

SEQ ID NO: 12522 - DNA, 474 bp, Homo sapiens
  misc_feature (1)...(474): n = A,T,C or G
natcgtagaccataggccattgtcgngcaattctcagngnctatgtaaagacacttttagaggaaaatgttgtaatcccaaaagaatttttgtttaaccaactttcagagttactaaaaggattatctttaattcagtaaataatagaatataatcttcaaaattagaagatattctcttaaaatttataacaattaatgcaacaaaaatcagcatattttgataaatgtctcaagcaaatgagcaactcacaggccccacaggtgcctacagcctgaccagctatacaaaaagcctgcaacctgattctaggataaaatattagaaagctctctgttgctaaaacatccagatataaacattttggtggctaaaatcaatgccatttcctcattgacattcttttattcagcaaatttgtacaaatatacattttctcctgtgcgaatttcaaaaagctatattcattttgag

SEQ ID NO: 12523 - DNA, 454 bp, Homo sapiens
  misc_feature (1)...(454): n = A,T,C or G
cggcggnnnnnccaactggacctccgcagnaccctacgannnacnngnnggtacagnagctgggattacagtcatacaccaccacgcccatccaattttgtatttttagtagagatggggtatcaccatgttcatcaggctgatcttgaactcctgacctcaggtgatctacccgcctcaacctcccaaagtgctgggattacaggcgtgagccactgtgctcggcctgtatttttatttttaaaccttagtatttctgaataacaacgggtagagaaacacccgcagtagctgtctacaatagagtgaaataaaaagcctgaggaactgtcaacagagaaatgggtggccgtggggagcaccgggacctgcacttgcacacaatctagggcagcttctaatgagtctatgagttactcagggatctcattaaaatgagatcagccttgagtgg

SEQ ID NO: 12524 - DNA, 479 bp, Homo sapiens
  misc_feature (1)...(479): n = A,T,C or G
nttcgatagacgtncctaggacgnngcgcggaatttcatgcctccattaccagttgcaattgtgtatctaagacctccaagcttgtttttaaaacaaaacaaaaaacctttctctattatctcagaaatataaatactgttatttttaatattaagaaattcaatataacttttaacacacactgtggaacattaaaccgtataaaaatgtagttataactatttttaattccaaggtgttgtttgcttttttcttttaaatattttcttaatattttgtcagattaactagatgaataaataaatctagtattaaccgcattatgaattaaataattttgatttaatgaaagggataatatgatttccagtgtttactgtagtgtatcttgtacagataacatgtatttttaaaggaaaaaaaacggaattgaagctattttttcttgcatttctaattgacctgagggacattccgt

SEQ ID NO: 12525 - DNA, 462 bp, Homo sapiens
  misc_feature (1)...(462): n = A,T,C or G
ntanacctgattcctttcactgatgccttcacaaatcataacttgaattttagttctgacagtgaacaagccaggaactcttaactaaataatattcagttgactcatgtgtgatttagaaaatattttgatattctagtctggttccagttcagtgaatcagtgacaggttcaaagtggttcactgcagtttaaataataaaataaaataaaataagctttgttttatttctcagttccatagaaaataaaataataatgtttggtatttgagttgaggttcagcaaacttttataattcattctaggtttttgtttattgtttccctctgcatcaactcctcctgttttggaaacatgccctgtagatatctacaaatccatactggtggaccgtattcaaggcctcaatttanaatgatgagtcacagctattcatgatgtcaggggtaagcctcagct

SEQ ID NO: 12526 - DNA, 483 bp, Homo sapiens
  misc_feature (1)...(483): n = A,T,C or G
gggagtgnaatcgtagacattagatagtaggccagtagttcagacaaaccaaaaaagttttttaaaaaatgagacccaccttcatcttgaatatgtcaaccccgcaccaccgttgtattaatctgtcatgtttttctcatataacaaaagaatggattttctttcttttaatctaaacactatacttgtatatacaatgtttatttatataggacctaagcaaaagtttttatagatgtgttcatgtcatcacaattcaggtaatgtgaaggctcaacttccgtcttctctctttgtaaatctcactgaagcattagatctcaagtaaatacatttgtnnnatnnnnnnnnnnaaaaaaaaaaaaaaaaaaaaaaaaaaaaaaaaaaaaaaaaaaaaaanannnnnnnnnnnnnnnngggccccccttaaaataaaagggccctttaaaaccccttaaaaacccctggggggccttttttaat

SEQ ID NO: 12527 - DNA, 472 bp, Homo sapiens
  misc_feature (1)...(472): n = A,T,C or G
nattggagacctataggccaatggagngccatccctannggccnnnctggcttcttcatggncacaaaaatccctggagaggggatttatggtaggtttactcttggcctcctttctgggggtaaaagccaccttaagaggaaaattatggcagcctcattttctttaaatttctgcttctagtccagtaaaggaagctccaagaaagctgctttttgtgtcggttgaatctcaaatatctttagcttaaaataatctttataacaactatggagttctgagtgggtctctctgtaggtgttttgatcttctattttgtatcgttggataaaatgtgtcattttccttgccctcagaaccctctgatggcgtctcttttccctcaaaaggaaatcagtctttaaaatggcacagaagttatgcatggtctctcctctccagcttctctgacctctcctgatcatctcaacct

SEQ ID NO: 12528 - DNA, 567 bp, Homo sapiens
  misc_feature (1)...(567): n = A,T,C or G
ggatcgataccantnnnnnnaatcgatgtctatccgagngggcaattccagcactttgggagaacgaggtaggcggatcacttgaggtcaggagttcaaggccagcctggccaatatggcaaaaccccttctctactaaaaatacaaaaattagctaggcgtggtggcgcatgcctgtagtcccagctactcaggaggctgaggcatgagaatcgcttgaacccggcaggcagaggttgcagtgagctgagattgggccactgcactccagcttgagtgacagagcaagactctgtctcaataaataaataaataaataaagcagtctatcctttttaaaagatacctgttatatcatgcattttcctgtgttcttagtctttaaaggcccttcttttaagtgatccatgtggtacaaaaatgcatagaatattttcttctatgtataccctattaacttcacttgtagggttagatgaaatttanatttccagatagtaagccccaaaatattctcctagtattttaaacttactccttccaagtccttcagtatcagcacgaacn

SEQ ID NO: 12529 - DNA, 457 bp, Homo sapiens
  misc_feature (1)...(457): n = A,T,C or G
nattcgaagaccactagtccattcggtggcactcctgcctttatgagctgtaacactcaccgtgaaggtctgaagctttactctggaagccagtgagaccaggaacccaccgggaggaatgaacgactccagacacaccgccttaagatctgtgacactcaccgcgaaggtctgcagcttcattcctgatccagcgagaccatgaacccaccagaaggaaaaaactccggacacatccgaacgtctagaagaaacaaactccagacacaccgcctgtaagaactgtaacggtcaccgcgagggtccgcggtttcattcttgaagtcagtgagaccaagaacccaccatttctggacacactaccatgccagagatccaggggctgcagcatgctgaaagaaaacagaagcctgtggagtgagccaagatcaaccaggaaataaaccctttcccttgg

SEQ ID NO: 12530 - DNA, 451 bp, Homo sapiens
  misc_feature (1)...(451): n = A,T,C or G
ctttgatagcgtacatctgaccangcggtggaattcgaaaactgtgcttccatttttattagatttctgtatttttttaaatttgtcactgccaaaattttgaatgttttgttcctaaccctgtctttcccataagccctatgattttagttgcatgcgtttgcatattgcgttacttttgaggaacacatccatcacattaaagcagaagggactgtatttctcttttgtgtctggctccttttgagattatgtttgaaagatttatcattgttatgtatagcaatagttcattcattttcattgctgtacagtatttcgttgtgtgaacataccacaattcatgtatctattcaactgatgatggacttgtagattgtttttagattgagactgttaaaaaccttgtacatatttctgttgagtatatactcaggaaattgctgggtcn

SEQ ID NO: 12531 - DNA, 498 bp, Homo sapiens
  misc_feature (1)...(498): n = A,T,C or G
ggaagttcccnnnggtnggggnnactgtagaccctnaaatcgatgacactagnnaangcggtggaattcgtaaatcttaaaatcttgaagctaaaatttatccttttatgaggtgtggaagtcagtgacttggtgacgttcttcctagcagtgttaatacatgcaagaagtaagagcatttgtggcttgaacttgccagatgcaaataccacagactccaagaaaacccgagttggggtttgttttgttttgatttttttttttaaagcgggtaaaagagaaaacactgaaaattgaattcttatcttccagaggctacaattattataatggacaatacttttacctttgtctctaaagatcagattagttttatttgttcacttacgtgctttgattatcccctctgaattatagaccgagtcttgttgtttagcctaagagaagatttatgtagtaatttcttctcaggtatggaaccacggtcataactaacat

SEQ ID NO: 12532 - DNA, 473 bp, Homo sapiens
  misc_feature (1)...(473): n = A,T,C or G
gcccaaatgagaccatagcaatgagcggcattcgaggnggcccggaccatcggcatttctgtggatccgaggaggcggaacaagtccacggagtccctgcaggccaacgtgcagcggctgaaggagtaccgctccaaactcatcctcttccccaggaagccctcggcccccaagaagggagacagttctgctgaagaactgaaactggccacccagctgaccggaccggtcatgcccgtccggaacgtctataagaaggagaaagctcgagtcatcactgaggaagagaagaatttcaaagccttcgctagtctccgtatggcccgtgccaacgcccggctcttcggcatacgggcaaaaagagccaaggaagccgcagaacaggatgttgaaaagaaaaaataaagccctcctggggacttggaatcagtcggcagtcnnnnnanaaaannanaaaaaaaaaaagaactggg

SEQ ID NO: 12533 - DNA, 526 bp, Homo sapiens
ataccgttctcatgaacgaatgtgttcggtagaaacttaagtgcaaagctctaaatgttttgtttctagggatcgatgagaaggcttaaggatctaaaatctgggcattttagatctgcttagtacaggaataatttgcggcctcaggtttagagtcatgtttgaaaaactggcccctggattgcaggaaaacaaaaaacaatatagccatttggtatgacttgttataaaacttagctggtggtttttaaaaatagttccaaaccaaattagctctgggcacctgctggagcttagtatgttttcagatagacttgtttgctgtcagccaaaaaaaaaaaaaaaaaaattccaccccaacaaacctttccccccacagggttggttaaaaaacctgactttattattgtttttccaacccattttttttaaaacaaatctttcaaataaaaaaacttggcttctgccttcttaaaagaggggggcaaatttttggttggtaaataccagttcaaaaagcttggag

SEQ ID NO: 12534 - DNA, 457 bp, Homo sapiens
agaaaaaaaatttgagacctcgagacgtgcggaggaattctggagcctgtggaaagacatgcttgctcatagtcttcagcaaggaccagttcccagaggtgtatgtgcccacagtgtttgagaactatgtggcagatatcgaggtggatggaaagcaggtagagttggctttgtgggacacagctgggcaggaagattatgatcgcctgaggcccctctcctacccagataccgatgttatactgatgtgtttttccatcgacagccctgatagtttagaaaacatcccagaaaagtggaccccagaagtcaagcatttctgtcccaacgtgcccatcatcctggttgggaataagaaggatcttcggaatgatgagcacacaaggcgggagctagccaagatgaagcacgagccggtgaaacctgaagaaggcagagatatggcaaacaggattgg

SEQ ID NO: 12535 - DNA, 454 bp, Homo sapiens
  misc_feature (1)...(454): n = A,T,C or G
tatgatacttgagaacctcgnggaannccnnaggatctncccaaagcccatctctggtttgagaattcattttgatctgtatttacaccactccaaagttaggcctcctataatgtccaaaacattcctttcagcctttttatttcttactgtactgtctcttactgtactgtctatctgcagtaattgaggacccataaaatctagataactacatgtctttgctcttagaattgtcactcagcataatgagcatttaacatacaaaggcaatggactgttttgtgtcgatctatgtaaaagaatacaattcttttttacataatgagggaaattttattttttattaggaaacactaaatagcgtaatatttcttttgcttttaaaaaaattcctggtagcaaatcaagataaataattgcttcattttcttgagcaatactgaagcaggaa

SEQ ID NO: 12536 - DNA, 461 bp, Homo sapiens
  misc_feature (1)...(461): n = A,T,C or G
ngggggttgtagatcccttggacagcgcggtggaattccttgtaagctatctgtgcaggatatttgcactatttccacatggaatcaatctttaacaacctctgagccttggtgtacagaccacctttcacaaaacgaaatgctatgactgtatcttgatatctcgaactttcaaaatatattttcagtacacccagttgccaaagttttgctgtctcttagagaaagaactatgaaatcaactgacaagaaacacattcttattgacaattgtgtataactggattgcagactgttcttactgtaactacttcctgattaggaatatgaccatttgactgttcaatgattatttgtatttacagtttccagagtttgtcattataataggaacaatctttgctgtatacttttaaaaaatactctgctatttctcttgctggaactgttgaaagaaaatn

SEQ ID NO: 12537 - DNA, 484 bp, Homo sapiens
  misc_feature (1)...(484): n = A,T,C or G
aggagtggcactgagacattggactgatgacactagtacagngcggtggaattcggtgtttctgttagaggccaagtattattgacacaggattgcaaacacacaaacagttggaacagagcactctgaaaggccattttttaagcattttaaaatctattctctccccctttctccctggatgattcaggaagctgacattgtttcctcaaggcagaattttcctggttctgttttctcagccagttgctgtggaaggagaatgctttctttgtggcctcatctgtggtttcgtgtccctctgaaggaaactagtttccactgtgtaacaggcagacatgtaactatttaaagcacagttcagtcctaaaagggtctgggagaaccagatgatgtactaggtgaagcattgcattgtgggaatcacaaagcaaatagtactccagaaagacaaatatcagaagcttcctattctttttttttt

SEQ ID NO: 12538 - DNA, 478 bp, Homo sapiens
  misc_feature (1)...(478): n = A,T,C or G
ggggtttaactgagacattagatagatgngccgtagtnnanaacaaacaaaaacaaaaccaaaaacaaaacaaacaaaaactcatattgcacatgctgtgttctagcttttttgtaagtgaactcgtttaatcttaacagtcacttaaagtccatttctcgagatgtccttcaccatgctttttctagtttatccctgcccctgagtgagcaaggctttgtgtgagaccttgttgaactgaattcgaggcaaggacttggccattgaattgtgtttatcaggtctcatccacttctaaatatgttacatttcagaccaaggaggaagtgtgtcttcagagacggtggtgcgcggtattcccctcgagtgagtgtgatacgtgaaggcacgcttatcgatcccttgtaaggagaggtcattcactttacaatgctacccaagagacaagcccttcaaatacagatgttggagtagagac

SEQ ID NO: 12539 - DNA, 493 bp, Homo sapiens
  misc_feature (1)...(493): n = A,T,C or G
tattggagatccctagtccagngcggngatagaccatctattggctntttaatttcttattttattaacaaaatatatcagatatattaccaaaacacatggagttccatacataatatggaatttgatgtcttttcaagttgcacaaagaatttgagcatatataattttaccaaagcataatggaccttagattatagaatacagcattgttaggtctgcagtgggcagtttctttttgttttgctttgtcaaaaatgggaaattgttaactgtgatgaaatgtgagaattacatagattatgttattttttagttgttttccaaatgcagagtttaaggactttctaacatggctagtattacttccaaaaagtataacaagcagcagtcacacatgacctaggagggttttttattggtttattttattatgcattccataacagttttaaaatgggattttgagaatggacttaactttcctggaatn

SEQ ID NO: 12540 - DNA, 455 bp, Homo sapiens
  misc_feature (1)...(455): n = A,T,C or G
nttcgaggcacnagncntttcgangaccactatcagtgtggtggaattcctttcttcctggacagtgcggctagacccaacccaggccagaagggaatctgctgtcctggttggttggacacaagttctggctggttttaccacctgctgactaaagtggcctcaagccttgaataaacgtcagtggcagtcaggtagtactgactgtggaccttgggcaatccccagtactgtgctggtcatagagtccatgggtttagactagcattactgtgatgccagctgtgatggacacaggagtccctgtgtcacgtctcccccaattacaggcagcctggtatatatagagggacttcttatacttcggggaatgagagagaagagagtaagggactttgcctgggaacccagaacattgtcttctctttcccacatctatctaggctgggtatctg

SEQ ID NO: 12541 - DNA, 454 bp, Homo sapiens
  misc_feature (1)...(454): n = A,T,C or G
ggcganattgtttcgattacatgnngcggggcantctgcggtgcataaaggggctggaagtgacccacctgtgatgagccctttctaaggataaggttttccaagagatcaccccaccagaaaagggtaggaatgagcaagttgggaattttagactgtcactgcacatggacctctgggaagacgtctggcgagagctaggcccactggccctacagacggatcttgctggctcacctgtccctgtggaggttcccctgggaaggcaagatgcccaacaacagcactgctctgtcattggccaatgttacctacatcaccatggaaattttcattggactctgcgccatagtgggcaacgtgctggtcatctgcgtggtcaagctgaaccccagcctgcagaccaccaccttctatttcattgtctctctagccctggctgacattgctgtgg

SEQ ID NO: 12542 - DNA, 457 bp, Homo sapiens
  misc_feature (1)...(457): n = A,T,C or G
nctcgatgaacattagtcgagtgcgccgtgaattcaattaagttggtacctgcaaaacactggatgtaatgcctggcactgaataatttctttaaatttaattcttttgtaatcctcaaaactacctgatgaggcattattagtatcctcattttccagatagataaaatgaggcttggagaggggaggtctgtgggctggatgcacttctctgtactcttggaccaaagaaagagtcctaccatacataccatggtatacttaccatggtgtaagtaccatggtgcagggtgttggggcttctccctgccttaggaggccacatgtacctggaaggtctatttccactggggtcaaatcactcaaaccctttgactttccctccaacctccagcccccagccaatatcctatctggagaattgtagactgggagaacatctgcttggtccatgtcn

SEQ ID NO: 12543 - DNA, 441 bp, Homo sapiens
  misc_feature (1)...(441): n = A,T,C or G
attgaagatccctagtcattgcggngcgaattcgttatcaaactcccttcttaactagacctagactttctactccaatcaggctaatctacttactgaatgtgacatatttattcctagttccatacctttgcacatgccctactctccactaattatacttaaaagtccaaaaattttttctttagtaacagacttaggtactgctaagcagttattaacacaatattccttagttttcatatgttggttattcatatgtctatttatatgtatatttatttttatgtatgttactatgtaaatatggtttgcagttgtttttgtgtggaatcttgtctttccgtataagttgtaagctccttgagagcaggatccatgtcattcctttatttttataaattattccccctatcattcctttacagtgcctagtgctgn

SEQ ID NO: 12544 - DNA, 460 bp, Homo sapiens
  misc_feature (1)...(460): n = A,T,C or G
atgagaccatagctttaggcgcgaattcatctctanaaaatgaatttggccatacacaggtgcctcacgcctgtaatcccagcactttgggaggctgagctggatcacttgagttcaggagttggagaccaggcctgagcaacaaagcgagatcccatctctacaaaaaccaaaaagttaaaaatcagctgggtacggtggcacgtgcctgtgatcccagctacttgggaggctgaggcaggaggatcgcctgagcccaggaggtggaggttgcagtgagccatgatcgagccactgcactccagcctgggcaacagatgaagaccctatttcagaaatacaactataaaaaaataaataaatcctccagtctggatcgtttgacgggacttcaggttctttctgaaatcgccgtgttactggtgcactgatgtccggagagacagtgacagcctccgtc

SEQ ID NO: 12545 - DNA, 458 bp, Homo sapiens
  misc_feature (1)...(458): n = A,T,C or G
ccccacctcgattagcatactatcgngcggngcaantccacggagattggctctggatctcaagataaaaccatcaagctatggaacaccctgtgtgtgtgcaaatacactgtccaggatgagaaccactgagagtgggtgtcttgcgtgcgcttctcgcccaacagcaacaaccctatcatcgtctcctgtggctgggacaagctggtcaaggaatggaacctggctaactgcaagctgaagaccaaccacattggccacacaggctatctgaacacggcgactgtctctccagatggatccctctgtgcttctggaggcaaggatggccacgccatgttatgggatctcaacgaaggcaaacacctttacacgctagatggtggggacatcatcaacgccctgtgcttcagccctaaccgctactggctgtgtgctgccacaggccccagcataaa

SEQ ID NO: 12546 - DNA, 535 bp, Homo sapiens
atgacattagtaagtgcggtggaattcaagccgcacaccactgaagagattggtgtgcccatatccaggaatggctccaccctgggcctgaagtcccagaacggctgcattcctccaaagctgccctcggggtccccttcccccaaactctcccagacacccacacacatgccaaccatcctagacgaccctggaaagaaggtgaagaagccagctcctccacagcacttttcccccagaactgctcaggggctgcctgggaccagcaactcgaatagcagcagatctgggagccaaaggcagggctcctgggacagcagggatgttgtcctctctacctcacctaagctcctggctacagccactgccaacgggcatgggctgaaggggaacgacgagagcgctggcctcgacaggaggggctccagcagctccagcccagagcactcggccagcagcgactccaccaaggccccccagacccccaggagtggagcggcccatctctgcgattctcaggaaacgaactgttcca

SEQ ID NO: 12547 - DNA, 563 bp, Homo sapiens
  misc_feature (1)...(563): n = A,T,C or G
naatcgatcactgtcagngggtgaattccctaagccgagatcccaccattgcactccagcctgggcaacagagtgtgactctgtttcaaaaaaattaaataaaaataaataagtaaagtacaaatactggttgttttatttgtgaatatattggcttattaacatgggctaaaattagtaataataatctacctattctttctaaaataacatgttgacttctgttaagtatagggtgaccaactcattcctttgcctggaattttccgttttggcacttaaagtcctatatcccaggaaacccttcagttctaagcaaactgggatatttggtcaccatatttaagttccaaataaacattggacaagtttgaataggaggtggcacattntaacaaaacaagtagtaatcttggtctttgccctaaaatggaactgttaaccaaatactgtccatataaagtaaagattntctcagaacttgtgctattattggtgggaggtgcctcacgcttttagacagcagaatagtattccattgtatgacttcaccatcatcttan

SEQ ID NO: 12548 - DNA, 457 bp, Homo sapiens
  misc_feature (1)...(457): n = A,T,C or G
agggaaaaaattttgggcccgangantctgtccatgcggtggaattcgctggaagatggccctaaattcttgaagtctggtgatgctgccattgttgatatggttcctggcaagcccatgtgtgttgagagcttctcagactatccacctttgggtcgctttgctgttcgtgatatgagacagacagttgcggtgggtgtcatcaaagcagtggacaagaaggctgctggagctggcaaggtcaccaagtctgcccagaaagctcagaaggctaaatgaatattatccctaatacctgccaccccactcttaatcagtggtggaagaacggtctcagaactgtttgtttcaattggccatttaagtttagtagtaaaagactggttaatgataacaatgcatcgtaaaaccttcagaaggaaaggagaatgttttgtggaccactttggttttcttt

SEQ ID NO: 12549 - DNA, 422 bp, Homo sapiens
cggcagccatcaggtaagccaagatgggtgcatacaagtacatccaggagctatggagaaagaagcagtctgatgtcatgcgctttcttctgagggtccgctgctggcagtaccgccagctctctgctctccacagggctccccgccccacccggcctgataaagcgcgccgactgggctacaaggccaagcaaggttacgttatatataggattcgtgttcgccgtggtggccgaaaacgcccagttcctaagggtgcaacttacggcaagcctgtccatcatggtgttaaccagctaaagtttgctcgaagccttcagtccgttgcagaggagcgagctggacgccactgtggggctctgagagtcctgaattcttactgggttggtgaagattccacatacaaattttttgaggctatg

SEQ ID NO: 12550 - DNA, 482 bp, Homo sapiens
  misc_feature (1)...(482): n = A,T,C or G
cggccgagatcgagaccctcngnaattgatgaccctagtccanngcgnggaattcgaggagaaaccagattcaagcaacatttctggggcagaaatgaaagaatgtggaaatacagcaggtgcatgaggctgaggctcagcttgngctcagcagagtttattctactcaactaaatcacaaacgcttcaggggttacaatcccattctcctattcttctgtatcattttgcacccagctcagtaagttcctgttaactaattaagtggaaaagaagagcttaaatccaaggcatacatgactgaagccaggcgtgtgcagttcctacttcatacagcctctcttgccgaacagcagggcgcactgatgaatattcaaaaagtaacaactattaatgacgactaagaccctcaaagtgtaataagttattttagtgacactcttctgtcacttttccccatctaatttcacattcttaggaac

SEQ ID NO: 12551 - DNA, 458 bp, Homo sapiens
  misc_feature (1)...(458): n = A,T,C or G
ggtgcacnnttttgagactgtagtacatgcggaggaattcgttctcaggcaagccggggagtaacttttagttttgctcctgcgattattcaactgacgggctttcatttccatttcacacaccctagcaacacttataccttgcggaattgtattggtagcgtgaaaaaagcacactgagagggcaccatgccggtggaaaggatgcgcatgcgcccgtggctggaggagcagataaactccaacacgatcccggggctcaagtggcttaacaaggaaaagaagatttttcagatcccctggatgcatgcggctagacatgggtgggatgtggaaaaagatgcaccactctttagaaactgggcaatccatacaggaaagcatcaaccaggagtagataaacctgatcccaaaacatggaaagcgaatttcagatgcgccatgaattccttgcctgn

SEQ ID NO: 12552 - DNA, 456 bp, Homo sapiens
  misc_feature (1)...(456): n = A,T,C or G
ctttgaatagctgaccattagnccangcggtggaattcacaagagtggatattgcctctccagcaggctaaccctagctagtttcaagcaggtgccaaatgagtgagtggaggcatgtgaatcctctcatggctcactcttggcactggcacgcaactacttctgaagcattttcttggcccagtttcaaggaatgaggaaatagtctctattcttaatgagaggaactgaaaagtcaaggagagtggatatagaaaggcatggaaacaatgggaacacaactattctattatgaaaggtattatgtgcatacacttcaaaagttaagaaacttactcaaggtcataaagctagaaagcagcagagacaggatttgggccttaatcttctgaccgaaaatctcattctctttcaacacttctttctaatattgctgattgatctgtgcagtccaan

SEQ ID NO: 12553 - DNA, 477 bp, Homo sapiens
  misc_feature (1)...(477): n = A,T,C or G
cctagaacactgnagatacctancccagagncgnggaantcattattctttcttacacgcttgccctttactcacattttcaaggggctctttcttaaaacataattatcaaactggttttatagtctagaataattctaatgtaagccagctgccttttgtgttcacttttgctttcacatttcgtgacctcaattccttctctgttttatgatttttggcaggacctcacatttctgagaactttaagtgtgggaattatttgaggtgtgggttaaaagtaaatccaaggagaatttacatttgcttttgcctggctgctgagtggacttgtagcccagttctgtgggagcactaagtacttaagacattttgtctgagactattttggaccacgttgtcagtgtagactctgaatgtaacactgctgagaatctgatgtctggttacaaatgctcaggggagacttttctcatc

SEQ ID NO: 12554 - DNA, 567 bp, Homo sapiens
  misc_feature (1)...(567): n = A,T,C or G
ggatcgataccanttnnnnnnatcgatntcctatccagaggggcaattatctncaagcttatgttggagaatgggaccagtgactgcaacctgcctgagaaccctctgttcattgcatgtggcggccagcaaaaccacacccagggctcaaaaatgcagaaaaatgattttcacagaaatttgactacatccctaactgaaagtgttgacaggaatataaactatactgaaagaggagtgttctttagtgtaaattcctggaccccggattccatgtcctttatctacaaggctttggaaaggaacataaggacaatgttcataggtggctctcagttgtcacaaaagcacgtctccagccccttagcatcttacttcttgtcatttccttatgcgaggcttggctgggcaatgacctcagctgacctcaaccaggatgggcacggtgacctcgtggtgggcgcaccaggctacagccgccccggccacatccacatcgggcgcgtgtacctcatctacggcaatgacctgngcctgccacctgttgacctggacctggacaaggag

SEQ ID NO: 12555 - DNA, 505 bp, Homo sapiens
agggctcccactgagtctctagtcactgtggtggaattcgtcttggagaaggtggtatagatggcctgagcctcaaaggatgagcagacagagaataatgtttgatggcctggaagtggatttgaaggaagaagagtcttttctctgaataaaggccagatttttcaaagaaggtggcagaaatgtataatgaacctgagacgactgagtgctgtttctcagggaaaggatctacctgctccatatacagactttcaaccaagtgtcttgttttcagaccttcctcctacaaagctgtctggcgtctccaattcctgactctgttctggacttctttgctttgtaaatgttggtatcatgtaattttatagccagattgttttaatgtttcataatgaacattttcccaaagcaaactgcttgttgcaaaacaaccgtatctttaagccagcattggtggagagttctagattcctgccagagttaaacccaaggtagtcatatg

SEQ ID NO: 12556 - DNA, 466 bp, Homo sapiens
  misc_feature (1)...(466): n = A,T,C or G
agcccncntnnnttttgattagcattcatcgngcggngcaantccaccaaaatgccatctcaaatggaacacgccatggaaaccatgatgtttacatttcacaaattcgctggggataaaggctacttaacaaaggaggacctgagagtactcatggaaaaggagttccctggatttttggaaaatcaaaaagaccctctggctgtggacaaaataatgaaggacctggaccagtgtagagatggcaaagtgggcttccagagcttcttttccctaattgcgggcctcaccattgcatgcaatgactattttgtagtacacatgaagcagaagggaaagaagtaggcagaaatgagcagttcgctcctccctgataagagttgtcccaaagggtcgcttaaggaatctgccccacagcttcccccatagaaggatttcatgagcagatcaggacacttagcaaatg

SEQ ID NO: 12557 - DNA, 508 bp, Homo sapiens
  misc_feature (1)...(508): n = A,T,C or G
aggccgcnntttgagcaactgagaccctagtcagagtggtggaattcggaagagctaatttttgtatttttagtagagtcggggtttcaccatattagccaggctggtctggaactcctgacctcaggccatcccccgcctcggcctcccaaagtgctgggattacaggcctgagccaccattcctggcatgtacgtgttttaaattcactcatttaacacttatgtattggatgcctactacatgccaagttctaggtgctggagacatagcagtgtatcagagggcttcccctcttggaacttataatctagtaggggagtcaggcagtaaagcggtgaagaaatacatacacagtatagcaggtgccaggaaaaacgtaaataggggaagcgcaagagaacttatcttcaaatggttaatttttattgcatccattagataatagagtaagttttttgttagtttgaattgaattagttctgtgagattggtacaaattatgtat

SEQ ID NO: 12558 - DNA, 479 bp, Homo sapiens
  misc_feature (1)...(479): n = A,T,C or G
ccctagagatttcgtgagccgtgngcaggaanccggncatctgagcacatccagcgcatcgaccgggacgtaagcgggacattaaggaagcatatattcttcatggatcgatacggaaccaagtaagcctacgggagccacagggtcccagcagagatggggtgaatgagagggatgggggcttccccggagcagaagccagggtcacccaggagggatgacacagctgccaagagctctcccggcccagggagcagccggcaccatgaaccgagcacctccctggttccaagccctgggccagactggaacatgtggggccagaacccaggaggatcctgaggagatggaaggcagcaaacaaaatcatgcacaatggtgaagggtgctctccctgacccatggggacccatggtaggacccacgggagggtggcaggatagagggcccatgagccccccccaggcaacagtgacagc

SEQ ID NO: 12559 - DNA, 565 bp, Homo sapiens
  misc_feature (1)...(565): n = A,T,C or G
ngattggatcacgctcagngggatcgattctccctaggagctgngcaggataggngcccaccacaacgcctagctattttttgtatttttagtagagacggttgtttactgtgttggccatgctgatctcgacacctgcctcggcctcccaaagtgctgggattacaggtgtgagccaccgagctcggccaagaatcagtattcttaatgctttccaaggagggtaaacagtggagcaccgaggtcatgattgagagatcggctgtgcctaaatcctgccactcactctggacgtagtaaaggtctgagagattgccggtgaatttggagatatgaacaagagtccttcactcatagaacaaaggagacatcccgggaagtcacaaaaccaagtctatgttcaggtagagacttttaaaacagtgcagatccccagaccttaccttttttgatcctggtgagtgagtgttggtggggcctgggatttgtctgggaggctgcccaggtgcttgggtcactgtctcaagacccacctgtgctggtgcagcatctcagaactgaactg

SEQ ID NO: 12560 - DNA, 455 bp, Homo sapiens
  misc_feature (1)...(455): n = A,T,C or G
ggtggtttgagtcgattaccagngcggnggaattcttaggatctagtagttagaaaagacagtaaaaataaggtagaatctgcatattaaaggagttttagattaacagtgaattacagtgagcagtactacagaactacagaaattgaagtaaattcaagagtgttttgccctggtagatgtttgtaaaattgattatagggccataatcccttatctatatataacctttggtgccaggtatttttggatttcagaattttgaggaaagatttgttttagattttggtaagagtaatcaaacacaatattaatgtggaacatggatagtcacattaagtgagagaaataaaagataaaaatagtctcccatcagtgctcaagtgaagttttgccattatatattaggattaagctttgccaccaacatagttatagaactttgagttttcaga

SEQ ID NO: 12561 - DNA, 478 bp, Homo sapiens
  misc_feature (1)...(478): n = A,T,C or G
aatagaaacctgagnaacctancccagagacgnggaattcctcagtgtcctacagacgcacacagaccaaagttgcttctctgggaagttgtctgcaaattggccataaaaccctgttccctgataccttcttgtttccttcctagaggttggatatttatgctattttatgaagacttcagagcactgaggcccaggccttgccactttctgactttagtttcttgtccaaaactgtgttggtaacaaagcactttggataggcaggggctgtggcatgtggaattccacagtgtacaagatcaggacaccctcctaaggtcctccatgttttctaggcttgataagacttaggttggctcaagctgggcacagtggctcacacttataattccagcacttcgggaggccaaggcaggcggatcacttgaggtcagaagttcaagaccagcctggccaatgtggtgaaaccctgtct

SEQ ID NO: 12562 - DNA, 508 bp, Homo sapiens
  misc_feature (1)...(508): n = A,T,C or G
gagggctcnctttgagaatagagtcactgtggtggaattctcgagaaggagatccttgtgacctttgggtaactctacactctatgggctacaataaagctctggagttgacagaggcatgtccatttgtcattgatatctatgcagaaaaatgcaagccaaaaattaaagctgtccatatggaggcatgtagtggacaacttgagaaggccatttgtaaatctgttcttagcaacggtgatgccaaagtaatggatggctatgaaaatataatcgtgcatacttacagttgtgacacctggataacgtcagttattgaaaacaagtcagatgagaaagtgattattcacatcagcaatgagctaagtaaaaactgcataaacaacagaggactcaacatatttgcagtagaagtgggacccaaatctacaatggtttgtcaacatgtaatgcctttgaatgaacgacaagaatggatatattattggatatattctcttatttctta

SEQ ID NO: 12563 - DNA, 413 bp, Homo sapiens
acttgtgtctctgtgttttattttaggcattctggtaggcatatagtgatagatatataacttactctggctctaatttttatttctttaattggtaatgttgttgagtatcttttcatgtactcattttgccatctgcatatcctgttaggtgaaatgttactttatatctaattggatttttaggtttttttttatttttgagttttgagagttctttatgtattctacatactagttctttgtcagatatgttgcttgcagctgattcctcccaatatatagcttggctttctttttttttcttttttaagacagactcgctctgtcactcaggctggagtacagtggtgagatcacagttcacttgagccttaacctccagggctcaggcaatccttccaccttagcct

SEQ ID NO: 12564 - DNA, 487 bp, Homo sapiens
  misc_feature (1)...(487): n = A,T,C or G
naatcgagaccctagtccgngnggttggattcccctcttgatataatggggagaactgagcacacattccagcttatccagaaggagcttatagaagaatttggccagcctaagagtggtgacgccgctgcagctgctgatgcttctcctagtctcaatcgagaagaagtgatgaaactcctcagtatatttgagtctcggttgtcatttcttctccttcagtccattaaactgctatcttcaactaaaaagaaaacaagcaataacatcgaagatgacacaattctcaaaaccaacaagcacatttactcccagcttttgagagcaactgcaaataaaaccgcgactcttctggaaagaatcaacgttatcgtccacctgctgggccagcttgccgccggcagtgcagcgagcagcaatgccgttcagtgactgcacagagccgtgtcccagacacgctgtcagtgccttcaacacggagccgttn

SEQ ID NO: 12565 - DNA, 481 bp, Homo sapiens
  misc_feature (1)...(481): n = A,T,C or G
tgtcgttnananaggaagaanaatttgatncccctnactgatgtccatagaacatgcggtggaattcgaaaaaatgagggaaacaaacacaaaaacctcaatgcagtgtatatttaacattttgttcaactacctcttaatgtggaattatctactttaatagtttcctgacagtaatgttaaatagtaactgccaaatttgttattttcccatctctcttaaaaaagtctttatgattattttatatagttttgagaactttaaagccactttttttaaccttacatttgcataaaaatgtttagcttttaagtagagagcaaattatgatcatatattttgatattcatgacctgtttgactataggagtttttttaaaaaaatgcactttggctataaaaccatggatgatttgatccataagatttaaatgtgccaccattatagtattcctagacatgagcttgatgaatggtatt

SEQ ID NO: 12566 - DNA, 476 bp, Homo sapiens
  misc_feature (1)...(476): n = A,T,C or G
tgctacgcagcnccnnnnnnntttgaatagctgaccatctgnccagngcggnggaattcccataaaatacctgatcagaaccccttgaaactcttaaggccatcaaaaataaggaaagtgtgaaaaactgtcacagtcaagagtagcttaaggagatttggctgctaaatgtaatatagtatcctggaagaaattccgaaggagagaaaaattattaggttaaaaactaacaagatctgaaaaaagtatggacttcagttaataataatatatcaattttggttcattaatggtaacaaatgtaatatactaatgttagatgctaataggggaaattggatgtggatatatgacagttccccatactatcttggcaatttttctgtgagtctaaaactcttctaaaataagtttatttttaaaaatagacaaaagatttgaatagatgtttcacaaaagacgatacctgaatggtt

SEQ ID NO: 12567 - DNA, 561 bp, Homo sapiens
  misc_feature (1)...(561): n = A,T,C or G
ngatcganncccctnnnnnncctcgaacaccagtccgtgtggtgcaattcccttttcactgctgctttattaccatagcagtgtcatacagcctgccatcatgtcagctaatgcaagaatttccactgagcagttgtttgttcactgttactgcaacaggttgtaatgagaatgaggcagaccacttggaccgggaccagcagccttatccaccctcgcagaagaccaagcgcatgcgaacctctttcaagcatcaccagctccggaccatgaaatcctactttgccatcaaccacaacccggatgccaaggacctcaagcagcttgcccagaaaacaggtctgaccaaaagagttttgcaggtaagacacatgcatcattgactgtgcatacatttcccttccccttcccagtaaaaatagtgctcttccctggttagagtgacgcagatatttcctatattgcttcttactagtttatcttagctatctccctagagggtgtctgagattttgaggggcttcctgagggtcccaacagagaccanggcttttaaaacag

SEQ ID NO: 12568 - DNA, 458 bp, Homo sapiens
  misc_feature (1)...(458): n = A,T,C or G
cggggnnattgtttcatgacaactagtccgtgcggnggaattctctttgaggaggagatgacactctgggctcttccttgctctcctcccgatgttttcttatgaaaaattttaaacatacagcaacgttgaaagaattttttagcaaacacctgtatgcccgctacttagattctgccactgacattttaccatgctgttttatcgcatagctgtccaactgtctatcactctgtctacctttttgggctttttcagtgatgtttctccagcatttcaaaggcaccatggtatgggtagttaggaatatgtgctgtggtgccagattgtctgggtttgaatcctggtctactgtccactaactctgtgactctgggcaagttgctgagcctctttgtgcctcagtattgtcatctgtataatggaaatcgcgatagtgctaacttcatagagttttg

SEQ ID NO: 12569 - DNA, 461 bp, Homo sapiens
  misc_feature (1)...(461): n = A,T,C or G
catcgacgccctttgaagacctctagaccgngcggnggaattcgcccaggccaggtgcagacaggcacccccgtcatcttgcgccccctgccccctcaggtttgtgtgtaagaacaacggggtcctgttcgagaaccagctgctgcagatcggagtcaagtcagagttccgacagaacctgggccgcatgtatctcttctatggcaacaagacctcggtgcagttccagaatttctcacccactgtggttcacccgggagacctccagactcatatcctctcaggcccggcccagcctcctgcctctccacgtcggccttcctcaccgtggggaagccggctgacccaggtccacacttctcttcagcctctcttgggcacgcaattagttctctgagattgagtgtctgcatctgttaagatgggggtgggattccttcccccaggacaggggatgacag

SEQ ID NO: 12570 - DNA, 463 bp, Homo sapiens
  misc_feature (1)...(463): n = A,T,C or G
agcccnnnnnnntttgagtagcattcatcgngcggngcaattcgntatagtagataattcaaaagtggcctggagatagattgtcagctgacctattgatatcaatgtatctctctagatatgtgtatatgtataatttaatatgatgcatagaacattgtagagtactggatgttagtgggtaagagactaccttttgtatctttaatgcaatttacgttttgtttaggtgagtcatgtaaattgatgtgagctctagcttaacatgccttattaaaaccaaagcccagtaggtagtttgattagtgctgtttagagtttttataagcaaagtgctcagatgactttccttattagaacttgtcagagcagtttctttgcagttttcatggatctcccttagcaacttactaaagaggcattttgtttaagctgtttcataaatagcaggaaattccaaagg

SEQ ID NO: 12571 - DNA, 556 bp, Homo sapiens
  misc_feature (1)...(556): n = A,T,C or G
taactcaaccaccgtatcggtgatgctcaaccacatcatatcactaatatctattataaccggaaaanaaagccagaaanaaaaaatttgagaccctcgagaacntgtggaannccngagctctcccaccccgncggagccgcgcatggaggggaaggggaagatccgcagttacgggacgcgctacatcaccaagaggcccgtgcgggaccgcctgctgcgggagcgcgccctgaagatccgggaagagcgcagcggcatgaccaccgacgacgacgcggtgagcgagatgaagatggggcgctactggagcaaggaggagaggaagcagcacctggtgaaggccaaggagcagcggcggcggcgcgagttcatgatgcagagcaggttggattgtctcaaggagcagcaagcagccgatgacaggaaggagatgaacattctcgaactgagccacaaaaagatgatgaagaagaggaataagaaaatcttcgataactggatgacgatccaagaactcttaacccacggcacaaaatccccggacggcactagg

SEQ ID NO: 12572 - DNA, 468 bp, Homo sapiens
  misc_feature (1)...(468): n = A,T,C or G
natggagaccccattgagngccgctggaaaccncccaancactttcattatccaattgacacaccccatctaaaacttaattgaattcagattctctgagttgcaattgtattaaaacccaggaatggtaaatgcaccaatgattgcttgcaaatagctataataaatatatgattctgtagaaagctactggcaaaacactagctgacactggtaataacagtgtaggcaatcataaaatacctcttatgtagaccacgtgacatgtagagttccagcaggctaccgtttcccattgctgtgaatgaccatgttggccatgctgtgaatgcatggcatttataaagcaaatattattttcagaatgtcaagccataaatttcttaccacatttctgtgggtgaaacatcttaacactgtaatcattccactggcattaaaaatgagaccagcaggctagcaaaacag

SEQ ID NO: 12573 - DNA, 485 bp, Homo sapiens
  misc_feature (1)...(485): n = A,T,C or G
gcggaatgagccctantgangccgtgggaaaccacgcggaaaactcttaaagtggaagtattggggcgaatgctctgacaggctaggatgttgcagtcagttccttcacccagaaatcagtagaatgttagcaggtcagactcaaaccttgtgaaaaacaggtggtggaaaggaaatccctcacagcaactggcaccataatcaagacaatgtttgcagaataaatggagttacctgctttcagccccaggtcatagctattgtctgccctgctgatatgtgataataatttgtgatcatgttgtcttaaaatggggtcactcatctccagtagaattaagtccacagtgaagttgtccccccatccccaaagagataaacatatatgaatgaactcacgtgataacaactactgctgcctgggatcatgagagacctgaactgaactgataggaagtgaaaagtgctgagataatgagattaga

SEQ ID NO: 12574 - DNA, 469 bp, Homo sapiens
  misc_feature (1)...(469): n = A,T,C or G
natgagaccatcgatgtagcgccgtanncgctccatccttccgtaaacaccctggagaaagacccaggattccctgtttagggggtttcagtagggggatttttttgtttgtttgtttgttttttgagacagagtctctctctgtcatacaggctggagtgtagtggcgcgatcttggctcactgcaacctctgcctccctggttcaaacgattctcctgcctcagcctcctgagtagctgggactacaggcatgtgccaccatgcccggctaattttttgtatttttagtagagatggggtttcatcatgttagccaggatggtctcaatctcctgaccttgtgatccacccatctcagcctcccaaagtgctgggattacaggcatgagccactgtgcccggccaggtagagggatttaagacacagaaaggcaaagttgttcaggacaggtgtctacaatccaagn

SEQ ID NO: 12575 - DNA, 471 bp, Homo sapiens
aggagggcttttaatcgagacccattcgagtgcggtggaattcagcagaactcatcagctccttatcctcagtctgttcctctataaaagatgagagatgttcactgactttgtgcagtgagaaggcagcaagtactcacggctggtgctgtgggacctcacagcttctaaggagaggggctgggagggcctttgccatcagatctgccaagcacctaatgcttgcctgtggtgaaggcaagatggaccaagggccttggagaaaagggctcccaggcttctgaactttgaggcctcagcactttctgcattatcgtcaaactctttggaaagaaaccaaatcattaaaaagtagaaagaaatctgcctcttgtctgccctactgcccctttacccccactctgtccccaaatgatattattgcaccttgacctgggagcgcagagaggggagggagttggcagagacttc

SEQ ID NO: 12576 - DNA, 584 bp, Homo sapiens
  misc_feature (1)...(584): n = A,T,C or G
attagaagcccgntagngngnngccnnntttagaacacctatccgagtggtggaattcgggagaagtttggaaaagaacctccataggtcaccctctccattcccccattctcaggaacctccttgcctactccagtgcttggcaaatttcagtttatagagaggtttctctctaaggttcatccatgttccttctgtagttctgctttatcagttggtgagcaggtcactcataattcctccaatttccttgtttcccttttctacctgcttacctctgggaatatggaggatataggagacagaatattgtttcttaaatagttctgcaaactgaatgaagcagtcaagatactgctagccctatggaagtagagaaaaggaagtgaaaaaatttaagtgatagaggctgagcagggacaggttttaagcagctttggtaaacacaggctgatgaaatctatgccctgcagaaccagataaaatttatcagctgcaggcctcatcctgtaagacacttcctctaagaaatggctagtttctttccagtgatcaaccccagttcttctgctgcatctgacaga

SEQ ID NO: 12577 - DNA, 477 bp, Homo sapiens
  misc_feature (1)...(477): n = A,T,C or G
aggnagcatgagcctctggcaatggaggcatcgcaagcacgcacatcacagcgctctttggagcagtccttgccagcttcctctctctgaaggcccctctccccactacccagtgtatggacatcaggcctcccctgcccaaggcaggacttaacctgtcctttactttcactgagtaggatccactatactctagaggctgactcatgaggaaaccttctaggaagggagggcttcctccgttcagaaagccaacagaggtcccttgaactgttttctgatccccaaatctgcactcgaatgcagctgcacagccaggctggacctatccctgacagcatgctcttctgtttgaaaatctcctgtgacaaaggccattctaggtggagtgtatgtgtggcaggatggggggctggagcttggtggcagcgctgctgggtgcccgcctcctgactggcttcctgctccctttctgtt

SEQ ID NO: 12578 - DNA, 467 bp, Homo sapiens
  misc_feature (1)...(467): n = A,T,C or G
nattgagnactgatgaccattacgccagagcggcggaattcgcttattttaccagctgtgcatattagtggcttatgatcatgcaaaacaaagctcattgacagtcagttcctcattctgctgtccactggtgggagtaaactcatatttctgcctgagttctgtgcttcgcaagggtgaagctgttttctgaataggttagagattcttcagacgctgtgggcttcagagtaaggtggcaaacagggaatccaagtccctcatttgtatcctcatgtgactcagacctctggagtcatggttttatttttctctgttgtgtgccatttgtttcgatggtcagacacaaaatgtttacctctttctttttctctttgcttttttgcttctctttgccccaaatagtccgtcattcccattggtattgtcaaactgtgtctccccagcattgcaaatgccttgggccg

SEQ ID NO: 12579 - DNA, 481 bp, Homo sapiens
  misc_feature (1)...(481): n = A,T,C or G
nattgagccccntggnaaactgagactatagaacangcggnggaattccaggtctggccacaagtcggcgtggcagtcagctggaggctccgagagcggagatcccagtgcacccaccttacctcgcttacaccaaagcgccatctcgccgcccgggttgcgaaaaaccacgaccctcttaaactactgtagcaaccactaattccccctgggagcagctagagaggggcacttggaaaccttcacgagctcggtgcctgaaggtctctgaggctcttgccctcaagatctctcccattcagccccgattctccggacaacctgacctagcatgtcgccagcctcttggtgaaacgcctaaagtgtgctgccccacttctcttgaaagtttacaccgaagggatgaggttttgccctttacagggttggggcacaaagtcggagtcgctgcggctccgaaatagaaacggagttgcccatt

SEQ ID NO: 12580 - DNA, 502 bp, Homo sapiens
aggcctccactggactgtagtacggtgcggaattccgaagggctttttgagtacatttgaatttagaaaatataaaagtattagtgaaagcaaatttttaaggtctattttaagctctgttatatgttagttattaatagatttcacctattaatacatgaagacacagataattccattttgggtcattaattgagcagaacagactcaaggaagactcttgaatcagtgaagcaactctgtgcaagtgtctgtggagctcaagcttattgctggcaagagggtatagtcctgggaaacaggaaaatatgttgtgatttgaagtgtttctatgttgatgtaatttaaataatcacaacacaaataagtttgaagaccacttatataagtatctcaatttttaaaaattctcaaattgtttttttttttggaatggaaaaaaactcaaattccccggggtaagagttctttaggtcaatttccattactgcgcaacccaggt

SEQ ID NO: 12581 - DNA, 510 bp, Homo sapiens
  misc_feature (1)...(510): n = A,T,C or G
aggccgcccactggaaactgagancactagtccagagtggtggaattcgaagtattgatacaagctacaatgtagatgaaccttgagaacattgcgttaagtgaaagaagccagtcacaacatatattgcttgcttctgttaacatgaaatgtctggaataggcaaaaccatagagacagaaagtagattcatgattgctgggggttggagggggtggggaaattgtgagtgtgtcttagcctgttttctgttgcatatataccacagactgggtagggtaatttataaagaaaaaaagtatatttagtacatggttctggagactgagaagtccaagagcatggaacaagcatctggtgaggaccttcttgctgtatcataacataacagagggcatcacatggcaagaggacaagagcaagagagccagagagcgcttgcttttataacaaaaccactcccacgatggcaacactaatccattcttgagggtagagggactgagtttc

SEQ ID NO: 12582 - DNA, 469 bp, Homo sapiens
  misc_feature (1)...(469): n = A,T,C or G
acgggnccnnnnnnactggagatcgtatgacattgcggaggaactcgccttctgcagtgtgagtaacacactgaagccagaagctgtgggctgtggggaagtggctgcatcgccacccaagggaccctggactttgccagacgtcagggttgagaggagccactagcaccatcccagagctgtcagcaccggcctcagcccaggcggctctctccctgagcttcctgtaccctgaccctctccagcctcagacctgagacagggctggacaaggaagcagagagcagaagaaaagcagaagcgaagctcagatctgctgggaggagattacattttgtcccctcctggggtcttgcacagtggcaggtgacattcgtgttacaggaatgactgccagggcctgggcctcgtggcggtcttcagctctgctcctcctgcttgtcccaggctattttcctcttagccaccc

SEQ ID NO: 12583 - DNA, 491 bp, Homo sapiens
  misc_feature (1)...(491): n = A,T,C or G
tggagcaccncnagaannnnnnnaatcgagaccatattgagngccgtggaanncaatctagaaatagattttgtgtgttttattaaatctcactgacaattcctggaaatgttcctatttctttttaatcctgagggagggattgtggggatctatttattccactcaaactgcgaaataagtaagtcatttatttatatatgttcctgtgtacagggtaaatagggtatttgtgcaatagtagtaaatagtagcatcttcagttataaaaatttaaaagttttcttggctattgaaacagaaagatgcctgtagttcataagtcctactgtctttttttgagacggagtctcactctgtcacccaggctggagtgcagnggcgcgatcttggctcactgcaacctctgcctcccgggttcacgccattctcctgcctcagcctcctgagtagctgggactacaggtgcctgccaccacgcctggctaatn

SEQ ID NO: 12584 - DNA, 477 bp, Homo sapiens
  misc_feature (1)...(477): n = A,T,C or G
cactgaaaactgaagacntancnagagncgnggaantcgagntgtaagaattgcttatatatttcagatacaaattctttttcaaatatatgtattgagactattttcttcctagtctttggcttgccttttcattttcttaatggtgtctttcaaagaacaagtttgtaattgtaatggagcccagtttatccattttttcttttatggtcagtgctttttgtgtgttgcaagaaatctttacctacccatagaattgccttggtgcctttgtcaaaatcaattgaccatatatctgtggatctggataatctatttatgtcattgatctatgtatctattcttacacaagtccccactgtcttgattattgtggctttatagtatattgaaattcagtattgttaagttctacaatcttttccaagattgttttgactatcaggtcctttctttataaagnttatattaagcttg

SEQ ID NO: 12585 - DNA, 516 bp, Homo sapiens
  misc_feature (1)...(516): n = A,T,C or G
ngaggccgnnnttcgagacctcgtagaacactaggcgagagtggtggaattcaaagcgcttctaacaataataagtactagcagtatcactgctgtttattgcttcctgtcaggtgggaactaagtccattagcccaagttcagtagccctgttttacaaatgcagaaacaggcttagaacaattaagaaacttgatcaagaccacacaattattaagggatagagtcaagaatttcactcaggtctccctgactccaaagcctgtgctcttaaccactatagatgtctctaatgcttcggaggggaggccaccatgacccccacttacagtcaccagctgggccccggccgcccagagatcatgcagagtgaacagaactgatttccagcactgctgttccatggctgtgtgactttcgaccgtctcatttcccctctgtttctcagttccctcttatgaaagatggaggacactatacctgccatgcctcagtgggacaagatcatcttatatg

SEQ ID NO: 12586 - DNA, 477 bp, Homo sapiens
  misc_feature (1)...(477): n = A,T,C or G
nttcgagaccctaatcgagngccgtgaanacaactcaagngggaaacaaaaaactcacctgacattattctgtctgaggcaccaagtctagtaaacactctatcaattggtgtgagcctgcacacttcagcagggacgtaacaacccatctgggccattacagctaataagccagcctgtgaatgagggaggaaaaggtcttttatgactggtagtaacagtttcataaacttttgtctttcttatgaacccttacgtaagagctaggcactctaaaacaactttcacaatcacatgtacgttggttctgttctgaaatccatttgctaacatggagaaagttgaggctaagagagacaagaggcatagggcctcacctggcctttaaaacatcagagcctgcttaccaacccactaccctagtgattctcaacgctggccagaatagaatcacctaggagctctttaaaactactg

SEQ ID NO: 12587 - DNA, 471 bp, Homo sapiens
  misc_feature (1)...(471): n = A,T,C or G
attgagnccctatcgtagactctaggacanngcgnggaattcgatagcttgaggcctggaatttgaagctgcagtgagctatgattgcgccagtgtactcccgcctggacagcagagcaagaccctatctctaaagtttgtttttgtttttttaaatttataaaactatattcactctcaatcagagagcctgtcttcacaaagaaatggaacattagggggtgtcttgcctactagattctttcatgcctatttgtatgcatatatgtgtctttgttcccttgcccactttttcttggtgatttttctggaaacagagatgccatcttttctgaaaacgccaatggatctgactattcgcactggtgccatggccagattagaatgtgctgcagagggacaccctgcacctcagatttcctggcagaaagatggtggtactgactttcctgcggctcgagaaagacgcan

SEQ ID NO: 12588 - DNA, 471 bp, Homo sapiens
  misc_feature (1)...(471): n = A,T,C or G
agggggccgggnnnnttagaaaatagtagaccttagtcagtgcggtggaattcctaagtcagagtggctgctggccctggtagatttgacttgctcttgcctcactcgacctccaaagtgggactgaagacagtggtcaagagacttgagttcgggacagtaagccaggggttaaggttctttcctttttttgaaagccaaagacccagtttgcattgtgctgctgcattcatggttagaagctttccatgcctaggttctagggaatttatttttctatgtgtatatattttcaaactttgtttcctgggtactgggcatgtgcctgtctgagccccaggtctgtctacaccccaccattcattctgtctgtctgttccctggacactgcctaaaagggtctcaagacagtgccctgtgggttcctaggactagggcccatcactgttctcttctgctgggaaatgcagn

SEQ ID NO: 12589 - DNA, 465 bp, Homo sapiens
  misc_feature (1)...(465): n = A,T,C or G
ttttgagattcatangcatgcgcagngagcnggaanncctgctacatgatccttattgcccttcttttcctggggaggtgaggccagatattatccctttctcctactaccccagacctgcctaggcgtctgccccgggcttggtcattgccagctgaggtcactagggagctttagagctgtgagttctgttttctaccagatgctaaccccagggcccactgcagcaaaacaacatagagtagggaggagaaagggagctactggctggggaatttcctagcacccagttagccagacctgtccacacattgcccctaggctttggcagacaagaagctccgttcctccttctgtacagacttacctgcgggtggaattgatgactctcagcactggtgcaggccctcagaaacaaacagcatcaagctgttcttatagcagttacagggaagctgacccacg

SEQ ID NO: 12590 - DNA, 509 bp, Homo sapiens
  misc_feature (1)...(509): n = A,T,C or G
ngagggccncaatgaganactgagatcgctaggcgcaagtctctaaaattagacaacataccccccaaactcatgtttctgtttccctactttctctcttactttaaaattgtagtattcccaagagttcagtggtggcaaatgttaataaaataagttagtacattttggaggttcttatatcctttgtagggtaagctgatagtgtttagatttctgttcccattattccagtagtgttttaaattatttaagataaataattactgtaatgtttgtttttaagttacataattcaagtatgtttggattaactctttgttgtcaaatttagtatggatttattcctggtgatttggacagattactttgaagtttcattttactcacatctctatatattagtgataaaaatctcttttaaaaatagcaaaaaagtggttctgattttgtactttgaagggaatttttcttttttacgaatggtaggttcattaacaatagcagga

SEQ ID NO: 12591 - DNA, 519 bp, Homo sapiens
  misc_feature (1)...(519): n = A,T,C or G
cgaggccgcnccctgaganactgagatcactaggccagagtggtggaattcctgaccatccgccattccgactgctaaaagcgaatgtagtcaggcccctttcatgctgtgagacctcctggaacactggcatctctgagcctccagaaggggttctgggcctagttgtcctccctctggagccccgtcctgtggtctgcctcagtttcccctcctaatacatatggctgttttccacctcgataatataacacgagtttaggcccgannaaaaaaaaaaaaaaaaaaaaaaaaaaaaaaaaaaaaaaaaaaaaaaaaaaaaaaaaaaaaaaaaaaaaaaaaaaaaaaaaaaaaaaaaaaaaaaaaaaaaaaaaaannaaaaaaggccccccccaaataaggggggggcgaaaaacccccaaaacccctcccgtttgtttttttataggcccccccttttttgtttgccccccccccccctttttttttggggggggggggggcccccccccgtttttt

SEQ ID NO: 12592 - DNA, 484 bp, Homo sapiens
  misc_feature (1)...(484): n = A,T,C or G
gcccgttgannccccatttgtagactctagtacagngcggnggaattcgggaggtccgcaggaagttgaggatatagcggaacactttgccgtcacggtcaatgaagcagttgccctggctgtccctcttggtgggcatcttcccgctgaacatggcgcctagcatggagtcagggaagctggtcagggtcgccagtgaggttgtatagagcttccccccgacgttcagcgtgatggggtcggacatggcaggagactgggttgctggaagtagtcctggagagggtgagaagtgagaaatgactataaccaaaccttatcagagaactcacagtccttaactccttattgtacatcaagcctatgcccttgggatcgaaatgaattaatacctgatgaatgggtgataattgctaacactgtgcaaagtacattagcttcactatggagagggaaaggagaaagggaaaaggaaaggaaaaan

SEQ ID NO: 12593 - DNA, 470 bp, Homo sapiens
  misc_feature (1)...(470): n = A,T,C or G
cttcgaccccctngnattgatgaccactatccatgtggtggaattcgcttctggaacctgatttttgacagagattttgagtaaggtggcccttgtcacctgcctggctccacccactggtctgtgaaagtggtctagcagtaggttttggcccaatccctaaatttacaaatggtggagggacgcaagtgtggcttttccttccagagaggtgtagcctgagtccagatggcatcttgggtcaagtccaggagggaagtaagagtccctccctttttacaggaggccttgaggtacgttgaacacccaggtgtgccccaccgtgggaactgttgtgtgtacgtgccaacactgggcgtgcagagcgcagcgggccgtggaacatttgtgccggccccagggggtgctgcatccctccggccctccctggcctcctgggctgctttctctgcaagactggcagacctttg

SEQ ID NO: 12594 - DNA, 475 bp, Homo sapiens
  misc_feature (1)...(475): n = A,T,C or G
catcgcacaccantantgagagcaataggaagngccgnnggaaacggaggaatcaccatttacaaggtggacaaatgctaatatttttatctagaaagaagagttagtgttaacttttatttttttccttctggggggtctgttgactcctttcttttgggtgctgcctataaatcttggaggaatcatttctcctcctcaaaaactgattcagaaactgacttggggaaggaatttaatactttgaagtcatgagatgcaccatcgaggctacccccaagaagaagcagaagagaagttggtaatgagaggggattagaggtcctcccttcagtagggctgtgaaaacctcatcactggaggtaaaagcacaagcaatgcctgtggacaagatgtcattcattcactcagcaaatgttcatggatcaccggctaccaaggtaccaggcaccatgctaggtattggggaagagag

SEQ ID NO: 12595 - DNA, 520 bp, Homo sapiens
actaagtgctgatgagaaggatctggggagacaagttgatagagacaaagaagtgaagaaaattgatgccgcaaggtgttgaagaggttccagagcacaggtagtggaatgggtcctgtggatttttgggtctggagctcaggtttggcccttagagatagatttgggagtcaacaatggacaagattattcagaggaaaatgtacaaaatgagcaaaatagggataaaggattcttctgataattttaaaatgcttctgagtctcacatcttaagccaaattgagagaagttgtttatttttttcacatttcagcttttgctgatagaaaagagtacatgctgatacttgaatatactttcaagtacctgtgtactgtttactcagctggagatttaatgtttgtctttgtagaatgttttcagttaaaaacatttcctagaggaaacaagggtatgacgttgattatagcatcacacatagaagaggtttttcttttttttttttcttttgagacagg

SEQ ID NO: 12596 - DNA, 492 bp, Homo sapiens
  misc_feature (1)...(492): n = A,T,C or G
ccctgaccaccnctnttttgagaacactactccagngcggnggaattccgagcgccgctccggctgcaccgggctcgctccgagtttcaagctcgtgctaagctagcgccgtcgtcgactcccttcagtcgccatcatgattatctaccgggacctcatcagccacgatgagatgttctccgacatctacaagatccgggagatcgcggacgggctgtggcctggaggtggaggggaagatggtcagtacgacagaaggtaacattgatgactcgctcattggtggaaatgcctccgctgaaggccccgagggcgaatgtaccgaaagcacagtcatcactggtgtcgatattgtcatgaaccatcacctgcaggaaacaagtttcacaaaagaaggctacaagaagtacatcctagattacatgaaatcaatcacagggaaacttggcgaacagagacccgatagagtaaaaccttttatgacaggggctg

SEQ ID NO: 12597 - DNA, 469 bp, Homo sapiens
  misc_feature (1)...(469): n = A,T,C or G
attcgaagaccactagtctagtgcggcggaattcattatacatgaatcaaagtaaatatgacaggagacttgttggaagttgttttttcactaaaacatcttttttagtgtagctctttttgaaagatttaaaaatactcagtacataaggtattttaaaataggctaccatgttaagaattgtctcatttattgtctttctttacactattggcattgtagttctgtggattttaaaagttgctatagatgagatttgagaaaaatgatatttaaatatttgattgggcaacattttatttatttttattctttcaaacagccattaggacttacaaaaccactacacttaattactttcccccaatctaaggaagttcaaaaccattaagtagtagagaaaagtaaaggggaaagtgaaagactgttttatttgtatttattgccattanaagtaatggcataaact

SEQ ID NO: 12598 - DNA, 467 bp, Homo sapiens
  misc_feature (1)...(467): n = A,T,C or G
cttgagaccatagattgtagacccttagtccagncnggaggaattcgctccggagggacgtggacaacggcctctcgctcgtcatcttcagtgactggtattacacttctgttatgagaaaagtgaagttttatgatgaaaacacaaggcagtggtggatgccggataccggaggagctaacatcccagctctgaatgagctgctgtctgtgtggaacatggggttcagcgatggcctgtatgaaggggagttcaccctggccaaccatgacatgtattatgcgtcagggtgcagcatcgcgaagtttccagaagatggcgtcgtgataacacagactttcaaggaccaaggattggaggttttaaagcaggaaacagcagttgttgaaaacgtccccattttgggactttatcagattccagctgagggtggaggccggattgtactgtatggggactccaattgg

SEQ ID NO: 12599 - DNA, 478 bp, Homo sapiens
  misc_feature (1)...(478): n = A,T,C or G
gggcccttcccttagaaaaccctnnnattgagtccctagtcagagtggnggaattccctgaatctgacaattagatacagagatacttgtagacaaatcttctgtaaaatataaaaaagacaaaatttagtatatgacaatattattaatctttactgacatgtgaatgctcatggtatatcaaactttaaaaagtttagcacacagttaatacaattatgtacattaacaaaatctacacatacaacccatcaacaggaaactagataaaatatgatacatccatacaaaagaatactatctcaacatttaatcgatgatgtaggactataaatactgaatcagaaagtcagaaagctagttatgattattactgagttaaaaagggaagttttactgtaatcccagtgcattaggacgctgaggcaggaggatcacttgagcccaggagtttgagaccacctgggctacaggatac

SEQ ID NO: 12600 - DNA, 469 bp, Homo sapiens
  misc_feature (1)...(469): n = A,T,C or G
taatgacacanattgagngcatggaanacgcagacaggagaaagtacttcccatgttaaaagacatttattatcttgttttgcagttatgggagtttttaaaaaaattaaaacagataatgggccaggatattgtagtaaagcatttcaaaaatttttaaatccatggaaaattgcacatacaacaggaatcccttataattcccaaggacaggccatagttgaaagaactaatagaacactcaaagctcaattggttaaacaaaaaaaggaaaaagacagtaaacagtataacactcctcagatgcaacttaatatagcactctgtactttaaattttttaaatatatatagaaatcaaaccactactcctgcagaataacattttaccggtaaaaagaacagcccacatgaggaaaaactgatttggtgggaaaataacaaaaataaaacatgggaaataggtagag

SEQ ID NO: 12601 - DNA, 516 bp, Homo sapiens
cgatatccttgatttttcattgtgtatctgtttgggcacggtctatgtaacactagttctgcgtattagtattttagagtatctctgcctcccttgtcctgttgtttcttttgcccccttggaacacattggtcagcagttctaagagacactgcccacatgatgaccattccctacttcatccttgctgagctaaattttatatttttgtgcatccttctcccagatgacttaggtggtaagtccagattagtcaaagctaatcatggaagttccattttaatgattctgttggggtgaacttgggagcaatgagatgtttgggaagtattgtgtagtacttctgggaaagatctccttgatacaacattgtcatgacatgagaagagactctgctgggctttttcatgtctgtaacatgggattggcttatcgtttttatctctgaagggcagtagcctgaagatacagtgcacaaggtgggaaaagccagctcagaggtgacgttgccgactg

SEQ ID NO: 12602 - DNA, 484 bp, Homo sapiens
  misc_feature (1)...(484): n = A,T,C or G
natgagtaccntggnannnnccttaatatgatcctagaacangcggnggaattcggaatacacaattcatcgttgcacccccacctcagagtgtaatcgcatttctgcttgtttaggccgagcccagcaaaggtggctccttctgaatgtgtggtcagcatctgtacaaatgcattttatttgctatagtttgtaaagctgtaaagttaaaagagatgaaaaccttttcagcataaatatattttacttgcactgtgttttttagctaaaagtgaaaacctagattaaataaaatcaaagttgagaagaatcatcaaaagactgtttctcggtgtgaatcaagtgttgaaaaatggttggtgtattttgtcagtaattgtacataacttttggcacatgacatagaaatggctatgtaaactataattattttgctaagagactgtatgcaagccttgggccgactttacagacgtccagagca

SEQ ID NO: 12603 - DNA, 426 bp, Homo sapiens
agacccctcccttctctcaggtcttgtgtggaccctcacatgtgcacctgcatctgtgctgtttactgcgtgtcttctagcatctggtttagttcctggaacatagtcagcattcaatagcacttacacttgtctggaggcgtgaacctgaagaatacaccaagaaacttctcaaatgccagcaaggccaacttcagaactccctgctcctatgtgatgctgagatctctatacactgaataaatggcatgcgtaaagcccaccgtccctgtgtaggtagtaggtacatagtaagtatatggagtagataatcaggatcagtgttccccttccccactttttttttttttttttttttttttgaaaaggggttttttttttcccccccggggggggggggggggaaaaaatttgggttattggccc

SEQ ID NO: 12604 - DNA, 492 bp, Homo sapiens
  misc_feature (1)...(492): n = A,T,C or G
cccccccccccccgcccnntttgagnccttactggagaccctaggacanngcgtggaattccagggattaaggattcatcagcagcacttgccacttctacaagtctttctgcaaaaaatgttattaaaaagaagggagaaattatcattttatggacaagaaatgatgaccgggaaattttattggagtgtcagaaaagagggccatcatttaaaacatttgcatatttagccgccaagttggataaaaatccaaatcaggtctcagaaagattccagcagctaatgaagctctttgaaaagtcaaaatgcaggtagttaatggttacactacaggagactagtaaaataaatgtttgacactgtagttgtgcagttaatggcctgttagtcattgaagatgtgaatagtgggtgagagacatccagttgagttcctgcttcagtcacaggttggaggatgattgctcgagcaggcatctaaggtgacctc

SEQ ID NO: 12605 - DNA, 456 bp, Homo sapiens
  misc_feature (1)...(456): n = A,T,C or G
cctagagtagcaatacatagngcggngcaattcccagctactcangaggctgaggcaggagaatggcatgaacccaggaggcggagcttgcagtaagccaagatcgcgccactgcactctagcctgggcaacaagagcaaggctgtgtctcaaaaaaaaaaaaaaaaaccattgattaaacaaaaaaaaatggaaagaggttgtttgtgtaccccaaacaaaaagaatttggggttgcttggggattaaaagggaaaggggaaacaaaaacagggctggcataaaaaaaagctgttggtggggaacccaccataaaaaagggtccttccaagggaaccaaatctttgcttgaagcaccgggggggacggaaaacaaattttcctcgttggctcagggccactgttttttaaaaataactgggagtaacattttttttgggtattaaaaaactaatt

SEQ ID NO: 12606 - DNA, 470 bp, Homo sapiens
  misc_feature (1)...(470): n = A,T,C or G
cccccatagtagaccactagttcgtgcggcggaattcgcagcgcgacctggccagctgccgcgactgggaggagcgccggaacgccgaggcccaggtgctaagtgtggtggctcacacctgtaatctcagctacttgggaggctgaggcagaagaatcacttgaggataggagtttgaggttgcagtcagctatgatcgtgccactgcactccagcctgggcaacagagcaagaccccatctctaaataaatgttttaaaaataaaaataaatgttttggataaaaccccatattaataataagtattttacattattatctggcatagactgttatatatagcatattattgttgaaatacaaaacaatatgtatccgtactgtatgtgatatagtgccattttcagtaactgctgtacacacagcaactcagatgaaactcaaggaaattcttcagagcaaaaacagn

SEQ ID NO: 12607 - DNA, 418 bp, Homo sapiens
gtacaaacgtggcatctgaatagaagcttagctagagaagtggagttagagtccctattttaatgaactacatatatttttcaatcaaaatgtgtaattatttaattatctagcctgctcagtaatcataactctccaacttcttcaaagggcctttattcaatatgttaccactcatatggtcattacttggtaagtgttttatattttgaatttcttagatgctttcagtgtatgtgctagtgttttattaatattaaaaatttttgtttacttatatatcaagctgctgcaaatggactaccttattttaaaagttagaataaaatgctattactctctaaacagaactttagcatatctgtttgataagaaatacacaaacaaaatatttttctatgctattgcaaattgtccg

SEQ ID NO: 12608 - DNA, 468 bp, Homo sapiens
  misc_feature (1)...(468): n = A,T,C or G
catgagaccttttgaaggcgtggaaancggatcctcagaatcaactcttcttatccgcactggctcccactgcttggacatggcacctgagaggccctcagactcccccagcctccgcctagggcgccagaacatcttccagcagctacagacctggctcaagctggcaaaggagagccagattaagggtgaagtctgaatctcataccctttccactccctgcatggtcacctcagtcctggacatacttgttcactgaacaaaagaaagcagcttgttttgaaagaagaaactcccaggaattggaattcagcacctgttccgcacgtaattggcatgtgtctgcaaacatccttattcccaacttaaagtgctttattgcagagagttatggaaatataagtggatgattattctcattgtaaatattggtattttgaatgttaaatgtcaaacaaatgtgactt

SEQ ID NO: 12609 - DNA, 444 bp, Homo sapiens
  misc_feature (1)...(444): n = A,T,C or G
ncccgttgaacccctaattgatactctcgcagngncgnggaattcctgttcaaccacattcttatgttggcagatctgcttccagattgatttttagagcaccatcactttcacattcctgattctgattttgttttgttttgtttgggttttctgaaacttaaaatgctgccccgaaaatactatatttttgagtttgtgttctgaaagcctccgtgctgctggatctttggggggaaatacaggatccttcagcactgaggtgtttaagatttgcaactagcaatgcaattttttctaaatatggggatatttacctttattaagaaattatactaaacattgatgtccttgatcattttatgttctcatattacttttgattctactatgattgtgtggtggtgaacaaagatcattacaaacaaaaactgtaattttgtt

SEQ ID NO: 12610 - DNA, 421 bp, Homo sapiens
cgaatcttagaaataattttggccataggaaaaggaaaagttatacctcttatttatagtaataatgtttaataatcaagttattaaacccattaaattgagaacacttgtattactgttattttgacagtaaaggaagaatggtatgccagaatcactaaattaagaaagatggtggatcagcttttctgcaaaaaatttggtaagtctgttttttttaattaccccttcaactaaaatgtattactgagtaacatttttttaaatgttgttttattttaggaaagtaaatacagtgaataggactcagctttagttttccctgttttttttttgggtttttttttttttttttgaaaaggatttttgtttttttccccaggttggagggcaggggaccaatttaacttcattgcaccct

SEQ ID NO: 12611 - DNA, 483 bp, Homo sapiens
  misc_feature (1)...(483): n = A,T,C or G
ctttgagaccactatttgagggccctaattcgggcgacagagngagaccttgtcttaaaaaaataaaatgctgtcagaataaaaagcagtcaacagaaatgaaacccttataagagacaaataaatgtgggcaattattttctgcaaaatgccctccaagcccctgggcgccattgccttctgtaataggacatcacctgaacaggctttctgggctggagccaaggaccctccctgactcccacctccctttctgccttgtaccccagccaggtggaagagaccggagtggtgctgtccctggagcaaacggagcaacactctcgcagacccattcagcggggcgccccctctcagaaggacacccctaaccctggggacagccttgacacccctggcccccggatccttgccttcctgcacccgccttccctgagcgaggctgccctggccgctgacccccgccgtttctgcagccctgac

SEQ ID NO: 12612 - DNA, 457 bp, Homo sapiens
  misc_feature (1)...(457): n = A,T,C or G
actcgagaacactgtctgagaccctaggaagngcggnggaattcaaaaaccaataatgtgaatgtcagttcccggctacaggcaactgcttttttctctggttaccaagcttccactgacaaggaagaggattatattcgttatgcccatggtctgagatctgactacatccctaaagaattaagagatgacttatctaaatacttaaagcttccagaaccttcagcctcattgccaaatcctccatcatggatggcagctcaaagacagaaaaggggcaagtgatgggggtggctccacgcaaggcttggcggttttccctgcaacttcagacactcccagaggactcggactttttcttctgcacttttttggaaaatcgccaagtgccaaaaggtgcattttaaagcgctgactgtaaatgctttatttctttgattagtaccactagtctatg

SEQ ID NO: 12613 - DNA, 491 bp, Homo sapiens
  misc_feature (1)...(491): n = A,T,C or G
agggttnnntttcgttgatgtcgtaggacngcaannnaattccgaacaggaattatatccatctggtatgaatatataactcagctggcatatgtttgtgtttgatgagatattacagcaataaaacacttatgaacaggaagattacatttgttggcatacgaaaccttagtggctacagaagaaagctgaccttgtgtcactatttattttatgccctgatcagactagcaacttagataagtgaaagtttttctaacatgccttaaaaatattatggattgatccaaagacccactttttctttagctcttgtgataagattttcttttttttacttttatacaaaggcagcatctttgaatttttttttcttttgatgttgcaacttttgggttcttttaaactgtgatagtgatgggaactgatgcctttcattttgttcaacttatacaaaacaagccagcatctgatcaaaagtattacataaa

SEQ ID NO: 12614 - DNA, 452 bp, Homo sapiens
ttccttagtagacattagatagagcgctggaattcgcctgctccattctccagtctgaacagttcagctacagtctgactctggacagggtgtttctgttgcaaaaatacaaaacaaaagcgataaaataaaagcgattttcatttggtaggcggagagtgaattaccaacagggaattgggccttgggcctatgccatttctgttgtagtttggggcagtgcaggggacctgtgtggggtgtgaaccaaggcactactgccacctgccacagtaaagcatctgcacttgactcaatgctgcccgagccctcccttccccctatccaacctgggtaggtgggtaggggccacagttgctggatgtttatatagagagtaggttgatttattttacatgcttttgagttaatgttggaaaactaatcacaagcagtttctaaaccaaaaaatg

SEQ ID NO: 12615 - DNA, 451 bp, Homo sapiens
  misc_feature (1)...(451): n = A,T,C or G
nnaaatcgagaccctaggttgagtggcggaattccaccaaatgtggtagaagaatctgcccgagcttctgtctcagttttgggagacatattaggctctgccatgcaaaacacacaaaatcttctccagatgccctatggctgtggagagcagaatatggtcctctttgctcctaacatctatgtactggattatctaaatgaaacacagcagcttactccagagatcaagtccaaggccattggctatctcaacactggttaccagagacagttgaactacaaacactatgatggctcctacagcacctttggggagcgatatggcaggaaccagggcaacacctggctcacagcctttgttctgaagacttttgcccaagctcgagcctacatcttcatcgatgaagcacacattacccaagccctcatatggctctcccagaggcaga

SEQ ID NO: 12616 - DNA, 462 bp, Homo sapiens
  misc_feature (1)...(462): n = A,T,C or G
atcgagacctctagnccgttcggnggcattcgctgngcttactcaagctgtgcacgcctggcccaggagataggctgcaactccccccagcctgtctgcctgaccaactccctcctctgagggcagaaggaaagccatggtgctagcacaggagatccagggtttcttcattgcttctaccaagagtatgatcgtggccaggtgcggtggctcacgcctgtaatcccaacattcgggaggccgaggtgggcggatcatgaggtcaggagttcgagaccagcctggccaacatagtgaaaccctatgtctactaaaaatacaaaaaattagccaggcgtggtggtgggcacctgtaatcccagctactcaggaggctgaggcaggagaattgcttgaacccaggaggcagagcttgcagtgagcagagatcgtgccgctgcactccagcccgggtggtagggg

SEQ ID NO: 12617 - DNA, 505 bp, Homo sapiens
  misc_feature (1)...(505): n = A,T,C or G
agcggtgnnnnnaaaccgttgacgatcgtcagngacgngcaannnancagttccttttgcaaagatgagttagtgcggatcagcacattagcaaagcaaaatatttatacatttttaaaagctgctaatccttccaatttccctcctgattgtagctcaagctgcagcctctaaacctgctaaaaatcaggaagaaacccctcctctggagggcagatggactgaagtggctacagccagtgtgggtacggaaagcctcccgctgaactgtgatcatgtgacacctgcagaccctgggaagggctgatctgaatcctggcagcaaactcaacctcttcttttgcttggggggcttgtgtttaatacaggtcattgcgatggaagaagtctcagagtctctctcacatcaagaggacagatggggacagggatcctggagcttttcttctcctgtgttctggttgcatacttgaatcccaggaaacagtgtgacacggtgccaatn

SEQ ID NO: 12618 - DNA, 503 bp, Homo sapiens
  misc_feature (1)...(503): n = A,T,C or G
tggccgannnnnttttgaaggatacgctacgaacngncgnggaatttcccgggtctcctgtttactaacagtgtaagcccaagcagatttcttggcctctctgtgtttcagtttcttcatctaaaaatgggggaaagaataggatcaggcagttatcataggacagaataaattaatatccagtcacacaccacacaatgatgaaccacgtacacaatggtgctgccataaaattattattattattattattattattttgagatggagtctcgctctgtcccccaggctggagtgcagtggtgcaatcttggctcactgcaacctctgcctcccgggttcaggtgattctcctgcctcagcctcctgagtagctgggactacaggcatgtgccaccacacccggctagtttttgtatttttagtagagacggggtttcgccgtgttggccaggctggtctcgaactcctgacctcaagtgatctgccacctcgatctccca

SEQ ID NO: 12619 - DNA, 501 bp, Homo sapiens
  misc_feature (1)...(501): n = A,T,C or G
gcggatnnnnnnccctaggacantcgtcaggcgngcaannctgacactagnggaattgttctgagattcacagcccaaaccaggatccggccttttgaatgggatcagtgggtaactcttatttctggctgaggcagatttgagaggttgtcagtgggggcagctgaatttgaaagagcaaatcttagaatgcaaagggaccctgtgtcccagccgtgggccgcacttttggtggggagcaggcaggagggagtgtggggcagcagtgacagctcaccgtgccaaggccacagtcaggaggaatctggtacaggctcctggggccttaaagcccagcagggcgggggcccggttctgctttccagccaagcccactggtctgactcgtaagagcccagcttgtactcagcagtacagattgtatcatcatctggttagatgaagggtgtgaatgtccctgcagctcctggctgttggcggaatgtgcatcctcagagcctt

SEQ ID NO: 12620 - DNA, 471 bp, Homo sapiens
  misc_feature (1)...(471): n = A,T,C or G
tggcgggnggggccnccctgaaaccctacggaaaccattgcanangcggnggaattntatctgttgaacctatatcccaggcactttacactcaggcaaggtatacttttgttttcttaacaaaattcatagcccctaaattcatgttagaaaggaacagtctttgaaaaacacctttggtcagtgttagagagtgaaattctcaggtctgaggattccagctgtggaggaggttccagagagggggcggaaactttatgcttgagtcaatgagagggaaggatgagagagagaaccaaggagggaggagaggggaaagaagttcagggaggaagtaagatcagcaggtattggtgagaagggtcaggactagaactcttggcgtcagggtggtctgaaggaacttttgaagaataagaatgtctagtgtggattttaaacatcttgctgtatcatgtacatgtgaatccg

SEQ ID NO: 12621 - DNA, 459 bp, Homo sapiens
  misc_feature (1)...(459): n = A,T,C or G
nttttaatcgagaccctagnatcgagatgcactagtcagtgcggnggaattcgcctaatccatcgagagaaagaggcttacgaaaaactttgcctctgatgctcagccccacccccaaatagcacacaagcttgttaaccccacctcttacaaaatgtttagattctgtaggtgttaaaagcctttctggaagtattgcattctgccgtgtttataggtgttcactttcctccagagctgattaactactgacatgacttggctttctcatccagaaattatggaaacagggtctgtcagtggcaggaggccgtgctgtgttttacttggatgacacaatgcagtttacttgcctcttcatacccatgcatgctgctcaccctagacaatgacatataagccgtatatagatcaatgtccacatatatatacacacacacatatatatatataaagtgg

SEQ ID NO: 12622 - DNA, 451 bp, Homo sapiens
  misc_feature (1)...(451): n = A,T,C or G
atcgaagnccccnnnnntttgcagnatccctagtccatgcggtggaattcgaaagaacggggcacatgattgatagcactgataggacatcatttgtggtcttatttctttggagcatcgtaggtgactttgcatctccatggtttttccagtatgtgattggtctggcaggcatgggcccgacacagtcagttcctgtgttctgaggttttctcgccagggctgattctactatagcacactggggtgataaaggcttggggtggtggcaccccaggggccacgtaagtatcattttttagttaccagcaagtgcctcctttactttacttaaaaacatggctcccctatttctgaatatgaccagaatttttggtaggttagtaacagaaaattgaggaagatgaaagtgagaccagcctgagcaacatggtgaaaccccatctctact

SEQ ID NO: 12623 - DNA, 470 bp, Homo sapiens
  misc_feature (1)...(470): n = A,T,C or G
cttgagaccctnngattgaggacccttagtccagngcggnggaattcgaggcttccgtggagaagcttggaggtaatggctgtcgtaaatgctagttattttcagagagttctcgaagatttggaataaagccgagccccagaaagacaggtcaaccacagaagtgctgagccaggtaaagaccctgctggacaagcagctggagtgagaatcaagacagctggaccacaggaccagacccagcagtatccatgtgacacataggttaatatcagagaagcacatgacctgggcaatctgcatgtgatgccaaccaagccttggaaagacagtgcaaccacagaagtgccgagctgggtaaaggccctgctggacaagcagttggagtgagaatcaagacagccggaccacaggaccagacccaccaggatccacatgacagtggtatcttccggtatcatcctattcan

SEQ ID NO: 12624 - DNA, 474 bp, Homo sapiens
  misc_feature (1)...(474): n = A,T,C or G
ccccccattgaagnaccactagtttagtgcggcggaattccagccttgtttttcatagggaaaaaataacacgttcatcttagtgaagctatgaattgtagaagaaactttttcttcaaaataaaagaaaaatttttttggaaaccaggtttcactctgtcactcaggcaagggtgcagtggtgcgatcatagctcactgcagccttgaattcttaagctcaagtgatcctcccactttggcctcctaagaagctgggactgtaggcgtgcaccaccacagctgactaattaaaaaaaattttttttataaagacgtggccacactatgttgcccaggctggtcttgaactcctggcttcaagcagttctgccacagcctcccaaagtactggtattacaggtgtgagccaccgcacctggcccactttggcgaatttcttgttacttttcttaaagagaaatgaatcctagaa

SEQ ID NO: 12625 - DNA, 485 bp, Homo sapiens
  misc_feature (1)...(485): n = A,T,C or G
ccgcgcccccgcccccccccatcgagacccctnnatagaagactactagtccgtgtggtggaattcccacccctcagagcagctgttgtttctaattgtttttaccttttcctttaggcccctattcagagaaggaaaaagcctgcttcacagaaaaagcgacgctttaagactcataacgaacacttggctggagtgctgaaggattactctgacattacttccagcaaatagggaacagttttgccctggaacagagttacagatacacaatcaagagtgttcttgctgatgctcggggtctgaagactgtcttcctatctgcttcttgcggctgaggagaggagcagttcagtttacaaaacaagtgcaaattaccaaactcaaagcttatttgagtagaatgggctcatgggcaatgtgatgttccctgttaaccttctgttactccctgcgagaaaggcgctgagcgtggcatgcangtg

SEQ ID NO: 12626 - DNA, 417 bp, Homo sapiens
caaaaaaagaaatatctttatcaaaagcagaatcccactcatagatgacacacacatggagaggttggagaggtggataaggcttgagcacgtagcagattcatacctcgtatctcatgcactccagacactttcactcactagtgggcagagttgcctgaactgtttatattgggttttctgttttggttggtgcttgctgatgccttataattaaatgatcacatttaatgattaattaccatcttggaattgtgaggattaagttgggtaatcattgtgacagatgctttgtaaactaagatcgctgtggtagtcattaatgctgttctccaaatatttctaatttcaggcatgtggtaggtttgcactgcccccttgaagttacatatagccaggtgagacttgcttaggtca

SEQ ID NO: 12627 - DNA, 486 bp, Homo sapiens
  misc_feature (1)...(486): n = A,T,C or G
nggggnnnnagggagccccggnntnnnggggttactgagacctttgncctactgaggctattcggagattggcacaggaccagactcaagacacacaactcataacagttgatgaaaaattggatatcactactttaactggcgttccagaagagcatataaaaactagaaaagtcaggatctttgttcctgctcgcaataacatgcagtctggagtaaacaacacaaagaaatggaagatggagtttgataccagggagcgatgggaaaatcctttgatgggttgggcatcaacggctgatcccttatccaacatggttctaaccttcagtactaaagaagatgcagtttcctttgcagaaaaaaatggatggagctatgacattgaagagaggaaggttccaaaacccaagtccaagtcttatggtgcaaacttttcttggaacaaaagaacaagagtatccacaaaataggttggcactgact

SEQ ID NO: 12628 - DNA, 401 bp, Homo sapiens
ggacttcatagacacaaaggcttcgaagcacaagccaaatatgtcaatatttgtatgtaagaaactaattatgtaataggtaatgaaactgaaactatactatgcccttaaggagatccagtttaattcaaggtgatcttttatttacctgtacaggagtgtaaacttttttgtgcttttatttttcaattgtgagaaccactgattggtatgttcaacaaatttgtgtatacaaagaaatggataaatcactgctatataagggaaactaccttaggaaagaatgtttactgaatgtttattttatttttttttttttttactataaagggaggggttgttaacaaaaaatatatatgtggcattcttacaactactatttaaagtcagcaacttttcat

SEQ ID NO: 12629 - DNA, 506 bp, Homo sapiens
  misc_feature (1)...(506): n = A,T,C or G
gggcngnnnnnnttattaaataccttcctacgacacngncgnggaatncgatggggtcagaccgagaatgctgggggagggttttccgtggaaaaattgcgctttagatttggccaaaaacaaacaagcaaaaatggcttgccctcaactaatactcggcagtgatgagtgctggaaaaacgggcgaatataagaatatttaacagctctgaactggttcatcctggaaccaaggaaagtatgcaaggaggcagggttacttttaaggagtctggcttcctgtgctgaatccggccctttccttctgtttctccttctagaagatccgcttccagtacccaccctcaacccgagagcttttccggctcctgtgctctgcccatgaggccccggggccagccccctcccttctgctgctcgacggcctagaagagtacctagcggaagacccagagccccaggaagccgcctacctcattgccttacttctagacacagctgcccat

SEQ ID NO: 12630 - DNA, 445 bp, Homo sapiens
attgaagaccctagtcattgtggtcgaattcggcagcggctgcagcgctcttttcttctgcggatgttggtgccctctccttttcgtttccggaaacatggcctccggtgtggctgtctctgatggtgtcatcaaggtgttcaacgacatgaaggtgcgtaagtcttcaacgccagaggaggtgaagaagcgcaagaaggcggtgctcttctgcctgagtgaggacaagaagaacatcatcctggaggagggcaaggagatcctggtgggcgatgtgggccagactgtcgacgatccctacgccacctttgtcaagatgctgccagataaggactgccgctatgccctctatgatgcaacctatgagaccaaggagagcaagaaggaggatctggtgtttatcttctgggcccccgagtctgcgccccttaagagcaaaatgatt

SEQ ID NO: 12631 - DNA, 440 bp, Homo sapiens
  misc_feature (1)...(440): n = A,T,C or G
natgacgaccctatggacagactgttggaatacgacaacagcggggaggacctggccgtcaacatcatcttccccgagaagatcgacatgaccaccttcagcaaggaggccggcgacgaggagatctaagcagcgttcccacagccccctctagattcttggagttccgcagagcttactatacgcggtctgtcctaatctttgtggtgttcgctatctcttgtgtcaaatctggtgaacgctacgcttacatatattgtctttgtgctgctgtgtgacaaacgcaatgcaaaaacaatcctctttctctctcttaatgcatgatacagaataataataagaatttcatctttaaaaaaaaaaaaaaaaaaaaaaaaagcggccgttcgagtttagggggcccgttaaaccccgttaaacaccctggactgggccttttg

SEQ ID NO: 12632 - DNA, 448 bp, Homo sapiens
  misc_feature (1)...(448): n = A,T,C or G
attgaagaccatgagtgacngcggnggaattcgctggccatcgacctgtggctgtccaagaagctggtggtgtgcgcgggagagagctcgtcgtggggcagcgtgcgaccccttatgaagctgctggagatctcgggacacggcatcccctggctgctgggcaccctctactgcctgtgcaggagcgacagctgggccgggcgcgaggtgctgatgaacctgctcttcgccctgctgttggacctgctgctggtggccttgatcaaagggctggtccgcaggcgccgcccggcccacaaccagatggacatgtttgtcactctctcggtggacaagtactccttcccctcgggccatgccacaagggccgccctgatgtcgaggttcatcctgaaccacctggtgctggccattccactgagggtgctggtggttctgtgggccttcn

SEQ ID NO: 12633 - DNA, 476 bp, Homo sapiens
  misc_feature (1)...(476): n = A,T,C or G
ggggngtttcgtcgatcactagtccaatggagtgccattcgatggtagtgttttcacttctgacttgatgtctgactggagcatctcttcgttttcaacgttcacttctcgtgatgaacaagacttcagaaatggccttgcggcattagatgccaacatagctagactccagaagtctttaaggactggtcttctggagaaatgaattcagaagaaaactcatcaggtgcttctttttaaaactagaacttggctatattgaatgtgtatttttctttagtgaaatgatgttttatgttattatgtgtgaagtaatatattgtacaagtaataaatgtattgttgagatatattgacactgaggagcttataaaaacaagtcatcttaagttcacaattgctacaagaagaaagttgtggataactaggaaattattggaagtaatgttttatttcagtacttagcaattagagtt

SEQ ID NO: 12634 - DNA, 469 bp, Homo sapiens
  misc_feature (1)...(469): n = A,T,C or G
ntggtngatccctagtccaatggagtgcaattcccaagagtgcctgacctagaagtagacttttcgctcccgctttgtgtttattcaccttttctagcctgtcaagcaaaaaattttgagtacctactacgtggacgcattattctaggccctagggataaaacagtatgctctcttggagcttctgggagggatgggagtataggaaaacaagaagcaaataagcaaattaatatgtaatagatcgcattttgtaagtgctgtgaagaaaaggccagagaaatctctgagtaagtgataatagaatagacctgcatgaagtgagggagccagcccagtgattcttcgagagccaagtattacggtggacatcgagtggtggaaaatgccgttagaatagagccaaatcttatgttgtgagatgctaatacagattttgcacaaggcatgacatcatcactaacaaaan

SEQ ID NO: 12635 - DNA, 450 bp, Homo sapiens
  misc_feature (1)...(450): n = A,T,C or G
nggagggaatcgtagacattagnattgtagaccctagtccgtgcggtggaattcatcataacttaaaacacttttttggaagaagatttaaaatatttgcccatgctacaggaagagactgtattaaaaatggatacacaaggtcagttgacactatgaagctcaagctaccaaaaagaaagtggcaatatattgactcaggatctcaaagctgggtgttttagcattactgtgtaaagacttgaagggacagaagtgaagaaaataagctgcaattttgtacagataccaacttctgaaaagctggtgtttttacaactagcattgaatgcagtccaatttgcagtagtaatcttcaatagacaagcagctttgttgctgcctttatggacatgggtaccaattgcttttgtaatatggtgaaaatgtgagctagcacttctgcgttcc

SEQ ID NO: 12636 - DNA, 478 bp, Homo sapiens
cccccccccccccccccttcgcccccattagttagagggacgttagtccagagtggcggaattcgagcagcatgccgaggaggaagcagcaggccccccggcgctcggcagacctactcaaaaagaatggctaaaggagttctcttaagaggaaggaaataataaaagggaatcttggaccatcataaaacaaagaagaacaagacacagggcgaggaccacgtctctgctgaatcccagcccagaggagcttctggcagacagctgacatgcggcagaggtaacatgatgtgtgctatgacaacaggccaaatgcggaaggagagactgatgatccgctgtcttctctgaagccaggctttaaaaagacctgcacaaagctgaagcaatgccactcttctcactgtttgtttttattttggaaaaacagttattttgaattaaaaacaaggaggctctgccacatctccaggcgatg

SEQ ID NO: 12637 - DNA, 478 bp, Homo sapiens
  misc_feature (1)...(478): n = A,T,C or G
tgtggggannnntttttgatcgacgtccattagtccagngcggtggaattcctggtttgggcataactggatcagttagggatttagggttgcaaactatactaggttgagtagtgtcactttaaaatccatgttcacctggaacctctgaatgtgacttcatttggaaatagagtctttacaatgtagtcaaattaaaataaagtcaatccttatttataagaagagagagatttggacacagacacacaaaggagaaggccatgtgaagacagaagcagagactggagtgacacatctgcaagccaaggagcaccaacgattgccagcaacccccagaagccaggaaagagacagggaacagatttttccctcggaccccccaaaaggaaccaactctgccaacactttggtttcacacctctaacctccagaattctcccatgagaaaataattcctgttgttttaagccacccn

SEQ ID NO: 12638 - DNA, 447 bp, Homo sapiens
  misc_feature (1)...(447): n = A,T,C or G
gcgccggnctntttancccaggcctanagcangggcgnngcantnnnttattggaggngctgtgctttgttttatcccgtggatccatagtaagaagcaaagagagatcagtaaaaccactggaaaagaaaagatggagaaaatgttggaaaaccagaactctctgctgtcaagttcatctggaatgttcaagaaagaatctgactctattatttaatatcttacatacctccaccagactggacttgctttttgaattttaagcaagtttcctttccttttatacaaattgcaaatttcatatttttttaatcacatcctatgaatagcacaataattgggaaatagaacccttatcactagaagaaccattttctgccactaaatatctctgatgtttccatgagtctgagggcagagactctggtatatgaaaacgtctgaaag

SEQ ID NO: 12639 - DNA, 471 bp, Homo sapiens
cccccccccccccccccttgagccttctgttagagcggcgtaattccagagtccgtcggtctcgaagcccaatgcattacatgtataggccgagaagtcgaagtccaagaatttgccatcgtttcatttctagatacagatccagatccagatcccgttcaccatatcgaattagaaatccatttagaggtagtccaaaatgctttcgatcagttagccctgagaggatgtcaaggagatcagtgagatcatcagatagaaaaaaagcattagaagatgtagtacaacgatctgggcatgggacagaatttaataaacagaagcatcttgaagctgctgataagggacattcaccagcacaaaagcctaaaactagcagtggaacaaaaccatcagttaaacctacaagcgctacaaagagtgattcaaatctaggaggacattctattcgttgtaaatcaaagaatcttg

SEQ ID NO: 12640 - DNA, 413 bp, Homo sapiens
gaaaaagttttggaaatggtagtggttgcacaatattgtaaatataattaataatgtcacttaattgtacatttataaatggtagattctatgttacatatattttacataaaaaaagtattagatctaaaactattgaattgtacactctaaaagatgaattatttgatatgtgaattctgtcttaataaaactatttaagaaaacaaaaacaaaaccagctatccgtgtttggacaacactgtcacaaaacaaagttgttgattttagccaggaagcatataaggtagatgtaatcagtgagactagattcagattagatttagtaatattaatccgtatgcagtccctcaaaactaatgtctttcaggaatatatcaagtgtttatgtactataatgattttgttaagtt

SEQ ID NO: 12641 - DNA, 483 bp, Homo sapiens
  misc_feature (1)...(483): n = A,T,C or G
nttgaaaccctttgcagnngttaagaatcctgttaaggatacaaaaattacttataaggcataagttctaatgttctacagcactgtagaatgactgtagttcaacaataaattatatcatttcaagtagctagaaggaagatacagaatgctcccaacaaaagaaatgaggccaggtacggtggctcacgcctcaaatcccagcactttgggaggccaaggcgggcagatcacctaaggtcaggagttcaagaccagcctggccaacatggagaaaccccatctccactaaaaatacaaaaattagctgggcttggtggcatgcacctgtagtcctagctactcgggaggctcaggtgggagaatctcttgaacccaggtggtggaggttgcagtgagctgtggtcatgccactgtactgcagcctgggcgacagtgagactctatctcaaaaaaaaaaaaaaaacccaccgtgttaatggg

SEQ ID NO: 12642 - DNA, 399 bp, Homo sapiens
gcaccactgcattccagcccaggtgacagtgcgagactccgtctcaaaaaaaaaaaaaaaattactttaaataatctttagaaactataacagcccatggaacatggaaggtactaaataacgggaaggaattctaccttttatttttagcccctcaccattttgttcaggaaattgcagtaagggaaaataactttttgttttattaaaggaaaaactatgtttctaagtatataaatcactttttcaacgactttgtaagggcggtttataaaaaatttcggagaggattttataaaaggggcgacaaagactttattaaattattcccccccaaaaaactgaaggatgtgattgttggaaatacaaattttgatgggaaaacatttgaaaagggcc

SEQ ID NO: 12643 - DNA, 409 bp, Homo sapiens
gtcagcttcgtgacttccttctcaggatggaaccagcttggtggcttgagggaaaggggttctgagttgcaaatcagaaacttgaagatgaaatggctactacgctgggtattgcctttatcttgaatgccagcctgatggtccaaggtgaacaagccttcctgtgttttctgaatggtaagaaaaagtggggacacaaggacagcagaaaaggcataggctctgattccggctgatctcggcctgggtctccctgcctggggaaggaggtgtatgtgtgtgtgctaatatatatgtggtgctaatgtataatacatatgcttatatggtgatatggtttggctgtgtcccccctcaaatctcatcttgaatggtagctcacataattcccatgtgtcacgggagggac

SEQ ID NO: 12644 - DNA, 473 bp, Homo sapiens
  misc_feature (1)...(473): n = A,T,C or G
acttgagaacctccgattaacctcggaaagngcggnggaantctgggcttactaattcttgaatttaaaaaaatcatttaaatcaagcaattgtaatagtttatgtttaagcatatagtgtatgtttttaaataaataagcaggctgggttttagtggctcacccctataatcccaacactttaggaggccaaggcaaaaggatcacttgagtcctggaattgaagaccagtctgggcaacatggcgagatcacacctctacaaaaaaaaaagtttaaggattacccgggtatggtggtatgtgcctgtagttcttatctattcgggaggctgaggtggaaggatcgcttgagcccggaaatttgaggttatggtgagtagcgatcaccccactgcactccaagcctggttgacagaatgagaccctgtctctaaaataaaaataagcaatagcatatttttttaaaaaacan

SEQ ID NO: 12645 - DNA, 478 bp, Homo sapiens
cgccccccccccccccccccatcgagcaccatagatagagcgccgttagtccagaggggtggaagtcccggcaccacaagtcggacccctactcaaccggtaagtggtcctcacccgtagactctggggaggctggtgctgggcctatagttttgtcctcaggaagccagaagggttaactcatgcttcaggctgcagtgggttcagagctgagcctcagcttggagggggacctggaagggtcattggtgcttcctacagtgtgtgtttatcaggtgtctctcttgcttgtgaggtgagatcactcagaataaggcccctctggtccctctcttgagtcaggagcacgacaatgctaggtgacttcttgctaggtggggaagctaggagcccaggggaggtacctgatgcacctcagggggtcaggatatgcttccaagaggcagtgatcgcagacaggtagcagctaacttagcag

SEQ ID NO: 12646 - DNA, 588 bp, Homo sapiens
  misc_feature (1)...(588): n = A,T,C or G
gggcaatccnntttcgaacaccatttcgagtggccgatttcgagagagaganagaagagaagagaagagaagagaagctatacattnttaaaaggctgaagaaatatatgaaccaaattgatatgaggcaatcagaaaaattgacaccgactgtattaaggaaatagctaattttagtgtggtaatagcattgctgttatgtttctaaaaagtcattatactttagattttcataataaaataattatgaatgaagtatggtatctgaaagtatcttcagaataacccagtgtgcatgtatgattaattgggtgggtttacaaaattgcccatgaattgatcattgttaaagcttggctgttaaaacatggcactcttctctctaacactgttgaagttttctgtaatacaaagttttttaaaaaatgcattccaggaaagtcccataaacataggcagagaaacattctgtntgaagttatgttagttnttaagcttttctcattnttatcacagttgggaaatcctaagtatccaaatcctgcctaagactataggaacctctncaaaatggcactctaaagaatg

SEQ ID NO: 12647 - DNA, 501 bp, Homo sapiens
  misc_feature (1)...(501): n = A,T,C or G
cgccccccccgnccnattgaaacccttaatagatgatcctcacgaagnngcgcggaanttcccatggaaaattctggatttcgagaagatattcaagtacctcctggaaatggcaacattgggaatatgcaggtggttgcagttgaaggaaaaggtgaagtcaagcatggaggagaagatggcaggaataacagcggagcaccacaccgggagaagcgaggcggagaaactgacgaattctctaatgttagaagaggaagaggacataggatgcaacacttgagcgaaggaaccaagggccggcaggtgggaagtggaggtgatggggagcgctggggctccgacagagggtcccgaggcagcctcaatgagcagatcgccctcgtgctgatgagactgcaggaggacatgcagaatgtccttcagagactgcagaaactggaaacgctgactgctttgcaggcaaaatcatcaacatcaacattgcagactgctcctcan

SEQ ID NO: 12648 - DNA, 463 bp, Homo sapiens
  misc_feature (1)...(463): n = A,T,C or G
ggcaactnnnattgagacccattgagngcgtggaancggctatggcttatgtggagggtgtgaatctggcaacattggctctgggttatgtctcctcatcagtgctggctgcagccaaatgtgatagcatgacgatgactcctggcccgtggctgggtttgccagctgttcctgcggtgacactgtataaacacgaccctgccttgactttagttgctggtcttatatcaaataagcccacagacaaactccgtgccctgcctctgtggttatctttacaatacttgggacttgatgggtttgtggagaggatcaagcatgcctgtcaactgagtcaatggttgcaggaaagtttgaagaaagtgaattacatcaaaatcttggtggaagatgagctcagctccccagtggaggagtacagatttttccaagaattaccaggctcagatccggtgtttaaagn

SEQ ID NO: 12649 - DNA, 487 bp, Homo sapiens
  misc_feature (1)...(487): n = A,T,C or G
ggtgggattgagcctttgagacattagtcagngcggtggaattcctgaggataggaaatgtggacagagacttgagtaaaatgagggagcaaacaaaattttaaaatataaaaatgtttttcttgtacttaagagctcatacaattttaaggatattggccttttggtttttatatttgtttatgtttttctctttgccatttgccttttaatatttttatgatacatatgtcataaagcatttttaacttatgttttcttcttacacattttacttttaaaaatctgcctaaaacttatattgaggtgaatgtcaggcagtaacaagaagaaacatgaggtaggttaaaagggatgaaaattgacagtggcttctttcagtaatggtagaccaggtaatttggaccctccttttattgatgacatctaaaaaagctggacaaatattanaatgtctttcttagaagtatcanaaagctaacaagag

SEQ ID NO: 12650 - DNA, 476 bp, Homo sapiens
  misc_feature (1)...(476): n = A,T,C or G
ccccccccccccccccccccccattgancaccactagatagagcggcgtaattccaaacgtttgaatgatcacaaattaagacattatcagcccagtaaatttcttgcttaatgtttttccaagttctggcttgaatatttcttattaaagctatcttatgtgggtattttattttgaaaggtattatagtttgtatatttaacagtaaggaggaaactgtaaccaaaattactatttctctatacgtattggtacttgaagattcctttcaaaagaaatccagcgttttcctaattttagtacttaatttctctttttaatttaagtgatctttctaattcgaaagctgtgttctttttgaataccatgcatgggggttaagctgatgttaaaacagtttgcaataaaaaaaatgaatcagcttaagtcatttaatcatttcaagtgcattctgcatcctttaaaaataagttta

SEQ ID NO: 12651 - DNA, 399 bp, Homo sapiens
gcacctttgctgctgctgctatcttccaagagaacgggactccggaagaagacgtctccacggagccctcgggacctgctgcaccaggaaagccactccaccagtagtgctggttgcctcctactaagtttaaataccgtgtgctcttccccagctgcaaagacaatgttgctctccgcctacactagtgaattaatctgaaaggcactgtgtcagtggcatggcttgtatgcttgtcctgtggtgacagtttgtgacattctgtcttcatgaggtctcacagtcgacgctcctgtaatcattctttgtattcactccattcccctgtctgtctgcatttgtctcagaacatttccttggctggacagatggggttatgcatttgcaataatttccttt

SEQ ID NO: 12652 - DNA, 477 bp, Homo sapiens
cccccccccccccccccatcgacaccactagttagtaggcccttagtccagtgagcagcgaaccaatcccaacactttgggaggctgcctgacgcacgcagatcacctgaggtcgtgagtttgagaccagctggcccaacatggagaaaccccaactctactaaaaatacaaaattagctgggcatggtggcacatgcctgtaatcctagctactcgggagactgaggcaggagaatcacttgaacctggtgggtggaggttgcggtgagccaagattgcaccattgcactccagcctgggcaaaaacaacgaaactccatctcaaaaaaaaaaaaaaaaaaaactaaggttttttttaaaagggcaggctgttttttgcaatacctcattcagccaagttttggttcttttcctcattcagaaaaagccacttttcatttggtttaaaaggcaccattagagggttagagttcatc

SEQ ID NO: 12653 - DNA, 465 bp, Homo sapiens
  misc_feature (1)...(465): n = A,T,C or G
attagacccctgagaccctggaagngcggggaantcgcagttacaggcacaaattggtggaggctggaggatggggaggggagctaaaccctttatatttgtgaagaaaatatctgtagctgatagaaataattgcttaaattggtttatgaaattaatgagtctgaaaaggttaaaagcacttataaaaagaaccaagtcctacatttccagaactttctggcaaaaatttgcactcatattatttatcctatgaacattcccattgtttttttttgctatttatatacagattatcataagaaagctctcagtttgaggacccaaaataaaaccaaagtcatgccatgacccatactcatttacaaaaacaagaacactttcctctatccctaaaattatgctttagtacttgaggcctttaaaagttagtgcttttgattgtgaagacattcagcaacttat

SEQ ID NO: 12654 - DNA, 487 bp, Homo sapiens
  misc_feature (1)...(487): n = A,T,C or G
gtnagtngnccttgagacctctgatagatgcaccattagtncagtgcggtggaattcagtcagtgttctgggagcttctattctgacctggcaccaggggcatacaagtgattcaggtctgccagcaactatccactgccatccactgagccacagaatccctactaaatctttgtcctgaccatgaggcacctccaagtccaccggctacactcaccctcttctctacaccctcaccatcaccaccgtgttacaaagacaaacaggaccctggaggacacctcccagccaccttctcccaccaggggtcctcagcctctctccagcccatgccaggagcttgtgttctctcaggcaacacctgaggagccaggcaacagtcccttctgctctgagatacctcaaatttactctgggagctctagtatctactatgagctacatctctttgtgattcctttattcccactagctggtcaaactttta

SEQ ID NO: 12655 - DNA, 471 bp, Homo sapiens
  misc_feature (1)...(471): n = A,T,C or G
cggccgcgaatcgangactattagncatggaggccgatttccgcgaacccaggaggcagagcttgcagtgagccgagatcgagccactgcactccagcctgggcgacagtgtgagactccgtctcaaaaaaaagaaaaaagaaaaagaaaagaaactagggtgacgccagtagaaatggaaacaagggggtgagctgggaaactattttgaaagtagaagcaatggaaattagtaattatttggtaggaagatctgaagagtcctctgcccttcccccgtgaggcaccatgcatgcttccgcaagggagtaggttgccctgcgctgtagtttgctgctggcattccttctctcctaataggccctgtgctccaggaagagcatgaatgagaagaatcagggactacccttgaactttcagcctggatgactggcagaatattggttgcattaacaagttttaaaccaggag

SEQ ID NO: 12656 - DNA, 498 bp, Homo sapiens
  misc_feature (1)...(498): n = A,T,C or G
agagaggagnnnnnttaatgagaccctattaggagtcataggacangcggcggaattctgacgacttgctctttgagctgaaagcaaaaggtacacggtgcataatttaaatttatgtcaggacaatagcacatgcagaggcccaagggttaaagaaagcaagggtgaggctgaatgcagtggctcatacctgtagtcccagcacttggggaggccaaggagggcgaatctcttaagcccaggatgggtaatgggtaacgtggcaaaaacccatctctacaaaaaatacaaaggttagccgggcacagtggtgcacatctgtaatcccaactactccggaggctgaagcgggaggatcacttgagcccaggaagcagaggttgcagtgagctgagattgnaccactacaatccagcctgggctaccgagtgagaccgagagaccctgtctcaaaaaaaaaaaaaaaaaaaaaaagggcctgtcttttaaaaaggcccn

SEQ ID NO: 12657 - DNA, 481 bp, Homo sapiens
  misc_feature (1)...(481): n = A,T,C or G
ggggggaatcgagaccctaggcattgagcggcaattccagnttctttatctgtattaggtttcaacaaagggaataaatcattggcttctcatgaggttgtcataaggattaaataagacaatgcatataaaagaactggcagacaataaatatagagtcccccactcctgcttggggctctctttctctctccttctctacatagagaagtgccagagcatccgtcagtagaagttacttaaggttggctgtgtcttccacatcttttgtttacccatgaagaactgtgaccatcttgttctgtgtcttgtcataaagatgggacgtgacttctttctgctcttgcttccatctggtgctgttttctgcacagcctccttgagaccttccagaaccttcttttttcctacttcatatcacttaaccagtagctatctgngatggttccagaggctgaagtttgcagttgaataacatttt

SEQ ID NO: 12658 - DNA, 441 bp, Homo sapiens
  misc_feature (1)...(441): n = A,T,C or G
actgagcccatgatgacctctgaaagncnggtggaattcgtttccctccagcggttatgtgtatgatattgaatttaatatgccatgaatttgcttttaaatacacaaatatagggtatattttgtgtatatattgatgtatttattttgttttcatagtaaaatccaatcccaattagttttataatgtaaataaattacaattaataaagtagaaatgcatattttaaaacatgtttacattgttttaatgtgtagcataggtttttacttgacagctctttgcagaaccatatcatttagttaactaataaatctggaaacttaaaaaaaattatgagctactttaaataattttagagagtacttgcaactttaaaacgtttagtgaaataacttgtatttgtattgtacctttgtttgaaattgtaaaaatctgat

SEQ ID NO: 12659 - DNA, 459 bp, Homo sapiens
  misc_feature (1)...(459): n = A,T,C or G
nctcgagtagcactagcncagngncgnggaattctaaaggctttcatggtgttgaagagaaatgtagtttttctagacacagagatgtaagatggagttctcctgtacttccccgtaagtcatctagactctgtgatctatgggacaatgtccttaaaaaagaaattacagtagtggcctggcacagtggctcacgcctgtaatcccagcactttgggaggcccaggcgggcggatcagctgaggtcaggcgttcgagatcagcctggccaatatggtgaaatcccatctctattaaaaaatacaaaaattatctgggcgtggtggtgggcgcctgtaatctcaactacttgggaggctgaggtaagagaatcgcttgaatcanggaggcggaggttgcagtgagctgagaccgtgccattgcactccagcctgggtgacagagtgaaactctgtctca

SEQ ID NO: 12660 - DNA, 455 bp, Homo sapiens
  misc_feature (1)...(455): n = A,T,C or G
aatagaaaacttgtacgaccctagtccagtgcggtggaattctgggtctcttgttgaaatccgaaatttcttgggtgaaaaatacatccgcagggttcggatgagaccaggtgttgcttgttcagtatctcaagcccagaaagatgaattaatccttgaaggaaatgacattgagcttgtttcaaattcagcggctttgattcagcaagccacaacagttaaaaacaaggatatcaggaaatttttggatggtatctatgtctctgaaaaaggaactgttcagcaggctgatgaataagatctaagagttacctggctacagaaagaagatgccagatgacacttaagacctacttgtgatatttaaatgatgcaataaaagacctattgatttggaccttcaaaannnaaaaaaaaaaaaaaaaaaaaaaaaaaaaaaaaaaaaaaaagggggg

SEQ ID NO: 12661 - DNA, 446 bp, Homo sapiens
  misc_feature (1)...(446): n = A,T,C or G
nttcgagttccactacccatgtggtggaattccaaactcccaacctcaggtgatgtgcccacctcggcctcccggggtgctgggattacagatgtgagccaccacacccggcctacttttaacatttttgtatcaatttatgtttcctgtaatacataaatattttcacctaatgaatttgtctttcaacagaatttaatccatttagttatacatgccatattaaagccttaatttacattatttacattattgcttctatattatttaatattaaggtgtcattaatttttttttttaagatctgaatctgcttcacaattgcatggaattgaatacctttaaagatttccagctgggcacagtggctcacgcctgtgtaatgccagcagtttgggaggctgaggcgggtggatcacttgaggtcaggagttcaggaccagcct

SEQ ID NO: 12662 - DNA, 445 bp, Homo sapiens
  misc_feature (1)...(445): n = A,T,C or G
nctcgcgnccatattgacagccngttggaattcctctggaggaagttctccagcttcagctcaactcacagcttctccaagcatcaccctgggagtttcctgagggttttctcataaatgagggctgcacattgcctgttctgcttcgaagtattcaataccgctcagtattttaaatgaagtgattctaagatttggtttgggatcaataggaaagcatatgcagccaaccaagatgcaaatgttttgaaatgatatgaccaaaattttaagtaggaaagtcacccaaacacttctgctttcacttaagtgtctggcccgcaatactgtaggaacaagcatgatcttgttactgtgatattttaaatatccacagtactcactttttccaaatgatcctagtaattgcctagaaatatctttctcttacctgttatttatcaag

SEQ ID NO: 12663 - DNA, 445 bp, Homo sapiens
  misc_feature (1)...(445): n = A,T,C or G
atacgagaccnttggnntttgtcgntccactatcagtgtggtggaattccctcaactccaccaagttaccctcatcggacaacctgcaggtgcctgaggaggagctggggatggtggacttggagaggaaagccgacaagctgcaggcccagaagagcgtggacgatggaggcagttttccaaaaagcttctccaagcttcccatccagctagagtcagccgtggacacagctaagacttctgacgtcaactcctcagtgggtaagagcacggccactctacctctgtccttcaaggaagccactctggccaagaggtttgctctgaagaccagaagtcagatcactaagcggaaaaggatgtccctggtcaaggagaagaaagcggcccagaccctcagtgcgatcttgcttgccttcatcatcacttggaccccatacaacan

SEQ ID NO: 12664 - DNA, 473 bp, Homo sapiens
  misc_feature (1)...(473): n = A,T,C or G
cgcccccccgcccccccnnnattgantttcgtagaccctagncagnngggnggaattccaaatcccctcccaaaccactctccacagctttttaaaaatacttctactcttaacaattacctaaggcttcctcaactgccccaaatctcttaatagcttctagtgctgctacaatctaagtcaggtcaccagagggaagagaacatggcattaaaagaatcacatcttcagaagagaagacactaatattattacccatatacatgatttcagaagatgacataagattcctcttaaagaggaaatgtcaggaatcaagccactgaatccttaaagagaaaagttgaatatgagtcattgtgtctgaaaactgcaaagtgaacttaactgagatccagcaaacaggttctgtttaagaaaaataatttatactaaatttagtaaaatggacttcttattcaaagcatcaataa

SEQ ID NO: 12665 - DNA, 444 bp, Homo sapiens
  misc_feature (1)...(444): n = A,T,C or G
nttgaagaccatttggacagtccgttggaattcccgctttcctgggcctctcagttgaacaaagcagcaaaacaaaggcagttttatatgaaagattagaagcctggaataatcaggctttttaaatgatgtaattcccactgtaatagcatagggattttggaagcagctgctggtggcttgggacatcagtggggccaagggttctctgtccctggttcaactgtgatttggctttcccgtgtctttcctggtgatgccttgtttggggttctgtgggtttgggtgggaagagggccatctgcctgaatgtaacctgctagctctccgaaggccctgcgggcctggcttgtgtgagcgtgtggacagtggtggccgcgctgtgcctgctcgtgttgcctacatgtccctggctgttgaggcgctgcttcagcctgcaccccn

SEQ ID NO: 12666 - DNA, 452 bp, Homo sapiens
  misc_feature (1)...(452): n = A,T,C or G
attagtaagactcgtagtccagtgcggnggaattcgaatgagggatcgtgcacggtagcgtcagcccgaattgacacgacaactctgaatgtgtggccctctatgaaagctggtgccagttttcatcactgttattaaatactagattgggaacctcattcagccgtattgcacagatgagcaattacagcagagaaaattcattagtgctcccactcatatccttatgtgtgagttggtgaaatttagcctgagcttgattcttaggtcttgagactcagtttccaacaccttcattattaatgttaagaatggccatataccacttcatttacgtaaaaggaataaaataagcaagttaagcttcagggtcctagaatttttctgatttctataatccttcagcagaatattaagaaataaagcaggatctgcaatggaaaggttttttt

SEQ ID NO: 12667 - DNA, 488 bp, Homo sapiens
  misc_feature (1)...(488): n = A,T,C or G
gggccccagggccccactgagaccncatagagggccgtcgaannccccnggactgagngggaacggaagctccacggcctagagagccgattcggtcctgggctcccccttccgaaatggaagcagtctccgcgctcactggcggatcgtcctcagccgcacgggaagcgccgtcaccgccgccgccgccgacatcttcgtctacacgtaaacacacggtgaggcgggaggggctggaacgtctgtacgcgcagccgcctcatgggcaggtgctcctggggtgccgccccggcccagccctccggggacaacccttgccaggcctgggacctgcctcctaccagcgaggatcccgccgtagagagcgcccttcccgcacatcaacggctcacaagtggcggccgagctgaggggtaggagagacggagtgtgccaaatgctcctgggctgaaccccacccttcgttcgaagaaaccacttctattaan

SEQ ID NO: 12668 - DNA, 490 bp, Homo sapiens
  misc_feature (1)...(490): n = A,T,C or G
ngatgggccggcgggccnnnnaaaattgagaactgagattatagcacangcggnggaatttaaagatttgaaaagtatacacaaaaatcagatttagtaactaaaggttgtaaaaaattgtaaaactggttgtaaaatcatgatgttagtaacagtaatttttttcttaaattaatttacccttaagagtatgttagatttgattatctgataatgattatttaaatattcctatctgcttataaaatggctgctataataataataatacagatgttgttatataaggtatatcagacctacgggcttctggcaggatttgtcagataatcaagccacactaactatggaaaatgagcagcattttaaatgctttctagtgaaaaattataatctacttaaactctaatcagaaaaaaaattctcaaaaaaactattatgaaagtcaataaaatagataatttaacaaaagtacaggattagaacatgc

SEQ ID NO: 12669 - DNA, 470 bp, Homo sapiens
  misc_feature (1)...(470): n = A,T,C or G
gcccccccgccccgnnnnnattgagatcgattgctattgcggnggaannccagagagcagagaggatgccttcctctttagaatccattaaagatgtcattaagccatcatctcccccagaggaagtagcacaaatatttacagcaggcccctggcggacatggcacttttcaataagcagagagcctccctctgcagaacatatgtggatcttgcttttaccatactccttgaagagctgaagaaataagagggcccagcaaggttaagtcaagtttccaagcctgttcaggaatatggtgactgaaaggaaactgcaatgagagtctctgactgaagaagatgctctttgcaaactgcctgtaaattcctgtcccctgacagggatggtctggtagaagcatgaactgtggatgcaagaggcagcggggaggagtggaggaagacaggaccagcacatggaatataat

SEQ ID NO: 12670 - DNA, 496 bp, Homo sapiens
  misc_feature (1)...(496): n = A,T,C or G
cggaggggaggccgggccnnnnnaaaattgatgactagaggcaatcgcggnggacnncctgggggcgagcgccctaccgctttcgctttcccttcgcggggcccactccactccttgtgcggcgctaggccccccgtcccggtcatggccatgctcagggtccagcccgaggcccaagccaaggtggatgtgtttcgtgaagacctctgtaccaagacagagaacctgctcgggagctatttccccaagaagatttctgagctggatgcatttttaaaggagccagctctcaatgaagccaacttgagcaatctgaaggccccattggacatcccagtgcctgatccagtcaaggagaaagagaaagaggagcggaagaaacagcaggagaaggaagacaaggatgaaaagaagaagggggaggatgaagacaaaggtcctccctgtggcccagtgaactgcaatgaaaagatcgtggtccttctgcagcgcttgg

SEQ ID NO: 12671 - DNA, 477 bp, Homo sapiens
  misc_feature (1)...(477): n = A,T,C or G
gatgaaaccctggaagnggcattgatacccttcccatcatcctttaaacacattttacatctggcacaataacgtgctacatacccatcttgtatttttcctgccccatctttgaaatcagccattctcaaggggttccttcttaatctggctgttgttgtgttggaactcctggtaccatcttagaaccttaaggagacaagcgaaccaagccaataagctttccatgatgctgcttagagttaaacagagcccaggtactaagttatgtcatggagacagtgaactaacctctggactgcttgctacatgagacaattgattttcttattttctatgtagggtggtacatttcctcattttgagatatttcttcaacatatagcttttcattagtggggattttgtcaattataaccaaaaacaatgtgacggatacccaagatgtttcatgttgtagcttgggtgaattacaca

SEQ ID NO: 12672 - DNA, 493 bp, Homo sapiens
  misc_feature (1)...(493): n = A,T,C or G
agcgattgagacatantgaaactactcgcgaagngccgnggaanncngncgcctgtaacttagtggggagaacaccagaaacaaagaatctgttttgtctggcgttgttcactgctttcagagggggaggtccagcttgtttattttgaagctaatcttcaagataaggaccacaaaatgctgataaccctgcgtggcacttgtcaggacttttaaatccgctgaggaaaggaaaatctgtacgacttacgaaacaggccctttcaaggcttctcggttttttccattgggctgattcatttttctgtctctgctgactgccccatgtatcagctcctctccaaaaaaaacggaattcaaggatttggagattgaagtgctgagttgagcaatacagatgtacaaaaaacttttttaaaaaggccaatctcactagctttgcatttacctctgtggtgtggttgccccggacagcttgttctacattcatagt

SEQ ID NO: 12673 - DNA, 450 bp, Homo sapiens
  misc_feature (1)...(450): n = A,T,C or G
nactgaagacctccttgatgaccctctagacgngnggtggaattcggcagccctccactcacccacacagtgtgtctctgcaccccctctttgacatgggagccggggcgctcttggaaataagggtttacctgaggggtctgaagacttgggcagtggggggctgtgaagcctcggggagggaatcagcttgtccaagagtctggggcagcgagtgggcgggggctacccggtctgaccccatcaaagtaaccttcctgggggatatttccattgcagggtcacaaaaaggcaagggctatggttcgagagaggggtctctctggggtcccagccaccctgctgtgggggcccttcccaagcaggacactccaggcaaaggggatggcttccccttgctcccaggacccataggtgaggtcctggctgaaatgcagactgtccccagan

SEQ ID NO: 12674 - DNA, 487 bp, Homo sapiens
  misc_feature (1)...(487): n = A,T,C or G
cgcgactgtaccnattgcagagcgtggaannacaaccaagngcaaggtaatttgaattcggtttccagtcaatatggttaacctgatttctctctacaatttagcagtctgttctttatacttgatttctatgatattaagtgcatgcaacatttccttcccttttaacccggtttccacttacagttttctgtgtatttgagatctgtttggtggcctgcctgaactcatggaaaattgacgacactgaaagagaattgttgtagttaagcttccctgatggcattttttaaaaaacaacagtggaaaaaaataacaaggcactagtcagatgtgatttttggcagatacttcactcaaagtgctcagggcatccccagaaattataacccctcaaagatgttcagggtacagtaaataaagcaagatacaattattttaatgttcatcctattgattcagntctcttctctgcaggtcttagtaa

SEQ ID NO: 12675 - DNA, 481 bp, Homo sapiens
  misc_feature (1)...(481): n = A,T,C or G
agcccgggatcgagaccatnggnactgatgaccctagtccangncgnggaattcggtacactgcttattcatgcagaggacccctccttatttgccaggacaatctatcctgaaatcaccctttcagccactgactcccctccgcaacctgtcttagcaggaggcatcttcaggacagcttcccagggatggccctgggaatcatgcttagctgaattcaggatcctgttttctagaaactgacgttttagaaacagcttcagacatagaaggagctcaacaaacgagctgctccacagtgttatcaaggattgaatgagataatccaagtaggatgctgagtgccaggccctgtgcacacgtagtcagatcatcatgcaattaacacgcaaacctacagctgtcttattctagacctcttcactgcctttgtgtgcacagcttcatgcaacaaaagactctcagctaaatctggttttgg

SEQ ID NO: 12676 - DNA, 450 bp, Homo sapiens
  misc_feature (1)...(450): n = A,T,C or G
attagaaacttgangacctctgaacangcggnggaattctttaaatcgttaagaatcagtttatacactagagaaattgctaaactttaagactttctgaaaattgacctttacagtgccaagttaaagtttaccttattctcggccgggtgcagtggctcatgcctgtaatcccaggactttgggaggccaatgcgggcggatcacgaggtcagatcaagaccatcctgccaacatggtgaaaccctgtctctactaaaaaaaataaaaaaattagctgggtgtggcggtgcacgcctgtggtcccagctacttgggaggctgaggcaggagaattgcttgaacccgggaggcggaggctgcagtgagccaagatcacgccactgcactccagcctgggtgacagagcgagactctgtttcaaaaaaaaaaaagttgaccttattctct

SEQ ID NO: 12677 - DNA, 447 bp, Homo sapiens
  misc_feature (1)...(447): n = A,T,C or G
nttcgaagactcttagtcagtgcggtggaattcgtttattgtaaatcagcaatccataatgcatgggtctgtttctgggatctctctttgattccattggtctctttggctatccttggattagtatcacactaaactactatgactttataacgtgtcaatatttagattttataataagttttggtatttagtagacagagcaaagtcctccagattgggattttttcaataatgtgtaagttattcttgactttttgtgtttgtatataatctttagaatcagcttgtcaagtgccatgaaaggaaggaagaagggaaggagagaatgaaggaggagttttgtttaggattgcattgtaattataggtcagttagaagagaattgacatcttcctaacactgagtcttccaacccatgaccatggtatatattccatttattta

SEQ ID NO: 12678 - DNA, 443 bp, Homo sapiens
  misc_feature (1)...(443): n = A,T,C or G
nactgagacatatgaagacgttggaaagcgcggaaaagcaatataaatggaaggagagagcacaataaggagaggcactggaatgtgacatttgtggggaggagtttggggacatgtcagtgtcaggcacacagtaatacaagctgataatcaaggcaagcaaataatcaaaaggctaacaagagccgaggctgactaagcatttgacaggagctggcttaagccttgataggaagcagctcactgcctcctcataggtaccccaggaagctggtccagagaagatttccatttcagagaggagcaactggggctggggagtccgagtcactagacccaggccacggggctactgggggtagagccgacaccattccactcccccaggggctcagctgcctacgcctggcctcctgcctctccacggagatgcaagcacagtg

SEQ ID NO: 12679 - DNA, 457 bp, Homo sapiens
  misc_feature (1)...(457): n = A,T,C or G
natcgagatagtagtccatgcggggaattccgcccggccccttttattttttccatgattttgatgagcaaaagtttacaatgttaatacaatcaatttatcgttctaaaacacattttgtaggtgttgtgccttctttaggaaacatttgcatattccaaagtcagaagtaatttctccaatgcgttcttctagaagacatacagttatttatccctctgtttaggcttattatccactcagctaatttttgcatttcatggaaggttggcttattttttttaatatatggaaatatagttcggcaccatgtggcaactctttcttttacccatagatttgcttggcatcttatcaaaagtaaattaaacatatatgtgtgtatgtctagttcggtaatctctattctatgctattgggctatttttctttccttagccaatactagtgtctcctg

SEQ ID NO: 12680 - DNA, 470 bp, Homo sapiens
  misc_feature (1)...(470): n = A,T,C or G
aactggagatcgttagctattgcggnggaattcctgaacctgagggtcaaattgaggccctcagggtgcccattgngtcagaggggactgcgcacatggtatgaatactagctaaggccttggagtgctgtgaagactaatgacattatctgtgtaaagtgctgacctcaatgaccagcacactcacttattcaattatttatcaaatttttattgagtggctactgtgtaccagatactctgccaggtgccgggggtactgcagtgaacaaaacagacagcaatctcaaacctctcagggtttacattctcctaacacacagtaaaccatcataaaaggtagccagcattatactataatacaaaatatgggaaaactaaaaaccatgatagcttttttcacctgctaaactggcaaagattctgatgaagataatccctagcaggtatgggccaagagtataggcact

SEQ ID NO: 12681 - DNA, 499 bp, Homo sapiens
  misc_feature (1)...(499): n = A,T,C or G
ngcnaggggcgggcggggcnnnnnanaattganaactgcagagcactagcacagngcggnggaattcgctaatcctgctgtgttgtctaaaagatggagggaagaggacatcagtgtctgatagtgaaatcatcagcaggaaagtgaagctctttccttggttacagataagacttggtttacactattggccagtatctgctaaacatatgaagacttaactattcagtgttgcctaggcattcgcctgcacaacattttgaggttagaacatagaatattttcagaaatactgttgtagtttgtgagtgttgttcattagttacacattanctatagagtggatgcatgaagccccatgacaccagtaaacttctcttaccagtaggtaaaccaaacaccattctgtcattagcagccctcttaaatgttgcctctccgtatcctgttgcatttttgtgtgcattggggttctactgatctctcttaggtttttacg

SEQ ID NO: 12682 - DNA, 448 bp, Homo sapiens
  misc_feature (1)...(448): n = A,T,C or G
atcgcattcgatgacactagtccangcggtggaattcgaagaaaccaaccctgaaatccccttgattttagcccagtgagacccacgttggactttggcttctaaaactactagtgtcttcttctacctgccctccaccagagggtattggttaattctttgacactgagaaattcaaatctgacccgtctgacttttgatccctggaataaatgaaagaaaagactttgcaatgatcatgacggtgccaaaggaacaggtcattatgagttgctcctgtttagattaatcacagtaaacacccattcctgcgttgacccatcacttatcaacaacagctaaatgagacattatttaatcatggaaccctgagcaccagccaccctctctgtccacagaaacatgactatctggttctttagcaaatatctgaagatttcagctgccg

SEQ ID NO: 12683 - DNA, 454 bp, Homo sapiens
  misc_feature (1)...(454): n = A,T,C or G
cttcgaccatgatggaccattagcgcagngcggnggaattctttaataaagaggacaagataacctgttctgtggatactagtaggcctctttcttcagccacacctgtcatcacccaattgtttcatgagcaaagtagccatggtgataagaatagaggttatgcatgggctcagcaacgtggacttctactcaccaaggctgacctggccaaggctatctctgagtgcccagtctgccagcaacagagaccaacactgagcccctgatatgacaccattccccagggtcatcagtcagttgcctagaggcaggttcattacattgatccacctctatcattgaagggatagtgttttatccttactgaaatagatcttactctggatacagattcactttcccttcgcgcagggtgtctgctaaaactaccatccgtggacttacagaatgt

SEQ ID NO: 12684 - DNA, 490 bp, Homo sapiens
  misc_feature (1)...(490): n = A,T,C or G
agcgtttagacttactgaaactcttcgaagngccgcggaanncanaggattaagagatcaagatacttcactgcctattagcctaatatgtatacctactttttttcaaatgccaaaaattcacattagaaacataatccagatatgtgttattttatatatatatatacaaaacagtaaatggtttcttaaaattattgctatttttcaacccccttaaactggagaaaaacatttaattagtaaaacattaattaatttactttaatttttcccatctctcagtagtggcggggaggaacacaacagttttcaatctatgtctgcatagttgtgtagagctgcagaattttagttggatttttaatttggatgatccctgacagccccaaactagtcaggctaataagtatttgaggcaaaatggctttaatctaacaatttactgagtttacctgaagttggctaaataacactgtatgtttaactt

SEQ ID NO: 12685 - DNA, 475 bp, Homo sapiens
  misc_feature (1)...(475): n = A,T,C or G
catagagatcgtcngcagtggcaggaancnccccacttggcctgccctgccctgtgtgaagctaccactcccttcttgtcctttccaggtggctgtgagagaagaggttcgagactgggtgcttacagtctccatggaccagcggctggagcaggttctgcctcgggatgagcgtggcgcctacgaggcctccctagtggcagcgagcactggtgttcgagccctgccctgccttattacaggtatagaagcctacagcaccccagatcctgtggtgggtagaaagcagcaggatcaataaacttaattttactaggattcagtaaagggtacaaaagacaggactgtgctttctaccccccaggctgctcctcatttttccctcctcaatctctctcaaaccccagttcatcattttttcttcctccacaggataccccattctgaggaacaaaattgaatttaagcggccagg

SEQ ID NO: 12686 - DNA, 442 bp, Homo sapiens
  misc_feature (1)...(442): n = A,T,C or G
taaatttgatgcctctgacttggaggacgatttcgncngacgaaacatacacaagggaaatgccctttacaataaaccaagaggatgcattggcctgagcagatgatgtatcaggaggccacgtttaaactcgccgacgtgggcgaggtgcgcgcgcatctgctggagctgccctacgccaggaaggagctgagcctgctggtgctgctgcctgacgacggcgtggagctcaccacggtggaaaaaagtctcacttttgagaaactcacagcctggaccaagccagactgtatgaagagtactgtgggtgaaggtctccttccaagattcagactacgagaggattatgacatggaatctgtgcttcggcatttgggaattgttgatgccttcctacagggcaaggctgacttgtcggcaatgtctgcggagagagacctgg

SEQ ID NO: 12687 - DNA, 438 bp, Homo sapiens
  misc_feature (1)...(438): n = A,T,C or G
nttcgagatccttagtccttgtggtggaattccaatcccatcagattaggacccagcccttatgacctcctttaacctgaattgtatcctgaagatgctgtctccaagtacagtcacagtgggtgttagagagtcaacatataaattctagggggacacaattcagttcatagcagagagatacgggtggagcccagggattaagtgttgaaatgacattaggtaacaggtttagagacagtaggaaaggtgtaataatagaagattggagacagatggagaacatttctgggatctagatttcagtactgttacagtaatggttgatgacagattccaaattatagataacatcaaaatagaaaataggtaatagttatgagaataaggatgttaaggaagtgtgaagctaaactgataagtgacagtgacacagta

SEQ ID NO: 12688 - DNA, 446 bp, Homo sapiens
  misc_feature (1)...(446): n = A,T,C or G
natcgagttcgattacacgngcggnggaattcgtcccgcgggtctgtctcttgcttagacagtgtttggacggaacagatccggggactctcttccagcctccgaccgctctccgatttcctctccgcttgcaacctccgggaccatcttctcggccatctcctgcttctgggacctgccagcaccgtttttgtggttagctccttcttgccaaccaaccatgagctcccagattcgtcagaattattccaccgacgtggaggcagccgtcaacagcctggtcaatttgtacctgcaggcctcctacacctacctctctctgggcttctatttcgaccgcgatgatgtggctctggaaggcgtgagccacttcttccgcgaactggccgaggagaagcgcgagggctacgagcgtctcctgaagatgcaaaaccagcgtggcggcg

SEQ ID NO: 12689 - DNA, 472 bp, Homo sapiens
  misc_feature (1)...(472): n = A,T,C or G
natggaagacactaggatagagcggcggaatncgngngcaggggcacgatctcagctcactgccacctctgcctcccgggttcggcctcccgagtagctgtatctacaggtgtgcgccaccatgctaggttaattttttgtatttttagtagagcagggtttcaccatcttggccaggctggtctcgagctcctgtgctcaagcaatctgcccacctcggcctcccaaattgctgggatttcaggcatgagccactgcacctggcctagaattttgaaagaaaggattggggttaatataaaatcattctaaatataatcaatttcccccctatacatatgtccatacaccttgacatatgtgtgctacagttagttaatggtctataggaagtagatgaaaatgaagtagtcattgtaatgatggctggaacccaggtgaaagtaaaattttaaaaaggaaaaggttgagg

SEQ ID NO: 12690 - DNA, 487 bp, Homo sapiens
  misc_feature (1)...(487): n = A,T,C or G
ggtgatgagactcatcgcaggcgtggaaancctcggcgccccgctgggtgtgctcgtggaagtgtcttcgtggtgctgctggcggcgtcagatagggctggatctaaatcgctagctaaggctctgtcctagtgcctttgggtgtgtttcctttaaaaagatgcagcacctggactgcgacctttggctccagctggaactttccagccagtgtgtgcttctggggaacggagtggctatgaatctgcatgtaaagactttgtccctcatgacttggaggtccagattcctggaagagtctttttggtcactggaggaaacagcggcattggcaaagcaactgcccttgaaatcgccaagcgagaacatttttctgcacattgtggacttgtctgatcccaagcaaatctggaaatttgttgaaaatttcaagcaggaacataaactccatgttctgatcaataatgcaggttgcatggtcaataaa

SEQ ID NO: 12691 - DNA, 455 bp, Homo sapiens
  misc_feature (1)...(455): n = A,T,C or G
nttcgangaccattgtangacccctagtccatgcggtggaattccgcgccttccgtcggtcggtccttgcttcctgcttcgcctccgcgcctcgcgctatgggacagagcccccgatccgccagcaccacctgaggatccagaaaccgccccagcgatggaagaggatcaggagctggagaggaaagcaatagaagaactgcttaaggaggcaaaacgtgggaaaactagagctgaaacaatgggacccatgggttggatgaagtgtcctcttgctagcaccaataaaagatttctaattaacacaattaaaaacacattgccctctcataaagagcaagaccatgaacaaaaagagggcgataaggaaccagccaagagccaggcccagaaagaagaaaacccaaagaaacacagaagccatccttacaagcacagcttccgcgctcgaggttg

SEQ ID NO: 12692 - DNA, 392 bp, Homo sapiens
gagttcccgttcgatgtggacgcgctgttcccggagcggatcacggtgctggaccagcacctgaggcccccagcccgccgacccggaaccacaacgccggcccgtgttgatctacagcagcaaattatgaccattatagatgaactgggcaaggcttctgccaaggcccagaatctttccgctcctatcactagtgcatcaaggatgcagagtaaccgccatgttgtttatattctcaaagacagttcagcccgaccggctggaaaaggagccattattggtttcatcaaagttggatacaagaagctctttgtactggatgatcgtgaggctcataatgaggtagaaccactttgcatcctggacttttacatgcatgagtctgtgcaacg

SEQ ID NO: 12693 - DNA, 489 bp, Homo sapiens
  misc_feature (1)...(489): n = A,T,C or G
agcgtttgtaccaatcgagactctcggaagngccgggaannccgngactgtaatcgcagctactcaggaggctgaggcaggagaattgcttgaacccatgttgcgggggttgcagtgagcggagatcacaccactgcactccagcctgggcgacagagcgagaatcttatctcaaaaataaaaaagttacttgtgataaatgaataatttgggaagaagaaatcctgagttttatgatgcagaaggtatttctttatcatgtagacacttagagggcttcaattttggtagtaaataaccttcattaaaaaagttaatttttttgttttaccttcatatgagccctgtaatagtacttctaatgacatcatactcataaaatgacttttttgtttcctgatcaacagtggaaaggtttatgatgtgctatgtaatagtatgtgcaaacatcgcaggcacaatattaatagatgcacatatatgtgtgtt

SEQ ID NO: 12694 - DNA, 489 bp, Homo sapiens
  misc_feature (1)...(489): n = A,T,C or G
ggctactgtactcattgtaggcgttggaaacggcgcactgtggaacgtctgtaaatatgtttttataattccatgtatagttggtgtacactcaaaacctgtccccggcagccagtgctctctgtatagggccataatggaattctgaagaaatcttggggagggaaggggagttggaacaaatgtctgttccctggaggccagtccagtgctcagacctttagactcattgtaagttgccactgccaacatgagaccaaagtgtgtgactagtcaatgaagtgcgacagcattaaagactgatgctaaacctcnnaaaaaaaaaaaaaaaaaaaaaaaaaaaaaaaaaaanngggccccctttattttaaaggggcccttaaaacccccgttaacccccctgggggggcttttttaaccccccccttttggggggggccccccccccggtcttttttttgtggggggggggccccccccctttttttt

SEQ ID NO: 12695 - DNA, 496 bp, Homo sapiens
  misc_feature (1)...(496): n = A,T,C or G
tgcagatgnnnnaggcngtnccaggnnnnnnnnntttggagcccctttgtagacatctgaccangcggnggaattcggacaataaccataaagcaaagacttaaaaggttttatcattagaataattgtaattcacttgatctctcagtgtaacaatacttcggtctactgtctcaagccattattatgtcttacactcagcatattggcttgtctaccattaaatatttattttctacagtactttctggaaggcaaacaaagcagccactctgctactttatattgattcctgagttgtccttcggaaacgctttcaggaagtttaataggtttgaaagatatttagacctgtgactggcaaatatacttccttctttttatttcaataagagagtactagaacttagatctttattgtttaatctagtcagtgctgtcattgtcaatcaagttctcaaatgacacttgtcctgagctgtaactgatctattca

SEQ ID NO: 12696 - DNA, 452 bp, Homo sapiens
  misc_feature (1)...(452): n = A,T,C or G
atcgagatcgatgncatngcggnggaattcccctgaaatacaacacctacttcagcagcccccagatcttcaaccagaaaacactgaaccttttaaccagcaaattttacaaatgtcatatcaagatattagatcagaagttatggaagagaccaaagaatggaaatctgaggaggaactccatagaagaaaatcctcaagacggcattccttaaaccagcaaaccaaagccttgcaatacttaaggagacattctttagacgtgcaagccaaaggctagaaatcctcaaagaggcattccttagatcagcaaagcaaaggctggcaatctccaaagcagaaatccttagaccagcaaatcaaagactggctatccccaaagaggcactccgtagataagcaagctcaacttaatcaaactaaagagcaactcccagatcagcaagctgaag

SEQ ID NO: 12697 - DNA, 492 bp, Homo sapiens
  misc_feature (1)...(492): n = A,T,C or G
agcgaatgatacctacctaaactctccgacangccgnggaanncgngaagaanattgngaaatttttattaaaggataggatataaagcacttggtggatagttcagagataccatgtttgcaaataaggaaatttatgatcaaattacctgtcttaacatagaaatcgatgttaattctaatacaaatctctggaaggctttagggaaatagagataaaataattgtaaagttcaaattgaatgataactgagaattgcaagaaaaaaattgaacaataatagttagggcagacttgtcaaatgatagaatcttctataaagtattgtaatcaaaacaatatagaactgacacagaattaaactgatacatcactgaaacagactaaagactccagaaagcaatgccagtgtatttgggaacttaataggataaaaagaacagttcaattcagaggtaaatgatagtgttgtttaataatgctacccgtat

SEQ ID NO: 12698 - DNA, 475 bp, Homo sapiens
  misc_feature (1)...(475): n = A,T,C or G
catggacgcccctngnnnattgcagtccctagtccatgtcgtggaattcgaaatagatacaacaaagaaggacttcagggagctctgaaatactgtatcaaaataaatgcaataaaaagtaacactgaagaatataaaataattgatagttaatagataaacttgatctgatcttaaatgtatctgaaaaggataatgagatggaaactaagaaagaacagatatgaatatcagaggatggaggtccagtgtgagaattaaaggtgtctctaaggaaggtgaaagaacatttggcatagaatcaatgatcaaagacattaagaaactttctctgagttaaaagtatatggtcactaagttttaggcaaaaccagtattaaagcaaccttagaaacaggttagaaagaagcaattaaaagcatgcagaaagaaaaattctggttatctgcaaaaccaaaaagggagggtggatacc

SEQ ID NO: 12699 - DNA, 447 bp, Homo sapiens
  misc_feature (1)...(447): n = A,T,C or G
nttcgcactgatagcataggccangcggnggaattcgttgacttcaataattggaaagactgggaagatgattcagatgaagacatgtctatttttgatcgtttctctgagatgatgaataacatgggtggtgatgaggatgtagatttaccagaagtagatggagcagatgatgattcacaagacagtgatgatgaaaaaatgccagatctgcagtaaggaatattgtcatcacctgggttttgagaaagaaaaataacttctctgcaagatttcatgattgagagaattcctgagttgatctaaaagcagatgctgtagctgcctactttaacccatttttcaacctgtttgttttttaaagggcttcactaagggttgatatgtaccattgtagggggcaattttaagtcagctaaggcaataaccttatgcatgaacatttcn

SEQ ID NO: 12700 - DNA, 473 bp, Homo sapiens
  misc_feature (1)...(473): n = A,T,C or G
atttgagacccctggagacactaggaagngcggnggaattcggctggagcagcctctgggatgggggtgtcctgttgagcagcctccccagcctccacccgttacttggcaggggcacccccagtggtgacaactaaaaatatctccagacatcaccaggggcccccaccagaggcagagccgctcccagctgagaacccagcacctggtcctgtgcgcctggtcttccgcacctgttttgccatgaggttgctgaggtgcagaggcgaagcagcttgcccagctgaccgagcgcctggtgtcagagtcgaactgctcttctcctcagctggagccttggcgggcgcctctgctccggccccttggggtgacctggcttcctgccctcaggtcctctccacccggatcctggccatgaaggcctcgctctgcaagctgtcgccctgcacggtgacccgcgtgtgcgactaccn

SEQ ID NO: 12701 - DNA, 561 bp, Homo sapiens
  misc_feature (1)...(561): n = A,T,C or G
gttcgaaaattgaatnacccatccagcgnggngcaantcgctgngattataggcatgagctactgtgccgggcctgataaaacctattgttagtgaaactcttgctcttctacatatttccaatttttagccacaataaacaaaaatatgttaaaatagaatcaatagaataggattttgtatattattaaatatatgatgaaaatgaatggtggtaatctaggatgaggaccaaatttcaaacttggataagcagagctatgaggataatgaggccagtcttggtcctgctgggtttgagccacctgtggaatacttagttcatatagtatttggaagactaattactgcacttcttgttatagactgatttaccctcctccctgctgcatatgttgaagtccttgaaaatatgactgcatttagagttagggtcgttaaagatataaaatgaagttattgaggtgggtctgaatccaatctgactggtgtccttataagtaaagaagactggacacacacacagagaanagataatgtgaagacacagggagaagacag

SEQ ID NO: 12702 - DNA, 444 bp, Homo sapiens
  misc_feature (1)...(444): n = A,T,C or G
cttcgacacccgaggacactagcacagngcggnggaattcattctaaaaatcttttgaaatatataattcaaacaccacttccataatatttcaatgcatgtttgttagttttaaataattaggtttgccataaatgaaacaaaattcattaaaggaaaaagtaggactttaaaaggagtgatgaattattttgtaaaattcagcaaaatatacaacactttagtttaataggcatttgtatacataacaatataccattttaatataattttcccatcaaggtggtattagctctgtgtgttagaaaatgcctgtttcattgtcacatgaagaatttcaaaaataataaaattttcatattaggaggaaatatctttgaagaataacaaacacaaatgtgaaaatccaagtaaatgcctataaaatcttatatgaggtaaaan

SEQ ID NO: 12703 - DNA, 469 bp, Homo sapiens
  misc_feature (1)...(469): n = A,T,C or G
agtgggaaatnnntttcgacgacccnagnctagtggatccactatccgtgtggtggaattcatctgataaaggaggtagttggaatatggtttatatcagttggtttgcattcgaaaagtgcatttgtgggcaagttgctgtatctctaggagaggcaggccctccaggattagcaaaacctcagatgttaaagcatgcagaaaataaaagacatggttcaaatagttccctaacaagcagttgtgcaatgctgctctgaatggaaatccaacctcacagtttcccatctagaaagaattttaaactctctattctgtcttccacatacacgttccctcccactgttatagcatctgagaatctgcttgagctctggatcttcatccaatctcctgattaagatttcaaactggccgggtgcagtggctcgcgcctgtaatcccagcactttgggaggctgaggcgtgg

SEQ ID NO: 12704 - DNA, 466 bp, Homo sapiens
  misc_feature (1)...(466): n = A,T,C or G
tgggganatnnnttcgtcgaccactagtctagtgtggcggaattcgatccccaggattcaccgaacaaatggattaagcacccactgagtgcctagcatgtgcctggacaccaggccaccgggaagatgctccccctttgacttgtctatgacatgctatgtctctcaccagatcccttcctggaggtcgggcttctgtaacatggctctgcccccaaaataaaattttcaccgcgagtcagggatcggcaaacattttctgtaaagagccagaaagtagatattttaagtcataaggtccctgttaacaactacttgactctgccattgtagcacaaagggcagccacagacaaaacaagcaagtagtcatgtctgtgttccaataagactttatttacaaaaacagcaggcacagacaagatttggcccacaggcatagattcccaactcatggtggtgaaaga

SEQ ID NO: 12705 - DNA, 588 bp, Homo sapiens
  misc_feature (1)...(588): n = A,T,C or G
cgcccacgcccccnnnnnnttttgaaaccttccgaacactagtccgtgtggtggaattccaggcggctctcggtggcagtgagcatgcgctccggctccaccacgaacatgtagtagaggttccacatcagcatcgacagcagtggcagaaacgtcaggccgtagccgaagcctcggaaggagcggcccacggcaaaggtcagccagtagatcagcctatgggggcaagaaaagggtcaggctactctcgagggaagcgcgtcagctgattggcaataggctgacggtggggggagtagataggggaggcagatgcagttggtgggtatggctggtacttccaaatacagccaaagtttatgcacttaacatgtattaggcacagcgctaattactataagtgattgatttgacttccccacatctttatgaagntgagtatgttattcctttccctcttttatttacttttcgagttatntntatttttttagagacatggtcttgctatgttgccagtctgggctcanacttnctggccttgagtgagtctctcacctcaaactcctgagtaggctggattacaan

SEQ ID NO: 12706 - DNA, 492 bp, Homo sapiens
  misc_feature (1)...(492): n = A,T,C or G
agcatgccnncnnnaatagagatcgtgagccgtgngcaggaanccgacattnttagaaaaaaagtggtcctctttgaaaggaaaaagtacgtgattccagttactgatagtctactgaaggaaatgataatttagaaacctgaccttgcttcttcacaggccaactggtctcttatgtgtcattagccaagttcaaattcttcttgcttttaaaaaaatctttttttttttcagtttgcaaaagtccatattatggccaaaaaaaaaggagacattttgaaatttaaaaagagaaaatccctttaatccctcccacctcaaaaaaaatcactttaaagggttggatttatttttttagggcctatatattttctcacatacataatttttattataggttaattacattaacggctcttttacaggagggggataccataaatccggcttaaaattggttggttattttcatttaacaaatatcttgaacan

SEQ ID NO: 12707 - DNA, 557 bp, Homo sapiens
  misc_feature (1)...(557): n = A,T,C or G
ttccttcgcgnttggnnnnnccatcctgagggctggtatcaaatttaactcatctcctatcctcagtgcctcgtacaagatgctttatgtaggatgagttcagaagctcaaactgaggcagaatcacagcgatttggaaaatggtccaatcagctatagtggaagagcagaatcattgaatataaaacatggagatgtcagcagcaggggctgtgagctgaacagcttcactgggaagaggatatgggtgagaaggtacagcaatgggtacctccattaacaggtaagctggatcctccataggaataggcactagctggttttggatgaaggtgtcgtaagatcagatacacttttgggtgatcagcatgatctgggtatggacatggcagagcaggtggaagggaagggaccaatatgtgtcaataaccatctatgagccaggcacttaccgggaagtataatgtctttgtagttagacagaccagtagtgtctgttgctctggaggaaagtacttatactcaccaagactcagttttctcttgattaaaatgan

SEQ ID NO: 12708 - DNA, 565 bp, Homo sapiens
  misc_feature (1)...(565): n = A,T,C or G
gcncccccnnaatcgaacacattgagnggcagtaagtgcgccgcnacagctggccacgaaagccgccaggaaaagcgctccctctaccggcggngtgaagaagcctcatcgctacaggtaggtcgggcggnggaacaatggcccggcggtggccggctttgtgcggcagcgtccgctcactcctcccctgctcgctgcaggcccgggaccgtggcgcttcgagagattcgtcgttatcagaagtcgaccgagctgctcatccggaagctgcccttccagaggttggtgagggagatcgcgcaggatttcaaaaccgacctgaggtttcagagcgcagccatcggtgcgctgcaggtaagacaaaggcctggagccgggggagggctgggcgcgttccgctccccgagtgggattaatagtgcggctctcgtcctcaacaggaggctagcgaagcgtacctggtgngtctgttcgaagataccaacctgtgtgccatcacgctaagagagcaccatcatgcccaagacantcagtggctcgccgatatgggagagagagctagtgg

SEQ ID NO: 12709 - DNA, 562 bp, Homo sapiens
  misc_feature (1)...(562): n = A,T,C or G
gattcggactactagtccangtggnggaattccgtgggcgcacacacagagacatgatcccagccttgcagtgtgcagagcaggtgggaggaaaatccactcattcctgttcccctccttgcacctgctccagagccccctgggtctgaaatagaggctggagaggaggactgtgagtccagaggagggagagtgatggtatcccacacacaagccagcgtgtctaggactcctatctgaagacactgcagagaaattacaaagaggaagaaagtaacttttcctggcttcctccactttaatcaagtgatcaaagttaacatcactgcaacggtaatgggatgatgaagccaagctgggagcaggggtgcactgagaacagacgccgcttctgcggtatccctgccagaaagcctcaacctgaacctaatcatgaggaaacatcaggccaacccaaactaagggacaacctacacattanacgtcttggaatctccgaaagtgacaaggtcatgaaaatcaaggaaaggctgaggagctttccagaactgaggcagcaaan

SEQ ID NO: 12710 - DNA, 447 bp, Homo sapiens
  misc_feature (1)...(447): n = A,T,C or G
atcggactgatnacattaggccangcggtggaattcctgcttcatactttggagcttattaagatcaattttgataaccatgtaatttcttataaccatggcaggtagtattgtgctttaaaaaccagaggctcctgaaagtcgtttacaccaggtgcattgataccatggctgtagctgatgcaactaacaagtactggggccagtgatcacaatccagggttggaaacaggagtgaagcccaccagcctgcctggttgatggacagcaggctctgccttctggaggcggcttatatcccaacagcctgaggcagggctctgtggcccaggccggcagtggctgcctctcttggttctgcatggtacattttgccaaccctgaggaccagttcttggggttccaggcctcggccttcctgctccacgtgctcaagcccccacaggg

SEQ ID NO: 12711 - DNA, 457 bp, Homo sapiens
  misc_feature (1)...(457): n = A,T,C or G
aatcgtgagcgtaaactaggccangncgnggaanncggggtactattggttctgttttagagatcaaaaaattgaggtctagagtaactcacttacatttatgtacatagcaaggttgggctgtgaagtcatgcagagagacatgagtccatatgtggcccatgtaaacgtttatttttttgagacagagtctcgctctgtcgcccaggctggagtgcagtggtagtggcagtggcgttatcttatctcactgcaacctccacctccccagctcaagtgattctcctgcctcagcctcccgaatagctgggattgtaggtgcccgccaccacgcctggctaatttttgtatatttagtagagacggggtttcaccatgtagaccaggctggtctcaaactcctgacccaagtgatccacccgcattggcctcccaaacggtggggattacaggcatg

SEQ ID NO: 12712 - DNA, 466 bp, Homo sapiens
  misc_feature (1)...(466): n = A,T,C or G
nttgtagactagaggaccctgtggcgagagtggtggaattcgcagaaaccaggttgacagacaacagggaaatccagacagacatttccatcagatgatcatcagacatgaagaaatgcccacttttgaccagcatgcatcccttactttttatcagaaaattcatactagagaaaaaccttttgggtataataaatgtagaaaagacttctggcaaaaggaactccttattaatcatcaaggaatttatactaatgagaaaccctataaatgtaaggaatgtgggaaggcctttaaatatggctcacgactaattcaacatgagaatattcattctggtaagaaaccatatgaatgtaaggaatgtggaaaggccttcaattctggttcaaattttatacaacatcagagagttcatactggtgagaaaccgtatgaatgtaaagattgtgagaaggccttcagn

SEQ ID NO: 12713 - DNA, 572 bp, Homo sapiens
  misc_feature (1)...(572): n = A,T,C or G
ctacctagtctaccctcccatttccttaactcatacggtancatcctactgngtttcttgctcgatatctctattacttattctataacccacacaggaccgggcggnnnnnttttgattcatcgcatgnggcggaaccntgcngcaccaagagacaaactctnnngacgcaaggagagcgggaaaaagaanaagcgctgtgatcatgccaccttctgtgtcatataaccaaaagaagaccgcctgctatggcaagatggcctaattttattcctgcctcatactatcatggataatcgttttcctttctctagcaggtttgtgtcactgggagtactgggagcattatcctgtgttgtgctggggttataccaagcagcgttaactttatttaaagaattcaggcagaaagattagagaatttaagtagcaattgtatatggtaagcaatacagtaaccttaataaaaattaatgatggccgggtacggtggctcacgcctgtaatcccagcactttgggaggccgaggcgggcggatcacaaggccaggagaacgagaccatcctggctg

SEQ ID NO: 12714 - DNA, 464 bp, Homo sapiens
  misc_feature (1)...(464): n = A,T,C or G
atcgacatcgatcccatgngcangngcnggaantcgtattgaactcctggactcaagcaatctgcccgcctcagcctcccaaagtgctgggattgcatgggttagccaccacacctggccagaaacgtaatctttagaagtatttgaattagaatgattcattgcaatgtaattaaatatccagacttctgctgaattgcagttattagaggaacaagaatattagatctggtctgaagatttgggaggaaaaaaaagaatattagatctgagaaatgttgagttttttctagttcctgtaggatttttaagttttgaatttttccttcaaaaatcattttcatccagccattgtatctacttcacttcatttgaactagagtatatgtggagttcagtttctcataaggaaaatcacagctaaaggaatgaatttttctctcattattttaggcatttgctag

SEQ ID NO: 12715 - DNA, 442 bp, Homo sapiens
  misc_feature (1)...(442): n = A,T,C or G
natgaggctgagaccctaggcagngcggnggaattcggntaacgccggccttcagtgagtgcagccagggatgctgcacactgcagggctcgggactgtccccatcccccacaacagggacctccctggtccgaagcatcagcagtgccactacggagaggctgtgggttcaatcccggaatcctgctgtttttgtgggtcaaaacgataaaataccagcagtgtcataggattcgacctaatacatgttgaatcttgatcaatgttagctattattggaaaatttggctttctctttcaaaaacgtttataaataactttccctaaaaccatatgatggttctcccctttcagtgtctcctttctattcggagcggctgaaggaggctcatgtcagactgtacccatccagccgctgcacatcacaacatttacttaacag

SEQ ID NO: 12716 - DNA, 451 bp, Homo sapiens
  misc_feature (1)...(451): n = A,T,C or G
nattgtagtgcactagcccagngcggnggaattcctatttatcatgctgatgttagaagcagcagtcatccagccacagagggagctaaagttaactaaccagaactgtagaaatcattatacatgcctttgacaacaaaggaagttcataagaaaagccatgtcggcttttcctctactagatacagattggaggtagatgaatatttgccaaatggaaaaaaagacaatgctagtcagaaaagacaaactgttttccagcttctcaaaaagccatggagagtagaaaccaaaaccaacagggaaataaaaaaccttgaaagtctcactttctagttgtcccatgcaggggttgaaatttgattccaagcggaaagtatattatgttttttcaggccttcacatctagagagatggataacttccaatttgatttttcaggtaatagaga

SEQ ID NO: 12717 - DNA, 576 bp, Homo sapiens
  misc_feature (1)...(576): n = A,T,C or G
agaccggannnnnnnaaatcgaacacattgagtggcagtaagtgaactctaagcatgtagctttatgaataacatttattgtgtttttcttttattgtaaacagaacacattctcatggtagataatttggaaaatacaagagtttaaaaagaagaaaataaaaatcaccagtaatccaaccaccttggagaataccgctgtattaacgttatgcagcttttagatggcttaagccgtggataaaccgaggctatctagactagaggaatggatgggcttgacacagtcttccatcaataccactgtcctcaacgggttctgacaagaaaagagctgcacatgtctttaggttattgctactggctaggtccagaattgcatttattttgtgctgtttgaaggtgaatttgtatgctttcaagatcagatgaataggttggcaacttggctagcctcttgtgaaaatgaggtgcctgtctgaaatattgcctggcagaaagtnntcactttncacttctgagagctgagagcacnaccagggtgttctgctctctttcattgagggtgatgctaga

SEQ ID NO: 12718 - DNA, 466 bp, Homo sapiens
  misc_feature (1)...(466): n = A,T,C or G
aggcgcggggcttccccatagatagcctatcnagtgnggnggaattctacctgaggaaatactttaatatttccagtgagaaggcaccttaagggagtctctaaccgctcaaaatgtggtctatagagggacagcctgggcatcatctgggagcttgttgaaaatgctcaatcttaggctccagcccataagtgctgatgtagatctgaattttaataagatcccttcttgtttcacgagcaaggtaaagtttgagaagcaggggtcgggcgcggtggctcacgcctgtaatcccagcactttgggaggccgaggcaggtggatcacgaggtcaggagatcgagagcatcctggctaacacggtgaaaccccgtctctactaaaaaatacaaaaaattggccgggcgtggtggtgggtgcctgtggtcccagctactcaggaggctgaggcaggagaatggcgtgg

SEQ ID NO: 12719 - DNA, 561 bp, Homo sapiens
  misc_feature (1)...(561): n = A,T,C or G
gttcgaatccgatcactagtccagcgtggtgcaattccggataccaccagtgccagcctgacctcacaagagacgtcttgtgtgactggccctgccgtcacagctgggccagtaaagtaccttccaggaggctccagttgctacctgactcacaaccttctaatcccatgatcttttagttctagtttccttatcttggtctgagcaaatggctcattttaaagatgacttgcagacaaatgtagagatcatcccaggggaaagtgccccaagaaaggagagtccaagaccacctgcccctcccagttctgcggctggagtgggtgggtgcagcaaccacagccccagtgtacaggagtcaccactgtctcctcccgcattggcccagcttggaagtgcacagcaaccaagcatgaggactgagttaagcttttcggagaanaaagacactatgatcatctggcagatcacgatcactgtttggtgccagaggtaaggagtttgctttgtgtgtttgcttggaggcgacagttggcaatgacagcctgggagacgcaccgg

SEQ ID NO: 12720 - DNA, 554 bp, Homo sapiens
  misc_feature (1)...(554): n = A,T,C or G
attcgaatccagtccaagtggnggaattccggacccgtcacatcctggtccctcctcttcccccacccccacatccgactggcactccctttgggcagctccatccggtggtgtcctctctgagtcccagggcctgcatcgggtggtgtcctctctgagtcccagggcctggcactcagcaggccctggggacatcaaccaggggcccttgaagctgtgtccctggacacagtttccctgccccaagccctggcacattcggcccaggcttggcaaaaactccttgtcctccaaggactcggctgcaccagccactcaaataaattgatgttcccatctctgctgactcatggatgagaacatcggggctcctgccaatggccacacacacccccagccccaccagggaatagccctgcaccctgcagggacaatgtcatgagcctgagaagccaccagcttcccctactccgtgagcaccanactccagcctgcttgagctgttgnggccccctgccttgcactgttcctaataaagctgggatcttgttgag

SEQ ID NO: 12721 - DNA, 543 bp, Homo sapiens
  misc_feature (1)...(543): n = A,T,C or G
ngtcgatcacagtccgtgtggtggaattctaaaggtgttttcattttcctgttcttacctattattgtatagagctattcatgccattttttgggaaaactttaaaaattgccccaaatactgacattgagtgcattaaataacaaattatctttgatacattaaacttttattcttcatgcatctgtaatttaattttaagtataatgttttgcctttggtacaactaaattaaaactcttggtggtcacatattgtatataaacaaaacaatatgctttgttgaaggaaaattttctttattggaatgtggttgtaatccttgttcagttcttaagtttcggttttttttaaaaacaggatgcaacttaaacttttctttgcatcaaggtatatgcaaaacattggtgccgtgcatcaccaaatgaaagtttgtatttaacgaggaggtgctttacactgtactttttggtgtttttggaaaagtacatttagatctattctgaaagctgtcattttaacanataaaatggtacaggttta

SEQ ID NO: 12722 - DNA, 471 bp, Homo sapiens
  misc_feature (1)...(471): n = A,T,C or G
gggcgggcaccggagtgccccaactgagaccaactganangtaatgacangcggcggaantcctgaacatgggtgccttggctaaatgtgcccaggagtgagtgggaaatctcactgagcaattttgagtggaaattacttgtctaaaatcagcttgaccctgaagcctgagaatgatgcatgtggttaggagaaaccagaggctgagtgcatgggcttgtctccttgtagagggcttagtttgggctgatataacaaaagaccttcgaaatttattgctcagagttctggaggctgggaagtctcaaatcaaagcatcggcagattcagggtctggcaaaggctcactttctgctttataggcacagccggtgccttctagctatgtcctcgcatggcagaaggggcaagcaagctcctttgagccactttaataagggcactaatcccattcataagggtggagccctc

SEQ ID NO: 12723 - DNA, 433 bp, Homo sapiens
cccaatgatatggaaaaagtccaatgtattaaatttataaagcagcaataaatagtaaaatagtagtagtaaatagtaaaatagtggtatgctcataattgttttcccaagtacttttaaataggacaaaaatactgaaagaataaagaccaaatatttatattatataatggttacctttcagtagtggcattaggatttttaacatttttttctttatccttttctttattttccttatgctttgctgtagtttccaactttttttttttttttaaccggggttaaaaagaaccaaaattgggttaaggaacggatttttttatagagggttttttggcccattttttaacccggaaaattaaccctgaaaaggggtggaattggaaaagccccaaaaaaaccccggaaattaaaataaggggttatctcc

SEQ ID NO: 12724 - DNA, 443 bp, Homo sapiens
  misc_feature (1)...(443): n = A,T,C or G
atcgacaatcgatgaccctctgtccagngcggtggaattcaaactttcagtgcactgagaatttagctgaaatgacactgtggttttattgacatctgaaagttgctggcatttggtgactttctgcgacagaaaatttacaatatttcctccctgtctctctcctttccttctctgcttcctttttcattcagccactagtggaaatgcccagtgttttccaggccctgggggactcgaagatctcatgggtgtggtcctcccctcaaagaaggggcaggtgagccgcagggctagtccagagactggtcaccagcatggacgggatgccgatcagggcagagctgctgtggagggaggaccttgagcacgggctacagcctggtagagtactggccgaacagggaagacagacatctttttgtttggagcacagggtttaa

SEQ ID NO: 12725 - DNA, 562 bp, Homo sapiens
  misc_feature (1)...(562): n = A,T,C or G
gttcgaaattcggattactattccagcgnggngcaattcgatttgatggcgtgatgtctcacagaaagttctccgctcccagacatgggtccctcggcttcctgcctcttaagcgcagcagcaggcatcgtgggaaggtgaagagcttgcctaaggatgacccgtccaagccggtccacctcacagccttcctgggatacaaggctggcatgactcacatcgtgcgggaagtcgacaggccgggatccaaggtgaacaagaaggaggtggtggaggctgtgaccattgtagagacaccacccatggtggttgtgggcattgtgggctacgtggaaacccctcgaggcctccggaccttcaagactgtctttgctgagcacatcagtgatgaatgcaagaggcgtttctataagaattggcataaatctaagaagaaggcctttaccaagtactgcaagaaatggcaggatgaggatggcangaagcagctggagaaggacttcagcagcatgaagaagtactggcaagtcatccgtgtattgcccacacccagatgcgcctg

SEQ ID NO: 12726 - DNA, 452 bp, Homo sapiens
  misc_feature (1)...(452): n = A,T,C or G
ctttggtgcctacgcaccgcggggcattcgnngaaaccctgtatccctctgaaacactggaagagctagtaaattgtaaatgaaagaatactgtgttcctcttgactgttatttttcttagtagggggcctttggaaggcactgtgaatttgctattttgatgtagtgttacaagatggaaaattgattcctctgactttgctattgatgtagtgtgatagaaaattcacccctctgaactggctccttcccagtcaaggttatctggtttgattgtataatttgcaccaagaagttaaaatgttttatgactctctgttctgctgacaggcagagagtcacattgtgtaatttaatttcagtcagtcaatagatggcatccctcatcagggttgccagatggtgataacagtgtaaggccttgggtctaaggcatccacgactggaaggga

SEQ ID NO: 12727 - DNA, 457 bp, Homo sapiens
  misc_feature (1)...(457): n = A,T,C or G
gcgggnnnaatcgcgttccactagcccagtgcggtggaattcgaccgaggtcagggccaaaactggaaccaaggatttaataactattatgatcaaggatatggaaattacaatagtgcctatggtggtgatcaaaactatagtggctatggcggatatgattatactgggtataactatgggaactatggatatggacagggatatgcagactacagtggccaacagagcacttatggcaaggcatctcgagggggtggcaatcaccaaaacaattaccagccatactaaaggagaacattggagaaaacaggaggagatgttaaagtaacccatcttgcaggacgacattgaagattggtcttctgttgatctaagatgattattttgtaaaagactttctagtgtacaagacaccattgtgtccaactgtatatagctgccaattagttntctt

SEQ ID NO: 12728 - DNA, 491 bp, Homo sapiens
  misc_feature (1)...(491): n = A,T,C or G
cgtaagacaggccggccngnnaaaatggagactganagctacgcacangcggnggaantcaactgtctaaaaatttttctcttacgtttaacatacaatcatgtgaaatttaggcagagttcgataaattactggcaaaaacaaaactcttttataaagattttctaatgttgactttaatactctaacatggtacaaaccaaatggtaaaatcccaagtcatttcttttttcatctctatttagcaacagaattaagtggatgaagatattctactatgcattaaatcttgaactttataaaacatgtacaaaaattgtacaagataagttccacctggtaatgtctttccctaatacagggttgcgcttgcattggaccctagggatttgcactaaaattatatcaaggtctcagatgagcttagtgcacaagcactatcactttaaatactattatttgctaccacagcaactatatatttccatagg

SEQ ID NO: 12729 - DNA, 457 bp, Homo sapiens
  misc_feature (1)...(457): n = A,T,C or G
gcgggnnaattgagtacgattagcccagngcggnggaattcggcgtcccccatggacgacgggtttgtgagcctggactcgccctcctatgtcctgtacagggacagagcagaatgggctgatatagatccggtgccgcagaatgatggccccaatcccgtggtccagatcatttatagtgacaaatttagagatgtttatgattacttccgagctgtcctgcagcgtgatgaaagaagtgaacgagcttttaagctaacccgggatgctattgagttaaatgcagccaattatacagtgtggcatttccggagagttcttttgaagtcacttcagaaggatctacatgaggaaatgaactacatcactgcaataattgaggagcagcccaaaaactatcaagtttggcatcataagcgagtattagtggaatggctaagagatacatctcacgagc

SEQ ID NO: 12730 - DNA, 556 bp, Homo sapiens
  misc_feature (1)...(556): n = A,T,C or G
gttcggattcgaacactacctccgcgnggngcaattcccttatactcctccttttgatcattcagccttttgttttagtttggtgagttttaagaaatttcaccagcatagttgttattcagtgggcacgatggactccaaatgcctcaagttatgtatacctgtcccagatgtaaacttcattgtcctttgatggatgatattttaaatggatataaaataaattggtctaaagggctgccctccttgttgtgtttttaaattttagataaaaactgctacagcttatgactttgtactttaagataattgcattgatcttttttcagattccttgtattttttaataaagtaatcttatataaaactcagataggttaagtgttagaaattttaaacagcttacattgttagcgtaaagctatcttttcttttttcctactcagagttcttgaccctttggttattgagtttaaagacttcaattgaattcgatagtatttatttttgaaaaaaatcactaaactgtgcctaaagaacataacttgcatattaa

SEQ ID NO: 12731 - DNA, 492 bp, Homo sapiens
  misc_feature (1)...(492): n = A,T,C or G
ngannnnnnnnnagggcggggnccaggggngatgaattcagcnangctttgcagtnagcatnagnaannacgnnnggagnantganannggggagggaggggatngntnccgggaccccgngcgcaactggcgcctccgagnccacctgcaaagaaggacatcaagcagctttcttcattatcagcctgctgccgagctcgggaaggacctcatagacttggccacttttaggcctcagccaactgccagtggacaccgcccagaggaagacgaagaggaggagattgtgattgggtggcaggagaagctctttagccagtttgaagtagatctgtaccaaaatgaaacagcctgtcagagtcctttggattatcagtaccgtcaggagatcctgaagctggagaattcgggtggcaagaaaaaccgacgaatctttacctacactgactctgatagatacaccaatttggaggagcactgtcagagaatgg

SEQ ID NO: 12732 - DNA, 462 bp, Homo sapiens
catcgacgacccttggacagctggtggaattcgtttcttataaaagttgaaagaatgttgcttgtgggaggtaattcttgcagcccgggttttacagggagggagtcctgctaaccagatcccaactcctgggaatgctccatttggtaataataacagcaaagagtgtattgtgtgccaagcactaagctctttgaaggtagtagctcactgattcctcacaacaaccctggaaagtaagtgctgttatcagccccattttacagatgaagaaactgcagagccctccttccttaggctcctccctggagcttccagctggagagggagggggagcattctggaggtcacagggtcactccctgagaagaccatgctggaggataagacagaaggcatgcagccccaatccccaacctccagagaccgcacccactagggatctagaaacccagagcttta

SEQ ID NO: 12733 - DNA, 484 bp, Homo sapiens
ttttgagacatatccaggtgggtagatacccagtctcgctctttcgcccaggctggactgcagtggcgctatcttggctcactgcaagctccgcttcctgggttcacgccgttctcctgcctcagcctcctgagtagctgggactacaggcgcccgccactgcgcccggctaatttttttttgtgttttttgtagagatggggtttcaccgtgttagccatgatggtcttgatctcctgacctcatgatccacccgcctcggcctcccaaagtgctggaattacaggcgtgagccatcgcgcccggcctcattcttaaacccaatggggacttggtagaatttgaaagctttcttgtgcgctgtttcatgagtatgtccaggaagtccccaggcacagtgggccctcagaggactctctacggaagctgtcttcataacaagggaacctcaggggtgaaccagagttgtcatggcctcagcccc

SEQ ID NO: 12734 - DNA, 418 bp, Homo sapiens
ctggcctcccagagtgctgggattacaggtgtgagccaccatgctctgccaattattttaaattactaggattaaagtatattatgtatgtctttaacttctttctttcccattgataaactggcacccttcttttaagtacctgctctcccattaccacctatttccagctgctttttgaggttttttgcttgcctgtctcttgcttccttcttaacctctaccacttaagagagtttgttataatcaaatttgacttcctagcctgtggataatttactattaagtaaattattaccacagggagccagtgaggtcccagtagtctaaaacagttcatgtgttcacaaaaattgcctccccggcagagattatgcagtaagataatttaactgaataatactatgtgcatgtatct

SEQ ID NO: 12735 - DNA, 459 bp, Homo sapiens
  misc_feature (1)...(459): n = A,T,C or G
ntttgaactgagtatcactaggccanngcgnggaattccggagatgcctgcaagagggggacaagagtcatttgcaggaccttctgagcaggtgggggacagcgaaggacaagaggaggctgtgcctgtgcggctgtgtcccggcacaggtgccgcttcatgcccacgccaccacatcctcactgggtggcttcgggaccctttagggttgcacatggcagaaacttaatccacaccaacttcagcgaagaaggaatgtactggctccagtcagtgaaaagtccaggaggagccatgccttcaggcacggctgcatccaggcactcaacaggtgtatccaggcactcaacaggtgcagccaacaccttgccccgcaggctgtcagctcctgccttctgctgcgtccacgtcactgtaggtggatttctctgcacatgggtgtcctacgggcctgatgga

SEQ ID NO: 12736 - DNA, 487 bp, Homo sapiens
  misc_feature (1)...(487): n = A,T,C or G
cggcccgcaatagaagaccactaggccaatggagagctattcgcaggcactcagaatggtccagcgtttgacataccgacgtaggctttcctacaatacagcctctaacaaaactaggctgtcccgaacccctggtaatagaattgtttacctttataccaagaaggttgggaaagcaccaaaatctgcatgtggtgtgtgcccaggcagacttcgaggggttcgtgctgtaagacctaaagttcttatgagattgtccaaaacaaagaaacatgtcagcagggcctatggtggttccatgtgtgctaaatgtgttcgtgacaggatcaagcgtgctttccttatcgaggagcagaaaatcgttgtgaaagtgttgaaggcacaagcacagagtcagaaagctaaataaaaaaatgaaacttttttgagtaataaaaatgaaaagacgctgtnnnnnnnnnnnnnnnnnnnnnnnnnnnnnnnnnnn

SEQ ID NO: 12737 - DNA, 490 bp, Homo sapiens
  misc_feature (1)...(490): n = A,T,C or G
tttgagatcctgnnaggncgngactgagaccctagtacanngcggggaattcgtgagttcccatattttttaatggtttacaattcattacttaattatttttgaagttcaattggtttggctggtgggatcccttcaagctggttcctgtgcccttgtatcatgttcccatcatttttgtggagagcgctttgttaatttccagcaaaacaaagtgctctacgcttatcttgaacttacatgtctgatatcatttggatatctgtcccctccaagtctcatgttgaaatttcacccccagtgttgcaggtggggcctagtgggaggtgtctggttcatgaggacagatcccttatgaatggcttggtgccgtcctcgacagatcccttatgaatggcttggtgccgtcctcgacagatcccttatgaatagcttggtgccgtcctggacagatcccttatgaatggcttggtgccgtcctggacagatn

SEQ ID NO: 12738 - DNA, 492 bp, Homo sapiens
  misc_feature (1)...(492): n = A,T,C or G
ttttgagaccctagtccagngnggngatagatgccctcttcctcttctaacctgctttctgaggcttctgctcttcacctcctgctcgctgatggaaacctccagggcaaagctgaaggtttcttggggaagccaggaaagccagtatttcctatgtgtcagatctgcttggcttccaagaagggatgcatgggctttttggccagtgtttccaggaggctctgggcttcctgcttcttccccgcttcccccagagttcacagatgttgaagtttctgaaggttgacgtcactggaagtctgaccacaaacaagttggctgttactgtatttgaaacccagtacctttggcagctcacctctaaccagtaaaataagaggattccatggtttcnnaannnanannnnnnnnnnnnnnnnnnnnnnnnnnanaaaaaaaaaaaaaaaaaaaaaaaaannnnnnnnnnggggggggggggtggggggggggggg

SEQ ID NO: 12739 - DNA, 465 bp, Homo sapiens
  misc_feature (1)...(465): n = A,T,C or G
aggacactgagaccactagnnnaactggggtcatcgtcacgngcggagaaaatcatctgtgcttagtttgaatgacaggaggatgaagaggaaaaattaaagttaagtcttctgagtcaatccagccactctgcttctttacccaagaaaccccatcttctctctccctaaatccaactagtgttttttcatcaaaccccggattatctagggtatcaagaagccaagcaaaacactagtttctagaggtattccaccaatgaaaattagttaggaagtatgatctaaaaaccaaagccattttatcagaattgggggaattaaacattaaaccctatatacttttaagctatcttgtcttactctttttaggctaaaaacctgaaaggaaaccatttctattacagcgagaataattcacccttagaagtccagntttcttccttttttgaaataatattggtt

SEQ ID NO: 12740 - DNA, 478 bp, Homo sapiens
  misc_feature (1)...(478): n = A,T,C or G
tgggtggccnggggtnnnngnnnaattgagaccattagnccaatgagtgctattcggctgaggcaggaggatcacttgagctcagggggtccgaggcagcctggaaaacagaggaagaccctgtctcaaaataaataaatatttactttaatacctaagggatgtcaaaaattgtataagcccctacaactccaattagcccctcaggaacacaaatgtttctcttttccttgctccacagccttttctggctctccagtgctctcaatgacccaaactgaacggctgtctgcagagaactgcatttcccatcgaccttttcgctcgatatttacattttaaaaaatgttttgtagcgatggagatctcgctgttgcccgggctggtctcgaactcctgggctcaagcgatcctctgccttcctaagtgctgagattacagggcgtaagccactgagcctggggctaattaaaaaaan

SEQ ID NO: 12741 - DNA, 458 bp, Homo sapiens
aggggacttaaaattgtagacactagttcgagcgccgtaattcgttaaatggacagcctttgtcaagactgaaaattctcatgctgcgcaaagtgctcgaataccatctgatgtcaaggtatataatcttactcatctgaatccatcaactgagtataaaatttgtattgatattcccaccatctatcagaaaaacagaaaaaaatgtgtaaatgtcaccaccaaaggtttgcaccctgatcaaaaagagtatgaaaagaataataccacaacacttatggcctgtcttggaggccttctggggattattggtgtgatatgtcttatcagctgcctctctccagaaatgaactgtgatggtggacacagctatgtgaggaattacttacagaaaccaacctttgcattaggtgagctttatcctcctctgataaatctctgggaagcaggaaaagaaa

SEQ ID NO: 12742 - DNA, 502 bp, Homo sapiens
  misc_feature (1)...(502): n = A,T,C or G
ngcggggcccncactggaccagtgtcactgtcgtggaattccgctggtatacagcacaccggactctaacgatagagttgaggagacctgagaatgagttttgggtcaaactaaagcctggcagggtcctatttatagacaactggcgtgtcctacatggcagggaatgcttcactggctaccgccaactgtgtggctgctatttaacaagagatgatgtattaaacactgctcgcctcttggggcttcaggcttaaaattgacagcatctggattatgaatacacctggcaccctggctaccagaatttcatatgggcagaataatattgtgtcaaactctacttcagattgtctccttatcccatcccacaaaacagaatctgtccgtttctctagtaagggagacttgttggagaggcgggactctgagttatctaatgtcagacatctagtggggcagctctcttcctcatgttataacatggatccacttggttgat

SEQ ID NO: 12743 - DNA, 411 bp, Homo sapiens
ataaaacccacaagaacaaagcaaaatagagagatctcaaaattaacattttggaagctagaaagcaaatgaacagtggttactaccttggtccatcagagaaagctgaacccaaagcagcagcaaggaaagtcaagacagggcaagtcacatgcacaactccgaggaacttcagaaagataacctctcaaaggaagggtgcatgggggcgaaacaggagattcgctggaaagtctgtataagaagtagccagaattccttttctcccattctcccaaaaccaggtagctatgtaactgctctctcaaatcccagcagaacactgaagctttactctctggagaggctaaactagagggaatctggacttggggacattacgcacagctgagagcagcgcgcacctttctg

SEQ ID NO: 12744 - DNA, 472 bp, Homo sapiens
  misc_feature (1)...(472): n = A,T,C or G
tgggggcctnnntttcgtncccatcgagaccctattcagngngcnggaattctggaccgccaaacagctactcagctgcttaagctggcccacaagtacagaccagagacatagcaagagaagaagcagagactgttggcccgggccgagaagaaggctgctggcaaaggggacgtcccaacgaagagaccacctgtccttcgagcaggagttaacaccgtcaccaccttggtggagaacaagaaagctcagctggtggtgattgcacacgacgtggatcccatcgagctggttgtcttcttgcctgccctgtgtcgtaaaatgggggtcccttactgcattatcaagggaaaggcaagactgggacgtctagtccacaggaagacctgcaccactgtcgccttcacacaggtgaactcggaagacaaaggcgctttggctaagctggtggaagctatcaggaccaattacn

SEQ ID NO: 12745 - DNA, 436 bp, Homo sapiens
  misc_feature (1)...(436): n = A,T,C or G
natcgagacactagtttgtgtggcggaattcgaaaaaaaaaccctctacatattgaaaggcaccaaatgtaatatctgacactgttaagatgcccaaaagagcaaagttgtagtggagatgcagggtcatttccccatgccatccacagtgtttgttagtgagtccacggctgacttgcagtgataaagaaaagcatggagctgtgtctgcagacaatggtggctgcatctgtaagtggcttcagaggcagcagccctggggaaattgatgggtgtggcagtggacctgtgaagagggagaatctagccttcagcctgtccagtgttaaccactagagaaactgagctttatatccttttttaatgcctgtgaattttagcatattgaaacattagagcaaatactcaggggatttttcattaaacatccctcaga

SEQ ID NO: 12746 - DNA, 439 bp, Homo sapiens
  misc_feature (1)...(439): n = A,T,C or G
tgggttttcccacgtagccacttcgagncagctcgannnccaaaaaccgaatacccttcacctagattgactaaaaacttcagtttgtatttgctaagcatgcagaaattctcctatttgatcaccaaatcattgcacaccgaagaaaattaacatttgatgagttccaaaatggcagcctttcactaaatgttactttataccattagcttttcaaaaatctcccatgtatttagctcaggttcattttttactatcccagagctggagagaactgctgcttttggtagaaactgagtaccatataacactacttatactggaggattttttttttaaacttaagacaaacttttaaaaaagacttaaagaagtttaaccttttgtagttatagtagtaggttatatctgaaatgtatctttatgtcatttgggtctc

SEQ ID NO: 12747 - DNA, 504 bp, Homo sapiens
  misc_feature (1)...(504): n = A,T,C or G
agaggcccccncatgagacctgagtcccnttcgnggaattcanattaacaagcattagggcagatttatatttttcctttatttaagaacgataatgttcagtggaagtgatcgtgagggaatatctggatccagatgtagtggacagtcactgacactgtatggatcaatggcagacccaacattccctgcctttttctgaaaaacctggctccttcagcaacatcatcattagcaaaagccaaaagagaaacttgccgacctacactgggttccagagcagcagggactttgagtgtcttaatcatcactgcattatcagctcctgagactgttcctggcactccataaacacttggtgatgaataaatcatccaacagaaagaagacctgcttttttctctaaaacaaaatgatgtctggaagactagctggcatgagtagattcaaacatctgtgtaccatctgaagcaaactccagaccaatcatttgaagtgaattgg

SEQ ID NO: 12748 - DNA, 504 bp, Homo sapiens
  misc_feature (1)...(504): n = A,T,C or G
gaggcggcccatgagaaactgagaccctacgccagagccgnggaattccccagacggccaagtgggatatgctgccaaatgacctgtgagttttctctcactcctgagtctgcaagctcagaaagccaggggctcttagaggttgctaagtccagaagacttttatgcagaataccgagggaggaggttagaattaagtattaagtgggcaaaacaggaggggtcatttcagagtcctgcttgggtcctggtgcagcctgttgtagctgatagggatggaggcggggaggtatctcctttgttgaagaaataaacctgtgactgtgaatccagtctgctccctcctaaagactgggctgcagtgtttgaagtcggaactggagtgtttcgggaagctggctgcatcaggttcccattagcccaggcagctgcaccagtgggttcacaccatgacatggtaacaattaagccttctgctactggtccttaccctggagagaggct

SEQ ID NO: 12749 - DNA, 560 bp, Homo sapiens
  misc_feature (1)...(560): n = A,T,C or G
ttagtggacccctnnnnnnnnaaattcttggcctaaaagcatttcatattgtgagcagcatgtggactacaaaagaccgtcttggaccaaggaagatatatcctcaatgaaaccaaaagaattcaccatctctcctgactgtggcaccattcgcccccagggatttgctgctatcagggtgacattatgctccaacactgtacagaaatacgagctggcactcgtggtggacgtggagggcatcggagaagaggtgctggcgctcttaattgcagcaaggtgtgttgtacctgccctccacctggtcaatacagaggtggactttgggcactgcttcctgaagtacccgtatgagaaaacactccagcttgccgatcaagatgacctcccaggattctatgaggtccagcctcaggtgtgtgaggaggtgcctactgtgctgttttccagccccacccccagcggngtcatctccccaagcagcaccatccacataccactggtcctggagacccaggtcactggagaacacagatccacggtttacatctcaatctttg

SEQ ID NO: 12750 - DNA, 463 bp, Homo sapiens
  misc_feature (1)...(463): n = A,T,C or G
ngccaatgatgactatagaccagatgaggacctccagggggaggccagggccccccacctgtcactctggctgctgccaaaaaagccaagtctgagactgtgctgacctgtgccacagggcgtgcccactgtgtgtggctagagtgccccatccctgatgcccccgttgtcaccaacgtgactgtgaaggcacgagtgtggaacagcaccttcatcgaggattacagagactttgaccgagtccgggtaaatggctgggctaccctattcctccgaaccagcatccccaccatcaacatggagaacaagaccacgtggttctctgtggacattgactcggagctggtggaggagctgccggccgaaatcgagctgtggctggtgctggtggccgtgggtgcagggctgctgctgctggggctgatcatcctcctgctgtggaagtgcggcttcttcaagcgag

SEQ ID NO: 12751 - DNA, 452 bp, Homo sapiens
  misc_feature (1)...(452): n = A,T,C or G
gtcggtcntcccactgatnacccgactgangaccttcgcananngcggnggaattcagaaaagaaggaacaatggtcgtgccaaaaagggccgcggccacgtgcagcctattcgctgcactaactgtgcccgatgcgtgcccaaggacaaggccattaagaaattcgtcattcgaaacatagtggaggccgcagcagtcagggacatttctgaagcgagcgtcttcgatgcctatgtgcttcccaagctgtatgtgaagctacattactgtgtgagttgtgcaattcacagcaaagtagtcaggaatcgatctcgtgaagcccgcaaggaccgaacacccccaccccgatttagacctgcgggtgctgccccacgtcccccaccaaagcccatgtaaggagctgagttcttaaagactgaagacaggctattctctggagaaaaataaaatg

SEQ ID NO: 12752 - DNA, 449 bp, Homo sapiens
  misc_feature (1)...(449): n = A,T,C or G
aggcgttttttacaactgatatcccttcngatngcgtcggaanncgctnngagaagccagacagtgttgcagcccaccgtagcaaaagtcacccagccctgcttctagcccctcaagagtcacccagtggtcccctagagccctgtcccagcatctctgcccctgggcctctgggatccagcgaggggtccaggccctctgcatctcctcaggctccaaccctgcttcctcagcaatgagctctcctccagctttggctttgggaagccagactccagggactgaaaaggagcaacaaggagagggtctgcttgagaaatgccagatgcttggtccccaggaactaaggcgacagagtgcagggtgggggcaagactgggctgtaggggagctggactactttagtcttcctaaaggacaaaataaacagtattttatgcaaaaaaaan

SEQ ID NO: 12753 - DNA, 447 bp, Homo sapiens
  misc_feature (1)...(447): n = A,T,C or G
nggggtctccccctgaaaccccactgangacctnagcacanccggcggaattcgntttntggaacagatgaatggtaagctgataactaatgggtgtataaactaggtgaaagggcaataaggtgaccaaggttccagagggaaggcatagcatcttggctgggtgcaatggctcacacctgtaatctcagcattttgggaggccaaggcaggcagatcacttgagcccaggaattcaggaccagcctgggcaactgtgaaaccccatctctacaaaaaatacaaaaattagcagggtgtggtggtgtgcacctgtagtcctagttgctcgagaggctgaggtgggaggatcacctaagcccgagaggtcgggtccgcagtgagccatgattgtgccagtgccctccagcctgggcaacagactgagaccctgtctcagaaagaaag

SEQ ID NO: 12754 - DNA, 452 bp, Homo sapiens
  misc_feature (1)...(452): n = A,T,C or G
ggggaattcgagacatctgacagtgggaggcattgaacgngcctccttaccaatatgctacaaatcatacctctgaattaaaagatgccttcatgcaactaacttactatctggagatgtgtattttgctaacctaggcaaagaataacaatttctgcttattccagtaggtgcgacaagctcagagaagcgagcgacaagctatagaagtaataattaccaataaagttaattgcgaagccgaaatcccagctttctgcctccaagttggggatcaaatagattatcttcctttcttctactgcctcactagtttaatcagtacattctacaactctctaggattattataatatttgcatgagtagtttagaatttagccttgggcctgctcttctaccattttaccatatttactgattacattttaccatattttaccatatttactg

SEQ ID NO: 12755 - DNA, 445 bp, Homo sapiens
  misc_feature (1)...(445): n = A,T,C or G
ggccngaatcgtagaccctagnctgtgtggcggaattcaagacatctctgtgacattttatcagtcaggaatttttttggttatgagtgacagaagccaactgagactaacataaggagaagaggaaatgttgtggtttacataattaaaaactcaagagggccaggcacagtggctcatgcctgtaatcccagcactttgggaggccgagggaggcggaccatgaggtcaggagattgagaccatctggctaacacagtgaaaccctgtctctactaaaaatacaaaaaaattagctgggggtggtggcgggcgcctgtagtcccagctactcgggaggctgaggcaggagaacggcatgaacctgggaggcggcgcttgcagtgagccgagatcgcgccactgtactccagcctgggcaacaagagcaaaactctgtctcaaa

SEQ ID NO: 12756 - DNA, 492 bp, Homo sapiens
  misc_feature (1)...(492): n = A,T,C or G
nttgagttcgatagccctagtggnggaattcctaggtttaagaaactacctttggtgattgtgtatgaattttgcactagacaatacaggtataatcttatcaaacttacctttaaaatcactttaataaaccaatgttttgctggatgtgaagtgtctttaaattatctggcacttctgaataactagccctgctatgctaaatgacaaggatgttactgggcatcacctatcatctatctctctctctctctctctctcacacacacacacacacacacacacacacacacacactctctcacaccccagatgtgtgcctcagccaattggcctgcccatttccgagtgggccaagttgaaagaattgattacctagagagaatatatatgcccgcatttagtaagaccagatttgcctcacctagggaatctctattgtgtggccagatttcanatgagtcgtgtcctcaacatttgaacaacgcactg

SEQ ID NO: 12757 - DNA, 504 bp, Homo sapiens
  misc_feature (1)...(504): n = A,T,C or G
agacgggcccccaatgagaactgagtcactgtcgnggaattcatggaatagggcccaaatattccttctttttagataatcttattccttgttgatatatggacctagatctgtgagctagaacttccttattaaaattagattttatagtttaattggccttttgtacaaaatagacatcttgcccacttgatttccattatgaagaagggtgtccttgcatttcagctttctttccaaatcttgaatcaaagcttcttttgatccttgtatttcatgatcaggagttcttggtatgggcttagcatttgcagtttgggatggctttgcatttataggttggccagctgaggactgttgatagctttaaaaaggaaaaagaaaagatttttaaaaagaaggtcttggcctcattttgcaaattacctttagatatgttgagtttaccacttagtactactagtattattaaaaacaaattgccctaataacagtcaagaaatt

SEQ ID NO: 12758 - DNA, 558 bp, Homo sapiens
  misc_feature (1)...(558): n = A,T,C or G
ctatgtcagcgnnnngnnnnnaaattcctataaattagctgttagatctgctgagatgactttcttcctatatgtggctcattggaagttctttgtaattttaattccatgaaagtcttaatgtttccaacatgaaaattctcttacttaaatacgtttgatttctgaaaagcctacaaatggaggggaaatgagattgtgctaatgttgatgtcatcaaggtaaccatctcatatactagtgtcaaaaggtttatgtaaacttgaattttatctgaactaaattgtatcttanaattcatacaattatttattagacagtggaatgcaaatgtttctatgaacgtaaacacattcatagagatttcttggcgaaaatatcttgagaatagaatgtaacgatataacattttgctgatttgtgcaagattggngaaaaatttcttctagattgatgaggtcaatgtgattcagttgtgttgctgtctgagccacagccaattgtgtgtgctctattaatatgttaccattatttttgattcctggcttggtcaagaac

SEQ ID NO: 12759 - DNA, 457 bp, Homo sapiens
  misc_feature (1)...(457): n = A,T,C or G
cggtaattgagacanttnnaacttgaggacattagaccgtgcggtggaattcctggactcaagcattcctcctgcctcagcttcccaaagtgctgggattacaggtgtgaggtaccatgcctggctaaaagcgactttctactccaactctaattcttaccactatgatagattgacaaaaaggaataaatactattttaaaaagaagtaggggaaaggagggaaggaaataattctggttttggggacttgtatctacctctcctctctccctgtatataactgaatgaccgttcttgtttctagcttataaaacctcctccagccccattgccccttcccctagagttcactctgtctagcctccttcaggtgggaagatggcctctaaacactacttttgtagtataaaaacacaatttccattctggagtgcttctgccctttgcagataagg

SEQ ID NO: 12760 - DNA, 475 bp, Homo sapiens
  misc_feature (1)...(475): n = A,T,C or G
tgcgggnttnnnattgatcgacgatcattagtccagngcggtggaattccaggctctgtggcgccgatggggcggcagcagtggcctgagctgtctccccagcggccagcagtgcccaggggagggagtggagagcggaaccgtgaccctggcctctgattcctctccctttcttcctcccgtgccttccctctccccgccctgactggcctccccttgttggggtgggtgggttccccaagatggatggagcaggtcagaggagaggagaggtcggtgtctttgcctctggctgcgtcagttctttgtagggaagtcaggggtgggatgtttcaacctcctggcctgcattcttctttcaggcactagggtgggagcagcttgtttaattgataggaatatccatactgcaccggctcgctgagaaatcaaactatcagactttggttcctctttaaaaaaaactttttttagg

SEQ ID NO: 12761 - DNA, 462 bp, Homo sapiens
ccccctttgagaccatttgacagcgctgtggaattcgttgggaacaagcccacaagctggcgatgaaatgcatgagaccagaagatgtgtctttgctatacatcactcaggcccaggaaatggagaagcagggcaagtaccgtgaggctgaaaggtgagccgtggccccagaggaggtgtagagggagatgagatttcaaggctgggacgagggatggggtctgaggatgtgtaccctctgcccagaaggcagtgatagcaggggtcgggtctaggaggccccagatgtatctccttccccaggctatatgtgacagtacaagagcctgatcttgccatcaccatgtacaaaaagcacaagttgtatgatgacatgatccgcctggtagggaagcaccatccagatctcctcagtgatacacacctacatctgggcaaggagctggaggctgaaggccgact

SEQ ID NO: 12762 - DNA, 469 bp, Homo sapiens
  misc_feature (1)...(469): n = A,T,C or G
ctttgatagagtagctagcgacgngcaanncgntgggtgtaaaaattcagtttacgtttaaactggaagggcataccacatgttcaatatattggacaaatactgttttatttttagcatgtagtattgtagatacaaatacgcatgttcttaagctaaacctaagtaaaagggctttgtcactgtagatttgacaaataacattctaaatgtcaaatctgacaattggaaaacagtacagttttatttcccttatttttaagtatagcaggaaaaaaataacaagtttgtccatgttactactgatactgcaaagaaacttccaaatcactggtttgggaggggggggaaacatccttattttcttggcatgaagcatggggaaaaacagtagctactgcatcatatacgtgcaagtaaatcatataggtccaagtaaatttacatggaaataagtgtaactacaaaa

SEQ ID NO: 12763 - DNA, 443 bp, Homo sapiens
  misc_feature (1)...(443): n = A,T,C or G
gtggttctccaaactgagtaccctcagatagcgtggaaancccangataattttaaatttttcgtcattcccaatggtcttgaagtcacctcccttaaaaagtagatataaaatactggcgaggcaatttcatttcaagtcaagtcggggaggagggcatccaggaagccagaattgatcgttgttgaaggttttgttttcggttttttttaaatctaaaaacaaatccaataataaaatttttaactgtacgaattacggcccccttttagtccggaagacagggatgtactttctgtataaaaggtgaggaggatagaaaagggttgttgctacagggatcctattgctgaaggatctcatccaaaatggaggacctaccatgactccaggaatccattcaaaagttttggtgttttgttttaagatgcaggtaccattca

SEQ ID NO: 12764 - DNA, 473 bp, Homo sapiens
  misc_feature (1)...(473): n = A,T,C or G
ggagggcttttaattgaaacccattgagangcgtggaattccccggctcgagcggcccaacccttccctcaccctggcaccagacacccaggacttatttaaactctgttgcaagtgcaataaatctgacccagtgcccccactgaccagaaaaaaaaaaaaaaaaaaaaaaaaaaaaaaaaaaaaaaaaaaaaaaaaaaaaaaaaaaaaaaaaaaaaaaaaaaaaaggggggccctttaaaaaaaaagggccctaaaaaacccggaaaaaaccccgggggggttttttaaaggcccacccttttggggggggcccccccccggggttttttttggcgggggggggggcccccccacttttttttttaaaaaaaaaaaaaaaaatgttcttctttttggggaaggggggttttttttttggggncnnaacaaaaaacgagactcgagatatctctaaagaagaatagtaaatn

SEQ ID NO: 12765 - DNA, 563 bp, Homo sapiens
  misc_feature (1)...(563): n = A,T,C or G
tatactacgctgatgtgtcatacactcttagatccatcacctctctcaatttcatatacacaataggcggacaacctaaacgagagaaaaaaaacccgaagacactcgagacgctagaaanngcgnnggaaaaggaacattaggatataggganttctgagaagatatgtttaccgttacttatgagagttattgctgggatacataggaactctgctttacgttttgatgaactgccatacttttccacagtggctgcaggattttacatttccagcagcagtgtatgggagccagggtaggttcagaagacattgtgttagaaactttaactttattggagcaaagtttgcttctaatcatttccatctcttttaaatttccatctttttaaatgtggatttagggtgtgaggcatgttataaggtagacataatttgatccctatcttcagcgtacttttgtgaatttaggcaggataaatctctatacgctatatctatatattgaggtagtagaacctacctctgaatatatgtatatatgttttttcttttaaaggn

SEQ ID NO: 12766 - DNA, 459 bp, Homo sapiens
ggggccaattgagtcgattagccctaggccagggaggtggaattcagggatcgctgatgattactataaaaagaaactagtgaaggcgattaagttaaagtttgcctgccatggtactgtaattgaggatgcggaatatggaaaagtcattcagctacagggcgaccatcgcaagaacatatgccagttcctcgtagagattggactggctaaggacgatcagctgagggttcatgggttttaagtgcttgtggctcactgaagcttaagtgaggatttccttgcaatgagtagaaattcccttctctcccttgtcacaggtttaaaaacctcacagattgtataatgtaaccatttggggtccgcttttaacttggactagtgtaactccttcgtgcaataaactgaaaagagccatgctgtctagtcttgaagtccctcatttatacagaggtcagg

SEQ ID NO: 12767 - DNA, 480 bp, Homo sapiens
  misc_feature (1)...(480): n = A,T,C or G
ccccccccccccccccccattgagaccttaatagtagaccttagtcagngcggtggaattcgtttaagcaaagttctcagactcttttaaaaacaagatggtaaacttaacacttggtagttatactatccagaagaacacttataacttaatttatcagaaaaatgctctaaacggattcatacttgatgtattgataaccagcagtaaccagcatgtagagtcttgcgatttctgttattcttggacacagggtgagaatctaaaatacaaaagccagttgaagtcttagtgttagtcctgaggtatttgtaatcatgaaggatcagctttttcattcctgcttattatttaccacacatactatatgaccttgggtctataaaaaaatcataacccataataattgttattttcttaaggaaggtaaaggagaggcttgtgatanttttttttacactttccattgcgcacataaga

SEQ ID NO: 12768 - DNA, 460 bp, Homo sapiens
  misc_feature (1)...(460): n = A,T,C or G
catcgacacccttttgagacattagnccangcggnggaattcgccgcttgtgctgcagccatgtctctagtgatccctgaaaagttctagcatattttgcgagtactcaacaccaacatcgatgggcggcggaaaatagcctttgccatcactgccattaagggtgtgggccgaagatatgctcatgtggtgttgaggaaagcagacattgacctcaccaagagggcgggagaactcactgaggatgaggtggaacgtgtgatcaccattatgcagaatccacgccagtacaagatcccagactggttcttgaacagacagaaggatgtaaaggatggaaaatacagccaggtcctagccaatggtctggacaacaagctccgtgaagacctggagcgactgaagaagattcgggcccatagagggctgcgtcacttctggggccttcgtgtccgaggcc

SEQ ID NO: 12769 - DNA, 486 bp, Homo sapiens
  misc_feature (1)...(486): n = A,T,C or G
gtantnaagacgtnacccnnaggggnnnnnaattgagncccttaatgagtccatcgaacangcggnggaanancctgtattagtaccggcttgataaactagcccaaaagtgtttgcttattccaccagttctactgtgacatactcgggtataaagacatgtagcaataacggggagtggggggggagtctcacagtgcctttggaagggcccgaacttgccttaaatcttcctcaaccaaataagtattttattactgcttgagagaatctgaatgtaagatgggttcaactgcacaaaaggaaaagattgttaccactttttttatatagatataaagtgaagcacccgccttagtgctgaaatatgtagtacatgaacatgccttgtttaattacagacaattccaaaacttgtactatttttttttccatgtagaaaggcaggaatgtctcctaagctttcctggacagcagatgaatgac

SEQ ID NO: 12770 - DNA, 451 bp, Homo sapiens
ggtaattgagacactatccgtgcgagggcattcatgaggtaattagattggttctctccagaggtaacctgccaagaagagatgctatagatgttactcctatactgtaaaacattgtgaaatcagattactttaaaatgatgtattacaaagttatgcaaaaaagcagttgtgactatggaagcccaaggcttatatcccagctctgtcttacactaaatatgggtacagtgtttccactctgtccataaaatgggagctaatattctccaacctgtgtgcctgacatgatggttaaagggattaaacaaaacaatagtttgtaatttattctgtcagagcaaactgctggtaaataaaagggactaagttgacgaaaaataaattttaaaaaacctaataaaacaagtttgtaatttataattgtatacaaataaaagatgttacaaaa

SEQ ID NO: 12771 - DNA, 453 bp, Homo sapiens
  misc_feature (1)...(453): n = A,T,C or G
ggggnggnntttcgagacccttannattgtagatccctagtccatgtggtggaattcgaccatctcatgaagtacaaataataaaaaatatgccccagatggcaaactttgtatacaacatgtacatgcatttgatacagactacacatcattatcatcagactttattacaactaccacctgctatggtagaagagggtgaggaagttcaaaatcaagaaacagaattggaaacagaagaagaggccatgactgttcaagctgacatcatacccagtccaacagacaccagctgccgtcaagaaactccagcctttcaaactgacaccacccccagtgagacaggagccacttccactccagaagccatccctgctttatctgagaccacccctactgtggtaggagctgtatctgcaccggcagaagctaacacacctcaggatgccacat

SEQ ID NO: 12772 - DNA, 473 bp, Homo sapiens
  misc_feature (1)...(473): n = A,T,C or G
actcgaagaccactcgagagccgcttggaattcctcgtactttgggaaggtttgtgcatgaactatacaagagtatctgaaactaactgttgcctgcatagtcatatcgagtgtgcacttactgtatatcttttcatttacatacttgtatggaaaatatttagtctgcacttgtataaatacatctttatgtatttcattttccataactcactttaatttgactgcaacttgtcttggtgaaatactttaacattataaaacagtaaataatttgttatttttacaaaaaaaaaaaaaaaaaaaaaaaaaaaaaaaaaaaaaaaaaaaaaaaaaaaaaatnnngccgccccctttatataaaggggcccttaaaaaccccgggtaacccccttgggtttctttttataaccccccctttttgtggtgccccccccccccgtttttttttgaagggggggggggcccccccc

SEQ ID NO: 12773 - DNA, 479 bp, Homo sapiens
  misc_feature (1)...(479): n = A,T,C or G
cccccccccgcnnnnnnnatcgagatccctagttagagtgctggaattcggctgattcccatacgaaatgtaacagaagcaaaactttcaaaaacaaagaagagaagaagccttggactgggccccggagaaagagtggaagtccaagtactcaacattgacatcccccgatctaggattactctggacctcattcgggtgttatgagtatcccacgaaggccagacgctgattttattttctcatttccacagattgacaaggataagtcagttgtttgtaaactctaggtagcagatgagaaataattcacttaatatcagaaatattttccaaacactttcctttattttttcttctgaataaatagaaaaccaacagtttgatttccttttcccttaaaggaaacaactaatacacattcttatatggctgtatgtagtaatagttntctgactaanattttgttttttattttt

SEQ ID NO: 12774 - DNA, 482 bp, Homo sapiens
  misc_feature (1)...(482): n = A,T,C or G
gggggttgnncctcgtagacattagatagatgngccctagtacggncaggccagtagcaggaataataaatcccactttgtaggctggaaaactgagctgtcaaaagaatcaagtgtttgggggtttgctctgatgagtcttctagttcatttggtgaatgtcatgatgatttttaacatgcattttgcatgcatcccccaataagaagagatgagactcggccggagagaagaaaaggcccttaactttctttccaatttaaggagttgagagtttaaaaatattccagccctaagtttttatcatgggtcccatctgatagtggctttgggaacctctgtgaagtagagagccctcccttgtcagggttatgaggcacagtggcctttggtgtttggccagtgacagtgtgagagatggagttgacctggcaatgatctgtggctaacatgccgtctctctgcccttcccttgcagnaan

SEQ ID NO: 12775 - DNA, 443 bp, Homo sapiens
  misc_feature (1)...(443): n = A,T,C or G
gtggtttttaacccaggtaccttcagatgatcgtcgaanncccggctccatacagcagaccaagcttcctgtcccggggccagggcaccagcacatgttccacggccggcagcaactcttccaggggctccagcagctctaggggctcccggggccctggccggagccggagtcggagtcagagccggagccagagccaaaggccaggacagaaacgccgagaggaaccaagatgacccttgttggggcattgagaatatcatgagtgccacggggaaggggagtagggatgtcttttcccccccagcagtgatgagtggggctagctgaagcccattggtttccacgatttcaattggctgagaaggcagagagctagctcctccctttctttctttttccacctgagacttgtttataaaaaacaaaacaataaaaagagt

SEQ ID NO: 12776 - DNA, 416 bp, Homo sapiens
gaaaacaccttaggcctcaacagaggccgaactctggctgacggatggggaaactgaggcctcaaagggaaagcaacttgctcaagttcactcagcaagtgaatagagcaggaatcgggggtctcatctcccccagtccccttttctctccagcaaggaggcttttcaacgagaattctgagacaagaggacaggggagaggccacggggcagctcacagattccaccgaggagtcgggagagggcacagaagcaagaggaacctaatactcttcctcattggccttcctgtctccatctttattccttccagctcattctctacatgacactgtgaatgccaaactgtctggaggctgccatgagcggccaatttgtgatctctgctttacctgaattatttccgtgaattgtga

SEQ ID NO: 12777 - DNA, 500 bp, Homo sapiens
  misc_feature (1)...(500): n = A,T,C or G
cccccatcgaganccnttcgcannatagtagaccactaggcagngncgtggaattcattttactgtcttcaaagacaacagcccaagtgctggagcagccagaaaggaaccggcctgatttatttatttatttagagacttggtctcactctgtcacccaggctggagtgcagtagcatgaacacggctcacttgcagattcaatctcaagcaatcctcctgcctcagcctccctagtagctgggaccacaggcatggaccaccatgcccagctactttttaatttttttgtagaaacggtctcgctttgctgcccaggctggtctcaaactcctgggcacacgcgatcctcacacctgaccctcccggagtgatgggattataggcgtgaggcaccattcccagaccagcctgttttctaatgggtgtccactttaaatctgaactctgcctcaagttgtagctgctgctgagagaaccctggctctatgcttttctca

SEQ ID NO: 12778 - DNA, 492 bp, Homo sapiens
ggcctttgagaccttatcaggtggaggaacccttcatgcaacatcctcatcagtaccatgaacaagctggccacagccatgcaggagggggagtatgatgcagagcggccccccagcaagcctccaccggttgaactgcgggctgctgcccttcgtgcagagatcacagatgctgaaggcctgggtttgaagctcgaagatcgagagacagttattaaggagttgaagaagtcactcaagattaagggagaggagctaagtgaggccaatgtgcggctgagcctcctggagaagaagttggacagtgctgccaaggatgcagatgagcgcatcgagaaagtccagactcggctggaggagacccaggcactgctgcgaaagaaggagaaagagtttgaggagacaatggatgcactccaggctgacatcgaccagctggaggcagagaaggcagaactaaagcagcgtctgaacagccagtccaaacgcacg

SEQ ID NO: 12779 - DNA, 458 bp, Homo sapiens
  misc_feature (1)...(458): n = A,T,C or G
cttgtagaccattggacagctgttggaattctactgagaaggggcaggagggagaggacacgctgagcagccagaggctattgacacaccagaagcatccccagggactgcctttctcaacatcaccctctgtaatggcagcgtcagccaagagcgcactgccattggttttactgaccaaacctaaagaaacggctgcgttcccatcagatttgctcactaaatcatgccgacacacagacatgcatcttccagcctgttcggcagcagtgcagacaacatgaggggtctcagatcctccacaagaatgattctggttctgcctgagccttcgcctgagcccccatcagacattgtaaaggtcaacttaaggatgatgggcaggcagaggcaggaataaagactgatatggttgaatctctcattgctctagcaccatccgcttggtgctgctctan

SEQ ID NO: 12780 - DNA, 475 bp, Homo sapiens
  misc_feature (1)...(475): n = A,T,C or G
tttcgatggactacgtcgcgacgngcacattccgcggcgcggccggctgccggaaaacagggcagacctgtatgattggtttattcctggggttgtcatatcatggctgataatgacacagacagaaaccagactgagaagctcctaaaaagagtacgagaactggagcaagaggtgcaaagacttaaaaaggaacaggccaaaaataaggaggactcaaacattagagaaaattcagcaggagctggaaaaactaagcgtgcatttgatttcagtgctcatggccgaagacacgtagccctaagaatagcctatatgggctggggataccagggctttgctagtcaggaaaacacaaataataccattgaagagaaactgtttgaagctctaaccaagactcgactagtagaaagcagacagacatccaactatcaccgatgtgggagaacagataaaggagttagtgcctttg

SEQ ID NO: 12781 - DNA, 482 bp, Homo sapiens
  misc_feature (1)...(482): n = A,T,C or G
gggggttgccnnagggggggccgatgtagacctnaatgatgtcattagnccatgcggnggaattccacttagttataattatccagaacatttgtatatagaatgattatagaattatccctttagaaaatcagggtcttgtgttggtccttattattgactgaaaaaaagatgaatgaataaatgaattaaattacatagaaagaggcccttgcttacaactgccaagctccagtggcacatttaattgtgaaaaacgaaatatatttttaaataatttatatgtggaatgctgtttttcaaagagggtaatttagtttaatggaatataaccactcattcatccttccatccaacagaggcaagtttggacctgccttgcctttttctgcttttaacatttgtattcaaagttgtacaccattgtcaaatgtataatgtagcagtaaatcattagaggaagtaagttaagtcctgttaat

SEQ ID NO: 12782 - DNA, 447 bp, Homo sapiens
  misc_feature (1)...(447): n = A,T,C or G
ngancggggtttcgtagaccctagtttgtgtggcggaattccgccaaggcagagcgcaaagtgctagccactggaaatgcatgacttccctccacccctactctattctgtagttttttggttttgtttctgagacggagtctcagtctgtcacccaggctggagtgatctcagctcactgcaacctccacctcccaggttcaagcgactctcctgcctcagcctcccgagtagttgggattacaggtgactgccaccgtgcccggctaatgtttgtatttttagtagagacggggcttcaccatcttggccaggctggtcttgaactcctgacctcgtgacccacccgccttggcctcccaaagtgctgggattacaggtgtgagccaccacacccaggctctgtagttctttttacaacattnttcattataactttanattttg

SEQ ID NO: 12783 - DNA, 503 bp, Homo sapiens
  misc_feature (1)...(503): n = A,T,C or G
gccccatcgatnnccntcnnnnnattgagacctactatccatgtggtggaattcacgctggcggcccagcctgggcaggtttcagggtgccagtgggaagcctgatgggtgctggtggcctttcccccgtggattggtctctggcccagcccagtctcttctcaggggcagggggggaggttggggtcaccggcctgcttggcacccccatctgaaagagcagcacttctcagctattaaaggccccctggatagaaaaaaaaaaaaaaaaagacaaagaaaaaaaaaacactataaaaaaaaaaaaaaaaaaaaaataacaaaaatacnggggggcccctttaataaagggcccccttaaaaccccgagaaccaccccctggtggtttttaaagagaccccacttttgggggacccccccccccctccttttttttttcggggggggggcccccccccatgttttttttaaaaaaaaaaagaaaaatctctcctttttcttn

SEQ ID NO: 12784 - DNA, 462 bp, Homo sapiens
  misc_feature (1)...(462): n = A,T,C or G
tttaatcctgaaacaactncgacttgacnaacntagnnnagngnggtggaaanagggccaaaaaaatgcgataggtaacttatgtagtcagtactttccagtgaagntgaaaataaagcaaagttccatgtattaaccctgttttccactaacccttctttacatgtaggacatatgccagggtaccaaaaactgtaggagtattccctaccattgcagcctcagttctaataccaaaatctccctgcagactaaatgtctagagcagcactgtatcaatagaacataggggcagatctcataccttccaagggtagaaatcgctgagcacaggtaaaaataaaatattccagagggaaatattattttacaaatttttataaacacttttgtaaaataatgtacacagccttgcacactgaaagagtcaaagccatttaactctgtataaccactgcagaa

SEQ ID NO: 12785 - DNA, 479 bp, Homo sapiens
  misc_feature (1)...(479): n = A,T,C or G
ggagtntccnnnaggggggggnaattgagaccattgactgatgtcgttaggacatgcgangggaggacacttattatataaagcccaaacgactgtccccaccaagaggtccatttgaatgcatacctaatatatgatataggctcaactattatgtgcaatttgggaaaatcaggtttattttttggagtggaactgttataagtgcttatttataaaaggaatgtttctgaatgcacgtgcctaaaaagatctttgatggtatgcatatgttttgtcacacaattttatagtgcatctttcaccatttgtgcttttttaagatacgtatgtaagctcttatttttcaatcggcaattcagttaatttttaaatgtttacataatggccagaaggcttgcaaatctgtatttaattgcattttaattaattgccagtttttacatgtgatagtcagatgtacaaagagnatgcactta

SEQ ID NO: 12786 - DNA, 470 bp, Homo sapiens
  misc_feature (1)...(470): n = A,T,C or G
gcggagcannnttttnaatggaagtcattagtacagngcggnggaattcgaaggcaacaganaatttgttcttggagagtcttactcacgtcaaggaagtataatattttccaaaatgccccgccaaaggatttcctcttacatcatattagccagaactgggacatattatcaccctttatctggggtagaggcccacatttccacatcaaagggaatttgctcaatgcctaaatcaaactggaattcagttaagcaaagaagaaacagaggaatggtttttgggtaggcagtaaacactgtcagctacatctccctgaaagccatcactcccttaaaatatctttgcgtaatgtcatcagttacttctgaactttttcatccaatggacagtgtttattttctaacttacttgaactttttgtggggcttagccacaccctttttgaaatttatgtattcatcaaata

SEQ ID NO: 12787 - DNA, 470 bp, Homo sapiens
  misc_feature (1)...(470): n = A,T,C or G
atagagacccctggagaacctaggaagngcggtggaattcgcatatttcccaatagatctaggtgaaaatttctatctcatgagccttttgtcagtatttttaaaattggacactctattagtggccacattgaatctcttacaggcatctcactcaaactgcagccatactttccaataggccccataaaaatccttgttctggagcaatctaatatatttattcacctctttagacacttaggtaagtataataatacaagttttgtgtgtgtgtgtgtgtgtattgtgtaccttgtgacctcttttccagtttctgcaacacctgaagctgaggcaagcttaatgtaaataatgtccagcaatgttagaaatgttgacttttatgtgtccatcaagaaaaaaggatgaatgttattgtagaggaaattttcattctggaaaaaaatgcatactgtttgaatattact

SEQ ID NO: 12788 - DNA, 482 bp, Homo sapiens
  misc_feature (1)...(482): n = A,T,C or G
gggggtccccccagggggggcaattgagnccctaattgtagtcattagtccagngcggtggaattcatagattgttaatccccaccagctagactttgaacttaagtcagacttaaagatttgagaaattatttgtgtcatttactagacgtgatttttagttctgtttgattatatttcctacacaaacttcttatttaacaggatagcctactaaattaaatgtttcttatttcacttaactcatttgattaaactgtattctaaaacatttggggtttttccccctattcagttttaatcttggaatatgcatttgtaaattgtgatgtcattgagactatatttatatttgacttggcaacattaacatgtcctaagacttagtgcagagaagcttggcagtacgttctttgacttaaggatggcataaaataatcatttttgaacctgtgtaataaagcttgaaagcagggaaaaga

SEQ ID NO: 12789 - DNA, 446 bp, Homo sapiens
  misc_feature (1)...(446): n = A,T,C or G
ggggtctcccaatgaaatcccgctgggangccagcacangcggnggaantccgatttctttagctgaatccatggacatgatacccacagatattgagggttggcccggtgcagtggctcacgcctgtgatcccatcactttgggaggccaaggcgggtggatcacctgaggtcagaagcttgagaccagcctggccaacatggtaaaaccccatctctactaataatacaaaacaatttgctgggcatggtggtgcacgcttgtaatccaagctactccagaggctgaggcagaagaatcgcttgaatccgagaggcaaaggttgcagtgagcccagatcacaccactgctctccaacctgggcaacaagagcaaaactccgtcaaaaaaaaaagatacagggtcaactgtacacattaaacacttctatcaactagggatgtcg

SEQ ID NO: 12790 - DNA, 480 bp, Homo sapiens
  misc_feature (1)...(480): n = A,T,C or G
agccnaagggccccccaatcgtagacattagatagangaccatagtccgtgtggtggaattctaaagttggaaacaagcatttaaaactctgaattaatttcaaaactgtctgtagaacttctggttcctctcaatatggtgacctagcatggagaggaaactgtatgagaggaactgtagaaaaggaaatatttattctgggaagtaacaataatgaaacaggctctcttgaactggtgtgttcttcctacagcctggtcagaaaagatttttgaggtggattaaatttggagaaaagctttcttttttctttcttccctttcattcctttctttttctttctttctttagtttaactttcacctcttttgttgccttgagacaataaatacatgccctggttgtaggagaagtggcagtaacagcccacaccagggctaagttagtgaagttcaaaggtcctgctatgatgaaatgcn

SEQ ID NO: 12791 - DNA, 462 bp, Homo sapiens
  misc_feature (1)...(462): n = A,T,C or G
gcgggnnnaatcgcgttccactagcccagtgcggtggaattccacaccgattagactggcaaaaatcagaaaaatgccgcatgttggagtcatgagaggttcgaggaactaccatgtactgttgatgagaaggtggactagggcaattccaaagagcaatctgacattgctgtcaaattaaacatatcaaaccccagagatccactcctaggtatgtaactcaaagacagtctcataaaccttaatgtaaaaaaaaatatgccaggaaagtaactgcaaggtggttatgatggtggggagctggagacagtctggatgtccatctctggcagagtcaggatacaaaagtggggatacacagcgtggagttcctctacagtgctgagaatcagtaaatgtgatgaatacaaaacaacagggatagattgtttttaacttttattttaggttaggggtacacgg

SEQ ID NO: 12792 - DNA, 331 bp, Homo sapiens
attggttttaccttgagtttagatatcctaaaaaattctgtagtacgtagttttgtcttacctgttaactttccccaattgagataaaagtgttttaaaattctgtttatagtttttgatatgcatatataattatgtgtatatctaaatacaaatgcaaatgaagcattagtaatacttaaataattttactgtgctacataaagtataacatacttggaaaggatttaccgttctgcaacaacggactggtacatacaggatgatcacaatggtaaggcacataaattattttcccactggaaacctgccctgtccaccccttctcatt

SEQ ID NO: 12793 - DNA, 471 bp, Homo sapiens
  misc_feature (1)...(471): n = A,T,C or G
agtcgtcgannnnnnnnngtttaaaattgagatccntattccagngttgtagaactctgccagcaggatggcccacaagcagatctactactcggacaagtacttcgacgaacactacgagtaccggcatgttatgttacccagagaactttccaaacaagtacctaaaactcatctgatgtctgaagaggagtggaggagacttggtgtccaacagagtctaggctgggttcattacatgattcatgagccagaaccacatattcttctctttagacgacctcttccaaaagatcaacaaaaatgaagtttatctggggatcgtcaaatctttttcaaatttaatgtatatgtgtatataaggtagtattcagtgaatacttgagaaatgtacaaatctttcatccatacctgtgcatgagctgtattcttcacagcaacagagctcagttaaatgcaactgcaagtagg

SEQ ID NO: 12794 - DNA, 331 bp, Homo sapiens
acgcaggtagccgacctgcaggagggcctacaaacgggcccagcaagagctgggcaacagctggcttgtgaaatgagacaccttgaccaatatgctttgggtggacggtctcctacatgttcagtggaggccaccaggagcatccatgagcggggaaggggtccacacccttacatggcaagttgatacgatggggtgcttggtggatgggccatggaggtccgtgagctggaactgggcacacgccatcccagagggctcaggatgccccaggaaggaaagaagggcaacagactacacgattggacgtgtgtggttgactgggatgaag

SEQ ID NO: 12795 - DNA, 460 bp, Homo sapiens
  misc_feature (1)...(460): n = A,T,C or G
natcgagatccctagttcgagcgctggaattcagaagtcacctattgaaaactggaatggcccattcagaaagacaggagaattaggagagagtgagtgaaagaagccaagggtcaagaatgcagaagcaaaggaaggactaaaaagcctccacggacatcgataatcaagagattattaagatctttgctagaagagttcctttacctgtacttaactcccttaaaaagagaaaagtgatggaatgacttctgcaactgtagtcccagcaggaactgtgaagaccagctgccctgcaggatccagtttttcttgggaggttgtatctggtcataaggcaaacattctatatattctatgcctgctctagaattgaaagacttcagcagtattaaagcattttttaatcttatttgagctttcatattcttcaatgttcctttcgtatacctgagttatn

SEQ ID NO: 12796 - DNA, 335 bp, Homo sapiens
aacctccagaatattattagtctgcatggttaaaagtagtcatggataactacattacctgttcttgcctaataagtttcttttaatccaatccactaacactttagttatattcactggttttacacagagaaatacaaaataaagatcacacatcaagactatctacaaaaatttattatatatttacagaagaaaagcatgcatatcattaaacaaataaaatactttttatcacaacacagtacatatttgtcatttttaaaaagccacacaatagaaacaagacaccaagatatttaattatcttgttgactcctgtaaaatagctaaac

SEQ ID NO: 12797 - DNA, 449 bp, Homo sapiens
ggaacagatataaggtgtcagttattactcatttttcatctccaccaaaactttttatcagagtagcatatcttagaggctaagaatgcatgctttgcagataaaccacttgggttgaaattctgctttatcacttcctggttagtgacatcaagcacattaaccagtctctaaaaacccgtttttgtttgtttgttttctgtttgtttttttactctacaagatgagaaaaacaattccccatagagttatgaaggttatataagatactatcataaggaatgtaacacaatacctggacatattagcactaagttttagttttctttattaccactgttgagtaataatttaaggcagaaacaactagattactgtcttagcacctcatgaatagaaccttaatttttaggggtgtggcatgtgcccagctaaaagataacattttc

SEQ ID NO: 12798 - DNA, 498 bp, Homo sapiens
  misc_feature (1)...(498): n = A,T,C or G
gccccatcganncccctcgnnnnatggagaccctaggccangncgnggaattcgcacccttgcttatctgggaagtggagctgatatctgcctgccggcctcccgggggtggcgtgaggccagatgtgctagagagtggagatgaatacgacaggcagtgccttgtggcccacagcactgtacctgcaggcctgcagaccagaggtctttgtagaagggaggagctcaggccctgatgacaccaggtgttctgtggctgcacaatctccgtgacccagacgagagagaatccttagctatcgcctacccaaagcacaagttccagtgttcccctcccttgcctcgcccttttccgtgaaacaatttccagcgttccccctcctcgcctcacccttttctgtgtcacatgtgcatggcgatggacacctgagtagtcgcccctgggacaactggagctgcggctctgcagtggggtctgggagctcccggccaggggca

SEQ ID NO: 12799 - DNA, 431 bp, Homo sapiens
gacacaaacgtgtttcgtaagcccaggcaccaatgggaatggaccaaagagtttcagggaaactccagtatattccagagtcagatctaagctccaggcacgcctgaagatgtgttgctactctgacatccagagtttctgtccacacattgcatgcacagcgccccacacattggatactgttgttcacgataatttctcccgttttccagagcatttaacatagcttggaggcgtaaaatggctctgtattttaataacacagaaacatttgagcattgtatttctcgcatcccttctcgtgagcgcttagacctttttctattttagtcggattttgttttggaattttgcttttgtatgaacactcagcagagaagtacttacttcttgccagttatctattaaccaaaacctttgatttgtagttt

SEQ ID NO: 12800 - DNA, 472 bp, Homo sapiens
  misc_feature (1)...(472): n = A,T,C or G
gacgggacccgggtggcnancacatgaacttactaatgacgtcagnagaancgnngnaanannnggaaanctcagctgcaggtaatagaacatttctgcacagatgattttagtttggtttaatcttcaccagcttatatccagcttgcatggcgttgtaaagctgaaatcagaatggatacagctggcgatgtaactacattacttagtaggcagttttttccggcttctttccattatgtttattgatctgttgtgggttggttggttttgaccaaccagaattgatctattattgttaactagcgcctgtagttacacccgggctctggcgtgtgcggcgcctcctggggctgtggcgagtgtgcgatgccctgcctgtgcccctcacgccgccccctgcagagcagccctgccaccctgagcgctgtagctcgttctgtctgaccctggcggggcgagctccatgccg

SEQ ID NO: 12801 - DNA, 473 bp, Homo sapiens
  misc_feature (1)...(473): n = A,T,C or G
natagaagcccgtcggaannnncnnaatgatgaccattagaccagcccggnggaattcagaatttgaaaatccattaaaatgaaatctaccaagacagagaaatattgagcatcacacaaattactattttaataattatgagattctctaaccccctcttctctgaaaagtttaaaataaaatatctctgggcatttaatgtagatcaacaaaagaaaagcttttgttgttgttgtttttgctggcccttcttaatgattttttttaaaataagtgacactagtacttgtcctggtttcaaacataacttcaatctggcaaacgttttcacttgtcttcaaggaacactatgttctttttgatctgtacatattgctgactgtccctacagagaagcacactatcatgccagatttactcattcctgttgttatatataaatttcatggtggataaataaatataaaatatt

SEQ ID NO: 12802 - DNA, 493 bp, Homo sapiens
  misc_feature (1)...(493): n = A,T,C or G
cgccgatagaaaccntcggagnattgaggaccttcgagctggacnggagctggggggaggaaaaatcaactctacctggctcattaggaaaggttccattgcagaggtgacctttgagcaggatcttgaaggaagactagaaatttgccagatggagaaggaagaaagaagattccatgcagaagaagcaacacaaagaaccagaggcaagaaagaacatatgtgctcagggagaagtacccttcttccatcaataatgatgggcacggtggctcacgcctgttattccagcactttgggaggccaaggtaggaggattgcttgaggccaggagttcaagaccaacctggacaacatggaaaaaccctgtctctaccaaaaaaatataaaaattagctgggtatggtggtgtagatctccagtcccagctactctggaggctgaggtggaaggatcgcctgagcccaggaggcggagtttgcagggagccaac

SEQ ID NO: 12803 - DNA, 491 bp, Homo sapiens
  misc_feature (1)...(491): n = A,T,C or G
tggggggnnttttgagaactgagtcccctnggnggaantccggcaaaccccgtctccaccaaaaaaatacgaaaaccagtcaggtgtggcaggctgatgcaggagaatcaggcagggaggttgcagtgagccgagatggcagcagtacagtccagcttcggctcggcatcagagggagaccgtggaaagagagggagagggagaccgtggggagacgggagacgggagatgggagacagggagggagagggagagggagacgggagacggggagggagacaggagacgggagacgggccgggagagggagacgggcagggaaaggggagaggggagagggaaaggaccctctggcatttttaggaattgttgtcttaccagaatgagaaccaaatactggtggtttgggatatgcaaaagtcctttatggattttgaaagttaaaaaaatgaaagttaaacaattatgtatagcttgctcttttgtttttg

SEQ ID NO: 12804 - DNA, 448 bp, Homo sapiens
  misc_feature (1)...(448): n = A,T,C or G
nttcgagaccctagtccacgcggtggaattcattgtatacatgcatacatgcctacctatgtatatataaacaaacatttttgtaaacagctcagtgaggactttggactggcataaatcataggaatatgattatgaggatacatccaattttcagattgggcaatgtatacagtttattatcatttctgattttgagtagagttagtactaagaacagcattgaagaaaagcagtataacattaaaattaagaagatttaaaatacaagaggattcataacagtcacttttaaaatattgttttggctttctactttggagctgtaattttaaaaaaagaatgaacaggtttttgtatgaatatgttagaatgattaattatagagcatctttcaactggaatacatgtagatactaacacctgggtgtatttgatgtaatttcag

SEQ ID NO: 12805 - DNA, 444 bp, Homo sapiens
  misc_feature (1)...(444): n = A,T,C or G
atttcactggatcccctacganatgcggacatccaagagacagaagcttacagagagaccctctgatgcatgagccaggccccagcccttctccctgcatccatttgtgtttccaccgcagaatgcctccacacaatgagcgactttggccctgcgtgggtcagcatgtggtctgaggtaaccctcaaatgcctccaccacacatctgtccacctgcacgggttcaaggtgagcacttgcccccttctctcctccagaccagtcgcctgaaattctgagcaacattccttcaagactatcatgtaacccttggtgatgctgagtccagacaggaaatgcagacttgggacccacctgtatcagcagaaagaggccttgtgccccgtttgtccgagtcccagaacggagcaaatgagaaaaccggcgagctgtcccccgaggagg

SEQ ID NO: 12806 - DNA, 460 bp, Homo sapiens
  misc_feature (1)...(460): n = A,T,C or G
ccccgcccccnnnnnaatagaaatcgagnacattagcccgngcggtggaattcgtacttacttgtaaccctttaccctataattgctatccttaaagatttcaaataaactcggagggaactgcagggagaccaacttatttagagcgaattggacatggataaaaaccccagtgggagaaagttcaaaggtgattagattaataatttaatagaggatgagtgacctctgataaattactgctagaatgaacttgtcaatgatggatggtaaattttcatggaagttataaaagtgataaataaaaacccttgcttttacccctgtcagtagccctcctcctaccactgaaccccattgcccctacccctccttctaactttattgctgtattctcttcactctatatttctctctatttgctaatattgcattgctgttacaataaaaattcaataaa

SEQ ID NO: 12807 - DNA, 462 bp, Homo sapiens
  misc_feature (1)...(462): n = A,T,C or G
aatgagactctagaccangcggatggattcccttaatcgaatctggtcagtgtagctgggcatggtggcatgcacctctattcccagctacttgggaggctgaggccagaggacctcttgagcccaggagtttgaggctgcggtgagctgtgattgagccactgcactccagtctgggagacagagtgagactccaactcttaaaaaaaaaaaaaaaaagaaagaaagaatttgttgggggaacttactgggcgggagctggataagggaaaaaataccctgagaggagggggaatgattgttttacccccaggtagcttcaaactatttggtttaaagaggcaaagtttgataaaccctgaacgggcagctagcataagggtatcatcactgttgttacaggcgaggctgaatttgaatagataacatttacaagctatttccaaacttgaatttggtggg

SEQ ID NO: 12808 - DNA, 497 bp, Homo sapiens
  misc_feature (1)...(497): n = A,T,C or G
cgcccatcgagnccntcgnnnattgagaccactggccangncgnggaattcgttgtaattttatttcatgacagcaccatcttctctttgcctgcgcctgggcctcctagtgtgctgcttacgtgatgcccacgtgccacagagttattgcccgaagtgccagtgggctgtgcaggggatgggctcttccttccagatggtctgcagcctctgggaccacgcagccaccatcccctttctttcttcttcggatgcaatttcaggagcaaagctgatctgaggggcaaggactttaaatccacagaagtgtaatgtgccatgctaaagccacaggggaagaaaagaactcattagaaactacacctgttacataccattcggttaaatgatttaaggggggaaatggtgtgaaacaaaccttcaaaaaatcatgaaacaaccttaatgttacaggcaactgaaagctaaacttccctatggctttaggacacagcctt

SEQ ID NO: 12809 - DNA, 453 bp, Homo sapiens
  misc_feature (1)...(453): n = A,T,C or G
catagaccccccactgatgacattagtaagngcggnggaattccagagttacaaagtctgctccttggccccagcttggtcagttctgaagggccttcctagctccagagttgcccatggttttggctgaggtcttgttgaaactctttgataagtcagcttctctctctgcccactcctgctcttccacaaaggttttcccaaaatcacttcccaattctttaaatttccatctccatctcagaatttgcttcccaaggaacccaatttatgacacatttttattaatttgcaaagtctgtaactacaaagcaaaaaatgaattaaacttgagcatttttatatgtcagagtttaagaatgtatcattgtttggatagtacatcttttcagaagcaagcatagaaatgggtgaatgagcacgtcctaagctttttttacccttctgaatcan

SEQ ID NO: 12810 - DNA, 458 bp, Homo sapiens
  misc_feature (1)...(458): n = A,T,C or G
gaggggccnnnnnnatagaaaactgagaccatagcacagagcggnggaattccagggatcggcgcccgttctctggcagctcctgggggcacttaaggaaagatgcggatgcaagcctctgatctgtcactggccagtggttcagtcttctctgcttgcgtagcaatttgttaaattacgcctcttgatatatatgtaatctacttttttttttggcaaggcacagttacggttaaatgattaaggggggcgtattcgaatgtttatgttttcatcaaaatgtaatcaaaatgacgcacatttttatagcggctacaatattaaggttttctaaatctttttctcattagaggaccatattcaacgataatattatttatctataacagcgtttttctacaatggacatagctgttcaaatgtttctctttttgtgagagtatcttgggggttttatt

SEQ ID NO: 12811 - DNA, 448 bp, Homo sapiens
  misc_feature (1)...(448): n = A,T,C or G
natcgagttcgatacccgngcggggaattagggtagcctgtcattgctttaaaggacaaaatgaaatccctgatgggcaaaatatgtcccccctcttcccccagcttttggtcggctttgctcacccaccaacagctaggagctggaaggctcagaagagctggggtgggcatgggagagacagaggaaccccggtggctggaaacacagttccttcccagggtctcttcagcttgctggttggacctcttagcctgcttatgaagcctgaattgacatcatgccaactggtctcctgctgataagtgattccttaacttcctcgggagcagcagaaacttgttttgaaaaaaatcagattctaaatctttacagctgtttacttctgcaagcacaatggccgtagtaaggaattcaagtcacagcgcagccgtggcagggaaggctc

SEQ ID NO: 12812 - DNA, 470 bp, Homo sapiens
  misc_feature (1)...(470): n = A,T,C or G
ggcgggccccggcggccaactcctggactactatgntcgaccgcagnanctnngnaannngnnnngaataattctactattttgtggcacagaaatttgatatcttcagtcagtatatgtaaagattgtttatcggaagacccatgaaggagttttggtcagaaaattccacttgtttccttagtgtaatagcagtcatatctccgaattttttttaatgtggttcggatgtgaaataaccagttatacgtattaaacagtttacagtctaaaggaaacaaaacctatatgttataatatccaagaagtactaataggttttctgaaatgttatattctctatgcatttaaaaaaaaatgtaaacttgacattttagggtcttcagttacacatacacctgttataaggtgtttaatatagctcaggaaagtgagcattttgtgagaaaaatgaatatatcatatctaag

SEQ ID NO: 12813 - DNA, 454 bp, Homo sapiens
  misc_feature (1)...(454): n = A,T,C or G
ggggtggnccngatgatnncctaatgatgacnatcagaccangcggnggaattcgcggcttttcaccgaggaggagctggcccgctatggcggggaggaggaagatcagcccatctacttggcagtgaagggagtggtgtttgatgtcacctccggaaaggagttttatggacgaggagccccctacaatgccttgacggggaaggactccactagaggggtagccaagatgtccttggatcctgcagacctcacccatgacactacgggtctcacggccaaggaactggaggccctggatgaggtcttcaccaaagtgtacaaagccaaataccccatcgtcggctacactgcccggagaattctcaatgaggatggcagccctaacctggacttcaagcctgaagaccagccccattttgacatcaaggacgagttctgatgttccccctgg

SEQ ID NO: 12814 - DNA, 333 bp, Homo sapiens
ggccatgggtcggcccctgctgctgcccctgctgctcctgctgcagccgccagcatttctgcagcctggtggctccacaggatctggtccaagctacctttatggggtcactcaaccaaaacacctctcagcctccatgggtggctctgtggaaatccccttctccttctattacccctgggagttagccatagttcccaacgtgagaatatcctggagacggggccacttccacgggcagtccttctacagcacaaggccgccttccattcacaaggattatgtgaaccggctctttctgaactggacagagggtcaggagagcggcttcct

SEQ ID NO: 12815 - DNA, 332 bp, Homo sapiens
ttggctttgctggagcgccagtgtgctgtggcctttccccgcctcccaccctagtacccacgttttgctccacactccttgaccgcaggggctcggacacaaacccctgtcaccaggagagtcagtcagcactacttgggagggctaaagggaaatttggaaataaaattccaaagtttggagtaaaaaaattcaagtgttgattttatattctttccctttctgacacagcctaaagcgtagggggaacatgtgtttatctgtgggagataaacaagatggagtcccaaagactttaacaaaatatttttttaaaaatccactagaatagg

SEQ ID NO: 12816 - DNA, 437 bp, Homo sapiens
  misc_feature (1)...(437): n = A,T,C or G
nactgcgaccctactgaagcgtgggaanncctggggtgagagcagcttccgataggacctgcccagatttctgcatgtgcacttttgtttactgaaagagagaaaggggggggtcacagcaacatgccctggcctttctgccctgttccccaaccccactgaggcctgctgcacaggtcaatgccttcgttatcgttattgtactgtcactttgttcttgaggtagtagtcaaggatcaggaggggcagatgtcttctctgggctgcgtggggccggagcagaggtgagcagcaatgcactggttcgggagcccccatcagcctccttgtgcaaactgggcccccatgccacagtctggctttccctccatctgccccaggacaagagcaagaaggacatcagttgcccagtcatgtgatcccctgccatcttgcct

SEQ ID NO: 12817 - DNA, 450 bp, Homo sapiens
catagagaccattggacagactgttggaattctgagaatggtgccttcatgacttaatcacatcctaaaggccccatatctgaatactgtcaaaatgggtcttagtttccaacaaatgaatttgggggcacacatacctttaaaccatggctcctactaagcacatttctgttaaatcatactgcctgaattctttccccgttattgcaagtcacaagcagaagataatttactcgcaaaattattttttttgcaaatctatttcagtttttatgaataaagacagattcactcaaataattcacataaatgtatttgtaaacgttatacctgaggaggaaatgaatataaaaaaaaaaagttgattgatttaagggcactgaaactgctcatcaattatttaacaagtacatacggagcttctacactgggccagtagttacgctaggt

SEQ ID NO: 12818 - DNA, 470 bp, Homo sapiens
  misc_feature (1)...(470): n = A,T,C or G
natagagaccatagnacnnnncnnatgatgaccattagtccangcggtggaattcgtgtcaccatgttggccaggctggtctcgaactcctgacctcaggtgatccaccctcctcagtctcccaaagtgtgtggattacaggtgtgaaccaccacgcctgggctagaatgttttagctctttataaacatgttttatgatttaagactgagtttcaaataataaaaaataatcgagagcttgaagaaaaagaattcattgggaagtatcccatcaaacccagcgcaagtaatatatcctggaattggaagcagaatgggaactatggactcagagaagattgttctggacattatttgattcttctttctcgctgccaattggatactttttttttttttttaaaacaaattttctttttgccccccaaatgggaggggtggggcgcaatttgggatcacggtaagctcn

SEQ ID NO: 12819 - DNA, 576 bp, Homo sapiens
  misc_feature (1)...(576): n = A,T,C or G
cggtngacccgnnttttgaaacctttcgaacactactccgtgtggngcaattcanaatatcacaggtgccaagtagccgtatctgcgtgtcgtcctccccggngccagccatgttatctggcggttgctgtgtccccctgactccacagcacattaccctgtgaggtgagcaggccaggggagtctggtatttgtaccactgtcaccctagctggtgtctggagaggtgctcaagtggaagcactgaagggcgcctggcgcaggaggtgcagatgctcctgctgcccttggtaggtgggcccctggtgtggaagagccagtacccagggcctccaacccagccggggtgcattctgttgccagctgacactgcatgggggaggcccagaatcttcttccctcctggtctgcaacttcaaagaccctttccgccggccatggacaccctaatctgccattntgaggctttttccaagacggaaaggcccgccacaacttggtaaaccttgacgatgtgaacgcgagtccccagctttcttttgggactgggaccttttccagaaagggcctcctggg

SEQ ID NO: 12820 - DNA, 463 bp, Homo sapiens
  misc_feature (1)...(463): n = A,T,C or G
attttgccttcagtaacttaggccangncgnggaattccatgaacatggtctactttggaggtatgaggggtaaaggtaagagaagtagggcagactgggaactgttccctgagtccccctaaccactgtggcttggggacacttgaggctagcagtgattgaggcttggctctccaaggacaggacttggccctggtggggtgggtggcagcactgcccaggttcggccacacctggcctcaggggaggctgcccatgtcatctatagcttggctccctccctgctctcaggctgctgagccatggaatctgttttctatctcccagtttaaagtcctcaagaagaatgtcagtagcattcaaaggaagtgctgggatccaggaagaatcctctccgtcagtctcctttaagggttgtattagtctgttctcattctactaataaagacatacccaaaactg

SEQ ID NO: 12821 - DNA, 483 bp, Homo sapiens
  misc_feature (1)...(483): n = A,T,C or G
naactgtagacatctgananngcggngctgacgacccttagtcagngcggtggaattcggaaataatcagaattgcttttaattcagctcctactatattcccgcatccctgagcctcacaatcatcctccaaggtaggtatttttgtctttctctaacagatgaaaactctgagtttcagaagaattaaatgacatccccccaaaagagagacagtataagaatccaagtcaacctgagtccaaaaccagtggcccttaacactgtgtggctttatggaggacatggagtttaagtttaccttcaaggatgagcaacacttttcttcaagcagaaaaagaagggaatgggtgaacacggtcccaggatgttcgctttggcagatgattagaatacgtgctgacttgatagccacaactgtcctgataagaaagtacgccggcctggctgggcatggtggctcacgcctgtaatccgaggatt

SEQ ID NO: 12822 - DNA, 472 bp, Homo sapiens
  misc_feature (1)...(472): n = A,T,C or G
nctgangacatctgaacangcggngctgatcacccttatanggccgttggggacagagcatgcaacgggcagctgttcccggtgacctgggcatctgggacttactgtgggagagacgtgatcttggcctagctgaccaccatcgaaaccactcatcggaggcgtggatgcagtttgctgggaagatgagcaccgatctgtctggtggtcacatggagggctttgcagatctctgacactggatatttccccttgccctggtgccaaggactaggggagagatcactctgggcttgagtcagggacagggatgccaggcacagcgaaagaagatgactgtggtacaaacccagctgatgaagtggaaaataaataaaagagaaggaatcaagctggttcatgtaggaagcatgcacacactcatcccatccattgttccacatcgggcacctccctgagctagctgccactt

SEQ ID NO: 12823 - DNA, 453 bp, Homo sapiens
  misc_feature (1)...(453): n = A,T,C or G
gggcgggnaattgagnacccttnnnattgtagatccctagtccagtgcggtggaattcggaaactttattgtggtgggctgttataatggattagtttatgttctgaaaagtaatagtggagaaaaatactggatgtttactactgaagatgctgtcaaaagctcggcaaccatggatccaaccacaggactcatttacattggatctcatgaccagcacgcatatgctttagatatttatagaaagaagtgtgtttggaagtcaaaatgtggaggaactgtcttttcctctccgtgtttgaacctgattccacatcatttgtattttgctacattgggaggacttttactggctgtaaatcctgctactgggaacgttatttggaaacattcctgtggaaaaccactcttctcttccccacaatgttgctcacagtatatttgtattggctg

SEQ ID NO: 12824 - DNA, 482 bp, Homo sapiens
  misc_feature (1)...(482): n = A,T,C or G
cggcgaggggnnnnntnngaatagtagaccatagtccgtgcggttgaattccctggttgcagctattcttgtgttctttttaaaatatctgaaattatacttagatatggggcaggctttattcctacccaagtagcagcgatcagcgatgctggtgctaacccctggtctttgtctgtttccctattgctgacctcaggcaccacactgtaactcgaggcatcaccaaaggcgtgaaggaggactttcgcctggccatggagcgccaggtctcccgctgtggagagaatctgatggtggttctgcacaggttctgcattaatgagaagatcttgctccttcagactctgacctgagtggagacctttccaccagacacagctcgggcctgtgtaattgtaggagaagacactcagcagtgattgccatggcacagagccgtggtcattgttgctgttacaaagaagaaaaccatctgagtt

SEQ ID NO: 12825 - DNA, 481 bp, Homo sapiens
  misc_feature (1)...(481): n = A,T,C or G
ccccccctacggagagctttcggaaatgcaggccatncgnnccatccttcccactgctccacgggctgctcgggaacccaatatcgaccggagctgtcttcccaaatcgccaccctacactgcttttctaggaaacctaccctatgatgttacagaagagtcaattaaagaattctttcgaggattaaatatcagtgcagtgcgtttaccacgtgaacccagcaatccagagaggttgaaaggttttggttatgctgaatttgaggacctggattccctgctcagtgccctgagtctcaatgaagagtctctaggtaacaggagaattcgagtggacgttgctgatcaagcacaggataaagacagggatgatcgttcttttggccgtgatagaaatcgggattctgacaaaacagatacagactggagggctcgtcctgctacagacagctttgatgactacccacctagaagaggtgat

SEQ ID NO: 12826 - DNA, 491 bp, Homo sapiens
  misc_feature (1)...(491): n = A,T,C or G
aggtgctnnaactgagaactgagtaccctacgnggaanccggcagccaacagccacctcagccacagcaaccatattctcagaaggctctgctataggacccggtgttcctcttggtggcagatacctgctaaatgccactgacaatgttatgagattcattactatcttaagatgtgtttatcctcagcttataggaatctctccaggtcaacaggttcaaatattcaagaaggtagaactctcctcaatttacactgaccttttagaggttcttccccccccgcccctgcagaggaatgaaactacttacaacatttaattcctttcataatatgaaagaattgatacaaggctatttgtctcgtaaacctggtctgcagaaagtcaaacttacaaaaactgttgtgacaaatgttatgtacatatattgatatgtaactgcattagtggccattttgaatcacagtggtgatcgtgtgaatatattta

SEQ ID NO: 12827 - DNA, 450 bp, Homo sapiens
atggaagcccattgaagacccctagtccatgcggtggaattcccccaccatgttgtagaggcagaggtgtgttttcatttgctcatggacacccatgcactattccttccctaggcctcccttctctccatgactccacctcctcaccaccgcccccttctttccctcctcctttttccttctactcccctccttccattcccctcctccttagccagtcttacttctccttgaaatcattatcacagaatgaaggcttggatgttgtttgcatacaactattacaaagagacccaaagtgacatttctttatgggcctgggttccagcctgtgacaaacagagctgatatcagagaaaacaaattgttaatgttatattggaatttcactgtgggcactagatatttgcaagaggtaaccaaatgtacaaggggtcgaagcagatgaat

SEQ ID NO: 12828 - DNA, 480 bp, Homo sapiens
  misc_feature (1)...(480): n = A,T,C or G
agttgaagacatctganannncngnactgatgatcattagtccatgtggtggaattcacagttctgccggcagatatgtttcaagacgctgtaaacctctgaaggaatttatgctttctcaagatgttgaacatgagcgtctctttgacctcattcagaaaatgttggagtatgatccagccaaaagaattactctcagagaagccttaaagcatcctttctttgaccttctgaagaaaagtatatagatctgtaattggacagctctctcgaagagatcttacagactgtatcagtctaatttttaaattttaagttattttgtacagctttgtaaattcttaacatttttatattgccatgtttattttgtttgggtaatttggttcattaagtacatagctaaggtaatgaacatctttttcagtaattgtaaagtgatttattcagaataaattttttgtgcttatgaaaaaaaan

SEQ ID NO: 12829 - DNA, 476 bp, Homo sapiens
  misc_feature (1)...(476): n = A,T,C or G
cgccccccccccccccccccatagtagacatcattgagngcggtggaattcccacaaaccagatagaggttctccagcttttctttgattgactctgctttagcgtctctaaatccggtcaccatgtcggaccccgaaggcgagaccttgcgaagcacctttccctcttatatggccgaaggcgagcggctctacctgtgcggggaaatttctaaagccgcgcagagcttcagcaacgctctttaccttcaggatggagacaagaactgcctggatgctcgctcaaagtgcttcctgaagatgggagacttggagagatccctgaaggatgctgaggcttcgctccagagagacccagctttctgtaaggtcattgcctaagtccctgccccctgtattccaaccttgaccttcaacccaggacccttctgttccaccacatgtccttcttccattaagctggagacaaaggggan

SEQ ID NO: 12830 - DNA, 460 bp, Homo sapiens
  misc_feature (1)...(460): n = A,T,C or G
cggggnattgattcgatacattagaccangcggnggaattctaagagccaaggcccaccaaggagttttccacccgtctctcatggtcacagcgcttttcattcatttttgagaagttgcttcttttacatcagaaaaccagtcaatcatatggagacttcttttgtgatgaaaaagggctttagaagttaaatacatgcatgcacatgaaaacatgcacaaccacagcctcaatcttgtatttagtttggggaaagagaagagaatttcctgtggattattttttcctcaagtgcacctctctggttaacccaaactctgcaagaaagcactgtgactaaaacatacataacgcctgcataaatattccatggtttcagttaaatttcagtttttagcctttacacatgaggtcaaaggagtgacgaanatacaaagcatggaataaatgaaatatctg

SEQ ID NO: 12831 - DNA, 444 bp, Homo sapiens
  misc_feature (1)...(444): n = A,T,C or G
gatgagnccntatgatgaccattagacagngcggtggaattcgaaaagattaacaaaattgacaaacctttagctagtctgatgaagagaaataaaagaaagtagtaaagttattaaaaaatgagagaagggcattaccaccaattttacagaaatacaaaaggattttaagagaatataatgagcaactatataccagcaaactggataacctacataaaatggacaaagtcctagaaatataaaaactaccaaaactgacactcaagataaaatagaatacatgaatagacttataaaagtaaatattgagttagcaagaaaaaacttctaacaaagaaaagctcaggaccagatgactccatcaatggattctaccaaacatttaaaggaaagttagcaccaatccttctcaaaatctttccaaaaaaatagcagagggaa

SEQ ID NO: 12832 - DNA, 491 bp, Homo sapiens
  misc_feature (1)...(491): n = A,T,C or G
cccccagccccnnntnnnnnatagaagnccataggacnnncnnatagangacccttagtgcagccggtggaattcgtatgagtataatacattgctgcctatacaacagttcattgcccttaagcgattgtacgcctataccttgccgtctctctttcatgcatcttcacactggtcgtcttggctgtaacctaaactatagctatagatcaacgctgaaacagtgggcaaaaagttcgttgctttaattgcactggaggtgaagctagttacatactttccttaacttcccttctgcttttgctgttgaagaggccaaatactttcttggcatgaaaaagtattataaggcccctaatccttaggagttattagtaagagctgtctttaaagcactggcagcttttaaggtttttttttcttttgtcctacatagagcaccagaataatttcacatattactatatttttgtgtctgaaatgtcagtaga

SEQ ID NO: 12833 - DNA, 472 bp, Homo sapiens
  misc_feature (1)...(472): n = A,T,C or G
gatcgagacctcactgatgagcgttcgaaanccgcccgcagaagcgagatgacgaagggaacgtcatcgattggaaagcgtcgcaataagacgcacacgttttgccgccgctgtggctctaaggcctaccaccttcagaagtcgacctgtggcaaatgtggctaccctgccaagcgcaagagaaagtataactggagtgccaaggctaaaagacgaaataccaccggaactggtcgaatgaggcacctaaaaattgtataccgcagattcaggcatggattccgtgaaggaacaacacctaaacccaagagggcagctgatgcagcatccagttcatcttaagaatgtcaacgattagtcatgcaataaatgttctggttttaccaaatagaaagctaatgaggatgctgagccagagnggttggctggagatttccccagggctggcgtggggtcattcggtgatggacaa

SEQ ID NO: 12834 - DNA, 476 bp, Homo sapiens
  misc_feature (1)...(476): n = A,T,C or G
gacctggcaanncaacnntgaacttcgctccctaggccangncgnggaanncgncggatgcagaagttaatattccacttaatgttatctgagcattaaaaatcatcagcatttaactgagaccccactatagagtttccttatcaagactttttggttttaaagttgtttttaatgcattgcaagttacaatagctattttgcttttagatttttcccagcactttgtatttattagctttcattaacttgcctccagtatacattccacttcgtgcttttcttaggtcatttctacatcccttattccttgttttcctgcagtgtaatggccctgaatgtcctctgagccttcagctccattatggacccaaactagactatacttggataagttaagctcttcttcgtgtactggtctataattagaaaaactgttttaaattagatgttcccattatttatttaaacagctt

SEQ ID NO: 12835 - DNA, 573 bp, Homo sapiens
  misc_feature (1)...(573): n = A,T,C or G
cgggtgacnnnnaattgannccaattgaaccactatccgtgtggnggaattcggactacaggcgcacaccactccaccaggctaattttcgtattttttgtagagacagggtatcaccacgttggccaggctggtctcgaactcctgagctcaagcaatctgcctgcctaggctcccaaagtgctggaattacaggtgtcagccactgcacctgaccctggctaatattttttatttttgtagagatgggatctcattatgttgcccaggctggtcttgaacttctgagctcaagtgatcctccagccttggcctcccaaagtgctgggattactggcgtgagctctttgttttcaactacttagttcctactgtaggaccttcacttagtgtcagccatcttatgcttttccttttccctcgcccttctctccttgagtctaagaagcccccccagggtgtgctctcaacattgtcaagctctttcccccccattggacagaatctccatctggtttctctgcaggtgctggaaacgtgcgtagcaacagtaggccgagtatccaaacgtga

SEQ ID NO: 12836 - DNA, 451 bp, Homo sapiens
  misc_feature (1)...(451): n = A,T,C or G
nttgactcgagacactagnccangcggtggaattcggacaccctccaccagtaacaggcattgggaaggggaaggcagaaaagcggagtgcaaaatgaagtggtagtgggtgctaactaacaagagaacctttgaacacgatgggacagaaataaggtcatgcattttctactatctgtcacctgtggacaacttgccacttcaacagttctggacacttttaagctcccccgaggagaagataggaaacttggacaccctgtgtgggattgagaatcacaaaggggcagtctcgcacctggtcaagataaagctgaactgaactcttcattcacaagtgggattctcgtaagaggcaggaaagcagggaccgtctgtcactacacacagcaagaagaggtgaaccttaatgagggaagaaaacagattctattaggggaaaaaaacattn

SEQ ID NO: 12837 - DNA, 564 bp, Homo sapiens
  misc_feature (1)...(564): n = A,T,C or G
natcgatcactattccagngtggnggaattcgtccttcttgatcctgaactgggttaggtgccgctgttgctgctcgtgttgaatctagaaccgtagccagacatgggactggaggacgagcaaaagatgcttaccgaatccggagatcctgaggaggaggaagaggaagaggaggaattagtgataggactgaggctttcagtgcatactggcaaccttggaaggcaggaatgtgaaacttttccctactacttagcatcagaattgaatgggagaccgcattctgccatttctggcggcagtgtggctctgccagctggccttctgcacggatcccctaacaacagtgagagagcaatgcgagcagttggagaaatgtgtaaaggcccgggagcggctagagctctgtgatgagcgtgtatcctctcgatcacatacagaagaggattgcacggaggagctctttgacttcttgcatgcgagggaccaatgcgtggcccacaaacttctttacaactttgaaatanatgtgtggacttaattcaccccagtcttcatcatcn

SEQ ID NO: 12838 - DNA, 464 bp, Homo sapiens
  misc_feature (1)...(464): n = A,T,C or G
ccctcgggtangcctagcgncacngncgnggaattcggatttcgccatgttaaccaggctggtctcgaactcctgacctcaggtgatctgcccgccttggcctcccaaagtgctgggattacaagcatgagccaccgtgcctggccttattggcttaatttttaaattatcctccaaaaattttgggcctttttctgtggggaaacaagtgaagctgctcttcagcatagacactacctttatcccatcattttagtaaaaactaggtttgtttcacttctgaggtgtcttattaatgtacttcatctgagaatttgttgatcttaatgttcgagctatataagaactgccattaaaaaaaatgggataatagatgattttatcagtatacctgtggaatatgtacaaactggatctatagatattttgaactggaccaggtgggtattgaagtaacccatcat

SEQ ID NO: 12839 - DNA, 469 bp, Homo sapiens
  misc_feature (1)...(469): n = A,T,C or G
cgagaaccccggctgcccgaaaagaaangcatcgaaangccagcaaggctgnggaannaaacatatacattttaaatggaaattaaggtttagaccaaataaaatcattcagggaaattgcatttacttttaaaaatgtgttgttcaaaaatgtatatatagtacaaagtgaattgaccaaacagaataattcttaactcacaaaggagtttgagcgcacttcctacatgttgaatttaaatctgactaaaggattgtaaacagttgtaattatgggttgtagtaacagagcaacaaggggacaatcttctaaacttgcctttgcctaggagagctactgtatatttccacaagtgaatttaatcagcagtaggagtggtttactcgtcactgacatgtggcacaatctggacaaattacacaaactggctatctcaaatgtgtaaaattaatgtacataaataaaccg

SEQ ID NO: 12840 - DNA, 461 bp, Homo sapiens
  misc_feature (1)...(461): n = A,T,C or G
aattgatttgcagaacactaggccanngcgnggaattccaatatttttatgtcagtgccgagcaaggtatagttatgctgaagggagggaggattattgctagatcgaactaggatgaaccacatgcaaggtctgtgataggaaagtaaactcagcatgttagctgagcatctcctgcatgtctatagcttttggccagatcctgcgtaggatataggaggaagatgagactgagccccttcccttggaagagctgactgacccacaggcagctgtgaagaactgaggcacacaagtgactgaggtagtcacttgcccatagtttcatagttaagtagcagagccagaatttgagtccagaacttagtttttttcctactgagctaatactagctttcctatgaaaattcaacggaagaggaatagtgctaggtgaacaagtctaagaagttttatagata

SEQ ID NO: 12841 - DNA, 460 bp, Homo sapiens
cgttcgtagacactatgcagtgcggtggaattctacccttaatggacgaaaagttgaaatacttttgtttcctcttggagcagttcagggaaatgcccacaggggattgtcctgcacagatagggcaagaggatttcctgggtggagtctgccaaggcctgcctcgctggggaccccagagtcctgcacctctggttccgccccaggtggtgacattactgtccccgttctgtggctcgtggacaagactttctccagaccccttaaagtggtacatattctaaaaaactgtttttctattatgccataaccttgctctagtcagtgaatgttcctaatgctgctgtttcaacatttgaattctttttaatttatgaaacatgctaaattttttttttcaaacaaaacacacacatccacatatacacatgcttcgctatgtggcttccaaggtttaaat

SEQ ID NO: 12842 - DNA, 443 bp, Homo sapiens
  misc_feature (1)...(443): n = A,T,C or G
gatgaggccctcctgatgaccctctagacgngcggtggaattccacgaacaggcacagagggcgaggggaggtattttgatacccaggtgccgaggcagagggtgacaatgaggctgggagccgggcagaggggaccctgtgtcctcctgaacccgcccccaccccgcctctctgtcccctcccagcaaagctctgcagcatggttgctgcatctgctgtcaccagcccttcctttttctcttgaagccatcccagccaggctttggctgtcaaggccccttggagacagctcctgtcaaggccaccggtgaaacactgaggctgcttccggaggccaggcctcagtcctgatcctcttgtgtctctcagagtatatgcggcactacgggccaggtgtgctggctcatgcctgtaatcccagcactttgggaggccaaggtgg

SEQ ID NO: 12843 - DNA, 499 bp, Homo sapiens
  misc_feature (1)...(499): n = A,T,C or G
aggggtnnnngnnnnnnnannagnnnnntnntttctgagancttctccagttgtcatcgcagngncncnaanannnnnggaggagagggggggngncatcctcttctcccagnagggcgatcaggagggncctctgatgcgctaatagggtagcaccgtgtcctccagggagggtggaagaccgcgcttctctccagttgagagtactgtcagtcgcgtccttgtctcctggaaagaatggattggcttgtggattgaagtccaagaaaacgccaggtcttcaagggtgtctgccaccaccatgcctgacccatttggcagcagcctcgtgtgtggtggtctggtgtggacggtggaagcgtgattctgctgagtgtcagtgtgaccactcgtgctcagccgtatctcagcaggaggacaggtgccggagcagctcgtgcagctaagcagccaactgcagaaacgtcaggcctgttgcagtctccaaggcaccatgaat

SEQ ID NO: 12844 - DNA, 567 bp, Homo sapiens
  misc_feature (1)...(567): n = A,T,C or G
ntcgacacattagagggcgaatctntttgggttntaagcattggaaccaaaggccaaataataaacagcctttagtttttaaagtaaaattcattttatttgcagagtacacttgtatggtagactgttaaagacaattttatgactatttatgcacattataatggttacatctgctttttgtctttaaaataaaaaaaaaaatcagagaaaagcccacctttgaatacgtggctgaagataacagccaagaattggtctttcctaaaaatgcaacagataatgctgctagattgttattttgtttgcacttttttttgattggcattttaaaatcggtatttaaactgaagacattgtcatgttttattaatttaacaaagttgaaagtgactgctctgtacatcatgaccttaacaatgttaatgcctgaagtgaaagttcacttgccgctgtatactaaatttaatggggttctaacttaaaagaagactgcaattatcccccaccanccttaatcccaagggtggggctctgtcgggtgcagtatgcagtcatgtggaacct

SEQ ID NO: 12845 - DNA, 574 bp, Homo sapiens
  misc_feature (1)...(574): n = A,T,C or G
cgcgcccccccnnaattgannnccatcgaaccactatccgngnnggggaattcgtaccaacaccaatgtgaagaactctagccaagaaccacggcctacactctccaacacaatccagaggccacaactaggtcccacagctaatttacccctggagatgggctcaggacagctggcacccaggcagcagcaacagcaaacagaattggacatggtaccaggaagagatggactggccagctacaatcattcccaggtggttcagcctgtgacaaccacaggaccagaacacagcaagccccttgagaagtcagatggtttatttgcccaggatagagatccaagattttcagaaatctatcacaacatcaatgcggatcagagtaaaggcatctcctccagcactgtccctgccacccaacagctattctcccagggcaacacattccctcctaccccccggccggcagagaatttcaggaatagtggcctagccccctctgtaccattgccagccatcagcttctgcaggacagatgttgccccagatttctcgcactccaccccacccaag

SEQ ID NO: 12846 - DNA, 482 bp, Homo sapiens
  misc_feature (1)...(482): n = A,T,C or G
ngttgaaaacccctgnaanannncnnnnctgacgaacactagtacagngcggtggaattcaaatttgaataataaagccttttcatgttcttttacatctcttatagatatttttggatttgttaccaaacattacatttactctcacccttttattatttttaaataagttatttcattacttgctgatacatgagtattcctaagtgtttataaatatttctataatagattcacatttatatttacattttaattaaacagtatcaaaattgcttgcttaaaacctaagcaatatgcattttgcttgaactgcttactgtaactttaacctaagattatagtgaccttattcaggaaaaaaaaaaaaaatttagggtaacttcaaagacttgacattcttgtcaaaggaaaaaaaatttctagatactgttggcttgttttttgtggttggaaaaaagataaaatattttggaagtaat

SEQ ID NO: 12847 - DNA, 440 bp, Homo sapiens
  misc_feature (1)...(440): n = A,T,C or G
natgacgaccancttgacgcccgttggaannccacgcacacgtttctgttcgatatacagatgcttcttgactcacgatagagttacatctcagtaaacctgtaatgaattaaagatgcatacacctcatgtaccaaatatcatagtgtattttatcctactctacatatgctcacaatacttatatttacttacaattaggcataatcatctaacacaaagcctattttataataaattattgagtgtcttgtaatttattgaatgctgtacgttgtgacaaaattgcaatggtttggcaccatcataaatttggaaaatcatttagtggaaccttcataagttgggaactgtttgtatacctataagtggaattattcggtcatagagtatgcgtatcttcaacttgagtagatttgcaaatggttttccaaagtggt

SEQ ID NO: 12848 - DNA, 470 bp, Homo sapiens
  misc_feature (1)...(470): n = A,T,C or G
taaacattgaaanccnttttgatgngcntgaanacnnaactgaaattggcctgtgccctgttgggacgctgcgaaagatctgaaagaacctcacagccctcctggggacagggtgggtgtgcagcctgggaacttcagggtttggcagggcaccatggagaaagccggtttggcttggacgcgtggcacaggggtgcaatcagaggggacttgggaaagccagcggcaggacagtgatgccctcccaagtccggagctgctaccccaagatcaggacaagcctttcctgaggaaggcctgcagccccagcaacatacctgctgtcatcattacagacatgggcacccaggaggatggggccttggaggagacgcagggaagccctcggggcaacctgcccctgaggaaactgtcctcttcctcggactcctccacgggcttctcctcatcctacgaagactcagaggagg

SEQ ID NO: 12849 - DNA, 553 bp, Homo sapiens
  misc_feature (1)...(553): n = A,T,C or G
natcgatgcactatcgagngncgngcaannccttaagcgggataaaccttttaatgagaacaaaaaggaaataaattgctaactctgaaggaaccagtaagatatacactgtagtatggtctgttgttttagaataatttgttaaatggaccagagtaatatagtggaacatgcatcaccttataccatatagtaactgattcttctaagtttacttgaacagatttcagtcaggaaaaaacattgctcaattgtgttcttcaatttattcaacaaacaattgaaaataatattttaaaggacataatctcttcatatcacatcttaacaattcttgaatgagatccagtttgtccatgccttgtaagtaagtttataacctactatgctttagggcctcctgctaccttaggttgacatatatttaagaaaaataatttcatttcaatagtagcataaacattagaaaaataaatttgctggaacatgaatgcatctacaccaatgtgatntaaaatatttctgccttaattccttcatatgtngaaaaatg

SEQ ID NO: 12850 - DNA, 454 bp, Homo sapiens
  misc_feature (1)...(454): n = A,T,C or G
attgagaactgagaccgtgcnggggaacgcagtnatctgatgccgttcctgacaatgaagacaagaaacccactgcaatccccattatacctattgctggggatgactttgacttacgagatgctggtgttgatggagaaaatgacgacccacgaccaccgaacccacccaaaccgatgccaaatccaaaccccaaccaccctagttcctccgggagcttttcatatgctgaccttgcggatggcgtttcaggtggagaaggaaaaggaggcagtgatggtggaggcagccacaggaaagaaggggaagaggccgacgccccaagcgtgatccccgggattgtgggggctgacgtggtctccgtggctggagccatctctagcttcattgcttaccagaaaaagaagctatgctgtaaagaagatgcataacaaggcgaggtggacatggagag

SEQ ID NO: 12851 - DNA, 458 bp, Homo sapiens
  misc_feature (1)...(458): n = A,T,C or G
cccgagtagcctacgacccgacgnggcantctgngtgtagatggacacagcggcagctcccacagtgatgctgctgctaagggcttccaaacattgcctgcacccctggaactgaaccagggatagacggggagtttccccaggctcctctgtgctttactaaaatggcctcagtctccactgtgggcttgagtggcatacactgttattcatggttaaggtaaagcaagtcaagggatggcattgaaaaaatatatttagtttttaaaatatttgggatggaactccctactgacctctgagaactggaaacgagtttgtacagaagtcagaactttgggttgggaatgagatctangttgtggctgctggtatgcttcagcttgctggcaatgatgtgccttgacaaccgtgggccaagcctgggcccagggactcttcctgtttcataaggaaag

SEQ ID NO: 12852 - DNA, 430 bp, Homo sapiens
aaattactttagagtttagcagctcaacacacgactgacttggaaacatcaggaaacctctgtaatgattacaccaccttgtactttgctcccatttctggtctctggattttaatccctttccttccttctgagatggaactggaagctgagaagtgatttgttaactcaagtgcagagcttcataatctcctttggttaaatttctacctattagtgtcagactatattctggttcagtagttttcaaaattttgggaggaaagtcctctcatggtcactgttccaaaaaaggtaacatcaaagattttaaaaagatgaaccttggtagtgtagttctgtaacttgattgtagtggttacaagagtctacacgtgctaaaattgcaaatacacacatacacaagtgcacgtaaaactagcaaaatctg

SEQ ID NO: 12853 - DNA, 559 bp, Homo sapiens
  misc_feature (1)...(559): n = A,T,C or G
natcggagcactattccagtgtcgtggaattcaagagaagtgctttgattcctcctgtggaagagacagtcttttatccttctccctatcctataaggagtctcataaaacctttattttttactgttgggtttacaggctgtgcatttggatcagctgctatttggcaatatgaatcactgaaatccagggtccagagttattttgatggtataaaagctgattggttggatagcataagaccacaaaaagaaggagacttcagaaaggagattaacaagtggtggaataacctaagtgatggccagcggactgtgacaggtattatagctgcaaatgtccttgtattctgtttatggagagtaccttctctgcagcggacaatgatcagatatttcacatcgaatccagccttcaaggcctttgttctccaatgttgctgtcaacattcagtcatttctccttatttcacatggcagccaataatgatgtntggtggagctctcttcagcatagtgaacattcctggtcaagagcagttaatgcagtgacctatttg

SEQ ID NO: 12854 - DNA, 559 bp, Homo sapiens
  misc_feature (1)...(559): n = A,T,C or G
aatcgatcacatcgcagnggcgggaagncgnngctntctcttgtttanatatggagaggtttaatcctttacataacaaaggaattaattttagcaaaatgattcattccaaccttcttataagaaatatctaggagagtcaagtaagaaaaataacgaatctaagtgataaacattcaagaaattctctaaataagagatttatttataattttaatatctcagggttctttttaggtttccaggggaaaagagcaagataacagtgtggagactgctaagttgagaatttaaaacaaatgagaacataagatttttaaaattgcattgtgaatgtaaaatttttatcaatcctttgctctcttttagacatattgagaaaatgttanatagaanaaattaagtaattttaataagatggttcagatctttgagtatganaaacataacaaanaagcctaatttcaaaaaactatttgagatcaaggggacatggttgaccaatatgaagggtcaagactganatgtattgctttactatcaagaactctancttcag

SEQ ID NO: 12855 - DNA, 578 bp, Homo sapiens
  misc_feature (1)...(578): n = A,T,C or G
cgacttaggcnnngatggaanccttccgaaccacctatccagtgtggtgcgaattccacatttcatttcttgttttatacatgtgatcttataaagattttttgttttgttttgttttccattttctgagatttatagattggtgtatagctttaaactgtataaagttttgtggaaagatttttttaaacatttttataaatcttaaaattgatatcatcaaagtgagcccatcttgtgtttataaaatacaagagtccttaacatttataattacatagataaaacactttctataaggaagttggatgttttgattttactgtttatagatgttagattgtacagatttgtctgtatttctcaccatatctaatgatacttttttcattagattggtcttcaagaacagtattagttataattattttggttattcagtatatagntagctcttacagtttagctttattcaccatatttatactgtggattcacagcgagaggtagaggttattccangagagttgatgaccttcttttaaagtcccactaaatcagtagtagaaacataagaa

SEQ ID NO: 12856 - DNA, 454 bp, Homo sapiens
  misc_feature (1)...(454): n = A,T,C or G
cctgattagcgtaacctaggacgngcgcggaattcttgatgagtaacaacaagaagcctgtcatatatcttagtgctgctgctagacctggcctgggccaatacctttgtaatcagctcggcttgccctttccctgcttgngccgagtaccctgtaacactgtgtttggatcccagcatcagatggatgttgccttcctggagaaactgattaaagatgatatagagcgaggaagactgcccctgttgcttgtcgcaaatgcaggaacggcagcagtaggacacacagacaagattgggagattgaaagaactctgtgagcagtatggcatatggcttcatgtggagggtgtgaatctggcaacattggctctgggttatgtctcctcatcagtgctggctgcagccaaatgtgatagcatgacgatgactcctggcccgtggctgggtttgcn

SEQ ID NO: 12857 - DNA, 457 bp, Homo sapiens
attgtcgtccctagtcagtgtcgtggaattcatttttgtatttttagtagagacggggttttaccatgttagccaagatggtctccatcttctgacctcgtgatccacccacctcggcctcttagagtgcttgggattacaggcgtaagccaccactcccggccgatatattgctttatgaaaattatactggatctgttacagatgatagtgttgaaccaagtggaacaaagaaagaagatctggatgacagagagaaaaaagatgaaactcctgcacctgtatatggggccaagtcaattctggagagctgggtatggagtaagcaaccaggtaatctttgatcagagatagaaattagtgtagacattttgcctccagatcctcaagtggttttagaaattggttctctaattctgtgggagaaggttgatactgggatagtcttacacgtcat

SEQ ID NO: 12858 - DNA, 461 bp, Homo sapiens
  misc_feature (1)...(461): n = A,T,C or G
aatgagtagcgtaccatagccangacgnggaantctgaggtaaaaatgccacgttttataaagacaaatttaagcatggacctaaacaagatggcctgtctaaagtcacctgtgacttggtgtgagctctgagacggcgaaactccacagcaatgatgaagacaacgtgaggtggaacttctctgaccagagacctcatctgaagcttctgccacagccagtcctgccttcatcccttgagagggggattggccaccaaagtatgcaaagcatttgaatggaaacgaattccgtgggtgcgccccacactttaatagtggccatcatatcactttctggtgccagtaaatgcgtaaaggggtgcatcatgccagtgacctatcactcatcatcccagtcattaagccacttacttcatgcctgtggggagtttctggaaggctcctttgaagcagggaaag

SEQ ID NO: 12859 - DNA, 336 bp, Homo sapiens
  misc_feature (1)...(336): n = A,T,C or G
ctgggganaagnnataaataacctaatgataatctatataggaagatgtgtgtaggttatattcaaacactatgcctttttatgtgagggacctcttgagcatcagatgattttggtatccacaaggggtcctggaatcagtcccccacagacaccaagggatgactgtagtgcattttaatagttttacttctggtacctgggcttttgatgttatatattaaaaaaaattagtatcaaatccaatgccaagcattntccctatgctttattctaagaattttatatttgaaggtcttacatttacgtctttttttttttttttttggaaggaac

SEQ ID NO: 12860 - DNA, 562 bp, Homo sapiens
  misc_feature (1)...(562): n = A,T,C or G
attgaggccatcgatcacctatccgagnggngcaattcccgggcctcaccaaggagcagctggaggagcagctgcgcccgctgccagcacacgactacttcgagttcttctccgccgacctgagtctttatcctcatctctactcaagagcatacattaattttaggaatcctgatgacatccttctttttagagatcgttttgatggatatatcttccttgacagcaaagatccagaatataagaagtttttagaaacctactgtgtggaggaagagaagaccagtgccaaccctgagactctgctgggggagatggaggcgaagacaagagagctcattgctagaagaaccacacctcttttggaatatattaaaaatagaaaattagaaaagcagagaattcgagaagagaagcgagaagaacggaggaggagagagttagaanagatacgtttgcgggaagaggaaaaaagaagaagaagagaagatgattgatgctnataaangagactgataacagaagaaaattgccgagatagatgtaaggattaagcttcttn

SEQ ID NO: 12861 - DNA, 425 bp, Homo sapiens
ggcgaagccgacaagagcccaaactcatctgtgctgcgctgcttttgagccacacaaatccaaataagggatcatccaaatcctttattttctctcgaagttttgtgatcattaatcagttaacagcttgttcccttctgtgctggacaacccccagctgcaaggggcaggaatggagcatgggggaggctgtaaaatagatcactcaggcgtttccctagcgagccccccgggaatgaacagaagggtttctctcctatggtgggatgttgctgtccatgggggtcgtcgaaggacgggtgtggaggcccaggaggactgcaggcaagaggggagaaaaggaagaacccgtctcccctcaactggatcatcatgggctgtgttgcactggtaaaccaaggtgccaaggctgcggcagctcagat

SEQ ID NO: 12862 - DNA, 457 bp, Homo sapiens
  misc_feature (1)...(457): n = A,T,C or G
naccgaactgcatagcctagccaggcgggaattatttgccccgggtcatagctgtagaggggcagatgtggtttgaacccagggcgtctggttcctctctggaagcaaccaaagtgcctgtgattggggtagtgacaaagcactctgagccgctgcatggcagatgctgtgaagagtcatctttgcctgtcccatatctattcccattttttctgattgtaacaccttgtttttttgtgtgtggtgggggaaccatgccctttcaaccaagctatgtggtgttcataagggtagcccctcctccgaccccaggagtggcagttcacagccctgactgatcacagtgttccgtggcctatctgtaaccaccccagggagtgagactgaactcaggggttcattggacctatcaagaaagagagacctttcttgtttctggacttggagctgtgatgan

SEQ ID NO: 12863 - DNA, 486 bp, Homo sapiens
cccccccccccgccccccccccgatcgagcacatatagtagaccttagtccatgcggtggaattcatttgtgacagctgcagttgctccccgcccccgagcagccgaggtgcgtgggggaaggggaagaaggaaaaggtccgggtcgcgtttccgctcagtttttgccagggttgaggcgattccagagagcggcggaaaggataagcctcgacttagaagctaccgagttaccctaagaaaggagtctaccatggctcaagaatctcccaaaaattcagcagcagaaattccagtgactagtaatggagaagttgatgactctcgtgaacatagctttaatagggatttgaagcattcattaccatctggacttggtctctcagaaacccaaattacatctcatggctttgacaataccaaagagggtgttattgaagcaggagcatttcaaggttccccagcacccgcactgccatctgttatg

SEQ ID NO: 12864 - DNA, 472 bp, Homo sapiens
  misc_feature (1)...(472): n = A,T,C or G
catcgaaatccattcccatangcagngngcnggaattcatttttcttctcttcacttctcccatccccccaaaaaaatctaatttctgtcattttggggacaatatcactctcactgagagtgcatgttcacatacaaccatgaatagaggtggttgccatgggctataccagaaatccccataattaatagggcattaggtagactattcataggggtcttgcctcagtcctggcaagtcctagaccacgtattactatggcggccccactaaacaaatcttcaaagatttggaaaaaaagatcaaaccgtttccaataactaattggcatctctgagcaaagttcacatgtatttccagtaacataaaactatccaacaccaggccgggcacggtggctcatgcctgtggtcccagcactttgggaggtcgaggcgggcagatcacggggtcgggagatggagaccatcn

SEQ ID NO: 12865 - DNA, 444 bp, Homo sapiens
ataaaattgtagacattagtcctggtggtcgatttccctgacgcccgtggaaggagtcaaacttgcgggaattttgcagtttatctgcagggctgttgtttccagcaagacccaaagctagaaaaggaggaggaagaaactgacccgatcagtgccagaagtcattgtattcaaagaagaataagcaagaaagaaaagaaggaaggatgagaggtagacagatacaagatgaaatcctgtcaaaaaatggaaggaaaaccagaaaatgagagtgaaccaatgcatgaggaagagccaaagcctgaggaaaagccagaagaggaggagaagctagaggaggaggccaaagcaaaaggaacttttagagaaaggctgattcaatctctccaggagtttaaagaagatatacacaacaggcatttaagcaatgaagatatgtttaga

SEQ ID NO: 12866 - DNA, 449 bp, Homo sapiens
attgatttcgacgaccactagtccgtgcggtggaattcgacacagtagactgtatttaatttttttctcccttcttggtagatctcttttggttaaaagaaaatgcgtcacttgcctcctattatagaagcttgtatgagcagccaggggtgcactctgcagggaaggcttggccattgccagtgagccttgctccactgtagctgccttagctcttcctcttttccagatgagcaggtgctgacagccaaaaaaatagaaaataagtggggagaattcaaatatggggaaaatattgtggaaaaaatagatgcttaatttttcttcttaatattatgtagaaagtaaatatctttgggtaaaatacatgaattgtagccactctagaaaacagatgtttaaaatctggcaaataatcttctgctaagttattacaggtccatgatttc

SEQ ID NO: 12867 - DNA, 446 bp, Homo sapiens
  misc_feature (1)...(446): n = A,T,C or G
ataaagtagannaccctagnnattgacgtacattagtccgtccggtggaattccacatgtaaaacagttattacaaatattttatacataaatctcttggtagattttcagaataatagagatttatatcaagaaaaggaatctagattttgttgcattgtaggagcaaacaaggcttcatattctttttaaaatgacttgaaattttattataaatttccatagtttctatcaaggtcaactggcagttttattacctttgctatggacttgaacttactgtataaaattagttggaagccatgtaagaaaataacatctgaaaattcttgaacttaaaatcatgcttaaatggttgattctccaatttctttttttaaaaataagttaattgcttttgcaggttgacactctcacctgacagatgatgtaattcttcaattttt

SEQ ID NO: 12868 - DNA, 449 bp, Homo sapiens
  misc_feature (1)...(449): n = A,T,C or G
atagacgacttgtagnccgtgcggaggaattccagcgggcgaaaggagcccgggcctggaggtttgcgtaccggtcgcctggtcccggcaccagcgccgcccagtgtggtttcccataaggaagctcttcttcctgcttggcttccacctttaacccttccacctgggagcgtcctctaacacattcagactacaagtccagacccaggagagcaaggcccagaaagaggtcaaaatggggtttatattttcaaaatctatgaatgaaagcatgaaaaatcaaaaggagttcatgcttatgaatgctcgacttcagctggaaaggcagctcatcatgcagagtgaaatgagggaaagacaaatggccatgcagattgcgtggtctcgggaattcctcaaatattttggaactttttttggccttgcagccatctctttaacagctggag

SEQ ID NO: 12869 - DNA, 474 bp, Homo sapiens
  misc_feature (1)...(474): n = A,T,C or G
ggggcaactggaatcggatannngnngactgatgtccattgtagcgtgcggtggaattcgaaagagagaacactgtttctatacaaactatacaactatataaacactatgtttgtatagttgccattcttgtttcattttctggtgttcatgcttgaatgtcagatactctctcagatctgtattctctgttttctcagtacctggaattatggtggtgtcccatcaaagtgacaggacatctgaggcccaagagtatcccttctctgggaaagggacacagttcttgagccttcaattctactaaaaactgccaagttcactttccctttttcgttattcttcttaggaaccgttgccatcatatgaattctggctcactatgctgcattttctacttccaccccagaatcttgtttctctctcaatgacaagtacttttttaagtttatggcattgggttggctgtaaatc

SEQ ID NO: 12870 - DNA, 461 bp, Homo sapiens
agagaaaaaattcgagattcgtagacattagtccgtgtggtggaattcgaagaaaacagactcctgatagttcaggatgcttcagagagggcagcacttatacctggtggtctttctgatggtcagttttattcccctcctgaatccgaagcaggatctgaagaagctgaggaacaacaggacagtgagaaaccactcttagaactatgagtactacttttgttaaatgtgaaaaaccctcacagaaagtcatcgaggcaaaaagaggcaggcagtggagtctccctgtcgacagtaaagttgaaatggtgacgtccactgctggctttattgaacagctaataaagatttatttattgtaatacctcacagacgttgtaccatatccatgcacatttagttgcctgcctgtggctggtaagggaatgtcatgattcatcctctcttcagtgagactgagc

SEQ ID NO: 12871 - DNA, 447 bp, Homo sapiens
  misc_feature (1)...(447): n = A,T,C or G
nattgaagtacactaccccaagcggnggaattccaagtgctgggattacaggagtgagccaccgctcccggcccagaacttttaataaatataaatacacaggtaattttaacacatattcctgatgaaatcattattatctgcaatgctttcattctgctttttctcttaacaatggcataaacatttttcaaggtcaataaatgtttttcaaaatcgcatttgtattagtggctgtatagttttctatcaaatgtggaataaactcaatttatttctcccttttgttcttgaacatttaagatcattggttcatagttactaatcatgttacaacaaatattcatgtattccaaattttgctcattcctgattatttccttagatttccaggtatggaataattaggttgaagtgtttgaaatctttttttgttggtttgtttgg

SEQ ID NO: 12872 - DNA, 547 bp, Homo sapiens
  misc_feature (1)...(547): n = A,T,C or G
atttgatcccanttagagnnnncncggtcccctatcagtgtggtgcaattcatttggtgctgatgaagcaatatgccctactgggcaggggagaggcacagaataagaattcttgccatgtggatgaactcattcaaacacaatgactgctttatgagacaatagatagatttctacctcttctcacatgtacagagaaaatatttccaaagtctccggaatatttacatgtattactatttaatataaacttgcaagtctttttaaatgtgtttaaaactatcacagtactaaacatgaactagatgcataataaatgctgaaagtaaaaagcctgaattatttaagtgaaaagagaaaaagatttagatcccaaataaatgtatgcgtttgtgtgtttgtgtgtgtgcgcgcatgtttgctgggcatgtacttgtaaaaagtaaaantaatagaaagtattattcttggtacccagcattctatgaataatgtcttccacaagattattagaacactctgctactttgtaggaggagctttggat

SEQ ID NO: 12873 - DNA, 451 bp, Homo sapiens
  misc_feature (1)...(451): n = A,T,C or G
aatagaaaaatcgtaggaccttantcagtgcggtggaattcctctgtcacatctctcttcacctgccttgagtgcttcataatcacgtggctttttcaggaatttcagcgatcaaagatcttctaattctgtgctaccactgacgtttgcacttaatacagagccacttgctctgtggccacctgataaatatttgctgatgataagacaaaaatatacacgtctattaagaggtctgcaatgtctgaacacagtgagggagaaaaatccttagagaaggtcgcttaatctcaattacccaaagtcattgcttggcagaatatctgtggtctgttatccttagtgaagtgacaggcttggagaagcagggaaatgtggggaccatgtgtgctatataaaccaaagactgatcaccatccaaatgaacacatgtttcttccattgactagtt

SEQ ID NO: 12874 - DNA, 479 bp, Homo sapiens
  misc_feature (1)...(479): n = A,T,C or G
ngggagtcnnnnnnnattgaaaacctcgcagaccactactccagnngcgtggaattctgtgtttttgcaacaacaacaaagaggggtggtgcacttaagaaaggaccaaatgccaaagcattgcaagtcatgaagcagacattaccctatagtgtggcagaccttgaatgggatgcaggtcataaaaccaatgtccagcagtgttactgctattgtggaggccctggagactggtatttgaagatgctacagtgctgcaaatgtaagcagtggtttcatgaggcttgtgtgcaatgccttcaaaagccaatgctatttggagacagattttatacgtttatatgctctgtctgcagttctggaccagaatacctcaaacgtctaccattacagtggtaagtgtggacctttctgttaaaagaaagaaaagccattttcttaaacctacaagttgaaactttctatatacatttacttgg

SEQ ID NO: 12875 - DNA, 462 bp, Homo sapiens
  misc_feature (1)...(462): n = A,T,C or G
atggaaaaaanttcgtagactgtagtccgtgtggtggaattcatgatgggcactaccgtggagatcccaactggtttatgaagaaagcgcaggagcataagagggaattcacagagagccagctgcaggagggaaagcatgtcattggccttcagatgggcagcaacagaggggcctcccaggccggcatgacaggctacggacgacctcggcagatcatcagctagagcggagagggctagccctgagcccggccctcccccagctccttggctgcagccatcccgcttagcctgcctcacccacacccgtgtggtaccttcagccctggccaagctttgaggctctgtcactgagcaatggtaactgcacctgggcagctcctccctgtgcccccagcctcagcccaacttcttacccgaaagcatcactgccttggcccctccctcccggctgcccccc

SEQ ID NO: 12876 - DNA, 453 bp, Homo sapiens
  misc_feature (1)...(453): n = A,T,C or G
nnggaattgaagacccctagtacagcgcggtggaattcgagacaccatcagccggagtggtataatcttacggagtccccggccagactttcggcctagggaaccttttctcagcagagacccatttcacagtttaaagagacccaggccaccttttgctaggggccctccgttctttgcaccaaaacgcccattcttccctcccagggactgatggaaaccaagggaaaggcattttgaacagtctagagaacattggaagtaggagcttggtttattggtgatggttttatttgggttctctttctcgattttttttttattataacaaagggcctctcttccaaagtaagaaatcacatacgcttacgttttactattcaattcaatcctccctcccattgcacttatctaccttccccaagttgtttgtattaaaaaaaaaaaaaaaan

SEQ ID NO: 12877 - DNA, 475 bp, Homo sapiens
  misc_feature (1)...(475): n = A,T,C or G
gagagttnnnnnnntttganncctgagatcactagtcagngnggtggaattcgccgccgcttgtgctgcagccatgtctctagtgatccctgaaaagttccagcatattttgcgagtactcaacaccaacatcgatgggcggcggaaaatagcctttgccatcactgccattaagggtgtgggccgaagatatgctcatgtggtgttgaggaaagcagacattgacctcaccaagagggcgggagaactcactgaggatgaggtggaacgtgtgatcaccattatgcagaatccacgccagtacaagatcccagactggttcttgaacagacagaaggatgtaaaggatggaaaatacagccaggtcctagccaatggtctggacaacaagctccgtgaagacctggagcgactgaagaagattcgggcccatagagggctgcgtcacttctggggccttcgtgtccgaggccag

SEQ ID NO: 12878 - DNA, 394 bp, Homo sapiens
cagcagccagcaatagttctttcagagcacacatctctccttccctcaccttgtactgccagcgattcaataaaaaatatgaacctgcatgaaaagcagccttttgggtagatacaaagattttttaataaaaggatataaaagagtgcttatgggtacagatgttgggctggtagtactctccataaaagtttgttgagaaatgggatctgacctggcaacatttagcacttggttagtcattgacaaaaccatcctgagttaatgccaagtttgtttccggtctttaaagccacccaagtgaagagctcaacatgttgcacaaagaaacaatgacagatttttttttttttttactttttatttggaaataattatataggccgagggtggt

SEQ ID NO: 12879 - DNA, 453 bp, Homo sapiens
  misc_feature (1)...(453): n = A,T,C or G
aatagaaaaattgtacgaccctagnccatgcggtggaattccctcactgggcctgtccacagtgcgagcgactcctgaggggaacagcgcggagttcaggagtccaagcacaaagcggtcttttacattccaacctgttgcctgccagccctttctggattactgatagaaaatcatgcaaaacctcccaacctttctaaggacaagactactgtggattcaagtgctttaatgactatttatgcgttgactgtgagaatagggagcagtgccatgggacatttctaggtgtagagaaagaagaaactgcaatggaaaaatttgtatgatttccatttatttcagaaagtttgtatgtaacaattacccgagagtcatttctacttgcaaaaggattcgtaacaaagcgagtataattttcttgtcattgtatcatgcttgttaaattttaat

SEQ ID NO: 12880 - DNA, 476 bp, Homo sapiens
  misc_feature (1)...(476): n = A,T,C or G
nggccgggccnnnnntttganncatcgtagacactagtcagtgtcgtggaattcatggttatgcaggcaggagaacttctcaggaagagaaaaggagaagactaactctacagagatttttgaaagactccgtgggatctcagcaatttgttaacactgctagggcccttcactgcatagggaggcatatggactgccatgggtctccaggctcatgttccaagcaagaatagggtaagtaactgtgaattaccctacaagcagtaataagtttattataataatatttttatacatttttggatgcacccaacccactctaaagaatgtcagtgactttatacaaaagaggaagcatctagattggcattgtgaacataatgcataggggcgcggcgggagctctagagcctagtggttaaaaccgtggcctctggaatatgactacctggacttgaatgctcactctgccattt

SEQ ID NO: 12881 - DNA, 569 bp, Homo sapiens
  misc_feature (1)...(569): n = A,T,C or G
ctagaaaacctgacaanaccccnnnnnnnnnaaattcctgcgatgaagagggcgtctgctggaggttccaggccccgattcccttatcctgagggacgacagcatccatagcctggactttgtgtcgagccgagcctggacttccctgactatgggcccgggggcctgcacgcaacctacctgccatccccaccgctcagcgcctctgatgccttctcattgctttgtgctccctgagcctcaaggcctcaagccggcagggcggagactacatggccctgcagcccctgtgctccgagggtgggcctcccatgccccaccgtagcatctttgcccccccatgcactgcccaaccacaatcgcagcctgtcctacaataatgtgctcaaccctggctcgcctggtggccacgcctgcctcgcccatccagcagttggcgtggccggataccactcaccctacctgcaccctggtgcaacgggcgacccaccatggtccctgccccacagcttcagtcccgtgctgggcccnccgacccaggagccctcgcttgtctctacgacatcatg

SEQ ID NO: 12882 - DNA, 462 bp, Homo sapiens
  misc_feature (1)...(462): n = A,T,C or G
agggggccnnnttcgtagactctagtacgtgcggtggaattcccttggcaggactaaagttgttaaaccatactctacagtggacaaccctgtctactatggccccagtgacttcttcattggtgctgtgattgaagtgtttggtcaccggttcatcatccttgatacagacgagtatgttttgaaatacatggagagcaacgctgcccagtattcaccagaagcactcgcgtcaattcagaaccatgtccgaaagcgagaagcgcctgctccagaagcagaaagcaagcaaactgaaaaggatccaggcgtgcaggaattggaagcattaatagacacaattcagaagcaactgaaagatcactcatgcaaagacaacattcgtgaggcatttcaaatttatgacaaggaagcttcaggatatgtggacagagacatgttctttaaaatctgtgaatcgct

SEQ ID NO: 12883 - DNA, 456 bp, Homo sapiens
  misc_feature (1)...(456): n = A,T,C or G
aatagaagacctcgaggacacttaggccagagtggtggaattcaagaggatccacacaggggagaaaccctatgtgtgtgataggtgtgggaaggccttcaggaacagctcaggcctcacagtgcataaaaggatccacacaggtgagaaaccctatgaatgtgatgagtgtgggaaggcatacatctcacactcaagtcttatcaatcataaaagtgtccaccaggggaagcagccctataattgtgagtgtgggaaatccttcaattatagatcagtccttgaccagcacaaaaggatccacactggaaagaagccataccgatgtaatgagtgtggtaaggcttttaatatcagatcaaatctcaccaagcataaaagaacccatactggagaggaatctttaaatgtgatatatgtgggaagttatagtggcacatcccagaagagaacctn

SEQ ID NO: 12884 - DNA, 461 bp, Homo sapiens
  misc_feature (1)...(461): n = A,T,C or G
agggaaaaaattcgagaatcgtagacattagtccgagcggtggaattcccaaactccgcctccatttccggggactccggggttctcccagagacacgggcgcccctccccactgtcggtcagggccctcacacggcgctggaggccccttccctagccttaggcccgggactacccacccccagctccgacaccccgcctaccatctggggacgccacgcaattagaggagaggaggaaaatgctaaagggatggagcctcagaggtgcagaagagaaaccttgtctgcatcaggaagctgaggctcaggcagaagaagaaacttgccccaggtcacaagccaggcagatgtggagctgatgcttcacaggagccccagtgcttccacctgacactggactgcatggaggaaggtctgagagggatcaccaagactcactggaggaggaggcagggattn

SEQ ID NO: 12885 - DNA, 475 bp, Homo sapiens
  misc_feature (1)...(475): n = A,T,C or G
agaaaaaaagaanaaaaaannntttgtagaatataggtcctctagtcagtgcggtggaattcgagctaacagaaaagctgaggaaattccgcttccgaaaagagacagacaatgcagccatcataatgaaggtggacaaagaccggcagatggtggtgctggaggaagaatttcagaacatttccccagaggagctcaaaatggagttgccggagagacagcccaggttcgtggtttacagctacaagtacgtgcatgacgatggccgagtgtcctaccctttgtgtttcatcttctccagccctgtgggctgcaagccggaacaacagatgatgtatgcagggagtaaaaacaggctggtgcagacagcagagctcacaaaggtgttcgaaatccgcaccactgatgacctcactgaggcctggctccaagaaaagntgtctttctttcgttgatctctgggctggggactgaa

SEQ ID NO: 12886 - DNA, 453 bp, Homo sapiens
  misc_feature (1)...(453): n = A,T,C or G
attgannnccattgaagacccctagtcagtgtggtggaattcggaagacacagtggtggcttccccaggtcttggaccacaaggcacagccgtggcctccaggaaccctgagataacccgttagtgggtcctgcactccaacagagctcatgcaatcagcctctggtcctcaccctcctcccattggtgtcgttgtgctctctaacattgacattgagcagtgagtgctccagatcttgttccactgattttttccactgttctccagtctagcactttctgaaattcatccaagcctaagaggtgacgccaaacgtaagtgtcttacacctcggaccccatggactaagacaagcctctggggtccatgtggcaccaaggatggggccttctagtacctttcacacaggccagggacagcacctgctgcgacccccacccccagcctctgct

SEQ ID NO: 12887 - DNA, 448 bp, Homo sapiens
  misc_feature (1)...(448): n = A,T,C or G
attgagttcactagcccangnggnggaattcggaaggagggagcggcgcggattctgcctctgcagcagagcccccatccctctttccgcccagggatgctggagggagctcgcccacgttctgggttgggcctgctggagcgcaggcagcctcctctagaggccgaggccagaccagggctgaacacggcccggcagtgcgcagccgtcctacgcttctgaggcctccccgacggcccagcgcctgtaagctctcacaacctctcaagtcagatccatgcccctagggaggggcagggacggtgcttggcccagtggacggaagggcctaggggacgggccctgagggagctgggcacactgctggctcccacggcccatggcagccccagcacccagcagagccatcccccgcttctggccacttgaaggtttatctgggtctgcg

SEQ ID NO: 12888 - DNA, 472 bp, Homo sapiens
  misc_feature (1)...(472): n = A,T,C or G
ggggnggatggagnccnttgnnnaatgacgatccttagtccgtgtggtggaattccggatgaagaagaaaacccggcgccgctcgacccggagcgaggagttgacccggagcgaggagttgaccctgagtgaggaagcgacctggagtgaagaggcgacccagagtgaggaggcgacccagggcgaagagatgaatcggagccaggaggtgacccgggacgaggagtcgacccggagcgaggaggtgaccagggaggaaatggcggcagctgggctcaccgtgactgtcacccacagcaatgagaagcacgaccttcatgttacctcccagcagggcagcagtgaaccagttgtccaagacctggcccaggttgttgaagaggtcataggggttccacagtcttttcagaaactcatatttaagggtaagcatttctttttctttctttctttttcttttttttttttggaa

SEQ ID NO: 12889 - DNA, 496 bp, Homo sapiens
  misc_feature (1)...(496): n = A,T,C or G
cgggttntnnnccataagacatcgtagnggcngcaancaacagcaacaccagggccctgtctagattcaccctgtgggtgagcccgttctccagatgtgcgtataaaggggctttctcctctacaccgttcctgtcaatgttccgtacaggcccacattcccaccactaagccaatggagtcaaccagatttctaaagccatggatatacgtggtcacggggccacatttctgcagctggctcagtggcaggcttgggccgtctctcagtaccatctaagacttctgtctaggttcctgtttttttagactcctgaactgccattctgattagacacaattttaatggaatttttggatttaataatagttgataatcaccttatgtatttgcacaatctctttataattaaaaactcgctaagcttcacttgctactatctactatatagaattagagacattccattggattctaagcatcagacactcctggg

SEQ ID NO: 12890 - DNA, 463 bp, Homo sapiens
  misc_feature (1)...(463): n = A,T,C or G
cattgacgaccattagttggngngcgggaattccccagncacagactgaccgagtggacctggggaccctgcgcggctactacaaccatagcgaggacggttctcacaccatccagataatgtatggctgcgacgtggggccggacgggcgcttcctccgcgggtaccggcaggacgcctacgacggcaaggattacatcgccctgaacgaggacctgcgctcttggaccgcggcggacatggcagctcagatcaccaagcgcaagtgggaggcggcccatgcggcggagcagcagagagcctacctggagggccggtgcgtggagtggctccgcagatacctggagaacgggaaggagacgctgcagcgcacggacccccccaagacacatatgacccaccaccccatctctgaccatgaggccaccctgaggtgctgggccctgggcttctaccctgcggn

SEQ ID NO: 12891 - DNA, 481 bp, Homo sapiens
  misc_feature (1)...(481): n = A,T,C or G
ggagggccccccnaggggggccattgagnccctttactgagancactagaacatgcggtggaattcaagggggtcagccctagtggggcagggtcatcactgttggggagcaggggaggacttgatctgtagggggataggataggtaccaggtggatgtcactgaagaagaaggcaatagtctgtggacagaacctcatgagaccaaccaagcaagatggtcctctgaatagagaaaattgaagcaaaatgtgaggtagtgtcctgaacatccagatcaggaatgggctgttcactgttctggagggaagtcacttgctcactctgggactcagtatcccaaaaggtaaggattggagaaattgcttaatattgcacttgtgggtctgtgttctgtgagtgagctactggagggaccttctgaagctgtatgcccaagtcctgcctggagtcctaggctgcctgttttcccagctcctca

SEQ ID NO: 12892 - DNA, 453 bp, Homo sapiens
  misc_feature (1)...(453): n = A,T,C or G
gtgggccnnaacctgaganccatgagangccagcacangcggnggaattcgngaactgtcaaagccatctaaaccaatcccaaggtcaagtggatataaaaattctgccaaaaacatggcataagatggaaaagttccctgaaaactctggaagaaaacaaagtaatgtagacaccttctttttccccacaccattagaaaatgttgcatcccttttgtcccacagcaataatgacgatgaggacctgacaccagagcagaaggcagagcgtgagaaggagcggaggatggccaacaatgcccgagagcgtctgcgggtccgtgacatcaacgaggctttcaaagagctcggccgcatggtgcagctccacctcaagagtgacaagccccagaccaagctcctgatcctccaccaggcggtggccgtcatcctcagtctggagcagcaagtcn

SEQ ID NO: 12893 - DNA, 503 bp, Homo sapiens
  misc_feature (1)...(503): n = A,T,C or G
agagggnnnnnnnatttaatgacatcgtaggacacngccgnggaattcggcagccttaggtaagaacaggtgagatcaaggtgtctcaaggcaatagataaagtctgttctcttctcttgattctatgatgccacaaaaagcaaacggtctggcaaactacagttgcaggacaaatctggcctcatgcttttaagttttttccatgtttgtgttttttatacctttaaatgactgaaaaaaaaatccaaagaataatattttgtgacatgttcatatgttatgaaattgtttagaatgcggccacactcattcattcattcacatatatcctgtgactgctgtcatgctacaggggcacagctgagtagctgtaaccaagattgtgtggcccacagagcctaaactagttactacgtggcgcactacagaagttcgctgacccatggattggaaggcatctcacagattcaataacagcttttgaacgaacaggttttgtttg

SEQ ID NO: 12894 - DNA, 493 bp, Homo sapiens
  misc_feature (1)...(493): n = A,T,C or G
ggganagggagggccggnnnnnnnaaaaatcgagaatgataggcatngcggnggaattccatttcaaggctgaagtgtatagtgtatatataacctttcctatggaaatgtgacattgagtacattttgtgttgctgttgtgaagccattaatataaatctttggtaatgacccatatctctatatgtatgtgttcccagttgtgggagcaggcactaatgaaatcctgtgcctggaatggagatatttaggtacctgaggcttagtgtcctgtggtctgcatgtaagatagatgacatcctagaacaaagaagctgttttaacttaatccccctgatcagcaggatatctgtgtgttcagtgacatcatacattctgtatctagaagtctaaaatttctgcctttctcctanagaatgtgttcttgcattntggttgaaataacctacacagtgttaaaaatcagatacctcctttagtgaccagttcanat

SEQ ID NO: 12895 - DNA, 461 bp, Homo sapiens
  misc_feature (1)...(461): n = A,T,C or G
aggcgnannnnnancctgagattagtagtacatgcggaggaattcaatcccagcactttgggaggccgaggcaggcacatcacttgaggtcaggagttctagaccagcctggccaacgtggtgaaaccccatttctactaaaaatataaaaattagccagccgtggtggcaggcaccaggaatccgatctatttacgaggctgaggcaggagaatcgcttgaacccaggaggcaggggttacagtgagccgagattgcaccactgcactccagcctggataacaagagtgagactccatctcaaaaaaaaaaaatttacaagtataggagtgcccagtccagtaatgccacccacccctatatcagtaaagggcacactctaaaggggtacatatctcagctgcatttaaggccttgctaattagctcattaaaagtgcccaaatgggtttttatattacc

SEQ ID NO: 12896 - DNA, 566 bp, Homo sapiens
  misc_feature (1)...(566): n = A,T,C or G
ngattgatnnccnnttnnnnnnncctcgatcacctatccgtgtggtgcaattcgaacagctagctagggtaggtgctggccttctgattcccagtccagacctctgctagtcacagtgcccagccaggtatgctgtggggatgtcagtggcctcagaaagagtgacgacttgggactgatgtccccacatgctggggtcacaggacaaaggaaagggtttgtgactttgagctctcttcttaccctgggcaacctctctctctgtttaaaagcctggtgaccctgctgggaacttcctcttttaaatgaacagctccctagagcatccttggctgagcttagcaacaaggggggagggagtgaggaggggtgagaggaaaatgggctcccccgttatcatgtcagtgcaatcactgggaattatggttgaggattaagagtcacttggggataattcagccaggctggagagggaaacacacacaaatacacacacactcacaacatatacagattgctaaagctcatggcagaaaacaaacagcataggaaagaaaaaaaaaaaa

SEQ ID NO: 12897 - DNA, 465 bp, Homo sapiens
  misc_feature (1)...(465): n = A,T,C or G
ggccgcccctnnaaatgtagacactattcagtgcggtggaattccttggacttacttcccagatccagtagctagaagattaggagtctgatgagggcctggatcttggacttacttcccagcctctggaaacgtgagaaatatatttctgttgtttttaagccatccagactatggtactttgttttataagcttaaatgtgctatgacattgtaatgcctaaccttgtttttactctgactggctacctttaaattttccctgcttgtctccttaattacccagccttgtttttcccataggaataagactttctcttggctgggaaagctggacaaactccatttggcttcttgatttacaagacattaagagctccttacccaacccccttcctcaaggagttaacctgtgtaagcagatcctcagcatttcaaaggagcccaattaactgataacatact

SEQ ID NO: 12898 - DNA, 449 bp, Homo sapiens
  misc_feature (1)...(449): n = A,T,C or G
gagcccacnnnnnncacggatcgagagtctagcaangcggggaattnaagtgaagaagaagaatagatagaggaggaggaggaggaggacccggaataagataagaaatccacaaaagaacaagagagtgaggtgcgcgaagccccggaaccaccacccgtccccgtgctggctcccacggaggggccgcccctgcaggccctgggccagccctcaggctccttcatctgtgaaatgcccaactgtggggctgtgatcagctcccgacaggcactgaatggacatgcccgcatccacgggggcaccaaccaagtgaccaaggcccgaggtgccatccactctgggaagcagaagcctggtggcacccagagtgggtactgttcagtaaagagctcaccctctcacagcaccaccagcggagagacagaccccaccaccatcttcaactg

SEQ ID NO: 12899 - DNA, 272 bp, Homo sapiens
  misc_feature (1)...(272): n = A,T,C or G
aatgacttggagacgatcgtatctgataaacctcagtaccctttaatacatgtacatttctttccttttttcatttaatgtaacatgtctgttggaactatgtttcttaaatattattctaagggtatgtgttctttaattatggtcaaatataatttggncaccaaaaatgaaataatagtttaaaacaagtagctgttancagngggctaaaaatactcattttataattaattttagctttcttagtatattattataaattgcgccct

SEQ ID NO: 12900 - DNA, 557 bp, Homo sapiens
  misc_feature (1)...(557): n = A,T,C or G
ggggaattgattcccatccagaggggcaattccttcccttccttttcttctttcctccgctcccctccccttccctccccttcgcatccttgtttctcttttttttacttaatccccagagtgacagtaatataggctgatttctagaagtgtggtgtattactcatggaaagtgagttgccttggttattactttcaattgaaagttctatgggatctagaaatgagacatactggcatggagagtgagaacgacaaaggaatgaagagctacaggagcatttaggccatttctatgccaagcttattctacatgcacaaaatcatacatgttaataaatataaacaaattggaggcttatttaaaccaattatgaaatctggtaatttgtgcagcagcaatagatgataaccaaaaaaaactcataataatctgaatatcttgatcatttgtatttaaagaagcagtaattatatacttgaaagtacataatatagtattgcaaaaatgactttggatattacaaattaaaagtatataagatgaaacttgattn

SEQ ID NO: 12901 - DNA, 450 bp, Homo sapiens
  misc_feature (1)...(450): n = A,T,C or G
gtggtttttaacccagctaccatganaatctggngaaanncnaggaatcaaagcttttacccaaaatagatctttcatacaatattaaaagaatttacataggtcttaagattctatttcttttctactccacaagtagagattaactatgtaaataaaaacagaataaatgttcttagatgttaacttgaactaaatgactaacaacaggaagttggtctcatctacaatatccccattagtatcatatttttaaaaataccttataaaaatgataaagaggcacatcaaatatttcagtaataaatggaaaattcccaggaggcttataagaaaaagtgacgacctcaaggcagcaggccaagagagatctgtggaacgcatcttgttccagaataccctataaaataaagttattagcattagaaacatttacttagtctaaaaagg

SEQ ID NO: 12902 - DNA, 443 bp, Homo sapiens
  misc_feature (1)...(443): n = A,T,C or G
ngggttttaacctacgcccctgantctggaaaancnnganngacccctcctcctgtgtgctttcttccccagcaagccacccgaggggactgcctggccttccagatgcgagctgggttgcttccctgagggcccccgctggccaaggcctgtggacgacgctggcggcccagcctgggcaggtttcagggtgccagtgggaagcctgatgggtgctggtggcctttcccccgtggattggtctctggcccagcccagtctcttctcaggggcagggggtggaggttggggtcaccggcctgcttggcacccccatctgaaagagcagcacttctcagctattaaaggccccctggatagaaaaaaaaaaaaaaaaaaaaaaaaaaaaaaaaaaaaaaaaaaaaaaaaaaaaannggggggccccctcttttttataaggggc

SEQ ID NO: 12903 - DNA, 451 bp, Homo sapiens
  misc_feature (1)...(451): n = A,T,C or G
gtgggcctgaaaatgaaaaccgtcgngngccagcacangcgnnggaantnnaaaacttgaccttaacagagactacatttgatcatggaaataatacatttctccactgatatacaataccatgtaatgcactggaaaagttggaccttggagtaatagcacaatttgtaacattacagatcacctcttcccactctttgttccactctgagactctttccttttcctcgtgtatccagatacactgacatacggatgattttaaacgtgtcacaagccacagtggagccatatacatgcagttcagcctgattttacccttattttcttctaatacagactccattacaattttggaccatctgcagagagtacagatacacaaaaccaaaacaagtatctatgataataaaatcttcagaaacttttcagacgtacctttcatggagcg

SEQ ID NO: 12904 - DNA, 460 bp, Homo sapiens
  misc_feature (1)...(460): n = A,T,C or G
gagcggnannanaanattgtagttagtagtccatgcggtggaattcatgctcatgtggtgttgaggaaagcagacattgacctcaccaagagggcgggagaactcactgaggatgaggtggaacgtgtgatcaccattatgcagaatccacgccagtacaagatcccagactggttcttgaacagacagaaggatgtaaaggatggaaaatacagccaggtcctagccaatggtctggacaacaagctccgtgaagacctggagcgactgaagaatattcgggcccatagagggctgcgtcacttctggggccttcgtgtccgatgccagcacaccaagaccactggccgccgcggccgcaccgtgggtgtgtccaagaagaaataagtctgtaggccttgtctgttaataaatagtttatgtggaaaaaacaacttaccagctatgcggccgtctgtac

SEQ ID NO: 12905 - DNA, 461 bp, Homo sapiens
  misc_feature (1)...(461): n = A,T,C or G
gggcgaaaannanaaatcgagattagtagacatgcggaggaactccaagatctctgacttccgaacatcaaagaggcttgctggcatacacccctgtactgaaacttttactggtaccctccagtatatggcaccagaaataatagataaaggaccaagaggctacggacaagcaacagacatctggtctctgggctgaacaatcattgaaatggccacaggaaaacccccattttatgaactgggagaaccacaagcagctatgttcaaggtgggaatgtttaaagtccaccctgagatcccagagtccatgtctgcagaggccaaggcattcatactgaaatgttttgaaccagatcctgacaagagagcctgtgctaacgacttgcttgttgatgagtacttaaaagtttcaagcagcaaagacttagacacaacctaagctttcagctctttcagct

SEQ ID NO: 12906 - DNA, 451 bp, Homo sapiens
  misc_feature (1)...(451): n = A,T,C or G
ntttgagttcactagcccagtgcggtggaattcttggagaccagcctggccaacatgctgaaaccctgtctgtacaaaaatacaaagatagctgggcatggtggcgcatgcctgtagtcccagctactagagcgactgaggcaggagaattgcttgaacctgggaggcggaggttgcagggagccaagatggcgccaccgcactccagcctaggtgatagagtgagactccctctcaaaaacaaaacaaaacaaaaaaattagacaaatgctacattaatgtttgggtggtcagattctactttgaatctgaagtttgcagatatgcctatagatttttggagtttaccactttcttattctgtatcattaatgtaatattttaaattactatatatgttaccatttttctggatttagtaagaaatttgcagttttggtttgatgtaaca

SEQ ID NO: 12907 - DNA, 448 bp, Homo sapiens
  misc_feature (1)...(448): n = A,T,C or G
gtggtccttanaccaggtngcttgatntctggcaaaancnnnaangaagaagataaagaatatcaaggagatgagacccatggtcagcagccaccttaacgtcggtaccgccgcaacttcaattaccgacgcagacgcccagaaaaccctaaaccacaagatggcaaagagacaaaagcagccgatccaccagctgagaattcgtccgctcccgaggctgagcagggcggggctgagtaaatgccggcttaccatctctaccatcatccgggtaagcaagcttggatggccatccatttatggcagtcgtgagtggtgaccatttcgttttattaatgcaagagtagaaaaacctcagttccatcagataatgaaagccatgttatttataatgtgttctgccctattcttaattacctaatatttcattttaggaatattgaatatn

SEQ ID NO: 12908 - DNA, 554 bp, Homo sapiens
  misc_feature (1)...(554): n = A,T,C or G
gatcgaattacagtncgngtggngcaattcgtttctgagtcatcttaatttcaaatgagactcatattttaaaatttctgtgggccaaatgaaacaagtatgcaggcaggtctggtccgagggggctggcttggccatgcctttctgtgcctttaatgaggactaagaagcaagattgggccacactgtctggactcaaagcccagctccaccactgagcacccgtgtgactctttccatatgtataacgtggggataataataatagctgcttcacaggatgaaatgaagtttgaggtgagaagcattcaccatggtgcccatcgtgttactccattgtcagaggaggaaacggngtcaggcaggaaagcaacttaaaggagggcctgcaagcagccagggtcagagacagngcttggttctgcttcctggtgaagcaatgctttcgggtgctgcctctccctccctgtttgaatctgcagaatgtgtangcccccagctganggcctggagtggtggattggtccagtgcctggcgcacatggcctgcgaag

SEQ ID NO: 12909 - DNA, 408 bp, Homo sapiens
  misc_feature (1)...(408): n = A,T,C or G
nggaaacaaaattttgaanaccccctcgaaccaccgtttagngnggnggaattccactacttctcccctanagcaagccatgaaattgagaaagattactctctgacttacttcttctgaaagtaggtcatagacccttatgtgacatgggtcctgcctgagggaatgctacacaaagacacaaagaatctggacaaacgggttatgctgagttcccccaagcaaacacacatttttccctgggtctttctctgtcattcaagccagagtgctgtcacgcaatcctagttgactgcagcctggacctcctgggctcaagctatcctcccacctcagcctccttagtagctaggactacaggtacatgccactgtgcctgctaattaaaaaaaaaaaaaaaaaaaaaaa

SEQ ID NO: 12910 - DNA, 474 bp, Homo sapiens
  misc_feature (1)...(474): n = A,T,C or G
cgggccggggnnnaatcgtagacaatagtagaccgttaggaagngcggtggaattcacagggccagagccaaggccagagctgaagccagtatgagggccatggccagtgctagggccggcatccacctctggtgagggttgatgaaaagttggccagtgggtccccgtgaggacgaactactgtcctgagtcataagtaatatgggtggggcgagggtcttatttctgtagaaatcgtgtgactttaaggatttagattttgtatcttatgttttgtaacatttaataattactgttaaaatgctgtttgtaaatgagattggtctactttttcctgtaggattttattgtagagttttgctggttttgtaaaatggatggaagaactttgtatttatactgtgattttgaacagattatgcaacattggaaggaaggctgtactttgatggtttgaaggaactcagcagtan

SEQ ID NO: 12911 - DNA, 560 bp, Homo sapiens
  misc_feature (1)...(560): n = A,T,C or G
ngtcgacactatccagggggttagtanaccctatgctaactcctgctgaggaaaatcactggtaaactagtgactactctgctaaattgcctctcttgacattgtcaacctgaagccatcaaaaggatcagaatacagagtttatgcaagtagaaagctgggaatggccaatcagagaacacaaactttagaaaatggggtcagtgttcccaaaagctttattttcttttatggacttctacttctttgatggagatgtcaccaattaaaaggtagctgaagaaagacacaggtagggaatttttaaaataactttgccagaaagatacagatacagaatttttaaaataactttaccaaaacagaaaaataatatactttccatattgtactaagatttggcattttactagaaaagggcataagaatagtgacttttctagtcaggctacctgaaatatagtacaaataaaccaatcttgaagtggatcccaaacaccttctttctatcagtcanagtagatattacaaaaagctaacattanagctcatgtactact

SEQ ID NO: 12912 - DNA, 571 bp, Homo sapiens
  misc_feature (1)...(571): n = A,T,C or G
ngtttgatnacccctnannnnnnntttcgatcacctatccgtgtggtggaattcgtggaacccccggaccgggactatcaatgacttcagttacctgcataccaactgcctggagctctccttctacctgggctgtgacaagttccctcatgagagtgagctgccccgcgagtgggagaacaacaaggaggcgctgctcaccttcatggagcaggtgcaccgcggcattaagggggtggtgacggacgagcaaggcatccccattgccaacgccaccatctctgtgagtggcattaatcacggcgtgaagacagccagtggtggtgattactggcgaatcttgaaccccggtgagtaccgcgtgacagcccacgcggagggctacaccccgagcgccaagacctgcaatgttgactatgacatcggggccactcagtgcaacttcatcctggctcgctccaactggaagcgcatccgggagatcatggccatgaacgggaaccggcctatcccacacatagacccatcgcgccctatgaccccncaacagcgacgcctgcagcagcgacgc

SEQ ID NO: 12913 - DNA, 448 bp, Homo sapiens
aatagagacctcgtagaccattaggcagtgcggtggaattcgtttatgcctctcttctttggggcccctggatgtttttgtggatttttacagagtatttatatctgcacagcgtgtattttgttatacattcttacaagcattgatattggggggtacattcataatagtgagaatatctggcagaatgtgtgaatgccatatctgtagatgacgatgaatgtgaagggttaatgtagaaatgtttgtttattctgttacagctcaaaatggaggctgagaatctctaccaccattcccttctctatttgagaatctctaccaccattcccttctctatttgggaaacaatactctcttattttgctatttttaccttcccattaactggcttcactcaacagtgccagatacctatggagaggggaagtaaaacaccttatgtcag

SEQ ID NO: 12914 - DNA, 449 bp, Homo sapiens
  misc_feature (1)...(449): n = A,T,C or G
ggcgtcctnaacctgaaanccaagcntngccagcacanccggnggaattncttgcttcatagtaaccagttgagatgaagcacgtcgttagaacgttgttggacaccatgttgaattattcccccatcgggtgtgaagaactgtgctacattcaggcttacccattgaactcagtatatatatttttttccttcctgtcttttgtctggcaggataccattcttgttgctcttctgtgtaatgaagtttaaatgcttgtttggaaaactttatttaacagtttagaaggcttgatagaaagagtgcattagtctgaagagtatacattggataggaaagaatttccttcttttgtttctccaaatctttccgccttacttagcttgagatctttgcagcttggttcatggattctagccttgcccgttgcgcagtatatactgatccaa

SEQ ID NO: 12915 - DNA, 447 bp, Homo sapiens
  misc_feature (1)...(447): n = A,T,C or G
natcgtagatagtagtccatgtggtggaattcgttgcaaactcttttgtgtgtgaaaaatcagaccttttccgggtgcggtggctcactcccgtaatcccagcactttgagaggctgaggcgggtggatcacctgaggtcaggagttcaagaccagcctgggcaacatggtgaaaccccatgtctactaaaaatagaaaaagtagccaggcgtggtggcgcatgcctgtattcccagcgactcggtaggctgaggcaggagaatcacttgaacccaggaggtgggggttgtagtgagccaagatcacgtggctgcactccagtctgggcaacagagactgctgaggcaggagaatggcttgaacctgggaggcggaggctgcagtgagcggagatcatgccattgcactccagcctgggcagtaagagcgacactcctcaaaaaaac

SEQ ID NO: 12916 - DNA, 455 bp, Homo sapiens
  misc_feature (1)...(455): n = A,T,C or G
ncgtggccganacctgaaaaccttgnaangttagtacangcggnggaattcccaatttcaagcttattttaggaagccttgaactaccatgtatcctggctcctagctgagtttattagaggtatggagcagtgcaacttaaactcaagttgcacttacattttgaattttaaaatgatggttttatctgttgtgtgaagtggttcacccttgaggaccaggagcctccatatcctgactgaaaaccttttctgagacttagagtaacagtacttttggttccttgagttctcctgtctccagataccaaatgaccttgacttttctgccttgtgaattcgtagtccaatcagctgaaattaaatcacttgggagggacgcatagaaggagctctaggaacacagtgccagtgcagaagtttctccaggtggcctccctttccaacaatgtacat

SEQ ID NO: 12917 - DNA, 539 bp, Homo sapiens
  misc_feature (1)...(539): n = A,T,C or G
ntttgaccacatctgtgtggtcgaattcgaagatgcttacaagaaacagttctctcaatacataaagaacagcgtaactccagacatgatggaggagatgtataagaaagctcatgctgctatacgagagaatccagtctatgaaaagaagcccaagaaagaagttaaaaagaagaggtggaaccgtcccaaaatgtcccttgctcagaagaaggatcgggtagctcaaaagaaggcaagcttcctcagagctcaagagcgggctgctgagagctaaacccagcaattttctatgattttttcagatatagataataaacttatgaacagcancttnnnnnnnnnnnnnnnnnaaaaaaaaaaaaaaaaaataaaaaaaaannaaaggcggcccttaattttaagggggcccttaaaaccccgttaaaacccctgggggggcctttttttggccccccctttgggggttgcccccccccccggcctttttttgccttggggggggccccccccccctgttttttataaaaaaaaggaga

SEQ ID NO: 12918 - DNA, 474 bp, Homo sapiens
  misc_feature (1)...(474): n = A,T,C or G
cggggcgannnnnnaattgtagacaatagaccagcgtgtnggaagtcggctggataagtgatagaaggaaaatactaacagatcacatgtaacaggaacaacattttagaggaaacaggacaaaaacttccctagactcaagatactacaccagaagtgggcagtactcactatgttcaggggaacaaaaagataaaaactaaaaagcatcagactgttttttgtgtgaaggaaatttgtaaggtatgagaattaagtcacttactacagcacaaattgcatgtctatctaaattgacgtttaagtgcaaaagcatggatattactcatgcagttttactggaaaaccatacagatgtttttcaggaatgtacagaatgaatcaaaggaaataactgatcgacaggaaaactgtaggaaatttgtgggctggctgtgaggcagtggctcctattatgtacaattttagtgctaa

SEQ ID NO: 12919 - DNA, 557 bp, Homo sapiens
  misc_feature (1)...(557): n = A,T,C or G
cgtttggattagaatnactagtccagagnggtgcgaattcgggccaccttgtaagagacatcattactaccagaactgtggtgccaaattgctggtgtctctctttggagaaaccaaccagatacatctgctggagagcccaggtgggcacagagaagggtggagagagaatctgggaagagaaatggagaataagcagcacagtgttattcatttctgtaaattcctatgtagaaggctcagtgttagaaataaagttattctactagttgcaagttaagtgtttctgtttgttctgctttcctgttagcataagtaaactccctttggaactacacaggtatgtctctccttcaacatgtgtgaagcagacattatattaaattacattattcatacctccctgtggtgtttcttattgtatgtggtgtaagggaagcagctctgtattcttccaaataaatagccagttgtccctgcaaannnnnnnnnnnnnnnnnccnnnnnnnnnnnnnnnnnnnnnnnnnnnnnnnnnnaaaaagaccggctccttgcgg

SEQ ID NO: 12920 - DNA, 458 bp, Homo sapiens
  misc_feature (1)...(458): n = A,T,C or G
nttttaattgatgacctctagtccatgcggtggaattcggtgtcagaaactggaggaatgaccatcctagttataaagtggcagagaacgtggctgaacggtgtccatgcccagtccttcctttgtggaaggaactgggatatctggctgaagaaatactcagggtgtggcatgttttcttctaactgcagagagtaagatgtgagaagagaaatgaattaaagatggaatttataattaacaaggaaagaatagggatcgtaaggattttcagcctgcccatttagggagtaaataagatgtctttaggagaacagaccaagtgtgtggccaagcaacttagtatggacagaacgaagccagaggctgctcatcaggacagtgggaaaatggccccagaggcatttcagattcctggtgctgcccctcccaccacaggcccagagtgccaaggcctt

SEQ ID NO: 12921 - DNA, 480 bp, Homo sapiens
  misc_feature (1)...(480): n = A,T,C or G
agcccagcctcccaattgaagacatctgnccagatggagacctctgcgcangcggtggaattcggagatctggcagtatcctgcataactttgggtgaggaaattgttctcttaaagatcagccatgttcaggaaatgatctctgtttgaacctcactatcctgtaaggttatccaagtagcttagcccagctaagttctatcagagacccaaattatattttttaaaaatttaacagctggaaacttggactagagctttaataaaaaatcttaaattctttgaaattcaagttaaaaatacttatatatttctattacaaagcagtgacaaatgatgccctgtgtgacttggagttatctttgacttttaccacaaatcttcatttataaaagaaaaagccaaagtgaaaaaaagttagattgtgtatttttcagtaacagctttccatgtcttaagatttttttacagacttaagtt

SEQ ID NO: 12922 - DNA, 547 bp, Homo sapiens
  misc_feature (1)...(547): n = A,T,C or G
agagaaaaccaaacctggatnnaccccctgantatcgntcgagaggngcaanncaaataattatggaaactgtggctntttgaagtggcatttaattttgctgctattaagtctatgtganaatatctaaaacttttatttggaaaatataattgaaagcttcatccattctttgatatgactaaaatgaaagatattatgttttcctgttcctggttatactgtattcagagctatggtgctttgtaaaatcttgaaaggcatttctttgttgttgttgatatgcattttaatggcatttaaatgagacgatttgtaattcttaagtgcattttacttaattgtatttattcttgggagaacattcatttttttatagatcaaaggttaaaaaataaccaaagctaaggcatgataattatcgaattaaaatatttcatgatctaaacatgaaataaacctaacaactgaaattttctttcaactctgaatttattttggattatgtaaaatctttctaccttagtctttaatcattggatcagag

SEQ ID NO: 12923 - DNA, 559 bp, Homo sapiens
  misc_feature (1)...(559): n = A,T,C or G
gttcgaattccagtncgagtggnggaattccgtggtgctccgcggcgcggccttgctctcttccggtcgcgggacaccgggtgtagagggcggtcgcggcgggcagtggcggcagaatgttgactaccagggtatttagcctagttggcaagcgagcaatttccacctctgtgtgtgtacgagctcatgaaagtgttgtgaagagcgaagacttttcgctcccagcttatatggatcggcgtgaccaccccttgccggaggtggcccatgtcaagcacctgtctgccagccagaaggcactgaaggagaaggagaaggcctcctggagcagcctctccatggatgagaaagtcgagttgtatcgcattaagttcaaggagagctttgctgagatgaacaggggctcgaacgagtggaagacggttgtgggcggtgccatgttcttcatcggtttcaccgcgctcgttatcatgtggcagaagcactatgtgtacggcccccctcccgcanagctttgacaaagagtgggtggcaagcgacccagaggatgttgacatgn

SEQ ID NO: 12924 - DNA, 534 bp, Homo sapiens
atttgatcacatctgaagggcccacttcggaggatgaggaggaaagagatgcctgcctggatggttctagctcacagaagttcttgcttcctcttgtccagaaagccaaaccatgcatcctgagcccttcacttcttcaacagatatttcctgagagcctgctatgtgtcccgctgtgaggatgcaacagagcacactactgacaaggtccccgccttccatccttgtcttctcatacagattgctgactcctggggctggagggaagcaggcagcacctcagtgaaagaaacttccagaagttaccaccagcctgtcctcggaatgactctgttgtcatgcatttcgctgccttcagagacccggatgtcctatcctgtctaatcctcatggtaaggtcactgccctgcaactgacccactaactcagtgccccatacaggttaccagagattaatatggtgtccatgtgatttcacatgaagtacaagggcaaaggtctttcctcactggcagagagacctgggcaaagcac

SEQ ID NO: 12925 - DNA, 550 bp, Homo sapiens
  misc_feature (1)...(550): n = A,T,C or G
gggagataaaaccttgattaccccctcgaagcacacttcgngnggtggaattccctggccaaagatttatttctcttgacaaccaagggcctccgtctggatttccaaggaagaatttcctctgaatcaccggaacttgctactaccagcaccatgccctaccaatatccagcactgaccccggagcagaagaaggagctgtctgacatctctcaccgcatcgtggcacctggcaagggcatcctggctgcagatgagtccactgggagcattgccaagcggctgcagtccattggcaccgagaacaccgaggagaaccggcgcttctaccgccagctgctgctgacagctgacgaccgcgtgaacccctgcattgggggtgtcatcctcttccatgagacactctaccagaaggcggatgatgggcgtcccttcccccaagttatcaaatccaagggcggtgttgtgggcatcaaggtagacaagggcgtggtccccctggcagggacaaatggcgagactaccacccaagggttggatgggctgtctg

SEQ ID NO: 12926 - DNA, 413 bp, Homo sapiens
  misc_feature (1)...(413): n = A,T,C or G
ncctcgaccatcgtctgtgatgggcaattcgggactcactggagggcaccaagccagcccacagccagggaagtggggagggggggcggaaacccatgcctcccagctgagcactgggaatgtcagcccagtaagtattggccagtcaggcgcctcgtggtcagagcagagccaccaggtcccactgccccgagccctgcacagccctccctcctgcctgggtgggggaggctggaggtcattggagaggctggactgctgccaccccgggtgctcccgctctgccatagcactgatcagtgacaatttacaggaatgtagcagcgatggaattacctggaacagttttttgtttttgtttttgtttttgtttttgtgggggggggcaactaaacaaaaaaaaaaaaaaaggg

SEQ ID NO: 12927 - DNA, 416 bp, Homo sapiens
  misc_feature (1)...(416): n = A,T,C or G
gacctgggagcgcagagaggggagggagttggcagagacttctggtgccctctgccctcctagcaacagatgccacttatattttggcccctggcagcctcgcccagcccctgatcagcccaggcctagggcagttaggacctttctgtttattttctgaagcagagagaatgatctcagagtttgcaaatgaagccttttttgcactttcattcacatgcactttggtggggttacatttttgtacttgcctcttgtgtgtgcacatgtgtgtatgtgttctttaagagaatcttctggcttaagctaaggtgactcttgaaggagaaaaagttacaaacaaaatgtggtgtgatctgtcagtgtatcaaaacaacataaataaacttgaacaactgaaaaaaaaaaaaaaaaan

SEQ ID NO: 12928 - DNA, 504 bp, Homo sapiens
  misc_feature (1)...(504): n = A,T,C or G
tggacgggcccggccccaaatcgattgcattccatagngcggngcaattcctcactctgtgtctggctttgctcctgggtcttggccctgggccatatgaggggccaggaaatgaacgacaaggaggataggagtgttctttcttgaaagccgggacttcccctcaagaacctgggcctggggccgggactctgcatgactgggagcaagtcacttaaacctcctgtgcctcgatttcccccttctacaaagaggggccaatgattcttgtgtgtcagcactgttactaccgagtgctgagtaagggcaaaataatacccctttctctatgtatctctgtatgcacacgcactatatatatatatatatatatatacacattcgtgtactcaccacttctcgatgtctatttcaaaacaaggctcctgagtagggggagaagagagccagcttgcacctcacgctaacacatatgactttgctcagccatgtcccctgagataa

SEQ ID NO: 12929 - DNA, 452 bp, Homo sapiens
  misc_feature (1)...(452): n = A,T,C or G
ntttgaaacccttattgagacatctagaccangcggnggaantccccgtggggtatgagggacagagagacagggagagtcagcctccacattcagaggcttgacaagtaatggcacaattcttcggatgactgcagaaaatagtgttttgtagttcaacaactcaagacgaagcttatttctgaggataagctctttaaaggcaaagctttattttcatctctcatctttcgtcctccttagcacaatgtacaaacgaatagtcttatcagaacaggaaggaggaatggcttgctggggagcccatccaggacactgggagcacatagagattcacccatgtttgttgaacttagagtcattctcatgcttttctttataattcacacatatatgcagagaagatatgttcttgttaacattgtatacaacatagccccaaatatagcaag

SEQ ID NO: 12930 - DNA, 461 bp, Homo sapiens
  misc_feature (1)...(461): n = A,T,C or G
ttttattgtagacctctagtccagtgcggtggaattcgtatttcgtaagatttaaaatccatcccttattaaaactcttagtaaattaagtctggaaagaaacaccctaatctagataaaggtctgtttcagaaaccaacagtgatggcattctaaagagtcagacgccacaggcattcccattaaagtcagaaactagccaagggcaagctattattcagcagtgtcccggcactactaacccctgcaacaagccagatgaggaacataaggaagaattataattgtcattatttgtagacaataaaactgcctacctgtaaaacctannaaaaaaaaaaaaaaaaaaaaaaaaaaaaaaaaaaaaaaaaaaaaaaaaaaaaaaaaaaaaaaaaaaaaaaaaaaaaaaaaaaaaaaaaaaaaaaaaaaaaaaaaaaaaaaaaaaannaaaaagggggggc

SEQ ID NO: 12931 - DNA, 452 bp, Homo sapiens
  misc_feature (1)...(452): n = A,T,C or G
aatgatnncccttattgatgactcttgcaacagnccggnggaattcttttaaatggttttgctagtggttattgttcatttctgtcccaatcagtgactattttaaataatagtgtatttactgtcttaacttctagtattggtgctgtttgatgttttcacatttaattaacttatttcatcatcataatgcaattaatgtatttgtaaattgaattttccaagattctgatatttgaagggtaagcatcttgatggatatatgtccatatgtttagagaaggttttggttttgggggcagcagattgactagttctttaaatctgtgtgtaacgtatgttttattcctcatttcttcctaatctgatgatcttgattctttttgattaacatgaaaaatcctgtctgcttgttttgggaaaaaaaaatgctttttttctcttctagctcg

SEQ ID NO: 12932 - DNA, 458 bp, Homo sapiens
  misc_feature (1)...(458): n = A,T,C or G
caatgatgttcgatagcncagngcggnggaattccttgaaaaagaggtcactcaaataaaagacagaagtttacctgctgtggtaagagagaatgcccagttattgaatatgccagtggtaaagggagattttgatctgcagattgctaaacaagattattatacagcaagacaagagttagttttaaatcaattaataaaacaaaaggcatcatttgaacttctacagttatcatatgaaattgaattaagaaagcatcgggacatatatcgtcaacttgaaaatttggttcaagaacttagtcaaagtaacatgatgctctacaagcaattagaaatgttaacagatccatcagtttctcaacagataaatccaaggaataccattgatactaaggattattctactcataggctttaccaagttttggagggagagaataagaaaaaagaattgg

SEQ ID NO: 12933 - DNA, 446 bp, Homo sapiens
  misc_feature (1)...(446): n = A,T,C or G
atagagattacgtagaccttagtccatgcggtggaattccgaatttattgtggagctggagtgcagaaagaccatgaaaactacatgaaaatattactaaaagttggaggcatattagtcatgcctatagaggatcagttaacacagattatgcgaactggacagaacacttgggaaagtaaaaatatccttgctgtttcatttgctccacttgtgcaaccaagtaagaatgataatggcaaaccagattctgtgggactccctccctgtgctgtcaggaatctacaggacttggctcgtatttacattcgacgcacacttagaaatttcataaatgatgagatgcaggccaaggggattcctcaaagggctccacccaaaaggaaaagaaagagagttaaacagagaattaacacttacgtatttgtgggtaatcagcttattcn

SEQ ID NO: 12934 - DNA, 448 bp, Homo sapiens
  misc_feature (1)...(448): n = A,T,C or G
natgatgaccatcttgaagnccgtcggaannnccttcaggaatatatgggtcagttttgtatgtgtgacctaagaaacctgtgacacttcttacaggtcttgacttttctttctcagtacatgtgtatttctctttttggtggccttgaaacctttgagttgaaaattgccttcaccatctgccactttcactaatggtagaccaggaaatttggacccactgaacatagagaacaactagaaaagctgtgcaaaatataaacagcatctatctgaaagcatcagctggcaatatagaaccaaaattcaggacacgaaggaaactcaagagaagtgagcctgggacttagagctacttttcccataagggcacctgctgattctggaagaggcagctaagaagctgagtagaactttcaacaacttcttgtgttagggagccagcttn

SEQ ID NO: 12935 - DNA, 481 bp, Homo sapiens
  misc_feature (1)...(481): n = A,T,C or G
agggcgggattgagncccctngnnactgatgaccctagtccanngcgnggaattctaaatgggtcaataattctagaagtacagagactgatttataggcatgctttggcagacatgaacagattcttagaggcctggctttttaaaagtaatctcctgaacctttagtaggtttcactctacattcattcattcacctcccatttattgaaggcttacttaatcagttaggaatgccttcagcccaagaaaggaaaatccctaatgatagtgccttaagcaatgaaaacgttgcaattggcaattggcacacacagtgattccggaggtggatggttctatggttcagtggctcgttgggcccaacaaggattcagaccatttctgtatttccacctgttgtctttttagctatcattggctttttgttcttaggtttgtcacctcatggttgtccagtgatggcagccactgcacctgg

SEQ ID NO: 12936 - DNA, 450 bp, Homo sapiens
  misc_feature (1)...(450): n = A,T,C or G
natggagcccttaggatgagcantcgnacagngcggnggaantcaaaatcatgaatggttaattatgcaacatacctcaactcttgccttataaaattctatatcatgtagtctctctttatatctgctgacttcactttcaagcttatcgactctgactgctttctctcgaagtgcatctaattcatctcggtacattctggcagagcgagcatccgaaagcaaattcatgttctaaacaaaaatttaaaattatattttaattattttctgttatcaacttgttattctttgttgcacaatttgaaattttatttatttatttatttatttatttgagatggagtttcactcttgttgcccaggctggagtgcaatggtgcaatctcagctcactgcaacctccgcctcccaggttcaagcacttctcctgcctcagcttcccaagta

SEQ ID NO: 12937 - DNA, 544 bp, Homo sapiens
  misc_feature (1)...(544): n = A,T,C or G
gggaaccaanttttgaaaccccctggagcacagtcagngnggnggaattcccggctcgagcggcccctcttttcccacattcatagcctgtagtgccccctctaacccccagtgccacagagaagacgggatttgaagctgtacccaatttaattccataatcaatctatcaattacagtccgtccaccacctcaaaaaaaaaaaaaaaaaaaaaaaaaggggcccgttaaatttaaggggcccgtttaaaccccgtaaaaaaccctgggggggcctttttattgcccacctttttgtggttggccctcccccggggctttttttgaccggggagggggccatcccaatggttttttttaaaaaaaaggagaaaatggcccccttttgttggggggggggctttcttattttgggccnnnaanancannccanccaaacaaaaaacaaaggattaatatgtgagtggagcgtccctttgaccccaattctgggacttttttaggcgcacaattgagcctacccttgtccttaacttatggcgag

SEQ ID NO: 12938 - DNA, 456 bp, Homo sapiens
  misc_feature (1)...(456): n = A,T,C or G
cttgacctgatnacctctagcccangcggnggaattcgagagatccagtatgcatccctcagcttccacaaagcgaggcctcagtacccacaggaacaggaggccatcggctatgagtactccgagatcaacatccccaagtgagaaactgcagagactcaggcctgtttgagggctcacgacccctgcagcaaagaagcccgagactgattcctttagaattaacagccctccatgctgtgcaacaggacatcagaacttattcctcttgtcaaactgaaaatgcgtgcctgatgaccaaactctccctttctccatccaatcggtccacactccccgcccccggcctctggtacccaccattctcttctctacttctctgaggtcgactattttaggttccaaatatagtgagatcgtagagtgannnanaaaaaaaaaaaaaaaaaaaaaaac

SEQ ID NO: 12939 - DNA, 455 bp, Homo sapiens
  misc_feature (1)...(455): n = A,T,C or G
caactgagtcgatagcncgngcggnggaattcggcaaaatggaaagccagaaggtgatctcctgcctgcaggcctgcaaggaagggctgtacattaattccttggaaagccttggccaaggaataaagtatcacttcaacccctcgcagtccatcctggtgatggaaggtgacgacattgggaacattaaccgtgctctccagaaagtctcctacatcaactccaggcagttcccaacggcgggtgtgcggcgcctcaaagtatcctccaaagtccagtgctttggggaagacgtatgcatcagtatccctgaggtagatgcctatgtgatggtcctccaggccatcgagccccggatcaccctccggggcacagaccacttctggagacctgctgcccagtttgaaagtgccaggggagtgaccctcttccctgatatcaagattgtgagcacc

SEQ ID NO: 12940 - DNA, 490 bp, Homo sapiens
  misc_feature (1)...(490): n = A,T,C or G
cgcgccgccccccccccnaatcgtagaccntannntttcgagnattcctagtccgtgtggtggaattcgattgatttcatcctgttactgctttgatttcaagccttcaatccattaacttggcatttaagggccattttccatctgtctgtaaatcaactttctagacctggctgtaataccttcctatatgaatactcagccaacctgatttcctactcccatgttttttatttatgctgttcttgttttatatggttaatatcagatccatccttttaggctcaacttaagttctttccccttaaagcttctcttagtattctagaatgacattagtgctattgatttaacactgtttgtcatttggtgccctcatgtggtgtacatcttttatgtacatgttgcactttattgctagaagacagaaagtgagttgccattgtattttgtagtacctagcccatgtcctgtccatatatttatcaat

SEQ ID NO: 12941 - DNA, 455 bp, Homo sapiens
  misc_feature (1)...(455): n = A,T,C or G
attgaaaccattgaggacccttanaccanctggnggaattcgtcctttgtccggacacatttgcaagtcatcatatctgtcagccagctgatagcatacgttgttggcattgggggaaccagattccagcagtccctgtccatcatcaacaactgtgccaacagtgaccggcttattaagcacaccagcttctcctctgatgtgaaggacttaaccaaaaggatacgcacggtgctaatggccaccgcccagatgaaggagcatgagaacgacccagagatgctggtggacctccagtacagcctggccaaatcctatgccagcacgcccgagctcaggaagacgtggctcgacagcatggccaggatccatgtcaaaaatggcgatctctcagaggcagcaatgtgctatgtccacgtaacagccctagtggcagaatatctcacacggaaagg

SEQ ID NO: 12942 - DNA, 506 bp, Homo sapiens
  misc_feature (1)...(506): n = A,T,C or G
aggggccgnntnnagtnaccctggtacctacgnagnggactgattcccttgcanggccggagggagaccgnggntcggccgtagcggagctgcgagttacagaatgtctgaaggggacagtgtgggagaatccgtccatgggaaaccttcggtggtgtacagatttttcacaagacttggacagatttatcagtcctggctagacaagtccacaccctacacggctgtgcgatgggtcgtgacactgggcctgagctttgtctacatgattcgagtttacctgctgcagggttggtacattgtgacctatgccttggggatctaccatctaaatcttttcatagcttttctttctcccaaagtggatccttccttaatggaagactcagatgacggtccttcgctacccaccaaacagaacgaggaattccgccccttcattcgaaggctcccagagtttaaattttggcatgcggctaccangggcatccttgtggctatggtcg

SEQ ID NO: 12943 - DNA, 472 bp, Homo sapiens
  misc_feature (1)...(472): n = A,T,C or G
agagcgcaatgatncccctnnnaattgacgacccttagnccatgcggtggaattcacaatccattcttaaagtacttgttatttgtttttattattactgtttgtcttctccccagggttcagtcctcaaggggccatcctgtcccaccatgcagtgcccctagcttagagcctccctcaattccccctggccaccaccccccactctgtgcctgaccttgaggagtcttgtgtgcattgctgtgaattagctcacttggtgatatgtcctatattggctaaattgaaacctggaattgtggggcaatctattaatagctgccttaaagtcagtaacttacccttagggaggctgggggaaaaggttagattttgtattcaggggttttttgtgtactttttgggttttttaaaaattgtttttggaggggtttatgctcaatccatgttctatttcagtgccaataaaatn

SEQ ID NO: 12944 - DNA, 556 bp, Homo sapiens
  misc_feature (1)...(556): n = A,T,C or G
cggtaaacaaanaaggaaaaaaaatttgaccaccgnctggaggggcaattctcnctgggcactcagagagaaggcatgtctttggggagtcagatgagctgattgggcagaaagtggcccatgctctggcagagggactcggagtaatcgcctgcattggggagaagctagatgaaagggaagctggcatcactgagaaggttgttttcgagcagacaaaggtcatcgcagataacgtgaaggactggagcaaggtcgtcctggcctatgagcctgtgtgggccattggtactggcaagactgcaacaccccaacaggcccaggaagtacacgagaagctccgaggatggctgaagtccaacgtctctgatgcggtggctcagagcacccgtatcatttatggaggctctgtgactggggcaacctgcaaggagctggccagccagcctgatgtggatggcttccttgtgggtggtgcttccctcaagcccgaattcgtggacatcatcaatgccaaacaatgagccccatccatcttccctacccttgctgccag

SEQ ID NO: 12945 - DNA, 392 bp, Homo sapiens
  misc_feature (1)...(392): n = A,T,C or G
ggngccctcgggccctgcctgacctggtgcttttttccccatccccatgttccttttattctgtaaaaagttagtggactgcagccctgggggttgcaggctgcggtgcctcaggcccctccttcagcctgtggccacctctggggcacaatgggggctccccactgcccagtctgcccctcgggttgggggagtatcccaggcctctctgtgggacctgggcccctgacgggccttctcagcccgttttgaggacagacagtcccccgaggtaggctacatccccccaccccagctggtctgcttggatttcctacagcccccgtgggcatggaccacctttattttatacaaaattaaaaacaagtttttacaaaaaaaaaaaaaaaaaa

SEQ ID NO: 12946 - DNA, 456 bp, Homo sapiens
  misc_feature (1)...(456): n = A,T,C or G
ttcaaatcgagacctgagtacgtgcggnggaactcagtgcaattacccataccccttctcagcctggggaccccaggcaaccacagactgtccactcatgggagctgaatcccaggtcagccctgccaatgtcccttaggaactgcccaggcaaggcccctggttttgtatacttgttcctgccacccagcagtagatgagtgtttcaggtgaagaccaggatagattttctaagtgtgaatccccacttcacatatggaaccccttatgctgaacttgaaaagcaccaagacttcctgtagacaagaaagtgcttaggtagggacagcccctgggcatcccacccaatgtagctggcaccccactatggcaaaggtgccttgataactgagccctgtatccctcccatgcccagccagattctcatgggaagccctctcccttcttttctgcctn

SEQ ID NO: 12947 - DNA, 480 bp, Homo sapiens
  misc_feature (1)...(480): n = A,T,C or G
ggcccgcaattgataccatcgtttgacgccatagcgagcagcgcggangcattgggttgtaatcattcaaaggataaccaaatgtgccgtgatgtatgtgaacagattttctcctcaaaaagtgaatcccgactaaaacatctgttgcagcgagccccagattattgcccagagacaatggttgaaatttggaattgtatgaattcatctttgccaggtgtgtttaagaagtctgatggctgggttggcttaggctgctgtgaactggctattgccttggagtgtcgacaggcatgcaagcaggcatcttcaaagaatgatatttccaaagtttgcagaaaagaatatgagaatgctcttttcagttgcattagcagaaatgaaatgggctcggtttgttgcagttatgcaggtcatcacacaaactgccgagaatactgtcaagccatttttcgaacagactcttctcctggtccatct

SEQ ID NO: 12948 - DNA, 456 bp, Homo sapiens
  misc_feature (1)...(456): n = A,T,C or G
attgaaaccttgatgatcattagtaccgtctggnggaattcccagaaaaaaggtttcccaaaccagaattcaggaatgaatcagaagataataaatttagtgatgattcagatgatgactttgtacagccccggaagaaacgcctcaaaagcattgaagaacgccagttgcttaaataatatgcagcaccactagcttgtgctggtttttagatttttttgttttcaaaaaaacatttgtcagtaatttaacatcactacaaaaagaagagtttgtgactattctcatctctgttttggacgtttactagactttgatttccttaatagcccatttctgttaacctcttatcactaagaaagaaaggaaagaaggagatgaatagaagaaagaaaatggaaagaaggaaaaaaggaggatagaaaaaggatggaagaaagaagcattgaaaacaac

SEQ ID NO: 12949 - DNA, 446 bp, Homo sapiens
  misc_feature (1)...(446): n = A,T,C or G
attgaagaccttttntttagaggacccttantccatgcggnggaattcctcctggagaataatcagcagcattgaacagaaagaagaaaacaagggaggagaatacaagctaaaaatgattcgggaatatcggcaaatggttgagactgagctaaagttaatctgttgtgacattctggatgtactggacaaacacctcattccagcagctaacactggcgagtccaaggttttctattataaaatgaaaggggactaccacaggtatctggcagaatttgccacaggaaacgacaggaaggaggctgcggagaacagcctagtggcttataaagctgctagtgatattgcaatgacagaacttccaccaacgcatcctattcgcttaggtcttgctctcaatttttccgtattctactacgaaattcttaattcccctgaccgtg

SEQ ID NO: 12950 - DNA, 371 bp, Homo sapiens
  misc_feature (1)...(371): n = A,T,C or G
gcagaaatgcatttgcggnggcantnggntcttcacctctaagatggggatgatgaaaacagtacctgtcatgcagaattgtttggatgattgataatttagatgtttatacatgtaatgtacttagatcagagtctgctcttttcacttgatatccagtactatgtaagatagaaggtgcatgtcttctgtattctgtatttcccatttcttttgcgtgcagtctttgattcgtacaatagaaggaacacgtagaatgtatatttgtacattcatgtcaacatagtatttgaaattgctaccaaactcatttaatttggcataagactaacagatgaagtctctcatttgcttgaagatattttacaaan

SEQ ID NO: 12951 - DNA, 469 bp, Homo sapiens
  misc_feature (1)...(469): n = A,T,C or G
gctgggctnnnaaggatggcatacgtaagngcggngcaatttaaatttgacatgtctaaacttggatttctgatccaagtgttggatttcccccaaaatccctgtccactcacagcctttaccatttctcttgatggcatctctatcctagttgctcaggccagaaaccatgcactctaccaggaaaacttcttggctctaccttcaaaatatatacagtattttgactacttctcaaagtgagaagtagatattgttactcccctagtaggagaacttcatcagctctcacttcctttactctaataacatcctggctggtctcccagcatccaccctttgccccctggggtctattctcaacccagtagccagagtgaaccttttaaagtagatgtcagatcgtattactcctgtgctcagaatcttccagcggttccccatttcccgcagaggaggcattaaagcg

SEQ ID NO: 12952 - DNA, 223 bp, Homo sapiens
ccgccactgtgtggtgggacgaggccgataccctatgtatcaccatcactctaggagtctgatcagagactggactacaccgtgggagaatctgcagaggtgttgctggaacagacatatttctagatgcatgaggaggcctggacattactctcgagctccttaaccatacttcagtagcatgcatttctcactaaattggagaccaccctgtttgtttgag

SEQ ID NO: 12953 - DNA, 457 bp, Homo sapiens
  misc_feature (1)...(457): n = A,T,C or G
tttaaccgtagacctgagtccatgcggtggaactccagcagtgagttcaaacccatgacacagaatgaacaaaaagaagtcattagtaaatttcgcactggaaaaataaatctgcttatcgctaccacagtggcagaagaaggtctggatattaaagaatgtaacattgttatccgttatggtctcgtcaccaatgaaatagccatggtccaggcccgtggtcgagccagagctgatgagagcacctacgtcctggttgctcacagtggttcaggagttatcgaacatgagacagttaatgatttccgagagaagatgatgtataaagctatacattgtgttcaaaatatgaaaccagaggagtatgctcataagattttggaattacagatgcaaagtataatggaaaagaaaatgaaaaccaagagaaatattgccaagcattacaagaataacn

SEQ ID NO: 12954 - DNA, 457 bp, Homo sapiens
  misc_feature (1)...(457): n = A,T,C or G
nattgaaacccttgatgacccttagtccagtctggnggaattccatccagggcctacgggctgtgtttgatgagacctatcctgaccctgtgcgagtcgtctccattggggtcccggtgtccgagttgctggatgacccctctgggcctgctggctccctgacttctgttgagttctgtgggggaacgcacctgcggaactcgagtcatgcaggagcttttgtgatcgtgacggaagaagccattgccaagggtatccggaggattgtggctgtcacaggtgccgaggcccagaaggccctcaggaaagcagagagcttgaagaaatgtctctctgtcatggaagccaaagtgaaggctcagactgctccaaacaaggatgtgcagagggagatcgctgaccttggagaggccctggccactgcagtcatcccccagtggcagaaggatgaattgcg

SEQ ID NO: 12955 - DNA, 474 bp, Homo sapiens
  misc_feature (1)...(474): n = A,T,C or G
natgagaccctggccaggcggttgttcccatatgcttgttcataccatgtacgtagtgtgtgattgtatgtgtttgtatttgtccacatgtcccaaaacatgggctgttacttcctttttctatcttggtttccttattcccacccttctttttccacccaggtatctggacaggaagacttctcccatcagctttaccagaggaagctgcaggccccactgtggcccagctccctgggcatcactgattgctgtcagtatgtcacctcctgtcaccccaagagatcagagagacgcaagtatggccgagacttcctgctacgtttccgcttctgcagcatcgcttgtcagcgaccagtaggactggtccttatggaaggagtgacagatactaagccagagcgacctgcgggttgggctgagtctgtccttgaggaagatgcatcggagcttgagcctgccttctccaggacg

SEQ ID NO: 12956 - DNA, 482 bp, Homo sapiens
  misc_feature (1)...(482): n = A,T,C or G
natgagaccatcgcannnccnnatgagaccataggccangcggnggaattcgtttttagtagtttctgatggctgtctttatatctgttgggtcagtggtaccattcctttcatcatttttaattgtgtttatttggatcttctcttttgtcttattagcctagctagtggcatatctattttattaattttttcaaaaaaccaattcctggatttgttgagatctctacaataagcattacaaaacactgctgaaagaaatcagagaagacacaaacaaatgaaaaaaacatctcttgctcatggataggaagaaacaatattattaaaatggctatactgcccaaagtaatttacagattcattgttattcctatcaaactgccaacaatattcttcaaagaactagaaaaaactattttaaaattcatatggatctaaaaaagagccttaatagccaaggcaatcctaaacaaaaagag

SEQ ID NO: 12957 - DNA, 552 bp, Homo sapiens
  misc_feature (1)...(552): n = A,T,C or G
gttgaatcgactccctattccgcgnngggcaattcccgagatgcgggtcatggcgccccgaaccctcatcctgctgctctcgtgagccctggccctgacttagactctgggccggctcccactccatgaggtatttctacaccgctgtgtcccggcccggtcgcggggagccccacttcatcgcagtgggctacgtggacgacacgcagttcgtgcggttcgacagcgacgccgcgagtccgagaggggagccgcgggcgccgtgggtggagcaggaggggccggagtattgggaccgggagacacagaagtacaagcgccaggcacagactgaccgagtgagcctgcggaacctgcgcggctactacaaccagagcgaggccgggtctcacatcctccagaggatgtatggctgcgacgtgnggcccgacgggcgcctcctccgcgggtatgaccagtccgcctacgacggcagggatacatcgccctgaacgaggatctgcgctcctggaccccgcgcgacacggcggctcaaatcaccccagcgcaggg

SEQ ID NO: 12958 - DNA, 452 bp, Homo sapiens
  misc_feature (1)...(452): n = A,T,C or G
natggaagncccctatctgatgaccntcgaaanngcggnggaantnctgaactgttacttattttgttttttgagacagtctcattcttctattgaggctttagtgcaggagtgtgatatctggtcactgcagcctccgcctctggggttcaaacaattcttgtgcctccgcctcctgagtagctgggattacaggcgtgcaccacaatacccagctaatttttgtatctttagtagaggcagggttttgccatgttgtccaggctgacttacaactcctgacctcaagtgatccgcctgccttggcctcccaaagtgttgggattacaggtgtgagccattgcacctggcttcaaatgttattatttaaaaagtgttaccaccttagatggcattagttgcattgtgcatagtgaatggaaaatgaatgagcatgattgatgcacagtccc

SEQ ID NO: 12959 - DNA, 471 bp, Homo sapiens
  misc_feature (1)...(471): n = A,T,C or G
tgggcgtnnnnttttattgcggtccataggccangcggnggaattcgtcggaacatgttgcagttcaacctgcagatcctgcctaagagtgccaaacagaaagagagagaacgcattcgactgcagaaaaagttccagaaacaatttggggttaggcagaaatgggatcagaaatcacagaaaccccgagactcttcagttgaagttcgtagtgattgggaagtgaaagaggaaatggattttcctcagttgatgaagatgcgctacttggaagtatcagagccacaggacattgagtgttgtggggccctagaatactacgacaaagcctttgaccgcatcaccacgaggagtgagaagccactgcggagcatcaagcgcatcttccacactgtcaccaccacagacgaccctgtcatccgcaagctggcaaaaactcaggggaatgtgtttgccactgatgccatcctg

SEQ ID NO: 12960 - DNA, 475 bp, Homo sapiens
  misc_feature (1)...(475): n = A,T,C or G
natggagaccaatggattgtgcgccgtagncnngaggctagatgggaggatgaattgtcacatctatccacactgtcaaacaggttggtgtgggttcattggcattctttgcaatactgcttaattgctgataccatatgaatgaaacatgggctgtgattactgcaatcactgtgctatcggcagatgatgctttggaagatgcagaagcaataataaagtacttgactacctactggtgtaatctcaatgcaagccccaactttcttatccaactttttcatagtaagtgcgaagactgagccagattggccaattaaaaacgaaaacctgactaggttctgtagagccaattagacttgaaatacgtttgtgtttctagaatcacagctcangcattctgtttatcgctcactctcccttgtacagccttattttgttggtgctttgcattttgatattgctgtgagccttg

SEQ ID NO: 12961 - DNA, 482 bp, Homo sapiens
  misc_feature (1)...(482): n = A,T,C or G
catcgacnccntnnaattgagaccattaggccagngcggnggaattcctgttggaagaatttagacaaactcagcaagttcctccaaacaaaatagattatgaatatagtgaattgatattataccagaatcaagtgatgagagaggcagatctgttgcaggaatctttggaacatatagaaatgtatgagaaacaaatatgtgataaacttttggtggaagaaattaaaggggaaatactgttgaaattgggaagattaaaagaagccagtgaagtgttcaaaaacttgattgatcgaaatgcagaaaactggtgttattatgaaggcttggaaaaagctctacaaattagcactttagaagagaggcttcaaatttatgaagaaattagtaagcagcaccccaaagcaattacacccagaagattacctttgactcttgtcccaggtgaaagatttagagaactaatggataagttcctg

SEQ ID NO: 12962 - DNA, 457 bp, Homo sapiens
  misc_feature (1)...(457): n = A,T,C or G
cacagacgcctagagccatcgcggnggcantnggaagaggctgcatggcgcggtagtcccccgagtggaggtcggctgcccctgggaatccagatagtcggagggagtccatctggagcggccaacttctcctcttaagaacaatgatgaaggctcactggacatatacgctgggttggacagtgctgtttctgacagcgcttccaaatcctgtgtaccatcaagaaattgtttggacttatatgaagagatcctgactgaagaaggaactgcaaaggaggcaacatataatgatttgcaagtagaatatggaaaatgtcaactacaaatgaaagagctgatgaaaaaatttaaagaaatacagacacagaatttcagcttaataaacgaaaaccagtctcttaagaagaatatttcagcacttatcaaaactgccagagtggaaataaaccgcaag

SEQ ID NO: 12963 - DNA, 457 bp, Homo sapiens
  misc_feature (1)...(457): n = A,T,C or G
ccttgacacatagtagcatcgcccangcggnggaattcattggaaacaagggacacagctgagaggggaccaagtggattgtggggtcctgagctagtgcacttaggaagtttgtggtagggctagcaagcgatagatgtgcccccagatgcaaggctgggacagaggagttggtgctgacaacatttctactgggtcatttactagacagctgctcagtgcctaccagggtcaagtactgctgtggaagctacagtgggctattttattctttcaggatggggatgctcttatttcaagaggcatacaaaagcagcactttccaaaggtgggcaggtgggtgtattaacttagcaagaataaccaggccagaaattggtgcctaacattgccaggtctcccctgtaaaaccacatgccctgggggaaacattgagtgctatatttctctgaggctn

SEQ ID NO: 12964 - DNA, 503 bp, Homo sapiens
  misc_feature (1)...(503): n = A,T,C or G
gggttcgagtcccctttncagngnggttcgagtccactatccatgtggtggaattcaaatctcatttcacagacaaagagaccggacaggaacatgagcttatcgagagcatgcccctgttggaatggtttgctaacaactataaaaaatttggagctacgttggaaattgtcacagataaatcacaagaagggtctcagtttgtgaaaggatttggtggaattggaggtatcttgcggtaccgagtagatttccagggaatggaataccaaggaggagacgatgaattttttgaccttgatgactactaggtagtcgacatgggtccggcaaaacgtgcctcaccctccagcatccaacccaaggagcatacccatggtggaatccaaacagatccctgccttacaattggaacatttccagaacttaatccatgagcattggatattgaaaagaaaaccgaaacaaaaccagacccagccctacactgtggtttgtcatgg

SEQ ID NO: 12965 - DNA, 506 bp, Homo sapiens
  misc_feature (1)...(506): n = A,T,C or G
agggccggnnnnnnnnnnnccatcgagtgcattcgttcagtgcggtggaattcgccgtcccaaggagtgcccagcactactcagcatgtagtccaggacctgcggcatcagcatcccctgggagcttcttagaaatgcagacctgtgggctctaccacaggcctctggaatcagaatcttcagggtggggcccagcagtctgtgttttaacaggttctcccggagatgctggtgcatgctcaagtttgagaaccgctgctctcatagactgctcctccaaggggaagcagtgtggaacagcagagaaagtcccgtccctatctctgactgtgcagtgagtgtggcctacgaacaggtcccttcctaagctctagtgtccccatctgtaaaatgggctgattggcctccatggtcagagcggccatctggctgtgccatcctgcatttttaggaatggaaagcaggcctctgaggcagtggacaggaagacttctcatccttgaatt

SEQ ID NO: 12966 - DNA, 505 bp, Homo sapiens
  misc_feature (1)...(505): n = A,T,C or G
ggggcggcnnnnnnnnaaccgtcagcgctncattagtccagtgcggtggaattccgcacactggagagaagccccatgaatgtaagcaatgtggaaaagcattcaggtatttctcttccttgcatatacatgaaaggacacacactggagataagccatatgagtgtaaggtatgtggcaaagccttcacttgttccagttccattcgatatcatgaaaggactcacactggagagaaaccctatgaatgtaagcactgtggtaaggcctttatttccaattacattcgatatcatgaaaggactcacactggagagaaaccctatcaatgcaagcaatgtggcaaagcctttattcgtgccagttcatgtcgagaacatgaaagaactcataccattaatagatgagaaatccttttagtggaagcaacgggagaagctttctgttgtcccacttcctttgaaacacaagagaagagagtggtgaacgaacctctggataactg

SEQ ID NO: 12967 - DNA, 487 bp, Homo sapiens
  misc_feature (1)...(487): n = A,T,C or G
nggccgcgaatcgtagaccctaggaattgagcgccatttgcaagctcatctaacacgtggaatgaaaagtacagttctttacagaaaacacctgtttggaaaggcaggaatacaagctctgctgtggaaatgcctttcagaaattcaaaacgaagtcgacttttttctgatgaagatgataggcaaataaatacaaggtcacctaaaagaaaccagagggttgcaatggttccacagaaatttacagcaacaatgtcaacaccagataagaaagcttcacagaagattggttttcgattacgtaatctgctcaagcttcctaaagcacataaatggtgtatatacgagtggttctattcaaatatagataaaccactttttgaaggtgataatgacttttgtgtatgtctaaaggaatcttttcctaatttgaaaacaagaaagttaacaagagtagaatggggaaaaattcggcggcttatgggaa

SEQ ID NO: 12968 - DNA, 473 bp, Homo sapiens
  misc_feature (1)...(473): n = A,T,C or G
gggatcgtagacattagnncnngcgatagaggattattagtcagtgtggaggaattccagcccctctgcaaaggttgggaaacttgcaaggaatttaaggaaatctctgttcagtcattagccagccactaaactaactgagcagatccttcagtgatcacacacaacaaagaatacagactttacagacttagtcctagaaaatcactacacaaacagcaacaacaatgcacctgggactaagggagaggagatgagttccagagttggtatattatttaaatgtctagttttcaataaaaacaattataagacacagagcaaaactagaaagtatggcccatacccagggaaaaacaagcaaccaatagaagctgtccttgaggaagttaatatcttggacttactagaaaatgactttaacactagttattataaatatgttcaaaaaactaaaagaggccaggtgcgga

SEQ ID NO: 12969 - DNA, 450 bp, Homo sapiens
  misc_feature (1)...(450): n = A,T,C or G
nactgagaccactggaagngcggtggaattcgggagcagttcagtgacatgggcttccagcaggaccggatcaaggaggtgctgctggtccatggcaaccgccgagagcaagccctggaggagctggtggcctgtgcccagtgaccacggaggcactccacgatgcctgggcatctaggcccaatgccagacctggcaacccatcctaactgtattattaaaaccaagtaagagtaaaaaaaaaaaaaaaaaaaaaaaaaaaaaaaaaaaaaaaaaaaaaaaaaaaaaaaaaaaaaggggcccttttaattaaaagggccctttaaaaccccgttaaaacccctgggggggtttttttatggcccccctttttggggttgccccccccccggttttttttttgccgggggggggggcccccccccttttttttttaaaaaaaagaagggg

SEQ ID NO: 12970 - DNA, 473 bp, Homo sapiens
  misc_feature (1)...(473): n = A,T,C or G
ngcccaccattganncccctnnnnaatgacgaccattatnccgtgtggtggaattcgccaagtcgcctggggagaatggggcctgaactctggaccctgaggtcctttctcatgcactgaaagcagccccccagccctggcccctccctgcgacttggtgacttgactgccctattctagcatcatggaaaacacatggaaggccacgtatagggtggtgggagggatgcccaagggagtcacgcattttggggggagggggctagctaggctgcaggatgagggagtccaattccaaaggcccgtgcttttttattttattttatttttttggtggaggatgagccaataatgtctccctcctcactttccacactgctcatgtcagcttgtactaccctcccctttgaccccagataacccactgtatccaaccttctgtatgttttctccttaattgagtaatcactgag

SEQ ID NO: 12971 - DNA, 469 bp, Homo sapiens
  misc_feature (1)...(469): n = A,T,C or G
gtgggntnnnttttgttgcgtacattaggccgngcggtggaattcagcagagaagtggcaggttttgaaaagattgtcctggcttctgggtagaggggagcttaggaggccaagggtggaaataagaaggcctgccacgagaccagtgcagcatcctggcaagaaaggttggtggctttggtagcaggagagatgggaagaagcagtgggcaatgctttcctgcttgcctcagtcagcgggatttgctgggagattgaagggggagcttgtgagagaaacctccaggctcaagttccctccctgacatcaccatctcttatcttttaaagactagggtacattaaggtatggaatatatctagcattggccactaagatggagtatttctactggagagctgagaaggtattttttgcttagagttaaagccttttgaattatgcctatcaatttctgctaatgttcaa

SEQ ID NO: 12972 - DNA, 442 bp, Homo sapiens
  misc_feature (1)...(442): n = A,T,C or G
ntttcgagatcgttatcccatgcggnggaattcgagccagagtgggaactgttgatccaagtgtagcctgaagcgaaagaggagccttccagacccatgccatatataaacacacgtgggtgtgcattctccccccacaccttctgtgcaaagctgggagctcactccactgcgtcttgctttttttcacttggcagatcttggagattgttccacatcagtacataaagtacataaagattgtcaccccacaaatacacaccaagtcctattttcatcagcgataaaaaagaaaagttcttgctttccggaagcttgcatgcggctctgagtacccagtgacaccagatggtactcagcgttttgcaagggattaccacaaggccccgtgatggtgcctgccatggttaggacaggctggtggctgggtagggttagtgag

SEQ ID NO: 12973 - DNA, 451 bp, Homo sapiens
gaacaaatcactcatttaaaaagtaattcagaagaacagtgtggcatgatcagacttctaattgaatagcgtaacaacagtgtttgtaattatagatttgcttggacaaaatattccaggaactcatagcgagctcaaagcaattaagtgggaacatttttaatttaaaaaaaatttccaaatatttgtgggtccgacagtaatgatcaaaatatgaatgactttggaaaatttacatgaagctcaagtgttaggattgacttatgaaaataaattttatttctatccaaatttgaatgtccaaaccattttttagttacttctttctaatcctagttattcagacaaaatttggaaacttattttatgaccacatctaatattctggctgctttggatacaatactcttgatttatgataattagttaaaatatattaaaaatatgatta

SEQ ID NO: 12974 - DNA, 501 bp, Homo sapiens
  misc_feature (1)...(501): n = A,T,C or G
ggccggnnnncnnnncactgatggtctcgttagtgcggtggaattcggtttacatgcaagaaatgctatttattcaatagctcagattccgtccaagaaatgtctgtgcagcccgattgacaagagacttaagggaccccgaaaacaaacgtagaagtcacacaagagtataagtaactatttcaagtattttaatacagataagttagagcacataaaatcagagtccaacctacccagacattaacataatgtgatactaacaagagcaaagaacaagttataattgtatttataattaaagttatgaaaatgttgatttgctctcaagggcaatattttaaatgtctgtgaggtatagttattacttcatgaaaactccatagaaatgctggacaatgaagagtatgaaattgaagtttttctccattgaaaacattcagggaggactttgattaaaactttttgtaaaaagtttcagtagtgttgacttgaggatga

SEQ ID NO: 12975 - DNA, 478 bp, Homo sapiens
  misc_feature (1)...(478): n = A,T,C or G
agagcanaggaanaaancctgataccntggnactgatcacactagacaagngcggnggaattcccacccacgccggcgggagccgcccgttcgcgctgccaacagcttacgcctgctacggtcctggcaagcacctcgggatcccattccttcacagggaccctagccagttaaagctgatacattcctgtgggtcaactatgcaactaactcagattttgagcaaacaaagctctcaagttggagatcctcaggagtctctgcattagtcggacagctcttctggaattatcttctaagacaactgagggttgggtaggtggctctgctgatttttcgctggacttccacatttgggaccagttggctgtcatcagctctagaaagggtgtggctgttttacattggctgttttcctcacattcctcaagcaggtactgcaataaagaactggagaaatacagtcagatgggaagta

SEQ ID NO: 12976 - DNA, 487 bp, Homo sapiens
  misc_feature (1)...(487): n = A,T,C or G
aggccgggaaatcgagagcctaggttcgagagcataggaagngacggggaatttcactagaataaatatgcgaggccctaaaatatcactgttattcttggagtaattcagtataggttcgctcaaaagagatttttataacttcagacatgcatcagtaggaaataacttgagaaattcatatggttatgttacaaattcatattctgttactacagtaaacgttaagagttttaaacagttaagattggacaatttttcttcttttctatattacaagggccccagtgttaatgtcttagattttcagtatttgaacttatttttttaaattctgtcattgagataagaataattcaggtagcatctgaaattttaatgaatgtataattggcatatcatggaaaattaaccagaaagtatcagttcttaaaagttatgcctagaaattatgtaaagctaaactactggttagaaagtattcagt

SEQ ID NO: 12977 - DNA, 507 bp, Homo sapiens
  misc_feature (1)...(507): n = A,T,C or G
agagcgcngnnnnnnnnnacctagctaccttcgnannnnactganagtctcgtaaanccgannngnnggaaganagaagccagtcatggatgaccagcgcgatcttatctccaacaatgagcaactgcccatgctgggccggcgccctggggccccggagagcaagtgcagccgcggagccctgtacacaggcttttccatcctggtgactctgctcctcgctggccaggccaccaccgcctacttcctgtaccagcagcagggccggctggacaaactgacagtcacctcccagaacctgcagctggagaacctgcgcatgaagcttcccaagcctcccaagcctgtgagcaagatgcgcatggccaccccgctgctgatgcaggcgctgcccatgggagccctgccccaggggcccatgcagaatgccaccaagtatggcaacatgacagaggaccatgtgatgcacctgctccagaatgctgaccccctgaaggggacccggcg

SEQ ID NO: 12978 - DNA, 417 bp, Homo sapiens
ctttaaggcacagatcgctcatgctattgtttgtggtttaagaatgccttaagtggttttccgccctgggtgggccaggtgttccttgccctcattcctgtaaacggacaaccttccagcatgggcatcaaggccatcacgagcatgtcacagtgctgcagagattttgtttatggccagttttggggcctgttcccaacgagggcacaagctttttttgttattgaaatggctcttgggtttacaaaggtaaaaatccaatttaaaaccgtggctttaaataataatattttgaagttatggaaatacttttacttttcaatatagagtttcccccaatcaaattttgaggactaacatggcattgctacggtacaaggagatatcctgtatttgatctaaactaattcttataat

SEQ ID NO: 12979 - DNA, 498 bp, Homo sapiens
  misc_feature (1)...(498): n = A,T,C or G
agcgcccagccgcccaattgagaccctaactgataccctcggaagngccgcggaanntgnatttttattcagcagactacctttcttatcttttcagcttaatatagctgcatcttctttctcaaagccaaactaagatattccctattaaaatgtccatgagcctagcattgagtgtctggcatccatcaatttcatagactggaaaatgattgttgtttggtacagtaaagaagaggatgtgcatcagttcctaccgtttgcagctttgtttttagccttcccattttaaaaataaattcaaggacattgagttacaaggcaggagggctggagctactgggcagcctgaatatgacaagcatttgtgtggaaagtcattgctccttctgccacactttgggccatcaggatcattctttcccagaagggccataaacttgctcaaaagtttctataaatgggaagagggagaggaaggatttttgcatcagtcct

SEQ ID NO: 12980 - DNA, 588 bp, Homo sapiens
  misc_feature (1)...(588): n = A,T,C or G
agggtgccccctttgannccccnnattgatnacctatccgagnggngcaannccacacatgtaaatcagagctaattggctgaaaatgaattagaatttttgaattaaattttaattatacaagtaatacatgaatacattttcctttaaataaaattagagcattttaggtaaagaagtctctactggcctccccagcctgacctcaggccccttccccactttagaggcagctgctgttaggcatttgctgttgatccaaaatgttctcctatgcgcattgaaacatgtcctgtgttctattgttgcttttgtttgcttgcatagatgtggtggtgtacacactggaggtgctgctcctgagctcagggcaccttacgggactctcctcatgtcgcgtgtcacctgccgcagctggctccactgcccctttcagctggccgctggcaaccagaactgattgtgctatgatttatttagttggtgcttattgatcgactattaaaaggcttccagtcttgtttcaataagacaaacctgtaacagcatccttgtacatgccactnttgctcatgtacaaagtgtttt

SEQ ID NO: 12981 - DNA, 482 bp, Homo sapiens
  misc_feature (1)...(482): n = A,T,C or G
ggggggaatcgagagcataggcattgagcnccattgcgatgaatactgtctttccaactcctctgagttgtagggatgaggcagctttttctcctctgtgtttatattagcaccgtgcacacagtaggaacccatgaaacagtaatttagttgatgtgtccagggtctgccaagctgctgtatttatccactttattacatatattgacaatttaccaccagttctatgaaaatgaaatatatctgttcatatggctttttactttccttagaataatttgaaatttgaagttaatagaacacagttttgcattcattcagcaagtatttattgaatgtctactctgtcaagtgctaggatccacagaaagaatcagacatggtttctgtttcccaggagcacgtggtcagctagcacagggaataaagttaccagtatgtaaatattcacaaggtcatagaatggatgagtgagttgagaa

SEQ ID NO: 12982 - DNA, 332 bp, Homo sapiens
taaaacatcttttaattccaagattttaaccttgttattaatatcttcaataccaagattttatcccgaggtaacaatttatggttgtatacggagttaatttcaacagtattttttataatagcaataaaactaaaaatcaaatatatttgcagcaacagggaattggtgacataaattgcagctctttcatatactgaagtggtcctcaaccactaaaaattccagtattgatgaatactgatgatacgaaagattgttcattgtacatcaaatttttcaaaattaaggttatactgggaggtggaggttgcggtgagccgagattgcgc

SEQ ID NO: 12983 - DNA, 568 bp, Homo sapiens
  misc_feature (1)...(568): n = A,T,C or G
cgggtttccccnaattgagnccatggatcacagtccgaaggggcaattcctcccacctcagtctcctgagtagctgggactaccagtgtgcgccaccatccccagctaattttttgtaatttttatagagagggttttatcctcttgcccaggctggtcttgaactcctgggctcaagctgtcagtccagctcagcttcccaaagtgctggggttatagggaagagcccccgtgcctggccaagtgcaaagcttttaacaatagaagtttcaagggctcaggaaggaccagggggccatctaggctctccatgagttcacgcttaacattatgtttacgtctgtcagataacaattttggttttccacatcaggtgcattgcactgttagatgggtcatcataaaggtcatcaatctagtggcattcattcaatttgcacatcctaactggttcagcactatctgatttagcatgaanatctgccagggcagtcccttgatattcaggntcagctatccatgtatgggcttcaatcttataagaatttgtatttattttcacctttan

SEQ ID NO: 12984 - DNA, 415 bp, Homo sapiens
  misc_feature (1)...(415): n = A,T,C or G
tatgaagaggtggcccgtaagctggtcatcattgagagcgacctggaacgtgcagaggagcgggctgagctctcanaaggccaagtccgacagctggaagaacaattaagaataatggatcagaccttgaaagcattaatggctgcagaggataagtactcgcagaaggaagacagatatgaggaagagatcaaggtcctttccgacaagctgaaggaggctgagactcgggctgagtttgcggagaggtcagtaactaaattggagaaaagcattgatgacttagaagagaaagtggctcatgccaaagaagaaaaccttagtatgcatcagatgctggatcagactttactggagttaaacaacatgtgaaaacctccttagctgcgaccacattctttcanttttgtttgtt

SEQ ID NO: 12985 - DNA, 395 bp, Homo sapiens
  misc_feature (1)...(395): n = A,T,C or G
ctttgaatgtgtagcagttgttcctgtaactctttaaaacttggctataggctgtttagcacagtacagattaaagatacagttacgtaaacagcaaagtaattttatagtgcttcatccatttatcatgctttggtttgctaattttttcacatacctttttctatcacagtctgttgcttttgtacacatttctcatattggggttcgacaggtaaacacaaactgctatttcagtagaaaaagttattgttatgaatattaaacccaataaattgtataanggtnnaaaaaaaaaaaaaaaaaaaaaaaaaaaaaaagaaaaaaaaaaaaaannnnggggccctttttatttaaagggcccttttaaaccccgttaaaacccctgagggggt

SEQ ID NO: 12986 - DNA, 470 bp, Homo sapiens
  misc_feature (1)...(470): n = A,T,C or G
gcggggntnnnnatcgattgacgtacactaggccgngcggttgaattctgtggccctgccgcgggcacgcccagaagagcttgagaacaaggtctgtctacctttttctcgcattggcctttgtaatttcctaattgcctcttttgtctgctgtggaattttaatgccacagattaccctgtgtagctggttttggagggccacgaatccttgtaatgtctgattttcttactccccaaaaccggttttcattcttgagggacattgtcgccccttaaggacacatgcagtggcacctgcttcagttgtagaaccaggtacccctggcagcatcctgggtcacctggagtgacgtggtgctccctggagatgaggctcacgccagcgtgaaaccagggtgggaactggggtggagggccaggggagctctgcagtggccagcagtggggtggggacagagggcacagcat

SEQ ID NO: 12987 - DNA, 471 bp, Homo sapiens
  misc_feature (1)...(471): n = A,T,C or G
gcgganctnnnaatcgatagcattacgtcagngcggnggaattctgatttttcatatgtggaaatatacctacctcttccgttggaaagaacatttaaaattaaataaattttaattaaaaaatcaaggagtcttctaatgtaaattttaatgttaactttcaaatccactagtattttttttgcttttatgacaaatagcatacaccaaacatttctgtgaaactatccttctctttcaatgtgtttaattttggagtaacgttttccttgtgactaagttgcaagatcttatttattaactaggtatgaagtataaacccattttggtgcaatattcttgactccttggtgctaaagattgttaaattcaatgcttgatgttacaaggtgttgttaaaacacaaaatgaataaaagtgagagtagtcagaactataacattcaatttgctatttacaaatgaagtattg

SEQ ID NO: 12988 - DNA, 469 bp, Homo sapiens
  misc_feature (1)...(469): n = A,T,C or G
gcgggntnnnnattgatcgagtacactaggacangcggtggaattcgccgggttcattttcagcgtgtctggcttttccatttctgtggcctggcaaggctctcttgcctgccaccatgtaagacctgcctctgctcctccttcaccttccgccatgattgtgaggccaccccagccatgtggaactgtcaagaggctgggaggtgccctctgcctttcaagatcagagagtagctgatccccctcctgccgtcatttatggaccgaataaccacagagactgtgaggccggcggaaacttggcagtgcctgtttgtcattgtcagtttcaaatactttttaattttgaatagttgtagattttcagaagggttatgaagatcgtgcaggcagtttctgcaagctgctgctaatttccctcagcttccacgtcttcgctgccatggtccacctgcagcagccaagaaag

SEQ ID NO: 12989 - DNA, 418 bp, Homo sapiens
atttaccttgatggtatcataactattgtggattcaaaatatggattaaaagtgaaataccactaaaggcagaagagaatgaaatcatcccacccactgacccgttcccaatctgagcatatggatagggcccaaagcacatttaacagaagagaaacctgatggccttatcaatgaagctactaggcaagttgctttggcagatatcattctcattaataaaacagacttggttccagaagaagatgtaaagaaattaagaacgacaattagatccataaatggactaggacaaatcttagaaacacaaagatcaaggctcagcagctgatagactcagcaacaggcagccaggagctctgaggctcacagctggcagtctagttccactcagtctctacttgagaaattctttctt

SEQ ID NO: 12990 - DNA, 470 bp, Homo sapiens
  misc_feature (1)...(470): n = A,T,C or G
aattgaagactattagaatagagcggcggtattcggatgattacgagatcgagtatgaccaggatgccgagacgctcatcagcgggctctctgtcaactatgatgacgacgacgtggagatcgagctgaagcgcgcccacgtggacatgtacgtgcggaagctgaaagagagacagcggcggaagaacatcgcccgtgactacaatctggtgccagccttcctggggaaggacaagaaggagaaggaaaaggcgctgaagcgcaagatcaccaaggaggagaaggagctgcgcctgaagctgaggccgctgtaccagttcatgtcatgcaaggagtttgatgacctttttgaaaacatgcacaaagaaaaaatgctccgggccaagatccgagaactgcagcggtaccggcgaaacgggatcaccaagatggaagagtcggcagagtacgaggcagcgcggcatanacgg

SEQ ID NO: 12991 - DNA, 470 bp, Homo sapiens
  misc_feature (1)...(470): n = A,T,C or G
ctcgacccccttnnattgtagacctctatccatgtggtggaattctgcaaaacaagtaaacaaagtgcagaggggaggaagagaggggaggggaaaggatgatgctcagaaccagggagcccccccagccctcctgaataataaaggagggaaggggcttcacagggtaatactgactggggggaagggacaggagggctgcagcacgtccagggacagccacagcgcagatcagggcctggcccgagtgagctctaagaggagacggtgacagcggctgagttgagggtactgttcctggcaaaattgaacttgttcaaggtctcttctagcagagaagtcaaccggctctggtcagcctgggggagaagagctcagtaagatgggggctgagagaagagaaggcatgggggcagccagggcagatgaaggcagaaacctcacctcactaatgaagcccagctgcacca

SEQ ID NO: 12992 - DNA, 479 bp, Homo sapiens
  misc_feature (1)...(479): n = A,T,C or G
gcgggannnnnntttgtagacactagtctttgaggtcgaattcgcctgctgcactgctttggtttcatcagctgtttttcccaacaaatatatggtgttgtgtatgggaatgtaactttccatgtaccaagcaatgtgcctttaaaagaggtcctatggaaaaaacaaaaggataaagttgcagaactggaaaattctgaattcagagctttctcatcttttaaaaatagggtttatttagacactgtgtcaggtagcctcactatctacaacttaacatcatcagatgaagatgagtatgaaatggaatcgccaaatattactgataccatgaagttctttctttatgtgcttgagtctcttccatctcccacactaacttgtgcattgactaatggaagcattgaagtccaatgcatgataccagagcattacaacagccatcgaggacttataatgtactcatgggattgtcctaa

SEQ ID NO: 12993 - DNA, 464 bp, Homo sapiens
agaaaaaaaactgagaccctatttgatgtcattagtaagtgcggtggaattcgtccttaaaggtggagacctttccctgctggccagagagaggctgccttgctggttttggagatggaaggaggtaccactagtcaaggattgcaagcagtctctagaacagggattccaacactccggacacagaccagtagtggtccatggcctattaggaagtggggtgcacagcaggttaggggccggcaagccagcgaagcttcatctgtatttatagccactccccgtcgctggcgttaccacccgagctccgcctcctgtcacatcagcggtgggcattagattctcatagcagcacgagccctattgtgaactgcacacacgagggatgtaggttgcacgctccttatgagaatctgatgcctgatgatctgtcactgtctcccgtcacccccagatggggctgt

SEQ ID NO: 12994 - DNA, 492 bp, Homo sapiens
  misc_feature (1)...(492): n = A,T,C or G
ggatcgannnccntnnnnnnnnnnatgtngatcatagtccatgtggtggaattcagagccggcactgctgagtcacagtgacaagacttaccctctggccttgaacagctcatactctaatggagtaaatagataaataagccactgtgatgataataataataataaaaagttaaaaatggcaagataagaccatgaagcatgtggtgtaacaattcagggagatgccatagcttagcagataagagcacagactcaggactgagatgagtctcactccagtgccagctgcagaggctcagctgcatcagtctctctgctcttcaggggtcttagctgtaaaacaagaatgctcttcgtgggaactcagagaatgggcatgtcaggtattcagagcagtcctgtagcccagaaagcctaagtcagtactatcatgatcatggaagagtagattattgaagctgacttagaagaactggaaagacttcttga

SEQ ID NO: 12995 - DNA, 473 bp, Homo sapiens
  misc_feature (1)...(473): n = A,T,C or G
nnnnaattgtagattattagatagagcggcggaattcgattgccatcccttgacatctttttaaaagtgaattgtttaatcacttttttttaagctgatttcttagccatcttgcagaaatatgaggcaggggcacttatccattaggtacagtaggtaaggtaactaagcccaatgacacccttagcagcccatgaaaatggtttagtttctttcataaaatggtgctgaagataatgatagttgcaaaggaaaaaatacggtagaccaatatcatagtatgttaccaagcatagggcctattattggaagctatttccagtgctcaggatattaacatctcctggagcgtctgcaaaacacatcttgaaggcagaaccatagtcctcaatttggcctgcctcttttatttgacaataaagttttatttatttctgagcataagattgggattntatttctagaanaaggga

SEQ ID NO: 12996 - DNA, 496 bp, Homo sapiens
  misc_feature (1)...(496): n = A,T,C or G
ngggcgaggggncccaatgcgaccctgatgagnggcctgaacagngccaagcaaagaatcactgtaggcagggcctatgtggggtacatgtgtgctaagagtgttcgtgacaggatcaagcgtgctttccttatcgaggagcagaaaatcgttgtgaaagtgttgaaggcacaagcacagagtcagaaagctaaataaaaaaatgaaacttttttgagtaataaaaatgaaaagacgctgttnaaaaaaaaaaattacaaaaaaaaaaaaaaaaaagggggggccataaaaggcggggcagggaaaaaaaagggggggcacttaagaggagtaattgggggtccacggggggggggtatgccctttccagactttttgttacggggggggggtggggcccagcccctccctcatcaaagagggagggggcctcaatttttttgggggggtccacccaaaatcccctgnttgaatacccccttttcctttatggggg

SEQ ID NO: 12997 - DNA, 462 bp, Homo sapiens
  misc_feature (1)...(462): n = A,T,C or G
gcggnctcnnnnnaatagagattcgtagtccgtgcggaggaactcgtctcaacactctaagacgacattcaagtgggttggaatgtataaatcaaacttctcaaaaccgctgttatctcaaacccaggtttcagcgacaatttcgtagtccacaaaagtgatgaggtttgtgcctgagcacccacaatttcaggatttagactgtgtggcacctcagctttcctctggatgtaaccactccttggtgagagagggaactcctcaccaatcccatttgacaaaggctaggcaatcttcattctgcttggctttagtcattcttgtcattgggctgcagaagaaaaacaactttgctgggtgatcccactgccttgatttcacctcggagcgaggctgggccatgtccaagtcttatgaggtcaccctgactagaataaattgaactcacctacaaatagtctg

SEQ ID NO: 12998 - DNA, 447 bp, Homo sapiens
aatagaagactcgtataccgtgcggaggaattcctgttgtttattagaactttatgtatatttactgtacatagagacttgtttgaaaacatgaatagtcattaaataaagacattgttaaattagtttttgaataccagtgatattcataactacttgacaggtatatatgaaaattctactatcgtgaaaaaaaatgaatatttgtactatttttggccatatttatatttatttctttcatatggtttgaactgttttagcattttgtaaattcacttgagagttttctttcatactggttaaaatatttcaatgatataatgaagatgaatgcaactcttatttttctgccattttttattaaaatacattgaaactaaagtaggctcggggttaactttaaaagtgatatttgagaagtgctttagagttgaaagatttagt

SEQ ID NO: 12999 - DNA, 425 bp, Homo sapiens
  misc_feature (1)...(425): n = A,T,C or G
gggaaattacagttttgatgaacttggcatttcaatcaaagtcatatttgccaccgttctctcagtagctttaggccaatttccaaattgctttcgacaaattagttttatttgtttatattatattatatatatataatatacatatatttaaattatatttataattctttcagtcagatttcctggagaacaatagttgttaggtgcctaccagaaaataggactagaaagtcatgttggagccatattgtggaagtccaaggaagtcggatgggagcaaaggtcatgtcaattatatatcaagcttatattctatggaaactaaccccttcctagcacatatattattgaaaaattattcacctgctattttatcaatgtcatttataaattaaaatttttcttattataactataccttn

SEQ ID NO: 13000 - DNA, 488 bp, Homo sapiens
  misc_feature (1)...(488): n = A,T,C or G
gcggtgggangnnnaatcgtagnccnntngnnattcgcgnatccctagtccatgtggtggaattcctgtggtgttggtcggatggggggacagtgctggttccctgtggtggtgtcccttcttgctgtgcagggtggagggcatcttgccacgaccaaggaccattgaccttcaccttttctttgaagtatgttgtatgtctcacccatttttctttaaggttctggtcgttttaacttttatacaacatatgggttggagatagtggccctctgaggagtgaattacaaatgcctttcccagcttatcttcggattttgctcatggcagtttctaccatgtaaaacttatttttatctcagtataatcagtctttcctcttcctgctgctaagtgggtaagagcatgctcacactctgagtcctcatgtttttcctttccccagcctgacatttaccccggtaactgctgggcatttaaaggctccn

SEQ ID NO: 13001 - DNA, 500 bp, Homo sapiens
  misc_feature (1)...(500): n = A,T,C or G
agggcaacggggncccattgagnnccctnctcgtagacactagtccatgtcgcggaattctccagttcttctggtcattttgcatggtagctcttgtcacgttccttccttcctcactctctatttctctttccctctccctgtccctctctttctttgtgtttgttgattttggtgtcaattttgtggacatttggcaggagttttgactggggtaggagaaacccatgacattagaattgaataaaacctagaagttggatattggcatattggttgttgaaaaataaatttcatcctcacttatgagtatacttggccttttaaagttactgttatgtttatctatattgagcacagataatggcattattcttataattgttaagatagtcttgcaacaaaatgtcttttaagtttcctgttaaaattataaaaagattttcatggtgagagggattttattgtgaaattctagaaaaaaatattaccacctctct

SEQ ID NO: 13002 - DNA, 466 bp, Homo sapiens
aatcgaagaccattagtccagagtggaggacctcttgcggaggattacggggtctcaatgcctccaaacgacctagctgcccagccagatctctcccagggagaggagaatgagccacgcgttccagagttgcaggatctccagggcaaagaagtgccccaggtctcctacttggactctccaagtctccagccattccaggtagaagaaagaaggaaacgtgaggagctgcaggtgccagagttccaggcctgcccacagacggtggtgcctcaaaacacctacccagcatggatggccagcatcctggcacagaatcttggaactgggattaaagagcaggtttctggcatactgaagctgcacaggactcttggaaagtgtatgttccattcctgctttcagagaaatagccacagtgtagactctgagtcgtcttggtaaaagtcaccactttcagaagcag

SEQ ID NO: 13003 - DNA, 449 bp, Homo sapiens
  misc_feature (1)...(449): n = A,T,C or G
atagaaaattttgatgtccttatacagngcggnggaattccaccattgattgaactgtcaacactttccccacccttttgaaacgacagctctattacatatacaattcccatacatgtgtctgttggaggcaggagtgaatgtatgtgaaatgatcaaagaagccaatcaaactgggggaacaggagggacagtagggtggtaagctgctgatcttatgggactaagagggagtgtggcctaaaggaacatgcagacacatcctgaggtctgctggagtctccacaggcctcctgcctgcagaatgcttagcttggtaacacactttattactgatcttcaggacatggtgaggaatggggcaagagtccatggaacagggaccagaagaggtagggtagggtagttgggaggtaggtgtggagaacagtgcaaggagaaggaaccat

SEQ ID NO: 13004 - DNA, 446 bp, Homo sapiens
aatagatgaccagtagtccgtgcggtggaattccttttttgactcctgtgtttatttataagtgtgtttttagatctctaagtatttggggattttccagctatctttctgttactgatttctggttgaattccattatggtctgagagcatgctttgtatgatttctattcttttacctttgttaaggtgtgtcatatggcccagaatgtggtctatttggtgaatgttctatacaagtgggagaagaatgtatattctgctgttgttagaggaagtattctattaatgttagtacatccagttgatggatggtactattcagttgaactatatcctcctgattttctgcttgctgaatctgtcagttactgatagaggggtgttgacatctccagctattatcgtggatttgtctatttctaaaaacatttatatatgtttttg

SEQ ID NO: 13005 - DNA, 496 bp, Homo sapiens
  misc_feature (1)...(496): n = A,T,C or G
cggcccagccgcccnattgaaacccttcctgatnagcctccgccanngcgcggaattcgtgatccacacatctcagcctgctgaagtgctgggattacaggcgtgagccaccgcgcctggccaacaggagacttttctctgtcgttaattcatttattcaatcatttatttctatcagtcaggattaatggatatttattttgtactttgggctataatttaataccttttttttttttggctaaaattttccccccctggcccttgggaaaatttgaaaatttttaagggggtcctttggacccccccaccccgggaaatttttttttggaccctttttttttttttggggggggccccaacctacttggtttttttttttccccagcttaaaaaccacccttttttttgttttttggaaaaggggggtaaaaaaaaaaaacccaaaatcgggcccctggggggcccattggttccggaaggggggtggctttag

SEQ ID NO: 13006 - DNA, 462 bp, Homo sapiens
  misc_feature (1)...(462): n = A,T,C or G
gcggtanattgtagacattagnacagttgacgnaccattagtacagngcggtggaactcctgtatttctgctggcattaatggctgatggtgataccatgtatcatcatggcggtactattttttaaaagaaattaaacactggatctctacttaagccaacattgaaaagacttgccgcacttctgagtccaaacactggaaagctctcctttgccaccgttagccgcggctcattctccatgtgccttagccttaaacatgcccccactcccacatatctcaccctgtcccctcctccccaaattaccaatcccaccgcattgtttggcatgcctaggactgataagtagctctgatagaggagctggaggcttctatacttcttcctgggtttttgatggggcatgatggttcgatgttttatgtttttttttcgttgggtaggggaagaattggctac

SEQ ID NO: 13007 - DNA, 461 bp, Homo sapiens
atcgagcaccctagttagagtgctgtaattcggctaattttttgtattttagtagagacgggataaaaagataaattttttaccttttaagaaatcctgcactggaacattggctccaggaggaaggggctgtgctttatctccctcacgtagggttgccaaagaaattacaggaaccccagctaaatttgaactgcgaatggggcatacttataccacatatactagaaagttattcatggtgtatttgcaattcaaatgtaactaggggtcctatagttgtatttgctgagtctggcaaccttgtcctgaattagcagtgccccgagaagcagcagggtggcctgtaggaggtgttcatctgttatgtggaatgaatggtgcctcttcagaattctgttgtgcagtcttctattagagaaaaccctttttatctgagcatggagttgggacattacctg

SEQ ID NO: 13008 - DNA, 497 bp, Homo sapiens
  misc_feature (1)...(497): n = A,T,C or G
cgcgccccgccnccnattgaaaccctcactgagagcctccgaagngccgcggaattcgccaggaactgctcgagtgccaggtgcaggtgggggcccccgaggaggaggaggaggaggaggaggacgcgggcctggtggccgaggccgaggccgtggctgccggctggatgctcgatttcctctgcctctctctttgccgagctttccgcgacggccgctccgaggacttccgcaggacccgcaacagcgcagaggctattattcatggactatccagtctaacagcttgccagttgagaacgatatacatatgtcagtttttgacaagaattgcagcaggaaaaacccttgatgcacagtttgaaaatgatgaacgaattacacccttggaatcagccctgatgatttggggttcaattgaaaaggaacatgacaaacttcatgaagaaatacagaatttaattaaaattcaggctatagctgtttgtatggaaaat

SEQ ID NO: 13009 - DNA, 455 bp, Homo sapiens
  misc_feature (1)...(455): n = A,T,C or G
atcgcgccctttggagaccatctgaccangcggnggaattcgaagaagtttttgagaagcctacacgtgaaacatgccagggcatgatgcatgccatttacgacaagctggatgatgatggtttgatagctccaggggttcgtgtatcaggagatgatgttattataggcaaaacagtcaccttgcctgaaaatgaagatgaattggagagcaccaatagacgctataccaagagagactgtagcacttttctcagaactagtgagacgggcattgtggatcaggttatggtaactctcaatcaggaaggatataaattttgtaaaataagggtacgctctgttaggattccacagattggagacaaatttgctagtcgacatggtcaaaagggtacttgtggtattcagtatagacaagaggatatgcctttcacctgtgaaggtatcacccct

SEQ ID NO: 13010 - DNA, 450 bp, Homo sapiens
  misc_feature (1)...(450): n = A,T,C or G
atagaaactttgatgatcacttagtccagtgcggnggaattcgatttactttccttttttaggttttatgtatatgtttgcattttttagcattgtgttttgtccagttttgtgaaaatgttctgctagtatgaaagaaaacattttctatatgaagacatttgttttatgttaggtagcttacattttctcctctgcgtgtgtgtgtatgtgtgtaaaatcagaaatttagcatactatggaaagaaggcatggagcacttgggtttagaggaacctaaaacatcatagcttcattgttccagatgtaacaggtttgaaagagctcatcgccaagttcttgatccacttgcattccaggggagttttcttttgagtagtatgtttcttgtttgcatgttcctgttctttgtggaaactatgcatggtagcatttttgcttgctgtgttt

SEQ ID NO: 13011 - DNA, 439 bp, Homo sapiens
  misc_feature (1)...(439): n = A,T,C or G
ntttgagatcgtagacatngcggnggaattncagatttaactgtgattctcttttctccctggccctaaaggccacttacttatgtgactgatatggagtgtgtatctgtttttgaagaagtggatatagtgggatggggcagacagggaagggctgtctacagaatattatggttttcaggtttcaaagacttcaacactatctccgatgaccagattattagttagcaataaaaagggtgctaagcaaactcattcattcagttcttcccatacatattcaggtttacatataaatgcagatgtacccatgaagttacattttaggaagagaattttgaaaaatctagctccgcgtgtgttaactgcatatgcaagatgaatgagaaaccagaacataaacacagtgagtgaatgtttaaatgaggtcatctgtgcn

SEQ ID NO: 13012 - DNA, 487 bp, Homo sapiens
  misc_feature (1)...(487): n = A,T,C or G
ggcgaagggcccgatgaacccccactgggatcgtgcgagnacacgccnnnttacagacagtaattcctttcaaactggtttataggaactcactgtgcttgctgatttacctctgagaggcaaagtttctgaattacgaaggactgattatataaacttagacagagacatgcttcattatttaacaggactgtgtcaaaagcctactattaggatgatgtgttgggtgtggaacagggtctcttcctgccaggaacactggtgatttcactccgtgttcaggctgatctttgaagttgaagacaagcagaagaatccttctaaaatttagccatgcccataggctgggagggacactgctccattcagaggcagcaaagcacattactgtatctcctatagagctttgagcacgccagtgtacatggagaaacttaataaatgtttggtgaattaatgaataaacaaatcaatggaccaagtcagg

SEQ ID NO: 13013 - DNA, 447 bp, Homo sapiens
atagtagacttgtagaccgtgcggaggaattcgggccctggccacaagctgtcactgctctttcgtttcagtgagtggagctgatctgttttcaccgtttgttggagattcagaaaaagtgttgtctcagatatttcgacaagcaagagcaagcactccagcaattttgtttttggatgaaattgattcaatcttgggagctcgctcagccagcaagacaggatgtgatgttcaagaacgagttctttctgttctcctgaatgaattagatggtgttggacttaagacaatagagagaagaggaagtaaatcaagtcaacagggtaaatacaaggagctgaaaaaatgaagagagtttcaagaagtttttaaccgaagtgtcatgattattgcagcaacaaatagacctgatgtgttagatactgctttgttacgacctggaagatt

SEQ ID NO: 13014 - DNA, 442 bp, Homo sapiens
  misc_feature (1)...(442): n = A,T,C or G
attgaagatccctagtcattgaggagcaattcgctttttcttcttcccttttgctttcagcatcatatcttaggaaagattttttaatctaagaccacgaagatgtattcttgtgctattttctgtattttggaattgtttagctattatatggagatatatgatcattctgagtcatttacattttcagcgtgaggcagttcaacttacacggaatatgcacttgtttcagaaatatttgagtaaaaatatttatccatatataatttatttggtgacattataaaattatttcactacaaatataagtattcatttttgagcattatattctattacattgatcaacatctatattcttatactagtaccgtaaatcttgattactcttactttgtagtgagttttgaagtcaggaattatgtatctcccatgccaacan

SEQ ID NO: 13015 - DNA, 441 bp, Homo sapiens
  misc_feature (1)...(441): n = A,T,C or G
nttagaagatcgttagaccatgcggnggaattccatagatttatatattaatttgaagaaaatattttctttatatatttccttaccatacaaggtgccttgctcatcaggaaaacttttgttttgtattttgacaagaaaggcaccttgagagtttctttttaagtatagctgacaagtgtataaatgttacacttactttcagagttctttttagatctaaagaagtcagttcagaaatggaaatcaacaatgttaggagaaatctgaattctgttaagttagtaagtattatgtatagcatgtgtttttaaccattgccattcttatccctagcgtatcagttgatcacactaagaaagcttacagatcgagcatttgaaatacatgctctttatgaatgattagatttttgaaaggatattgaaatcattgcgctgg

SEQ ID NO: 13016 - DNA, 447 bp, Homo sapiens
atcgtttcgagaccactatccatgtggtggaattcgcggcctccgagctcatagggcagctgtacgaccacatcacagaggcagtgcctcagcttcacggggaggtgctcctggacgacaggacccatctgaccatcggaaacagactgaaagatgccaacaagtttggctacccctttgtgataatcgctggcaagagggccctggaggaccctgcacattttgaggtttggtgtcagaacactggtgaggtggccttcctcaccaaagatggagtcatggatttactgaccccagtgcagactgtctaaatgcccccagcccacccctgcccccatttgcagccttggtgttcgttctaacactgcattttcctacacccctttcctggactgctctctccagaaacagcacagctcatggagggtgagatcatgttagggaaat

SEQ ID NO: 13017 - DNA, 469 bp, Homo sapiens
  misc_feature (1)...(469): n = A,T,C or G
ggctggaatgacgacattagncatggtggctatattcagacacattcctgttgcattaagacttgaaagacttgtagatgtgtgatgttcaggcacaggatgctgaaagctatgttactattcttagtttgtaaattgtccttttgataccatcatcttgttttctttttgtaggtataaataaaaacactgttgacaaaaaaaaaaaaaaaaaaaaaaaaaaaaaaaaaaaaaaaaaaaaaaaaaaaaaaaaaaaaaaaaaaaaaaaaaannngggccccctttaaaaaaaaaggccccaaaaaaaccccggaaaacccccggggtgttttttttaaacccccccccttttgggggccccccccccccccttttttttttggggggggggggccccccccctttttttttttaaaaaaaaaaaaaaaaaattttttttttttttgggggggggtttttttaatggggg

SEQ ID NO: 13018 - DNA, 472 bp, Homo sapiens
  misc_feature (1)...(472): n = A,T,C or G
ggcgcgaatggagccatngnaatgacgaccatctgtccgngcggtggaattccgccggaacaccattcttcgccaggccaggaatcacaagcttcgcgtggataaggtagctgctgcagcagcggcactacaagccaaatcagatgagaaggcggcggttgcaggcaacaagcctgtggtaggtaagaaaggaaagaaggctgctgttggtgttaacaagcagaagaagcctctggtgggaaaaaaggcagcagctaccaagaaaccagcccctgaaaagaagcctgcagagaagaaacctactacagaggagaagaagcctgctgcataaactcttaaatttgattattccataaaggtcaaatcattttggacagcttcttttgaataaagacctgattatacanggcctagaaaactacatgggcgcctactgtcacgcctgtatagaaggcaccaacgtgcgtgctgg

SEQ ID NO: 13019 - DNA, 471 bp, Homo sapiens
  misc_feature (1)...(471): n = A,T,C or G
gggcccgaatgatgaccattagncattgaggccgatttccaggagttcaagaccaacatgggcagcatagtgaaacctggtctttacaaaaaaattagccaggcgtggtggcacatgcctgtagtcccagctactcaagaggctgaggtgggagaattgcttgagcccaggagacagaggttgcagtgagccaagattgcaccattgcaatccagcctgggtgacagagccagaccctgtcgcaaaaaaaaagaaaaagaaaaaaaccccacaatgaccaagcatagtggcatgcacctatagtctcagctactcaggaggctgaggcaggaggatcacttgagtccaagagttctaagctgcagtccactatgttgatcaggtgtctgcaaccagttagaggtttttgcacattacctaaggagggctgaactggcccaggtcagaaacagagcaggtcacaactctcan

SEQ ID NO: 13020 - DNA, 488 bp, Homo sapiens
  misc_feature (1)...(488): n = A,T,C or G
ggcggnaggggnnnnttttncctgagaccttctgagacctaggaagtgngcataaaccaccacccccagcataattagtcttcttgtttaacatctttccccccacctttcttttcaacatagcagccagcaaaatcctcttaaaacttacatagataaacatcactcttctgctcaaaacccctcagtggccttccttctcagagtaaaaccaaagtcacatcgcctaaatgccttgtctgaaccccaaaccttcctgatctcacctgtgcttgcctcctggtgcctttgactcaagccatttcctactcatgttgtacctccgacactccagacgtgctccatgctgttccctctgtctggaacactcttccccccttgcactgtgcccttctcactcatttcattcagttatttgcaaatgtcacctgatcagagaggccttccctaagcaatcgctccatttgaaatagtaccgctgccctcgt

SEQ ID NO: 13021 - DNA, 480 bp, Homo sapiens
  misc_feature (1)...(480): n = A,T,C or G
cgccccgcgaaatganggnctactngnaaattgacgaccgatctgaccgactggaggaattcgaggaaacgctgcccctgtgcctttccaaagccaagcctttcacctgtgcttgttgagcttcaagactcaattttgcaattatcagattccctttccccaaaatctccctgctgctgggtcactcccatccacatacaaataggcttcagtatatgtcatctttaacaaaagaggaaagctcttcctctattgtacaccctgctccggtttttacccgccttttttactcctcttcacaatataatttgagtagttacctgtgttccttctccattttctcacctcaccttttctcctcaatccacttttgctgggttttcatcccccacccccttttccccccactacttcactgactgctcttgtctaggtcgtcactggtttttttctttttttgagacagagtcttgctctgtn

SEQ ID NO: 13022 - DNA, 446 bp, Homo sapiens
atcgagacactatccaggggggaattcctagttcttcattctaatatcaccctgaattccattgaagctggaaatgtcattttccaagcccacctgtcattcatttacccatgcagaaaaaatggtaacttgaagagagtggcatgtgcctgctgccttagaggttatagaatccccacagtcaacaaaaaagcctctagagacatgactgttgccatggaaaccagagaaaatgtgtcttctcatccctcatttgtaaatgagggggtggagcagatcatctgtctctaaggtctttttcagtgctaaaatgtggtgattctttgggaaaaactttttgcatcaagtatgattaaatattctgaaagacgagtgtagcttacaatttggtttgtttttaaattctgttcatgggtcttcttaaaatggacccttgccgaaaggcg

SEQ ID NO: 13023 - DNA, 518 bp, Homo sapiens
acctattcgtacattaagggacgataaatgataggtctatacattaacggggatatcaacaactacatacaccacaaattggatttcgaggaccttatccaacgggtggaattcgggaaaatgaaatttctgttgtgccttgaaagaaattcctattcacaccttgactgtccttcagtgatcagtgctgatacctcctgggactgctgctgcatctgctcattgagcatatggagacttctaggtttgtgggcttttaatagatgaggtcttgctgcgttgcccatgctggtctcaaattcctggcctcaagtgatcctgcctccctcagcttcccaagtagctgggattataggtgcaagcaactgtgtgcagcaggctctgagacttctagttttgatatcattcctttccccacattctcaagtcactggtgaatctgctttaatatctgtccaatctaatccccataatccagatcttcaaccgctcttttggcaagcagtctcaacctcttg

SEQ ID NO: 13024 - DNA, 476 bp, Homo sapiens
  misc_feature (1)...(476): n = A,T,C or G
cgcgtggnctnnnnaatcgatgaccattactccagngcggnggaattcgccagatgggcagggactcaccttgcttcagggacaaatttgcagtggtgatgaattcctttcattcttagctttcctcctattacttccctgatttattttacttacaaatgacacgtctaaatggcagagacctgaagttctcttgatggggtgctgagatgttcagaagggaggtatcctgtttaaccaacagatcatttatagataaagagaggctctaacttagcatacagttcatctatttccttcccccaagaaagaagggatatttacatctcctctattccttcttccagggcaagaatcttctgttccatatgcaacatcttctggcagccttgtcctttttctgtccttgacgactacaataacaaacagctgttgccgaggcattgctgttgacgtgttacctttgaaacctccct

SEQ ID NO: 13025 - DNA, 446 bp, Homo sapiens
atagacgacattgttgaagccgtgaattatcctgcaccatccagaatgttcagactttttggatcgattctacatgagtcgcatttcaattagaatgttactcaatcagcactctttattgtttggtggaaaaggcaaaggaagtccatctcatcgaaaacacattggaagcataaatccaaactgcaatgtacttgaagttattaaagatggctatgaaaatgctaggcgtctgtgtgatttgtattatattaactctcccgaactagaacttgaagaactaaatgcaaaatcaccaggacagccaatacaagtggtttatgtaccatcccatctctatcacatggtgtttgaacttttcaagaatgcaatgagagccactatggaacaccatgccaacagaggtgtttacccccctattcaagttcatgtcacgctgggtaatg

SEQ ID NO: 13026 - DNA, 465 bp, Homo sapiens
  misc_feature (1)...(465): n = A,T,C or G
naatggcngaccattagtccagtgcggngcaattcgttgctttttcatgatcttcaggaattttactgggataattatccaaataaattgcaagcattctatccaaatggagctctttctgagatgaagagaattctcaatgtcaagatttgaacaagaagagaatggaatacacaatatggacatccataaaaattcatcagagagcattttactactgagctgcaaagggaaaaacttaaaatggatatgaaaagtgaagaaagtgatcataggagaaaaccatttcagatgacaagagcacctcaaaggcagcagcctcaaggagcagccatggccccagacttgtcgcacggatgcagaaaacttaatggaggaggctgaggtcagaatgggaagagtttttaaaaaataaaaaggggagctaatatgtgagnaananaaaaaaaaaaaaaaaaaaaaaaa

SEQ ID NO: 13027 - DNA, 495 bp, Homo sapiens
  misc_feature (1)...(495): n = A,T,C or G
ntttgagaccactaggcagngcggnggaatttggtattggcattagcttggatgaagaaaaggattctgctgccctgcagaagtttggaaacccctgcttaggcgcctgctgtgctgtagtgggagcgctggatagcagagctgtcagtgtggcgggcgttcgtttaggcagaaattcattaagcagtgtttggttggcacctactaagtgctgggcctggcttacagcactgtgaatgcacagggcgggtgaggcgagggctctgtcctagaggaactcccagactcaagcttttagctgagtaagctggacccagaaggctccaggaggaagcagaggaggcggcgaggccagtggggtgctggtgttgggcacagcgccgtgaaggacccaacccgggactcgggctctccttgagctcagcaggaagcctcacggcggagcaaggaggaagtggccctgagcatgagccctgcaggcccaggctgagcagn

SEQ ID NO: 13028 - DNA, 455 bp, Homo sapiens
  misc_feature (1)...(455): n = A,T,C or G
nttcgaagatagatagaccagtgcggcggaattcctagcgttaaaggcactgcagagaaatgaggtgcagaggtggcccctctgagtatttattttactcaggtaccagtggtacatatatacagtgtaattatgaccaggctggtaaaattggctgctcgcaaacaatccccttttttcctggcagtatttggaatttatcatttattaataactatacatttttaaaggcagaagaagaaaatctatctatctatctatctatctatctatctatctatctatctatctatctatctaaatgacctgacagaagaaaactgttaaaaatggatattattggaggggatttaaaacagtgggtgtgaattatcattctgatggaaagaaaatagcaaaacaatgtgttacaagtatttgctaataaacagtatactgccagcttctaattgctn

SEQ ID NO: 13029 - DNA, 478 bp, Homo sapiens
  misc_feature (1)...(478): n = A,T,C or G
nttgatacctttcagngttggaaactctaagacagggcgctttcaaatagaggtaatttgctcttgtgttgtaagaggaacatgtctacaaagataggaaatgagggtgatcgtgcagatggcttgtatcttatatatgcaaaggagccaatctcagaagcacaaagaaaaaagtgtgcataccttattttgtacagataaagatgatgtctttttgttattgtctgtctgttttgtatgtgtctgagataagggatagagaggaaacatccgtcaggctaatttaactacattttattttaaaaatagagaaacataacctctagatgggacagcagaggacagttagtagaggccacaaactgttatgggctgctgtgttttgttctaaaatcaatatggttggagcatgtatatcttacgtgatcatttcacatcttaggaatgcctactcattttattttattctagtgatgct

SEQ ID NO: 13030 - DNA, 479 bp, Homo sapiens
  misc_feature (1)...(479): n = A,T,C or G
cgantttgaaacccttgccannggtgagaaccttatgaagctcngcaatgggtacattttagcaaatgttacaattaatttagaacctaagttatggagacacaaatttcaataggcacccttttatgttttggttaaatggttcagtatatacatcttatttatttgtaatattagtatataattcgttggatacatttttagtgtataagcattggatttctaattggatcagattagggaccttccgcttagctgcatatgtacatatacatgtacaatttattatatatttgcgttaaaatagcctatctgcatgtgtatatatgtgtgtatgcgtatgtatatgcactcacacgcataaatacacagtctatttagttacctttaatgttttttcccttgtacctaggctttttctcgctttttcctttttttctgattttgcggcaatttagttggaaggaggcggtcccagc

SEQ ID NO: 13031 - DNA, 462 bp, Homo sapiens
  misc_feature (1)...(462): n = A,T,C or G
nttagtagacctctagtccagtgcggtggaattcggaagaaaagcaacataaccggatttaaacaaagcttttgttttttcatgaagcagtcatattggtgttatgtcagttgggggagattttagaaagttatgttatggaaactgtaacttataaaaaaatactgctaacttataaaaaaaaagtactgctagccatttgcacatagacacttagtgaatgaatgtttctgttttccttcatcttctctagtccaaggtgtgttcatataattacttaatttacattattgagcatattaaatatgttcatagatgattaaaaactgggtgcgattaagtactcaaccaagaacaaatcaaattactttgaataacctgtttttaaaaaagcagatgtgttttaatctgtgtggacagaaaaaaaatgagcagactctttgaactgtctagctagaacca

SEQ ID NO: 13032 - DNA, 476 bp, Homo sapiens
  misc_feature (1)...(476): n = A,T,C or G
ggggacgcnnnnnnatttgagaacttgaagaacngtcggggaanccccctactgctgctacacaagaccctgagactgacctgcaggacgaaaccatgaagagcctgatccttcttgccatcctggccgccttagcggtagtaactttgtgttatgaatcacatgaaagcatggaatcttatgaacttaatcccttcattaacaggagaaatgcaaataccttcatatcccctcagcagagatggagagctaaagtccaagagaggatccgagaacgctctaagcctgtccacgagctcaatagggaagcctgtgatgactacagactttgcgaacgctacgccatggtttatggatacaatgctgcctataatcgctacttcaggaagcgccgagggaccaaatgagactgagggaagaaaaaaaatctctttttttctggaggctggcacctgattttgtatccccctgtagan

SEQ ID NO: 13033 - DNA, 442 bp, Homo sapiens
  misc_feature (1)...(442): n = A,T,C or G
ntttgaaattcgatgancattagtccangcggnggaattcgtgaggagtgaggagatagggtagttcttccttggctggctggcttcataatccctgggccccgcagataattaaatcgactttttctgtctcaggcatttgtatgacctctttggaggttccctgctgggtagttatccttgtatctgatggacccatctcaatttaaaatactctgccaggttcggaggttcatgcttgtcatcccagcactttgggaggctcagaggtgccattggcttgagcccaagagtttgagaccagcctgggcaacctggtgaaacctcttctccattaaagatacaaaaattggccaggcatggtggtgtgtgcctgtggtcccagctactcanggagctgaggtggaaggattgcttgagcctgggaggtcaaggctgcagt

SEQ ID NO: 13034 - DNA, 456 bp, Homo sapiens
  misc_feature (1)...(456): n = A,T,C or G
nattgagnactgatgancatgcggccagagcggnggaattctttatactctttgttacatgtttgtatcagtatttactggaaaaccatttgagtttttttgggttagaatttttctttttggactgtggctttaaaacagagttcttagtaacaggggcagttcctgaattcaaataaaccattttgtatgtttggattttgaatgggttaactaattacaggctaaaataatgccttttttagtgtttttaatttttagaattcactacataaattgtaagtaattgtgggtctcaaaaacactaggaacttttaagtgtcgttaacacttcctcgatgtgcctgccctgagggagagagttcacatttgagacaactgcactccagagtggacgtgcctttgtcttcaggccatgccgaaaggtgtttaaagcaggcttgcaggtcgctcctt

SEQ ID NO: 13035 - DNA, 478 bp, Homo sapiens
  misc_feature (1)...(478): n = A,T,C or G
nnaagggcgccngtctgnnccccggaaatcccagancgtacggnccaattnnngtaatnncaacactttgggaggccgaggcaggcggatcacaaggtcaggagatcgagaccatcctggctaacacggtgaaaccctgtctctactaaaaatacaaaaaattagccgggcatggtggcgggcgcctgtagtcccagctagttaggaggctgaagcaggagaatggtgtgaacccgggaggcggaggttgcagtgagccgagatcgcgccactgcactccagcctggacgacagagcgagactctgtctcaaaaaacaaaacaaaagtatgcagctgtgcaaggcagtatagaccagtcaggaagagaaattacatgtacacgaaattaaacgaaagcaaccaaaattcaatattaaataagaaaagaattaaacaaaaccatcttagctgagaccaaaccatttcttcacaattcag

SEQ ID NO: 13036 - DNA, 465 bp, Homo sapiens
  misc_feature (1)...(465): n = A,T,C or G
nattgcngactttagtccatgtaggcctattgtccgtgtggcgtgattcgttgcttaattattcggagggatctcttgagtgagttttatgagtatcacgcactaatgatggaagaagaaggagcagtaattgttgggctgctggttggcctgaatgtgatcgatgctaatctgtgtgtgaagggagaggatttanactcacaagttggagtgattgatttttctatgtatttaaagaatgaagaagatattggaaataaagaaaggaatgttcaaattgctgccatattagaccaaaagaattatgttgaagaattaaatagacaactgaacagcacagtcagcagcctccattcaagagttgattcattagaaaagtcaaatactaagctgattgaagagttagcaatagcaaagaataacatcattaaactccaggaagaaaatcatcaattacgaagtgan

SEQ ID NO: 13037 - DNA, 469 bp, Homo sapiens
  misc_feature (1)...(469): n = A,T,C or G
gcgatgcnnnttttgagaactgataacgtcgnggaanccgannncagctgcgggacggtcaggggagacctccaggcgcagggaaggacggccagggtgacacggaagcatgcgacggctgctgatccctctggccctgtggctgggtgcggtgggcgtgggcgtcgccgagctcacggaagcccagcgccggggcctgcaggtggccctggaggaatttcacaagcacccgcccgtgcagtgggccttccaggagaccagtgtggagagcgccgtggacacgcccttcccagctggaatatttgtgaggctggaatttaagctgcagcagacaagctgccggaagagggactggaagaaacccgagtgcaaagtcaggcccaatgggaggaaacggaaatgcctggcctgcatcaaactgtgctctgaggacaaagttctgggccggttggtccactgccccatagag

SEQ ID NO: 13038 - DNA, 495 bp, Homo sapiens
  misc_feature (1)...(495): n = A,T,C or G
aggggnnnaggggnnnnttttnaatcgagaccattggacatgcgttggaattcaacaaatagggcccacagctctcctttccaccaaagccaggtttcctggtaaggtcactcgaagataagggatggggatgggggctgactgacaaaaaattttagccccaggtctcagtacctggctggggagggggatatttttccttccttaagtagttttacattgccacagtgtgtatgtgttcactatataaaatgttcctctgctctttgaaagtaagagtgttgtgtctgtacaaatccttttaacatgcattcattggagtaaattctgagtatctactgtgtattggataatacaaaagatgtaatgtcatttaaaananannnaannnaaaaaaaaaaaaaaaaaaaaaaaaaaaaaaaaaaaaannnnngggcgcccttttatataaaaggccccttaaaacccccttgaaacccccgagggggttttttt

SEQ ID NO: 13039 - DNA, 490 bp, Homo sapiens
  misc_feature (1)...(490): n = A,T,C or G
agaaattccgatatccctattccagngttgtggaactcataatttcaaaagggccaggcatggtggctcacgcctgtagtcctagcactttgggaggccgaggcgggcagatcacgaggtcaggagatcgagaccatcctggctagcggggtgaaaccccgtctgtactagaaatacaagaagttagccaggcgtggtggcgggtgcctgtggtcccagctgctcgggaggctggggtaggagaatggcatgaacccgggaggcagagcttgcagtgggctgagattgcaccactgcactccagcctgggcgatagagcgagactccatctcaaaaaaaaaaaaaaaatttcaaaggttttttttccaaaatacagaagcattttttactttcttgttaagtggcaccagccccaatttatcaaaacatttttgaaaaaaagtaaaggcagattatccacatttaccaatttttaaacttactacaggcc

SEQ ID NO: 13040 - DNA, 460 bp, Homo sapiens
  misc_feature (1)...(460): n = A,T,C or G
nattgagnactcgagaccattaggccagagtggtggaattcggaggatgtgctatgagtttgcaaacagctggactgtcaggctgctttttttccatatgttcctcctctgcctccccttcccctcctctcccctccttttccttccttccttcctttccttggagcactgagcaccatttggaagcttgagagaaaccaaaattaaagagagaaagagagagcgtgcacgctcctgctttgtcgtaaaaaaaaaaaaagaaaaaaaaaaaaaaaaaaaaaacaaaaaaaaataaaaaaaaaaaaaaaaaaaaaagaaaggaagagcataaaaaaatctctacccccccccctcttgaaggagggaggctataaacacccgggaagcgaccccggggggccttttgtacaacctcctctgggggcgcccccccccccctccttcttttaatgaaaagggg

SEQ ID NO: 13041 - DNA, 461 bp, Homo sapiens
  misc_feature (1)...(461): n = A,T,C or G
cttcgaccctagtagaccttagtccatgtggtggaattcgaggacgcgcccctgctgagaggagccgtgttttttgtgggcatggctctctggggagcccaccggctctattctctcaggaactcgccgacatctgtgttgccatcattttaccaggccatggcatgtccgaacgaggtggtgtcctatgagatcgtcttgtccatcaccaggctcatcaagaagtataggaaggagctccaggtggtggcgtgggacattctgctgaacatcatcgaacggctccttcagcagctccagaccttggacagcccggagctcaggaccatcgtccatgacctgttgaccacggtggaggagctgtgtgaccagaacgagttccacgggtctcaggagagatactttgaactggtggagagatgtgcggaccanaggcctgagtcctccctttctgacctgan

SEQ ID NO: 13042 - DNA, 472 bp, Homo sapiens
  misc_feature (1)...(472): n = A,T,C or G
cgacggccnnnntttggagatctggggacaatcagaagngcgnggaantcccttccttaaccgcaaacatgatataaaatgaggatcaaatctccgacaattctaaattctaactatccccatatcctcctcagagactatcgaatttcttactttcttatcttccctaaaataatctatgcataatcaagcatatcattactatcttcacctgcattataggcaacacagcggaacatctgtcacaagtgtcttgaaagatatatgtattggtttctttttctttccttttttctattttgttttttaagaaagaggaaactctccccccccgtgggggggggagggagaagttttggttaaattgcgacccccccccctgggccaaaggaacccaccccttatgctctccgggggatgcggcaccaaggggggaacccccccaaggcgggaaaaccaataatttctttag

SEQ ID NO: 13043 - DNA, 470 bp, Homo sapiens
  misc_feature (1)...(470): n = A,T,C or G
gagattnnnntttttagtacctgagaacctcgggaaanccngaaagcctgcccacccactgacacagtcagatcccctcacaggcatccatatccatgtcataagtgctttggcatgccccatctgatcctcacagaaaggtttgtgcatgcttgtgattttgctctagtttttccattaagaaaataaaaaagaggtggggagacctgaggggtgacatggcttgctccaggtgacacagcccatcagtgaaaagtgacgtcttcaggcttctatgtgagtgcttcttcctagatgctgtctacagcctccccagacccacatgagacagactggggtctcaccttgtcgctgacctgccttgagacctcagacaacaccaataattaagcaagcccgagtgagcacatgctccgtcctcacctgtttattcacatgtcaactccgctcatcccattgcagccctgtaa

SEQ ID NO: 13044 - DNA, 476 bp, Homo sapiens
  misc_feature (1)...(476): n = A,T,C or G
ccgcgtacgagacctacgagaccgtaggaagngcgaggaaactgtccagaattccctgaagacatgaaaaggaggggaaatctcgacatgttttaactcttctgtgaaaatgaaggaatggcttcaaaccaaggaaagatggaaaatgaagaacagccacaagacgagagaaagccagaagtaacttgtactctggaagacaagaagttagaaaacgagggaaagacagaaaacaagggcaaaacaggagatgaggaaatgttaaaggataaaggaaagccagagagtgagggagaggcaaaagaaggaaagtcagagagggagggagagtcacagatggagggaggatcatagagagagggaaaaccacagatagagggaaagccagagagtgaaggagagccagggagtgaaacaagggctgcaggaaagcgcccagctgatgatgatgtacccaggaaagccagaagaaaaat

SEQ ID NO: 13045 - DNA, 489 bp, Homo sapiens
  misc_feature (1)...(489): n = A,T,C or G
gcggcggcccnnatttgatncccatcgagancactagtcagngtggtggaattcctattgctggagtcatgacactaagtcaagttaaaggctttgttcgaaagaatggtgtcaatgaagccaaaatagatgagatcaagaatgacaatgtccaagacacagcagaacagaaagttcaactgcttcgtaattggcatcaacttcatggaaagaaagaagcgtatgacacattgattaaagatctcaaaaaagccaatctttgtactcttgcagagaaaattcagactatcatcctcaaggacattactagtgactcagaaaattcaaacttcagaaatgaaatccaaagcttggtctagagtgaaaaacaacaaattcagttctgagtatatgcaattagtgtttgaaaagattcttaatagctggctgtaaatactgcttggttttttactgcgtacattntatcatttattagcgctgaagagccan

SEQ ID NO: 13046 - DNA, 471 bp, Homo sapiens
  misc_feature (1)...(471): n = A,T,C or G
ccgatatgagacctatgagagcgtaggaagncaccaaaagggcccacagctctcctttccaccaaagccaggtttcctggtaaggtcactcgaagatatgggatggggatgggggctgactgacaaaaaagtttagccccaggtctcagtacctggctggggagggggatatttttccttccttaagtagttttacattgccacagtgtgtatgtgttcactatataaaatgttcctctgctctttgaaagtaagagtgttgtgtctgtacaaatccttttaacatgcattcattggagtaaattctgagtatctactgtgtattggataatacaaaagatgtaatgtcattctacaaaataaacaacgaatatatatatcttacttttccttaaacatataaaacttcaacggccgcctttcattaaagggggcctataaaccccggtaaaacctctcgggtgttttttt

SEQ ID NO: 13047 - DNA, 444 bp, Homo sapiens
atagattttgaggacccttagtccagtgcggtggaattccagggtcacgggtaaggaccgttttgtcagcgccaccctttctttcggctttcaatttttgttctccttaaaacaaatgttttaaaacaaattccacctcctcctcctttccacccacccacttcctcttgcccttgggctgaaatccttccaggttgttcagcttaatttctcagtggtggtgataagaacagtgctcactagtcttagaaaacagccgcagagacctaaacaataaccgactccccccccccctctgggtttttgcagatgtcattgtttccagagaaggagaaaatggacagtctaaagactctggagctggataactaaaaataaaaatatatgccaaagattttcttggaaattagaagagcaaaatccaaattcaaagaaacagggcgg

SEQ ID NO: 13048 - DNA, 462 bp, Homo sapiens
  misc_feature (1)...(462): n = A,T,C or G
atcgacncccctnnattgatgaacactagtccangncgnggaattccgaaaaaggaaaatctggcttatggaaaaggtgtactgagtggggaataatgtaagaattagttgattaacaccctgtgttctggcaggtgggatcagcaatatgtaatccaactcacctccatgttcaaggatgtccctctgactgcagaagaggtggaatttgtggtggaaaaagcattgagcatgttctccaagatgaatcttcaagaaataccacctttggtctatcagcttctggttctctcctccaagggaagcagaaagagtgttttggaaggaatcatagccttcttcagtgcactagataagcagcacaatgaggaacagagtggcgacgagctattggatgttgtcactgtgccatcatgtgaacttcgtcatgtggaaggcaccattattctacacattgcgttt

SEQ ID NO: 13049 - DNA, 454 bp, Homo sapiens
  misc_feature (1)...(454): n = A,T,C or G
attgagnacttgagcctgctgcggggaactcttcagtgggagggaattcatcacagagcagctcccccagctccagcgtgcccagtttcccattcggctctgggcacacacggcccagctccctccacggtctggcacccaagctccaacgccagtaccgctctccacggcgcaagtcagcaggcagcatcccactgtcaccactggcccacaccccttctcccccacccccaacagcttcacctcagcggtccccatcgcccctgtctggccatgtagcccaggcctttcccacaaagcttcacttgtcacctcccctgggcaggcaactctcacggcccaagagtgcggagccaccccgttcaccactactcaagagggtgcagtcggctgagaaactggcagcagcacttgccgcctctgagaagaagctagccacttctcgcaagcacag

SEQ ID NO: 13050 - DNA, 536 bp, Homo sapiens
  misc_feature (1)...(536): n = A,T,C or G
aacgatgacatctgtccagtgcggnggaattcgtggttgctgtaaggggtcctccctgcgccacacggccgtcgccatggtgaagctgagcaaagaggccaagcagagactacagcagctcttcaaggggagccagtttgccattcgctggggctttatccctcttgtgatttacctgggatttaagaggggtgcagatcccggaatgcctgaaccaactgttttgagcctactttggggataaaggattatttggtcttctggatttggaggcaatcagcggacagcatggaagatgtgtgctctggctcggataagagatgggacatcattcagtcactagttggatggcacaaggctcttcacagacgcatctgtagcagagtggatcttgtactaacttatgatagaatgtatcagaataaatgtttttaacagtgaaaaaaaaaaaaaaaaaaaaaagggggggggggtttttttaattggcaaaaaataattaaaccccccttcttttttttggggtgaagggggaaaan

SEQ ID NO: 13051 - DNA, 460 bp, Homo sapiens
  misc_feature (1)...(460): n = A,T,C or G
actgataccttggaaannnactgagacactagtacatgcggtggaattcgctgcttgtcccagcaggtggccttgatctctccatgccctaccttaagtggtaagcatgtttaattatcaaaggccccatttgtcaggggtgagagaaaagtcaaaagataaattggggccttgtaaaaggccagggtaaaatgtctcaggcaagcaaaagattgtccccttctgcatatgggtaaaactgagacgtccccgtgagcccgaggctggaagtggtgtctgccttcaagggttaatccctctttgttccaagcagaagcattctggcatcccagtgaagagctcaggccctcaggaagtgtctgctgaatggaatggcccagcattagcccagtattggaaaagacaccagcccaggggccctgactcgtcacacttccctttcctaagcctctgagggtgg

SEQ ID NO: 13052 - DNA, 461 bp, Homo sapiens
  misc_feature (1)...(461): n = A,T,C or G
cgcgtcgcgnaaaanagtaaaactgtaacctgtaagngctgagaacctagtacggncacatnaagaagaagagggtggatgccattaggggacagatcttgagcttgctcatgctcaccagtccccctgagccaacggagatgacccacgtcccctatcaggtcctggccctttacaacagcacccgggagctgctggaggagatgcatggggagagggaggaaggctgcacccaggaaaacaccgagtcggaatactatgccaaagaaatccataaattcgacatgatccaggggctggcggagcacaacgaactggctgtctgccctaaaggaattacctccaaggttttccgcttcaatgtgtcctcagtggagaaaaatagaaccaacctattccgagcagaattccgggtcttgcgggtgcccaaccccagctctaagcggaatgagcataggatc

SEQ ID NO: 13053 - DNA, 470 bp, Homo sapiens
  misc_feature (1)...(470): n = A,T,C or G
tggacgcanaaaaagtaagctgagagccctngtannaactgagaactctcggtaagngccgnggaattcgacttcggccacatcaagaagaagagggtggaagccattattggacagatcttgagcttgctcaggctcaccagcccccctgagccaacggtgatgacccacgtcccctatcaggtcctggccctttacaacagcacccgggagctgctggaggagatgcatggggagagggaggaaggctgcacccaggaaaacaccgagtcggaatactatgccaaagaaatccataaattcgacatgatccaggggctggcggagcacaacgaactggctgtctgccctaaaggaattacctccaaggttttccgcttcaatgtgtcctcagtggagaaaaatagaaccaacctattccgagcagaattccgggtcttgcgggtgcccaaccccagctctaagcggaa

SEQ ID NO: 13054 - DNA, 482 bp, Homo sapiens
  misc_feature (1)...(482): n = A,T,C or G
nttcgaagtccctagtccagtgtggtggaactcccacctcctgggccggngctctggcccccaacgtgtctaggagagctttctccctagatcgcactgtgggccggggccctggagggctgctctgtgttaataagattgtaaggtttgccctcctcacctgttgccggcatgcgggtagtattagccacccccctccatctgttcccagcaccggagaagggggtgctcaggtggaggtgtggggtatgcacctgagctcctgcttcgcgcctgctgctctgccccaacgcgaccgctgcccggctgcccagagggctggatgcctgccggtccccgagcaagcctgggaactcaggaaaattcacaggacttgggagattctaaatcttaagtgcaattatttttaataaaaggggcatttggaatcaaaaannnnatnnaaaaaaaaaaaaaaaaaaaaaaaaaaaaaaaaaaaaaat

SEQ ID NO: 13055 - DNA, 484 bp, Homo sapiens
  misc_feature (1)...(484): n = A,T,C or G
aatagataaccnttnnannttcgagatccctantcagtgtggtggaattcaaataaacacataagtacataaatgcataaaaataaaataaaataaaaacctaacattagctcttatgaattaatcactctttcaggctctttcaggatgacaggccctgcggagtgagagccagccccaccagatgtgtgaaggaccttgcttagggcactctgccttaattttttagatgcaataatggtattgtgggtatgcaaggaattgttcttattcttaagagatacttgataaagaatttaggaataaaggatcgcgatgtatggagtttatctttttttttttttttgggaaacgggaaaaaaaaattttctttttgccccccaggttgaacctgaagggtgggggcccggcctggccaaactgaaatttcggcccccggggttaaaggaattttaagcccccaccccccggagaagggggaatg

SEQ ID NO: 13056 - DNA, 524 bp, Homo sapiens
cagattaccttgaaaacactgcatagcttctgtcaaacttatgtatcttaagactcaatataacccccttgttataactgaggaatcaacgatttgattccccaaaaacacaagtggggaatgtaatgcccaacctggtttttactaactctgtttttagactctcccttttcctttaatcacctagccttctttccacctgaattgactctcccttagctaagagagccagacagactccatcttggctctttcactggcagctccctcctcaaggacttaacttgtgcaagctgactcccagcacgtccaagaatgcaattaattgataagatactgtggcaagctatatcggcagttcccaggaattcatctgattgataacgcccaaagccccgggtctatcaccttgtaatagtcttaaagcccctgcacctggaacggtttacattcctgtaaccatttatccttttaactttttgactacttctgtaaaattgtttaactaggccccccgccttctt

SEQ ID NO: 13057 - DNA, 535 bp, Homo sapiens
  misc_feature (1)...(535): n = A,T,C or G
nacgatgaccactagaacagngcggnggaattcgtgtgaagccttgccctggattgccaatgaggaaagtatcctgcaaatgaaaatgcgctgggagtgcagccttggaagaacataaccatattgcttgtaaaggaggtttctagtggcgagaaggaaagatgatgggaaaacttgagctacaattctaaagatgcttcttttggaatatacttggcatcagacatggtaaaaaggcattcaaggagccagatttgaacaacttacccagccttggatcctgaagaagatcagattttgtggtggttttagaattaaatattttttataaccccgtaacttaagagtcttagagattttattggaaagtatagactatttctggctagtgtttataagtgatgaaatgctaaactgggaggtttatctatcttcaaaatattaacacactggaaagacctggagccttctgcatattgcatgggacgtctagggccctggtggaatgaatatatcgaggagcctggcaccttat

SEQ ID NO: 13058 - DNA, 453 bp, Homo sapiens
  misc_feature (1)...(453): n = A,T,C or G
atcgaccatagtagacattagtccgngcggtggaattcggtggataagaatatttacatcattcaaggggagattaacattgtggttggggccatcaaacgaaatgcccgatggagcacccatacaccactggatgaagaacgggatcctctgctgcatagtttcggtcatctaaaggaggttttaaacagtataacagaactctcagaaattgagcccaatgtattccttcgaccttttctggaagtgattcgctctgaagataccactggccctatcactggactggcactcacctctgtcaacaagttcctgtcctatgcactcatagatcccacccatgagggcacagcagagggcatggagaacatggcagatgctgtcacccatgctcgttttgtgggcacggatcctgccagtgatgaagatgtcctgatgaaaatccttcaggtt

SEQ ID NO: 13059 - DNA, 453 bp, Homo sapiens
attgaaattgatgacaattagtccagtgcggtggaattcccagatacgcttccaagagtggcaatcagttttcctaaagagtcaaagaaaagagtgagaattgtgggaagtgggagactagaaggacagacccatttggaaacaggaagtggttcaaggaacttaggatttggaatataggaaaagaaatggggaaacatacccatgccttctcttctctgtagacatccaatttgaacctactccagattagtaggaagtaaaatcattatctgatgttctgtggccacatggaaaatacattggtagttgcaaccagactagagtcaacattgagaaaccaatagaaccactaacttgggctggtgaggcacagctactggtcaaaacctgcccaggaggcccagtaccactcacagtcaggatcggggtcatggtaggggaaggtcagcc

SEQ ID NO: 13060 - DNA, 470 bp, Homo sapiens
  misc_feature (1)...(470): n = A,T,C or G
agaaatagancttgatcccctctaanactgataacctgtccagnggcnggaattccgcggcctcctgcctcctccctcctcggcggtcgcggcccgccggcctccgcggtgcctgccttcgctctcaggttgaggagctcaagcttgggaaaatggtgtgcattccttgtatcgtcattccagttctgctctggatctacaaaaaattcctggagccatatatataccctctggtttcccccttcgttagtcgtatatggcctaagaaagcaatacaagaatccaatgatacaaacaaaggcaaagtaaactttaagggtgcagacatgaatggattaccaacaaaaggaccaacagaaatctgtgataaaaagaaagactaaagaaattttcctaaaggaccccatcatttaaaaaatggacctgataatatgaagcatcttccttgtaattgtctctgacctttttan

SEQ ID NO: 13061 - DNA, 525 bp, Homo sapiens
cagatacccttcccacagccgcggttgaagaccaaatgctgtagctactatgaaagtgctttgtaaattgctgcggaaagagtgagctactcaagcacccgaggctgtccctccttgctcacatgtccagcccaattctcccttagcgagaacagcactcagtaagtgctgtgtgtgtttgtgctcaattaagaaattccagaataaataaaaatgaattaattcaacaaacattttctggggcaccgacaatctggccagtgcaccatgctaggtatctgatacaaagataatgaagacagtctcttggaacctaattggggtcctcatttgaccaggaatttctttcgttccgttttaagccaaccagttttgtccggacaagacaaaaacaacttgagctgctttagagaagcccagctcagtgtagacaatagctgcccagcctctgaaaggggctgattggattatgttgcaaatggaggtgccaggatgacttggacggcgacaaatgagtgggcggag

SEQ ID NO: 13062 - DNA, 535 bp, Homo sapiens
  misc_feature (1)...(535): n = A,T,C or G
naagatgaccactaggacangcggnggaattcggagcacatggagatggtggaagggcatcaagcctactgtcacgattctctcgagaggaatttccgaccctgcaggcggctggcgaccaggacaaggctgccaaggaaagggagtctgccgaacagtcgtctgggcccggaccaagcctccgcccccaaaattctacaacttggagggacggaggtgggcgtggccctgatgagctggagggcccggactccaaacttcatcatggtcatgatccccggggtgggctacagccttcaggcccaccccagttccctccctaccgcggaatgatgccgcctttcgtgagtcttggtgtcttgtcttggaacgattacactggaagctggagagctaggaatcaggacttagtctttgacctatgagatagaggggagggtgggagatgattgatagcaggcttaaggagctagaagggtatatgactgtccctctgagcagctactgttggacccttttacagatgtatncnccn

SEQ ID NO: 13063 - DNA, 487 bp, Homo sapiens
  misc_feature (1)...(487): n = A,T,C or G
agccgttgagacctatcaccccttgtcctacgaagnnacncncnnnncatgagcttattggccattcacatatttcgtgaactatctgtacaaatatttttgtttattaaaaaattagattgttttgttttattattgaatagtaagaattgtttatatattctggatacactctttttcagatatgtgtgttgtgactattgttagtctttagcttgccttttcattttcttaattatgtctttcaaagaacaagtttttcattttgacgaagcctagtttatcaattttttttatggttggtgctttttgtgtgttccaagaaatctttgcctactcatttaattacctgagtgcccttgtcaaaatcatttaattttgactactcatttaattaccttgcctactcatttaattacctgtgtgcccttgtcaaaatttactgtttatctgtgaatctggatgatctatttatgtcatttatctn

SEQ ID NO: 13064 - DNA, 460 bp, Homo sapiens
  misc_feature (1)...(460): n = A,T,C or G
nggggnnattgattgaagactattagaccangcggnggaattcggaggtcagaggggatggggctgtgggagagattctactcaggctaggtgctttatatttggacctggctgtgtccctactttattaaaattctcatgtggcgcgcgctgtcttctctcttctctctctctctctctcacacacacacgcacatacacacacagcccgagagaaatttccaatctttgagcaaatctcttccatctagtccttgaaacagaggaaaggacatgggacctgaaggagagttatgattgaattttctaaaatttagttttgacattgcaaagtaaaagtgaggaccgtattcccaatacagacccagagggtggttatttcaggtgaggggacctcagcctgtgacgtctatgatcaaccagacaaagaccccttcctaaatctgaagtcccacccccn

SEQ ID NO: 13065 - DNA, 457 bp, Homo sapiens
agagaaaaaatttcgagactctagtacatgtggtggaattctcaccattcatgtatgtttactcttttgtttgattcttcatttcctcctccatctctgtgcttcattctgaggtcacttttccttttgtatgcagaactccctttagcatttcttttagtgaaggactcatttattttgtttgtatgaataatgtctgtatttcaccttattttaaaattgcagtaaaatatacataacatatactttaccattttaaccatttttaagtgtacagttcagtggcattaagtatattcacatttttctgtagccaaaactgccacctatctccagaacttgtctaatcccaagtagctgggactataggcacatgccactgtgcctggctaatttttttttgtagagacagggtttagctttgttgcccaggctggtcttgacctcctggcttcaa

SEQ ID NO: 13066 - DNA, 494 bp, Homo sapiens
  misc_feature (1)...(494): n = A,T,C or G
aatcgannnccntcggnannnccnnnaattgtagacactagtacagngcggtggaattccccgacacacacacacaacaccatgcaaatctatgcaatcagggcacttgcaaatccttagtattatcaaaagaaaaatgcaaattctaaggcattcttatgccccagttttgaccagaattgacctgtgaagatgagctcaacatccaatccagattattcttagtgctgttcagagtgggaggatcaacagcctctgctggtgtatgctctcactaatcattatccttatttccagttaataaggtttttgtctattttattcattgtagaaataaagaaaagagttagtgttgaccttgtaaccataaagcttcatagttttaaagtcaattattaaataacccattcatctttcttcttttagtttgtttgaaactctctttttttaaaattattttctcctgggcactactggcaacatttatttttctt

SEQ ID NO: 13067 - DNA, 461 bp, Homo sapiens
  misc_feature (1)...(461): n = A,T,C or G
ncctcgatgaacactaggacagngcctgaggaaccctgcgccgacacgcggagagccagcttctgccttaaagatcacccgagagctgagaaacttgttgccaaaagaaatttcacaaaaatagtcgcactagtgagctctgggtggcggggtgattgtgagcagtttttacgggctaccgtggctcctgtttttcacaaagtattaacaggtgggtttaaaacgtcagggagcacacaaaacactcagagaagccgaacaggcgccccggggctgccgggagggagacggaagctggcgggacagcgcccttcagatggcgcggtacgctgtcgatgagacctcaggtttttaaaaacagtctttaaacttcgaccctacaccataaggactacgtcgggtcaaaattacttctggtcagccgcgggccccatgtcccatggctgagcaagtccggtctg

SEQ ID NO: 13068 - DNA, 483 bp, Homo sapiens
  misc_feature (1)...(483): n = A,T,C or G
ntttgcagacccctattccagtgttgtgagaacccagcttctttctaatgttctgtgaaaaattattttaagtgtcttatataatggtgcttttatggttattaaaaattgtaaatggtatcacatttatatggatttgtcattggatctttttttggttcaacaataaaaaaatttaattacctaaatgccaagaaactcaacaatataccagtttttctgtatcacaggcttatttaccagtcttttttttaataaataggaatcgtaaaggtaatgacaaaagcagccttataatttagttgcttatatatttgatctgtgtacatgagactgttttaacgttatctgacactactgaaacctgctcgacatctccatgactaccaacaccatgtgtaatgttttcttcactaacattttaaaaactggtatctcctttgagtaagtttggctgacaatagtaaatcccaatgaatctaa

SEQ ID NO: 13069 - DNA, 461 bp, Homo sapiens
  misc_feature (1)...(461): n = A,T,C or G
nttcgagactagagtncgtgtggtggaattccttcagccaaattaaacttaaagaagtttaattgagcaatgaatgattcacaaatcaggcagcctccagagttacagctgattcatggagactccagggatgcctcatggtcagaacaaatttatagacaaaaaaagggaagtgacatacagaaattagaagtgaagtacagaaagagctggactggttacaggttggtgtttgccttatttgaacacagtttgaacactcagcagtgtctaagtggttgaagtatggctactagaattggccaagactcggctattgttacaggaacgtactcctaaattaggttttcaatcttgtctacctgttaagttaggttacagttcatccacaaggactcaaatatagaagtacggagtccttctcaggctatcttcagttctctttaacagtatgatacggg

SEQ ID NO: 13070 - DNA, 462 bp, Homo sapiens
  misc_feature (1)...(462): n = A,T,C or G
nttgaagacccattgatgatcatctagtacagncnggtggaattctgatttggggactagctgggttggcaggaaaagagcaggatggatctcttgggactggttcccccaggagtataaacacaaggagccaggattgtgctggcagccaaggaaacagtagtgcctgtttgagttggcagagagggccttggcacctcttgcatccaggcagtcttgtgagatgggggcacatagcactggggaaagcagaactccattctcacctctattttgagcttcagtgctttatttcagtatgaggaaaaacaacaacaaactgaagtgcgctttccgtcctttcaaaggacaactgtcgggaagggagagccgagttgcgaggtaggaggggagcactggcagggagagacattcttgactcctctcttccctggtgtgttgngatccacggaatgaaaagan

SEQ ID NO: 13071 - DNA, 482 bp, Homo sapiens
  misc_feature (1)...(482): n = A,T,C or G
natggagaccctagattgtgcgcggaatccaagcggtgcttggttgcctaaagaacagtaaagtagctgttatttcagaacaaggtggattggttaataggcactgaaagtaaatgtctattggagtatctcatcagagctacagtgaaaagttgccacaagtcatttattttgaagatgttctctttactcttcctttgagtctactgttgacagaatagttcttgttaattgcctcagttttcttctcttcagctcctcatttgattctccttgaccttcctcagtctggtttatgtccttaccattccttgcaaactaccctttgtaaggtggttaactgccccctggcttcttcccttcatttccctttgacctgtctgctgcagttggttaccctctgcatacatattttgacactgcctctntcctcttaacagtattttcctctctactgattctgaaactgaccttaatattcn

SEQ ID NO: 13072 - DNA, 475 bp, Homo sapiens
  misc_feature (1)...(475): n = A,T,C or G
nnaacactgatatccatcgaagncctggagaactctctcctcacctccgngngccgcatctctcacctagtctctgttaggaaccctacaggagcctgcaccccagtaaccccattttatgctgcttggaggaagagacagagagtttgagaggtcttttcagtgtgtgtttggttcccccacttctcaaagctgagagcttctttgttttaagagccacttggttaagtcaagagcattagaagagtaaaaagaagaatccaattagataattttacctaaacatgctatagtcgactagggagtcacatagacattgattttctaatgagggcgctgttggtgattctctctgtgtgtaaagatgcttctgatcatgcctgctattacatgatacttatttctaaaggcacttttttttttttttacatttccatgggaaaaaataatcccataaaatttggccccctaaagg

SEQ ID NO: 13073 - DNA, 526 bp, Homo sapiens
  misc_feature (1)...(526): n = A,T,C or G
gagttatcactccgagctacacagcagatgccattctggatggctccctaggaaacagnggaacagagttttgaccctcagtgactcttcttagcagtaatgcatgcatttgatttaacaagactctggggcctgtgctgggaaccatctggacctttgcagaagatagagattcagggcccccctttcttaaaggggttgcttaacaaccacaaaaatccttatttctgcagtggcatagaatctgttaaaatttaattagaatcacaaatttatctcagaagctttttaacagttggtgaaatgtgcttgtccaacaaagcatcctaacagggtcgttcccatacacatttgacctggtcagccttttccaggtgaatagccccagttctgacataaagaaagttttatttgtattttactactgtgcggtcaattttgatatataactgggtacaaacagagccttactatttattagtggggaaatgattttaagaccgtccctgtcagaattaattctgcg

SEQ ID NO: 13074 - DNA, 476 bp, Homo sapiens
  misc_feature (1)...(476): n = A,T,C or G
gattgttaannaggannnnnntttgagatcactagtcagtgtgctggaattccaaacataacttaccatctactcatggaatgttgatgtgttagccagtctgaaagcccaccttaatttttatataactggctttagctcttgttttgacagggcaggccttgttctgaactggttcgcttctgactgctaaacaccgatgacgcatgcactgcacttcttagttttcttcttgctcccccattggcctgagttgcttgagcattactcctctccctccttcggtagaataggtatatcagctgtgtaaatagagcacgaaaacagtgttctgcatctgtggcatttatgaaaagatgcagttgtgtactgatgaaaacgcacgcttctgtaacagggtgatctttactgatgcactcatgacagagacccaatgtatcatagctattctagtgagatgtgatcaataaagacgc

SEQ ID NO: 13075 - DNA, 460 bp, Homo sapiens
  misc_feature (1)...(460): n = A,T,C or G
ggtgccaaaanttcgagacttgtagacattagtccaagcggaggaattcgcaactgatttctcagaccaagaagaagcagtggtgctacaactgtgaggaggaggccatgtaccactgctgctggaacacatcctactgctccatcaagtgccagcaggagcactggcacgcggagcacaagcgcacctgccgccggaaaagatgaagctggcccttcccggagtcaccccgatgattactcttttcagacacagcggtttttgtttccaagaagccaaaattgtttagaatttgcttcccattttgcaccagcctttaaacacttttcgtgaagaaattttgcacagtagtttaaatcttttgttaatgctcctccgaagtttttcagggggtaaaagtaacatcagtggagggtattattttaaataaattttaattgagaatttgttgcattttcag

SEQ ID NO: 13076 - DNA, 480 bp, Homo sapiens
  misc_feature (1)...(480): n = A,T,C or G
gaatataanaaagaaagannaaccgagnccccttactgatgtccctagtacatgcggtggaattcggcacaaatggctgccaaactggaacgtttgcgagagaaggataatcacattgaagaagtgcggaagaacaaagaatccagagaccctgctgacgagactgaagctgactaatttgttctgagaactgactttctccccatccccttcctaaatatccaaagactgtactggccagtgtcattttattttttccctcctgacaaatattttagaagctaatgtaggactgtataggtagatccagatccagactgtaagatgttgttttaggggctaaaggggagaaactgaaagtgttttactctttttctaaagtgttggtctttctaatgtagctatttttcttgttgcatcttttctacttcagtacacttggtgtactgggttaatggctagtactgtattggctctgtg

SEQ ID NO: 13077 - DNA, 461 bp, Homo sapiens
  misc_feature (1)...(461): n = A,T,C or G
cgggtgccnnngcnnctttaaattgaaaccttagccctccggcttgtanangcgngnaattaaggaaagaacagacatgagagtcattccattctcttccagttcaaatctttttttgtgaaaaaaatggtagttgtgacccatgaattaatttcacggcccactaattggttacaacccacaggatgatagaacataggtactaaaatgagggctggggcatgggtgaggtatttcctctccttccaaaatgacttaattttatccatttaaaataaaatttgcatttaccagaatagtggcaaaaatttattgtgcagaatagaataattgatttattacatgaatgattagttcaagagtcatctgttgagcatctgcactggattaggcccagagatgcatgaatgaataaaaagataatgcctctcttgaggtgcatataatctaaggtggaaaga

SEQ ID NO: 13078 - DNA, 477 bp, Homo sapiens
  misc_feature (1)...(477): n = A,T,C or G
taacggtcagctcgaannntacagatgagcctcggaaangcggnggaantnctgccgggcgctccgcgaagatgcagctcaagccgatttagatcaaccccgagattctgaacaaagtgctggcccggctgggggtcgccggccagtggcgcttcgtggacgtgctggggctggaagaggagtctctgggctcggtgccagcgcctgcctgcgcgctgctgctgctgtttcccctcacggcccagcatgagaacttcaggaaaaagcagattgaagagctgaagggacaagaagttagtcctaaagtgtacttcatgaagcagaccattgggaattcctgtggcacaatcggacttattcacgcagtggccaataatcaagacaaactgggatttgaggatggatcagttctgaaacagtttctttctgaaacagagaaaatgtcccctgaagacagagcaaaatgctttgaatagg

SEQ ID NO: 13079 - DNA, 477 bp, Homo sapiens
  misc_feature (1)...(477): n = A,T,C or G
cgtgttgnnnnaganannnncctcgagnacactagtcggtgtgcctgaattccgggcacacaacctctcctccgagtggtcggcccccagcgaccccctggacatcctgatcgcaggacagttctatgacagagtctccctctcggtgcagccgggccccacggtggcctcaggagagaacgtgaccctgctgtgtcagtcacagggatggatgcaaactttccttctgaccaaggagggggcagctgatgacccatggcgtctaagatcaacgtaccaatctcaaaaataccaggctgaattccccatgggtcctgtgacctcagcccatgcggggacctacaggtgctacggctcacagagctccaaaccctacctgctgactcaccccagtgaccccctggagctcgtggtctcaggaccgtctgggggccccagctccccgacaacaggccccacctccacatctgcaggccg

SEQ ID NO: 13080 - DNA, 449 bp, Homo sapiens
attgagttcagtaccctagtccatgcggtggaattcatttgtttaaaataaagtattaatactttaaagtcaaataagatatagcgtttacattctttaggtcctgaggggcagggggatctgtgatataacaaaatagcaaaagcggtaatttccttaatgttatttttctgattggtaattatttttaacagtacttaattattctatgtcgggagacactaaaatcaaaaacgggaatctcatttagactttaatttttttgagattatcggcggcacaatcactttgtagaaactgtaaaaaataaaagtatctcctagtcccttaattttttcataaatatttctggcttttgagtagtgtatttatattgtatatcatactttcaactgtagacaattatgatgctaatttattgtttcttgggttcacctttgtataagaga

SEQ ID NO: 13081 - DNA, 462 bp, Homo sapiens
  misc_feature (1)...(462): n = A,T,C or G
attggacacgtagaccttagtccgngcggtggaattcctacttcgcagtggaagaaacattggtttgtgctgacagattcaagtctcaaatattacagagactccactgctgaggaggcagatgagctggatggtgagatcgacctgcgttcctgcacggatgtcactgagtacgcggtgcagcgcaactatggcttccagatccacaccaaggatgctgtctataccttgtcggccatgacctcaggcatccggcggaactggatcgaggctctgagaaagaccgtacgtccaacttcagccccagatgtcaccaagctctcggactctaacaaggagaacgcgctgcacagctacagcacccagaagggccccctgaaggcaggggagcagcgggcgggctctgaggtcatcagccggggtggccctcggaaggcggacgggcagcgtcaggccttggat

SEQ ID NO: 13082 - DNA, 511 bp, Homo sapiens
  misc_feature (1)...(511): n = A,T,C or G
ggggnaggcaggcccgnnnnnnattganactgatntcactagtccatgtggtggaattcaaactaaagtcgacttgagtcatttcatttatagcttgagtaattagctttacattcaagcactgtcttagaatgatctangaaaagaatagagggcaaggtctgaaagagaaatatcatcttcacttttgattcttgggtatagacagtatgacattaacttgaaagagactaagacatctagctattttcttgtactttgaaactgccctcatcaaggacaactcttaattctgatagggtatcattctgaggtgtgagtgggctgtattttgagttcagcttactgttcaccaaaaattctcagagattcttattaccttggtgaattttcatggtctaaggtctggtcattagccttgaagataagaaactgggcctttcatctccccagctcacccactgtttttctgctgacaaccctccttgatatgcactttctttggcatatt

SEQ ID NO: 13083 - DNA, 459 bp, Homo sapiens
  misc_feature (1)...(459): n = A,T,C or G
cttgacacctttcgtagacctctaggacangcggnggaattcgtttaagtttgaaataaaatgttgccaaaaggagggtctgtaaatggcagagatattaaaaaaatgcctttgctatagcaaattgccctaaaactttataatacaaaatatttgactgtatttctcccccaaccccacattaatactttctgcccctttaagtggtctgggagctttgtcaccttactcctagagcccatcccctccataaagccctgcctctgattttttttatcacactgaggctgtcacttgtattgtaacctaaatagttgcttggtccaatgcagtggttcatgcctgtaaccccaccactttgggaggccaaggcaggcagattgcctgagttcaggagtctagaccagcctgggcaacatggtgaaactccgtctctactaaaatacaaaaaaattggct

SEQ ID NO: 13084 - DNA, 479 bp, Homo sapiens
  misc_feature (1)...(479): n = A,T,C or G
cgcagtaanaagaanaanatttgannnccntnattgtagtcattagtccatgcggtggaattcgctgattctcatgaattcaagtagctgagttcctttatgtttcgtttattcactaaagtagctgacacaaaacacaccaaaacctagagcggtagttttatgtaaatgctcatgagtttgtatcaataatataattgttgatccacttataattcgtgcaacactgtatgtatgtagagattgagttgtcaattaaaaaaaatgtggcctctttgtgatcataaaattgccttttattattgaggggagagggtttgggacagcagctgctaaagccaataaaaaaatgactgtcttttttgcctaggctgcctgtcaccaggcgtcctccctacctgacactgtttcgtccagagtcctagctgctgattctccacacagccctggagagaccatctcaggtgtctctcatctcc

SEQ ID NO: 13085 - DNA, 480 bp, Homo sapiens
  misc_feature (1)...(480): n = A,T,C or G
tgaatgtaaaanaagaanannnntttgagnacactagtcgatgtgccgtaatacctagcccatggacttcacataagctcagaatccaagtgaacactagccagacactctgctctgcccttgttccctaggggacacttccctctgtttctctttccttggctcccattcactcttccagaatcccaagacccagggcccaggcaaatcagttactaagaagaaaattgctgtgcctcccaaaattgttttgagctttccatgttgctgccaaccataccttccttccctgggctgtgctacctgggtccttttcagaagtgagctttgctgctacaggggaaggtggcctctgtggagccccagcatatgggggcctggattcatttcctgcccttcctcagtttaatccttctagtttcccacaatataaaactgtacttcactgtcaggaagaaatcacagaatcatatgattctg

SEQ ID NO: 13086 - DNA, 471 bp, Homo sapiens
  misc_feature (1)...(471): n = A,T,C or G
agaggtgnntttggagccctttactgatgtcactagtaagtgcggtggaattcgttgaagaggaaaacaaggaccattgattcacaatggcagcccagcatttatttattcattcaatcatccgtcaatcccaaacatctatagatgcctccgtgttccagacaccatgccagagctgagagtacaaagaatcacagaatattgtttaaagatgtttactgcagcataatttatgaaagtaaaaagttaatggaaaataaaaaaattgatgcaaccatcaaaatgacagttataaaaattatgatagtgagccgcacacagtggctcacgcctgtaatcccagcactttgggaggccgaggcgggcggatcacgaggtcaagagattgggaccatcctggccaacatggtgaaaccttgtctctactaaaaatacaaaagctagttgggcatgatggcgggcgcctgtaan

SEQ ID NO: 13087 - DNA, 509 bp, Homo sapiens
  misc_feature (1)...(509): n = A,T,C or G
ggggagccaggccgnnnnnntttgaaactgatnacactagtcagtgtggtggaattcggagacaaatgaggcaattaactaaaacggagatctgccagaggaatgagtttgtggagaaaaaggaaagatgatcattactgctagtgtaagtgacagcaatgccctcacattatcaatagatgcatagtaatagctaatctttactgaaatgcttgttatataccatgcactatactaagtgctatacgtactttatttcatgttgaataatatttagttttccaaacagctttatgactatcattcttactttagggagattaagtagcttgcctaaggacagcgattctcttaggggtccctgacactcagggtatccaggtttacaaggtcaaaactacttttatagcaatactaacacattacttgcttttactgcgtgtgtatttccaccaatagtgcaaaagcaatcatggataaaagtgctatctactgctgtagcactaggc

SEQ ID NO: 13088 - DNA, 495 bp, Homo sapiens
  misc_feature (1)...(495): n = A,T,C or G
ggagccgancncccccnaatcgtagacctttagnnatggtagatccatagtcagtgaggtggaatgcgcacgcctataattccagctactcaagaggctgaagcaggagaatctctcgaacccaggaggtggaggttactgtaagcggagatcgtgccactgcactccagcatgggtgacagagcgagactctacctcaaaaaaaaaaaaaaggggaaggggggactgcccctttcccagggggcaggacctgtttgggctgaccataaaacccacagaaagaacccttgtttacgggccctttattggggttggctttagccggggaatacttacttacccctttttatgggccgggcccgggaggaacaaagggaaatgggactaatggcttgttaatccaaggattacagccagggccctaaaaagcactgcccgaggggctgccccatacccaaaaggctggttttgtgggaaaacaaataatccccagct

SEQ ID NO: 13089 - DNA, 377 bp, Homo sapiens
  misc_feature (1)...(377): n = A,T,C or G
nggggnnattgattcattaccattactccangcggtggaattccttttttccatgcccatgcaacccagattggggtggagcaggaaggagctcttttctgttcccaagcctcagaactcttgagctgtggcttacttgctgtcttcaccaggttcaagctccgtgggccacactgctgctgtgccaagaaggtgtacagcctccccaggatggggcctcatacaacccttcatctgcactcaacatttaatcgtgtccttgctgtctttttattttcctttttgtttgctagcaaaaacctctatttagatttcaataatcagagaagtgtaaaataaaacagattatattgtacttgaaaaaaaaaaaaaaaaaa

SEQ ID NO: 13090 - DNA, 483 bp, Homo sapiens
  misc_feature (1)...(483): n = A,T,C or G
tgcgcgcnnnnnnnaatcgagatccctagtacagtgtggcggaattcataaattgcttatgttctgaaacagttgtctctctcctacctttttttgctacgtagtctctagtagttctgtaacatcttaggtaatttaaagagttttgtttcgttttgatcaattcatgacatgtagatgcataagagtgggaaaagcaacaagagcatgcagttttaagtgcattggttttgtgcttacaagaccagggttcgaatcttggatctgctgttttataactttgcaagcttgggcgaatcacttgccttcctgagcctgatttgatcacttataaaatgggtaaattttggtaaacttgttaggactttttgggttaatatgtatgtatgaagagcttagtgtggtccctaataggtaacatttactcaggtaattcttgctgttgttagaaacaaagaatatttaggcctcttcacctcagta

SEQ ID NO: 13091 - DNA, 449 bp, Homo sapiens
  misc_feature (1)...(449): n = A,T,C or G
nagatgaaatgagactctgctgaggccattgaccgacagtgcacacctgacctcatgtgacaggtcagtcaaaacaaaggcacacaacagtttattaaaactactgtataaaattaccttcaagctatgtatatatgaaacatgaatgaatttcatgtttagacttcccatcccaaagatatctcattatgtatatgtaaatattccaaaatctgaaaaagttaaatctgaagcacttctgttcccacacatttcagataagggatactcaacctgtatctactttttaaaaataatattctgaaattcgatactgtttttcatcttccatgctatttttgctatcaagatatggttacatacagtggctggtccataatatattcctatataatattttagatgtttccttatgagtcatgattcagggtttttttctttgctttgtt

SEQ ID NO: 13092 - DNA, 549 bp, Homo sapiens
  misc_feature (1)...(549): n = A,T,C or G
ctaagagcttcacagggccttgactgcacaattcgagctgaatttgccccttgtcagctgccagtaaataaatctcaaagggggaaaagctgaagtttcattacctgatccatggggctttgttggttttggcatcacacaggggaagctcttgcccctccattctctggatttgaagatgtccattggagcctgcagtgcctggacagggttcagagcggaaccttttgaagagtgtcaatagttgtaacagttcagctgttaggaagacaaataaatggaggagctcattaatccgcttttggctctcagtgccttttgcccttttatcacagccttattaggctcctactcatcttgaaccagaaaaaaatgaattgaagttgttgagtactaattggcaaagacttttaatcatgggccaagaactttcactgacttgaaagaacttctccacagggaaggaccaaaaaccntggtttaccttaaacaaaaaccctggtggagttcaagcgtggtgtanaaatgtaaggaagcattngataaatg

SEQ ID NO: 13093 - DNA, 491 bp, Homo sapiens
  misc_feature (1)...(491): n = A,T,C or G
natcgagatcgctatcnagtgtggnggaattccgaggtacacagagggctataatcagagatcgagcagctttagagaaacaagaaaaacagctggaattagaaattaagaaaatggccaagattggtaataaggaagcttgcaaagttttagccaaacaacttgtgcatctacggaaacagaagacgagaacttttgctgtaagttcaaaagttacttctatgtctacacaaacaaaagtgatgaattcccaaatgaagatggctggagcaatgtctaccacagcaaaaacaatgcaggcagttaacaagaagatggatccacaaaagacattacaaaccatgcagaatttccagaaggaaaacatgaaaatggaaatgactgaagaaatgatcaatgatacacttgatgacatctttgacggttctgatgacgaaaaagaaagccaggatattgtgaatcaagttcttgatgaaattggaattgaaatt

SEQ ID NO: 13094 - DNA, 492 bp, Homo sapiens
  misc_feature (1)...(492): n = A,T,C or G
cgatgggcacncccncaattgtagaccantannnatcgacgatccctagtccgtgtggtggaattcgtaatttaactgctgattccgctgtacctaaaagctggttaaattatagtttttattgaatgctaacaaactcttattcccctcctgcatggaattttaaaaaccttttattttctctgggctataattatggtgaccacattttccatggcaaaaattaagacacgtcgtctgacaaaggattcttgtgccacttctaggtgtgagaccacccatacttagattttttttaaagcaggcttttttaggcaggccctataaaaatagaggtttgttaaataggtgtgtttttagacttttcattaaaagcctacaatacaaacagtattttattttgtatctgaatcaacatgttatatcctaaagcactattttacagcctaagggtgtgtgttagtctattcataaaaacatactgctgcatag

SEQ ID NO: 13095 - DNA, 453 bp, Homo sapiens
  misc_feature (1)...(453): n = A,T,C or G
nnaaaaatcgagactatagtccagtgcggtggcattcaaattattaatctaatgaggaaatatcagtgaaagctggacttgagctgtgtaccaccaagtcaatgattatgtcatgtgaaaatgtgtttgcttcatttctgtaaaacacttgtttttctttcccaggtcttttgtttttttatatccaagaaaatgataactttgaagatgcccagttcactctagtttcaattagaaacatactagctattttttctttaattagggctggaataggaagccagtgtctcaaccatagtattgtctctttaagtcttttaaatatcactgatgtgtaaaaaggtcattatatccattctgtttttaaaatttaaaatatattgactttttgcccttcataggacaaagtaatatatgtgttggaattttaaaattgtgttgtcattggtaaat

SEQ ID NO: 13096 - DNA, 486 bp, Homo sapiens
  misc_feature (1)...(486): n = A,T,C or G
ggtgcggcnnnnnnnntttcgagatccctagtcatgtgtggtcgaattcgggagacaagacagggctctttctctcccgtgacctcagcctcatctccaatcgtggggaagagagaaactgaaattcttcctgtgactgaacacatgagaatgcgacagttacttggggtaacaggtttcctgtgggtcctgtgtgaagagtatgcattcattccagtgtcggggaggggagaagaatgaggaggaggcagtcccatgtggatgtcagtgtgatgattaggatgcctgatgcttccgaaacaagaatacactttacgaaaatgcccattgaaaatactttttcctttctactcttgngctaagagtgcctgtttggaccccatggcttcgtaatggtcagtgtgtttaccgtggccaaaaagagcctgtgtgtaagagaaagaaatccatgtggctgagtggcaagagaaccanaagaggagttgg

SEQ ID NO: 13097 - DNA, 402 bp, Homo sapiens
gaatattattagacagtaattttgctttccatccagtatgctagttcttattcgagaactatggtcagagcgtatttggatatgagtatcctttgcttatctttgtagtactgaaaatttgccgaagtaactggctgtgcagaatgtaatagaagcttttcttattcttttattcttaagatcagtatctttttacagtattctttctacatgatccttttttgtacatttaagaatattttgattatattaaacaagactgctgattttgctactttttttaaggggtcttcaagtaagtaaaacatacatcgtagctagaagaaaaatgtaccttaaatttgcatcttccctctcatacccaagctgtaaacaattgaaatattttgtcttaaatcactt

SEQ ID NO: 13098 - DNA, 467 bp, Homo sapiens
  misc_feature (1)...(467): n = A,T,C or G
ggcaggcccggnntnngnnnaaatgagaccatagacagatgtaggcattcgtggnggctcacgcctgtagccccagctattgcaccactgctctccaagctgggcaatggagtcagattctctttcttaaaaaaccacaaaaaaactggatttccagttctctaatattcttagtaccacaagatatgtcataggtatctttaaatgaaattcttagctggaaaagtgactaaaaagtttttctcctgctacctagtaataaacaaatcattgtttattactggtcacttataaaattaaaagggatagggccaggcacagtggcttatgcctgtaattgcagcacttttagaggccgaggcaggcggatcacctgaggtcgggaagtggatcgcctgaggtcaggagttcgagaccagcctggccaacatggcgaaaccccgtcgctactaagaatacaaaaaata

SEQ ID NO: 13099 - DNA, 458 bp, Homo sapiens
  misc_feature (1)...(458): n = A,T,C or G
cggatttgagccctcgnnnncttgagnacaattagtacagtgtggtggaattcgaagttggctttgaaagctgaactttagtggtgcctcttccttaccggggagccctggtgctggaggcagaggccgagttggtttgcagctgcctgggatgccacttcttcccagagttccaatgtgagttggggacaagggcttctttctctcagggaggggtgagtgggccagtgcttggctctgcttgttatccttctaatccccttcgtaccatcccctgggcaggaaggaggggaccaacactcttcctcttcttgctcagtcatccattacataaaattccagggccacacccaaggagagggatgagggaatccaggaaacatgctctcaaaagaatagcctgctttagaagacttttgatctgcagcataatcctattttgcatgtcaaataccaaa

SEQ ID NO: 13100 - DNA, 457 bp, Homo sapiens
cggtaattcgaagacatctgaccgtggagtgccatctagaggatctagcgatagagatggatatggtcgtgatcgtgactattcagatcattctagtggaggttcctactagagattcatatgagagttatggtaactcacgtagtgctccacctacacgagggcccccgccatcttatggtggaagcagtcgctatgatgattacagcagctcacgtgacggatatggcggaagtctagacagttactctagcagccgaagtgatctctactcaggtggtcgtgatcgggttggcagacaataaagagggcttcccccttctatggaaagggggtaccctcctccacgtgactcctacagcagttcaagccgcggagcaccaagaggtggtggccgtggaggaagccgatctgatagagggggaggcagaagcagatactagaaacaaacaaaacg

SEQ ID NO: 13101 - DNA, 425 bp, Homo sapiens
  misc_feature (1)...(425): n = A,T,C or G
aaccaacatcatcttttctaccttatttaatgagtgtgtccaagtgaaacattttttccctataaagttgataaaatgtcagtattatgtacttcacaactatatcttgtcaccataaaaattcctgtgataagactttttatagtaatgtatgaacttaacagttttatcaaattcaagatttttatgagttaagcatttctggaaagatgctaaaatcataagcatgacatgaagatctgcataaaattcaaaatggtcttttttaatggtgatgtattcagcattgtcatttatttgtaccatgttttaatatattttttctaatgtagtttcaacgcctttttaagagcatccactttttaaaaaaaatcctttgtcatttcctttaattaaagcctggttagtattgtagagtggcctcn

SEQ ID NO: 13102 - DNA, 473 bp, Homo sapiens
  misc_feature (1)...(473): n = A,T,C or G
nactgatgaccataggacagngcctgagaatcctcatganacncgaagaccaccactggattcagcagaatgagttcacttttgaaatgggcttcggtggagagatggggatgagaagcgctgcatgagctggaagtgggggaaggtcaatatcactctgttctgactggctgccctcattctgggacatcactgtggtcacgctggtccccgttcaagttactttcactctgtgagaaagtcaatatgatcttatgctcctgaagcatttttagtccactgtgtggcatattcccattccacagctctgatgaacagtgaccagggtgatggctctatagatctcacttcaactgagacatgagacctaggtgctgacaggggcagggtacagtggtcccatgctcatcattaagcacaggcatgtgataacgtcatctagtgtgctttgacctcctacagatctttctggn

SEQ ID NO: 13103 - DNA, 460 bp, Homo sapiens
  misc_feature (1)...(460): n = A,T,C or G
aggggnnattggttcgatactatctagcccangcggtggaattcggagcccgcctgcaagcgccacttcatccaggacacctgtctctatgagtgctcttccaacctggggccctggatccagcaggggaatcatagctggcgcaaagaacgcttcctggatgtgcccttatgcaaagaggactgtcagcgctggtgggaggattgtcacacctcccacacgtgcaagagcaactggcacagaggatgggactggacctcaggagttaacaagtgcccagctggggctctctgccgcacctttgagtcctacttccccactccagctgccctttgtgaaggcctctggagtcactcatacaaggtcagcaactacagccgagggagcggccgttgcatccagatgtggtttgattcagcccagggcaaccccaacgaggaagtggcgaggttctatgctg

SEQ ID NO: 13104 - DNA, 492 bp, Homo sapiens
  misc_feature (1)...(492): n = A,T,C or G
tgccgcggcnccccncaatcgaagaccntannnatcgacgatcactagtcagtgtggtggaattcagtaaatgatggcttccaggcaaagagaacattgtactgcaggcagtagctgagctgacctggacactggaagtcaggggcccacagacagaacagagagggctgtacattcagtaaagaaaaaattacacacttattttcattaacccctaactaaactttagctattccttcagttaatgtatgcaacaaagtagggtgtatcagaggcacctgcgactctggcgcaatttgaatctgaaatattttcacttcccactgcgtttgttgcagataccttgaaatttcttatattcatcacttcttcaaaatcatcgttgttattagagcgactgccagatcttatcatgcaatgcattaataaagtagcctttatcttgcctgagtttgtttacattttgataactgtatttcaatacagcaggtn

SEQ ID NO: 13105 - DNA, 446 bp, Homo sapiens
  misc_feature (1)...(446): n = A,T,C or G
attgagggcccttngattgaagacccttaatccangcggnggaattccctgcctgttcccaagcctgggaccaaggactacaggccggtacaggatttgcgcttggttaatcaggctacagtgactttacatccaacagtacctaacctgtacacattgctggggttgctgccagctgaggacagctggttcacctgcttggacctgaaagatgctttctttagcatcagattagcccctgagagacagaagctgtttgcctttcagtgggaagatccagagtcaggtgtcactactcaatacacttggacccagcttccccaaaggttcaagaactcccccaccatctttggggaggcgttggctcgagacctccagaagtttcccaccagagacctaggctgcgtgttgctccagtacgttgatgaccttttgctgggacaccg

SEQ ID NO: 13106 - DNA, 456 bp, Homo sapiens
  misc_feature (1)...(456): n = A,T,C or G
nggaaaatgagnccntngnnnattgtagacattagtccgtgtggtggaattcttttcttcctgcatttattgttgaaaactattgtttcatttcttcttttataggccttattactgcttaatccaaatgtgtaccattggtgagacacatacaatgctctgaatacactacgaatttgtattaaacacatcagaatatttccaaatacaacatagtatagtcctgaatatgtacttttaacacaagagagactattcaataaaaactcactgggtctttcatgtctttaagctaagtaagtgttcagaaggttcttttttatattgtcctccacctccatcattttcaataaaagatagggcttttgctcccttgttcttggagggaccattattacatctctgaactacctttgtatccaacatgttttaaatccttaaatgaattgctttctc

SEQ ID NO: 13107 - DNA, 477 bp, Homo sapiens
  misc_feature (1)...(477): n = A,T,C or G
taatgcacctncattgagngncgtggaaancnncggnnagangggaggatgaattgtcacatctatccacactgtcaaacaggttggtgtgggttcattggcattctttgcaatactgcttaattgctgataccatatgaatgaaacatgggctgggattactgcaatcactgtgctatcggcagatgatgctttggaagatgcataaccaataataaagtacttgactacctactggtgtaatctcaatgcaagccccaactttcttatccaactttttcatagtaagtgcgaagactgagccagattggccaattaaaaacgaaaacctgactaggttctgtagagccaattagacttgaaatacgtttgtgtttctagaatcacagctcaagcattctgtttatcgctcactctcccttgtacagccttattttgttggtgctttgcattttgatattgctgcgagccttgcag

SEQ ID NO: 13108 - DNA, 467 bp, Homo sapiens
  misc_feature (1)...(467): n = A,T,C or G
atttgagacattagnccgngcgttggaaaccctggtcgcacgcgtgagacttctccgccgcctccgccgcaaacgccgccgcgatgcgctacgacacctcctacctgctggctgccctagggggcaactcctccgccagcgccaaggacatcaagaagatcttggacagcgcgggtatcgaggcggacgacgaccggctcaacaaggttatcaacgagctgaatggaaaaaacattgaagacgtcattgcccatgggattgggaagcttgccagtgtacctgctggtggggctggagccgtctctgctgccccaagctctgcagcccctgctgctggctctgcccctgctgcagcacaggagaagaaagatgacaagaaggaggagtctgaagagtcagatgatgacatgggatttggcctttttgattaaattcctgctcccctgcgaataaagcctttttacaca

SEQ ID NO: 13109 - DNA, 542 bp, Homo sapiens
  misc_feature (1)...(542): n = A,T,C or G
gatattanncttgatcacgnctgngtgggcgacattactgcactctgcctgagatgcccttaccctaaggaacaaacatagaatcaagttgtcctacaaaggccagggtgggtttgtcctggaggcacactcactgcgagcgtgctctttttccagtatttgaaggactctctttatatgatctgtcttaagagttctattagatgtagcttttagaagatcaattaactatgaatatatactatacgcactgaatttagcaagtatagtactattctgttatgctgagcttcttctctctttgtaaatttgatatagtaaattcacaatccatttcactaataagagatatttatttgcgtcttttctaatcatgcttgagaatcctattcgtcccagaaatttattttcctgtgttatgtgcatgtatgtttttttattgatagtgcctaaagttgtagaagttgataagcttacaagatctctgttgcaatctgtttttccttttaagttggctaaattatgtttattgcaaactcctg

SEQ ID NO: 13110 - DNA, 481 bp, Homo sapiens
  misc_feature (1)...(481): n = A,T,C or G
aggtgaagaccataggaaaaaaaaagggtgacgacccttantccgtgtggtggaattcgtcagaagaggcagaagtggatgtgagagaaagagagacacagagagacagagagcctaagagggcaagagacttgactttaagagactcctgtactgacaactccatgcagttcggaaccagaacgactacggctgaaccagggttcatggggacatggcaaaacgctgatactaacctcttattcagaatgtcccaacaggccatccgttgcacactggtaaactgcacatgtgaatgttttcagccagggaagattaacctgaggacttgtgatcagtgtaaacatggctgggtggcacatgccttggataagctcagcacgcagcacctgtaccaccccacccaagtggagattgtgcagtccaacgtcgtgtttgacatcagcagcctgatgctctatgggacacaagcagtgcctgt

SEQ ID NO: 13111 - DNA, 467 bp, Homo sapiens
  misc_feature (1)...(467): n = A,T,C or G
natcgtagatcgtagtcagtgcggnggaattcagaagttcaaggagttaaatgtcacattcatactcaggtaatagagaagaataaaacacatcaggtttgcttcatctatcctaagtggtgcttaggggttcagaaaaaatgtttcaagtacaggaaattaatgagcaatatttacaatgtattttaataaaagggatttttctagttaaaaaaaaaaaaaaaaaaaaaaaaaaaaaaaaaaaaaaaaaaaaaaaaaaaaaaccccgccctgaatatataaaatgacattaaaaaaccccattaatacccgtggcgtttttttataaaggcggccccttgaaccccgcccccccccccctttttttttttttttttgaaagccctttttttagcctcccctttctaaaaaaaataataagtggggggcgttccccccagcttgtttttttatttagagtggactca

SEQ ID NO: 13112 - DNA, 521 bp, Homo sapiens
  misc_feature (1)...(521): n = A,T,C or G
acttttacttgattagcaagatgattatattatataacttgcccttaaaaacactccaaaatactgactccttttctccaattacaaatgagtgtgaagaaattctgttgtatgatttgaacactattaggtttgtatgtgtgtttaattggaagaattttatatagagtatctctgctgcttttgtttacctgggtaccacacaaccaaatacacattgagatttcaagaaatgatgatgaaagccagaaggccagaccacagctctgcagcctgtttcctacaaccagatataaaactctttctcgtcgccatgctgatagtcacactgaactagaactgtcccaacacattcttcctctctcataatggcttccatttaatacaggcaaagccctttaccttagcaaattctttatctttcanaagtgaccaaaatgaggacttcaaccttggctgcacctcaataggagatgctgatcttgagttgtaatgagaaaagtgggcatataggagatttn

SEQ ID NO: 13113 - DNA, 462 bp, Homo sapiens
  misc_feature (1)...(462): n = A,T,C or G
natagtagatagtagtccatgcggnggaattcccaggatttaagcagcccagctccacagaccatgttaatccctgggttatacggtctctactcctatatatattttatccatagataatgtggcatggttgctaacacacccactgagcccctggcacacaccattaatcaagcacaacagtcttctccactgggcccagataacatctaggtatccttttcaatatagtactttaagtagccactatgaactgttcataagagttctagaaatgagatttgcctttctttacttacaggataaaggcccaactcttcaacctgacactcagcgcctttagtgacttgccctcaacttacccctccagcctcagcaactattcctttcccaacacataccctcttctcactgtgagccaagtgcccctgaacactgcccatttctttgctccttccttta

SEQ ID NO: 13114 - DNA, 480 bp, Homo sapiens
  misc_feature (1)...(480): n = A,T,C or G
gcgcggannnnnnatcgagatcatagtatttgcaggcgaattcctcttttacagattttgtagttatccttttttgcttaatcaatcttggtggcagcaaagtgttttgtttatgtccttgcatctcagattctgctgtgtacaaagcacctctctagatggagtttcccagctgccagaaattggaatcatagactttttgagccagaagggccgtttcataggcatcagctgggaacttgttaaacctacattaataaattgggccagaccaactgaataaagaactctggaggtgtggtccagcaatctggtttagaaagccctccaggtgattccaaaccacactcaagtttcagaattcctgacctgagtttcaccctttgatttctctttctttttcgagacagagcctccgtcgcccaggttggagtgcagtggcgcgatctcggctcactgcaacctacgccaccctggntt

SEQ ID NO: 13115 - DNA, 498 bp, Homo sapiens
  misc_feature (1)...(498): n = A,T,C or G
tggatggagccnaggcnggnccnaattgagncccctattgtagacttctggccagngncgnggaattccctgaactccacatgtggatggtcacagatatatctccaaggccatactgttgagatttatggctagacaagattttgctagtaaatcttcccttcaatcatatcagagggaaagcagaccttgagatacgaaaagtggaaagagaatttctgttccctggacttaaggaaaagagaagcaagctttgtgaggagaagacagtggacaatggctgtccatttaactgtaggacaggagttggtgaagtcatatgtattgcagatggtggtggtgatgtaggaaaatagggaatttattaatactccactcccaatatggccataagtaaggaggaaataattaggggagagataatgctgaagtttccctcccaagtttgtggtgtgtctttgctcaagttttcttcctctcgcattacccatccctatg

SEQ ID NO: 13116 - DNA, 427 bp, Homo sapiens
  misc_feature (1)...(427): n = A,T,C or G
ccaagtagccacaaaatataataaaccctcagcacttgctcagtagttttgtgaaagtctcaagtaaaagagacacaaacaaaaaattctttttcgtgaagaactccaaaaataaaattctctagagataaaaaaaaaaaaaaaaaaaaaaaaaaaaaaaaaaaaaaaaaagggggggccgtttaataaaaggggccccaaaaaaccccgggaaacccccggggggggttttttaaagccccccccttggggggggcccccccccccgggttttttttggggggggggggggccccccccctttttttttttaaaaaaaaaagaaaaaacccccccctttgggggggggggggcattttttttgggnnnnncnnnannnnnnccnananannaacaccaccacacaacaacattatacaccctgtcg

SEQ ID NO: 13117 - DNA, 465 bp, Homo sapiens
  misc_feature (1)...(465): n = A,T,C or G
ntttgagatacatgngcagtgnggccggaaccccagggtggagtgcagtggcacgatctcggctcactgcaacctccgtctctgggttcaagtgattctcctgcctcaacctcccaagtagctgggactacaggcgcctgccaccatgcctggctagtttttttatgtgtgtttttagtagagacagggtttcaccatgttggctagactggctttgaactcctgacctcaagtgatctgcctgtgtcggcctcccaacgtggtaggattataggcgttagccaccatgcccagcctgatgtatgttcttaatagattagaacatcttttatttgttatgaaaataagttttcatatgtggtaatatataaatttgtcacatatatttgtgatgataaaatatgtacaaccaaatttactcacataatccccctttcctgcttgcattgcaagcaaacaggaaat

SEQ ID NO: 13118 - DNA, 462 bp, Homo sapiens
  misc_feature (1)...(462): n = A,T,C or G
attgatttcatcacttcgcangngcnggaattcctaatccgggaaaccaaagccacagattgtcgcctgcataatgtcttcaatgacttccttatgctctctaatacccagttcatagagaatcgtgtatatgatgaagaagtggaggagccagtactcaaggctgaggcagaaaaaacagagcaggagaagacacgagagcagaaagaagtagatctcattcctaaagtccaggaggctgtgaactatggcttacaagtattggacagtgcctttgagcaacttgatatcaaagcaggaaactcagactccgaggaagatgatgctaatgggcgggtggaactgatccttgaaccaaaggatctatacattgatcgtcctttaccatatctcattgggtcaaagctgttcatggaacaagaagatgtaggtcttggagagctgtccagtgaagaaggctct

SEQ ID NO: 13119 - DNA, 330 bp, Homo sapiens
atcatatatcattctctagaaaacaggctgtttggttatagagtatttatcttaaatatattaacagacactacataaacattgaaaagccatgcaagttatagctcacaggagccagatctactgcaactggggcctacatacaaaattttatggcagtggtttcagtatgacaatcttttgaattgatgccgtatggtaaaactataaagattttttaaaagctctgtctcagctagaatttttaagattataactgaacagtatagcccttttagttgtttgaaaattacataatgattcaaaagcttgtttcactgcctttcccag

SEQ ID NO: 13120 - DNA, 559 bp, Homo sapiens
  misc_feature (1)...(559): n = A,T,C or G
aatcgatgcacattcgagngncgntcaagnccacancaagncttgaataagttctgattaattgagcacaatttaagttaattttaacacccctatttgttgttatgtaataacagcctactgagaggtccagcatgctgagaggaaagagtcaaaaatttgttcatgtatgtgatcacttatttgttcagtaatgttgatcaataatgttgactgggataagcagcactggctccaactgcaggtcaaacagcagaattggccccaactgggaggcggagtgaatgattgctgttagaggacaagcaaagggaacattcagaaggaaagaatgaaaacaacacagaaagacccagaaagaaccagggaaatacagagtactctaatcacttctgaggctcagaggggacaaatgacctgtcccatgtcatgtagccctcttcttggcagagccaagagtagagagcagattctataatcctcagtctaaactcttgacattacatattgcattgcttctccagtggggcaggaaggggtggtaatgcaactgcgattn

SEQ ID NO: 13121 - DNA, 468 bp, Homo sapiens
  misc_feature (1)...(468): n = A,T,C or G
gggttgcccggnttnngnnaaactgtagatctagaccgatcgagggcattcattggctaaaagtgtcttctgtaatactgatagtgaagaaactgtttttacatccgagatgtgtttgatgaaagaagatatgaaagtgctgcaagacaggcttcttaaggacatgctagaagaggagcttcttaatgtacgcagagaactgatgtcagtattcatgtctcatgaaagaaatgctaatgtgtgaaatctagtttttatcaccatactttatctaattattattctctgtatataactgaggaaataagaatagtcctacaaagagaaaaatatacatgtcaccgaagcaagtgtaccctttataggaaccctcaaattaaaaaaaaatgtcttttaatggatgagagggaaccactataacatgagtccaagcccagaagacttctgtctatacaatattntttttta

SEQ ID NO: 13122 - DNA, 470 bp, Homo sapiens
  misc_feature (1)...(470): n = A,T,C or G
cttcgcccaccctnnnattgtacgtcctctagtccgtgtggtggaattcccttgtactcctgacctcaggtaatccacctacctaggcctcccagagtgctaggattacaggtgtgagtcaccgcacctagtcctaatttggcttttctataaacactgtgctgtgttacggttttagacccctctgtggcagttgtaaatgaccatgttaaatgttactagtctgtcaacctaagttatcaggaaaatcgctgaaaacttggaaagaagttgccgagcgctctgagcttctggagtggatcctggggccgcacactcagctgccctgtccacctctgggagtgcctggctccgtcctgccttcccacttgtggtgcatggttagcagcccgccagaaggggacaaagacctgctaggagcccgctctgctctcgtaagaaaaaaatggagaggcaaatagcctcattct

SEQ ID NO: 13123 - DNA, 469 bp, Homo sapiens
  misc_feature (1)...(469): n = A,T,C or G
ccccattgtagaccactagttagtgtggcggaattcgaagactcaagggcttaatctactcttccagtttcggaagggcaactcagtgtaaatgtcatgtggagagcagaggtgagttcaggattgctggagatctgcccgtgtggatggcaggtattcaactgggtatttctgtgaatgctgatggaatacacccaggacatttttagttataaatactggaggaatttaaaaatacattttattgagaaataatttaaacttctaggaagttgaaagtacaaaaaaccccacgcacactttacccagattcccctcttgttcacttattaacattttgtcccatttgatttgtcagggtttctctctccctttctccttctccataaaaaattgaggcatttgagagtaaattgcgtacatcataggcctttcctcctaaatgcttatttcctanaaataaggatat

SEQ ID NO: 13124 - DNA, 437 bp, Homo sapiens
  misc_feature (1)...(437): n = A,T,C or G
nttcgaggtcactagtctagtgtggcggaattcatgaagtatatcagagattatctctagaattacttgattcgaaacgacatacgtacttctttgtgcctttcgatattatccaaaatgtccatatgatcatatattagtaaggtgatgtttttattctctacatcctttgtgtagttatatattcatttaaattaatgatggttgtaattcaaagatagttttgagtagaggctattaggaatgtgaagatcatactattgctgattcctgccttcgcatgttgcaaatggaattaaatgtattaaatgtattattagtatgtgttgtttgaaccctacatctgacttcagcatccctttggtgagtacctttttcctttatttatttatttttttacctaagaagctgaaaagagtgaagattcctctggtgcn

SEQ ID NO: 13125 - DNA, 457 bp, Homo sapiens
  misc_feature (1)...(457): n = A,T,C or G
gggaagttgagcccatngnnnnaactgatgatcactagtccgtgcggtggaattcgcaatactgctgctatttttctagaaatagcaatcatttaaaaatgccaaatagctaactgctaccaactctttcttgtatcttgtctctttagagaaggaaatttttgtgtgccagtaatcatcaaagaggtgttttataagagtgttgatgttcagaagttcatgaaagtattttatccgtataatttgctagtgagctaaaacaatataatttatgtaaatctttatatgtacaaaatatatagtctgttgtacttgagtaatttggtctatggaattttaaatgccttcatttagcagtaatattcacatttttattttagacagttaagttcatgtgtttgattttgtcatgtcagcataaatgagaaaaagaagtggatcatgcagctaatgagta

SEQ ID NO: 13126 - DNA, 482 bp, Homo sapiens
  misc_feature (1)...(482): n = A,T,C or G
ggagggcccggggttnnnccncaatgagnccaatcgagaccattagaccatgcggtggaattcggaggaagcgagaggcatctaagcaggcagtgttttgccttcaccccaagtgaccatgagaggtgccacgcgagtctcaatcatgctcctcctagtaactgtgtctgactgtgctgtgatcacaggggcctgtgagcgggatgtccagtgtggggcaggcacctgctgtgccatcagcctgtggcttcgagggctgcggatgtgcaccccgctggggcgggaaggcgaggagtgccaccccggcagccacaagatccccttcttcaggaaacgcaagcaccacacctgtccttgcttgcccaacctgctgtgctccaggttcccggacggcaggtaccgctgctccatggacttgaagaacatcaatttttaggcgcttgcctggtctcaggatacccaccatccttttcctgagcaca

SEQ ID NO: 13127 - DNA, 458 bp, Homo sapiens
  misc_feature (1)...(458): n = A,T,C or G
cattgggnccnaatgatgcacattaggaagtcgcgaggatagtcattattgtatatatctatgtatgtatatctactctttatgctttctcaacccgatattccattgagctatggcccacattcttgagtcatgctagactcattgccttcatagttcttcacccatgcactccttgatcctttgccatctgtcttctctccacagcagtgatatggcttccatcaaggtcactagtgactttattttatttttttgagatggagtctcactctgtctcccaggctggagtgcagtgtcatgatctcagctcactgcaacctccacctcctgggttcaagcgattctcctgcctcggcctcctgaatagctgggactgcaggtgtgtgccaccatgcctggctaatttttgtgtttttggtagagacggggtttcaccgtgttagccaggctggtcn

SEQ ID NO: 13128 - DNA, 467 bp, Homo sapiens
  misc_feature (1)...(467): n = A,T,C or G
ntttgagcccattgacagngcggggatagatcctccttgctcccggctcgccgccatcttgtattggggtttcattgttcccgctgggccgggcggtttagtgtaattgccgccggaggaggaggcggagtaacctctggtcagccgagaaaccccactatcctgtagccataaccgcttaaacgatttgggaggtagtgaagggcagggagctggacctggaggcgccgccgcgacagcagcagccatggaggacgagatgcccaagactctatacgtcggtaacctttccagagatgtgacagaagctctaattctgcaactctttagccagattggaccttgtaaaaactgcaaaatgattatggatacagctggaaatgatccctattgttgtgtggagtttcatgagcatcgtcatgcagctgcagcattagctgctatgaatggacggaagataatgggta

SEQ ID NO: 13129 - DNA, 481 bp, Homo sapiens
  misc_feature (1)...(481): n = A,T,C or G
nnttggcgnaccactagtacagngcggnggcctgatgacccttataccacgcggtggaattcgcgagaagaggccgcgaccggagagaaaaagcggagtcgccaccggagagaagtcgactccctagcagcagccgccgccagagaggcccgcccaccagttcgcccgtccccctgccccgttcacaatgcagcctgcttctgcaaagtggtacgatcgaagggactatgtcttcattgaattttgtgttgaagacagcaaggatgttaatgtaaattttgaaaaatccaaacttacattcagttgtctcggaggaagtgataattttaagcatttaaatgaaattgatctttttcactgtattgatccaaatgattccaagcataaaagaacggacagatcaattttatgttgcttacgaaaaggagaatctggccagtcatggccaaggttaacaaaagaaagggcaaagcttaattgg

SEQ ID NO: 13130 - DNA, 460 bp, Homo sapiens
  misc_feature (1)...(460): n = A,T,C or G
ctcgaattcatagcattcgcagnggcngaattaaatacaaaagttcaacctcttacaataagctaaacgcaatgtcatttttaaaaagaaggacttagggtgtcgttttcacatatgacaatgttgcatttatgatgcagtttcaagtaccaaaacgttgaattgatgatgcagttttcatatatcgagatgttcgctcgtgcagtactgttggttaaatgacaatttatgtggattttgcatgtaatacacagtgagacacagtaattttatctaaattacagtgcaggttagttaatctattaatactgactcagtgtctgcctttaaatataaatgatatgttgaaaacttaaggaagcaaatgctacatatatgcaatataaaatagtaatgtgatgctgatgctgttaaccaaagggcagaataaataagcaaaatgccaaaaggcgtcttaatg

SEQ ID NO: 13131 - DNA, 513 bp, Homo sapiens
  misc_feature (1)...(513): n = A,T,C or G
cgagtggccaattgagaatagtagancactagcgcagagtggnggaattcgctgcagccatgtctctagtgatccctgaaaagttccagcatattttgcgagtactcaacaccaacatcgatgggcggcggaaaatagcctttgccatcactgccattaagggtgtgggccgaagatatgctcatgtggtgttgaggaaagcagacattgacctcaccaagagggcgggagaactcactgaggatgaggtggaacgtgtgatcaccattatgcagaatccacgccagtacaagatcccagactggttcttgaacagacagaaggatgtaaaggatggaaaatacagccaggtcctagccaatggtctggacaacaagctccgtgaagacctggagcgactgaaaaagattcgggcccatagagggctgcgtcacttctggggccttcgtgtgcgaggccagcacaccaagaccactggccgccgtggccggacccggggtgtgtccaagaaaa

SEQ ID NO: 13132 - DNA, 509 bp, Homo sapiens
  misc_feature (1)...(509): n = A,T,C or G
tgggcggggnnccnnnncatcgattgtcattcgtctagtgcggtggaattctgaaatgtcaattgcaggatgctgatgttgtgcacgtcaatcaccgggcacttgcatactcttagaaacagttcgacttcggttactgccttctcccttgaaatccttgctgcgtgcccaccaggatttcctgtgagggcccgggaatgagcaaggcatggtctgccaccagctgacggaaagcagccttctgtacaacagatgggagggtgaagggggcagaatgaaaatcgaaccaaccttttagctgttgcaaatcagaaggagccagagaagcaggcagtctcatgcatgagaggttacccttcaggatgacagagctgagggtctttgtaggagttgctcttgctgtgtaaagcactattgtcttggggttgagccctaaggcagttcttggtaggttctgctgggcagaacatatgggttaaatctcggtagagagttttcctcatcctcta

SEQ ID NO: 13133 - DNA, 421 bp, Homo sapiens
attgcaagtctcctttttaaaagatagcaaaaaaaaatgttgctgatatagaattctttcttagatatagtcatccctctgtgtatgtgggggattggttccagaacccccacatataccaaaatctgggtttactcaagaaccaccaacccatatatactaaaagtcagcccctccatatacatgggtttcaaatcccacgaatactggattttctatttgggtttagttgaaaaaaatccacatgtaagtggacctccacagcttaaagtggtattgttcaagggccaactctgcctgttttaactatagagaactttggtttgttatgacttgctatcatgaaatgatcctatatatgaattcaaatgaatcaagctcttcctgtgactccccacccccatttgacctatattacata

SEQ ID NO: 13134 - DNA, 462 bp, Homo sapiens
  misc_feature (1)...(462): n = A,T,C or G
nattggattcatgngcgtgnggcggaattcgaagaagagaaaaggagaatccgaagggaaaggagagctcagattcctcttggctctcggagccgcagggagtgtgtcttcccgcgccaccctccaccccccgaaatgtttctgtttctaatcccagcctgggcaggaatgtggctccccggccaggggccaaggagctattttggggtctcgtttgcccagggagggcttggctccaccactttcctcccccagcctttgggcagcaggtcacccctgttcaggctctgagggtgccccctcctggtcctgtcctcaccaccccttccccacctcctgggaaaaaaaaaaaaaaaaaaaaaaaagggcggccgtttaatttaaagggcccctttaaaccccgtgaataaccctcaagtggccttttatttggcaacccatttgtggtggcccctcccccgg

SEQ ID NO: 13135 - DNA, 286 bp, Homo sapiens
  misc_feature (1)...(286): n = A,T,C or G
cggcgggnnnnntnttccgaaactctaccgtagaggctcgaananncacannggatanncaagaatgtctttgtttctgctgcccctgtggctgctgccaccacagctgcttctgctgctgctgcagccccagctaaggttgaagccaaggaagagtcggaggagtcggacgaggatatgggatttggtctctttgactaatcaccaaaaagcaaccaacttagccagttttatttgcaaaacaaggaaataaaggcttacttctttaaaaaaaaaaaaaaaaaaa

SEQ ID NO: 13136 - DNA, 501 bp, Homo sapiens
  misc_feature (1)...(501): n = A,T,C or G
gggagcaaggccnngcnnnaatagagaactgagtgtcgtgngcaggaatccgcgacatgaaaaggaatgggagcaagaatctgaaaggcatagacgcagagacagaagccaagacaaggacagagacagaaaaagcagggaggaagggcacaaagataaagagagggcacggttatcacatggtgatcgaggaacagatggaaaagcaagcagagatagtaggaatgtagacaagaagccagataaacctaaaagtgaagactatgagaaggacaaagaacgagagaaaagtaaacacagagaaggagaaaaggacagggataggtaccacaaagatagggaccacactgacagaactaaaagcaaaaggtaaaatttgcaggctgcttcaggattacatttaaataactgttaaaatgttgtatcttgtaaacaaaagaaagattgcctgctaggattgtgccatctttaaaatttttactattggtcatttgcagaacn

SEQ ID NO: 13137 - DNA, 469 bp, Homo sapiens
  misc_feature (1)...(469): n = A,T,C or G
gggaggccaggccggnnnnnaactggatcgataccctagaccangcggtggaattcgttttcttaatacttgatggagtcctatgtaattttgcagcttttaattttactaagaccattttagttctgattatagaagtaaattaactttaagggatttcaagttatatggcctacttctgaagcaaacttcttacagtgaaaattcattataagggtttagacctccttatggagacgttcaatctgtaaactcaagagaaggctacaagtgcctcctttaaactgttttcatctcacaaggatgttagtagaaagtaaacagaagagtcatatctgttttcacagcccaattatacagaaatccgacagtactgcaatcactggcgaaattttgctgacattgatgattcctggaaaagtataaagagtatcttggactggacatcttttaaccaggagagaattgt

SEQ ID NO: 13138 - DNA, 509 bp, Homo sapiens
  misc_feature (1)...(509): n = A,T,C or G
agggcgcggggnnnnnnnaattgattgcgctcattagtccgngcggtggaattcatgctattaccttttggaaaacagctagcagtctgtcaaatatgctagatttggggtttgacgcccctcaaggtaatcagtgacctgttaaaccacagtatctcaagccttgtacgcaaagcaaaatgttacctgtcctacccctgctcaaagtatccatcatttctctaatgtagtctcacacccatatgtaaagcctctctagcactcctttccaaaatctgtagcttaattatgctaatgatcttcatttatcatgttggtttacttatcaggacattttcctatttctggtcagatgtttttccagggatccaaggcatggaatccttcattaagtggggaagaaccaacagaatttgttccacatattcctctgacacatccccaaaagcatgacttctagcctgaatcctacaatgaatgtatgggtgtatgtgacacactgtaattat

SEQ ID NO: 13139 - DNA, 402 bp, Homo sapiens
tgacgacccggatgagtgccaagaatatggggctgagatttgtggagcccagcggtgtgagaacacccctggatactaccgctgcacaccatcctgagaccctggatatcagtccacgccaggggtcggacgccaggatgtgatcgagtgtgaaacactacacggtggatgcggagctgtcctgagtgaaaatgtcggaggctccttcctctgagactgccccaacagcccggaagagtttgaccccatgactggacgctgtgttcccccacgaacttctgctgggacgttcccaggctcgcatccccaggcacctgctagccccgttctgcccgccagggcacctgcgacacccctgtcccgtcgacccagcacacctagggagggccctgtggggagggg

SEQ ID NO: 13140 - DNA, 418 bp, Homo sapiens
  misc_feature (1)...(418): n = A,T,C or G
aaagagcacgatcaagctaaatggtggaaaatgaggaaaagcggcttttgtcgctttgtttccagatgtaaataatgctgccaagccatgcagagatggaagagaattttaggtatgttttggaagtgttaaccatattgtttgacctgtgtcctcattcttttagctgccttcccacttgcctagaaacaatgttttacttctggtgaagaagtgaatttttttttttggtctgattgagttaaagcctgaagtactcgggacacagatgaccgattgtaatgcgatcttgtcagatctgccctcaaatctgttgaattttccgtacttgcctggcagccctgtgcttcccaggcccacatgctgtggctgatctgttttaatcatcaagctctggggctcagtcaaaggagaggtn

SEQ ID NO: 13141 - DNA, 456 bp, Homo sapiens
  misc_feature (1)...(456): n = A,T,C or G
aggtgttgagaccttggtaccagctttgccagcaagntcgcgnaantncccgacaaattcctgaagtttggcatgacaccttccaagggagttctgttctatggacctcctggctgtgggaaaactttgttggccagagccattgctaatgaatgccaggccaacttcatctccatcaagggtcctgagctgctcaccatgtggtttggggagtctgaggccaatgtcagagaaatctttgacaaggcccgccaagctgccccctgtgtgctattctttgatgagctggattcgattgccaaggctcgtggaggtaacattggagatggtggtggggctgctgaccgagtcatcaaccagatcctgacagaaatggatggcatgtccacaaaaaaaaatgtgttcatcattggcgctaccaaccggcctgacatcattgatcctgccatcctcaga

SEQ ID NO: 13142 - DNA, 509 bp, Homo sapiens
  misc_feature (1)...(509): n = A,T,C or G
tgggccgcnnnnnnnnntttgattgacgtcactagtccagngcggtggaattccctgtaccccacgtagtcgccggttaccgatcggactaagttccagtggtgatttacaagtcaagttaaaatgtccccagaagtggccttgaaccgaatatctccaatgctctcccctttcatatctagcgtggtccggaatggaaaagtgggactggatgctacaaactgtttgaggataactgacttaaaatctggctgcacatcattgactcctgggcccaactgtgaccgatttaaactgcacataccatatgctggagagacattaaagtgggatatcattttcaatgcccaatacccagaactgcctcccgattttatctttggagaagatgctgaattcctgccagacccctcagctttgcagaatcttgcctcctggaatccttcaaatcctgaatgtctcttacttgtggtgaaggaacttgtgcaacaatatcaccaattccaatg

SEQ ID NO: 13143 - DNA, 503 bp, Homo sapiens
  misc_feature (1)...(503): n = A,T,C or G
cggcggnnnnagnnngctcgtgacctngnannnccttgagntctcgtanngcnnnnnnnnnnaaagnnttananaggattggagatgagaattcatctgatgcttntncatttcacagnagtaatgttaggagagttggaaacatagtttggcaggactttgccaggatgtcaggaacctttgaaacctattgcctccacttccccctaccctccctctatcacagacacgtaccattggcttaggctggtacctccaaatggggaggcttttataattcagaccagagcccatataatgaacaaactaaagaacaggtgggccatcgaataattaaagtagaatttgttcctgtggtcaggggctgagccatattgttttttttttttttttctccagatctatttaaccaatttaattagtggcacagaatggaaattcttgcctttttttttttttaaagggtgggcacaaagaaaaatttccctaatctgatcctcccg

SEQ ID NO: 13144 - DNA, 509 bp, Homo sapiens
  misc_feature (1)...(509): n = A,T,C or G
tgggcggcnnncccccccatcgattgctttactccgtgcggnggaattcggctagggcatttggccaggatggccaccctcctgctgttgccccttagtgaggaatcttcaccccacttcctctacccccaggttctcctccccacagccagtcccctttcctggatttctaaactgctcaattttgactcaaaggtgctatttaccaaacactctccctacccattcctgccagctctgcctccttttcaactctccacattttgtattgccttcccagacctgcttccagtctttattgctttaaagttcactttgggcccacagacccaagagctaattttctggtttgtgggttgaaacaaagctgtgaatcactgcaggctgtgttcttgcatcttgtctgcaaacaggtccctgcctttttagaagcagcctcatggtctcatgcttaatctntgctctcttctcttctttatgatgntcactntaaaaacaacaaaaccccn

SEQ ID NO: 13145 - DNA, 472 bp, Homo sapiens
gccccccccccccccatgagaccttagacagcgttggaattcgctatgtgaagctgtttcctaatagtttggaccacacagacatgcacggagacttataatacaacatcatgtttggtcccgacatctgtggccctggcaccaagaaggttcatgtcatcttcaactacaagggcaagaacgtgctgatcaacaaggacatccgttgcaaggatgatgagtttacacacctgtacacactgattgtgcggccagacaacacctatgaggtgaagattgacaacagccaggtggagtccggctccttggaagacgattgggacttcctgccacccaagaagataaaggatcctgatgcttcaaaaccggaagactgggatgagcgggccaagatcgatgatcccacagactccaagcctgaggactgggacaagcccgagcatatccctgaccctgatgctaagaagcccga

SEQ ID NO: 13146 - DNA, 478 bp, Homo sapiens
  misc_feature (1)...(478): n = A,T,C or G
ggccccgccccccccgttganncccattgtagaccatagtccatgtggtggaattcgcatgatcttggctcactgcaacccctgccttgcgagttcaagtgattcttctgcctcagcctcccgagtagctgggattacaggcgctcaccaccacacccagctaatttctgtatttttagtagacacagggttttaccatgttggccaggctggtctcaaactcctgacctcaagtgatccacccgcatcggcctcccgaagtgctgggattacagttgtgagccaccacacccagccataaaatgaattttaaccgtggttcttacccattaatctgtgtaacctcatttgttaatgttagaggtaaacattccaaatctgttttttcatcttaaaaagtgatatttataaaaagtgaattgtaaaattgtttgaagaagactgtttttcctgtttataattcctatttttataattg

SEQ ID NO: 13147 - DNA, 480 bp, Homo sapiens
  misc_feature (1)...(480): n = A,T,C or G
ccgcccccccnngnnaattgaagacattagtaattgaggagcattgcgctgcgcctcataattcgccacatgcccctcctgtctcgactcgacctcagtcactgcagccaccttacagatcagtcctccaatctactcactgctgacgggtcttccactcgctactctctcacagagctcaatatggcaggttgcaataaattgacagaccagaccctgatctacctacggcgcattgccaacgtcaccttgatcgaccttcgaggatgcaagcagatcactcgaaaagcctgcgagcacttcatctcagacttgtccatcaacagcctctactgcctgtctgacgagaagctgatacagaagatcagctaagacacacccagcccagattcaacaggaaaccgatcttcccctgactccccaccgaggagagactctcctcgaccctgcacgggctctgaggccgagcgcacacttcct

SEQ ID NO: 13148 - DNA, 494 bp, Homo sapiens
  misc_feature (1)...(494): n = A,T,C or G
cttcgatagtacgtccactagngcagngcggtggaattcgagctccttatgtgccctcagggaaagaaccctctgtgcaacagaactacacataacatcttcagcacgttctgagggtgaatatatactacataaattgatcttgtgtatttaaccttatctttttaattttaaaattgaaattttgaaacttggctgcgctctgttggagggggttgggataaactgcttatatgtctgcctacttgtccagtgaaattacatttgcatcagtatatgtatatacctgccaaccttattggtatgtctcagaacatttatattaaaataatgcttgtcttgcagcacgtgatcccataaaacaataactccctgttcttaaaaacttactctctttttcactaacaacataagaatcggttctgtggtgagattattctgcgttgcatccattctctatgtagtgggcaccttctgtctgtcatggagggctt

SEQ ID NO: 13149 - DNA, 502 bp, Homo sapiens
  misc_feature (1)...(502): n = A,T,C or G
taggtgntnnnaacttaagatacggtagngacngcaannngnanacccaactcattccttttagcacctgtgtagaattttgtggtgaagctggactattatttatttactcattcccccattccctcttgagggagtatttaggttgtgttcatgttctgttttttttccctataaataatactgctataaatttttgtgtctatcctgacctactggtgcctgtatttctttaggctgaactgccaaaattgatatggctgagtcagagtatacatgttttaaatttcagcagctgtcaatgagggcttttattgagagttatgctttttgatcagaaatatatattattttgacaaaggtgcagagaagatagttcactagtgtcttagtctgcttgggggctgctgtaacaaattccttagactgagtagcttagaaactacagacattagtttctcatggttcttanagctgtaagtccaagataaagatgccagcn

SEQ ID NO: 13150 - DNA, 475 bp, Homo sapiens
  misc_feature (1)...(475): n = A,T,C or G
ggcggagggccgcaaatgagaccataggaattgagggcattccgancaccacctacaaccacagagctgtcatggctgccatctctacttccatccctgtaatttcacagccctagttcacagccatgaatgaaccacagtgcttctacaacgagtccattgccttcttttataaccgaagtggaaagcatcttgccacagaatggaacacagtcagcaagctggtgatgggacttggaatcactgtttgtatcttcatcatgttggccaacctattggtcatggtggcaatctatgtcaaccgccgcttccattttcctatttattacctaatggctaatctggctgctgcagacttctttgctgggttggcctacttctatctcatgttcaacacaggacccaatactcggagactgactgttagcacatggctccttcgtcagggcctcattgacaccagcctgacggcatc

SEQ ID NO: 13151 - DNA, 511 bp, Homo sapiens
  misc_feature (1)...(511): n = A,T,C or G
aggcgggcngncnccnaattgactgcgatacgctagngcggngcaattcatgacgactggctcaagactatttcatcttacacggccttctcccgtctcatcctgattctgcgtgccctacatgtgaacaacgatcgggcaaaagtgatcctgaagccagacaagactactattacagaaccacaccacatctggcccactctgactgacgaagaatggatcaaggtcgaggtgcagctcaaggatctgatcttggctgactacggcaagaaaaacaatgtgaacgtggcatcactgacacaatcagaaattcgagacatcatcctgggtatggagatctcggcaccgtcacagcagcggcagcagatcgctgagatcgagaagcagaccaaggaacaatcgcagctgacggcaacacagactcgcactgtcaacaagcatggcgatgagatcatcacctccaccaccagcaactatgagacccagactttctcatccaagactgagtgga

SEQ ID NO: 13152 - DNA, 490 bp, Homo sapiens
  misc_feature (1)...(490): n = A,T,C or G
cccccgcccccnngnnattgtagaccattagncagngcgttgatttcatggcagcaatgaatcgtgtcttgtgtgccccggcggccggggccgtccgggcgctgaggctcataggctgggcttcccgaagccttcatccgttgcccggttcccgggatcgggcccaccctgccgccgaggaagaggacgaccctgaccgccccattgagttttcctccagcaaagccaaccctcaccgctggtcggtgggccataccatgggaaagggacatcagcggccctggtggaaggtgctgcccctcagctgcttcctcgtggcgctgatcatctggtgctacctgagggaggagagcgaggcggaccagtggttgagacaggtgtggggagaggtgccagagcccagtgatcgttctgaggagcctgagactccagctgcctacagagcgagaacttgacggngtgcccgctggggctggcaggaagggagccc

SEQ ID NO: 13153 - DNA, 455 bp, Homo sapiens
  misc_feature (1)...(455): n = A,T,C or G
nattggagatcgttancnatngcggnggaattcgactgcccagggatagaacccagggtgggcctgggatcaggcggggtgcacacctgctccttgagctcgttgagctgggcagtgaggtgggacaccagcttcatggtggagttgagcttgtcctggagaatccgaatctcattctgctccccctcgccctcattgctgacaagggacatggcccgcatccgggggaaccagtccaggttcttgttctgaaaaacatcaccagtgggttaagcaggcgtgggcccggcctataaaggcctcatttagaaaaacagtaatgtggggggaggcttctgccacacccttaacaaaactactcgtcagggatgtgtcatgggaaaatctgaattgacctggtcctccccggggccagagtgagctggcagtcaaccctcttgtcaaccctctgccac

SEQ ID NO: 13154 - DNA, 496 bp, Homo sapiens
  misc_feature (1)...(496): n = A,T,C or G
cccccgcccnnnagnattgagnccntgngnntnncaactgagaccatagtacangcggtggaattcgaaaaatacaaccagcctctaagagcagaaagaccccctaacagcctcctgctgacagccaataaggaaactggatgtcagtccaacaatcacaaggaactaaattcagccaataacttgaatgagcgtggaagtggattcttctgcagagcctctaggtaagagcccagccttcctgacattttcctctcagccttttaagattttaagcagagaagccacttgagccctaactacagctctaatgtacagaacagtggagcaaataaatgggtgttggtttaagctgctttgtgtatagctgtcagttatgtaccagtaagaacatagttccaagtatttaaaaacataacacagtgacaaaagtaaaataaaactagggcactattacgactcaataaattaagacaaataacccaaattagaaaan

SEQ ID NO: 13155 - DNA, 495 bp, Homo sapiens
  misc_feature (1)...(495): n = A,T,C or G
cccccgcgcnnnnagnaatagaagacattagnccagngcgtttgatgacgttgaaagaangaangaatgagcaggatacataaagcagaatgggctgctatgatatttgggtccatatagaggcttcatggcaacatccacgacagttccagtagacaccccaccacaaggaccaagggaaggggcagccaattcctttacatggctatcttcctcggtgtgatcaattaattccccaaagtggctcaattagccttagttggtaccctccccagttttcctcagaccacatagatgtttttgaacatagctttttgctatttactatggcttcttctggacacccactcttagctcaaatttacacatgcattttggaagccttcactgccagagtggtggtcagactaaaaagcttgacttgggtctccaagccatagttatgaagtaccataggattgggtgtcttcctggtactttcttctcctcagaaan

SEQ ID NO: 13156 - DNA, 471 bp, Homo sapiens
cccccccccccgccccctttgagcacattagttagagcggcgtaattcctgtgagcacggccacaaggagatcgcggggctgctgctggccgcgcccagctgtgacatctcactcacagatcgcgatgggagcacagctgtgatggtggccttggacgcagggcagagtgagattgcgtccatgctgtattcccgcatgaacatcaagtgctcgcttgccccaatgtcagatgacgagagccctacatcatcctcggcagaagagtatccgtgagggaggcggggaccagccagaccgggagcaaaccgtcccttgttcccgtctcctccctgttaccgttcctccctggtccaccccactcacactccccaaggcccacggttcataggcaagcgagctctccctctgcttccctggaggagccccgacggtcacaggactccagctgctagcagggtttcttggctccc

SEQ ID NO: 13157 - DNA, 474 bp, Homo sapiens
  misc_feature (1)...(474): n = A,T,C or G
cccccccccccccccccatcgacaccttggatagangacccttagtccagtcaggaggaattccacagagtgatagttgtcatagttcttgccttccctaagtttatataaataacttaagtattgctacagtttatctaggttgcagtggcatctgctgtgcacagagcttccatggtcactgctaagcagtagccagccatcgggcattaattgatttcctactatattcccagcagacacatttagaaactaagctatgttaacctcagtgctcaactatttgaactgttgagtgataaaggaaacaaatataactgtaaatgaatcttggtatcctgtgaaacagaataattcgtaatttaagaaagcccttatcccggtaacatgaatgttgatgaacaaatgtaaaattatatcctatatttaagtacccataataaatcatttccctctataagtgttattgattat

SEQ ID NO: 13158 - DNA, 480 bp, Homo sapiens
  misc_feature (1)...(480): n = A,T,C or G
cgcccccccnngnnattgagnccctngnnattgaggacattagtacangcggtggaattcctggggagactggaaattttctattgtgctaatccaagcttgaggtgatgaagactacacagtccaaattttctattgctgctgtaaaaaaattaccacagccttgatggcttaaacaatacaaacttcttaccttgcagttctttaggtcagaagtccgacatgggtatcactggactaaaattaagatgttggtaaggccgccctcccttctagaggctctgagggagaatccattttcttgcttttcccagctgctgggctgcctgcattccatgctttgtgacctccttcttccgtcttcctcgccaacgcagcaagttgaattcttctcatgctgccactgccacctctctggttctatgtccacagctgagaaagtttcttctctttcaagactcatgtgattagagtggcccc

SEQ ID NO: 13159 - DNA, 499 bp, Homo sapiens
  misc_feature (1)...(499): n = A,T,C or G
gtcgataccctttgcangttcgagaaccctcttcagngagccggaattcatagcctgagccatagatttttgatactgctaattatgcttcttataggccacacccactgcataaaacccaatcaggggactaaccccaaaatccaatgtatttaaaaatgtaagtgataagagatgtgcattatgtacgaaaatgaaaattggtgctaaagtggcaatgtcaatttaaaatttcttgtccagatctgactgactgactcaggagattatagttcctactcattctctttccttttatcagatctttcaaaagcgctttttaaaattgatcaatgtgcaattctgtatgagtctctacagtcctatcccttttggaatgaacagctacacaaatatatattcttggaacttcgaagttgtcttcaaactatctctagaaaatgtccctagttgacattagcgttggtctgttagaaagggaaattgatttgactgcttn

SEQ ID NO: 13160 - DNA, 474 bp, Homo sapiens
  misc_feature (1)...(474): n = A,T,C or G
gggcggaaatggagaccactagncatggtnggcgtattcccctagtaatgactattggcttccacatatctatgattgcttcttaagatttaagaattacttctacccaacctaaatggtgatacctacctaaaatacttaaaaaaaaaaaaaaaaaaggccttttatttttttctataaactttcctattttaaaggaacccccttttataatcccaaaacaaggggggttttttaaaaaaaagcaaaggcatcattgattttttttaaacttttaaaacacaattcaaaatacccccgcggtttcactatggggaaaactcacatttggaaggtttttccgggacagaaaaaaaatttcctagggacatttgttagcccggggggctcaggggggaaaacccgggcatttgtcgggggggaaaagccccctgaggaaagcccaaaggttctggttttggctgcatctgaaat

SEQ ID NO: 13161 - DNA, 494 bp, Homo sapiens
  misc_feature (1)...(494): n = A,T,C or G
cgcccgccccnntagnattgagaccgtggaaannccatgagaccatagaacangcggnggaattcggactcttggcgggtgaaggtgtgtgtcagcttttgcgtcactcgagccctgggctctgcttgctaaagagccgagcacgcgggtctgtcatcatgtcgcgttacgggcggtacggaggagaaaccaaggtgtatgttggtaacctgggaactggcgctggcaaaggagagttagaaagggctttcagttattatggtcctttaagaactgtatggattgcgagaaatcctccaggatttgcctttgtggaattcgaagatcctagagatgcagaagatgcagtacgaggactggatggaaaggtgatttgtggctcccgagtgagggttgaactatcgacaggcatgcctcggagatcacgttttgatagaccacctgcccgacgtccctttgatccaaatgatagatgctatgagtgtggcgaaaag

SEQ ID NO: 13162 - DNA, 497 bp, Homo sapiens
  misc_feature (1)...(497): n = A,T,C or G
cgccccgcccccnnnagnaattgaagaccataggacangcggtggagtaccntcttnatgancngaagtacctcatgaagagctgcaaaaatctcaaaggtggatttcaggaggtggcagaacatttagagctggaacggataggaccacaacatcaggcaggatctgattcattgctcacaggaatggcctttttcaaaatgagagaagtatgaagacatcactgcctttttctcagttggttgttaggttgagaacattaaaaatcttgtggccaaagattttgggcaacaagtacctactaagtaaagatataattagagataccatatgagtcacatccaccacacttaaaagtattcaaaaataagtcatcttgaaatgtagttcagaaggaactgggagaacatgttcatcatagaaccaacaattttaaaacataaactacctgagaagtcatgtaggtccaaccatattatttctcaggtgagaaaacn

SEQ ID NO: 13163 - DNA, 501 bp, Homo sapiens
  misc_feature (1)...(501): n = A,T,C or G
cgcccgcccccnnagaaattgagaccntnggnaannncnattgatgactattagaacangcggtggaattcattttcttactggtttctactgaaggggaggtaggtgaggaggaaaaaaggaccatgtgtgatgctgttagacaagacactgacgctgattatggagggtctcctgcaggcccttgtgggctccttggcaaggccccaggctgggaaggagctccccccactgcccatcctgcccgctttgtggcgggtagagtcagtgacagggaggcagccctccttttgtgtatatagagtgagctgatttgggctcaggaaaacctagtcgcttgttgctctcgtctgtgacatttttgtacactggtttgctactcatggcaagaaacagacaaagccccatgaaaaataaaacaaaacaaaagtcatttcaaacaaagctgttgttttgaaaactcttgctttcttttggtgtccattttgtgttctattttaa

SEQ ID NO: 13164 - DNA, 469 bp, Homo sapiens
  misc_feature (1)...(469): n = A,T,C or G
nattgagcccctnggnattgtagacatctagacagngcggnggaattcgccaccggggtcaagaagactctagccggggttcagataattccagttatgatgaagcactctctccaacatctcctgggcctttatcagtaagagctgggcatggagaacgtgacctggggaatcccaatacagctccacctacaccggaattacatggcatcaaccctgtgttcctgtccagtaatcccagccgttggagtgtagaggaggtgtacgagtttattgcttctctccaaggctgccaagagattgcagaggaatttcgctcacaggagattgatggacaggcccttttattacttaaagaagaacatcttatgagtgccatgaacatcaagctgggccctgccctcaagatctgcgccaagataaatgtcctcaaggagacctaaggtggccctcttgcacaaaccagcct

SEQ ID NO: 13165 - DNA, 488 bp, Homo sapiens
  misc_feature (1)...(488): n = A,T,C or G
tcacatcacttcgnannntacgttccaatagtaanncnnnnnnnnnnngntaaaaattttggggaatatgttttgggatgtattatggagctaaaactctatcctcttaatagtttgatagaacttaaaaattgtttatacaattacccaattggtgatatgatcttaagcttttgtgtcacattatttaatatgatgacttcatgctttattatgccttattatggctgacttattactggggtgaaacaaaatatctttaaaagttaaaacatccagatatataagctattttttcctaaggataaagtacctttgagcatgagtgtatcacagctctcattaagaaaactcttcattacataacttggtaaactctgtcttccagggtaaaaacaataaggttgaatcattttattaaaaatactttttagaaaataactatgagcatctgaatattaaaggatttaaaatgcacataattcatn

SEQ ID NO: 13166 - DNA, 478 bp, Homo sapiens
  misc_feature (1)...(478): n = A,T,C or G
caccgatnncctcacagcantgngcagnaancnggaccagaggggggtgccaccacacccgctaattttgtatttttagcagagacggggtttcaccatattggccaggctggtcttgaactcctgaccttgtgatccacccgcctcggcctcccaaagtgctgggatgtgcctaattactttcttataatacctgatatactgccccctgttgttggaatttaacaaagacatttagtgataaattactatttttttttgttctttggctcaacgtaatccattgtttgttttgtgcctgttatgtgtgagaccctgtgctaggttttaggtgtacagtgagaatgaagcagacatgtaatccttgctcttgtggaatttatgctataaaggagggatattcattaatcaacaaagtcaaatatgtaattataaagtgtgagaggtattatcaaggaaaataataaggtccttgcct

SEQ ID NO: 13167 - DNA, 476 bp, Homo sapiens
  misc_feature (1)...(476): n = A,T,C or G
ggccccgccccccccttgannccctttgtagatcatagtccatgtggtggaattcccggtgttacgtgcccctcgggcctttggcctccccatcaatgacccccagcctggctccattcctggttgtcactctaattcacgctaaagagtgaatggctgacacttgaggattgctgtgcttgaagaggcagggcttgcaatttttctggaacaatccctttcttcaggaggaggggtctctaaggcaggtgagccaggtcccctccttgtccccacatctgaaatccaatcattcaacttgggttcctcgggcctcagaggcttctcagactgtaagaggccgggaggggaaggacatcctgtccgaagcggcaagtgcgtccactaccactcatgctggagaggacaggccgcctgtcttctgtggccagggacacaggcttggggcccaccctcagacctctgagaactgcctg

SEQ ID NO: 13168 - DNA, 500 bp, Homo sapiens
  misc_feature (1)...(500): n = A,T,C or G
gtcgaaaccactnngcagngtcgaggaacctactccatgtggtggaattcgtgatactgatggggaagggtcggctgattgctgccagaaatgtagagctcgttttaaggaaatgcggcgtctcctgggagtgaagaggcttttgggccaccttgaggcacgacgggtgccgcttcgtttccctgcgaccgctgcctgtttcgactgagccccttacaggaggacgtggcgggggcagacgggcgcagcctcccgccctctccgtgactcagggaaacggcctcgccgcagagcgctccctcggcagctggctgcagcactcctcccccgccgggcttcagagtgggtggtttcctacagcctagggagggggcctgaaacggggtttaaaatcttccctgccctcacacaagcccttctgactgttggagaacctgacgcgcggattctaactagaactggcactctcttcgggtgttagataattaactcanaggaca

SEQ ID NO: 13169 - DNA, 473 bp, Homo sapiens
  misc_feature (1)...(473): n = A,T,C or G
nattcgangacccttngnnattgatgatcattagtccgtgtggtggaattcagcggctgctgttggttgggggccgtcccgctcctaaggcaggaagatggtggccgcaaagaagacggtgagtgaggcgggccaggcccggaagacgattcacgtggagagatgtcttggccagggcgggcagatgtgagcccacgggggtgacagcatgcctgctggcatttggagggccccagaaggaatcccagtggccctctcaatgacttggggtcctcgacttcggaagtttaaggggctcggcttcaaaaagctgggtccggttttgaggcggttgcaggcgaggcccttaggaaatctgaaatagagtactatgctatgttggctaaaactggtgtccatcactacagtggcaataatattgaactgggcacagcatgcggaaaatactacagagtgtgcacactggctatcat

SEQ ID NO: 13170 - DNA, 466 bp, Homo sapiens
  misc_feature (1)...(466): n = A,T,C or G
natgtaggtccctagncagggtggtcgtattccaagaagcaggccaaggagatggacgaggaagataaggctttcaagcagaaacaaaaagaggagcagaagaaactcgaggagctaaaagcgaaggccgcggggaaggggcccttggccacaggtggaattaagaaatctggcaaaaagtaagctgttccttgtgcctgaggagatggtgaccctttatttcatctgtatttaaacctctctattccctgccataacatcttttgccacgtatagctggaattaagtgttgtcttggagctgttgtacatttaagaataaacttttgtaaaaaaagaaaaatcttacagtggctcatcatctctttagttgttttcactaagtcattcctaccataactgtgaatttaaagtaaaaccagctcagaatcttgccagagtctgttctttggtccttgttctaccct

SEQ ID NO: 13171 - DNA, 505 bp, Homo sapiens
  misc_feature (1)...(505): n = A,T,C or G
gccccccatcgaganccnttngcagatagaagaccctagtcagngtggtggaattcataacttaagtagctatttccttgggaaccaatatctttacattggctagaactgtgaatcgccctttaaagataaagccccaaaatacattttttttccctacaggtaaccagagggtgaagtaacagccgaagaggaaaccagaagtgaagtgatttgtacaaaatgtcgtagtgtaatttattgagtgtcatgtggtattaatcgcaacatcctgaaaatgcaaatgaataaaagtttggtcaatgtaccatgacattccttcatgtgagcctcctaagaaaaggtcactgagcattctctgtttacattttaattttagactccagaatttcacactaagtttttcttctcatttcttatgcagtaaaagaagaagttgtatttccaatgggtctggctntctgttctttaagttttgtttccttaaaaagttaaactccaaaaa

SEQ ID NO: 13172 - DNA, 498 bp, Homo sapiens
  misc_feature (1)...(498): n = A,T,C or G
agcgcaggccngggcccnacttgaaanttgcatngcgtgngcaggaanccgngcaaantgagttattatgtatatgggtaaagatgtacaaatatatgtcctctttgtagtagatatgattttatatttataatgtgcatcaacatgtgaaagcaatctatgtcactagcacagaggaagttgccaggaaggtggcttcagcacctccaggttggttctgggtgtcctgctgtgaggggtagaacgggaggctgctgaagtgagtagctgagcagctggagccatcccaagcatcagtgtctcagagtcctcctcgcccctttcttcaccccgccccccaacccccagactttcctggagcatctgccctttgctcctagcagcctccccaggaagggactgcagaggcgggcaagccctctctatgtgtttttatctccaccttccccggaatctggggagggcttttgtttttacgttttcaagttcagcattgta

SEQ ID NO: 13173 - DNA, 476 bp, Homo sapiens
  misc_feature (1)...(476): n = A,T,C or G
natcgtagaccatattgaagngccgtggaatacgccagatgcaggtttatatcatgtttccaaacctctgttatctattcagtttttataaggttgtgaacatctgcttgctcatagtgttctatcaataatcttaacactacctgtgctcagacaaaatatgtaaatatgtgctcagagtaaaatatgtcttcctcaaatgcaataaaaagaaataatgttttttaagacctaaaacatgggaaccattagggaaagggggatatactttataattaagcctattttgttaatctcatgattgctacagtaccacctaagggataagataacttatagacttataattatgaaggagcaatatatactatacttaactggagtgaaaacattaatttttttacaagatacatttgagattactataataccaaaataaaactttgcctattttttaatatagggaactctttaat

SEQ ID NO: 13174 - DNA, 476 bp, Homo sapiens
  misc_feature (1)...(476): n = A,T,C or G
cggcccggaatgtagacatctgaaatgatgatcatcagacagngcggnggaattctgtagttgcaaggagtatctttactaatgcaccaccacactttcatattatgaattaattaagtggaaattaacagaaatatccattcgtttgctgtactatttctatgtaatatttgggatgatctataaacactggcatactacttgtgttaaaagatactgattcctaagtatttatttgagcattaatgaatttgcaacattggcaagtgatttgggattctaaaattgcgaatgttcatttattcatatcattgaatacacgttgaacacatccacattgtataggatgtggtaattagcttgtaaccagggtatgagctgctattgatatttctcctctttattggaaaaaggcctcagatttaattattttcttgccacaagaaatcacacatttggttacaaaaaacaaaaat

SEQ ID NO: 13175 - DNA, 441 bp, Homo sapiens
  misc_feature (1)...(441): n = A,T,C or G
attgagatcgatgacccttagnccgngtggtggaattccaatggagtatttttggccatacagaaatttaaaaaaaattatgtagtcaaatcgatcaatctttcagtcttcccaattttgagttgtagttagcaaaccctttcctacatcaaggttagagaattcaccttttttcccccttctagtggtagtatggcttcattgctttatttagatccctgattcgtttggagtttattttggtttatggtatgaggttttccaaatgaggttttccagtggctagccaattattttaacattgtattaatccattttcatgctgctatgaagacatccccttgactgggtaatttataaagaaaagttgtttaattgactcacagttcagcatggctggggaggcctcaggaaacttaacagtcatggcagaagaggaag

SEQ ID NO: 13176 - DNA, 491 bp, Homo sapiens
  misc_feature (1)...(491): n = A,T,C or G
ggacgtnnccgggggggnnnnnattgagaccctgtgcgtgcggtggaattcattataagagctcaaaaaatgtagccattatttttattattatcatcatcccaacaactccccttaccactgttattcctagagagtagcctctttgctatgagtgttcattgccctgggattagtcagtgtgttttatagagtggatggaaagattaagttaattcagtggttggtgttttgttggagagcatacttggtaaaatgcatagtcttggagtgaatttactcattatgtgtttaataatgttccaggggcacatagtaggtgctcattaaacacataatgagtacattcactttaagactatgcattttaccaagcctatgtgctaggcttggagaatccaacagtaactggacatagttctgccctcaggagcgtttattgtgtaaggacttcctgcagataaacagtgaacttcctgttgcaggaggct

SEQ ID NO: 13177 - DNA, 476 bp, Homo sapiens
  misc_feature (1)...(476): n = A,T,C or G
atttgagaccctaggacangcgttttgagtccttttcctgggccctgaggaggtgagctggaggaaccaatagtcaggatgccctgtaattgatgttgctctgttttgtgctcacaaaacagccatgtaacacatgagcacctgagttgaagccatccagtcgcaagtcagcagacagcagttgatggaattctcagtagaaattcagtaagggtgcccaaattttattttttttttcacctatactctaccaatatatggtatttaggaaaactttttttatccaagctcaaagaaaagcacacacatttttataatcatctgcttcatcagggtaaataaataatttaacaaatttgatcagcatctttagtttaccagtactttaatattagttttcttacaaattaatgcattttgcaatatttccagaaaatcactgtgggagaataatgtaatatactttaggattattn

SEQ ID NO: 13178 - DNA, 493 bp, Homo sapiens
  misc_feature (1)...(493): n = A,T,C or G
agcccgcccgggcncaatagatnatcgtgatgcgtgtgcgaggaaccttaatttatgatgggtgtggtggctcatgcctgtagtcccagcactgtgggaggctgaggcaggaggatcatctgaggccaagagttcaagatcagcctgggcaacatagtgataccctatctcttaaaaaagaagaagtttttaaatttgaaataataataggtactggatttatgcaaatgtcttttctgcgtcttttgagatgagtatcaggtttttttttttccttttatcatctgaggatgaacttaatgtttccatttgtattaagggaatactaagtccctctgtgatttctgaaccaagctattcctaggcctgagttttattttgttgacacagaaataaattataaggccaagcgtgggggcatgtgcctgtagtcctagttgctgaggtaagaggattgcttgagcccaggagttcaaggctgcagcaagctttg

SEQ ID NO: 13179 - DNA, 504 bp, Homo sapiens
  misc_feature (1)...(504): n = A,T,C or G
aggaatgtcccnnccaggggggttacttaaatcngtcagcacctcgcagngngcngnaannnnaaagnnatttgacatccctatggctattgccaaggctactaaaaaagaaagctttatttgtatgcaacactaaccttttgactgctaatggatgtttctgcttgctgtgccttgttatggctgctttttttgtgctaataaagtatgtttggtgttctccttgtatatctgctgttttatacatttgcaacaatttctcttgtaaatggaatggtttggggtttttaaataagcattaactaacaacctttctatagttaatgcagagttaatgaacagtctaatattgacttatcagaataagctaactctaaatttaatgctctacatcttatcagtcataattatatatactgtggaacagtatctgtagttactgcaaattactgtacagtttaggttataacagaaaactgacagagaagtaataaacctattgan

SEQ ID NO: 13180 - DNA, 454 bp, Homo sapiens
  misc_feature (1)...(454): n = A,T,C or G
ngggggtnnntttgtagaccctnattcgtcgtccactatccgtgtggtggaattcggggaattcatgtggaggtcagagtggaagcaggtgtgagagggtccagcagaaggaaacatggctgccaaagtgtttgagtccattggcaagtttggcctggccttagctgttgcaggaggcgtggtgaactctgccttatataatgtggatgctgggcacagagctgtcatctttgaccgattccgtggagtgcaggacattgtggtaggggaagggactcattttctcatcccgtgggtacagaaaccaattatctttgactgccgttctcgaccacgtaatgtgccagtcatcactggtagcaaagatttacagaatgtcaacatcacactgcgcatcctcttccggcctgtcgccagccagcttcctcgcatcttcaccagcatcggagaggac

SEQ ID NO: 13181 - DNA, 483 bp, Homo sapiens
  misc_feature (1)...(483): n = A,T,C or G
tggcgggagnnnnnnnaatcgtagacattagncattgacgggcaattcggaggngtgaatatgggttcccatcaaaaatggaaggttggcgaaattgagtttgaagggcttatgaggactctggacaacttggggtatagaacaggctatgcttacaggcatcctctcattcgagagaagcctaggcacaagagtgatgtggaaatcccagcaactgtgactgctttttcctttgaagacgatacagtgccactctctcctctcaaatacatggcacagaggcaacagcgtgaaaaaacaagatggctgaactcaccaaatacttacatgaaagtgaatgtgcctgaggagtctcggaacggagaaaccagtccccgaaccaaaatcacgtggatgaaagcagaagactcatctaaagttagtggtggaacacctatcanaattgaagatccaaatcagtttgttcctttaaacacaaacccg

SEQ ID NO: 13182 - DNA, 447 bp, Homo sapiens
  misc_feature (1)...(447): n = A,T,C or G
ncctggatgacatctggncttgacggccatttncagagaccggagaggccagagggcaggacggctctgggcggaggggcccccagaagagaggtgtccgagtcctcaggccaagcactgcagagctagtccctgcgaggagcccctcagaaacactggcttaccagcacctacccgtcaggatctttgtggctctgtttgactatgaccccgtgtcaatgtcgcccaatcctgatgctggagaagaagagcttcccttccgagagggtcagatcctgaaggtgactgattcgccatcagggctcagaattccaaacaccagctgggtcttccctcctccctcctttcctccactggaggtagcacagaatcatggtggagaacatggcttctagagcagatgacatgggtttggacctgactctgctgcttctagctgtgtaacct

SEQ ID NO: 13183 - DNA, 494 bp, Homo sapiens
  misc_feature (1)...(494): n = A,T,C or G
gggcggcncccgggncnctnnnaatcgagaccattggaagtgcggtggaattcacattgtgcatgtgtaacttcagagaagtccaaaaaaattaaaagcaaatgaaattgtctcctttgataaaagtgtacacatgaaagagaaagaatgcccctcaaagtctgcctttccagatgtcctgtgtagctgaattacagaccctgtaacagattttctatactggaggatgagtttgcttgtcacaaaagcatcttccagggtattccttatctacaaatattcgtaaaaggaggcctggaccttcagaatcagaagatgagtaggtataattttgtgttatctcctgtatataagtatcagtcaaaacaaactctccaagaactttatcttggaaaggttacatcagtctgagttttgttccattggatggccctttttttttttaatttttttaaagagatggggtcttgccatgttgcccaggctagtctcaa

SEQ ID NO: 13184 - DNA, 497 bp, Homo sapiens
  misc_feature (1)...(497): n = A,T,C or G
gggcgnncnaagggcggggnnnngattgtatcccaatcgtagaccctaggccangtggtggaattccacttttgcaccattggaaagttgaaacatcctaaggcaaactgaaccatcataagtcagagactgtctgtattttcatcaccccaaaaagaggtcctatgcccattaagcagatactcctatttccctttctctcagcccctggcaaccactaatgtactttctgtttctatggattagcctattctggacattttatataaatggaatcattcaatatgtgtttttttgcgtctggcttctttcacttagcatgatttctaggtttggactgggatttttagctaagggttgcacagaatctgttaggatcacgctgctgaaagacctgcataggttagctgcactctaacttataatgtgcctgtggtgaccaaagctccacttacccagagtcttgaattataaaagcattaaaactctgtgtgacg

SEQ ID NO: 13185 - DNA, 443 bp, Homo sapiens
  misc_feature (1)...(443): n = A,T,C or G
attgacgttctattagcccagtgcggnggaattccccagagaaaagccacattgccatcatggtactgctttgtgacatcagtttcttgtctatgtgactgttttcccactggtgctctgagagcaagactcttagagaggctgtgaggactcatcctgaggtcgggagttcgagaccaacctggccaacatagtgaaaccccatttctactaaaaatacaaaaattagctggccatgatggcacacgcctataatcccagctacttggggtgagggtgcagggctgaggcaggcgaatcgcttgaacctgggaggcggaggttgcagtgagccgagattgctccattgcatgccagcctgggcaaccgagtgagacaccgtctcaacaacatcaacaagaagactcagctctgctgtttgtaacattaaaaacaaccccaga

SEQ ID NO: 13186 - DNA, 488 bp, Homo sapiens
  misc_feature (1)...(488): n = A,T,C or G
ggcgccccattgaaaccctaactgataccctacgccanngcgnggaattccactgcagggattatattatcttcacagtaaaggaaaaatgcacagagatataaagggagctaacattctattaacggataatggtcatgtgaaattggctgattttggagtatctgcacagataacagctacaattgccaaacggaagtctttcattggcacaccatattggatggctccagaagttgcagctgttgagaggaaggggggttacaatcaactctgtgatctctgggcagtgggaatcactgccatagaacttgcagagcttcagcctcctatgtttgacttacacccaatgagagcattatttctaatgacaaaaagcaattttcagcctcctaaactaaaggataaaatgaaatggtcaaatagttttcatcactttgtgaaaatggcacttaccaaaaatccgaaaaaaagacctactgctgaaa

SEQ ID NO: 13187 - DNA, 502 bp, Homo sapiens
  misc_feature (1)...(502): n = A,T,C or G
ggggtggccacgccgaggggnaactgaaacccnactgcantgngcaggaancncgcacacacatatatatataaaatatgaggacttgtagtatactcatttaatagaattatttttctctataaaactgttgaaaaggccagacatggtggcttacacctgtaatctcaaaactttgggaggccgaggcgagtggatcacctgaggtcaggagttcgagaccagcctggccaacatggcaaaaccccatctttactaaacatacaaaaaattagccaggcgtggtggcgggcacctgtaatccctgctacttgggaggctgaggcaggagaatcgcttgaacccaggaggcagagcttgcagtgagctgagatcgagccactgcgctccagcctgggtgacaagagcgaaactctgtctcaaaaaaaaaaaaaaaaaaaggtgaaaaagccttcagggactattttctttgttgtataccaccctttttaatgaacccaaa

SEQ ID NO: 13188 - DNA, 451 bp, Homo sapiens
  misc_feature (1)...(451): n = A,T,C or G
ggggtttnnnttcgtcgaccctagttcgtgtgctggaattcggctctggaggtgggcagcaatctgtcaatcaccttgttaaagaggctattataatggttttagagtcaactggagaaagtacatttaagatgattttggatttattaaagtccctttggaagtcttctaccattactgtagaccaaatgaaaagaggttatgagagaatttacaatgaaattccggacattaatctggatgtcccacattcatactctgtgctggagcggtttgtagaagaatgttttcaggctggaataatttccaaacaactcagagatctttgtccttcaaggggcagaaagcgttttgtaagcgaaggagatggaggtcgtcttaaaccagagagctactgaatataagaactcttgcagtcttagatgttataaaaatatatatctgaattgtn

SEQ ID NO: 13189 - DNA, 400 bp, Homo sapiens
acccgagtagctgggattacaggtgcccgccaccacacctggctaatttttgtatttttattagagatggggtttcaccatgttggccaagctggtctcgaactcctgacctctggtgatccgcctgcctttgcctcccaaagtgctggaattacaggcatgagccactgtgcctggtcagaagggtgattcttgatgagtaaaacgatgattaggtttttcttagatggacaagggagggatggcgtttaaaagagctgacaatttcagaagcacagttagctcaaaaagcagagcagcacgaggccgtttaccataggaacaaataaccttacacatctttgtaagccttttcagtacagttcaataacttttccagaaaagggtaaaaaactccttt

SEQ ID NO: 13190 - DNA, 555 bp, Homo sapiens
  misc_feature (1)...(555): n = A,T,C or G
attcgaataccantccgagtggcgcaattccagtatcattaaaatggttaagtttacatttgaactgaaaatatgtataaaatctagcaattcacaaaaatgccctataaatatagattttaatcaccattacataatgacaaaccttgttaaatgcttccacttccagtggcaaatgccactagggaaagtaagttgcactcatgtaagtatcaaactatataaaaggaggccttgtgcatttcaagtttgcaaagtacctgtgtacttaaaatatgtgtggagacctactgtacagtagttttgcccctttaattggggcacattcatcttaaatcttatagtatttatccacccaaaccccagactgagatactgctcccaggggcctaggtagctgccagtccgtgattttaattgctgtcttgaagttaacaagtgttataatgaaataatctacctgatgctaaataaaggctttagaatggtaaaaaannnnnnnnnnnnnnnnnnnnnnnnnnnnnnnnnnnnnnnaaaacaaaacaaaaaggcgct

SEQ ID NO: 13191 - DNA, 462 bp, Homo sapiens
  misc_feature (1)...(462): n = A,T,C or G
catcgcgatccctagtccagtgtgcgtggaattcgcaaaaagtgcagctattgattaatgcaatgtagtgtcaattagatgtacattcctgaggtcttttatctgttgtagctttgtctttttctttttcttttcattacatcaggtatattgccctgtaaattgtggtagtggtaccaggaataaaaaattaaggaatttttaacttttcaatatttgtgtagttcagtttttctacattttagtacagaaactttaacaaaatgcagtttcgaaggtgtttccttgtgagttaacaagtaaagaagatcattgttaattactattttgtatgaattttgctaaagttaactgtaaagaaacacctgctgacttgcagtttaaggggaatctattctccccatttccaaaccatgatatgaatgggcgctgacatgtggagagaatagataatttgtgtgn

SEQ ID NO: 13192 - DNA, 501 bp, Homo sapiens
  misc_feature (1)...(501): n = A,T,C or G
ggcggannagaaaacctgataccttgcagttggaggacctacctgaccaagtgtagaaatacgtagtagatttccccagtatgcacctgtgaaatacgatgtgtaggatctgcaaatgggcactcccacctgcaacttcacattgacttccccttctctatgaaatgttccatgtgttcaagcttttcctccctccttaggtcaagctttagccacctctggggtctttggtgaccttagagcaagggagtgcccacttgtcattatcagggctcaacatgaatggttgaagaggcagttaataaaaatagcaaaagaaagaaaaagaaatgagaaggcattgcatagggacctgttgaagagggccacctgcccagcctgcctcctggccactcttgtgctctctgacttgtctctctgacttgtctgcccagactgagctttccccaggtgtgaagccaggaatggtgtggtttctaggttaatacctggggcagagtg

SEQ ID NO: 13193 - DNA, 441 bp, Homo sapiens
  misc_feature (1)...(441): n = A,T,C or G
atcgacatcgatgaccctctgtccgngtggtggaattcccaaaaaatctattaggtctgtaatttggactaaggaaagaagtttgtgttagtagattaactcacttatccattgaaaggatgctagtttttgagaattttgactcgacccttctgaatgaggtttaaatatttctggtggtatatcttcacttgctagcttttatcaatttagagtgattaaatgttcatgttgatggtgttaaaagattctagatggcatcctagaatctcagaaatgaggaatgataataacagacaagaagttggggcccatgattcattcaatgttaatggaagctgaccatcatagttccttctaatggagctgcattcaaattgaaatcagtttggaggtttgaattgaaacaaaacagacttaaaattatttttgaacctttga

SEQ ID NO: 13194 - DNA, 464 bp, Homo sapiens
  misc_feature (1)...(464): n = A,T,C or G
gttcgaagacattagtccagngcggnggtagttcttcttcccacctgtggctttttcctgagctttgtcccctgccttgaaagctcagccaaatcctgtcttgagaaatagcctggtgtgacctctgtgaagtctctctgaccactcagcctggtgtttctctccctgctgaatcctttaagctcctaacctcattcttcctagatgagctaaataaacttccttcttgctactatcttttcatgcatataattttcccccaactacaccatgaactcattgaggacaaagaccagatgtcatgatttttatacattcaacatggtctaggacagttctctctgcctaaggacattcaataaatacttactgaatgaagtgattaatttcttccttttcattatgttgtactctttctatgaaatatcgcaaccaaagcttattcctttctaggtttacgtaca

SEQ ID NO: 13195 - DNA, 482 bp, Homo sapiens
  misc_feature (1)...(482): n = A,T,C or G
ggtggaattgagaccatggnaattgcagaccctagncagngcggggaactcgccaaaagaacgtgttctatggggagaaacaaactctttgaagccagttatgtcatgccttgcacaaaagtgatgaaatctagaaaagattgtgggtcacccctgtttattcttgaacagagggcaaagagggcactgggcacttctcacaaactttctagtgaacaaaaggtgcctattcttttttaaaaaaataaaataaaacataaatattactcttccatattccttctgcctatatttagtaattaatttattttatgataaagttctaatgaaatgtaaattgtttcagcaaaattctgcttttttttcatccctttgtgtaaacctgttaataatgagcccatcactaatatccagtgtaaagtttaacacggtttgacagtaaataaatgtgaattttttcaagtaaaaaaaaaaaaaaaaaa

SEQ ID NO: 13196 - DNA, 475 bp, Homo sapiens
  misc_feature (1)...(475): n = A,T,C or G
gggagaatgataccttcgcaactgaggccataggagaannccggcgcctgcaactaaacgtggccgggtctgcaagctaagtgccagcggggaaagtttccctgcttcttatcgtctgctttaacgccttaaatagcccgctgaaggctgcagcaggtgctaggtagcagcctcccggccctcgggaaaggcggggtggggaggcgagagcagcttagcctcctcgacctcccttcctggtgacggacgaacagttcccgtagaatttcgcttcaccgagtgaccttgagcccagggcgacggtcagcttgttaattcctggctgcaggaactttgtgagaattttaatgcatggaaaagctgtccatgttccaactgctgtacatccaaaagtctcagtgtaatagcaggaccaaaatattctgtcaatcagctgaccatatacttaatgactcctaaaatctcgtggacttcn

SEQ ID NO: 13197 - DNA, 457 bp, Homo sapiens
  misc_feature (1)...(457): n = A,T,C or G
aactgatacctttgnanntactgatgtccctagtaagngcggnggaattcggaaactgccaagttgttttccaaaatggctgtaccatttttatttctcaccagtattttgtgggagctccagtcctacatctttttgagcacttggttttgttacactttaagtttttcaatttaacagatgtgtagaggtgtctcattgtggatttaaatttcattgctgaaatgactactggtattgagcattttttcatatgttcattgttcatatatctttagttatctttccaaatctttttttttttttttttgaaacggagtttcttttttgttgcccaggctggagggcaagggggaaatttaagttaaccacaacctccgtttcccaggttaaagcagttttcctgcctcaccctcccaaggagctgggattacaggcccccaccacaacgcccatt

SEQ ID NO: 13198 - DNA, 418 bp, Homo sapiens
cgggttcacgccattctcctgcctcagcctcccgagtagctggaactacaggtgcctgccaccacgcccggctaattttttgtatttttagtagagacggggtttcaccgtgttagccaggatggtctcgatctcctgacctcgtgatctgcctgcctcagcctcccaaagtgctggaattacaggcgtgagccaccacgcctggcccccaatcaagtttcatgacccaaagtgttccttctaactgtcccccatttggggcaacttctctcactccaaactcttggcaaccactgatttgttcttctttcctgtagatttgccttttccagggtagcgtgtaaatgggttaccatatgtagctttttgagcctagcttcttaaatttagcataatgaatttgagaatcttccatgtt

SEQ ID NO: 13199 - DNA, 459 bp, Homo sapiens
  misc_feature (1)...(459): n = A,T,C or G
ggggaggtnnnnttgggaggncccnnnattgtagatccctaatccatgtggtggaattcctgcaagccccagggctaagtgcatgaaaggtgggaattcaggcatctgggccaggcttctaggggagaagctgtaaaagggggcaagggtcttctgcgccatcaccagcattagccaacagtccagatgctagctgcagcctggccctgccctgccttccttcctctgtccaacattttctcagtagccctggagatggaaagggaagctcctcccccacagagaaggagctcagagttagaaataaacaaaaacatcccagaggcatggaaaggtctcctgcccctcgggctggggggccctgggccagggactttatctccatggcatccatcccttggacctgtaccaccgaatactctggaggacacagaggcatggcaatggtggggcacctgt

SEQ ID NO: 13200 - DNA, 482 bp, Homo sapiens
  misc_feature (1)...(482): n = A,T,C or G
gggggggncatcgagaccattgactgagaccatagtacangcggtggaattcgggccctggccacaagctgtcactgctctttcgtttcagtgagtggagctgatctgttttcaccgtttgttggagattcagaaaaagtgttgtctcagatatttcgacaagcaagagcaagcactccagcaattttgtttttggatgaaattgattcaatcttgggagctcgctcagccagcaagacaggatgtgatgttcaagaacgagttctttctgttctcctgaatgaattagatggtgttggacttaagacaatagagagaagaggaagtaaatcaagtcaacagggtaaatacaaggagctgaaaaaatgaagagagtttcaagaagtttttaaccgaagtgtcatgattattgcagcaacaaatagacctgatgtgttagatactgctttgttacgacctggaagattagataagatcatcta

SEQ ID NO: 13201 - DNA, 453 bp, Homo sapiens
  misc_feature (1)...(453): n = A,T,C or G
ttaacctgagtacctagnatgtagcggcgaatntatgggaatcaggcaaggatcaagactcagacagtcgcttctgctgctctttgtagaaaaggtttcctctagaactgaattcctctggaattgagtgatggacttcacaacaactagccaggaagggtgacaagtaccttctgcctcctccattcttcctgggtgcagaactgtagaagaccctgaggactcctgggctagtgtgagcagctattctgcatgggtgcagatggctggatgtgaaagagacatgctctagctgcagaggcaaatttgaagtgccacggaacgttgtcaagaggtagtgagattgttgctgtgagcaaggctctgggagagtcacctcaggctcaggattctgaaccattgagatcagaaaccagatacttagccttctactgtagctacggaaccagattc

SEQ ID NO: 13202 - DNA, 495 bp, Homo sapiens
  misc_feature (1)...(495): n = A,T,C or G
gggcgttnnncggggngnttttnaactgagaccattgtacagtgcggtggaattccttagacagtgattcctgcaacttgaccttcaggctgggagaggtggagagccatgcctgttctccttccttgctatggaatttgctgacacaatatcttccgcctggtgctgggcatatcctaagaacttacaactttcctgtattatcctgtgtgagcagctgtcaccttattgggggaaaaatgcctgaaaattagggggcacttcaagtagatagcttctatttcctatatttgtcttatatacaagtatttgcttttatcaaaataattccaataaagcattttaaagctgggaaaaacaataccccctcaagaaaaaaaataaaaagaaattaaaaaaaaaaataaananntnnntgnnctctggaaggggttnattctttgaaggatgcngntgaacaccagaggaagaaaaacaatgacctttgggcgcggc

SEQ ID NO: 13203 - DNA, 487 bp, Homo sapiens
  misc_feature (1)...(487): n = A,T,C or G
gagggaaatgagacatgagtcactgtggnggaattcttcttctgttttttgtgatcattcttagctacctgtgccaagtcacagttagactacctcagaatgtagtcaagaattcacccagtgttctttggatgtcccttccctagggggaaaggctggggaatgttgctgggagcattcccagctgcctctccaaagtggtcctaactctgccttggctatggtgcagacattccaaaaagtgttttgtatacagccctgtacatctagttttcttggttctccctggcaagttcgctaccctagcttaggctgacgttctgatgagtctctgcttgctgagctcatcactgtgggatggtgacctgcagagctgcagattggagcaagtggacagaggagggagccagctaagccaaatccgtcactgccacttggctggcaggccttataagagggcggatctgggcccgtttgcaggaggcca

SEQ ID NO: 13204 - DNA, 445 bp, Homo sapiens
aaagatgaccacattgaagacccttggaaagcgcaggaggaatgggagtgaagacccatgatgtctatttttgagttaaagctagaaaagggttcaacataatgtttaattttgtcacactgttttcatagcgttgattccacacttcaaatacttcttaaaattttatacagttgggccagttctagaaagtctgatgtctcaaagggtaaacttactactttcttgtgggacagaaagaccttaaaatattcatattacttaatgaatatgttaaggaccaggctagagtattttctaagctggaaacttagtgtgccttggaaaaggccgcaagttgcttactccgagtagctgtgctagctctgtcagactgtaggatcatgtctgcaacttttagaaatagtgctttatattgcagcagtcttttatatttgactttttt

SEQ ID NO: 13205 - DNA, 465 bp, Homo sapiens
  misc_feature (1)...(465): n = A,T,C or G
cgaaacctgaaaccctggaaannactgaagacactaggacagngcggnggaattcgcagccatcatgtaagccaagatgggtgcatacaagcacttccaggagctatggagaatgaagcagtctgatgtcatgcgctttcttctgagggtccgctgctggcaacaccgccagctctctgctctccacagggctccccgccccacccggactgataaagcgcgccgactgggctacaaggccaagcaaggctacgctatatatatgattcgtgttcgccgcggtggccgaaaacgcccagttcctaagggtgcaacttacggcaagcctgtccatcatggtgctaaccacctaaagttcgctcgaagccttcactccgttgcagaggatcgagctggacaccactgtggggctctgagagccctgaattcttactgggttggcgaacattccacatacaaattgtt

SEQ ID NO: 13206 - DNA, 453 bp, Homo sapiens
  misc_feature (1)...(453): n = A,T,C or G
ggggngtnnntttcgcgatccctagttcgtgtgccggaattcaaatcgtttgtttctaagttgtgtttattcctggagtgacatgccaccccgaatggctcactttcactgaggatgctgtcctctgatttagctgctgcctccagcctctggcttgagaacttactaaaggcacttccttcctgttaaacccctgttaactctccataaatttggtgattctctgctaggcctaagattttgagttaacatctcttgaagccaaactccaccttctgtgctttttgcttgggataatggagtttttctttaaaaacagtgccaagaatgacaagatatttnnaaaaaaaaaggaaggaaaaaaaaaaacccccctttttttaaaaaaaaacccaaacaaatttttaaaaaagtcacccctcccccttttttttcaagttcctggatttcaac

SEQ ID NO: 13207 - DNA, 400 bp, Homo sapiens
gtttcttttaaaaatatgacatagccagtgatgtgtttaattatataactgttcttactgattttattgccccctagcaataagccctttcctttgaatacatgtacaactttggtcatatgagaagcaggtgcgcagagaattccttgaaagatctgaggtttttaacataaagtctgatgtggttttcctctagcattccaaaaggtttttgctttgaaagtgttagcagaagcatgttgatgtgaattatgatttcttcatgtgctactggtagcacactgagtttttatagttgcacatcattcctcattgtgccttgttttatccattttataaatagagtagatatttgatataccactctgataactcatataaaaatatcatcataaaaagc

SEQ ID NO: 13208 - DNA, 492 bp, Homo sapiens
  misc_feature (1)...(492): n = A,T,C or G
ggggtnaactgagaccatgatgacactagnccagngcggnggaattccatggctggtgcctgtaatcccgcactttgggaggcccaggcgggcagatgggtcaggagttcgagatcagcctgatcaacatggtgaaaccccatttctactgaaaatacaaaaattagccaggtgtggtggcaggcacctgtaatcccagttactcgggaggctgaggcaggaggatttcttgaaccgggaggcaaaggttgcagtgagccgagatcgcgccactgcactccagcctaggttacagagtgagactggtctcaaaaaaaaaaaaaaaaattgggaaaaaagaagagggccttatttttttttttggggagggccctactaccctattaattgccatattcggaagcatttttctttgctgtcgttaaacagcaaatgaaaagtcccatttctactttgttcatcttcccaacggagtggagaggaagaggattn

SEQ ID NO: 13209 - DNA, 497 bp, Homo sapiens
  misc_feature (1)...(497): n = A,T,C or G
ntcgattcccttngagttgtgagtacctagtcagagtggaggaattccagcacttcgggaggccagacgggtggatcacgaggtcaggagatcgagaacatcctggctaacatggtgaaaccccatctctactaaaaatacaaaaaattatccgggtgtggtggtgggcgcctgtggtcccagctactcgggaggctgaggcaggagaatggcgagaacccgggaggcagagcttgcagtgagccgagatcgagccactgcactccagcctgggcgacagagcaagactccatctccctgaaaaaaaaaaaataaaaaagataaatcggggccccttcattttaaagggcccttttaaaccccgcggacacccccgacggggcctttttaatgccccccctttttttgtaagaccccccccgggcctttttttgcccgggggggggcccctcccggggttttttttttaaaaaaaggagaaattcccagcgtttggc

SEQ ID NO: 13210 - DNA, 443 bp, Homo sapiens
  misc_feature (1)...(443): n = A,T,C or G
natcgagatcattagcccagngcggnggaattcggttataatgacaattattactccactttgtagcagtaaaaaaaaagcctagagaatatgaaactactcaccttaagagacagtaagcatgcctgtgatttgggttgtttcaacagacctgtgagcttccttcctacagtctttcaaagttggagccacataaatgacacagctccccagtttccaggagcccttgccagtcatggcctaaatggtaacgcataggcacagtccatggtggtcactcacgtactagttaactgcagtcctcactgctaattaactacctaggtccctgtgccataaaactctactgttgctctccagcctcacaaaggtgtttttgccttccagatactctccattgcataatgtgaagttaccagaagcagatgacatccagtacccgg

SEQ ID NO: 13211 - DNA, 457 bp, Homo sapiens
  misc_feature (1)...(457): n = A,T,C or G
agaaaactagaccatacgaaagctgagaaccctcggaaagncngaanctcacaattatgtatttaattctcaaagaaatatgtatctgtttccgtttggtgacacttatacagatgattaaggaaaacagctgatctttggggaagggagctaccaacactttatacacacacacacgtgcacacacacacacacacacacacactatatatatatatattatttacagggaaatttttcagggtttacaaaagagtatgtgattggtagtaagagacacacagaatgtttatgaagaaattgcattttctttttcctttacatttgaacttctttatagtttaaatataacggcttgagatggcacattcctacgattgaagaaggggtcttgagatcccctaaacttgcatacccagttttttggatattggaataaaaaaaagtattatgacan

SEQ ID NO: 13212 - DNA, 466 bp, Homo sapiens
  misc_feature (1)...(466): n = A,T,C or G
gaaaaactgaaaccttcngaannaactgagatccctcggaagngcggnggaattcagctgaagtaatgacagattgttgctgggtcatatcagctttatcccttggtaattatatctggtttgtttcttgactctgtccaatcagagaataaacatcatagtttcttggccactgaattagccaaaacacttaggaagaaatcacttaaatacctctggcttagaaattttttcatgcacactgttggaatgtatgctaattgaacatgcaattggggaagaaaaaatgtagaatgatttttgctatttctagtagaaagaaaatgtctgttttccaaagataatgttatacatcctattttgtaatttttttgaaaaaagttcaatgttcagttttccttagtttttaccttgttttctctataggtcatgatttctgtgaagcaaaaagatgccttttaccatg

SEQ ID NO: 13213 - DNA, 456 bp, Homo sapiens
gaaacctgataccatgcgaaagctggaaaacctcgtgaaaaacgatgacctcagagaatgaatacccttcaggaagccacttcctgattttagtggataatattgttctctgtagcacaaagatttaaagtcctacaatgtctaatcctagttctcagaattgtagaatatgacaaaaataatggtttccccatttgtccactgacttcagggatatttcacaagttatttatttatagaatgaaaactatgtagttaaatctgtcattcagttaaacctgttgtctttcagtttgaaatctttttgttatgtatgttgcaaaagaaaatttagaactattcctttgttcactcaatcacagcattcagagctttatgtttccagtggaaatgtactgttcagtctcaatttcttttaattcaaccattctcagtattagtaacatatacctataa

SEQ ID NO: 13214 - DNA, 465 bp, Homo sapiens
  misc_feature (1)...(465): n = A,T,C or G
gagacganaaaaaaagtaaactgagaccccttttnagngtttgagaaccctgcttgncctcaccataaaaagaattattattagcaaagacagacaaagagaccatggggctgcacagaggacccagaggtgggccacatattgatgggaacttggactgtgatggaggtggttttactacacatcagcgggaaaataagacaccaatttgtacataataccagaacaactggctaacagatgcaaaatataaaactagattccttcctcacatcgtacccaaagatagactccggatatattttttaaaactaaatataaaaagccaaactttaaaacttaaaaaaaatctgcaagcaaatacaaccatgaacttgaagggggtgggtttcttaaataagatgagaaggacatattttataaaggaaaatgttgatgaatttgactaccttgaaattttaaact

SEQ ID NO: 13215 - DNA, 474 bp, Homo sapiens
  misc_feature (1)...(474): n = A,T,C or G
cgggccggggnnngttgaaaccctactgatgatcattataccgtctggnggaattcctgattattctgactgttgggagaggcttgcatggaccagagccccatcagtatgactgaaagtccagcggagccttctgtgtccctgtgcctcccagcagggtgggagtggaggaggcggctgctcccaggtggcatctccctgcccttgggtgcaaagtgctgccctcaccactctcccacctcccttacttccttgaaaaccactctgatgtcacaactgagtgtctgttccgtttcagatacccagggctgctgcccagttctgtaaacgcagcccagctaaagctctgctgtctcaagtgtgcatttatacccaggtgatttggacggagcagctaccatggcgtggacgccttcactgaactccgggctgcagtgcagggagctcagagcagtgctgctaccagtttttaan

SEQ ID NO: 13216 - DNA, 443 bp, Homo sapiens
  misc_feature (1)...(443): n = A,T,C or G
nttcgcgatccctagttcgtgtgccggaattcgccctttagtacgaaaaagtgttgaagtatatgatcccaccactaacgcatggagacaggttgcagatatgaacatgtgcagaagaaatgcaggagtttgtgcagttaatggtctgttatatgttgttggaggggatgatggttcctgtaacttggcgtcagtagaatattataacccaacaaccgataaatggacagttgtgtcatcgtgtatgagcacagggagaagttatgcaggggtcacagttattgataaaccattatgagcctgaaggacattttcagcatatttatacatgagaaacagccttcaacaagtatttgtgaagtgactgagaatctagcacttctccacttgtagctgcactttaagtctcagcagaagatacgatcgtcttgctttataggccc

SEQ ID NO: 13217 - DNA, 456 bp, Homo sapiens
  misc_feature (1)...(456): n = A,T,C or G
cggggggnnatgaattcgatactattagcccangcggtggaattcgccatacccaaccccaggaaggaaggccttggatggaccctcagattgattgacctggtggaccttggggttggtgaatcctaaacagagagaattcgaggttgcctgaaagctgggtgtccttgctccttttcctggagccaatatacccagtttttactcagtttgatttatattctgggcaaggaagctttgcctactttattggcacaatccgttgatctgtcgtttagtgcatatctgctggcttcagccctggcagctgagaaattgttttctatatgtagaaggaaaacctgagcatttgcaggcatctggttaaagcagggtctgtgtgtacaattttaaaacgggtaatatgtcatgctcttagttcatcttcacaacaaaactatgagtaagcggtattag

SEQ ID NO: 13218 - DNA, 486 bp, Homo sapiens
  misc_feature (1)...(486): n = A,T,C or G
gacggtatgagaccatgnanctncgtagaanncgaagcactgagcaaattccagaaaattgaaccaagcaccgtggtgccagctcagacaccctgggacaagcctagggaattccagataacatgtggcccggattcatttgctacagatccctctaaacaaacaaccgtcagcgttagcttcctcttaccggacatcaccgacacatttgaagccttcacattaagtcttctgtcttcactcttgacttctgggcccaattctcccttttacaaagccttgattgaatctggccttggcacagacttttctcctgatgttggatataatggctacacgagggaggcctactttagtgtcggcctccaagggattgtggagaaagacattgagaccgtcagaagcctcatagacagaacgattgatgaagtacttgagaaaggatttgaagatgatcgaattgaggctttacttcataaacatgan

SEQ ID NO: 13219 - DNA, 488 bp, Homo sapiens
  misc_feature (1)...(488): n = A,T,C or G
cgcgccccattgagncccttatatagagtcgtacgaagnngcgnggaanncgcttgaacctgggacacggaggttgcagtgagccgagatcgcgccactgcactccagtctgggcgaccaagtgagactccgtgtctcaaaaataagaacaaaatgtagatgcctacgtaccatctctctacccttggctcctggggagtaagggtcacccagtgacctcctagaaggccagtgacaatggggggtgtcagagtgctcttcagagccaagggagcagtaggaattgggatcttagtctcttagtctgactccaagctgtgagggagagagttgcaggacacttaagcttggtggagaccgacagtgcctccttgcctgtccctgcagcaaaagttcatgacaccaaagccaagctcacaagccgtggtggaacacgggtgaaaagcaagggttctgactataaactgctgggctgcagccctggctct

SEQ ID NO: 13220 - DNA, 512 bp, Homo sapiens
  misc_feature (1)...(512): n = A,T,C or G
agtgccgnnnnnnaggnacctggtggctagnagngncctagntgaccggtagaggccatacananacccantgtgtgccactgagcgtcccactgctgctgggcaactggaggactgcagggggcgccaggtgactctctccttttatatcacagcagctcctgtgctgaccttcaagttacgttttggaactgtaatactaaaggaagaaataaactactaatttgtataatagaaaaaaaaaaaaaacaaacaaaaaaaaaaaacaaaaaaaaatagaaaaaaaaaagaaaaaaatgaaggtacagaagcttgaaaaaaatgaagaacaccacacctgtggtggtctaatagccctgaagagggtgaagttcccnnngggggcggggcgccgtaaggcagcggtcctgtgcccaccaccgaaatagaaaacgccctttttcctggatgacccacctaggtcccgccctcccccccctcttttaatctaggaggaggacaaggccttccct

SEQ ID NO: 13221 - DNA, 491 bp, Homo sapiens
  misc_feature (1)...(491): n = A,T,C or G
agcgactgatacttattgagaccctccgaagngncgcggaanncggcacgtgccaccatgcccggctaatttttgcatttttagtagagacagggtttcaccatgttggccaggctggtctccaactcctgaactcaggtaatgcacccacctcagcctcccaaagtgctgggattacaggcttgagccaccgcacccagctaacttcttttaatctataactaaggtctcaatcctgaagaccttcctctataaatttacttaatctaaatggctccaggtgctggggtgattacccttatcttgtctcctgctaaatcatggaggtttggggaattccttcagacctgatgggacaagagtaccaccatcttaacaagactccaccaccttaaactatcaagtttccatttctcagaactgtccattgccacctgaccaaactgcaaaagtcagccccacctatatcttcaacagagcataacaaccct

SEQ ID NO: 13222 - DNA, 480 bp, Homo sapiens
  misc_feature (1)...(480): n = A,T,C or G
gggggtngcctcgtagacactagatagagtgccgtaattcggtcttctgtatattgcacaacagtcctcaaatacactgatgtatgaaactattcatacatcaagcagcatttttttcactctccttagaattggaactatgcagttaaggcagataaaatgtacagatgtttcatatattacaggttacatatataaatcaaaatttcctatataaaactgatttgggatttggggtggaaatattttgaatattaatttatttttaaagatgcaagataggactttgtgcaatgtatttttgtaaatgcttttcaaaatatctgtctttggtagtgcttctgctgctgccaccaaattgataagatgctattaagaggtttaaataaagagttttaatttttaaaagggagnccnngctnnnnccnttgccccctgtnnanncnctttnccncccaaaacccctgatataaagcccgg

SEQ ID NO: 13223 - DNA, 478 bp, Homo sapiens
  misc_feature (1)...(478): n = A,T,C or G
nggagggcgccngncttttaacgggaagttcanganagtcncgngcgtggaattcctgnaatcccaatactttgggaggccgaggcaggcggatcacaaggtcaggagatcgagaccatcctggctaacacggtgaaggcctgtctctactaaaaatacaaaaaattagccgggcatggtggcgggcgcctgtagtcccagctagttaggaggctgaagcaggagaatggtgtgaacccgggaggcggaggttgcagtgagccgagatcgcgccactgcactccagcctggacgacagagcgagactctgtctcaaaaaacaaaacaaaagtatgcagctgtgcaaggcagtatagaccagtcaggaagagaaattacatgtacacgaaattaaacgaaagcaaccaaaattcaatattaaataagaaaagaattaaacaaaaccatcttagctgagaccaaaccatttcttcacaan

SEQ ID NO: 13224 - DNA, 467 bp, Homo sapiens
  misc_feature (1)...(467): n = A,T,C or G
cggacgctngttttgagacctctggacagtcttgtggaattccttattttccactttttgtagtagttaattattttttgcttttagggccccaaactgatggcttacatgttaatgtaccaaatgacctatgacttagatttgtattatccttcattttagaaagccattgacttgaaatctccaaagataaacttttaggccgtttttaacttgaaagtaaagaacagatttacttttgtaaaggtaacagaatgtagatttttaaaatatattatgaataccaagttatggattatattctatttaaattatttatgtaaagataaatgtatgtctgttttgcactaaaaaatatcttatgcattcaaccatttttatacaatgatagttcagttttatgttgaaataatttttttttttttttgagacagggtctcactctgatgccaggcttgagtccaggg

SEQ ID NO: 13225 - DNA, 455 bp, Homo sapiens
  misc_feature (1)...(455): n = A,T,C or G
agtggcccgnnngnatgnacccagggagcttcgaactgacggcatccgaangaccnaggccgntggntttggtgatttttgtctgattgcaatgtctggacgtggtaagcaaggaggcaaagctcgcgccaaagcgaaatcccgctcttctcgcgctggtctccagttcccggtgggccgagtgcaccgcctgctccgtaaaggcaactacgcagagcgggttggggcaggcgcgccggtgtacctggcggcggtgttagagtacctgaccgccgagatcctggagctggccggcaacgcggctcgcgacaacaagaagactcgcatcatcccgcgccacttgcagctggccatccgcaacgacgaggagctcaacaaactgctaggccgggtgaccattgctcagggcggcgtccttcctaacatccaggccgtgcttctgcctaagaagaccg

SEQ ID NO: 13226 - DNA, 469 bp, Homo sapiens
ggggaaatgaagctacgcaatgagactcggaaggcgggacttgcgggccccggacaagggccgcagagctgcagccttcgatggccagccctctcctagtccggggctgggtcccaccagtgacaaggcggcagccccgcgcacaccaaagagaaggcggctgtggcggcagcggcagccccagccatgctgtgttatgtgacgaggccggacgcggtgctgatggaggtggaggtggaggcgaaagccaacggcgaggactgcctcaaccaggtgtgcaggcgactgggaatcatagaagttgactattttggactgcagtttacgggtagcaaaggtgaaagtttatggctaaacctgagaaaccggatctcccagcagatggatgggctagccccttacaggcttaaacttagagtcaagttcttcgtggagcctcatctcatcttacaggagcagactagcattg

SEQ ID NO: 13227 - DNA, 481 bp, Homo sapiens
  misc_feature (1)...(481): n = A,T,C or G
gggggtgncctcgagaccatagatagagtgccgtaattccaaggacatcaagaagatcttggacagcgtgggtatcgaggcggacgacgaccggctcaacaaggttatcagtgagctgaatggaaaaaacattgaagacgtcattgcccagggtattggcaagcttgccagtgtacctgctggtggggctgtagccgtctctgctgccccaggctctgcagcccctgctgctggttctgcccctgctgcagcagaggagaagaaagatgagaagaaggaggagtctgaagagtcagatgatgacatgggatttggcctttttgattaaattcctgctcccctgcaaataaagcctttttacacatcnnnnnnnannnnnnnnnnnnaaaaaaaaaaaaaaaaaaaaaaaaaaaaaaannnnnnggcgccccctttaatttaaagggcccttataaaccccgtttaacccttttgtttgttc

SEQ ID NO: 13228 - DNA, 496 bp, Homo sapiens
  misc_feature (1)...(496): n = A,T,C or G
tgcccggtcnncgccggaatagatnatccgtctgccgtgngcgaggaacccagcaaagtctcttgtttgtggcaagcactggagtgacggggccagccagtggttcgcctctctggtgagcggctgcaccctccttgtgaaggtcttctctgtggtgcacagcgtcctgcacgtggatgtgtaccagtactcaggggtccaggatgccatcaacataagagacgtcctcatccagcagggctatgccgagctcacggaggagtcctacgagtccaagcaaagccatgaagttctcaagggcctcttttccaagtcagtagaaaacatgacagatggctctgtgccctttcccatgaaagacgacgagaaatatctcatccggattttgttagagagcttttctaccaataaactgggtactccaaactgtaaggcagaacttcacgggccttttaacccttatgaactaaagtgccatagtttgaccagaatatcn

SEQ ID NO: 13229 - DNA, 474 bp, Homo sapiens
  misc_feature (1)...(474): n = A,T,C or G
ggggnaaatgagaccatagccatgtatgggcattctttcagnccaagntgacagtgtttctgctgatataacattgttagaaaccttgggggtctcctatgtatattttgggggttcttgtcattagacaagagggttctctatagagcttttctggataatcccatctccattcctaccttctgcttatggttggctgaaggaattcatgagtcacactcctgatcccttcagcatgactaagaggttgtcctgcaacatgcttgactttctctccacagcatgcttttcttaacagtgaatttcctaattttaacatattttgttggctgggtgcggtggctcatacctgtaatcccagcactttgggaagccaagccaggtggatcacctgaggtcaggagttcaaaaccaccctggccaatatggtgaaaccctgtctctactaaaaatacaaaaaaaaaaaaaaaaaan

SEQ ID NO: 13230 - DNA, 501 bp, Homo sapiens
  misc_feature (1)...(501): n = A,T,C or G
ggggatgtgccaggncngnnccnatttgatgcccctnatcgtagacactagtccagngcggnggaattcccccctcccgggccccattctgaggaccttaaggtgcccccgggagtagtcagaaagtctcgtcgtggccgtaggagaaaatacaaccctacccggaacagcaatagctcccgccaggacattaccttggaacccagccctacagcccgagcagctgtccctctgcctccccgggcccgccctggccgtcctgccaaaaacaagaggaggaaactggccccatagcagccatacctggagctggatctgaccctgattggggagagctgagtgctgagccttgggagcccctgccagccacctgcacctgtggacagtggccaacaggctcagtttacaaacctgtgagctactgttggctgctgccctccttcccagtgaaagagacgttgtgatgatgcgactgaggattatgcaacgtggtccaaccgg

SEQ ID NO: 13231 - DNA, 488 bp, Homo sapiens
  misc_feature (1)...(488): n = A,T,C or G
ggcgatgagactcttcgcaggcgtggaantccagccacagcagctgcgtggaaaatcctgccccaccaccatcctcttgtccccacgcacgacgatcccgggaggcagtgaccagagggttcagtttccaggtcactgcatgagggtgtccttcttgccaggcagagccagtgctgaggctcccctgcagcctccccacgccatggacggtggagtcggaagcataaaagccccaggactgcgccgtgtttaataacatccagactcgaggtcacaagccccagcctcaaggttagaacttaccttaaactggacttcgattcttggtgattgtgaagccttaagcaaattatcgaatccctctatgccccagtttcatcatctgaaaaagcaggatgacaatactcagctcgtagagctttgtaagcgctgaatgaggagcaggtgaagtgctcagtgccattctggacacttgggctgtgtccagg

SEQ ID NO: 13232 - DNA, 493 bp, Homo sapiens
  misc_feature (1)...(493): n = A,T,C or G
agcgcgattggaccaatggagaccctaggccangncgnggaattccatggaaaggaagttggcagtatcatcggaaagaaaggagaatcagttaagaagatgcgcgaggagagtggtgcacgtatcaacatctcagaagggaattgtcctgagagaattatcactttggctggacccactaatgccatcttcaaagcctttgctatgatcattgacaaactggaagaggacataagcagctctatgaccaatagcacagctgccagtagacccccggtcaccctgaggctggtggtccctgctagtcagtgtggctctctcattggaaaaggtggatgcaagatcaaggaaatacgagagagtacaggggctcaggtccaggtggcaggggatatgctacccaactcaactgagcgggccatcactattgctggcattccacaatccatcattgagtgtgtcaaacagatctgcgtggtcatgttggagcccn

SEQ ID NO: 13233 - DNA, 440 bp, Homo sapiens
taaatttgtagaccctagtccttgtggtggaattcgaaaacatctattactagatgtatctcatatgttactgaatgtttactttgccaagtgaattatctggggctgataaaaatcagtgtaaaacccactctcagagcagccttctgacatgcctgaggctgaaccccgaagaggaatctactgaaactggacttgaaagcctttgtcacaatgaaaagcaccttctgtgactgacattcttttgtgatctcctccaaaaaagttatcataattattgaacatttcctctgtagcttattctcaatccaatcagttataatgaaaatagtctgcttgctttttatattcttaagttttcaaaatgattagtgcttccttgagatatcccattaattggacacacaacccagatgaaaaggctgaaacccaagagtata

SEQ ID NO: 13234 - DNA, 481 bp, Homo sapiens
  misc_feature (1)...(481): n = A,T,C or G
ccctagatnatcgatcngcagtgngcaggaancnggagacacaggggcagaattacaaggaacactacaaggcctgttagagaagaaagggtagtatcccgagaatgttttccccacagtgctgataaggagagaccactatcccatctactgctacagctctggagacagagctctcccacctgtcatatagaacacaaggaccaatctgcagagaaagagcatccaaacctgatccagtggacactggggaaaaactcaccacagctgagtgtggaaaaacaaggccaacacacacatctctgcacagatacatctcccataaagaaactaaagtgttaatttacagggcactgttgcagacccacttcagctggaagctacgaacatggacaaggagcctctctaccaccaagggagagagaggaatgtgctcttgtcctggcattgcatccacaggaggggcaggaaattctttgaa

SEQ ID NO: 13235 - DNA, 462 bp, Homo sapiens
  misc_feature (1)...(462): n = A,T,C or G
gggnagggccggnnngnnncctgagaccctttgaagacgttaggaaacgaaggagaaagacacgtttgagagtaccgtacaggtgagcaagttgcaagacctcatccaccgcagcaagatggcccggtgcataggacggtttgtctgcccagtaatcctgttcaagggcaagcacatttgcaggtcggccacactggctggatggggagagctgtatggacgctcaggctacaactattttttctcagggggtgcagatgatgcctgggcagatgtggaggacgtcacggaggaggactgtgctcttcgaagtggtgacacgcatctttttgataaggtcagaggctatgacatcaagctgcttcgatacctgtcagtcaaatacatctgtgacctgatggtggagaacaagaaggtgaagtttggcatgaatgtaacctcctctgagaaggtggacaaagc

SEQ ID NO: 13236 - DNA, 471 bp, Homo sapiens
  misc_feature (1)...(471): n = A,T,C or G
cgggacgctttgnattgtagaccactggacagcccggcggaattcggtggcccccctttcttgacctcctcctccttcaagctcaaacaccacctcccttattcaggaccggcacttcttaatgtttgtggctttctctccagcctctcttaggaggggtaatggtggagttggcatcttgtaactctcctttctcctttcttcccctttctctgcccgcctttcccatcctgctgtagacttcttgattgtcagtctgtgtcacatccagcgattgttttggattctgttccctttctgactgcccaaggggctcagaaccccagcaatcccttcctttcactaccttcttttttgggggtagctggaagggactgaaaatgtgggggcgaaggaggaggcacatcaacatggaggaaacccccccaatcaaaacagatggtgctgaggcaaggacatacccacaccggg

SEQ ID NO: 13237 - DNA, 442 bp, Homo sapiens
  misc_feature (1)...(442): n = A,T,C or G
ntggaggacccttggntttgaagatccttagtccgtgtggtggaattcggctaaatccatgaagtttgtggatggcctgatgatccacagcggagaccctgttaactactacgttgacactgctgtgcgccacgtgttgctcagacagggtgtgctgggcatcaaggtgaagatcatgctgccctgggacccaactggtaagattggccctaagaagcccctgcctgaccacgtgagcattgtggaacccaaagatgagatactgcccaccacccccatctcagaacagaagggtgggaagccagagccgcctgccatgccccagccagtccccacagcataacaggtatgtctgcaagggcaggggcctcttggggcataatagggtccttccgagtctttctgttaatacttgtatcccacattctggtaagcgtttggt

SEQ ID NO: 13238 - DNA, 476 bp, Homo sapiens
  misc_feature (1)...(476): n = A,T,C or G
aggagtnncctgagacactgactgaggccgtaattncaccgagtctgtgggcccacttcccaaatctctggaggatctgcagcttactcataacaagatcacaaagctgggctcttttgaaggattggtaaacctgaccttcatccatctccagcacaatcggctgaaagaggatgctgtttcagctgcttttaaaggtcttaaatcactcgaataccttgacttgagcttcaatcagatagccagactgccttctggtctccctgtctctcttctaactctctacttagacaacaataagatcagcaacatccctgatgagtatttcaagcgttttaatgcattgcagtatctgcgtttatctcacaacgaactggctgatagtggaatacctggaaattctttcaatgtgtcatccctggttgagctggatctgtcctataacaagcttaaaaacataccaactgtcaatgaan

SEQ ID NO: 13239 - DNA, 457 bp, Homo sapiens
  misc_feature (1)...(457): n = A,T,C or G
actgataccttggaagngctaagaacctgcttaacaccgatggntcctacaagtgtttgtgtctgccaggctacgtgccttctgtcatagccaaactactgcactccgttgaataccgccttgaatttagagaaagacagtgacctggagtgaaacagaatctacataacctaagcccatatactctgcactgtgtaaaggaaaagggagaaatgtattatacttgagacattgcacctaccccggaaggctggaaatacggaaacagcatggagttgcaagtcctctgaagacaatgagaggatttaggatgagcccgataggtgtggcagaccaaatggacatttctctaaaaaaccagtatatatagtctgttcatatgtaaaattcaatggaagagaggtggaacagtgctgttattttaaacagaaggttgtattattatgttggtttgttn

SEQ ID NO: 13240 - DNA, 470 bp, Homo sapiens
  misc_feature (1)...(470): n = A,T,C or G
gaaaaaactgaaaaccttcgcaaanaactgagatcctcgtgaagagcggnggaattcggaatcgcttcagcttctggaactacgcacggccgccccttttatcctggagccccttttgttccctgggaattgctgggcttttgaaggcgaccaaggccaggtggtgatccaactgccgggccgagtgcagctgagcgacatcactctgcagcatccaccgcccagcgtggagcacaccggaggagccaacagcgccccccgcgatttcgcggtctttgtgagtgcggacgaggtcaggaggtgggggattttgcctagagagcccaagcagtcttgagaactggtgccgttatctgagtcttcgcttgctcatctataaaatgaagatactactatttgcctctcagagctgctgtaggttatagtcataaccatatccagatattagttattgcttgcaaagcacttac

SEQ ID NO: 13241 - DNA, 476 bp, Homo sapiens
  misc_feature (1)...(476): n = A,T,C or G
aaaaaaaaaagttgatnnccntntnnancctcgagtnccntattnagtgtgctggaattcggcaaagttatcttggactatgggtggtggagattaagtgcagtggatagttttgagatatattttagaagtcttttgttgatggcttggataaggggagagtcgggggtgagggaaaaagagaggagcaagacaagagaggactaaagaattgaagagataatgtgtaaatattttgccaagttatttgtcagtaaagggaagcagagctgtttttaacagcttatttcttatttctgtaattttttcagtggcattttttctctctcctacgccattgcctccaccacctccccattcttggaatcaaatatatttttattctaatctctctctccagattccaacacctttttctcatcccacacttgacagatgcaggaggaaagctagtgtaaaaagtaggctagcatcct

SEQ ID NO: 13242 - DNA, 442 bp, Homo sapiens
  misc_feature (1)...(442): n = A,T,C or G
nttgaggaccctagnntttgaggacccttagtccgtgtggtggaattccacctttatgggttcctggtccatttccttctctaattaccatggcagttattttacacctctactgctgtccttaatcccataccccaccctcatcaggtgaccctgtttccttttttagagaaattgaagctcttagacattggtttccacagtaataattttaaaacttcttacaactacctacaaagcagatgttctatcctatctacagagcagaaaattgaaattctcaagtagcagacccggtattaaagtgcagatctgactttaaagtccatgttcattttacacagcaggctgcctcttaagatagtatttattgagcacacactttgtgtaggttctgattttggtagatgtcatgctttatattaatctttacaacaactat

SEQ ID NO: 13243 - DNA, 480 bp, Homo sapiens
  misc_feature (1)...(480): n = A,T,C or G
agganaatctgatgaccactagaacagngcctgataaccnttcnaccacactncattcttctggagtagaactgtgccttgcaatcctagaggatttagtggtttaagaaggaattgttttctttttaatatatttaactgaattcaagccatacccacatcagcaacagcacctcttctactctccccgggttagaggggtggcaaaaatggcacggactaaaaggagaaatggatattccagcaaagtctctaactgcagcctgtagacaatttgctattaaagattcagtgcacaaaatatagctaacagcttttaaatttttacttttaaccagtctggggatttgcttgcctggtgagtctcatatgccatattatgaatatgaaaataatgaagttaatttcctgttgcctttctgtgtcagccacaatatcaggtctaaccctaatccagggatgccagtaaactgaaggcaa

SEQ ID NO: 13244 - DNA, 432 bp, Homo sapiens
  misc_feature (1)...(432): n = A,T,C or G
gttcagttgtcttctcagagatgccaggaagcctcagatccaggagataatcaactaagagccaggcaccctttgaagtctgataagaaacattttacaacctgctctctctaaagtctgctgagtatttcttaaatgtatttgattgatgtctcgtgcctcccaaaaatatgtaaaaccaagctgtatcccaacctccttgggtacatgttttcaggacctcctgagggctgtgtcatgggctgtggtcactcatatttggctcagaataaatctcttaaaatatttttacagagtttgactttttgtcaacaggaggatgaataggttaataaatggaaaactcttagaacaaggcctggcacatactgagcactgtacaaatgtctgttgctgctactactattattgggggtatggagaggggaggan

SEQ ID NO: 13245 - DNA, 478 bp, Homo sapiens
  misc_feature (1)...(478): n = A,T,C or G
ntttggggttcgaagnnacatcnttcgatgatccatctagaccagcgcggnggaattcctggttctcccaggtgaggcatgccatggttgctgggctgtagttattgaggatcgcttggtgggacctgacgagttggtggcatgggaaggatgtgggtctctagtgccttgccctggcttatctgcaggagaagatggctgctttcacttccccccattgagctctgctccctctgagcctggacttttgtccttttttattttggtctccaagatgaatgctcatctttggagggagccaggtagaagctagggaggggagagacttctctctccaggtttcaccttccagtgtgcataatgtagaagggtctggcgggggtagtgccttacacatgcttgattcccacgctaccccctgccttgggaggtgtgaggaataaattatttttgttaaaaaaaaaaaaaaaaaaaaaat

SEQ ID NO: 13246 - DNA, 467 bp, Homo sapiens
  misc_feature (1)...(467): n = A,T,C or G
gaaacctgagaccttcggaaannactgaaagtcactagtacagngcggtggaattctcctcctgagcctctggtggtctccccctgctcgagcggttccctcggccaataagactttggacatcatgacgaggactccgggtggggacctgaactggtcaccgccctgcacttctagccctcatttaagatttgagggtgaaaccaaagaaaaccccctaagtgagggaatcttttaatatttgtggctttagaggaaagaactaaaggagccatctctctcccctctcctccgttccgagaggaggggtgggtctcagacgtttttcctatggacttatttcttccatgtccaggactttgcacaactttggttttaaaagctgttgaaaaataggaaaacaaagggcattgttcacagatagggccaagtctccccttgcaagggtgcctctgttctgtccctgn

SEQ ID NO: 13247 - DNA, 449 bp, Homo sapiens
  misc_feature (1)...(449): n = A,T,C or G
ggggcccgnnaggaataacccagggggcccgnactgcagtctcgaannacgnnnnncaggaatacttaccagcggcctgcaggctggcctcaagcttagccacctcagtaaggcaatcggctcttccccgctggcgtccggggaagggctcctgggcctcaccccccggcctaatggacacagccacctgctgaagaccccactgggcgggcagaaacgcagctttgcccacctgctgccctcgcccgagcccagcccagaaggcagctatgtgggccagcactcccagggcctcggcggacactacgcggactcctacctgaagcggaagaggattttctaagtggctggcaccacagataactcaagggcctgcaccaaatcgcttttgggttttctgaggttttgttttgtgttttttttaaaccattttctctctttcgggaata

SEQ ID NO: 13248 - DNA, 468 bp, Homo sapiens
  misc_feature (1)...(468): n = A,T,C or G
nnnnggttgtagaccacttggacagtcgcgtggaaatcgtaactcctcagttcgtgtggggaaattcagtactttctgattcagtaattttagagtgagacccaagcatttctgttcttgaagtattctgtgtacttactatgtacagttaggaattagaactgtaattataagcaactttaggagatagccgaatgtgtttcctttcacagagagaggtgaggatgcagtgataccacatcaaacaacctcctgctctgtggaatacagtttaccctcctgaagatgtacagtatagcagccctaataagaaaggaataggagactattagagtagcatagttattaaaggcttaaaaatatatagcattaaaaattcaattttaaaaattattattgagaaaaaaattgatcattatctttcagaccataacaatccagaaataaaaatagggaaatctaaacagc

SEQ ID NO: 13249 - DNA, 490 bp, Homo sapiens
  misc_feature (1)...(490): n = A,T,C or G
ccgcgatgggacctttgagaccctacgcagngncgnggaattcgcgagccggtgtgcggcagcgacgccaacacctacgccaacctgtgccagctgcgcgccgccagccgccgctccgagaggctgcaccggccgccggtcatcgtcctgcagcgcggagcctgcggccaagggcaggaagatcccaacagtttgcgccataaatataactttatcgcggacgtggtggagaagatcgcccctgccgtggttcatatcgaattgtttcgcaagcttccgttttctaaacgagaggtgccggtggctagtgggtctgggtttattgtgtcggaagatggactgatcgtgacaaatgcccacgtggtgaccaacaagcaccgggtcaaagttgagctgaagaacggtgccacttacgaagccaaaatcaaggatgtggatgagaaagcagacatcgcactcatcanaattgaccaccagggcaagctgcctg

SEQ ID NO: 13250 - DNA, 580 bp, Homo sapiens
  misc_feature (1)...(580): n = A,T,C or G
caataggaagcactgctcagagaggngcaattcgttgaacaagctctgtgaaaaaacgtcttggtgaggagccgccatttcatctgtcctcattctctgcgcctttcgcagagcttccagcagcggtatgttgggccagagcatccggaggttcacaacctctgtggtccgtaggagccactatgaggagggccctgggaagaatttgccattttcagtggaaaacaagtggtcgttactagctaagatgtgtttgtactttggatctgcatttgctacacccttccttgtagtaagacaccaactgcttaaaacataaggatgtttcagttcctccatttaacagatatgaagagcattttaagaggtgcagcctctggaagtggatcaaactagaactcatatgccatactagatatgtttgtcaataaacttatgacgtgnnanaaaaaannnaaaaaaaaaaaannnaanaaaaaannnannnnnnnnnttttnnnaaaaannnnnnnnnnnnnnnnnnnnnnnnnnaannnnnnnnnnnaannnnnnnnnnnnnaaaaaaaggcgctcccttcct

SEQ ID NO: 13251 - DNA, 490 bp, Homo sapiens
  misc_feature (1)...(490): n = A,T,C or G
cggcgatcgagaccnatcgagagcgtggaanacatcagacaactcatgtaacatttcggtttcctcatctgtaaaatttgaatgtttttgaggattaagtaatgtaatacatttaagacacttatcctggtggcaagaaatagtaaatgctcgataaatattagctaaaagtatatatgccgatatacatgggttaatacagatactacgatggagtattagataaagttctagctcactgcagccttcaccttccagactcaagcgattcttctgcctcagcctctcaagcagctgggaccacagatgtgtgccaccacacatggctatgttgcccaggcaggtcttaaactcctggactcaagcagtcctctccccttggcctcccaaagtgctgcgattacaggtgtgagccactgttccagccctgaggttcttgatagtctaggtagagaggaaaattaaagaagttatgtggaaaacatacatn

SEQ ID NO: 13252 - DNA, 554 bp, Homo sapiens
  misc_feature (1)...(554): n = A,T,C or G
attcggactacgtagtccgtgtggtggaattcgtccctganaagaataaaaagtatcagtacttccgttaactagctttagtattgggtcatttgtagtttacattctcctttaagttttaagaccttcagtagttaacaaagcagacagagactggccaggcacagtggctcacacctgtaataccagcactttgggaggctgagttgggtggatcacaaggtcaggagattgaaaccatcctggccagcatggtgaaaccccgtctctactaaaaatacaaaaaaaaaaaaaattacccaggcgtgggggcaggcacctgtggtcccagctactcgggaggctggggcaggagaattttttgaccccggaaggccgaggttgcagtgagctgaaatcgcgccactgcactccagcctgggtgacagcgaaactctgtctcaaaaagaaaaaaaaaaaaaaaaggcaaaaccttactttggaaaacctcttttttttttagaaaggttagggcccctataaaaaacccggggaatttgggataatccggaaag

SEQ ID NO: 13253 - DNA, 441 bp, Homo sapiens
  misc_feature (1)...(441): n = A,T,C or G
nttganttcgantgacattagtccatgcggtggaattcgctaatgatgctatagcttctgcttgtctctatattgcctgtagacaagaaggggttcctaggacatttaaagaaatatgtgccgtatcacgaatttctaagaaagaaattggtcggtgttttaaacttattttgaaagcgctagaaaccagtgtggatttgattacaactggggacttcatgtccaggttctgttccaacctttgtcttcctaaacaagtacagatggcagctacacatatagcccgtaaagctgtggaattggacttggttcctgggaggagccccatctctgtggcagcggcagctatttacatggcctcacaggcatcagctgaaaagaggacccaaaaagaaattggagatattgctggtgttgctgatgttacaatcagacagtcct

SEQ ID NO: 13254 - DNA, 453 bp, Homo sapiens
  misc_feature (1)...(453): n = A,T,C or G
gggtgccgnnnagnataaccctaggagcttcgnactgacantctcgaannncgcanaanaaaaaangggctcattgttacttcatttttacctcaggccaacaatgataataccgtttttttctttcaaaggttatatttttaaatatccattttctccatgtcttctttgtgatgcatgtatcctatatatctgcctttaagtatttccaggtagcatgttcagtgacactatttggatttttacctatttattgaggatgtttttaactcatgtagtatttgtcttattacagaattagaacttatttggaaaagcattaagggaatattttaatgcaagttaggtccgaacaattatttgttattaatttagaaatatgtagaaccttagaggaaaatgtatagattttcaactttagaaatggtatggtatttctatgaataacattcn

SEQ ID NO: 13255 - DNA, 457 bp, Homo sapiens
  misc_feature (1)...(457): n = A,T,C or G
attagactgattaacctaggccangncgnggaattcgaaagacaacaggttcatggggcaacttactatcatagcttccccaagtcgatttgtgtacgactgttattttctggttcttctcagaatgttacttgtaaatggtatttgccttgatacagatttcggtggagaagtaattagtttacaaagaagaattctcagcatgtggatgtaagcttaattgagtcctcatggtgttttacaattagcttctctagctgtgggatttcaagaaatatgtgaggtagctgatgacacccaagttgtcttaacataactgtacaccttgcacatgctcttgtttacagatgtggaatgattgctttccacaagcagctgactgatgtaaacactggggattttcttcacgtttaaaagcattaaggaatcaaagtaaaaatttcttgtgtatattctt

SEQ ID NO: 13256 - DNA, 502 bp, Homo sapiens
  misc_feature (1)...(502): n = A,T,C or G
ggaaagagccagggnngnnncnattttgagaccccattgacgagcactaggccagtgcggtggaattcgaagaagaagagaggacgttagtgtcttaagttaatgttaattgatatattagaagtgtttattctgtcgggtgtggtggctcacacctgtgatcccagctactccggaggctgaggcaggagaattgctggaacccaagagacggagattgcagtaagctgagattgtgccactgcactgcagcctgggcaacagagtgagactctgtctcanaaaaaaaaaaaaaaaaaaaaggggggggtttttcccttcccggtttaaaaaaagggtttaaatttttttaaggccctttttttttgtggggaaaaaacttttggttttaaaaaacccaatttttgggaacccaaaaattttttttttgttaaaaaccttggggtaaaaaacccttttttttttttacctttgaacaaagggggggcaaataaaatggggg

SEQ ID NO: 13257 - DNA, 463 bp, Homo sapiens
  misc_feature (1)...(463): n = A,T,C or G
aatttgagaccctatcagngcggggaanttgaattcatgttatactactccgaaggttagtcacttgtcgttacttttctttttcagcgttatcctggctgtgctttattatttttccctgtaaactttcgcatcaagtgcattaggtcccactcccaagctcttggtgtaggtagctttgaatctgttgattaactgggaagaaaaagcatctttatgttgaatcttcccgttcaggaaaatgatatgtcttcaattcatttttttctcccttattagcttttccattggtttcatgggccttttgcactcttcttaaattcatcactaggtttttaaatttttttactccgggaaaagattattggttgtgtatatgaaggctcttggtgtatgtacatttaaaatttttttattttgcctatgctttttccaacctaattgtcatcccacactgtgaggg

SEQ ID NO: 13258 - DNA, 478 bp, Homo sapiens
  misc_feature (1)...(478): n = A,T,C or G
cactgaaatcgatngcatcggccangngcnggaattcgcaacatacgcctggggaagtgtgcaggcccagcggagacagaactgccaagagtctggactcacggtagtcttcagactcgtccaggatctcggacctgatgatctcctcgatcacgtcctccagggtgaccaggcccaggacctcgtagaaggggtcgccttcaccctcgttgttcaccttctgcacgatggccaggtgggacttccctgtggggggaggacactcatggaacagcttgctgggccccccccagtttgattcatctcccctggtataggcccaccaaaaggacacggctaacgttcatgctcctacaacgtgccaggcacagagccacactcttttctaggtttttacttaagactcccagcgtgattatgagaactggccttattttcacacaggttgaaaatgaagcagtgggctcatgcccatctg

SEQ ID NO: 13259 - DNA, 488 bp, Homo sapiens
  misc_feature (1)...(488): n = A,T,C or G
cggattggcccaatcgagancntacgccangncgnggaattcacattttagacattgcaatcaatatttttaaattggctcattcattgtcaagtagtaaatttttgctattttattcccaagattgagtatgaatttcttatgaccataaaacaggaccatatcacaataatattaactcatatgaacaccatcaaaggatcaagttttcaaatgaaggaatttgtaccccacaagtcatgcatttctgctttaatttatttcgtgtaagatgcaggaccctgttcttcatatctgttgttaattttttacctttcaaggtgaagcctcttggctgaggactgctatggtcagaacttcacagcactgagagtggctgtcaggtgagtggggatgctaattactgcacggcctggagtgtgacagggaagctgctgcagcgaccccaaatagtctaattgttccttatattaaatcatgagctcctt

SEQ ID NO: 13260 - DNA, 553 bp, Homo sapiens
  misc_feature (1)...(553): n = A,T,C or G
gttcgggaccgaacactagtccagcgnggnggaattccgcgtggtccttggggagaccccaccctgccttcccggagactcctgctcttcctctgacagtctcatctttggactcatcacctgcctgaccggagtcctgggtgtgggcctgggtgtggagatcagccgccggctccgccactccaacccccgggctgatcccctggtctgtgccactggcctcctgggctctgcacccttcctcttcctgtcccttgcctgcgcccgtggtagcatcgtggccacttatattttcatcttcattggagagaccctcctgtccatgaactgggccatcgtggccgacattctgctgtacgtggtgatccctacccgacgctccaccgccgaggccttccagatcgtgctgtcccacctgctgggtgatgctgggagcccctacctcattggcctgatctctgaccgcctgcgccggaactggcccccctcctttctggtcgagttncgggctctgcagtctcgctcatgctcttggcgttggtggggcactggc

SEQ ID NO: 13261 - DNA, 449 bp, Homo sapiens
  misc_feature (1)...(449): n = A,T,C or G
actgaatttgttagcacangcggnggcattctgcagtacttagaggtatgataccatctctataaaatttttttaaaaagccatacaacatattagtatagctgcatacatatatagacacaatttatgataatggttatctctggggataaaaggaagagaaaaagatttgggatggagtatttcacctgtatctgtagcttatttctacaaatgatgatgatgatgatagtatctgaagtaaaatgtggcaaaatattactctcagttaagtcctgatagttggctacactaggattattttctgtattaatatccaaattattaaatttttcataatctaaagttttaaaatttgtcttctgaagttaaatgcaaaaatgtttaaagaattttttaaaacctggatatttatggcaaccatttcttctaaatgagtaattcagaaa

SEQ ID NO: 13262 - DNA, 453 bp, Homo sapiens
  misc_feature (1)...(453): n = A,T,C or G
atttgcactgatatcatctagaccangcggtggaattctcgggcaagcactttaaccttttaagcccaaccagatgagttgcctgcagttttggaggccttcagagcatttcactagacctctgtctgtgtcggtccagtgtctttagccaagctttgattaaagatgacttccttgtttgctcaagaaattcgcctttctaaaagacatgaagaaatagtatcacaaagattaatgttacttcaacaaatggagaataaattgggtgatcaacacacagaaaaggcatctcaactccaaactgttgagactgcttttaaaaggaaccttagtcttttaaaggatatagaagcagcagaaaagtcactacagaccaggattcacccacttccacggcctgaggtggtttctcttgagactcgttactgggcatcagtagaagaatatattccn

SEQ ID NO: 13263 - DNA, 459 bp, Homo sapiens
  misc_feature (1)...(459): n = A,T,C or G
gaaaactgagaccttaggaagnngctgatgaacgtagaaatcccggggcacctggctcagctccggaaagagaaacgggagctaaaggaattcctactgaaatgcacattcaaggaagtcctggcgagcctggagcagaagctgaaggaaattgacgaggagtgccggggcgaggagagcaggcgcgtggacctggagctcagcatcatggaggtgaaggacaacctgaagaaggctgaggcagggcctgtgacgttaggcaccaccgtggacaccacccacctggagaatcccaaagctgtcacacctgcctctgccccagactgtaccccagtcaactctgcaaccacactcaagaacaggcctctctcggtcgtggtcacaggcaaaggcactgtactccagaaagccaaggaatgggagaagaaaggagcaagttagaaaacaagcttcatctaa

SEQ ID NO: 13264 - DNA, 474 bp, Homo sapiens
  misc_feature (1)...(474): n = A,T,C or G
cactgtattcgtacngcgcttgcaggaanccctggaacattccctcccatccccaccccctagaagcccctcttcctcccttagattcgactcatagtttgaaaccactattaactaccttatgagagccactgtttgtgaagtgctgactatgtgccaggtcccgtgccgtgcaatttttgtgaattatctcgtgtctacagtgcctcacaatttctctgctcaatacctccatgttactgccgaggaaagggaagctcagagagagtaagtaatttgctcgagttaaagagctggccaggacagccaggggcttgcaccccggagccttcatccactacactgtcagctggtatctcaaccagccattacaggctgtaaaaaaattatataagatagtctatggtaatgcagaaaagtgaggttattttgctccctttccctttgaagaaaaaagccctggaaagacatatc

SEQ ID NO: 13265 - DNA, 502 bp, Homo sapiens
  misc_feature (1)...(502): n = A,T,C or G
ngcccagacgcgcggnnnnnnaactgacatcgancatacgacanngcgnggaantcaagnnggagtagtgctttcccttattcaatactctgaaataattggaatttttcattccttgaatatttcatagaactcaccagtaatactattggggcctagaattctctgtgggaagattatttttaaattactgattcagccaggtaccatgactcacacctgtaatcccaacattttgggaggttgaggcaagaggatcacttgaggttaggggttcaagatcagtctgagtaacaaagcaagactccgtctctacaaaaaataaaataaattagtcaggcatggtggcacatgactctagtcctagcttctaaggagactgaggtggaaggatcactcgaacaccaaaagtcaaaactgcagtgagctatgatctcggcactgcactccagcctgggtgacaaagtgaggcgctgtctcaaaaaaaaaaagaaattactgg

SEQ ID NO: 13266 - DNA, 479 bp, Homo sapiens
  misc_feature (1)...(479): n = A,T,C or G
nattgactgcgtncntccgacgngcgngnaanntttagccaatactaattatattggttttaaaaagtctgcataatcactaggtggcattttcccttcatttgtgaaccaagaggggtaaatgatgctacccatacagtgacttctgagttctttaactttgacagaatctccattgtttcattgaatttctcattgtattatatgtctttccaagtgtgcaaactataatatgtagttaatgaaaaatggaaggctgcagattattttgcatgaataattaattgcccattagggctaaggagactgacatgatttttatcgggtctgggtaaatgaaaattttaatggaaaactcattcaccatttactaactttgcgcacatattataaaaggtagaagccaaaacactagcacattgtgctttgcttggcttgaaggatggctttagtaccattacattaaatggacagtgtgg

SEQ ID NO: 13267 - DNA, 469 bp, Homo sapiens
  misc_feature (1)...(469): n = A,T,C or G
nttttgtagacactatccatgtggggaattgatgacactgaaagaaacagaaaaacattaaacacagtgggaatatcacttttgatgagattgtcaacattgctcgacagatgcggcaccgatccttagccagagaactctctggaaccattaaagagatcctggggactgcccagtcagtgggctgtaatgttgatggccgccatcctcatgacatcatcgatgacatcaacagtggtgctgtggaatgcccagccagttaagcacaaaggaaaacatttcaataaaggatcatttgacaactggaaaaaaaaaaaaaaaaaaaaaaaaaaaaaaaaaaaaaaaatataaaaaaaaaannnngggcgccccttaaattaaaggggccctttaaaaccccggaaaaacccccgggggggttttttattgccccccctttttgtggtccccccccccccggttttttttt

SEQ ID NO: 13268 - DNA, 450 bp, Homo sapiens
  misc_feature (1)...(450): n = A,T,C or G
aatcgagttcattaccccangcggnggaattctgaagttcttatgtccttaaggccatgcagaatctggacacttccactctcctcattcccccttacctctaaggttagctactatcatccctctgcttacttctctctggctccaatggttttcctaagggcagctacatatcagacactgccctgaacgcttaggctccatcaataaacaaaacagacgaaaagctctgccctggtggaagttgtgtaatagtgtgtgtttgagggcagggggaggagataataaacacaatcaatgaggaaattatatactgtttacttctcctggcaagaaggtgacaggtgccatggaggaaacggagctgttttttacactggctgttaccctgtagatacatgcatggcttgttgtctccgtccagtctttgctttttaaatgtcagtttct

SEQ ID NO: 13269 - DNA, 465 bp, Homo sapiens
  misc_feature (1)...(465): n = A,T,C or G
tgccgtgnnntttccatagatagcctcaccagagtggaggaattcctcaaagtctgcaactttaagcagctcttgctaatcagtgtctcacactggcgtagaagtttttgtactgtaaagagacctacctcaggttgctggttgctgtgtggtttggtgtgttcccgcaaaccccctttgtgctgtggggctggtagctcaggtgggcgtggtcactgctgtcatcagttgaatggtcagcgttgcatgtcgtgaccaactagacattctgtcgccttagcatgtttgctgaacaccttgtggaagcaaaaatctgaaaatgtgaataaaattattttggattttgtaaaannaaaannnnnntaantnnnaaaaaaaaaaaaaaaaaaaaaaaaaaannnnnnnnnaaaaaacgcccctttttttattagagggcccttataacccccgttattgccttttttt

SEQ ID NO: 13270 - DNA, 469 bp, Homo sapiens
  misc_feature (1)...(469): n = A,T,C or G
attttgagaacactagtcagggcggggaannggtagatcgctcccatgacgaatatgagaatctgtttaatatgattgtagaaatacctcggcggacaaatgctaaaatggagattgccaccaaggagccaatgaatcccattaaacaatatgtaaaggatggaaagctacgctatgtggcgaatatcttcccttacaagggttatatatggaattatggcaccctccctcagacttgggaagatccccatgaaaaagataagagcacgaactgctttggagataatgatcctattgatgtttgcgaaataggctcaaagattctttcttgtggagaagttattcatgtgaagatccttggaattttggctcttattgatgaaggtgaaacagattggaaattaattgctatcaatgcgaatgatcctgaagcctcaaactttcatgatattgatgatgttaagaagtg

SEQ ID NO: 13271 - DNA, 450 bp, Homo sapiens
  misc_feature (1)...(450): n = A,T,C or G
nnttgatggacccttagtgcagggnggtggaattacagtattctgtaaatgatggaaatgacgcacagagtggcaaagaatctttttcaaggacacaagagtagactcagctcctaaactttgatgttctccaccctggaggtaataaagggtagaccctagggtgaggtcgtggcagggagagccctgagaagatgcgtatgggtggggattcatgtgtgttacatatacactccaccccaagagccaggcggcagctgtgttttccttgggaggaggggacaggatgaaacgttcagggctggcagagaggtacttcctcatgggagaaggttcggggcgatgccggccaaaccaatggaaatgccttcaagtcaccctccttaatccagggtgtgtttcaactggtgtgcccagttcctcccctgctccatgccctgccaaacccca

SEQ ID NO: 13272 - DNA, 474 bp, Homo sapiens
  misc_feature (1)...(474): n = A,T,C or G
aatttgagaaccactagtacagngcggnggaanncnnttgantcctctccaaaaaagaggggtcagaataaaaatagaggaaatttacggttgcattcttatgctaaaagaaataatttttcaggcagtatgaaatgatcttagaaactttgaaatgcagaaataaataacactggaggggtaaatatgttgataaatacaagtcaggtgttgggaaattatggtctatggaccaaatcaaggcctttgagctaagaatgattttaacatctttaaaaagctgcttagaaaaataagaatatgcaacagttaccatatatggcctgcaaaacctagaatattggccgggcgtggtggcagacgcctgtagtcccagctgcttgagaggctgaagcagaagaatggcgtgaacctgggaggcggagcttgcagtgagctgagattgcgccactgtactccagcctgggtgacaga

SEQ ID NO: 13273 - DNA, 473 bp, Homo sapiens
  misc_feature (1)...(473): n = A,T,C or G
attgaattcgattgcatacgcagngngcnggaattcttatactataatgacaccaatgcctggttataattgtattttaaacaaatgtttttgcagcctttttatttgtagatgttgtttttgtttttcttttacagtctaacagtatattttctgttttgaagttggtgatatatgcggggcctaacacaaacagtaggaaggttgctgaatatggaggcaacacactgggatatggcagccgtagtgtcttaggaactggttggccgaaagacttggtgaaggtatggtattcagtcataatcgcttcctagaaaagaaaatgaacttgcagtcctcacaggtccaagtactaactgtaatcccagaaaaacatttgccctgggggcttttgttgaggtggagccaccttaccaggcctgtcagctcactccttctattcagaatgaccctcctttcacttgtaggacatn

SEQ ID NO: 13274 - DNA, 457 bp, Homo sapiens
  misc_feature (1)...(457): n = A,T,C or G
cttcgatagcactacgccgcgncgnggaattcgncaggaagaaagtttctggaagagagctctgcctttttctcttgtaagcatgcttgtcacccatggactagtctaccaaagttatttggcagctaattctagatttggatcattgcccaaagttgcacttgctggtctcttgggatttggccttggaaaggtatcatacataggagtatgccagagtaaattccatttttttgaagatcagctccgtggggctggttttggtccacagcataacaggcactgcctccttacctgtgaggaatgcaaaataaagcatggattaagtgagaagggagactctcagccttcagcttcctaaattctgtgtctgtgactttcgaagttttttaaacctctgaatttgtacacatttaaaatttcaagtgtactttaaaataaaatacttctaatggaa

SEQ ID NO: 13275 - DNA, 448 bp, Homo sapiens
  misc_feature (1)...(448): n = A,T,C or G
gtggtgcttcccactgagctctacttagnctntngcananncggcgaantcctttaaatatttgctcagaaaagatgctgactctttcattatgttatgtgaaatatcagtgttgtctataaatatttgagggtatatagaaatgagatgatgtaatgtatttataaatttatccaagtactgtaatccttgaattgttgcgtaactgtgtgtgagttttatgcttcatggtatttttggaaacatttttattgcttgcttattttgaaggtatatttatctgttaacatttagggcatagttaccttataccagcaacaagtctaagcactttacttgtattaatttattttatcttccccaaggccctcagaagcagattattcctgttttacagagaaagatactgagagtggttgaataatttgcccagctgctaactgtgaag

SEQ ID NO: 13276 - DNA, 393 bp, Homo sapiens
gcccacctctgcctcccgaagtgctgggattacaggcatgagctactgtgcccggccagtcttttaatggaattatcagccaatcttaggatcctaggtatttatttgtagtaatttccatttgcaaatacttgacattaattttgttttgttgggaatgagggcattcacatagtatttttaatgctccctataatcttgaaggtaagattttccttaacacatttcagatactcacctaccttacttttggtatcttttcttttaaaaggcactgaaaatgaagtatttcagtaatcggccagggccaacacctggatgtcagctgccaagaccaaactgtccagtggaaaccttaaaggagcaatcaaatccagctttggcaataaaaag

SEQ ID NO: 13277 - DNA, 472 bp, Homo sapiens
tgcggtataaaaagagacctttgtaacgcggggaattaactttcctacacgaagtatgcaggaaactttaaaaaattaataagctgggtgcagtggcttatgcctgtaatcccaacactttgggaggccacggcgggtggatcacctgaggtcaagagttcaagaccagcctgaccagcatggtgaaaccccatctctactaaaaaatacaaaattagccaggcatggtggtgtatacctgcaatcccagctacttgggaggctgaggcaggagaattgcttgaacccaggaggaggaggttgcagtgagccaagatcccgacattgcactccatcctgggcaataagagcaaaactccatctcaaaaaaaaaaatttccttcttgatcactacaagttatttgttttggatgaaaaagaaaaaggctattacgacaggtttattatcaacacaattcataactgatgagtt

SEQ ID NO: 13278 - DNA, 470 bp, Homo sapiens
  misc_feature (1)...(470): n = A,T,C or G
attttgagaccctagtcagngcggnggaantanttgattccctcttcgtgccccctggggagcgctgaagataccccaaggccatgttccacacttggagccacctgtgcctgtgctagaagaatgggacatcatgcccttctataaagaagcaatggtgatggcggaccttctgcacaatgcctgcgttcaccgagcgcccctcgccactgcaagtgttcacatgggatgctgagcgctgtccctgctccaggtgtcatctgtggaccccagagcaccatctaatgccaccgatgcctcccttggttgcaggtcccagcctgccattcatgctgcccgcatacgccactggccaccacccagacacgcagaagtccattcttcctgttccatatctgtcagccccaacatggagctatcttagctntagcccatctttccagcccacagctcccatccagcctgatgca

SEQ ID NO: 13279 - DNA, 334 bp, Homo sapiens
ttgtggagaccagaccagcaggagatagaaccttccagaagtgggcagctgtggtggtgccttctggagaagagcagagatacacatgccatgtacagcatgaggggctgccgaagcccctcaccctgagatgggagccgtcttcccagtccaccgtccccatcgtgggcattgttgctggcctggctgtcctagcagttgtggtcatcggagctgtggtcgctgctgtgatgtgtacgaggaagagttcacgtggaaaaggagggagctactctcaggctgcgtgcagcgacagtgcccagggctctgatgtgtctctcacagcttgaaaagc

SEQ ID NO: 13280 - DNA, 460 bp, Homo sapiens
  misc_feature (1)...(460): n = A,T,C or G
cactgagaccctaggacagngcggnggaattccggaactgaggaggaaggatgagaagagactgcaatgcagcaggcaccctctgcagagtgaggccgcccgtccatcactgccagccctgggctgctcaggaggggacgtgaaccactcaaaggaatgtcttaaagaggatctggagtttcccccatgcaaattagggaagaattaggcaagaaaagacatacattacagggaaatccttctgaacaaaatggctgtcttcacctactcttcttgcaagaaaagacatacattacagggaaatccttctgaacaaaatggctatcttcacctactcttcagcaaaaaccgtctccagactttttagtgtcaaaaatgtaaccaactgtctcctgattttttccaatgtgtttggcaagtgctgtggccctgttgtaggtacttctcctgactctagagg

SEQ ID NO: 13281 - DNA, 452 bp, Homo sapiens
  misc_feature (1)...(452): n = A,T,C or G
cctcgttagcgtaccctacgcggggcanccattaacaaagcctgtggtatggggtaaagccatgtaagaagagaatagtctcagtctcatatgaagaggaaaatttgcagctgccactgctttccttgtggacctgccaaccagctcttccaggacgaactcagtccagcatggttttgatgtaaccatccatgcttttatttttgttaagtcttttgtgactgggacagttaattttagtagctgaagaacgtctagttgtttgcttgatatttgtgaacatttactgcatggatcacaaaacaatataccctgtatttcttacacgccacttatatgcagcaaggagtaaatgtgttactagattcgggtagtgcattttgtcactgaatctgaccttgagaatgtacattaattcttatattttacataatggatgtggcgtttaagaa

SEQ ID NO: 13282 - DNA, 449 bp, Homo sapiens
  misc_feature (1)...(449): n = A,T,C or G
ncctgatgacccttagtccagtgcggtggaattcgtggcaaataatttgggggtgatttgcaatgaaattttgggacccacagagtatccactggggatgttttttggccaaaactcttccttttggaaccacatgaaagtcttgatgctgctgccatgatccctttgagaggtggctcaaaagctacagggaactccaggtcctttattactgccttcttttcaaaagcacaactctcctctaaccctcccctcccccttcccttctggtcgggtcatagagctaccgtattttctaggacaagagttctcagtcactgtgcaatatgccccctgggtcccaggagggtctggaggaaaactggctatcacaacctcctgatgccctggtgggcttatggaaccatctctcctgctctccttgggatgatggctggctagtcagcctt

SEQ ID NO: 13283 - DNA, 458 bp, Homo sapiens
  misc_feature (1)...(458): n = A,T,C or G
attggactgcagaacactaggccagngncgnggaattctgtccagacgcctcccagatccccagcccacgccagacacagcctgtcctccagtcccaggtggagaacctgctccacagaacctactgtaggtggaagagcaagagtccctccccagtccatggggcaggcccctcggtcatggagatcccatgggatgatcttatcgccttgtgtatcaaccacaagctgagagactggacgcccccccggcttcctgttacatcagaggcgctgagtgaagatggtcagatatgtgtgtatttttttaaaaacgatttgaaaaaatatgatgttcctttgtcgtgggaacaagccaggttgcagacgcagaaggagctacagctgagagagggacgtttggcaataaagccttttcatccttctgcaaacaattttaccataccattgcttcacatg

SEQ ID NO: 13284 - DNA, 439 bp, Homo sapiens
  misc_feature (1)...(439): n = A,T,C or G
antttataccactccttttttcttggtgggcttacagatgtttaaaaaggggcacaggttactgaattgtctacctgccagcattctgatatagcacaaaaagctattttcctttattttttgaattattttttatttttctggcattgagctctaggggggatgagggtttatggtcctctgatcataagctccattctaaaaactggtcactgttagctgaaattgctttggttccccaaatgccttggaactccagacgcacccgcagggcctgaggtaggcttcatagagttctaggacttccgggtgcgttgccaccagatcctgcccagcaatggcctttcccttctaagggcattagattcagccaaaagcgacctcttctctagtccggtgttacgaacagaagttctgagttgtgctacaaaagtagttn

SEQ ID NO: 13285 - DNA, 462 bp, Homo sapiens
  misc_feature (1)...(462): n = A,T,C or G
nganaataggnnctcgaagaccctaattgatgtccttaataacttcggccttacttccatacacagtccctctacaccctaagcccagcgggcccgcctcccccctccttctcggcaggtgacggcggaatcccgctgtaagctgctcagctggctgatcccggagcaccgccaattcagcctctccttcaagtcgctgtgcctgacggtgaacactctggaccgcttcctcaccaccacgccggtggctgcagactgcttccagctgcttggggtcacctgcttgctcatcgcttgcaaacaggtggaggcgcacccgccgcgcgtgaagcagctactggccctctgctgcggcgccttctcccggcagcagctctgcaacctcgagtgcatcgtgctgcacaagctgtacttcaccctgggtgcgcccaccattagcttcttcctggagcatttcacgca

SEQ ID NO: 13286 - DNA, 457 bp, Homo sapiens
  misc_feature (1)...(457): n = A,T,C or G
aatagactgcgtaacctacgccanngcgnggaattcgtcagcttctgcagctctcccgggctagcatggcagcgcggaagagttggacggccctgcggctctgcgccacagttgttgtacttgatatggtcgtctgtaaaggatttgtacaagatttagatgaatcgtttaaagaaaatcgaaatgatgacatttggcttgtacatttttatgcgccatggtgtggccattgtaaaaagctggaaccaatttggaatgaagctggtcttgagatgaaaagcattggttctccagttaaggctggaaagatggatgctacttcctattctagcattgcttcagagtttggagttcgaggttatccaacaattaagctggctctaattcggccacttccaagtcaacaaatgtttgaacatatgcacaagagacaccgcgtatttttcgtttatgtaag

SEQ ID NO: 13287 - DNA, 471 bp, Homo sapiens
  misc_feature (1)...(471): n = A,T,C or G
gtgcggtnaanccaatgaaacctccggctagnangctncgcacangcggnggaattcgngctgtttcagatgagaccatctagatgcagaaaaacaagctcaggactcccactgactacattaggatacttgctgctacattgcttctccctctctgtgtggacatacctgcctttgctgcaaagtgctggaagctggcctctttggagccacagaccaaaagatggagtcccgctctgtcacccaggctggagtgaagtggcacaatctcagctcactgcaacctccgcctcctgggttcaggccattcttctgcctcagcctcccatgtagctgggtttacaggcacacaccactatgtccagctgatcttttgatttttaatagagacagggttttgccatgttggctaggctggtcttgaactcctgacctcaagtgatccacccacctcggcttcccaaaatgctg

SEQ ID NO: 13288 - DNA, 477 bp, Homo sapiens
  misc_feature (1)...(477): n = A,T,C or G
gantgntnnnnnaggtnnnnnnntttgtagacactagtcagtgtgctggaattccgggctgaagccaacagagtcccaaccagtgggcgtatcccaagatgaagaattttggaatacatacgagggtctgcaagaacagctcagcaggaatactcataaagagactgagcctgtgtatgagaggggtaaggagcttcatgataattttcttctcctgggagctgtgataatagtttattcacccaaaatgtcatgggcattttttgaataccctgctctgtggatttgtaaaaccagccttgatagcaactatgatgtccttccaggcagcagtagaaatgccaactgtggatgaaagtgggagtaggcctagagaacagaaatatctaaaccacagaactcttggtaataacagtgtgaactctgttccttagactagtggagaggaaggaaagaaatggagtgggaaggcttggg

SEQ ID NO: 13289 - DNA, 420 bp, Homo sapiens
ctgcatgctactgtctagagcttgtctcaatggatctagaacttcatcgccctctgatcgccgatcacctctgagacccaccttgctcataaacaaaatgcccatgttggtcctctgccctggacctgtgacattctggactatttctgtgtttatttgtggccgagtgtaacaaccatataataaatcacctcttccgctgttttagctgaagaattagtaagaaaaaaaaagggaagaaacgaaaagataaacaagcagacaaacataaattatttaaccttttcttccaaaaaaagaactgggccccgcactgtaataagaaccctaaataaccccgtattacttccactgggggtcttttttgggccgccgctttttgtgaccccgccccccccccttgtcttattattagtgagg

SEQ ID NO: 13290 - DNA, 445 bp, Homo sapiens
  misc_feature (1)...(445): n = A,T,C or G
ntttgagggaccactagtctagtgtggcggaattcgggaaagttgcccattgtaaatgaagatgatgagcttgtggccatcattgcccggacagacctgaagaagaatcgggactacccactagcctccaaagatgccaagaaacagctgctgtgtggggcagccattggcactcatgaggatgacaagtataggctggacttgctcgcccaggctggtgtggatgtagtggttttggactcttcccagggaaattccatcttccagatcaatatgatcaagtacatcaaagacaaataccctaatctccaagtcattggaggcaatgtggtcactgctgcccaggccaagaacctcattgatgcaggtgtggatgccctgcgggtgggcatgggaagtggctccatctgcattacgcaggaagtgctggcctgtgggcggcccn

SEQ ID NO: 13291 - DNA, 399 bp, Homo sapiens
cttaaacaactccttcaccagtgtccagatgacacacaggaggtcagaagcctctcctactttaaaataacatcacccatttgccagtgttctccctggtggaagggaaagaatgaggtggggcaagaggagacctgcattctcattacttatggaatgaagtattaggagcattagtaaatgatgcattttccttcaaacctgatatgtctttcaggaggcagttatgcactacttagaagaattttggggttcagatgcctctgttcaatttgttcaattggctgttcatttaacacaatttttttttttttttaaagacagagtcttgctctatctcccaggctggagggcattgttatgatctcagttcaccacagcctccacctcccgggttca

SEQ ID NO: 13292 - DNA, 475 bp, Homo sapiens
  misc_feature (1)...(475): n = A,T,C or G
catcgacgccctattgtagacnttagtcagngcggtggaattccacagcaatttctttaacccagtacattatgtccagttatcaagaaaaaattacgaggcatactaaaaggaaaaacacagtttgaagagacagtacaagcatcagaaccaaattcaagatatggtagagatgttggtattagaccactaatttaaaataactatgattaatttactaagagctttaacacataaagtagatagcatgaaaagaccaataggtaatgtaagcagagagatagataatttaataaggtaccaaaaaagatggtagagatcaaaagcactgtagcagaaatgaagaatgcctttgatggtcttagtagactggacacagctgaaggaaaaaatctctgaacatgaagccatctcaatagaaactgccaaaactgagaaacagaanaaagactganaaaaaagattacctacccag

SEQ ID NO: 13293 - DNA, 486 bp, Homo sapiens
  misc_feature (1)...(486): n = A,T,C or G
gattgaggacccctggccagngcggattgattaccgttccctnggacgaggagcgctggggcctggaggcaaacctcttaagccagttcccggagggcttgcgggtgctggccttggggcagggctcggcgccttccccgcagttacctttccgggggctctggtgcctggtggagtggctgacgctgctgcagcctataaagctgctaaggctggcgctgggcttggtggtgtcccaggagttggtggcttaagagtgtctgcaggtgcggtggttcctcagcctggagccggagtgaagcctgggaaagtgccgggtgtggggctgccaggtgtatacccaggtggcgtgctcccaggagctcggttccccggtgtgggggtgctccctggagttcccactggagcaggagttaagcccaaggctccaggtgtaggtggagcttttgctggaatcccaggagttggaccctttgggggaccgca

SEQ ID NO: 13294 - DNA, 469 bp, Homo sapiens
  misc_feature (1)...(469): n = A,T,C or G
attgtagacattaggaanattgatgacccttagtccatgcggtggaattcagttcctcccgcctcagcctcatgagtggctgggaccgcaggcgcatgctaccatgcctggcaaacttttttgattttttgtggagacaggagggtctccctgtgttgcccaggctggtctgtaatgcctaggctcaagggatcctctgccttggcttcttaacctgctgggattacaagcatgagacaccattcctggcctagaagcctatttttaaagaaactacaatctcccatggggactgtttccctgcctcttttgtgcagtcccatggaacttgcctacagcaagaggcctaagattgaatctttttggggaaaagtcattctaggatgaaaatcctatgttaaggccgggcgcagtggctcacgcctgtaatcccagtactttgggaggccgaggcaggtggatcacctga

SEQ ID NO: 13295 - DNA, 473 bp, Homo sapiens
catgagacctatcgtagaccctagtccatgcggtggaattcgaacaggagacagaacaggacagagacagctgcccgggaggatgggagaacagaaagagggaggaaacgccgagcactgacctgggggaggggagtaaagagaagtgaagggggattggaagggaactggagaatgagagaagcaacaggcggggtgcgtgtaggagggcgggagagccaatgacaagacagaaaaggcagagaaagcaaagcaagaccagactcctcatccggtaacactgtgtcaggtcattgccctcccaccccgcccccaaccccataactgaaaacaagtaggaacctggataaaatagtcttaacaattttttttttgagacggagtcttgctgtgttgcccaggctggagtgcagtggcgcgatctcggctcactgcaggctccgcctcccgggtttaagcggttctcctgccta

SEQ ID NO: 13296 - DNA, 445 bp, Homo sapiens
  misc_feature (1)...(445): n = A,T,C or G
ntcgtcgaccctagttcagtgtggtggaattcgttcaatatcaaagctgaaaactagcgaggtctgctgtactgcttattgaagtattgtgattattttaggcattgattcttacaaaatatatactgtaacagtatactttgtacagatttaaattttatttgaaaaaatgaaataaagtaggcaaaaaaataaagatgtttatttttcatgtgactgtataatcaaaaaaaaaaaaaaaaaaaaaaaaaaaaaaaggggggccctttaatttaaaggggccctttaaaacccggtaaaaacccctgggggggttttttaagggccaccctttttttttttgccccccccccgggtttttttttgcctgggggggggccccccccctttgttttttttaaaaaaaaggaaaaattgcctccctttggtgggggggggggttttt

SEQ ID NO: 13297 - DNA, 472 bp, Homo sapiens
ctcgagaccaattgacgagcggtggaattccgcggcgagagaagccatgagcagcagagtctctcgcgacaccctgtacgaggcggtgcgggaagtctctgcacgggaaccagcgcacgcgccgtaagttcctggagacagaggagttgcagatcagcttgaagaactatgatccccagaaggacaagcgcttctcgggcaccgtcaggcttaagtccactccccgccctaagttctctgtgtgtgtcctgggggaccagcagcactgtgacgaggctaaagccgtggatatcccccatatggacatcgaggcgctgaaagaactcaacaagaataagaaactggtctagaagctggccaagaagtatgatgcgtttttggcctcagagtctctgatcaagcacattccacgaatcctctgcccagggttaaataaggcaggaaaagtccattcactgctcacacacgacga

SEQ ID NO: 13298 - DNA, 453 bp, Homo sapiens
  misc_feature (1)...(453): n = A,T,C or G
natcgagatcgttanncagtgcggnggaattcttctagacttgacttttactaataagaaaaactgagtttttaaagttagtaaagtaactagaaactacaagaacaccaagaaaaagaggcagtgtcatgcagattgcgtatcccttatccattaaggtgctaacataagaattaggcgtgctggggattcattcattcattcaacaaatgtttactgaatgcttactatacgcatgcctattttaggttctgggtatatgacagcgaataacatagacaaaaatccatgctctgttggaccttgcattctagttgggggacggggataataaacagctatattaataaaatatgtaatagttcaaatggtgatatgaactatgaaggacaatgtcaggagttcgagaccagcctggccaccatggtgaaacccccatctctactaaaaaaa

SEQ ID NO: 13299 - DNA, 480 bp, Homo sapiens
  misc_feature (1)...(480): n = A,T,C or G
aatcgaagatctattagnnccagngttgtaggaccctctagtccgtgcggtggaattcccatcaccgaagcgggagcggccaaaatgaagtttaatccctttgtgacttccgaccgaagcaagaatcgcagaaggcatttcaatgcaccttcccacattcgaaggaagattatgtcttcccctctttccaaagagctgagacagaagtacaacgtgcgatccatgcccatccgaaaggatgatgaagttcaggttgtacgtggacactataaaggtcagcaaattggcaaagtagtccaggtttacaggaagaaatatgttatctacattgaacgggtgcagcgggaaaaggctaatggcacaactgtccacgtaggcattcaccccagcaaggtggttatcactaggctaaaactggacaaagaccgcaaaaagatcctcgaacggaaagccaaatctcgccaagtaggaaaggagaag

SEQ ID NO: 13300 - DNA, 464 bp, Homo sapiens
  misc_feature (1)...(464): n = A,T,C or G
atcgagaccatagtccangtggaggacttcctgaacagcagcatagccaaaatgggaacggagctcttctgacttcaagcccctgcacttttttcttaaccacattaattttatgaatatctatgtggtcaaagtctcttttgtaaaatctgagtataagctgaactagatcatgtctctgtaagctaagatggcagaaacacattgtcatgttagtttggaggagcaaacagatataagtatgtgttgtaatgttatagtgagctgttatgtatcccccagcaatgtccaaagtgatcagagctactagatgacttattacaatgttcagatcccactccttcattcctcctctctcagggacctgtctacccccaagctttagaactgagctctctccaacttagaactcattagagtttgttgcattagtgattggatctcctcatgaaagttttttgacn

SEQ ID NO: 13301 - DNA, 478 bp, Homo sapiens
  misc_feature (1)...(478): n = A,T,C or G
aattcgaaaaaacannctcgatgtaccntatggaagtgcggnggaattcgaaagcagccgggatgtccccagagcaggtactgcagcccctggagggcgacctctgctatgcagacctgaccctgcagctggccggaacctccccgcgaaaggctaccacgaagctttcctctgcccaggttgaccaggtggaagtggaatatgtcaccatggcttccttgccgaaggaggacatttcctatgcatctctgaccttgggtgctgaggatcaggaaccgacctactgcaacatgggccacctcagtagccacctccccggcaggggccctgaggagcccacggaatacagcaccatcagcaggccttagcctgcactccaggctccttcttggaccccaggctgtgagcacactcctgcctcatcgaccgtctgccccctgctcccctcatcaggaccaacccggggactggtgcctct

SEQ ID NO: 13302 - DNA, 473 bp, Homo sapiens
  misc_feature (1)...(473): n = A,T,C or G
cattgacgaccttagtnnnaattgatgattattagtcagtgcggtggaattcggcatggctagctcgtgtgccgtgcaggtgaagctggagctggggcaccgcgcccaggtgaggaaaaaacccaccgtggagggcttcacccacgactggatggtgttcgtacgcggtccggagcacagtaacatacagcactttgtggagaaagtcgtcttccacttgcacgaaagctttcctaggccaaaaagagtgtgcaaagatccaccttacaaagtagaagaatctgggtatgctggtttcattttgccaattgaagtttattttaaaaacaaggaagaacctaggaaagtccgctttgattatgacttattcctgcatcttgaaggccatccaccagtgaatcacctccgctgtgaaaagctaactttcaacaaccccacagaggactttaggagaaagttgctgaaggcaggag

SEQ ID NO: 13303 - DNA, 548 bp, Homo sapiens
  misc_feature (1)...(548): n = A,T,C or G
accgcgcccaaacgtcttgacaaattaaagataagtgccatacttcttaaattggggaatacacaagaaaaanaaaaaaattcgaaaccactcgacaacacttnggaaanngcaaaantcattntttgccacaaaattacttaaaaacaggccagaactttatatagctcttgttaaaggttaagtagctgggataataatgaaacaaaaagatgcagcaggactccatttcaaagagagagagtctgtgtgcccaacttcagagtaagaaaccactaggtaatagtttatatagttacttatatgtaatgtggctttattttttaaataaagatttgcatataattgtttatatctgtgaatttatatttaatattaaacacagttttgtaagcatataagatggaaaatgaatgaaatgctcaatcaatgagctgtatgccatgaggattcaaaacagcactttggtgttgccaaaattccggtggtggacttgtgaaggaattccctttggactaggtccactgtagattgtatccgggactatc

SEQ ID NO: 13304 - DNA, 464 bp, Homo sapiens
  misc_feature (1)...(464): n = A,T,C or G
gcagcnctccccctgatacctgaggacagtgcggnggaattcagaacgtcctgtgtctccatgtaagagagtggctctctcagatctctcagggcgtttggttatagggaaacaagtggagcagggacgtggctttaattggagcactcggctgggctgcttggggagactcttccgagcgttcttcctctggatagaaccaccacctcctgggcgtcactgacaagctccatcttaacctccaaagccacagaactaggggctcagagccagagctggcagccgccagccaaaatgatgccattgcctgagctgacagccaagcccttctgtgggtcacctttctcctcacccagccccttgctcttcccttttgaaaggcccgtgtgttttctttccttaccctgtgcttgctcatgtctactccggttttctctaccacatccttagagccatcacctggg

SEQ ID NO: 13305 - DNA, 473 bp, Homo sapiens
  misc_feature (1)...(473): n = A,T,C or G
ggtggccnnnnnaggggnnaaatgagactttgcctgaggccgtagncaggcttgccacttgggaccctgactatgaagggtcaagatagcccattctgccccagcactcagagccctattaccaaggcccctactccaagaatccaccatcaaaaccggggccctgccagtgccttcccagtgttcaggcctagggaagaatagccccattatgcctgttactcctgatccttctgcagtctctctctttgtgaccccatggcctttgctgctatgtctgccctggccccacagagtgccaggtcagagccaccctggcctacatagcagggccccggttcacaggctaaaacctgggcctcctgccaggctgcaactcccagctgcacaccgcaacctgagacatctcagcatattctaggaactagtaatggggacgcttccgactcgctggggaagggagatgagggccn

SEQ ID NO: 13306 - DNA, 497 bp, Homo sapiens
  misc_feature (1)...(497): n = A,T,C or G
aaggctncnnnttaagttgacgtcgtcangacggcaanncacagactcttcataagtcctttgagttttgtatgttgttgacagtttgcagatatatattttataaatcagtgtacttgacagtgttatctgtcacttatttaaaaaaaaaacacaaaaggaatgctccacatttgacgtgtagtgctataaaacacagaatatttcattgtcttcattaggtgaaatcgcaaaaaatatttctttagaaacataagcagaatcttaaagtatattttcatataacataatttgatattctgtattactttcactgttaaattctcagagtattatttggaacggcatgaaaaattaaaatttcgatcatgttttagagacagcggagagtaaatctgtggctaattctgttggtcgtttgtattataaatgtaaaatagtattccagctattgtgcaatatgtaaatagtgtaaataaacacaagtaataaatgaa

SEQ ID NO: 13307 - DNA, 471 bp, Homo sapiens
  misc_feature (1)...(471): n = A,T,C or G
cttcgaccccctnggnnnnattgatgacccttagnccgtgcggtggaattcgatgactctgctgaggaaggagaggatgacagagacagcgccaatggcgaggatgactcttaagcacatagtggggtttagaaatcttatcccattatttctttacctaggcgcttgtctaagatcaaatttttcaccagatcctctcccctagtatcttcagcacatgctcactgttctccccatccttgtccttcccatgttcattaattcatattgccccgcgcctagtcccattttcacttcctttgacgctcctagtagttttgttaagtcttaccctgtaatttttgcttttaattttgatacctctttatgacttaacaataaaaaggatgtatggtttttatcaacaaaaaaaaaaaaaaaaaaaaaaaaaaaaaaaaaaaaaaaaaaaaggggcccctttttttttagggg

SEQ ID NO: 13308 - DNA, 560 bp, Homo sapiens
  misc_feature (1)...(560): n = A,T,C or G
ttccgatcccctccnnnnnnnaattcgtgaaggagggttgctgtgtgtgacctgcacagacatggcggtgttggcggcgaacagcgttgagacgtgctacagcaagtacggggccatggccctcaagagccgggcctgccacgagatggccctgagaatcgtcctgcacagcctggacctccgcgccaactgctaccagcgcttcgtggtgccgctgctcagcatcagcgctgacttctacgtgcgtgtttttgtccgtgtcttcaccggccaggccaaggtcaaggcctcagccaggtcagcccgggggcagagagcggtggtggattgagagaggagacaggaccttgccctgggggatctggggcttcttaagggacagagccagtctaagggaggagttggggtgtcgtggtcacgctgggaactcgtggccactggtaccccccacagcaagcaggcgctggtgttccagtgtgtgggctgcggagccttccaccttcagcgtctctgcaaaagcgtcaagagtccccagcggccggtgagccnagaagatggaa

SEQ ID NO: 13309 - DNA, 451 bp, Homo sapiens
  misc_feature (1)...(451): n = A,T,C or G
catagagaccactggacnagcctgtggaattcccgccatcgtggtgtgttcttgactccgctgctcgccatgtcttctcacaagactttcaggattaagcgattcctggccaagaaacaaaagcaaaatcgtcccattccccagtggattcggatgaaaactggaaataaaatcaggtacaactccaaaaggagacattggagaagaaccaagctgggtctataaggaattgcacatgagatggcacacatatttatgctgtctgaaggtcacgatcatgttaccatatcaagctgaaaatgtcaccactatctggagatttcgacgtgttttcctctctgaatctgttatgaacacgttggttggctggattcagtaataaatatgtaaggcctttctttttaaaaaaaaaaaaaaaaaaaaaaaaaaaaaaaaagggggccgttcaatt

SEQ ID NO: 13310 - DNA, 456 bp, Homo sapiens
gcggttaattcgtagacactagtccattcgagggcattcgagaggtaggactggattaaatgaccactgaactcactgaatccagatcattcatatcatcaacaaaagctctagggggaggtcacgttgtgaatgcttaaaacatattattttcttcaacaaccatatcgctaaactaatatatccagagattttgcacaattcgtgttgaaccttccaaaacaaaaataaagacctgtccaaaagttttgacaaaaatactgattgctcccaaataaagtgcttctaagctttgtgtagacagagtttaactgatttgtaaaaatagcctaagcatgttgagaatgaagtaaaagttttcccatgtgctgtctaatgtactctgtgtaactctgaagacacatcatcttctaggattgcagcaatctatgaataacattttttctctcatttatg

SEQ ID NO: 13311 - DNA, 406 bp, Homo sapiens
agaggttgcagtgagctgagattgcaccactgcactccagcctgggtgacagagtgagactccgtctcaaaaaataaaaaaaaagaatagagtatgaggcttgttggcttgttaccatgcccatcctgtccacagccttagtctttgagaaaagatggctgaaagagaggaactctccaagtcattccgcaaacaaatgcccatttaaacatcatccttgtcttgtgaagaaaacaggaagaatgtcatgtaccatgtggatcaccttcagttcaaagttgcagcaaagtgaagaaagaaactactggaagccacccagcaatgcactgtttagtcatcaattaggagcccatgggaggataatagggagactgggtggaggctcagtgtgtaataatctcttgtc

SEQ ID NO: 13312 - DNA, 464 bp, Homo sapiens
  misc_feature (1)...(464): n = A,T,C or G
catgagccctntgatcgtaggctngtaaaacggaagagaagggagaggaatgaattgaggaagtgaaagaaggcaaggaggtaggaagagagggaggaggaaaggaaggagagatgcctcaggcttcagaccttacctgggttttcagggcaaacataaatgtaaatacactgatttattctgttactagatcaggttttagggtcctgcaaaaggctagctcggcactacactagggaatttgctcctgttctgtcacttgtcatggtctttcttggtattaaaggccaccatttgcacaaaaaaaaaaaaaaaaaaaaaaaaaaaaaaaaaaaaaaaaaaaaaaaanaagagcccccttttaattaaaagggccccaaaaaaccccggaaaaacccccgggggggtttttttaagcccccccctttggggggcccccccccccccggtctttttttgggggg

SEQ ID NO: 13313 - DNA, 467 bp, Homo sapiens
  misc_feature (1)...(467): n = A,T,C or G
atttgatgacactagaacagngtgaaggacttccggaaacacccctttccccctcccgtcctgtccccatcagtgatgaaatgtatgctatcagttattatgggtgtaatttgttatgccatgttgatcttcttgtgcttttcatatcagaacaatgcatttttaacattctgactttctttttctctcaattggtaactgactatatagcaaaattatatttatggatactatttcttttttaataagttcaagggaaaacattgataaaggaaaatttatcctttcaactttctttaggtgccagcattattttcatattacgaagcaggagaaagttaaggaactctgagcaatactagaatggttatatatatttaagtttgaattaaacctgctggaatggtaaagaaatttactgacatatttaaccatacaaaatagtgttgctaaaagactagtttttg

SEQ ID NO: 13314 - DNA, 469 bp, Homo sapiens
  misc_feature (1)...(469): n = A,T,C or G
tggcgacttttaatcgaaccctttgaagtgcggtggaattccatatcttggaagatgagcaacctttaaatagtgctgcccataaggagtcacctcctactgttgattcaactcaacagcctaaccctttgccgttacgtttacctgaaatggaacccttagtgcctagagtcaaagaagttaaatctgctcaggaaactcctgaaagctctctggctggaagtcctgatactgaatctccagtgttagtgaatgactatgaagcagaatctggtaatataagtcaaaagtctgatgaagaagattttgtaaaagttgaagatttaccactgaaactgacaatatattcagaggcagatctaagaaagaaaatggtagaagaagaacagaaaaaccatttatctggtgaaatatgtgaaatgcagaccgaagaattagctggaaattctgagacactaaaagaacctgn

SEQ ID NO: 13315 - DNA, 451 bp, Homo sapiens
  misc_feature (1)...(451): n = A,T,C or G
agtgggtcncccaactgaaatcccgccaattgggacnagcanaaaccggnggaantnntatntgatttcttatagagtttaaaacctcagttttagtcattttttttctagaaaaacaagtgtattctagcctagattaggataccttttgaacccaaaactgtatctgtcatccacattaaactgagacagtattatttgtttggttgtttttttcccccaaatactgctgctagatcccaagaacaatacttccttacaatctggtagaaaatgaagaaagggcatttgtgaagacatggtctgaattcttaaatgtctcagttcttaatttgtcaaaataatttttggatggaaaaaatgaagtaagaaatttcaaattgattttattattgtgagtttgatgtctagttcaaaaatagagccacatacatttatttcacttaatcat

SEQ ID NO: 13316 - DNA, 489 bp, Homo sapiens
  misc_feature (1)...(489): n = A,T,C or G
gggtccnacacagaacnccaaaagagacccctaattgtagaccctaggccanngcgtggaattcaaaattagccaggcgtggtggtgtgcccctgtaatcccagctactcaggaggctgaagcaggagaatcgcttgaacccgggaggtggaagttgcagcaagccgagattgtgccactgtactccagcctggtgacagagcgagactccctctcaaaaaaacaaaacaaacaaaaaagaagtgtgggcaaccaaatgtaggtaaggatgaagaagaacaggaactctcactggtggctgatgggattgcaaagcgtcagggcagctttgaaaaacttttcagcagtttcttataagcataacttatcatatggcccagccatttcactactagaaattgacccaagtgaactgaaaacttatgttcacacaaaaactcgcacatgactgtttatagcagcttcattcataattaccaaaaactagan

SEQ ID NO: 13317 - DNA, 465 bp, Homo sapiens
  misc_feature (1)...(465): n = A,T,C or G
agcgccctccaatgatnactgagancntagcccagagcggnggaattcggccacaaccatgaggtatcacagagagagaggcagggtctaaaactaaatcctctgcaaacaactttagcagaagcttatctgctggcgacacatgagtgctatgtagaatagtatatgcaagcccatggaaatacgactgcaatgcagcagctggccttcaaggactgtttaagagtatgtgcaaggacaggcgcagtggctcacacctgtaatcccagcactttgggaggccaaggtgggtggatcacaaggtcaggagttcaagaccagcctggtcaagatggtgaaaccccatctctaaaaaaatacaaaaatgagccaggtgcagtggcatgcgcctgtaatcacagctactcaggaggctgaggcaggagaattacttgaacctgggaggcagaggttgcagtaagcccn

SEQ ID NO: 13318 - DNA, 455 bp, Homo sapiens
  misc_feature (1)...(455): n = A,T,C or G
ccccccttcgagaccattanatagagcgccgtaattccaaacaaggtaggaactaacctggaagaaaaacgattaatttgtttttgagttttatgaagatcataataaaacaggctgaccagctgttttctatcttcaaagaacagttaaaagataaatagtcaaaaattataggaaaggcattcagttagatcaggggtcagcacactttttagctccaggtaactgatagaactaagcaatgagatgagagtcagtcagtaggaaaccagggcaggagaggaggaaggcagatcacaggaaacaatggaagaaaaggtgcacaacacacacaggcaaatgcccccacggtgcctccgcggctggcctctccacagcgcagaatctctgctctgaaatgatgacgtagcatggatgatataacattaccaagaaaagcttagactcttcctctn

SEQ ID NO: 13319 - DNA, 406 bp, Homo sapiens
ctgtttttaattttctgggatgttaatggaataactaaaactgtaattattaatttggtcaataagaagtcattcaactaaagaaagcactggaacctaccagtcttagtgaataacataattgcatctagtccccagaagcttctacatcaacctaataatgtatacatgaatcatattcttaattaacatttccataaatatgctgaagggcagctcaaagaaaatggaatacagactgaacaggatatacaggcatcccaatttctactccttcccattcatagcttgctcttttgatgctgcctaatagatatctctatattttacatatatttagggacatatttcatctccactgtactgacccactaagggctttggctcatagataaatacgaggttg

SEQ ID NO: 13320 - DNA, 484 bp, Homo sapiens
  misc_feature (1)...(484): n = A,T,C or G
gggcggnnnnnnnaatcgatgcgtacgtagnngcgngcaattcgtcatttctgcattggagagacttctcatactttctttgaagactcatagaaagctggatctagagcttttgaatccttaattagcacagtagaaattagctttctatgggaatgctttagtgttagcagttgacaattaggcccatattcaatctgaatgggaacaaaagtaaatgcaatgataatatactgctagttagagaaacatgttagttgattatacctgaaatggattatttatctcatcagcaagtattatttgaataaaatgagaaatgcttaagaaaaattgttgctctatagtaatttggtttcgaagaatggaatggtaactattttttcccatcgttcttttgagagaaggaagtgtgatgactgatgatcttgacaagcccatttctgattgcacgttgactggaattctttctttgtgtctgtga

SEQ ID NO: 13321 - DNA, 492 bp, Homo sapiens
  misc_feature (1)...(492): n = A,T,C or G
agagggccggnnnnnnnatttgactgcgtccctaggccanngcgnggaattcgcagaaactgaaagcaatcgaacaactgaaagaacaagcagcaactggaaaacagctagaaaaaaatcagttggagaaaattcagaaagaaacagcccttctccaggagctggaagatttggaattgggtatttaaagattcacggaaagcaagttgatgaccagaaatcagtgcaaacacatcttctgttaaacccattggtatacacagaatattcctgtgcccacacttaatgtcaatctataattttaaccatttatccaagattctactaagtgtaaaattatttaataatgtctattaaattgatatttatatcttgcatcctatatcatgtcaatatgtgatatagaaaagagatacgtgaattttttagctaagcttgacagattgaaagacaagtgtcatttttttttgtagagggtgatatataccatgt

SEQ ID NO: 13322 - DNA, 458 bp, Homo sapiens
atgagaccctgatcgtaggctgtaagacctcctccagggcctgccccacagctcgggccctctgtgagatccgtctttggcctcctccagaatggagctggccctctcctggggatgagtaatggtccccctgcttacccgcaaaagacaagtctttacagaatcaaatgcaattttaaatctgagagctcgctttgagtgactgggttttgtgattgcctctgaagcctatgtatgccatggaggcactaacaaactctgaggtttccgaaatcagaagcgaaaaaatcagtgaataaaccatcatcttgccactaccccctcctgaagccacagcagggtttcaggttccaatcacaactgttggcaaggtgacatttccatgcataaatgcgatccacagaaggtcctggtggtatttgtaactttttgcaaggcatttttttatatatatttgt

SEQ ID NO: 13323 - DNA, 414 bp, Homo sapiens
ctgagccttagttgtcttgtctaaaggaaaaaagagggaattgtagaataaaagtatttgttagtggaaattattgacctgaaaccatatcatattgttagtgtaactgaatgtatcagaaattgttcctatgtaggtattctgtgaaactggtttctaaaatgttacaggaaactgtttcctttttttttgtttgtttgtttaagtggaggtgggaggagggtaggaagaggtctgaatattaaaatatgtttatgttcatgtgttcataatacgttcctttttctctctgtgtgtgtataaaagtgccttgctcatgaatgcatttttgctattcacttcgaaaggaagcctttccccagcttggcagctgaataaaccaatagctttgtaaaaaaaaaaaaaaaaaaaaaa

SEQ ID NO: 13324 - DNA, 405 bp, Homo sapiens
aaagaacgcaggctgttctagaccttcaactgcctaaattatacaaaaattcattttaataaactcaattattagctatttattattcaaagacccatatttaaatcctttgctgaccatgttgacatatatcagccttcttctagacaaactgtcaactctcaaccatcttgacagtagaagtgacagtaaaaaatgttgaatgatcagagattatattaaaataaacatgtaattttcaagtatttttgttgtgcttttataatattaattctagatcagatttattttatagccagggtttgtctgttgtagagtcttgaggcgtagcagtcattcatgattaatcactggtagttttgtacccatatatttttagaatagttttaaatgttagatttctca

SEQ ID NO: 13325 - DNA, 460 bp, Homo sapiens
  misc_feature (1)...(460): n = A,T,C or G
catcgagacccctagatcgtgngctgtaattccggctatcttccggtgcagtccttgctggaacggactctctgagaaggggtgtccgagctcatctgtggcaggttctccccctcacccacagctgtccttctgcttgccaaaaaacggggaggctgcaactctccaccagacttctactgcagtgtgttgccttggagtgcacacaaaaacaggatatccttccagagcaccaaacccaggggcagttccaaatactggtttcagggaagcatcctgtagaataataccgacattaaaactttaatgagccgggctcgccagcttacccttcctgtgcagagatgtgtctaggggtggacgctgagatgttctgcttgaggtacatcaaagaggggatgtggggcatggatggacatctctcgtagaaagtcctcacctttgccagccctctgctgtn

SEQ ID NO: 13326 - DNA, 421 bp, Homo sapiens
  misc_feature (1)...(421): n = A,T,C or G
ggccagtgcaggtgggacaacgctgtgatccttgagagaagagagaacacagatgagctgcccttcaccccagtggtgttgctggcatatttcccaaaccctggagcaggaagtggaccctgagcggacggcagtgtacagatagagattgtccttcggggcagccagaggagccgggacttgaggggcaaaatcccaagaagcaagaaacaaagaggaggaccccagcttctgcatacaactgccccccaccccaagcctctaagccccacacacacacacacgcacacacacacacaaccacacatacacatgcacacatgcacacgcacacatgcacatacaaacatacacacacacgcacgcacacacacacaagaatcacttgaacctgggaggtggaggttgcagtgagccgaan

SEQ ID NO: 13327 - DNA, 446 bp, Homo sapiens
  misc_feature (1)...(446): n = A,T,C or G
atagaattcgtttaccttaggccangcggtggaattccggatttggtctctctctaattaaatggatcctgattgtcaggttttcctcctatttccctggatattttgatggtcagtactggctctggtgggtgttccttgttttaagctttctcctgtttctcagaggatttatcaattatgcaaaagttcggaagatgccagaaactttctcaaatctccccaggaccagagttctctttatttattaaagatgttttctggcaaaggccttcctgcatttatgaattctctctcaagaagcaagagaacacctgcaggaagtgaatcaagatgcagaacacagaggaataatcacctgctttaaaaaaataaagtactgttgaaaagatcatttctctctatttgttcctaggtgtaaaattttaatagttaatgcagaattn

SEQ ID NO: 13328 - DNA, 437 bp, Homo sapiens
  misc_feature (1)...(437): n = A,T,C or G
gggttttcccctgagacccttagagatcgtcgaaaacaccctngaggcaatgacacagtttctttgacaaataaatgacaaagaaaaaaccaagggggaacctgtgtattaaaacagtggtcctcagagcgctggcatgaatcaaaagtcactgggagggcttgtcaaaacacagattgctggcttcatcccgtagtttctcattcattagccctgggttagggcccatgaatttgcatttctaaaacgctgctaggtgctcttcctcctgatgatccagaaaccacagaaccatgttattaaagaagtcttggattatgaatcaaatacaatgtatggaccttgtttggattctgttttgaacaagccaattgtaaaaataacaataattcccttgataatagggaaatgtagacatgggatggacttttgataat

SEQ ID NO: 13329 - DNA, 450 bp, Homo sapiens
  misc_feature (1)...(450): n = A,T,C or G
cactgatgacaactgatagacctgcggaanncccttttctggcacgcgtatgtggtcagatgcttcataaacgtgagccaacttgggttgtaaacattggacataatatacaaattggggaattttggatgactgcataatcctgtcattagagatttcataagacagaagataactgtttatttgtaatttaacacatttttagaaaagatgatctttaatttctttccctcagttgtgtatacagctatacaccatactaacaccgtactatgtcataggaacttaaagttagatgtatctaaatcccttcacttttctaagacttctctgtgctcccacccctgaagtcttcaaatcatttttcatctgtgaagtcactgaggtactgggcttgactatagtggtaacagttaaggggagttgaactattgatcttccaagaagaaa

SEQ ID NO: 13330 - DNA, 477 bp, Homo sapiens
  misc_feature (1)...(477): n = A,T,C or G
gggcgcccacgacgcccaattggacctccatagagnctgtaaaaaaacactngctattcaggaatgcatgagatttcaagagagcctacagtatgaaatcattttcacaaaataagcagcttgcttctgaaatgctgtctttcccagtagctactcacctgcctctggtggctgggattcagatgccacaaaactgtcagtatctatagaccaggtctgtgccacctcctctctcctctgtgctcagtgaggaggcagtaaatgaagttacaggctagcacaatacctaactcatgtttcccagtacacctgtagatattactgtacttttatgttctcaagaaataagttgttgcctattcagtgttacagatttctttgtttctttttaattaaaatacaagaagcagctgaggaaagggagacaaggtattttatttctgactgattttagaaaaaacttgtgtacatgtgttn

SEQ ID NO: 13331 - DNA, 455 bp, Homo sapiens
  misc_feature (1)...(455): n = A,T,C or G
ttttnaatcgaaagaccactagtctagagtggcggaattcgattgtactgctggttgtgttaacagagcacattttgttgggtgagtcctatgtgatttttttcatgtttgttttatctgggggttgttcatgaaactgacagatgtttttctaaaaaggactattatcagtttccaaatacaatacttctctcttctggtttttcctgaatgagcctgattttgttgctggttttcatcatctatgagggtaaaacgagtacccttaaaatccctgtggccagtttgaacacccctgttgtattcttttctctgttcagtgtgtcagctattttgtgaagatgcttagatgtatagttttgataaccacagttttaaatcttttatctgtgcataataaaaagatatatatcagttaaaaaaaaaaaaaaaaaaaaaaaggcggccgttcgagt

SEQ ID NO: 13332 - DNA, 450 bp, Homo sapiens
gcggtaattgagacactatccgttcgagggcattcgaaaacaccttaggcctcaacagaggccgaactctggctgacggatggggaaactgaggcctcaaagggaaagcaacttgctcaagttcactcagcaagtgaatagagcaggaatcggcggtctcatctcccccagtccccttttctctccagcaaggaggcttttcaacgagaattctgagacaagaggacaggggagaggccacggggcaactcacagattccaccgaggagtcgggagagggcacagaagcaagaggaacctaatactcttcctcattggccttgctggctccatctttattccttccagctcattctctacatgacactgtgaatgccaaactgtctggaggctgccatgagcggccaatatgagatctctgctttacctgaattatttccgtgaagtgtg

SEQ ID NO: 13333 - DNA, 457 bp, Homo sapiens
  misc_feature (1)...(457): n = A,T,C or G
gcggaaattgagacatttgnaatttgacgacccttagtccagtgcggtggaattcgaaaacaccttaggcctcaacagaggccgaactctggctgacggatggggaaactgaggcctcaaagggaaagcaacttgctcaaggtcactcagcaagtgaatagagcaggaatcgggggtctcatctcccccagtccccttttctctccagcaaggaggcttttcaacgagaattctgagacaagaggacaggggagaggccacggggcagctcacagattccaccgaggagtcgggagagggcacagaagcaagaggaacctaatactcttcctcattggccttcctgtctccatctttattccttccagctcattctctacatgacactgtgaatgccaaactgtctggaggctgccatgagcggccaatttgtgatctctgctttacctgaattatt

SEQ ID NO: 13334 - DNA, 447 bp, Homo sapiens
  misc_feature (1)...(447): n = A,T,C or G
aggcggcncccaatgattacccgactgagaggcgngtacangcggcggaattctttgctgcatacaagggttactggacttagaggtgtgagacagcattgtagccccagctagtaaggtaggttgccttgagtaggtggaactgaccttgatcagagaagagagtggaggtgtattctggaggaaaactacatgaacaaagggatggaagtgaggagagggatctgcagcaggtgtgttgattgcattacagtgggaaataaatgcttagccatcatgagctcctttaccagggagcttggtcagctgtgaggtgttttggcctccatccttgcatctggaacatgaagaaatgaaagttgtgtttaatgagcattagttggaaaggcaaaaaaaaaaagcagaaggattagagtaacaggatgatctgggattccagggccttgg

SEQ ID NO: 13335 - DNA, 441 bp, Homo sapiens
  misc_feature (1)...(441): n = A,T,C or G
ggggttctcaccctgagacccttcagatgncgtcgaaancacacaaaaggatgttaaatggaaaaacgtgaaatctaaagtccggagtctagagtacagttgagagtattgtaccaatattgggttttgttttgagacggtgtcactgtctcctaggctggagtgcagtggtacgatcttggctcactgcaacctccacctggattcaagcgattctcctgcctcagcctcctgagtagctgggattataggcacccgccaccacgcctggctaatttatttttagtagagatggggtttcaccatgttggccaggctggtcttgaacttgacctcaaatgatctgcccacctcagcctcccaaaatgttgggattacaggcatgaaacaccacgcctgaccccaatactggtttcttaactgacgtaccatggtagctta

SEQ ID NO: 13336 - DNA, 471 bp, Homo sapiens
  misc_feature (1)...(471): n = A,T,C or G
aagtncagggngnccccccaactgatgacanactgatagacctgcggaantcactnacagaaaggctatttagttctaatacttttatataactctcctattaccactttgccgctttaaatggttttatttttgtgttccctaaaatatattcagatatttcaggtatgaaaagaagcctctaagatctataaaatgaggctgggcacagtggctcatgcctggaatccagcattttgggaggccgaggcaggtggatcatctgagatcaggagttccagaccagcctgaccaacaaggtgaaaccccatctctactaaaaacaaaaaatagctgggtgtggtggcgcatgcctgtaatcccagctacttgtgaggctgaggtaggagaatcgcttgaaccaggaggtggaggttgcagtgagccaagattgcgctactgcactccagcctgggcagcaagagcgaaact

SEQ ID NO: 13337 - DNA, 473 bp, Homo sapiens
  misc_feature (1)...(473): n = A,T,C or G
agaggcaggnngngccncaactganncccactgatgancactaggacangcggnggaattccccagcttttgtaatctgacaaaaaaatgaggagcagcttcgtgtatatcagtgtacacggtattccttaagtcccttccattggtagtgatgctgcgagttattactggagaaaaggaattctagagctttaacttggcagattaaaagtactcattttttattcatcaataattagtaatctcactagttttcaaaaatttgcatattattgacaacctctttgaagatgcatttcacaaactcaacagagtgccatgataagagctagggatcccccaaactatctcaagcatctaaaaaattgccatttttaaaggcttaaattgtagtagtaaaggggaaaacaggaagtagtagtaaaggggaaaaaaaaccaataaagcatctaaaaaattggcatgttaaaagg

SEQ ID NO: 13338 - DNA, 455 bp, Homo sapiens
  misc_feature (1)...(455): n = A,T,C or G
ngcggtaaattggagacactagtccagtgcgagtggcattcctctgagcttgtttgttgctgaaatgctactttttaaaatttagatgttagattgataactgtagttttcatcatatgctttgctagaacactgtgatagattaactgtagaattcttcctgtacgattggggatataacgggcttcactaaccttccctaggcattgaaacttcccccaaatctgatggacctagaagtctgcttttgtacctgctgggccccaaagatgggcatttttctctctgttccctctcttttgaaaatgtaaaataaaaccaaaaatagacaactttttcttcagccattccatcatagagaacaaaaccttatggaaacaggaatgtcaattgtgtaatcattgttctaattaggtaaatagaagtccttatgtatgtgttacaagaatttcccc

SEQ ID NO: 13339 - DNA, 489 bp, Homo sapiens
  misc_feature (1)...(489): n = A,T,C or G
gggtgtaannnaggaagcccttaatgagaccatctantgtnactctcggacagngccgnggaantcttgatacctgtcttccaatatttgaaaatactgtaggtagagaattatttaaaaccctttttagtaggtcattaagtaagatgcttagattatcacttttgggggatgttttcagggctggagaagaggaccttcctcagttaaaaacagacaaaaaatttactccttatccattctgcttaattgggctaaatgaaatccttctatttttttcaatagagctaaaatttttaatcttcagttctctaaatcctttttaaaaatgtggttccatcttaaaattaaattacattattttaaaaaatgtagttaggaagttaaaatgtgatgctaaaatataattattaaaatataactagttccaatctaaaaagaaattataagattgcattattgaatttcaaagaccattttctgaagact

SEQ ID NO: 13340 - DNA, 479 bp, Homo sapiens
  misc_feature (1)...(479): n = A,T,C or G
tgatacgcaaanaanaaaaagtttagcttgatacccctnnntaannnactggatgaccntagtccagtgtcgtggaattcataattgttcaatatgttttttgaacagtgtgctaaatcaatagcaaacccactgccatattagttattctgaatatactaaaaaaatccagctagattgcagtttaataattaaactgtacatactgtgcatataatgaatttttatcttatgtaaattatttttagaacacaagttgggaaatgtggcttctgttcatttcgtttaattaaagctacctcctaaactatagtggctgccagtagcagactgttaaattgtggtttatatactttttgcattgtaaatagtctttgttgtacattgtcagtgtaataaaaacagaatctttgtatatcaaaatcatgtagtttgtataaaatgtgggaaggatttatttacagtgtgttgtaattttg

SEQ ID NO: 13341 - DNA, 460 bp, Homo sapiens
  misc_feature (1)...(460): n = A,T,C or G
ntttgaaaccttgngaannactggagaccctagtacatgcggtggaattcgtttatttggtaccgggggtctcctgacctgtctagcatttccacccactcttctgctcttcttgcaaggtaacttgaatcatcacttatttctctgccacctggttttaggactggcactctataaatgacgctgactttgtatagaaggattttgctaagggggcaaaaagcccagataccattttaactggcccagttcattttctcctttcattttacaaaagaaatcatgcagaagcatcaattaaaactgatttatttatgttggtacatccaacaaaatagttggagccacaaggcccttgtctttttaaaaaaacaaaatattttgaagatggtgaaagtgactgattttaataatgagataggtcacttaaaataacagtgcctttgaccttaaaacatgg

SEQ ID NO: 13342 - DNA, 447 bp, Homo sapiens
  misc_feature (1)...(447): n = A,T,C or G
nttgtagaccctagaacacgctggggaattctttttttcttgaaatttcaaacacaaggaaagcatagaatagcttttaaaagtagctatgccttcttccaaatgttattttattcaaaaaggtaaccaggttgtgttttaaacctgtgaaatattgtgatgcattttattactgaaagttatttaactgcctttacttgcacataaaaactctcatttacggccaggtgctgtggctcatgcctgtaatcccagcgctttgggaggccaaggcgggcatatcacctgatgtcaggagttcaagaccagcatggccagcagtttggtgaaaccccatctctactaaaaatacaaaaattagcctggcgtggtggtgtgcgcctgtaatcctagctactcgggaggctgaggcaggagcattgcttgaacctgggaggtggaggttgc

SEQ ID NO: 13343 - DNA, 564 bp, Homo sapiens
  misc_feature (1)...(564): n = A,T,C or G
ctgcganggcggnnnnnnnnnnaaattctttttacatttaanaaataacaacattaaacagttatatctgtaaatgtaagaaggttaaggcattctaatgtcacaggatgggataggaggtaggcacaagatacaggtcataaagaccttgctgataaaacaggttgcagtaaagaagccggccaaaacccaccaaaaccaagatggcaatgagaatgacctctggtcgtcctcactgctatactcccaccaatgccatgacagtttacagatgccacggcaacatcaggaagttaccctatatggtctaaaaaggggaagcatgaataatagaccctttgtttagcatatcatcaagaaataaccataaaactgggcaaccagcaaccccccggngctgctctgtctgtggagtagccattcttttatgcctttactttcttaataaacttgctttcacttanaaaaaaaattaaacatttacatttgtataaagtactttcacatacctaaccaaattcaattattntaacaacccnagtaggcaggaaaatcagttattan

SEQ ID NO: 13344 - DNA, 477 bp, Homo sapiens
  misc_feature (1)...(477): n = A,T,C or G
nttagatcgcgtccactaggccanngcgtggaattcggtgggattaccagagtttatcccaaagaggctggagaaaattggcaagaaaacccagagacatatgaggacagcttctataaaaggagcctagataatgataactatgttttcactgctccctactttaacaaaagtggacctggtgcctatgaatcgggcattatggtaagcaaagctgtagaaatatatattcaagggaaacttcttaaacctgcagttgttggaattaaaattgatgtaaattcctggatagagaatttcaccaaaacctcaatcagagatccgtgtgctggtccagtttgtgactgcaaaagaaacagtgacgtaagaaaactatttaaaatcacttttgagtacaatatttccttgtgttactcttgctaagactatagtgatgaaaaaatatgcaggaattttttaatcaaaggctaaaaaatn

SEQ ID NO: 13345 - DNA, 442 bp, Homo sapiens
  misc_feature (1)...(442): n = A,T,C or G
nttgaggaccctagnnactgatgacccttagacagtctggtggaattcgtctgttattacttaaagaagttttttaaaacccagtgtgtcaacctatctctctgctcttttaacttcctttacttctttgtactgcataactctcctaaactcaaacttatattattagtagcttatctgcaaagagggagaaggggtatcatggagttgggagctccagaggaggcaaaggttttgggtcacgggagagtgccattgagaacggacaatggatgctgagaaggacaatgagaatcagtggaaataaggcaacaggaatttgtgctgaacatggtcaccctggtttcatgattctccacaacaatatgggaagctcagaggcaaagaaaaaaacaaaaaacaaaaaacagagagaccagggctgatggcaggcatggtaaan

SEQ ID NO: 13346 - DNA, 417 bp, Homo sapiens
ctttccgcgccgccacaatggtgcgcatgaatgtcctggcagatgctctcaagagtatcaacaatgccgaaaagagaggcaaacgccaggtgcttattaggccgtgctccaaagtcatcgtccggtttctcactgtgatgatgaagcatggttacattggcgaatttgaaatcattgatgaccacagagctgggaaaattgttgtgaacctcacaggcaggctaaacaagtgtggggtgatcagccccagatttgacgtgcaactcaaagacctggaaaatggcagaataatctgcttccatcccgccagtttggtttcattgtactgacaacctcagctggcatcatggaccatgaagaagcaagacgaaaacacacaggagggaaaatcctgggattctttttctagggatgtaa

SEQ ID NO: 13347 - DNA, 556 bp, Homo sapiens
  misc_feature (1)...(556): n = A,T,C or G
ctcgccggccgnttccnnnnnaacctttgtaatttatgttgattttaataaaatcataatttaaaaaatgaaatgggaagattgtcaggaaattatgatagctactctagtataatttagaaaaactaagcaagagattctccagttgctagtgagtaagcactctgatttgagaaatgtgtggggacaatggagaaaagttttcagaaaactgctatgtagatttctgaatgtgttgtattttgctgaggaattcggtaacaactgaaagggaaaagtgcttcagccatcttttgaaaacaagttaaaattctggaacttgtatctgtaatacatcctaactcttgtaaaagaaaataatttatcatagctggcgtcctttcattgaaagttgtaatactgtctctaaggagggaggaaaagattattatataattntataactggcaacatttgagttagtattgactttgtctaaaagaggcttgacttcaactgggataaaaatgtcagtgaattttgttaaagtagtaaaaatgcagttgacttagtagga

SEQ ID NO: 13348 - DNA, 475 bp, Homo sapiens
  misc_feature (1)...(475): n = A,T,C or G
nttgagaccctagcatagagcgccatttctacaatccaatagtgttaagtatattcacattgttgtgcaacagtttctagaagtttttcatcgtgcaaaactaaaactcttcaccactaaacgatttctctcctctccccctgcccttgacaatcatgattctttatgtttcattgatttggactactttggacacttcatatgagtggaatcacacagtatttgtccttttgtgacatgtttatttcacttggtgtcatatcctcgaggttcatctgcgttgcagcatgttacaggatttccttcttttatcaaactgcattatattccactgtatatgcaccacattttccctatgcattcatctgttgatggatttttgagttgcttccacctcttgactaatgtgaataatgctgcagcgaacatgagtatgcatatatctcttcaagatcctagcaggaattttttaatg

SEQ ID NO: 13349 - DNA, 471 bp, Homo sapiens
  misc_feature (1)...(471): n = A,T,C or G
nagcgcgccgcttttccccaaagtttccanagananncnctnnnntnnngaagaggcccagatatgacaactggcccaagggagcaggggacctttcttttgtcaaaaagatgaaggagacctttagaggagggagctaagctctgagctgaggaaacaaggtgtcctccatcccccagtgccttcacatcttgaggatatgcttctgtactttttaaaagcttatagttggtatggaaaacatttttcttatttttaagtgttattaattatatctatggaaaaactattcctgaaatatatacagtcttatgtcccaatcagagtcttttaacctatgatttaaaaatgtataagtaacagaaattaacatattttaatgactttactttttatttctaagaaaagtatttgaaaaatggaataattttaaatcaatgataattctagggatcatgaactcccagaaga

SEQ ID NO: 13350 - DNA, 480 bp, Homo sapiens
  misc_feature (1)...(480): n = A,T,C or G
ggtagcccggccgcgnnnnngnttttgagacctgaggaccatctgagcgactggaggaattcgcctatgacagcatccggcatgcccatagccagtctgcagaggcagatcggcgtttcaatacctcacccctggcagtacctagccctgtgagcaactcggcaagtgctctgcatcggacagaggcactgatggatgctcagaaggaggacttcaacaccaaacacatggccaaccagcgggcacttggtaagctctctgcccatacccacaccctgagcctgacagacataaatgagctggtgtgcggggcaccaggggatgcaccctgtgctacaagcccttgtgggggtgccggctgtcgagatgaggatgggcagccgcgctgtgggggcctcagctgcaatggggcagcggctacagcagacctagcactgggccgggcccggcacacacaggcagagctgcagcgggcactgg

SEQ ID NO: 13351 - DNA, 487 bp, Homo sapiens
  misc_feature (1)...(487): n = A,T,C or G
caaagacaccatgcgatgagcgtcatagcaaangcccngccaggctgggagggaattgtccctgcctgcttctggagaaagaagatattgacaccatctacgggcaccatggaactgcttgaggggaccattctttttcttctgcccaggatttgcagcagtaacagcacaggtgttttagaggcagctaataattaacttgttactacaacaaaaccatctataacaacaccaaacacagaatcattacagaaaaatgttgtcacaccaacaactggaacaactcctaaaggaacaatcaccaatgaattacttaaaatgtgtctgaggtcaacagctacttttttaacaagtaaagatgaaggattgaaagccaccatcactgatgtgaggaagaatgactccatcatttccaacgaaacagaaacaagagttacacttccaaatgctgtttcaacattacaaagttccgaacccaagactgaan

SEQ ID NO: 13352 - DNA, 480 bp, Homo sapiens
  misc_feature (1)...(480): n = A,T,C or G
cgaccgccattgagacccatngnnatttgagagcctaggccanngcgnggaantcgccaagtggttaaaacccatgttcaacggattgtctactgtatatcttcatggtaaggatttggggaatgttctaggaaaagatattgacagatacctctgggtctgggcttttcttttggggaagtttataaatgactaaatcatacttcttgttacaggcctgtttagatgttctgtatcttcttgagacagttttgctttttatcttttttgttgttgttaatcccaaagatttaaaactatggtttctgtctgaatttggtcattgcaaccaagttactgtgttgtggggccaccattttcttctaggctcagagatgcagtccttgtggcttgccgatttgtgtcccaaaccacaagtcttaatgttcttgagcataacacaatcactgaagtgagtaagggatgcagtggtgttatttg

SEQ ID NO: 13353 - DNA, 473 bp, Homo sapiens
  misc_feature (1)...(473): n = A,T,C or G
catgagaccntggtgagaccgtaatncgagcgnggaagggtttcagccagagctcaaatcttcgaattcatcagttagtacacacaggagagaagtcttataaatgtgaagactgtggtaaaggctttacccagcgctcaaatcttcaaattcatcagagagtgcatacaggagagaaaccttataaatgtgatgactgtggaaaggactttagtcacagctcagatcttcgcattcatcagagagtccatacaggggagaaaccctatacttgtcctgaatgtgggaagggcttcagtaagagttcaaagcttcacactcatcaaagagtacatactggagagaaaccctacaaatgtgaagagtgtggcaagggattcagtcagcgttcacatcttctcattcatcagagagtccatacaggagaaaagccctataaatgtcatgattgtggaaagggttttagtcacagt

SEQ ID NO: 13354 - DNA, 442 bp, Homo sapiens
  misc_feature (1)...(442): n = A,T,C or G
gatgaaaccctactgatgactattagacagngcggtggaattcaagtaccatcaaagactgtggagtcattgagggtctgtgtgtcctcaccgagagggacctggtgtgcccgccgggtcgatcttcccacgtgttagggtttatttttatacaacacatcttttgacactttaaggtgggtgggtgtgtgtgtgtgtgtgtgtgtgcgcgcgtgcgcgcgcgcatgtgtaaggttttatgttgctgttatttatttacgaacttcagatacgtttttatgtatttttcattcttctggagcttcctaaaaattgataagcatctgcactgaaatataatttaacagcaaaagtaaaaaaggattgaaagttgtaaattcctcatatcactacagtgacgattattctagaaatcgttgcttgtgtagcaaagaccaaataa

SEQ ID NO: 13355 - DNA, 493 bp, Homo sapiens
  misc_feature (1)...(493): n = A,T,C or G
cgcgtttgagaccnattgagagccggtggaaaccacccataagggttccacataataggattaccacatagattttaaagcaattgtgcctttcaaattgaagtgaagtacaagtcaagattacacatttcagcagaggattagaaactataaaagtgaaaaatagtgaaaccaaaaagaactcaatgattttagcagattagacaactgaggtgagatttttagcacattggaagataggtcagaagaaaacatccagaatgaagcatattcagaatgtaggaggcattgggcgaggggtaggggtgggagatcctagtatgttgaattggattctcaggacaagtgagaataagatagaattaatatgtgaaaaaagaggctccaaactcaagagatgtttataacctcaagcagtataaatgcaaaagaaaaagcaggagggtagggtggaggggtgatgacaaaaccctacatgtaggcacctcccaag

SEQ ID NO: 13356 - DNA, 489 bp, Homo sapiens
  misc_feature (1)...(489): n = A,T,C or G
natcgagttcgcntagcncgtgtggnggaattcgttntatttaaacaganaacatacacatgagctgtctactcattttctttgctgcgcagcctgggattggggttggtgactctgacggccagctgggcagctcttttccacgatggctttgcggttcttggaggaaacattgtgagcgatctcagcacagtaagatttgttgcacaacagcagcacttccagctccttgacgtgtggaccaggaatttccggaagccactgggcagcatgtgctttgttttcttgttgctcccataatcaatgttgggcatcaagatctaacccttgaaccttccacgaaccctgttgtcaatacctctgggtttccgccggttacgcttaattttgacatatcggtcagactggtgccggataaacttcttggttctctttttgacgatcttgggcttccccagggttctgaggacgggtttataaagtgcactg

SEQ ID NO: 13357 - DNA, 459 bp, Homo sapiens
  misc_feature (1)...(459): n = A,T,C or G
natcgagttcgactagcccangnggnggaattctttggaaagtttgtctttgccaccgtgagcccgagagctcccaataaatcagatgccagtgctaatgctgatgaaccgtatgcttttgatattatagactgaacaacatttgcaagagctgcctaactcggtgaagcaacattttccagatggtcgatgcgggatcacgcctgggtaaaagatccatttagagtacaagtcaagccaatggatcttaaagccataaagtgcagaagctcatggatacagttcacattccatattgcaaacagcctttaaggaaaaataaaacacacttgttgcgtgttggtgtggtgtcaaagaggaatctccataattatctgaagagcctattaagatacttttcccttgtctaactgcatctccttgtaaggctgcattttattttattttttcgtacttttt

SEQ ID NO: 13358 - DNA, 386 bp, Homo sapiens
gttcagccagactcctgataagagaatctggcggccttcagccataattcccttcggaagcttttgcaaagcctcctggccttccaagaagatgatattggtgcccatatgaatgtaggaagaacttataaaaatttaaatagaaccaaagaagctgaagaatcttacatgatggctaaatcactgatgcctcaaattattcctggtaaaaaatatgcagccagaattgcccctaaccacctaaatgtttatatcaatctggctaacctgatccgagcaaatgagtcccgactggaagaagcagatcagctgtaccgtcaagcaataagcatgaggcccgacttcaagcaggcttacattagcagaggagaattgcttttaaaaat

SEQ ID NO: 13359 - DNA, 484 bp, Homo sapiens
  misc_feature (1)...(484): n = A,T,C or G
catagatcnccnttttttgagacactagtccagagcggtggaattcggaacgtcatcgtttggaaagcgtcgcaataagacgcacacgttgtgccgccgctgtggctctaaggcctaccaccttcagaagtcgacctgtggcaaatgtggctaccctgccaagcgcaagagaaagtataactggagtgccaaggctaaaagacgaaataccaccggaactggtcgaatgaggcacctaaaaattgtataccgcagattcaggcatggattccgtgaaggaacaacacctaaacccaagagggcagctgttgcagcatccagttcatcttaagaatgtcaacgattagtcatgcaataaatgttctggttttaaaaaatagaaaaaaaaaaaaaaaaaagggggccgttcaattttaaagggcccgttaaaacccgttgatcaccctcgattgggccttttattggccacccttttgtggttggc

SEQ ID NO: 13360 - DNA, 491 bp, Homo sapiens
  misc_feature (1)...(491): n = A,T,C or G
ggcgattgggccccatcgagaccctaggccanngcgnggaattcgttctttattttcccttgtggatatgctgtgtgaaccgtcgtgtgagtgtggtatgcctgatcacagatggattttgttataagcatcaatgtgacacttgcaggacactacaacgtgggacattgtttgtttcttccatatttggaagataaatttatgtgtagacttttttgtaagatacggttaataactaaaatttattgaaatggtcttgcaatgactcgtattcagatgcttaaagaaagcattgctgctacaaatatttctatttttagaaagggtttttatggaccaatgccccagttgtcagtcagagccgttggtgtttttcattgtttaaaatgtcacctgtaaaatgggcattatttatgtttttttttttgcattcctgataattggatgtattggataaagaacgtctgtacattgggttataacactagtat

SEQ ID NO: 13361 - DNA, 493 bp, Homo sapiens
  misc_feature (1)...(493): n = A,T,C or G
acgcgatcgagaccnattgagagccgtggagaacctcgctgctccagggatgtcatagttaaagttgaccagatctgtcacaaaaatagcatttagttctttacatggagatgtttttggctaccatggatacacatttgccaatctaggagagcatgagtttgtagaggagaaaactaaagttgccaaagttagccaaggagtagaagatgggcccgacaccaagagagcaaaacttgattcttctgagacaacgatggtcaaaaagaaggtggtcttctgccctgttaaagaagccctggaggtggactggagcagtgagaaagcaaaggctgctctgaagcgcacgacctccgactactttctccttcaagtgctcttaaagttccgtacagataaaggaagagatcccagttctgatacatatgaggaagattctgagttgttgctccagatacgaaatgatgtgcttgactcactgggtattagtcct

SEQ ID NO: 13362 - DNA, 488 bp, Homo sapiens
  misc_feature (1)...(488): n = A,T,C or G
cggtttggacatacgagaccatccgaagngccgcggaanncggggctactgtgtctccaaatttggcctggaggccttctctgacagtttgaggcgatgtttacagggctctgggttccaggactaacagcaggccactcaacaaacgtgggccagcagaggtggttaagatacagcacattggaatagttaagaagagacagtttagggctagacttcatgggttcaatgaagtctacccttatgtaagctttgtgaccataagtagattacttctctttacccatttttaacgtgtttgttttttgttttttgagatggagtcttgctctgtcgccaggctggagtgcagaggcgcgatcttggctcaccacaatttccacccccggggttcaagcgattctcctgcctcagcctcccgagtagctgggactacaggcatgcgccaccatgcctggcttatttttgtatttttagtagagacaggg

SEQ ID NO: 13363 - DNA, 471 bp, Homo sapiens
  misc_feature (1)...(471): n = A,T,C or G
catgaccactcttggatagagggccgtagncctcaactccctgccccgcaatcagttttgcagatgcagccggagtgtaagcaccccaaactacctcctgcagtttctgtttcctcttcccccaccatctcctacctaggcagaggagctcagtaattcctccactgcttatggactaaagttcaagttccttattatgctgggctcttcctaaagaattcaatgcagtgggtaacagcttggcattggagttgcagagtcctgtgttcaaatggctctgcccccaagagctgtgacttcaggtaactacatctttgagcctcatttccccatctataagtaagagctgcctcgtcgtaagagttgccaagaggattaaacgacacaagtccacactcccttctctgaaacccctggagccagatgtgctttggaatccaagacattntgggttttagaaaggtaatactg

SEQ ID NO: 13364 - DNA, 467 bp, Homo sapiens
  misc_feature (1)...(467): n = A,T,C or G
nggcgcccgntttttccccaatggcccantgannnncnntnnnntnngaaagnngcagaaggaagagagggtctttttctttaagcaagattgttagccaaaagaaaaagaataatttggggcgggggcaggatggccgactagaagcaccgctgatctgacgctctcatcaaaaagaactaaaacagcttgctatcctgcactggcaaccaaggtatccaggttctgtcatggggacagaccaggcagctggcatgatccacggagaggaaggaagagcagtgtagtgcggcggcccacctgagagccacatggggcaggggacccctcacccccccagccaagggaggcagtgagtgagcgtgctacccagcctgggaaactgtgctttttccacggaactgtgcaacccacggatcggaagatcccactcatgagcccatgccaccggngcctatggtcccaag

SEQ ID NO: 13365 - DNA, 490 bp, Homo sapiens
  misc_feature (1)...(490): n = A,T,C or G
nctgagttcgataccactagtcagngaggtggaattcgtaaaagaagataaaggtagcagagaagatataaagttattgatattgatatatatccagtgatagataggggacatggagaggaagtggactgttttgtaactggtgtagaataaaccaaccccaaggtttgtcacagtggactcagatgcagcaaaggcttcatgcattcaggatgcctattgttgattaatagctacctgatcctaatagtagaaaggaccactgtccaagttactggaataaactttttgtgatgtttgagtaaagcattcatgtcagaattttcagacatacctataggaacaaaatagggcaaaaatagtcaactatataagactgggatacttatgttaattcttagccagctatactgtttgccactacatgatataatcgatgtaggaatgggaacaatacaattaaactatacaccccttctctctgctttgn

SEQ ID NO: 13366 - DNA, 389 bp, Homo sapiens
  misc_feature (1)...(389): n = A,T,C or G
gcgtaccacaaatataaggcaaagaggaactgctggccacgagtacggggtgtggccatgaatcctgtggagcatccttttggaggtggcaaccaccagcacatcggcaagccctccaccatccgcagagatgcccctgctggccgcaaagtgggtctcattgctgcccgccggactggacgtctccggggaaccaagactgtgcaggagaaagagaactagtgctgagggcctcaataaagtttgtgtttatgccacanaaaaaaaaaaaaaaaaaaaaaaaaaaaaaaaaaaangggggccccttaaataaaaggggcccttaaaaaccccgggaaaaccccggggggggctttttaaggcccccccttttgggggtcccccccccg

SEQ ID NO: 13367 - DNA, 468 bp, Homo sapiens
  misc_feature (1)...(468): n = A,T,C or G
ggggggnnnnagnagactgtaccctgtaagctgatggccttcgtcctcaacatctgctcagatgatgaactagggtcagaagaagatggatttgatggtgcaacagctgcagcccggaaagaggtgataaggaacaagatccgagcaataggcaaaatggccagagtgttctcagtgctcagagaagagagtgagagtgtgctgacgctgaaaggcttgaccccaactggcatgctccccagcggagtactttctggagggaagcaaaccctgcaaagcgctatcaaaggattttcaccacaacataagatcactagcttcgaggaagccaagggcttagaccgaattaatgagaggatgccgcctcgcagagatgccatgccctctgacgccaaccttaactccatcaacaaggctctcacctcagagactaacggcacggacagcaatggcagtaatagcagcaat

SEQ ID NO: 13368 - DNA, 489 bp, Homo sapiens
  misc_feature (1)...(489): n = A,T,C or G
agcgatcagaccttttgagngccgtggaatacctaactgagcagcagtcctgaggccctgcctcccagtccctccttgttccagatgtggcaaaatctggcaaaggcagagaccaaacttcatacctcaaactctggggggcggcgggagctgagcgagttggtctacacggatgtcctggaccggagctgctcccggaactggcaggactacggagttcgagaagtggaccaagtgaaacgtctcacaggcccaggacttagcgaggggccagagccaagcatcagcgtgatggtcacagggggcccctggcctaccaggctctccaggacatgtttgcactacttgggggagtttggagaagaccagatctatgaagcccaccaacaaggccgaggggctctggaggcattgctatgtgggggaccccagggggcctgctcagagaaggtgtcagccacaagagaagagctctagtcctggactcta

SEQ ID NO: 13369 - DNA, 444 bp, Homo sapiens
  misc_feature (1)...(444): n = A,T,C or G
gttgatnccctaatgatgaccatcagacagngcggtggaattcggggaccctctccgcttgtcaccatgacaccagcagtgccagcagttacccctgtttacgaggagagctcagacggggagccagaccaggaagctgtgcagagctctacctacaaggactccaacactctgcacctccctacggagcgtttctcccctgtgcgccggttctcagatggggctgcgagcatccaagccttcaaagctcacctggaaaaaatgggcaacaacagcagcatcaaacagctgcagcatgagtgtgagcagctgcagaaaatgtacggggggcagattgatgaaagaaccctggagaagacccagcagcagcatatgttataccagcaggagcagcaccatcaaattctccagcaacaaattcaagactctatctgtcctcctcag

SEQ ID NO: 13370 - DNA, 484 bp, Homo sapiens
  misc_feature (1)...(484): n = A,T,C or G
aggggnnaatgagaccatgataaccgtggnggaannctaaaatcttttgagatgtagtgctggggcatctatatgtttttttaaaagaaccaagagattacaatgggtagccaaggtttgagaatccctgctttgatatgcagctgacaagttatagtattttcacattggtagtcgcagcacctgctagcagtgtaatatgctttacttgaatcatttccacatctgcacctcaattccctgggcctggggttgccatttggtaggggaggagcttatcaggagttcctttgcaagtgcaggagggcagtcctgggttctgttagtgacagcgtgatttcagtgaaataatttagaccccccaagcagactgtgcaacggatagcccctggagagtgccccgtgtttacattctcatctggcatttttgttttgtggaatcggcctgtgttaagccaggtgacctatgaacagtgcttgtctn

SEQ ID NO: 13371 - DNA, 490 bp, Homo sapiens
  misc_feature (1)...(490): n = A,T,C or G
cgctactgatgactcattgagagccggtggaaacctcgntntggccccttcactagatattacagtttttatcggaaacaagaggcagtaaatagtaatgtttaaaagcacaatctctagagacagatggcttgggtttgtatccttgctctgccatgtcatttactaaccttctgatgttgaacaagtccctcaacttgtttgtgactagttcagttatcttttgctgtgtaataaactaccccaaaatgtagtgtctcaagtaacattttaaaaattcatcattcatggttctgtgggatgactgggttgctcagttgggtgattctctattgaggcctcttacgcagttgcaatcagatggcagctggggctggagtcacccaaaggctcaactggaccagatgtccaaaatggctcactcacatggctggaagacgatgctttctagtggctgtgagctcagttggngctgtccgttagaatctcn

SEQ ID NO: 13372 - DNA, 491 bp, Homo sapiens
  misc_feature (1)...(491): n = A,T,C or G
ggcgattgagccccatcgagaccctangcagngncgnggaattcccaaatggcgctagctcggaagctgccgaggtgctaggagttgccgtagcaagtccggaagctaccgagcgagtccggaagttgccgaaagggagcagcggggaaggaggatggcggatatcatcgcaagactccgggaggacgggatccaaaaacgtgtgatacaggaaggccgaggagagctcccggactttcaagatgggaccaaggccacgttccactaccggacgctgcacagtgacgacgagggcaccgtgctggacgacagccgggctcgtggcaagcccatggagctcatcattggcaagaagttcaagctgcctgtgtgggagaccatcgtgtgcaccatgcgagaaggggagattgcccagttcctctgtgacatcaagcatgtggtcctgtacccgctggtggccaagagtctccgcaacatcgcggtgggcaagg

SEQ ID NO: 13373 - DNA, 464 bp, Homo sapiens
  misc_feature (1)...(464): n = A,T,C or G
catacgtagaccctattgcagngcggtggaattcgaggaaaagaagcgatttgaagactgtgtcactaatgcctggggatccacccgtcggccccctgctcctctcacttcctttccctccgactgcgccccctccctcctccggctggcaccaccgaccccctggagttggtgctgctgcgaagtgcccttagaggatgctccagcctccccgcctgcgcccgggctcggctgcatcctttctgtctctcccacccacttccaccgagatggaaaagtgaacatccagggcaggaaacgagtgtttctccgtgccggtattccagaggccttagcccagggagactcctttcctcggggttcacagttcctctgggccctttcttcacacctcgtcacagttgcactcctcctccccaccccacccgggcgccccgggtatccctttatgccacgctcacagg

SEQ ID NO: 13374 - DNA, 471 bp, Homo sapiens
  misc_feature (1)...(471): n = A,T,C or G
aaggcccccccttccaaaggggccattttnnacgancnncnnnnnnntnnnnaangagacggagagaaagttgcaagaatatttgggagatggatttactatgaatggatgactgatttggatgtggaatggggagggagaagtcaagggtgtccttcangtttctggcttggaagaagggactcctcctgccaagtaatcctctattattgcattttccatgctgtttcacaatgatctgcttactgtcttcttcatttttactgatggtagtagtagaactactattgttactaagagctagcttgtattcagcccttgctattcaagaagaatgccctaaaagctttaaaggaattcacacttaatattcacaacattaatttgagttagtggtcattattatcattttacagataaggaaactgaggcacaaaaaactgtgcacagtatcaaatgtagtaaatggtg

SEQ ID NO: 13375 - DNA, 440 bp, Homo sapiens
  misc_feature (1)...(440): n = A,T,C or G
natgatgaccacttgatagccngttggaannccagagttccactttttccactcttattagcactgcaaaagctcctgagaatttaaaaacacagtatttctctggatgttaggacctaggggaacattgggcatttgaacatatcagggagggtccccattttagtgggaacaagtatttaaacaatatttagagcaagtgtcctcatgtgataaacagagcacagtccaaagataccctctttctcaaggtagtcttttatctttataaagaaagattagtgtttaagagcgtagacttgagctagactacccaggttgaaaccccactagctgggtgatcttgaacatgctgcttagcttctctgtgccaaacttactgatatcctcatctgtaaattagcgataataatagtacttacctggtaggattatggtga

SEQ ID NO: 13376 - DNA, 468 bp, Homo sapiens
  misc_feature (1)...(468): n = A,T,C or G
cgggactnntttgatnccatcgaanaccctagtcagngtggnggaattctatgaattcactgatgaccctatcgacgtgccacggatccccaaaaatgatgcccccaacaggttctgggcttcagtggagccctactgtgctgacatcaccagcgaggaggtccgcacacttgaggagttactgaagcccccagaagatgaggctgagcattacaagatcccacccctggggaagcactactcccagcgctgggcccaggaggacctgctggaggagcagaaggatggggcccgggcagcggctgtggctgacaagaagaaaggcctcatggggccactgaccgaactggacactaaagatgtggatgccctgctgaagaagtctgaggcccagcatgaacagccggaagatggatgcccctttggtgccctgacgcagcgcctcctgcaggccctggtggaggaaaa

SEQ ID NO: 13377 - DNA, 489 bp, Homo sapiens
  misc_feature (1)...(489): n = A,T,C or G
agcgaggagacctantgagaccctccgaagngccgnngaannangatatgaagcttcatggaccttggtaaagntttttctcttttgggtttgtttcttttgtgagagaacagaacttacttaagactgacctggcacttgctcttagccagggaagtctttcccactgggttccgggctgggtggcaggctgagcgtgcagcaactccaggcatctctaccctcagccccctgcacggccaggtgggcctttgtttacagccgtaggcagctctcaagactgtgtttcaggtttacagccactgggcctgggcacacacattgaagagtgggccaggtcctgtctgggggcctgtacctgctctatttcagagcttgtggctttgtgtctcccctgctttccccacgcagacagcccttcctctgtagaaccagctgcacggcagctgtccaccagagggcagacctgcactctccattcatgtccag

SEQ ID NO: 13378 - DNA, 523 bp, Homo sapiens
tggagcaccactagcaagctctggaggatgagccaggagtctggaattgaggctgagccaaagaccccagggccgtctcagtctcataaaaggggatcaggcaggaggagtttgggagaaacctgagaagggcctgatttgcagcatcatgatgggcctctccttggcctctgctgtgctcctggcctccctcctgagtctccaccttggaactgccacacgtgggagtgacatatccaagacctgctgcttccaatacagccacaagccccttccctggacctgggtgcgaagctatgaattcaccagtaacagctgctcccagcgggctgtgatattcactaccaaaagaggcaagaaagtctgtacccatccaaggaaaaaatgggtgcaaaaatacatttctttactgaaaactccgaaacaattgtgactcagctgaattttcatccgaggacgcttggaccccgctcttggctctgcagcccctctgggagcctgcggaatcttttctgaaggctac

SEQ ID NO: 13379 - DNA, 458 bp, Homo sapiens
  misc_feature (1)...(458): n = A,T,C or G
ntttgagttcactaaccctagtggaggaggtggaagtcgggtgaggctattttggggctgggaagtgggggcctggggtcccctggatggctgtgctggcctctggctgcaagggagaggggcacaggcaaggacatgacccccgtcaaccctgagccccctccagaaatttaaccagagcctgtccctcctttcttgcctgcccccaacatctcacaatccctcctgtgatggcagatgtctccatctactctacagacacctgcaactatcattcccttgatccgtggtaattaggagggaactcctctgtgaagaactgcttctaccatcctcttttagaaactctttctccactgggatcttgaacattttcaaaatctggtgcaagggctttatttatttatttatttattttgagacagagtgtcactgtgtcacccagggtggggtacagt

SEQ ID NO: 13380 - DNA, 453 bp, Homo sapiens
  misc_feature (1)...(453): n = A,T,C or G
catgacaatagngcattngcccgngcggggaattcaatcctccacatggagcctctagcagcttacccgctaaaaagttccggttccatatcaaagcttttatgcctttgaagtgaaggatgcaaaaggaagaactgtttctctggaaaagtataaaggcaaagtttcactagttgtaaacgtggccagtgactgccaactcacagacagaaattacttagggctgaaggaactgcacaaagagtttggaccatcccacttcagcgtgttggcttttccctgcaatcagtttggagaatcggagccccgcccaagcaaggaagtagaatcttttgcaagaaaaaactacggagtaactttccccatcttccacaagattaagattctaggatctgaaggagaacctgcatttagatttcttgttggtaaatatctgccttgcatatgctgttt

SEQ ID NO: 13381 - DNA, 488 bp, Homo sapiens
  misc_feature (1)...(488): n = A,T,C or G
ggggtatctccggggttnnnnnnnnaaattgagnnctatnngnnnnactgagttctctctggccgngcggtggaattcactccatcaagaatgctggaggaagggtgtttgtccactgccaggcaggcatttcccggtcagccaccatctgccttgcttaccttatgaggactaatcgagtcaagctggacgaggcctttgagtttgtgaagcagaggcgaagcatcatctctcccaacttcagcttcatgggccagctgctgcagtttgagtcccaggtgctggctccgcactgttcggcagaggctgggagccccgccatggctgtgctcgaccgaggcacctccaccaccaccgtgttcaacttccccgtctccatccctgtccactccacgaacagtgcgctgagctaccttcagagccccattacgacctctcccagctgctgaaaggccacgggaggtgaggctcttcacatcccattggga

SEQ ID NO: 13382 - DNA, 426 bp, Homo sapiens
  misc_feature (1)...(426): n = A,T,C or G
cttttgaattgagtttcagaggtgattcagtagtaaatgtatggggagaagaattagaaaaacccatctctttttaagcagtcatcattcttaaacatctgaattgttttacaacagagtcagcaaacctttctagcatttctaaaagatggcagtttcttggagaccacatctttgcaaggcagtattttcaaaatataaaatagcccccaaaccaaacctttaaacatgaagggcaaatgggtaaagacttaatattctttttgtgtcaagtatacttaatgtaaatctagttgcttgtgaagtagtaaaatagtaatagctcctattattttgagcactgactatatgtgctcagcctctgtgcttggatctgacatcactatctcatttccttctctcagcagntctggaaggagtacctac

SEQ ID NO: 13383 - DNA, 476 bp, Homo sapiens
  misc_feature (1)...(476): n = A,T,C or G
cactgatnacctagagcagtgncgaggaancnnaacctgcaagggtaaagggcatgctgatacctgtcacttcgacgttaatgtgtgggaggcatcatggaatcgtagtggtggtgtctgtgatgactgtcagcacaacacagaaggacagtattgccagaggtgcaagccaggcttctatcgtgacctgcggagacccttctcagctccagatgcttgcaaaccgtgttcctgccatccagtaggatcagctgtccttcctgccaactcagtgaccttctgcgaccccagcaatggtgactgcccttgcaagcctggggtggcagggcgacgttgtgacaggtgcatggtgggatactggggcttcggagactatggctgtcgaccatgtgactgtgcggngagctgtgaccctatcaccggagactgcatcagcagccacacagacatagactggtatcatgaagttcctgact

SEQ ID NO: 13384 - DNA, 492 bp, Homo sapiens
  misc_feature (1)...(492): n = A,T,C or G
aggaggggccnnnnnnagggggncatagtagacattagnaactgatgactattagtccagaccggtggaattctccagctcctgcaggatattttatttatttatttagagatggggttttactctattgcctaggctggagtgcagtggcgcaattatagctcactgcagccttgacctcctgggctcaagcagcctttctgcctcagcctccttagtagctgatactacaggcgtgtgccaccacacctggctaattttttattttatttttctctgtgttgcccatgctggtcttgaactcctggcctcaagtgatcctcctatctcagcctcctaaagtgatgggattacaggcatgagccattgtgcctggccaggatattattatttttaaagtcaattttattgagtggcataatttacacagaacaaaattcacccattttactatgtaataagatgagtttcattaaatatgcacgggtgtgg

SEQ ID NO: 13385 - DNA, 480 bp, Homo sapiens
  misc_feature (1)...(480): n = A,T,C or G
cggtagtttacccgggaaaattaaataccgatgatcctagtcntgacgacanctagaaangcggtggaattcggaatatctgtcttatgaaacgctctatgccaatggcagccttttaaagacgcatgtgggcatctacatcctcagcaggagtggagatggggcccaacaccgagactcagggtcttcaggaaagtgtcgaaggaagcggcagatttatggctatgacagcaggttcagcattgttgggaaggacttactgctcaactaccctttctcaacatcagtgaagttatccacgggctgcaccggcaccctggtggcagaaaagcatgtcctcacagctgcccactgcatacacgatggaaaaacctatgtgagaggaacccagaagcttcgagtgggcttcctaaagcccaagtttaaagatggtggtggaggggccaacgactccactttagccatgcccgagcagatgan

SEQ ID NO: 13386 - DNA, 456 bp, Homo sapiens
  misc_feature (1)...(456): n = A,T,C or G
cactgggatcgatagcnttngcggnggcattcgattatcccagcaacttctccatgcagagagaaatgtctgcagctgcaacactatttctacttcagccttctagactccatgtagtttgcctttgtttgaatgtttctatttatctgaaataaccagaaatcatttttattattatatattactccagtttattaaataaatgaaacaaggcttatgccacatattccaacaatgtttaaataaagagcttgaaatataaaggcttatgaaaacttcatactctttatataatgcatactatttctagcacatgaataaatataaaggacaggagccactttttatattatgaatccacaacattaagcatcaatgattacacaaatccataagcacacaaacaaaaaaacccattggttataaaaactagaattccttttggcatatttaaan

SEQ ID NO: 13387 - DNA, 457 bp, Homo sapiens
  misc_feature (1)...(457): n = A,T,C or G
ggggnaattgattcatgccatctgccagngcggnggaattctcattctgtctaaagatcaggtagtggattttcatttgctctttgctactgttgttgaatacccaagaagaggcattagagcactcggtaaactctgggactggagccaagagactgtgagaaatgacctttctcatcaagtttgtcccaagccaggcttaaattgatagatcgtctaggttttctgatgctggtaaagagactctgtgcctcagggacaggtctgcaaagatcattaagaaacagattaaaattagggagcaagacaagacaagagaaagtttctttacgttctcccagacctctctgggcctataggcagatcaaatttggcctctagatcagcttggacaaaatgatgtccacggtgtctgagtaggtcttttcatttttattcctcttatagccatctttag

SEQ ID NO: 13388 - DNA, 533 bp, Homo sapiens
  misc_feature (1)...(533): n = A,T,C or G
tattagtccagtgcggtggaattcggttggtgctgcaggcacggggagcctgctcaccctcacctcctctccagaaaggcctgccccatcacttccactcagtgttccccaactcacgaggctggcacctccctcttcctgactgacataaaaatatgtagcgacaagctgtctgccacagcagaaatctgatcagacattgatttcagcaattgccactataggccaagacataaggcaaatttgtttctgagtacggttattgctgctgcaggtctgaggcaggaagggccagcagcatgtggaaggtgggagcaacatcccaaataggagcctcagccacagataattggaatacagattttaacagtgtgtgctgctctgcggctcatgcattttcattctggaagatcctatttggagggaaattctggccttcactttccaagggttacagtagctggctgtcaggcgtgtatggaaaaagggtgggcaactgcttctctgtggaaatgatgattaangccgggtgg

SEQ ID NO: 13389 - DNA, 471 bp, Homo sapiens
  misc_feature (1)...(471): n = A,T,C or G
ngaggcggccgncttttaaaannaagtttccannngaagncgnttnanttnagagaacnggccncatagctcactgcagccttgaattcctatgctccagttattttctcacctcagcttccctaatagctaggattggaggtgtgtggactcccaccccaccccacccttcacacctggctgatttttcaaaaagtttttttgtagaaacagggtctcaccatgttgtccagcctggactcaaactcctgtcctcaagtgatcctcccacctcagcctttcaaagtgctggaattacaggtgcgagccactctgcctggcctaccactaacttgaatacattcagaatcacctcctctccccaaaatttgtagaaatagtttttgacgaagccaaaagcaaagcagaaacctttacagaattgtttcttttctctttgttaactgtgtcattacagcaaaatactagcaa

SEQ ID NO: 13390 - DNA, 553 bp, Homo sapiens
  misc_feature (1)...(553): n = A,T,C or G
cgggnaacaaaacctggatnnccccnctcgaaccacagtccgtgtggnggaattcggatctgaaccgaaatttcccggacctgacgtccgagtactaccggctggcggagacccgcggcgcacgcatcgaccacatccccatcccccagcactactggtggggtaaggtggccccggagacaaaggcaatcatgaagtggatgcagaccataccctttgtgctctcagccagccttcatgggggcgacctggtggtgtcctaccccttcgacttctccaagcacccccaggaggagaagatgttttctcccacgcccgacgagaagatgttcaagctgctgtccagagcctacgctgatgtccaccccatgatgatggacaggtcggagaataggtgtggaggcaatttcctgaagagggggagcatcatcaacggggcagactggtacagcttcacgggaggcatgtccgacttcaactacctgcacaccaactgctttgagatcacggtagagctgggctgtgtgaagttcccccccgaggaggccctgta

SEQ ID NO: 13391 - DNA, 472 bp, Homo sapiens
  misc_feature (1)...(472): n = A,T,C or G
ggtggcactgagacatagnattgacggtcgtaattccactcgcttttgataagagatattgattaggatgagatcttgttgcacagagtacttaccagccaccaataacatgtactttaataagctacatttatgtctcagcatcagttaagttgtactaaaggataaacttcttctagacaaaggttgtggcatcttcaccttcattttttcttaaaatatttagctgtttcttattattgctacactgctgtcatccaagtgaaaggtcaagactagcaacatattttatgaaaagacaaaaatataaaattaaccaaccctcaaccatgctacctcaattactcatatatacaatcaaaagtcatcttgataaaaaaaagtttacattaccatgaatattaccatgtttctgctccacgatttctccaacaagcagcttctatcactgacctgtatttggccaacttga

SEQ ID NO: 13392 - DNA, 467 bp, Homo sapiens
  misc_feature (1)...(467): n = A,T,C or G
cttcgaccccctatagangaccattagaccagagcggaggaattcggcgaaacccagtctctacacacatacacacacacatacagacacacagacacactcacacactagctgggtgtggtggcgcacatctgtggtcccagctactcaagaggctgaggtggaaggatcacttgagcccaggaatttgagttgcagtgaaccgagattgtgccattgcactccagcctgagagacagagcgagactctgtctcaaaaaaaaaaaaaaaaatgcttatgcctttataaaaaaattcaggggttttaaataaatttaaaaatacccgcttacaccaaggggtctttttgggaatcttaatttaaccggggccccttccctgggggagaaaaagcgataccggggggaagcctgaggggtcatttttttatgctttccattaaaagggggggtgttattgtagctttt

SEQ ID NO: 13393 - DNA, 470 bp, Homo sapiens
  misc_feature (1)...(470): n = A,T,C or G
ggcagccaatagagaccatctgnatagagggcgtaagtcccactgcttttgataagtgatattgattaggttgaatcttcttgtaaatagtatttaccagttagcaaagtctgtgttttcagaattacagtgagcacagaggtgttcataaaatgggaattgagtcccactcggtaagagttgcttaaacttgacactgttgacatttgggctggataaaacccctgtggtggggtctgtgctgtgcattgcaggatggtgagcagcgtccctctcatgtgacacccacagttatgccggatgttgccagatgcccctaggggacagagtcaacccccaactgaggaccactgtcctacagagtcaggaaatattgtagggagaaaaaaataacaacaacaaaggcctgtgttaatgttaaatagatgagattatggaatgtgtatattaatggtaaaaaattgaccttg

SEQ ID NO: 13394 - DNA, 460 bp, Homo sapiens
  misc_feature (1)...(460): n = A,T,C or G
natcgagtagcantagcgcagngncgnggcantcggaanattttactatttctgcagaacttctggtgatgtacagcatttgatttaacaacttctgtgtagatctgaaaataaatacattaccaattgttagttgcgtttttattaatataaatcttagagtacttgattttgctgttagctttacttaagtaaattatgtggcactctagcatttttgttggtgcatgttccattgaactttgctctgtgttttccatttattccaaattcaaaatagactgtaacttcccaatttattctatgttcccaaggcaccaggcatagtaggtgttttatgaatacctgttgacttgaaatttctcagacttttaaaaaatttttcattactgacaaaagatggagcgataaaaagattcttagtacacttcctattattgccaattctattagtaatgag

SEQ ID NO: 13395 - DNA, 466 bp, Homo sapiens
catagtagcaccactattgcagtgcggtggaattcaaaacacaaaaattaactgggcatagtggcactcaccagtagttccagctactcaggaggctgaggtgggagaatcccttgagcccaggagttcaaggctgcagtgagctgtgatcgtgccactgccctccagcctgggtgacagagtgagaacctgtctcaaaaagaagcaaacgtatcatctggtaggaaatgaaccctccctccattagtagaaaacccaaatagcagtattttacagataactttatagcaatagtcagggatttcaaaaaatttttttcatatccacttgccccatctattagttcaaatcatcttcctgcagcaaaaaaaaattttgtgtgtgtgtatgttcgaaattgctgttttgcatgactaatcagaaaagttgtcttcaggtgaatagtttccatgtgattctatcttta

SEQ ID NO: 13396 - DNA, 466 bp, Homo sapiens
  misc_feature (1)...(466): n = A,T,C or G
caacatcacatgggctgatgtggaggccacgtatcctttgtttgaagggcaagagactggtaaaaaagagacaatcgaggaatgaggacaattttgacaacttttgaccacttgcgctaataaaaaaaaaaaaaaaactacttttatgtccactttacaaaaaaaaacagcattgtgattactcccagggaccgtattttatcttcaggggctgcctgattttacccccacaattaaagttgaaggaatcctgcgaaaaaaaaaaaaaaaaaaaaaaaaaaaaaaaaaaaaaaaaaaaaaaaaaaaaaaaaaaaaaaaaaaaaaaaaannnnggccccccctttaaaaaaaaaagccccttaaaacccccggggaccccccgctggggtttttttttgaccccccctttttttgggtccccccccccccctttttttttatggggggggggggcccccctcctttg

SEQ ID NO: 13397 - DNA, 421 bp, Homo sapiens
ggccgagcaggaggcgccatcatgggagtggacatccgccataacaaggaccgaaaggttcggcgcaaggagcccaagagccaggatatctacctgaggctgttggtcaagttatacaggtttctggccagaagaaccaactccacattcaaccaggttgtgttgaagaggttgtttatgagtcgcaccaaccggccgcctctgtccctttcccggatgatccggaagatgaagcttcctggccgggaaaacaagacggccgtggttgtggggaccataactgatgatgtgcgggttcaggaggtacccaaactgaaggtatgtgcactgcgcgtgaccagccgggcccgcagccgcatcctcagggcagggggcaagatcctcactttcgaccagctggccctggactcccctaagggct

SEQ ID NO: 13398 - DNA, 460 bp, Homo sapiens
  misc_feature (1)...(460): n = A,T,C or G
atagtagacacttttgcangcggtggaattctggtgatacagtggaagtacaagtgaatggaaatcttgtcagagaacctgaccatatggaactggaagaagatagggctggacaacttaacatgcgtggagtttttctgcatgtccttggagatgccttgggttcagtgattgtagtagtaaatgccttagtcttttacttttcttggaaaggttgttctgaaggggatttttgtgtgaatccatgtttccctgacccctgcaaagcatttgtagaaataattaatagtactcatgcatcagtttatgaggctggtccttgctgggtgctatatttagatccaactctttgtgttgtaatggtttgtatacttctttacacaacctatccattacttaaggaatctgctcttattcttctacaaactgttcctaaacaaattgatatcagaaatttgat

SEQ ID NO: 13399 - DNA, 474 bp, Homo sapiens
  misc_feature (1)...(474): n = A,T,C or G
gccaggacatcgagaccattagaactgatggctgttgtcccgngcggtggaattcgacctttctgctcatctcaacctctcacagaggtgtcttctccccctaacctacagctttttgtacaagccattttgtgtaaattatttatatttaatattattccctgctttgtcaggagcaggtactaggctctggggcagtgaggaactagatccttctctcctcagcctagggtggaggtcactgcactaccacccacctctggaagactggctgtgaaaagtcaggtggcagaaacctggggccacatagagcctctctcttttcctgtttcttggctctagaagatcagcactgcactgttagctgagagtgcgggcaagacataaactgtccagagtttgaaggttctcggaaagaccggagggcttctccccacagaaggcggagagagctggggctcagacatgggtgtg

SEQ ID NO: 13400 - DNA, 463 bp, Homo sapiens
  misc_feature (1)...(463): n = A,T,C or G
ggccgccatgagacattgaatgagggcgtttgcctagcatctggcactttactcatttcctttgataaattgtactatgcagagctgtcaggaaccttcagatagcagtagaggactgcagctgtctaggtctgcggccacatcttggggacacactggactgttcccatgtgcagggttcagcagttatgtgggagtgctaggggttaggcttttgagcttgaacgcctgcgtgtgaacagatgaaaaatccttcagtacccaagtcccagtctgtcctatggggagcagtttgggggcggccggcagcaggagcctgggaaagaggccctcgccaggtgatggcagggccagggtggcctggggcacccagcggaatgtgcttagtatttggtcaccagccgtcatcctgggcttttcctactgtgtcttggtacaaggcctcagcantccacagaactct

SEQ ID NO: 13401 - DNA, 466 bp, Homo sapiens
  misc_feature (1)...(466): n = A,T,C or G
ggccgatgagaccctcgnncnaactgatgacattagtccatgcggtggaattcgcttgggaaagtagctcttatcaaacacaggagaactgatcatattgctgtttatttaaaatccggtgtaatgtggaatttttgcaatgtttcagggtccatatgacttaaataagattttaaaaataaattagctgagcatggtgttgcacacctgtggtcctagctacttgggaggctgaggtaggaggattgcttgggcatggaaggtggaggttgcagtgagctgagatcacaccactgcactccagtctgggcaacagagggagaccctgtctggaaaaaaaataaaatatgttttctgtttttttttgttttgagacagagcctcgctctgtcactcaggctggaagtcagtggcataatctgggcttactgtaacctccaccttctgggttcaggcgattcttctg

SEQ ID NO: 13402 - DNA, 458 bp, Homo sapiens
  misc_feature (1)...(458): n = A,T,C or G
gcgggnnnaatcgagttccactagcccagtgcggtggaattcagcatgaagaccaataatggatgcactgagctgattatgaatttagccctgatgaagacttgtgttgctgtcatgatatgaaagattccagtaatgaacgcacttgagttgattcaagcacgcttccatggtcatgagctctgtggttgcatctgtgtgttaggagcatgcagaccaatagtgataatctcgaggtgatttatgcattcttccatggccaccagccttatgattgcatctgtgcgtcacagcttagagatcaataatggatgcaacaagctctttgaatcattctgttgggatcaagattgttgtgttccctctgtttggaaagagaccaagaatggatacgctcaggtgatttaagcagtcttccatggccacgagctctgtggttgcctctgtatattaagagg

SEQ ID NO: 13403 - DNA, 466 bp, Homo sapiens
  misc_feature (1)...(466): n = A,T,C or G
atagaccnccntatagacgactattagaccangcggaggaattcccttactccagtatgacatcatcttaactttattaattatatttgtggcaacctcattccccataaggtcacattttgaggtatagaggattagaacatcaacataaatgttaggagggacacgatgcaaccataacagtggtgaaggctcatgaatggacagctgtagacttggccacacccagggccgccatgttaggacacttggaggctgggtttatgctggaggctccccagttcactcagcctgaggattcagaaaactctccaggaaggtgatccagagaagctatcgtgagcctttcccaggtaattcttcccactcaccctgtgcccacaggctggctggagggcgtgaggctctcagacggtgagcgaggctggtttcctgtgcagcaggtggagttcatttccaacccaga

SEQ ID NO: 13404 - DNA, 484 bp, Homo sapiens
  misc_feature (1)...(484): n = A,T,C or G
aggagttnccccaagaggcccccgatagtagacccatagagagccgtgnggaanncgtttgcaattttgaaacagactgcctttaaccctccaactttttttctgtaaaaagccttttttctttcttcctctgaaagctttgcattgtgaacaatccatggtaaacaaggctccctctacagccgcgagtgcgaagtacaaccccacaggttcagagcccagcgtttacccgtcagaaaaataaaatgatgacaagacatcacattagcgccacgcaggcttccttccgcacatgctcaagactctgctgtcaatagaaaactcacactttctttttaaaagagggtttaggcacatttactcatttgcaccttttattcctgaaatcaaatgtgttttcaaaccaattcactctccccagtttactggatcttctcatccttggtgatgtggggcaggtgggaggctttatttatccacacat

SEQ ID NO: 13405 - DNA, 475 bp, Homo sapiens
  misc_feature (1)...(475): n = A,T,C or G
ggagggcccagggncccccaactgagatnatgagagcatgcggaanncgctngcaattttgaaacagactgcctttaaccctccaactttttttctgtaaaaagccttttttctttcttcctctgaaagctttgcattgtgaacaatccatggtaaacaaggctccctctacagccgcgagtgcgaagtacaaccccacaggttcagagcccagcgtttacccgtcagaaaaataaaatgatgacaagacatcacattagcgccacgcaggcttccttccgcacatgctcaagactctgctgtcaatagaaaactcacactttctttttaaaagagggtttaggcacatttactcatttgcaccttttattcctgaaatcaaatgtgttttcaaaccaattcactctccccagtttactggatcttctcatccttggtgatgtggggcaggtgggaggctttatttatccacaca

SEQ ID NO: 13406 - DNA, 473 bp, Homo sapiens
  misc_feature (1)...(473): n = A,T,C or G
cgggccgactccagattgaatccttatcgattgcctatacaccgaacaggagtttccttcattgatgatggaagtaatgcaacagatctccttagaaaaatggcaacacagatggtagctgcacagcttgcatcaatggtgtggaataacccaagtcagcaacaatttatgcaatttggaggaagctctggatcacagttgcctcaaatccagacagatgttgtacttccatcatgcaaaaaaaaagctcctgctgaaactcctgtgaaagaaagactttttattgggtttaatcctcatcctttacctttagacgtattagaagatatattctgtcgttttggtaacctgatcgaagtttaccttgtgtcaggaaaaaatgtggggtatgccaagtatgccgatagaataagtgctaatgatgccattgccactctacatggaaagattctgaatggggtgagacttaaagn

SEQ ID NO: 13407 - DNA, 468 bp, Homo sapiens
  misc_feature (1)...(468): n = A,T,C or G
aaaaaaagaagnnnnnnnntttgagaatagagtacgtgcggaggaattcggacactgcgcacaccagacttcgctcgtactcgagcgcctcgcttcgcttttcctacgcagccatgtctgacaaacccgatatggctgagatcgagaaattcgataaggcgaaactgaagaagacagagacgcaggagaaaaatccactgccttccaaagaaacgattgaacaggagaagcaagcaggcgaatcgtaatgaggcgtgcgccgccaatatgcactgtacattccacaagcattgccttcttattttacttctttgagctgctgaactttgtaagacgcaaagagggtggatcaagtttaaatgactgtgctgcccctttcacatcaaagaactactgacaacgaagggcgcgcgtgcctttgccatatgtctatatatctggctggcacggaaagaaagaacttgcatg

SEQ ID NO: 13408 - DNA, 477 bp, Homo sapiens
  misc_feature (1)...(477): n = A,T,C or G
cgggacgcttacgccttgananacttnctcgagtgccctaaccatgcgccggaattcgttgatagtgataagctcctaaggatttttaacttgtacttttgagaacgaagagaacgcatcaataatgttggtgaggataaagcacagatatttcatgtagaattaattgctagttatgatgcttgtggatagttaactgttttttttttagtcaaaatgatcatgctaccaaaagatgcttctgaaagaatgtaatgactaactgatttttcttcctgagccgcccttgccaaatatgttactgtattaattaatctaatattgagggattatttgtaaaattatgaatatgggaaatccatctatctacagcctaagttacacataagtttcagaaagtctgattagactaaagagatatttcttctgggacagccttcttcttggtaattttgaagttgtttttacaagttcctt

SEQ ID NO: 13409 - DNA, 461 bp, Homo sapiens
  misc_feature (1)...(461): n = A,T,C or G
aggagaaaaaanttcgtagactgtagtccgtgtggtggaattcctccggtacccaccgggggatgtgcctgctcaggaaacctctttgctccacacagcatggggcttcagctgctggcccaaggccaggagcgctgggttctgcagcagggctcagcctcaggggcgttaagaccctggatgacatcaataaagggacaggaagggccatgttgccacatgagcaagcttgggtgctcccaaggttcaaatactttttattagacacggccaggcagagaagaccatgggagttcccgaggggccccagctttcaagggcgacgggagagacacaggataaaaggttaaaagtgcagaggcagagtctggggctcaggttgggtctagggtgtcctcaaacaggctgaggaggttccgaggctcaaaggaggggaaggagccccgaggaggctctgagtt

SEQ ID NO: 13410 - DNA, 438 bp, Homo sapiens
  misc_feature (1)...(438): n = A,T,C or G
nttcgtcgaccctagttcgtgtgctggaattcttgatatccaccaggtaactttctgagattttgactgggaatgcattgtatctatagatcaaattgggaagaattggcatcttaataaagcgtttttactcatgaacttgaaatatttctttgtttatatcttcgatttatttcataaatgtgtcatagtttccctcatatatctcttgtacctattttgtcaagtttaaaggtaaatgtttctatttttgcaagctaatataaatggcattgtgttttaatttataaattcaattgtttattgctgttatataggaaagcaactgacttttgtgtatgttttgtatcctgcaactctgctatagatgcttattagttccagaaagattttgtttctttgaaattttctacatagacaacatataattttccaacc

SEQ ID NO: 13411 - DNA, 470 bp, Homo sapiens
  misc_feature (1)...(470): n = A,T,C or G
ggcngnaggaannannnnnaattgtagacctgagtacgtgcggnggaattcaagaggagaaaacactgaacaaagagcctggtgtagtttttaattttgagttttctgacagaagaaaagattgatattttgtgtattgaacaggaagactgccagtattaaaaaaatccttctgggaatctgtaggttatttcttggaaattgcaatacgtagttctagaataaaagtacaaaaaattagaataagaattctttaacattttctttaatgatttgcataaatggagataaaacttgtatttagtatgtaatagaaaaaattctgttattcgcagattgttactatttcctataaggttttgtgatactatactgtcctaatacagtctgggaatactattctattttatttaaaatattttttattgaaatattaatgtttattacatgcaaataactattttgtatct

SEQ ID NO: 13412 - DNA, 477 bp, Homo sapiens
  misc_feature (1)...(477): n = A,T,C or G
aaaaaaaagaaagaaaaaaantttgtagacctgatgaccctctaggcgcagagtggaggaattccttggagattgcatgtcacccaagctggaaatttcttcccaagtagtggaacagccagggcagagggaacagacgctactgcagactctgcttcagccactgaatcaagggagagagtggcagctccggcagccacggggcagtggaaggacccagtcacgagagttcctggctgtgcctgtggcctgggttagctgctgttcacagtcagaccagcctggctggatgctgacgttgagggctcccatattggcaaaccaagggaggctgcgaaggccagtctcttgtttgcaccatgtccccagaggcctttggtgacacccctgttaaagactgctgtgtctcagtagaaagaattatatacttgaagcttggggatctagagtcagcttctaccactggcactttctatg

SEQ ID NO: 13413 - DNA, 441 bp, Homo sapiens
  misc_feature (1)...(441): n = A,T,C or G
ctcgactttcgagacaattagaccangcggnggaattcgtagttttcaggtataggaatgagatgcctcgtggtgaaaggatctcaccctgggaagatgtggtgccccctccagggctctggaggatggatgcctcccccaggggctctccaagctgggcatttgggcctggtggatgccaacctggataacctgtggcccagcattgactgtccacccagccttgctgttaggcaccatgactccaagatgaagatgtggtccctgcccttgagtgacagcccagggacttaatgtggccatcgggcatcaagcacaaggccatgcaggtgatgatacgtcggaatagaggcaccagccctggtaactgcatcttctccccttgccaccccatggccccggctgaaagcttcggccctcctctgctgtcactcaatgatg

SEQ ID NO: 13414 - DNA, 453 bp, Homo sapiens
  misc_feature (1)...(453): n = A,T,C or G
ggggnnattgatcgagaccctagtccgtgtggtggaattcgtctgagaacaaatacaattcagtcttctctttggggtgggagtatgtgtcaaacataggactggaagtttgcccctgttcttttttcttttgaaagaacatcagttcatgcctgaggcatgagtgactgtgcatttgagaatagttttccctattctgtggatacagtcccagagttttcagggagtacacaggtagattagtttgaagcattgaccttttatttattccttatttctctttcatcaaaacaaaacagcagctgtgggaggagaaatgagagggcttaaatgaaatttaaaataagctatattatacaaatactatctctgtattgttctgaccctggtaaatatatttcaaaacttcagatgacaaggattagaacactcattaaagatgctattcttcaa

SEQ ID NO: 13415 - DNA, 458 bp, Homo sapiens
  misc_feature (1)...(458): n = A,T,C or G
cggggggtttgagttccctagcccgtgtggtggaattcgtgtaaacaaaccagccagccgccaccttgctaaacctatgagctgtttaaaatccaatatattctgccaagaatatgccttgatagttagccctcagcccataggtgttttttgttttttaacagaattatatatgtctgcnggnanggtgctgcagcaactggatttccacatgcgaaaagagcaacgttcaatcccacctcacatcacagacaaaaattaactcaaaatggattaacccacgtgcaagagctaaattcatgaagaaaacataagggaataactgttgggcatggaggtgcatgcctggaatcccagctactcaggaggttgaggcaggaaaatcgcttgaatccaggaggcggaggttgcggagagccaagagggcgccattgcactccagcctgggcaacaagagg

SEQ ID NO: 13416 - DNA, 453 bp, Homo sapiens
  misc_feature (1)...(453): n = A,T,C or G
gggtaattgagacatatnaattgtagtcctctatccatgtggtggaattccactgattggtgaaagctattgaattagacagaaatgtttctctgcaaatatatatttaaatatttaatagtgaacagaatatctgaatggtgtgtatatacatatatatgttgtatgtgatttcagatgcaattttagatattctatgaaattgtgtaggcagaaggatacacctcaaactggtgaaaattatgtgtagatataaatgactactttttattttagtgtttaaatattttattacgtttgttgaggtgtgtattaactttctaatgaattaccacagtatagccagcagtttactacagcactcatttattttctcacagttcacagatgaaaaatgtgtcaggtttttctgggtactctgtctagtctcaccaggccaaaatcaaggtcaaa

SEQ ID NO: 13417 - DNA, 460 bp, Homo sapiens
aggagaaaaaatttcgagactcgagtccgtgtggtggaattcgttcgaaatccaaatcagagctcccaagtgatggaccctcccacagccaggcctacagaaccagagtctccaaaaaatgaccgtgaggggcctcagtgagaccagattgtgtcatttggctccaccttcatcttgcagagccagctgatctcagattgccaagaaactagaagccacttgcacggtgtggccagagcctcagctggatgagaggctgagatgggtggccagcttgtataccagtccctgaactgagctgtttacaggactggggaggctccacccagaaggctttcatttgtactctgctgggagtgactgggaaaaactccttccctgctgctgagtggagagaggcctcatccggctttgacccaccatccgttgcagaagcctccaggagcagcaatcctaagag

SEQ ID NO: 13418 - DNA, 456 bp, Homo sapiens
  misc_feature (1)...(456): n = A,T,C or G
aggggattgtagacactagtcattgtagggcaattcgaagngacccctcttcttgcctctgtaacaccgccatgcacatttcatacagcccttgctgaaacttcatctagttctctgttagacttaacattccctaagggcaggcttggaaccttactcatctttatatggcgcccaacataatgcttgctttatgatatgtgctcaataaaggttgtcttgaattgagcagatcctctagggacaggagttggatggagagcagactgtaaagcctcatgagggcaggggccctgcctcttcctgagctcaggatacccacagcctagctcactgcctgccatgagatcgttcactccatcaagccttgttaaatgagttcggggcggggggagcatgatggctttctctctctcataaagaaagcgctgtatctgagccctagcaccctctcta

SEQ ID NO: 13419 - DNA, 453 bp, Homo sapiens
  misc_feature (1)...(453): n = A,T,C or G
attganncccattgtagacccctagtccatgcggtggaattcatttttagtccagtctcataattctcttttccagcatgggcaaatataatttctaacataatttgttaaaaagtctctactgattctattttaactttgtatctttgattcattgtgcatgatccactttcgttggcacagaactggaaagtatagagtagggaggtaagggtaggctacagtaactcttaccaagaagaggaaagctaactcactgttgctcacagattctatgactgctcttccttcctctttctctcattcaatttattttacttccaattaagttaaaatacaactttgaaagataagatatgatatatcagattatgaaagcagcttagactagtgaagactttggcatgtatagaaaggatgactgtattctgaaagattattgataaattatan

SEQ ID NO: 13420 - DNA, 452 bp, Homo sapiens
  misc_feature (1)...(452): n = A,T,C or G
nattgangatnattagaccaccgtggtggaattcggctccttgggcagcaagaagggtgtgaaccttcctggggctgctgtggacttgcctgctgtgtcggagaaggacatccaggatctgaagtttggggtcgagcaggatgttgatatggtgtttgcgtcattcatccgcaaggcatctgatgtccatgaagttaggaaggtcctgggagagaagggaaagaacatcaagattatcagcaaaatcgagaatcatgagggggttcggaggtttgatgaaatcctggaggccagtgatgggatcatggtggctcgtggtgatctaggcattgagattcctgcagagaaggtcttccttgctcagaagatgatgattggacggtgcaaccgagctgggaagcctgtcatctgtgctactcagatgctggagagcatgatcaagaagccccgcn

SEQ ID NO: 13421 - DNA, 477 bp, Homo sapiens
  misc_feature (1)...(477): n = A,T,C or G
gggcttggtcncccgactgataccctattagangccgttgaanaccgagccatggcgacggtggcaggtacgatgacagaaaaatggacacgctctccatgattttttgcagataatggtcctgtgtgttagaatgacagtataaatataatttcaagttcatgccattttctaatatagcaatgttagaagctagaggtctctgaatgcctctttcttgttaatactcaataacaaatattttatgcagattgtgtttctttgtttctctaccaaaaatatattggaaagaaaaaaggttttatgtaggaattgaaaatatacaccaaaaaccagttgtcattttcaaataacatagctttttgttgtgcttttaatagcaccgtgaaaatcttaagttttatcattaattgatgacaaataaaaatgcagtcttagcattggtattacttgtagaacaaaaccgttacaggaaag

SEQ ID NO: 13422 - DNA, 463 bp, Homo sapiens
  misc_feature (1)...(463): n = A,T,C or G
aggaggggnntttgnattcgtcgatccctatnccgtgtggtggaattcgtggtcttgggtacagatagatatatagactaatggaagagaatcaagagtccataaataaacccacatgtcaatggcccaactggtttttgaaaagcgtgccagatacactcaatgaggaaagaagagtctcttcaacaaatggtgctgcagcaactggatttccacatgcgaaaagagcaacgttcaatcccacctcacatcacagacaaaaattaactcaaaatggattaacccacgtgcaagagctaaattcatgaagaaaacataagggaataactgttgggcatggtggtgcatgcctgtaatcccagctactcaggaggttgaggcaggaaaatcgcttgaatccaggaggcggaggttgcggtgagccaagatcgcgccattgcactccagcctgggcaacaagagt

SEQ ID NO: 13423 - DNA, 478 bp, Homo sapiens
  misc_feature (1)...(478): n = A,T,C or G
agccacgtgcccctaagaaacccttgatgagaccttcggccanngcgnggaantcgcgtgggcaatgtggtgaaaccttatctctacagaaaatacataaattaactgggcattttgccatgtgcctgtggtcccagctactcgggaggctgaggtgggaggatcacttgagcccaggaggtcaaggctgcaatgagtggtgatcgttttgccactgcactccagcctgggcaaaagagtgagcccctgtctcaaaatcaaccccaacaacaaactctatttgtgaataaggattactggtagtatcctagtagtaaggattactagtagttatccagccctaacagtaatttcttttcagaatctctaggactgcgtagtaaagtgctgaggaaaattgaagagctcaggaccaaggttaaatccctttcttcaggaattcctgatgaatttatatgtccaataactagagaactta

SEQ ID NO: 13424 - DNA, 472 bp, Homo sapiens
  misc_feature (1)...(472): n = A,T,C or G
naagacgcccgtttttanaaaccanttangacagactnncnntnnnnntaagngacggnncggggagaagaccggagtgcattnaggtntaaaccgctcttttgtttggtcgactttgggcttatttttgggccgccgagttctaaaaagttggattacaaactctctgtctgcaggtatgttataacgaactacattaataaattattgttactttctctgtttctaggtgtttcctgtaatgtttctgtggataaggaacagaaactatccaaacgtgaaaaggaaaatggttgcgtccttgagactttgtgctgcgcggggtgctcactcaatcttggctacgtgtacagatgcacgcccaataatcttgattacaagagagacttgttttgcctcactgttgaagccattgaaaggtaagtttgatatataaatgtttacctcacaactggtgtttcagaaagttaag

SEQ ID NO: 13425 - DNA, 444 bp, Homo sapiens
  misc_feature (1)...(444): n = A,T,C or G
tgggccattgagacaatgatatcgtgtggaattcgcgncactcacttgcctttaaatagagatctttttaactccctcatcaaattctttcaggaattattgattttcttagttggtttcttttgattgtgtattttatcatggagatgatattaattccaggataaaatactgatataaggaattttcaaaattgttgctcattattttctaattttcatttagcctcttgcaacattgcaaacaaagttgataacattttacctttagattcaccttttcaatttacaaaacacttaatgtctaagacttgccaatgatataagctatttactatttaacacatttatagataaggtgtagagcattggcaaggttaaatgactttgctaaggtcacacaaccagacattagcgaagccagaccttgaacccagcatttttg

SEQ ID NO: 13426 - DNA, 477 bp, Homo sapiens
  misc_feature (1)...(477): n = A,T,C or G
ngatgccgccnnncttttacaannaagtttacaaagnannntcnctnnnnntangnaacgnaccagaggaacccaatgctgcagttcctgatgagatcccttttctttattgcgaagaggatgcgtctcgcatgggacgagtcgattaagataggagttcatacttgcaaaacttgtgcccttgtatagtgtccccatgggctcccactgcagcctcgagtgcccctgtcccacctggctccccctgctggtgtctagagtttttttccctctcctgtccttgtgttgaaggcagtaaactaagggtgtcaagccccattccctctctactcttgacagcaggattggatgttgtgtattgcggattattttattttcttcattttgttctgaaattaaagcatgcaaaataaagaatatgcccgttttatacccnnnaaaaaaaataactctctaaaaaaaagcccccctttttat

SEQ ID NO: 13427 - DNA, 482 bp, Homo sapiens
  misc_feature (1)...(482): n = A,T,C or G
agacnnnnnnnagggcgggcccagnnnattaatctgaaacctagctgagaccctcgaaangccncnaggnnaggaggaggnggaaatgtgggaaggacacaccgtcctttaaggaaacctccaggaagttgcctacaacacttctggccatacttcaaggccttacttaactgcagggaggctgggagatgtagttctttaagtgggcatgttgttatccacagcagtgtaaagtgtatgttactatgggggaaggagccactcatgtttgtgtagacagtgcctgcctcgtaaataatatacgtttctgtttatagtctgttactgcagctgagaagcaaaccatcttaatatcactaatgaacttcattaaatagttcaattcccagaaatttcacaagaattctcttatagttaaggttaacaaatacaaatcatttaatcagtgtcctgagtaggcagacatgaaaataatttatttg

SEQ ID NO: 13428 - DNA, 468 bp, Homo sapiens
  misc_feature (1)...(468): n = A,T,C or G
tggcgggcgnttttntttgaattcactggcatngtgcaggaattctttccagagggcaggcgtcctagctccagttgctccatcccttgggccctcccctgctcttcatctagccaaactggtttgagtcagccacaccccttcccagctccctgggctcttcacgtggtggctggccactcaaccccacccctgggcttggcttggagccctgagtcagctccatcaccacccaagccaaaccaaagctgaggcaggagccgaaactcagagtccttcaaggcctatagccaggtgatggaggacgaggagaaggcagtggagatcttgggcaacacggaagctgctcatcctccatcccccatccgctgctgctggctccgcctccgctgcttggcagctactagcattatctgtggctgctcttgcctgggagtcatggctctggtgtttgccatcaaggcggaa

SEQ ID NO: 13429 - DNA, 447 bp, Homo sapiens
  misc_feature (1)...(447): n = A,T,C or G
ggcgcggatcgagaccattgagagcatgtggaaancctaaggcacttgcttataaaactgtggaacatttttaaaagaaaataaatctcaccagtcatccttctacccagaagtaacattttcatgcattacctggtaatttttttctctgcatattttttcatagttgagataatttaaggaaaaccattttgtgtccttcatatatggatgaatacaatataattctggtattaatatcatagcaacaaagaaggcattgaaggctttaaatctgcttacagggaattgaaaagacaggatgaagtgcacacagcatgcgaagacaattctttcaagaagtttggctgtcaaggaaaacagagaatgtgagtagccacagcagaatgacagcgaaagaaagaaattgggagccagacaatacagcccgacagtttacgcctgttc

SEQ ID NO: 13430 - DNA, 458 bp, Homo sapiens
  misc_feature (1)...(458): n = A,T,C or G
catcgacatcgtagacccttagnccgngcggtggaattcatactttacaccaaatctcagaagattcagaacttagatgagtggggcccaggacaggaaccctggagccttggaaggaggggagccccatctccccagaagagcagtgaccccagcagagaggggcctggtgtatcactggaggaaatagcctgccaaggaatacacgtcttcagaagaaattctgtgtggcttcaagagactgatcaaattgtgagaggaaaacagcctactcgagccaatattggagcttttcaataaaagctatggcctcaaccaccagcaccaagaagatgatggaggaagccacctgctccatctgcctgagcctgatgacgaacccagtaagcatcaactgtggacacagctactgccacttgtgtataacagacttctttaaaaacccaagccaagagcaa

SEQ ID NO: 13431 - DNA, 460 bp, Homo sapiens
  misc_feature (1)...(460): n = A,T,C or G
tgtgggccnnntttcgagactctagtccgtgtggtggaattctccacggtgactacagtacatgctgaagcgtgccgtttcagccctcatttaattcaatttgtaagtagcgcagcagcctctgtgggggaggataggctgaaaaaaaaaaagtgggctcgtatttatctacaggactccatatagtcatatataggcatataaatctattctttttctttgtttttttctttcttcctttctttcaaaggtttgcattaacttttcaaagtagttcctataggggcattgaggagcttcctcattctgggaaaactgagaaaacccatattctcctaatacaacccgtaatagcatttttgcctgcctcgaggcagagtttcccgtgagcaataaactcagcttttttgtggggcncnnnnnnnnnnnnnnnnnnnnnnnnnnnnnnaaaaaaaaggcg

SEQ ID NO: 13432 - DNA, 439 bp, Homo sapiens
  misc_feature (1)...(439): n = A,T,C or G
taaacaggaacgtcngnanngacantctcgcaancccngaaacctttactcgagggcagaaatacggactcaccttgcttgtaactactgatcttgagctcataaaatacctaaataaggtggtggaacaactgaaagattggttatacaagtgttcagttcagaaactggttgtagttatctcaaatattgaaagtggtgaggtcctggaaagatggcagtttgatattgagtgtgacaagactgcaaaagatgacagtgcacccagagaaaagtctcagaaagctatccaggatgaaatccgttcagtgatcagacagatcacagctacggtgacatttctgccactgttggaagtttcttgttcatttgatctgctgatttatacagacaaagatttggttgtacctgaaaaatgggaagagtcgggaccacagtt

SEQ ID NO: 13433 - DNA, 506 bp, Homo sapiens
  misc_feature (1)...(506): n = A,T,C or G
cgagggnnnnnnnttttgatgacatcntacgacagcgncgaggaattcaaactgaaatggatttgcacgttggggagctggcggcggcggctgctgggcctttttcttcttttctacgtgaaatcagtgaggtgagacttcccagaccccggaggcgtggaggagaggagactgtttgatgtggtacaggggcagtcagtggagggcgagtggtttcggaaaaaaaaaaacgaaaaaaggaaaaaaaaaaataaaaaatgcggggccgttcatttttaagggccccttttaaccccgttgataaccctgaattggcctttttattgcccacccttttgttttttgcccttcccccggcctttttttgcccttggagggggcccctccctttgtttttttttaataaaaggaggaaattgcttccctttgttggagtgggggcttttttttttggcncncctnccggtgtgctggtaattatatctttctgctcctctcccggtttg

SEQ ID NO: 13434 - DNA, 454 bp, Homo sapiens
  misc_feature (1)...(454): n = A,T,C or G
tggggnaaatgattcattacaccgngcggnggaattccccacaggccttcagccctttaacgtctctgccaaaaaccagcacaaggagacaaagcagagccttgtctgtatctgggcagcaggtgttccatgctgctaggtggcgggggtcgggggtcttctgtttcactaacaggaacaaagacagaaaccatgacagggctgccccgccaggccccggtgggtttgtctgcacttggtgctcctgcccacaccagccactttggtgacaatgacccttccaagaatctttggttcaaggagcaccagttccctcttcattcttgaagcagggagaaattgacctttgccttgtcgcccaggaagtggggctcggcacccataactaacacctcccacccttggaaaccatgtcttctgggggtgagatgaccattctgggtctaagactgat

SEQ ID NO: 13435 - DNA, 467 bp, Homo sapiens
  misc_feature (1)...(467): n = A,T,C or G
tggcgggcgttttnaactgttagcatggcatngtgcnggaactcgtggctcaaagcgcccagtccgacgccaggctctgcgctcggtctcctctgctccacctcctccccgcggggcgtgcagctccgaagctctttggacctagcaggttcggcggccgggaggtgccattcacatcaaatgtagccattttagaggtgtcaaaataaatcagccatatttaataaattccagctctactcttctaccctgtagcccaagaagcagcaacgatggggtcaaaggatcatgcagtatttttcagggaaatgacacagttaattttgaatgaaatgccaaaagctgggtattccagcatattaaatgattttgtggaatctaatttttttgtgattgatggagattccttgcttgtcacatgcctgggtgtaaaatcattcaagtggggacagaatctccactttttc

SEQ ID NO: 13436 - DNA, 468 bp, Homo sapiens
  misc_feature (1)...(468): n = A,T,C or G
tgggggcgnnttttnccttgactgcatagcatagccangngcnggaattcggagaagacccacacccctttctgtggcccccaccctcatctggtccccaacatccactccttccttaactcctccatctctcccccacctctccacctttctgctccagctacacaacccatttttcttttttcttttctttttgttcagactgagtctcactctgtcacccaggctggagtgcagtggtgcgatctcggctcactgcagcctccatctcccaggctcaagcaattctcctgcttcagcctcctgaggagctgggattacaggcgcccgccacgatgcccagctaatttttgtattttttgtagagacagggttttaccatgttgcacaggctggtttcaaactcctgacctcaagtgatccacctgcctcagcctcccaaagtgttaggattataggcgcgagcca

SEQ ID NO: 13437 - DNA, 452 bp, Homo sapiens
  misc_feature (1)...(452): n = A,T,C or G
atcgaagacactagtcgatgagcgttgaattcctcacctttcgctgnttggtgtttcacagatttatttaaaaaaagagaaagtctatagctataaatctttaaagagaaatatgaatacaattccccttaactctcctcaaaagagaattcagtctacagccatttaaatgatcattgctgctacagaagtgctttaagagaattgcctgaaacatctgtattatatcggccacctgccaatcacagctttactctttcaggtcactctggggctgcctcttgcatgtattactaaataaaaggatctctctttctctctctctctctcttttctaagaaacaattatgtgcactttgatacacaaccttctctaaccaactatatatcaagacccaaaaattgaagaaaaatattgttttctcatacagtgagcagatttttcaatctat

SEQ ID NO: 13438 - DNA, 462 bp, Homo sapiens
  misc_feature (1)...(462): n = A,T,C or G
attcgagaccattagttggngngcttgaattcgctcgcggggccatgccattcctcgggcaggactggcggtccccggggcagaactgggtgaagacggtcgacggctggaagcgcttcctggatgagaagagcggcagtttcgtgagcgacctcagcagttactgcaacaaggaggtatacaataaggagaatcttttcaacagcctgaactatgatgttgcagccaagaagagaaagaaggacatgctgaatagcaaaaccaaaactcagtatttccaccaagaaaaatggatctatgttcacaaaggaagtactaaagagcgccatggatattgcaccctgggggaagctttcaacagactggacttctcaactgccattctggattccagaagatttaactacgtggtccgggtaagtctcaagtgcctaaaggctcatccaggctctttcccaagtt

SEQ ID NO: 13439 - DNA, 468 bp, Homo sapiens
  misc_feature (1)...(468): n = A,T,C or G
aggcgtgcctttgagncccttnaatgaggacctcagtacangcggnggaattcaaacacggcttgtggcattggcatacttgcccttacaggtggagtatcttcgtcacacatctaaatgagaaatcagtgacaacaagtctttgaaatggtgctatggatttaccattccttattatcactaatcatctaaacaactcactggaaatccaattaacaattttacaacataagatagaatggagacctgaataattctgtgtaatataaatggtttataactgcttttgtacctagctaggctgctattattactataatgagtaaatcataaagccttcatcactcccacatttttcttacggtcggagcatcagaacaagcgtctagactccttgggaccgtgagttcctagagcttggctgggtctaggctgttctgtgcctccaaggactgtctggcaatgact

SEQ ID NO: 13440 - DNA, 451 bp, Homo sapiens
  misc_feature (1)...(451): n = A,T,C or G
caatagatgaccnnttgatagacgttggaannccacncatccggccaaccaatgtttcctgacgtacagtgttgcccttttcagcaaatgccaattccaagttccattaaatcataagctccatggctccttggcccacgatgtcgagcgctgactgtgcgttctactgaaagagtaaaacactgactatccaaagagaaatggatattctggttttataataaccatatattattgatttcttcttccctttctatgcaagcgtaaattaatgaacagagaggtatttggaaatggtaatacattcgtcacggatttgtataatgtatacagcattgggaaagagggtgggggctttctaatatgataccgtctttttaataactatgacgcagcttacatatgaattagaagaccactttacatttttacattccttctgctgttcatg

SEQ ID NO: 13441 - DNA, 496 bp, Homo sapiens
  misc_feature (1)...(496): n = A,T,C or G
natcggagnaccantagtccagngnggnggtagaccaactgtggaccttgcaacactggaaggagatggaatgaacatagaaggagaggagctgatgccaagtctgcaggaagctttgagttctgacatccttaatgacatggagtctgttttggctgccaccaagctagataaagaaagctttcttacatggttatagagccctcaggcagactgaattctaaatctgtgaaggatctaaggagacacatgcaccggaaatttccataagccagttgcagttttcaggctaatacagaaaaagatgaacaaacgtccagcaagatactttaatcctctattttgctcttccttgtccattgctgctgttaatgtattgctgacctctttcacagttggctctaaagaatcaaaagaaaaaaactttttatttcttttgctattaaaactactgttcattntgngggctgggggaagtgagcctgtttggatgatg

SEQ ID NO: 13442 - DNA, 481 bp, Homo sapiens
  misc_feature (1)...(481): n = A,T,C or G
cgcccaatcgaaganccctagtccagtgtagaggaattcctcatcgctccccctccccaccccgcgcaggccactgagacggtgggacacacgcccccacctgctccttcctgggccctcagtccacccgggctcgtcctggcagcccttccgcgcttcacacagtgccttttgtgaaagtgtcatcacgggtcccctgaggagacaaggcaggtccagcgcacatcaggcggactgagcactcgatgtcatccgtgtcgatgtcatccgtgtgtcccagactgcctgctgtagaaaacacttcctcctctcctgagtctgtgaagtcctcagagagcctttttggattctaggcttgcacctcatactaaacattgaccctttcactatgccctcaacctgggagcatcttgcaggcaggggggcaggtacacacacacccacaggcacacccaccagtacacacgcgtgcgcatacaca

SEQ ID NO: 13443 - DNA, 501 bp, Homo sapiens
  misc_feature (1)...(501): n = A,T,C or G
gggggnnnnnnnnnagtagactttcctaggaagcgncgnggaattctcatcttgtgcctcttctccatttgcctcttccttcctatttcccttccgctaatgaattaaattggaggcacatttgtaaaagtaattttaatagttaatcatctctgagagtaacctgtattttaattgttgaaacttaaccaaaataagatactgtctcagctagggcttgtcatttgtgtatttagtgttaagataggaatgctagtgtctctttaattaattggaaatagatggaggctaaaaatgaaggtttttctttgaaactgaattaacttgggaatatttgttgttaaaaacttctttttgcccaaaataactcattttgtattatctgaaaatatataatttctggtcatgtgtatgttaaaatagaaaattttgaggaacaatggaaatagggtggaaaagtactttggtaacagtagtaaccaaatattttcactccagatt

SEQ ID NO: 13444 - DNA, 436 bp, Homo sapiens
  misc_feature (1)...(436): n = A,T,C or G
ngggttctaatccttgtaccgtagtctnngaaancnngggnagggagggnagtcgggcccttcccttaagcttccaaacgtgctgaatgccttacatgattggatttgtagtcgtcggctcatctggacacgaagacggcttcagtgcccgggagctcatgatccacgcgccaactgtcagtgggtggcggtcacctagtttttgaggagatgcaacaaataagaccccctgtgcctgcatttcccggaagtgagttctgaatgaactgataaatgaagcacgagtcaagcagaaggggccagacagcgcctttgtcacccgcagagctgggattgcaggcgagccagcgtcctgatactgcccaggccgtggccgatgcactgcccatgcaggcagcattaacacggtccagcctgtggctggagggcaggaggn

SEQ ID NO: 13445 - DNA, 453 bp, Homo sapiens
  misc_feature (1)...(453): n = A,T,C or G
ggggnntttgtttcattacctctgtccangcggtggaattcgagacatttatgataatattcattgcagtgtactttaaaataatgaaaaattgagacctgcctaaatatccactaatggaaggagattaatttttgatatgttcgtatagtaaaataataagcagtagagaaatcaagtagagcttatataaacagcatggacaaatctcagaaatctgattttcacagaaaagcacattttagaaagctatgtacacttttagtctatgcagaataattatgttctctttttggtgagaataataatatgttattaaggtatacttaaatatgaagtaaaagtataaaaaactatgtatgtgaatgataaaataccaaattaggggagtgtcaccttatctggtaaagtacattaagctggttggtgaatacatgggttttatataattat

SEQ ID NO: 13446 - DNA, 456 bp, Homo sapiens
  misc_feature (1)...(456): n = A,T,C or G
taggaaanccccgaagatctncgnanagncnggnggaattcnaagaagaagaaaacatgtcaggacacaaatgcagttatccctgggttttacaggttcgatatgctcaagataagtcaggggtaaataagatgcaacagaaatattgggagacgaagcaggcctttattaaagccacagggaagaaggaagatgaacatgttgttgcctctgacgcggacctggatgccaagctagagctgtttcattcaattcagagaacctgtctggacttatcgaaagcaattgtactctatcaaaagaggatatgtttcttgtctcaagaagaaaacgaactgggaaaatttcttcgatcccaaggtttccaagataaaaccagagcaggaaagatgatgcaagcgacaggaaaggccctctgcttttcttcccagcaaaggttggccttacgaaatcctg

SEQ ID NO: 13447 - DNA, 450 bp, Homo sapiens
  misc_feature (1)...(450): n = A,T,C or G
cactgacacccctganaggcgtcggaannncacngagacttcgactatgtccacttttcatgctcaggtaaaaagaacgtattcttatggtacttacagagctggcccaatgagacaaataagcttggtgggagcagttgatgaagaagtaggagattatttccctgagttccttgacatgttggaagagtcaccatttttaaaatgtacactgccatgggggacgctatctagtctaaaattacagagtcgaaaagatagtgatgatggtcccatcatgtgggttcgtccaggagaacaaatgatccctgtggctgatatgccaaagtcacctttcaaaaggaaaagaactaccaatgaaataaaaaatcttcagtacctacctcgaacaagtgagccccgtgagatgctctttgaagacaggacaagagctcatgcagatcatataag

SEQ ID NO: 13448 - DNA, 502 bp, Homo sapiens
  misc_feature (1)...(502): n = A,T,C or G
gaaggtnnnnnncactgataacctacgaagngncgnggaanncgnggcatgaacatggctcactgcagcctcgatttcctgggctcaagcaatcttcccattttggtctctcgaggagctgagactacaggcacgtgctgccacacccagatatgttttaaagttttttgtagagacaggtcttgctatgttgcccgggctggtctcaaactcctggactcaagcagtcctcctgccttgtcttcccaaagtgctggtattacaggcgtgagccattgcacctggcctgttctgggtattttgtataaatggaatcagtatgtgaccttttgtatctggctgcttctacctagctttatgttttccatgttcttccccattgcatcatgtatcagtactttctttctttttgtggcataatattccattatatgtatccactgcaattttgtttactgatctgttgatagacatttgggctggttccaccttttggctgttg

SEQ ID NO: 13449 - DNA, 473 bp, Homo sapiens
  misc_feature (1)...(473): n = A,T,C or G
ccccccccccgcccccncaatagaacnccaactagagatcatagaccangcggnggaattccttttactcaacttttctttgttttgaaactttgtttcccatactgttttcagccttttgtttataattagaaattgtgagaagcttcatttagtgtttaaaaatgtggggagataaatcagacttaacatgtatgtaagatcaattcacttaaaagtatggtccaaatagcaaaaataggaccaggtgaaacatgtagtcattttttaaaaacatgtacttggtcttttgtgtgtgtctgttttattccattagaataaatgtgtccttgatgtaaatgcaaagcatttcttcctgattaaattgtagatgtagactttacaatataattcaataataaaaagtaattaacctctannaaaaaaaaaaaaaaaaaaaaaaaaaaaaaaaaaaaaaaaaaaaaaaaaaaaaa

SEQ ID NO: 13450 - DNA, 495 bp, Homo sapiens
  misc_feature (1)...(495): n = A,T,C or G
natttgagacccctatgccagataggaggccctatggcagagctcggccaggctgctggtacctgtgtccgcccggcgagcaggacaggctgctttgttttgcgacctccaggcctgacggacatcctctccagaatgaagatcttcttgccagtgctgctggctgcccttctgggtgtggagcgagccacctcgctgatgtgcttctcctgcttgaaccataagagcaatctgtactgcctgaagccgaccatctgctccgaccaagacaactactgcgtgactgtgtctgctagtgccggcattgggaatctcgtgacatttggccacagcctgagcaagacctgttccccggcctgccccatcccaaaaggcgtcaatgctggtgtggcttccatgggcatcagctgctgccagagctttctgtgcaatttcaatgcggccgatggcgggctgcgggcaagcgtcaccctgctgggtgccgggctgctgctg

SEQ ID NO: 13451 - DNA, 442 bp, Homo sapiens
ttgagaccctgtgaaggcgtaattactcgccacaatgggcctagcgcagactagaagccatctgccttcttctgaaaaatgacattaaaacaggtctgaaagaggttttgacttctttctctgaactcaaaggggaaaaaggagtgttttgcagcagtgggatttaaccttttttgatatcatctgtaagaagaaatacatcctaccttgcaacctcgtgtacaggtatgggcacagatagctaaagtaaacatttcacagaacaagtgatacctgcccttctcagtgtgatggagtgtgatgtatttattgagcagcagcatagggtagtggctaagaacctaaactctaaatttagatgtcctgagttcaaatcccagctgtatgctcaccagccttgtgtgtggggccagttaattaacctctttgtgttttacttttt

SEQ ID NO: 13452 - DNA, 462 bp, Homo sapiens
  misc_feature (1)...(462): n = A,T,C or G
agaaaatnncctcgagatcactagtcggtgtgccgtaattccaggactgcacggtttaacacagcagagtacagaagggtgaagaagtgagcagaggcttatgaagatattcagatactcttctatgccaggaagcacaaagactttgttgagatttgcctcagttcagtagatcttccttggcagccagccataggttgtttctttgtcttccgggtcctaaagagcacagagaaaatggaggtccccagtctaggtaggaagctgattggatgaggacttctttttttccgacagcaggatggggctcttgggctccacacaccagatgctttggttttctacaactgttgctatgtgtagagggtgctcagagcgtggcatgagagcaaggagaccatggctactctttgaaatggatggggaaaattagcttaaaaatttaatcacgagattgcgccg

SEQ ID NO: 13453 - DNA, 427 bp, Homo sapiens
aagaaaacatatattttggccatctaaaaatgagaattataattatatgaattataatttaaactgtttaattttgtttaatgtgtatattgaatcttccaaattgaagccattattctcaattaagtactacaactatgacaatgcttgacctacatttctaaaataaaaattcacattttttgataaataaactacagttttaccagaaattactatctaaatgtgtattagcagtattttttaaggtgaaattgccttggtatctaatgaatgtgtagacagggagataaaatgaaggattgccagactagttagaatagaatttaggattaggttagttttgaaaaatgatgttgtaatatatgggttctaacacatcctaccataaaaactggaggagatatgtgtaacctgggtaatttgg

SEQ ID NO: 13454 - DNA, 469 bp, Homo sapiens
  misc_feature (1)...(469): n = A,T,C or G
aggctgcttttttttgagtccctggcagtgcggtggaattcctgaaatggaagtgttcgacatagctgctcctttcctccggaagtcagaaaaggagaggatcgaggctcagaaccagccctttgatgccaagacgtattgcttcgtggtggactcaaaggaagaatatgccaaggggaaaatcaagagttctcaggatgggaaggtcactgtggaaactgaggacaacaggaccctggtggtcaaaccagaggatgtgtacgccatgaacccccccaagttcgacaggatcgaagacatggccatgctgacgcacctgaatgagccagccgtgctgtacaacctgaaggaccgttacacatcttggatgatctatgtcagcgagggctttcgacgtggtttccctggggcattagatatgcgggcaggggagggaggcanaggtatgtgtgtgggccgtgggattctg

SEQ ID NO: 13455 - DNA, 476 bp, Homo sapiens
  misc_feature (1)...(476): n = A,T,C or G
ggggaggtgcccccatagagaccntagtagaagagcttgaattcgctgggaacaggccctaagcctgtcataaacaggccttaaactgaccatgaacaggatttctgcacgaatgtgacgtgctcctgatggctatgacgcccactgctagaagttgttagtttactggagcagggtagggaacacctggcccacccggagcggaaaactgctcaaaccacaaacaacagcatgagtggcctgagccttaacaacatgtttttgctgcagataatcggccagagactgtttctctactcctctctaagtatgctttgtttttcgtaaggaatgcttttagctaatctgtaacctatagaaacaatgcttatcactggcttgctgtcaataaacatgtgggtcaaaaaaaaaaaaaaaaaaaaaaaannnnnnnnanaaaaaaaaaaaaaaanaaaaaaaaaaaaaatataagcgct

SEQ ID NO: 13456 - DNA, 470 bp, Homo sapiens
  misc_feature (1)...(470): n = A,T,C or G
ccccccccccccccccccatagaaacccaactgagatcatagtacangcggnggaattcgaaaagaagagaacaggccagcccctctgcatctgctgaactgaacaaactatcacaggaaaggaagtgggactggcactatttgagggtaaaacaaactgcatatgtacttcaattgctttgcacttttccgtttcagcggaagacctgaagagtggtcagaacagagcctttgatttttattatgggtattttattgattattactggcaaaaacggccaggtacaacacctttttcatacaaggcccaggaggcttagtccagtctgtgctcctgggctacaaggacccagcttgagatggtcccatctgcatggccccgcaccagttggagcagatgcctccccaccaccaattgccataggtccaatagaatgcctcaaccacggaaaaaaaaaaaaaaaaaaaan

SEQ ID NO: 13457 - DNA, 487 bp, Homo sapiens
  misc_feature (1)...(487): n = A,T,C or G
ggccatcccaattgagncccctgggnaattgtagtccctagtcagtgtggtggaattcgaaacacctgttggccaggcgcggcggctcatgtctgtaatcccagtactttgggaggctgaggcgggcagatcaggaggtcaggagttcaggacaagcctggccaacatggtgaaacccctgtctctacgaaaaatacaaaaattagctgggcatggtggcgcgtgcctgtagtcccagctcctcgggaggatgaggtgggagaatcgcttgaacctgggaggctgaggttgcagtgagccgagatgacaccactggactccagcctgggctatagaacaagactccctttaaaaagaaaaaaaaattcatgatctggaagcccgagtgtagctaactggtggacagatgaaagtgaaatgtgtgatgtttcctaagaccccctaagacttccctgagccacgggaggctctcacgagtgtgtaagcc

SEQ ID NO: 13458 - DNA, 483 bp, Homo sapiens
agggcttgccaatagagacccctaggccattgaggagccattcggaggctcacacctgtaatcccagcactttgggaggccaaggtgggcgaatcacttgaggtcgggagtttgagaccaggtgaccaacatggagaaactccatctctactaaaaaatacaaaattagcccggtgtggtggcgcatgcctgtaatcccagctactcgggagactgaggcaggagaatcgcttgaacacgacaggtggaggttgcagtgtggcgagattgcaccattgcactccagtctgggcgacaagagggaaactccatctgaaaaaaaagagaaattcttttattttctacttctcttcagatttgtcttatgcattttccaactatgtatgcatcacagctattctttttctgagttatagctacaagtttcttactgttggcttcatgccatttcatttcacatggtactttgtagatttgatgagg

SEQ ID NO: 13459 - DNA, 451 bp, Homo sapiens
  misc_feature (1)...(451): n = A,T,C or G
nttagatgaccattagtagangcccgtgaattccttgatctgggtggtggttacacaggtatacgcgtgttaagaaatcatcaggctgtatacttagtgtactgtaatggcattacactgtctttcaattaaaatgtgaaagaaaaaacgggggtgtcttttgcttccacatttgtagccccagcttctgtatctcctgcgtgataatggttggatgaattaaaaggtaggaggaatagaagaggagaaaagcaataggaagaggaaggctggaagaaaagcccagctccactgtctcacttgggtgtcactgggtactggggaatttggaagcactagggaacagagaggaaggtgctcccttaggcttccacttctcagcccagtagtgagaggctatgaagctgttgccccctggtgggggacaagtgagaccagtgagagagggttt

SEQ ID NO: 13460 - DNA, 428 bp, Homo sapiens
gatagggcccaaagcacatttaacagaagagaaacctgatggccttatcaatgaagctactaggcaagttgctttggcagatatcgttctcattaataaaacagacttggttccagaagaagatgtaaagaaattaagaacaacaattagatccataaatggactaggacaaatcttagaaacacaaagatcaaggctcagcagctgatagactcagcaacaggcagccaggagctctgaggctcacagctggcagtctagttccactcagtctctacttgagaaattctttctttggaggtacagcagaggccttagaatctcactctggtttgagacagagtctcactgtgtcccccaagttggagtgcggtggtgcgatctcggctcactgaaacctctgcctcctgggttcaggcgattctcct

SEQ ID NO: 13461 - DNA, 486 bp, Homo sapiens
  misc_feature (1)...(486): n = A,T,C or G
ggaacggagccggnannnnnaaaatgagactaaggcatngcggnggacntcattacccaatggatgactgtttattagctatcagcagaattccgtaggcgaaagcaagccgtgaacgatgtacattttgctttaatagcatgttagcgaacaaacttccatggacttttgtggacaaggtgctgctttttctcatgaccctgtagaattgctatcgaccacatcttctgtagcactgacctgtgtgaactcagggaagaatttgtgcatacaaatgagtggaaacagagcaggattcatgaatatgaatgagaatgtgaatcattttggagaatgccctgggcacacgggtcaactggaaatttcatttctctaagaaagtagccctaccagcggcacggactgttcctgttcctcatacctgtggggattcctccatattggaactgtttcatgtatcttttttgcattgtaactagccaaacn

SEQ ID NO: 13462 - DNA, 463 bp, Homo sapiens
  misc_feature (1)...(463): n = A,T,C or G
agtggcacnnnnnttcgagacctcgagtaccattaggccagagtggaggaattcatttgtttctagatttacccctgcgctagagtaagcactttatctccagaactgagagcaaagttaacaaatctcaccccttctctcctgcaaattagtggacagactccctggaacatgtttggggcttccacctagggccacctagtggtatctctgggtctttacttggtcagatgtttattctacattgttccccaggaacagagtatgagctcattgatgcagaccgattctaattgccaggccctaatttgcagactaactctcataataaacagaggcccatagttgtttatgaactgcttatcccttaaaggagcacaagaacccctccctgccctccttgggcaccctgcctccaggagatggaggcacgtgataagacaaaagactgcaccaactcacc

SEQ ID NO: 13463 - DNA, 507 bp, Homo sapiens
  misc_feature (1)...(507): n = A,T,C or G
agacggtnnnnnnnnnatgagatgagattcgtagnaacngncgnggaanncgtaaattatagaaggcataagaaaaaatataaaggagaaaatcaattatcaggaatgctatagaacttttcaaatctagtaatttgaatatagacacaatgcactttattgcactttcaattcttataaagcaacaataatattaaggtccttgactatgtgtacaatgttttcacatatatagtttcatttaatcatttcaaagttaatctctgccatctcgctaaatcatcagtctcggctcttctgaaatagaaggtgcctgatcttcctaataattctgcctattttcatttgctttaaacaggcgccctattttctttctagttgtggctgcgcaaaaacatttatctcccaaataagatgtgctgcttaccgaggtatcacggngtggggctccagcttgggtcgntgaagctggggtttgggaaaccacttcagagatggcagcagcag

SEQ ID NO: 13464 - DNA, 505 bp, Homo sapiens
  misc_feature (1)...(505): n = A,T,C or G
cgagggcnnnnnnttttttaaagtcatacgtagggccnngcannnngncagagatgattaagagtcggcagtttgtgtggggaggtgggggcaggatggggtttgtttttcaaaagagtttgggaaatgctggcttaaacaaaggcgagaggaagttcctttcatgtcaggatttatgaatgcctatgagcccagtgtcagtgacgactttctagcggcggtcttcaacactttctaaatattaagcgatcaaggcccctgccccacttttagttccaacagaatgccattcacaagatctgggaggcactctctcagccctctcctggagcccccggaatttctcagcagcccaggccctcccgctgcccgtggcccctcctcccaggtgccaggtggtcttccagcctctccaagggcccacccccctgcctcttcctcccactgcagctgatctaggggtttcttggccacatttcccttgagagagagtgggatttgccct

SEQ ID NO: 13465 - DNA, 451 bp, Homo sapiens
  misc_feature (1)...(451): n = A,T,C or G
cttgacgactttttgaagcctgtggaanncgcacacagaaagaggaggagcaagtgggatgtttatgtccccccttctcttcctgagtgattctcattcaagtccagacagtgctcggcgggtgaggaagggtctgccccgagctttctggttggcaggtggcagcaggatggtgggtgttcagcctgaatgcccaggagcatttctggggggcagctaagactggcagctgggttggtgtgttagcgggcaggggagccattgtggggtccccaggaaagggcaagggctcagccacatcttggggtctgggaggcccaggctaagccatgtggcagggaccgtcttgccctgctggccacactctggagaagcacttctcagccaaggcacccctgccctgggactggcagggcaggggcaggggcagggacagtggccaggcggcccg

SEQ ID NO: 13466 - DNA, 481 bp, Homo sapiens
  misc_feature (1)...(481): n = A,T,C or G
catgaccccctaattgagacctctggccanngcgnggaattccatctttctaaaatgcagcttggttttaaaataaaagaacattcattttgtgattctaaacaagcttcagtaaataccaccagtatagtactggtgaatttctcagcataaaatcgacatacctaaaaagttaataaaattcagctcttttccaatttcattgttatgcctattgaagtattaattgccaggtttgatttttagtgaagcttggagtccatactttgagcagaccaagtgaagggaagaacagaaagaaactcaggagtagagtaatatcacttctcacttacaccactttcaggcacatccaaagagttcctagatacttggaaaatgtctgaaaatttttaagtaaaatactaaacttttcagtgtttagctcaactttttgttcatttggaagtttctctccatccgaggacttaagccagttttg

SEQ ID NO: 13467 - DNA, 456 bp, Homo sapiens
  misc_feature (1)...(456): n = A,T,C or G
cttgaccnccntattgangactattagacagngcggnggaattcccatgttttcatttaagccttcagaaatatgagccaattaaactcttttctttatacattagccagcctcaggtttttttttgtagcaatgcagttatgacctaatacatttacacatgcagtaaatatacctaagttttaagctagtattcactactcactaggggtaagaatttgtatatatattccaggatgtatacatcctggagaaaaatcacagaagtgtaatacgtgtggcaagaattctactcaaaagccagaacttgtaaatctaggtaattaaaagggcatagatgtatgaaatgaaatgagggtggcaaaacctttactagagttcaatcactacttgtcataagagagtttatactgaaaggaaatcatataaatgtatgtgtcagaggctttccccagg

SEQ ID NO: 13468 - DNA, 486 bp, Homo sapiens
  misc_feature (1)...(486): n = A,T,C or G
aatcgaaccctagccagggcngctgacgccatcgaacanacatcagagggctctggaggtacacagttgaaaaacagagcaacaggtaactatgatcaaaggacatcatcaagcacacagttaaaacacaggaatgcagttcagggaagcaaatcctcattgtcaaccagttctccagagtctgcaagaaaacttcatcctagaccaagtgataaactgaaccctaaaacaattaatccgtttggtgaacagtcacgagtgccttctgcatttgcagctatttactctaaaggaggtattccttgcaggtccattcggatgatgaagtgtttgaaagaggattgaatgctctagttcagctaagtgtcgttgttggtccttctctaaacgaccatctgaagcatctgcttacaagcgggagccttagcatcatcaaatctaaaattccaacatactgctccatatgctgttgaagaagggagccan

SEQ ID NO: 13469 - DNA, 487 bp, Homo sapiens
  misc_feature (1)...(487): n = A,T,C or G
ttttgaagcctaggantgcctacgtatcgactccgaanaccnannangtttntggaggtacacagttgaaaaacagagcaacttttaactatgatcaaaggacattatcaagcacacagttaaaacacaggaatgcaggtcagggaagcaaatcctcattgtcaaccagttctccagagtctgcaagaaaacttcatcctagaccaagtgataaactgaaccctaaaacaattaatccgtttggtgaacagtcacgagtgccttctgcatttgcagctatttactctaaaggaggtattccttgcaggtccattcggatgatgaagtgtttgaaagaggattgaatgctctagttcagctaagtgtcgttgttggtccttctctaaacgaccatctgaagcatctgcttacaagcgggagccttaacatcatcaaatctaaaattccaacatactgctccatatgcttgtgaagaagggagccaacg

SEQ ID NO: 13470 - DNA, 447 bp, Homo sapiens
  misc_feature (1)...(447): n = A,T,C or G
tgggcggnatcgagaccatagacagcgttgtggaattcccagaagtgccaatatggcaaaattacacaagaaaacagtattgcaatgacaccattacataaggaacattgaactgttagaggagtgctcttccaaacaaaacaaaaatgtctctaggtttagtcagagctttcacaagtaataacctttctgtattaaaatcagagtaaccctttctgtattgagtgcagtgttttttactcttttctcatgcacatgttacgttggagaaaatgtttacaaaaatggttttgttacactaatgcgcaccacatatttatggtttattttaagtgactttttatgggttatttaggttttcgtcttagttgtagcacacttaccctaattttgccaattattaatttgctaaatagtaatacaaatgacaaactgcattaaatttaa

SEQ ID NO: 13471 - DNA, 502 bp, Homo sapiens
  misc_feature (1)...(502): n = A,T,C or G
cganacaggggcggccggggccnnnnnaaaaattgtagaactgagnagcatccgcacagngcggnggaantcaagtaattgcaaacaactgtatgtggtggtgcatgcttgtaatcccagctactcgggaggctgagggaggagaatcgcttgaacccgggaggcggagattgcagtgagccgagatggcgccattgcgctccagcctgggcaacgagagtgaaactctgtcgcaaaaaaaataaataataaaataaagaccctaggagtcttccatcttaaacctagccctacaggtgaccgaatgcagctggagaataactgcttgttaagaggcagcaaaaccttgggttttgttgggaacatcatctctcactactttgatctcttggccatatgacagactaatcattagtgtcgcatttattcttccagtggtcagatggggtgctcacatgctgcaggttccttacatggtgctngttccttccctaaactgagg

SEQ ID NO: 13472 - DNA, 450 bp, Homo sapiens
  misc_feature (1)...(450): n = A,T,C or G
attgacgccttattgaagcctgtcggaanacgcaaagnttttatttctttctcatttctgaaacatagctttatttggtaaagtattcttgggtggtcatttctttttattccttcagcactattaatatagaatttgcctctcttctggcctgaagtgtttctgctgacaaatctgccaaaagccatattgtgcctccactgaatgtgatgtttcttatcttttgctgctttcagtattatttctttgtatttgatttttgataatttgattataatgtatcttggtgatgtcctctatgggttgaatttgattggcaacctgtgactgagatgcctgtacctggatgttgttgtctttccccagatttgggatatttttagctattattttctcaaatatgctttctaggcttttatctctttctttgtcttcatgaattcctactag

SEQ ID NO: 13473 - DNA, 450 bp, Homo sapiens
  misc_feature (1)...(450): n = A,T,C or G
gtggtcctnaaaactgganncctttgtgctagcanaaacnnnggaantnagngnctcagccaggtgctggagttgggaatgcgtgagcccctttctctgcccacctgtcacgtggcagctggaaggtgggatcaactgcacaggcgaagaggggcccgcacacgagaagccatgggatgtgaagggccgcaaggagaggaccctgggacacaggaagaggtggtgcatctggggcagggcggctttcccaagatgactagagaatcttcagctggcatcttgcctgaaatatccacgctctcagccactacactaatggaacacagatgctatggggagacagaagggaactgacaaactttatgcccctgttttcaaatagcctgcaatcttacctcttcctctgcattttttggggggagtgacattttaatgggaggcaggaggttt

SEQ ID NO: 13474 - DNA, 487 bp, Homo sapiens
  misc_feature (1)...(487): n = A,T,C or G
aggtggacactgagccatgataacgtcngggaanncctggntttctacagagggcagatggatcagcctgctaacatgccagactccatattgctagaggcaaaggagagtggctacagtgatgacgagatcatggagctgtggtcaactcgagtgtggcagaagcacacagcttgccagcgcagcaaaggcatgcttgtgatggactgtcatcgcactcacttgtcagaagaggtactggctatgcttagtgcctctagcactttgcctgcagtggtcccagcaggctgtagctccaaaattcagccattagatgtatgcatcaaaagaactgtcaagaacttcctgcataaaaaatggaaggaacaggctcgggaaatggcagatactgcatgtgattctgatgtcctgcttcagctggtgcttgtctggctgggtgaagtgctaggtgtcattggggactgtccagagctagttcagcgctcct

SEQ ID NO: 13475 - DNA, 487 bp, Homo sapiens
  misc_feature (1)...(487): n = A,T,C or G
gcaagggagccggnaannnnaaattgagatcgtaggcattgcggaggaattccgagcggctggaggacacccattttgtgcagtgcccgtccgtcccttcgcacaagttctgcttcccttgctccagacaaagcatcaaacagcagggagctagtggagaggtctattgtcccagtggggaaaaatgccctcttgtgggctccaatgtcccctgggcctttatgcaaggggaaattgcaaccatccttgctggagatgtgaaagtgaaaaaagagagagactcgtgacttttccggtttcagaaaaacccaatgattacccttaattaaaactgcttgaattgtatatatatctccatatatatatatatccaagacaagggaaatgtagacttcataaacatggctgtataattttgattttttttgaatacattgtgtttctatattttttttgacgacaaaaggtatgtacttataaagacatt

SEQ ID NO: 13476 - DNA, 499 bp, Homo sapiens
  misc_feature (1)...(499): n = A,T,C or G
cgttntnnnnagggcggggccgagggagattattccgagaccatgtcagctaggctangcgaangncgcggaannngaaaatggggcttggttcttaattttgcagcattcaggacattaaataagtcatttactgtcaccatcctttcaaaaaaaggacattttatcatagggaggccgtaacatcagaattgccctacagattcaaaactggctttctgagaacctcactatatggttttttattgtttctcagaggatttggtgatatctttgccaccaagtgacacttgaaagcagctgggctctccaggatcagctagagaatttgaggcccatttcaatttttatcaagaatttgaggctgggcgcagtggctcacacctgtaagcccagcactgtgggaggctgagacaggtggatcacctgaggtcaggagttcgagaccagcttaaccaatatggtgaaaccccgtctctactaaaaatacaaaaattac

SEQ ID NO: 13477 - DNA, 456 bp, Homo sapiens
  misc_feature (1)...(456): n = A,T,C or G
agggnaacnnnttcgagactctagtccatgtggtggaattcgacagttaacaccatgaattaaaagtcataaagttttcattttaggcatgttcttctcactattgtacagcatttttattgatttgctaactgcattggattaatctgctaactgccttacactcttattaaattacattgctattccagagaagggacagctaaagctgaaatcctttagtttttatttctcttggtagattaagacactttggtcattcattcattgattcatatattcagcacatgttcacagacgcttattgtgtgcctgggtgtggtctaggtgtgggggattatccaaggatatcgggtagtgagcaaagttgaaatggtctccgccttcatggacctacagattagtgggagagagagagagagacagactcagactcanacatgaaggaaataaaac

SEQ ID NO: 13478 - DNA, 473 bp, Homo sapiens
  misc_feature (1)...(473): n = A,T,C or G
tttgagacctatccaggggtttgattcccactcacaagagagttagaggggtcaacttccaaactatatcattctccctgcagttctatcagtttttgcctcatgtatcctgatcctctgttcttgggtgcatacatgttaaggatagtcatgtcttcttggagaatggacccctttcatcattatccctgatagtaattcttgctgtatagtctgctattctataatatacctatttcttcattttggttagtgttagcctggcatatttttctctctttaatttgtatgtctctttacatttcaagtgggttgcttgtaaccaacatataattgggttttgttctttgatcctgctttgacaattttttcttttttaaactggcccagtttttccatataataatctatcttttaattggtacatttacacccttgacattcanagtatttatatatttggataaacatct

SEQ ID NO: 13479 - DNA, 453 bp, Homo sapiens
  misc_feature (1)...(453): n = A,T,C or G
attgacccctattgangactatctgaacagnccggnggaattcaatttgagactgaaattgtgctaaatgctcatcattagtatggtacatttggtctatgatgagcatttagcacaatttgagactgaaatttagtacactatgttctaggtcagtctaacagtttgcctgctgtatttatagtaaccattttcctttggactgttcaagcaaaaaaggtaactaactgcttcatctccttttgcgcttatttggaaattttagttatagtgtttaactggcatggattaatagagttggagttttatttttaagaaaaattcacaagctaacttccactaatccattatcctttattttattgaaatgtataattaacttaactgaagaaaaggttcttcttgggagtatgtttgcataacatttaaagagatttcccttcatttaaacta

SEQ ID NO: 13480 - DNA, 487 bp, Homo sapiens
  misc_feature (1)...(487): n = A,T,C or G
nggcttggcattgagnnccntngnnattgtagtccctagtcagtgtggtggaattcggatcagcagcaagtcattgaaggttggcatgattccagctcccaagagagtgtgtctcatccaggagccaaaagtccatgaaccagttcgaattgcctatgacaggcctcggggtcgtcccatgtccaaaaagaagaaacccaaggacttggacttcgcccagcagaagctgaccgataagaacctgggcttccagatgctgcagaagatgggctggaaggagggccatggcctgggctccctcggaaagggcatcagggagccggtcagcgtgggaaccccctcggaaggggaagggttgggtgctgacgggcaggagcacaaagaagacacattcgatgtgttccgacagaggatgatgcagatgtacagacacaagcgggccaacaaatagatcaaaaccactgatgtgaaagataagccttgaagc

SEQ ID NO: 13481 - DNA, 464 bp, Homo sapiens
  misc_feature (1)...(464): n = A,T,C or G
attggagaccccnattcgcngaccatagtcagtgtggtggaattccaaaaggaagtcaaattgtctcactttgcaaatgacataatcttatacctgtaaacagaaaaacctaaagactctaccaaaaaactcttaaaataaattaggctgggcatggtagctcatgcctgtaatcccagcactttgggaggacaaggtggatggatcagctgaggttgggagtttgagtccagcctggccaacatggtgaaaccctgtctctaccaaaaatacaattagccaggcatggtggtaggtgcctgtaatcccagctacttgggaggctgaagcaggagaatcgcttgaacccgagaggtggaggttgcagtaagccaagattgcaccactgcactccagcctggaaaacagagtgagactctctcaaaaaataaaaaataaaaaacatttttaaaaacggatgtatn

SEQ ID NO: 13482 - DNA, 463 bp, Homo sapiens
  misc_feature (1)...(463): n = A,T,C or G
agagaaaaaaaanttcgagacctcgagtatcactaggcgagagtggtggaattcgcttgttccaccaattattaatcctttagatggaactgaaaaaattgctatagatcacaaccagatgttccaatattttattacagttgtgccaacaaaactacatacatataaaatatcagcagacacccatcagttttctgtgacagaaagggaacgtatcattaaccatgctgcaggcagccatggagtctctgggatatttatgaaatatgatctcagttctcttatggtgacagttactgaggagcacatgccattctggcagttttttgtaagactctgtggtattgttggaggaatcttttcaacaacaggcatgttacatggaattggaaaatttatagttgaaataatttgctgtcgtttcagacttggatcctataaacctgtcaattctgttcctttt

SEQ ID NO: 13483 - DNA, 454 bp, Homo sapiens
  misc_feature (1)...(454): n = A,T,C or G
atcgaccccctattgangacctcttgaccgcgcggtggaattccttcagttttctaaaggtttgagtttcatgagaaaagaagactttgcagagtggctactttttttcactaacactgaaaataaagatatttattggaaaaatgtgagagagaagttgtcagcaggagagagcattagtttggatgaattcaagtcattttgccattttacaacccacttggaagactttgctattgccatgcagatgttcagtttagctcatcgtcctgtcagactagcggagtttaagagagctgtgaaagtagcaacaggacaagaactctcaaacaatattttggacactgtctttaagatctttgatttggatggtgatgaatgtcttagtcatgaagagtttcttggggtgttaaaaaacagaatgcatcgaggtttatgggtaccacaacatcag

SEQ ID NO: 13484 - DNA, 478 bp, Homo sapiens
  misc_feature (1)...(478): n = A,T,C or G
aatggcaccacattgagagcgntggaacacnctcgagagagngagtgagtgtatgtgtttaaaggaaacaaaatgggagaaataagttttaaaaaaatcctcattttgttaatattcaaaagatggactgagcttccacttgggttttatcttgttttaattgtttttgtatcaaaacttgaaattcctctatttctattgggatataaaagccttccccttcagtgaagaaaacatttattttttatttgattcctaggatttagtaaactctagctgtctatttaaaatgtactgaggcacaacaagtattatactggaagacttgccaaactggcaaagctttaagttcatcagcattctatgtggttcagagctgtgatttttgcaaagtattttaccaacctcctcgatggctttgataaaggttagatttgatgttcttttttagatttatttttcttactccactacactn

SEQ ID NO: 13485 - DNA, 462 bp, Homo sapiens
  misc_feature (1)...(462): n = A,T,C or G
gtgggcgcgannaanattggattgattnctctggccangngcnggaattcgtcaaagagaaaaatgcccccagactttgccaaatatcccctcccggggaagatcgcctcgcttgagaaccactgttggaggagagcctgggttttcgggaggtaaccgtttacaaaggggagaacggtaagaagccggaagcaacgatgacttagctacgtgaaagacttgcggccgggctcgcccctcttctagaagccgtcagtttgggtctcgcgtctggaatcaccgtcaaggagtcagatccagccccggagagggagcagggtcgaggtctccttgcagaaggcgccaccgcaggaagcacaggcgcaacgtgcagtctccctagcggaggcgctcgcgatccttcagccgccggtccgggaggtgctcggtagccctccttggtgcctgtccggtagctggtca

SEQ ID NO: 13486 - DNA, 478 bp, Homo sapiens
  misc_feature (1)...(478): n = A,T,C or G
atgacccccaatgagancataggccanngcgnggaattctggagacttacccatttatgttaaaacagtgtttgcaaagggagcagtctctgaagacggacgtctgaaaaggggcgatcagatcattgctgtcaatgggcagagtctagaaggagtcacccatgaagaagctgttgccatccttaaacggacaaaaggcactgtcactttgatggttctctcttgaattggctgccagaattgaaccaacccaacccctagctcacctcctactgtaaagagaatgcactggtcctgacaatttttatgctgtgttcagccgggtcttcaaaactgtaggggggaaataacacttaagtttctttttctcatctagaaatgctttccttactgacaacctaacatcatttttcttttcttcttgcattttgtgaacttaaagagaaggaatatttgtgtaggtgaatctcgtttttat

SEQ ID NO: 13487 - DNA, 560 bp, Homo sapiens
  misc_feature (1)...(560): n = A,T,C or G
cgggtatcccannaggganaaaaaaaactcgatcatcgntttgtgtggccgaattctttntttctggaactggctcacatggtacaatgtgactcaggttaacttcttcacttgaagtatctttagccctttttccacgttttcctttatgacgtacatccttattgccttggtccaactgtttcacatcagtgccagaggcttcttttagttggtcagaggagggtctagttcttccagggatttggaattcattttcttcttctgctctgttccagttggcctggagccgaaggtcagacatttgccttaacagatcctcaaagagctctctatcatcctctggtaactcagaggacaggacgacccccacaaagcatcctgctgcttgtagcattgtatcaggaaacatgtaggctcccgcagtacatttcagaaccggagatctatcaggaactagaggatataaccagtcacaaacctgaagaaacccgggaggacggtttagaaccgtatcgagagaattatccaaaaacctcacaattcgaaggtacccagga

SEQ ID NO: 13488 - DNA, 503 bp, Homo sapiens
  misc_feature (1)...(503): n = A,T,C or G
catagaccaccgtccagagtggagcaattcggcgcggcaggaccacggtgctctggactgctgcgtggaggtcattctctctcacggctgtcaggccagccacctgcagttcccaggggctgtctacggcacagatggatgccctgtgtcggtcgagaagattgtgaacatcttcaatgggaccagctgccccagcctgggagggaagcccaagctctttttcatccaggcctgtggtggggagcagaaagaccatgggtttgaggtggcctccacttcccctgaagacgagtcccctggcagtaaccccgagccagatgccaccccgttccaggaaggtttgaggaccttcgaccagctggacgccatatctagtttgcccacacccagngacatctttgtgtcctactctactttcccaggttttgtttcctggagggaccccaagagtggctcctggtacgttgagaccctggacgacatctttgagcagtgggctcact

SEQ ID NO: 13489 - DNA, 458 bp, Homo sapiens
  misc_feature (1)...(458): n = A,T,C or G
agagaaaaaantttcgagactctagtacgtgtggtggaattcggctatggaattcgtcgacttaggggttggccacgatggtgtccttgatccacttccggtaatgcaccaccttggtgtacagggaaagcctttcgggcagggcacatggttcactgccccatgacgtgataccttgaagcacaccattacagacaagtggggccccagaatcacccgagcatgtgcttttgccccctgtccagcgtccatcacacagaatgaacttggtcaccttctgagggtgaacttgcgcacacacgtcattggaaataacatggaggtccacacactgaagtttttttggggtcaagaactcctctggttcaatgctgccccagcctgaggcgtaacacgtggtccccagtgctggctcctgggtgggcaggtccatgaccttcacagcatacgtgagctgg

SEQ ID NO: 13490 - DNA, 412 bp, Homo sapiens
  misc_feature (1)...(412): n = A,T,C or G
ctgtgggagagcgaagggggtcaaaggaagacttgaagcacagagggctagggaggtggggtacatttctctgagcagtcagggtgggaagaaagaatgcaagagtggactgaatgtgcctaatggagaagacccacgtgctaggggatgaggggcttcctgggtcctgttccctaccccatttgtgggcacagccatgaagtcaccgggatgaacctatccttccagtggctcgctccctgtagctctgcctccctctccatatctccttaccctacacctccctccccacacctccctactcccctgggcatcttctggcttgactggatggaaggagacttatgaacctaccagttggccatgatgncgtttcttctttttcttttttttaacaaaacagaacaaaacc

SEQ ID NO: 13491 - DNA, 448 bp, Homo sapiens
  misc_feature (1)...(448): n = A,T,C or G
gtggtgcttaacccagggnacctgatatctggcganaannccccaccatnagggcacccagacttaaccctaactgcaagtcccagactcactctggtccttattgatgagccaggtgtccctggagtcaagtggctcactgtcaccgatttcattccgagccaccactctgaagtagtacttcctgcctgggagcagccccgtcactgtgtacttgttgctgaagacacgctcggctgccgtgtaccaggtggctgtgcttgcatcccgcttcatgatgatgtagtgagcctcaccgtcctcctgcacatctgggctgtggttccaggtcagagtcactgtgttggggacttcctcaaacaaccgtaggtttgtggggggccgagggaaatctggaagagttggaagatctgtcagcgaccttggggcacctgaagtattatgtccc

SEQ ID NO: 13492 - DNA, 509 bp, Homo sapiens
  misc_feature (1)...(509): n = A,T,C or G
catagatccccantccagttagaaccactattcagagnggtggaattccttgttcagtgacagcgccgtaagcacagtgggtgtgatgcgtgaccctgaatgacacactacagaatgtgagcagtgtgagacttctctcactggccttgaaataagaaaatattgaacattttaatattaaaaatatttcagtgttaacaaatgtgcatgaagtttaattaggaaggaatgctttatgttatgaaggctttttttttttttttaaaaagggagtttctttttttcttccaggttgaagggcaggggggaaatttaagttctttgaaccctccccctccggggtaaaaaaatttttcttgcctaaccctcccaagtagctggaataacgggatgggcccaccacccccagttaatttttggggtttctttttaagaaaaaagggggtttaacaatgtgggccggggggccctaaaactcttgactttggaacccccccccttaaccctcn

SEQ ID NO: 13493 - DNA, 472 bp, Homo sapiens
  misc_feature (1)...(472): n = A,T,C or G
ctccaatgagatcatatcagtgtgggcattcaggtagcgaccgtgcctgggtctggaacacccacgctgacttcgccgacgagtgccccaagccagagctgctggccatccgcttcctgaatgctgagaatgcacagaaattcaaaacaaagtttgaagaatgcaggaaagagatcgaagagagagaaaagaaaggtgacgtggtgccatgggttggggggcttctttgcagactcactctgcatctgactatacttccaggcgggtgctttttctgtctgccagataaacattccagggtgctgtggccgcctcacgtatccagagtgatgcagctccctggggacacaggtgcttcctggggagccctgagcacttgtcagtgttgctggcctcagtccaattgggcaggcattggagtccgggcactggctggagctcaccagaaggtgctttatgatggtcctcggnt

SEQ ID NO: 13494 - DNA, 455 bp, Homo sapiens
  misc_feature (1)...(455): n = A,T,C or G
gtgggcctnaatcccgaaatccatgngtgctntgacannacgnnggaantnaccatggatatgcgaaccccacctacatattcctggagcacattcatattcatgttgcagggagcgcggcaaccctggcggagggatgcaggtgggccggaagatcccacgattcccatcgactgccatgcaccaaccgctgccaggggctgcgtctgacatcctgacctgctggactgtttgactatataacgtactactgtggaactgcaatttccattcttttaaatgggtgaaaaatggcaatataacagtatatgatctataaaccttaaatgaaaaaaatgatctattgcagatatttgatggagttttctttcttaaattaatcagaaaccccacttacattgtattggctgacacatgctctcaatatataatacatgggaaatgtctatgttcag

SEQ ID NO: 13495 - DNA, 560 bp, Homo sapiens
  misc_feature (1)...(560): n = A,T,C or G
cgggantccccaaaaggannnnnnnnnatcgaatcatcgtctcgtgtggccgacattctatgaattgggaggtaaatcangtgatatttggtactatggcccttttttccccccagtgacaaaatcagagaggtgcttcttagtgttcattaatagtaatcctttagaggttagttttatgacttgatattttgtttagaatgcagagatttgaatttgcctccaccgataacatagttgcctggcttgctgtcattacagtattctctaggcatatagccaggaagtaggtggaggaagttgtggattgcctccttatatagatggtttttggagcctctttgatggtagcttccaggcattatgtcagttagctattaggcattttaggttgcttattaaggtatttgggtatttctgattgtaattttagaggtaggaataaataggtgtactttttttttataggtaggcatctacctgttcaacagaaaagtagaatataactagaatgttaccttatggacagttgcttacaagtgtgaatggttaaagcccan

SEQ ID NO: 13496 - DNA, 429 bp, Homo sapiens
ctgttcccttgtgtggcaagctaagtctctttggagttaccttaaaattcattgcccttatttactcaataaagatacccttctcataaataattacagtttctcttagaggcagtggttctgtttgtctcaagatcacagatctacacattgtatttgtgtttttccctagagaattcagcctcagcccccagatgaagatggggatcacagtgacaaagaagatgaacagcctcaagtggtggttttaaaaaagggagacctgtcagttgaagaagtcatgaaaattaaagcagaaataaaggctgccaaagcagatgaagaaccaactccagccgatggaagaatcatatatcgaaaaccagtcaagcatccctcagatgaaaaatattcaggtttaacagcaagctcaaaaaagaagaagccaaa

SEQ ID NO: 13497 - DNA, 484 bp, Homo sapiens
  misc_feature (1)...(484): n = A,T,C or G
taagaaactctggaanggcctatgacgccctcagtagaacccagngntctttagaggacttcagaatgctatgcaaaaaacattttaaacagaactaatgtgaatagtttttgaaacagtaatatacatcagcagagaagcagaggggaactagcaggggaaagaaggcaagattcaacataaaagaaatgattcagataaaatgagcaatttaactcaggtgatagtaagagaatctttttaaaaacaatttatccttttattttattttattttattttgttttattttttgagacggagtttcactcttgttgcccaggctggagtgcaatggtgcgatctcggctcactgcaacctccacctcccaggttcaagcgattctcctgcctcagcctcctgagtagctgggattacaggcatgcttcaccgcatccggctaattttgtatatttaatagagacggngtttctccatgttggtg

SEQ ID NO: 13498 - DNA, 471 bp, Homo sapiens
  misc_feature (1)...(471): n = A,T,C or G
catcgcacnccnntngnatagatgaccactagtccagagcgggggaattcggagaagcaggagctgtcgggaagatcacaagccagtcatggattaccagcgcgaccttatctccaacaatgagcaactgcccatgctgggccggcgccctggggccccggagagcaagtgcagccgcggagccctgtacacaggcttttccatcctggtgactctgctcctcgctggccaggccaccaccgcctacttcctgtaccagcagcagggccggctggacaaactgacagtcacctcccagaacctgcagctggagaacctgcgcatgaagcttcccaagcctcccaagcctgtgagcaagatgcgcatggccaccccgctgctgatgcaggcgctgcccatgggagccctgccccaggggcccatgcagaatgccaccaagtatggcaacatgacagaggaccatgtgatgca

SEQ ID NO: 13499 - DNA, 443 bp, Homo sapiens
attcgagattagtagtcagtgtggtggaattcgagataaatcacatcattgcgatctatatcacctccttgagaatctctcccaggctgaaaatgtgatggtaatcatgggtgtttttaagaacaaatctaatttttatcaagtgttctttcctctacaaaaaaggaaggaggagaaaaagcttccttaaaactgattattttgattcaattttaagtttctaaaaaaggtgatattaaagtatatgtattccttcagcattaccttacaggctagaaaaacgggataaatcttcagaaaagtgtcaaaagtgtcacagtacatgttcaaatttaaacttgaatcctggttcatctttgacttttgttgtgcatatttaatgcttctttatttttgatacacagaatgcagttgaacttgatcttttaacattgagacatgca

SEQ ID NO: 13500 - DNA, 487 bp, Homo sapiens
  misc_feature (1)...(487): n = A,T,C or G
aggccccccagtccccgatagacggccntccgnncnnnatgatgaccattagaccagnccggnggaattcattcaaagcacaggtgcacagagctggatggtataggacatcggagaaattcttatgtctttggctaagatgaaatgacactaaaagccagttacacggcctcttaccagggcaagagtacctcccaagcaagggtcatcctcaccaaaggagtgacacgatccatggacttccaaagacagaattttaaaagtgaccattcctgcagaagcagggcttttttttttttaaccacaacaaaaaaaatttttaaggtttaaatggaagagttttatacccaacccttttattcaaaaaaaaaccccagggttggccctaaaaaaaaaaaggggtctttttttttagggagagggttttttggaaaaaaaccacacaagggtttggatttttttattggcatttgcgggaattaataaa

SEQ ID NO: 13501 - DNA, 483 bp, Homo sapiens
  misc_feature (1)...(483): n = A,T,C or G
natgagncccctggnnnnnccnatggagacatctggccaggcggnggaattcattcaaatgtaatttagggctgccacagagaaatcagcactcagaaccttgagaaaccttttctctttctgtagtcacagataagagtcttatccttaaagcagagctgtgatcactgcccaagcagctactcttagggctgaatgcagatttctttcgtgctgagtgcaggtaaaaaggtcttggcctgtggataatggcagacataggaaggagtgttctagagggtactggccccctatctctctctctttttccaccccacccccccatctcttaatagggaaatcagagaatcccagatcatttcatagctttcgcagattacacatgaagagttaatgcctgatccctgagcagcaggaaaatccccagtcgagagtcagcacggataggtccacatgctcttgctccagtttctttaaggactg

SEQ ID NO: 13502 - DNA, 482 bp, Homo sapiens
  misc_feature (1)...(482): n = A,T,C or G
catcgacnccntnggnatgagcaccactaggacagngcggnggaattcgacccaggttgtgcagtgcctatggtgtagttgctgctaaagatcatgatataggaacaacaaatctccatattgaagtttctgatgttgtaaatatactagtttatgttggcatagcaaaaggaaatggcattctctcaaaagcaggaattctcaagaaatttgaggaagaagatttggatgacattttaaggaaaagattgaaggactcaagtgaaatacctggtgctctgtggcatatttatgctgggaaagatgttgacaagataagggaatttcttcaaaagatttcaaaagaacaaggccttgaagttctaccagaacatgatccaatacgtgaccaaagttggtatgtgaacaaaaagctccgtcaaaggctgcttgaagaatatggagtcagaacctgtactcttattcagttccttggtgatgcn

SEQ ID NO: 13503 - DNA, 466 bp, Homo sapiens
  misc_feature (1)...(466): n = A,T,C or G
attggtagacactagtccangtggtggacttcgtgtgtgataggagagggtaccctaaaccccataccttccctccctgacctgaaaagctgatctcaacagggattcacacagaattaggctgtgtttttgcattagctggtaggtgactttctcaaaattcttaaattcagaaagtatttagtaaacttgaggaaggtatgaaatctggaggaggcatccaggacccaggggtttgatagctttacaggtaggatcataccacaccaaaagagcagtggacaataagactatatgagctatatgaagcttttaggaatcatttaggacagacagagccctaaacaacccattcatgacttaagttgttggctcagtgtatgctggggacaaagaaaaactaacaagccgacctgcctttatgataaattctagtgtgcttacaagggatgacttcctgaggtgn

SEQ ID NO: 13504 - DNA, 458 bp, Homo sapiens
  misc_feature (1)...(458): n = A,T,C or G
nttttaattgaagacctctagtacgtgcggnggaactcgacagggataggtaccacaaagatagggaccacactgacagaactaaaagcaaaaggtaaaatttgcaggctgcttcaggattacatttaaataactgttaaaatgttgtatcttgtaaacaaaagaaagattgcctgctaggattgtgccatctttaaaatttttactattggtcatttgcagaacagtaaattctgtgtgttggtacagagtgctctgtaccagtgctcatcatcccttcttcataccaacggtccctagttataggaatttaatatttttaaaagttttacattgctgtatattcaaagatttgttttattaatatgcaataaaggcttagaaattttagttttattccttaattggtaaatatggctaactatggaatatatttacttcctctagtgaatgtcctt

SEQ ID NO: 13505 - DNA, 444 bp, Homo sapiens
  misc_feature (1)...(444): n = A,T,C or G
ataaatttgtagatcattagtcctgtgtggccgaattcgtgaaatgtcactcgggtcacaaataaataatttacaggattcttcctataaaagatcattaaaacttacgcttaagggaaaatcttgccccatggaaattccaaaagaataaaatgactcagaagtcttattttgggaagaatgtgtggctgatactgcggtggtattacaaaacaataaatttggaactattataaactgggccgcttgaggccaattatattatgatagtacaggccagacccactcatgttcacaggctccatcagtctggcccactaatccggcctatgatagtgatttaactacaaggctagaccaggtttatagaaggctagaatcaccctatccatggaaatggggtgaaaaggggatttcatcaccccgcccaaagttagtttgtcn

SEQ ID NO: 13506 - DNA, 457 bp, Homo sapiens
  misc_feature (1)...(457): n = A,T,C or G
ctttgataagtggagcctcgcacangcggnggaantctttttctctaaccctgcaaaaaatgagcagcgctgttgttttgttccaactgacaatacagctaagaaacagcagaacatgactgccctttgcaaaatgggccatgtgatcctcctagctcaattcaacacttacagtaaaaacgaatagaaagggacctgtttatgaaactctcctgcttgcctttggaatactctcatcctctcccttctcagcctcctaaatacccaagtgaatttatataatgagctttattttatcaccctgaaattcttcctcagtccaaattgctaatgtggcaggttccagctgcccaaattccctaaacaacattgcctgttccataaaaagcatgcaattacaagcacagcagtcctgctctggttcttagaactataaactgactacacagctccctgg

SEQ ID NO: 13507 - DNA, 531 bp, Homo sapiens
  misc_feature (1)...(531): n = A,T,C or G
aattgaccacatctgtgtggtcgaattccaccgcgtctccgcgatcccggatccactgcgctgccaggggcctgggggtgggtctcttgctgtctctgcgacgacatccttacgtttcggcactctaatgctgggtttgtgcgtgtgtgtctgcttagcggtctagcgggctgttaggctccctcgcccccagctccttggctcgctcagctcctccaccgcagcccagcagtgagacgcgcgcgcagccagctccccacgagatggaacagaccgaagtgctgaagccacggaccctggctgatctgatccgcatcctgcaccagctctttgccggcgatgaggtcaatgtagaggaggtgcaggccatcatggaagcctacgagagcgaccccaccgagtgggcaatgtacgccaagttcgaccagtacaggtatacccgaaatcttgtggatcaaggaaatggaaaatttaatctgatgattctctgttgggggaaggacatggcagcagtattcatgatcataccan

SEQ ID NO: 13508 - DNA, 471 bp, Homo sapiens
  misc_feature (1)...(471): n = A,T,C or G
gggggaaattgagttccagtnncatangccangnggnggaattctgggcattgaattttaagaaatggtggcaattttgactaaattatcgtgtgctgttctcagctcttgagtaattttcattaaagcattatagacattaataggacaattggggccaagcacagtggctcacgcctgtaatcccagcaatttgggaggccgaggcgggcagatcacttgaggtcaggagtttgagaccagcctggccaacatggcgaaaccccatctctactaaaaatacaaaaattagccgggtgtggtggtgcatgcctgtagtcctagctacttgaaaggctgaaccaggagaatcacttgaacccaggaagtggacgttgcagtgatctgagatcgtaccactgcactccaacctgggtgacagagtgagacactgtctcaaaaaaaaaaaaaaaaaagcggccgctcgagttn

SEQ ID NO: 13509 - DNA, 485 bp, Homo sapiens
  misc_feature (1)...(485): n = A,T,C or G
nttttatgaccctcngaannccnttttgagaccataggacagngcggnggaattcgccagacgcttataaaaccttcagatctcatgagaccggctcactatcacaggaacagcatggaggaaaccgcccccatgatccagttacctccacctggtcccacccttgacacgtggggattgctacaattcaaggttagatttgggtgaggacacagagccataccatatcagcccagatcaagtagtgacagagtatggatttgaatacaggttataggcactattgtgttatttcttgacttttgtactattaaaaaactgtagccagtgaggcttctacccttagtacccagaactccttttaggtatagcaattgtttttaggtaaatttatattgagtttaacacctgtgtgattaaagacaactttccaatgtagtatctgtagccatgtcccctaatggctattagagttcatgggtagg

SEQ ID NO: 13510 - DNA, 550 bp, Homo sapiens
  misc_feature (1)...(550): n = A,T,C or G
cggaacaannnttttgaaaccanttcgaaccacagttcgtgtggtggaattcgaagaggcgagaacgacccccggaccgaccaaagcccgcgcgccgctgcatcccgcgtccagcacctacgtcccgctgccgtcgccgccgccaccatgcccaagagaaaggctgaaggggatgctaagggagataaagcaaaggtgaaggacgaaccacagagaagatccgcgaggttgtctgctaaacctgctcctccaaagccagagcccaagcctaaaaaggcccctgcaaagaagggagagaaggtacccaaagggaaaaagggaaaagctgatgctggcaaggaggggaataaccctgcagaaaatggagatgccaaaacagaccaggcacagaaagctgaaggtgctggagatgccaagtgaagtgtgtgcatttttgataactgtgtacttctggtgactgtacagtttgaaatactattttttatcaagttttataaaaatgcagaattttgttttactttntttttttttttaaaaagctatgtggaag

SEQ ID NO: 13511 - DNA, 479 bp, Homo sapiens
  misc_feature (1)...(479): n = A,T,C or G
cccgcccccccccccccccctttgagcacatcatagangnactcttagtccagtgcggtggaattcgagccaggcctgagccccacacaggccagggcacattcttggattttccattccttggtcatgctggaatctctcaatgtgacatacttatgtaaatattgttactattatttatttgttccatttgagggatttggaatttttgttattttagttttatttttgaaaccaagcatctatagaaaccaagaaagtcagcatgtaagcgtcactggaaaaactggtttaagcaaatagagccgtctgggatttgtaactgaggtgcaactgtcatgaggcccaggcagctctgtaacatcttctatagatgcccttggctaccctgttgttttcatctacctcagacccctatcatggggctctaccctgtgacaagagccaaacccattctccatggcctatggaagcctcac

SEQ ID NO: 13512 - DNA, 474 bp, Homo sapiens
  misc_feature (1)...(474): n = A,T,C or G
gccccccttggagccccntagtncgnatagatgacccttagaccgtgcggtggaattcgaagaatcagctccgcttccttgcagaactggcctatgatctggatgtggatgatgcgcctggaaacagtcagcaggcaactccgaaggacaacgagataagcacctttcacaacctcgggaacgttcattccccgctgaagcttctcaccagcatggccatctcggtggtgtgcttcttcttcctggtgcactgactgcctggtgcccagcacatgtgctgccctacagcaccctgtggtcttcctcgataaagggaaccactttcttatttttttctattttttttttttggtaatccggaatacctcctccagccatgaagtaaaggactacccatgggttatgttttcaaaaatcaaagggtatctttgggaggaagatacattttaggggtagcatatagatggtcctttg

SEQ ID NO: 13513 - DNA, 462 bp, Homo sapiens
  misc_feature (1)...(462): n = A,T,C or G
ntagagaccattagtccaagtggaggacttctgaagattgatgtgcatattgataatgtacttaaaagtgtttgtaaaatgctaagtaaaacctaatgctatgctttgaatgtagcgggttccaaatatttgtgtaatgacgaacaataaaagacattgactattgaacataatcaagccactggaatgtcacctcctgcatctgccagtaaacctgttaacacaggggtggcggtggggggaagtaaatatgtgaaaccaccaaatctcatgatcaggagaaaaactttggaactcccatgagactcccaagttatgtcacaggtgaataagccatgaacttttcatgctgatatcatttctaacgttgctgccttgtcacaagaagcaaaccacaagatcaaccatgcacaacatctttttttaaatacagtttctcgaggattgataggtcaattgatt

SEQ ID NO: 13514 - DNA, 464 bp, Homo sapiens
  misc_feature (1)...(464): n = A,T,C or G
nttcgagaatagtagtccatgcggnggaattccctttcttagacgccacaaaggctccaggagattgaacgccggcgaaatactcctttccatgagcgattcttccgcttcttgttgcgaaagctctatgtctttcgccgcagcttcctgatgacttgtatctcacttcgaaatctgatattaggccgtccttccctggagcagctggcccaggaggtgacttatgcaaacttgagaccctttgaggcagttggagaactgaatccctcaaacacggattcttcacattctaatcctcctgagtcaaatcctgatcctgtccactcagagttctgaagggggccagatgttgggtgcagatgtagaagcagccagtcacagacccattctatgcaatggacatttatttgaaaaaaattctcaaaagttttttttttttttggggggggcggggttctaaagct

SEQ ID NO: 13515 - DNA, 485 bp, Homo sapiens
  misc_feature (1)...(485): n = A,T,C or G
aatggagagcctgcgaannnccntaatgagatcatcggcacgngcggnggaattcgctaaacccacggaacagactctctgggcaattagccatccccctctgactttggtcattgtgctggttctgatatatattttttttaatgaaaggcaactttagattttccctctatccttgctttttttcccttcacctcccacgtgtccctccatccctccccccacccctctgttttgggtatgtacaacagaagcacaaactactgaaacaaaacaaaacagcagaatgagcgttcttccgagagatggcatcgtgatgcgctatttattttccatagaaataggaagttagacggattgtctcttttctgaggggagggggtctttttgacaggagcagagttgatgtcctcaattttcatatttattggcaaaaggaagagaagaggaactttgggttggaaacaaagaaccaattacattag

SEQ ID NO: 13516 - DNA, 548 bp, Homo sapiens
  misc_feature (1)...(548): n = A,T,C or G
gggaacanantttagatnacccctcggaccacagttcgtgtggnggaattcctagctcaaggtgaatatgagaagggcgtagaccatctgacaaatgcaattgctgtgtgtggacagccacagcagttactgcaggtcttacagcaaactcttccaccaccagtgttccagatgcttctgactaagctcccaacaattagtcagagaattgtaagtgctcagagcttggctgaagatgatgtggaatgagaaacaaatgtcaacataataaaatctcagttaaaaatattttaaaaattcttggtagttgagcagctctgggggaataagggcaaatatgcttgttatgaactacactgaaatctaccaaagttaatgtttactttgtgtagatccatttgtctattttatttatttttcccagcgaaaagtgtattttgatagagaacttttcattctataaatacactatgagttgctanngnaaacnnnacaancnnaacaaccaaaacatataaactgaaccaacaaaaaaaaaaaaagggggg

SEQ ID NO: 13517 - DNA, 532 bp, Homo sapiens
  misc_feature (1)...(532): n = A,T,C or G
ntttgaccacatctgtaggggcaattccgagcgccccatgaactcgctcttcaggaagagaaacaaaggcaaatacagccccactgtgcagacccggagcatctctaacaaggagctctcggagctgatcgagcagctgcagaagaatgccgaccaggtggagaagaacatcgtggacacagaggccaagatgcagagtgacctggctcggctgcaggagggtcggcagcctgagcaccgggacgtgaccctgcagaaggtgttggactctgagaagctgctctatgtgctagaggcggatgcggccattgccaagcacatgaagcacccacagggggacatgatcgccgaggatatccgccagctgaaggagcgtgtgaccaacctgcgcgggaaacacaagcagatctacaggctggcggtgaaggaagtggatccacaggtcaactgggcggcactggtggaggagaagctggacaagctgaacaaccagagctttgggactgacctgccgctggtggaccaccaagtg

SEQ ID NO: 13518 - DNA, 463 bp, Homo sapiens
  misc_feature (1)...(463): n = A,T,C or G
tttggccctgagaacatacgcagagccgtggaattcgggaactatgatgccttccgaggccagggaggttatcctgggaaacctcgcaacaggatggttcgtggagacccaagggccattgtggaatatcgggacctggatgccccagacgatgttgatttcttttgagccgtcccccgttcctcagtcttgtatcatccatacttgtactaccttgtcctatgaagctctgagaattttttgtacgatcagccttactgctaataaaagcacttccacagggaaaaaaaataaaaaaaaaaaaaaaaaaaaaaaaaaaaaaaaaaaaaaaaaaaaaaaaaaaaaaaaaaaacaacaaaagataaatgacgacaaacctccaggaaaaaaaaaaaccggggggggcgtttnnggggggtttggggggtgaagcccctcccgggcctttttttgccctgttaaa

SEQ ID NO: 13519 - DNA, 470 bp, Homo sapiens
  misc_feature (1)...(470): n = A,T,C or G
gcgggctnnnaatcgatagcattacgctcgngcggngcaattcctgtgagaatagtagctttatctttgatataatacatagtctccaaataggtaatacttctcaattgattagattttcagagtagatttagagttatctgtttttctggtgagggtcaaatatttttgttaattaagctcacaaatttgataaattaagaattatctgcatttgtctcgtaacataataatgtgtaataaagtctatagaaaattaaaacctgcttttctagtttttatattatttgcctctcatcacttctgcatagctcctgacagttacttcttaacagtgttctatgctggaagcctttatctaaactaaatacagggatgacctcttagcaatcttgccatcaatattatattcaagaaaataaaagttcggntatttgttgtttttgtttttcttcacataagcacatact

SEQ ID NO: 13520 - DNA, 461 bp, Homo sapiens
  misc_feature (1)...(461): n = A,T,C or G
nttgagatcgtagtccgtgcggnggaattcctgtaatcccagtactttgggaggctgaggcgggtggatcatgaggtcaagagatagagaccatcctggccaacatggggaaaccctgtctctgctaaaaatacaaaaattagccgggcatggtggtgcgcacctgtagttccagctacttgggaggctgaggcaggagaattgcttgaacccgggaggcagaggttgcagtgagctgagattctgagattgcaccagtgtactccagctggcgatagagtaagactccatctcanagaacataaaaaaaacatgaaaaaaaatggagggcgcccttttaattaaaggggccctttaaaccccgggtaaaccccttggggggtttttttatgaggcccacttttgggtggggcccccccccccgcctttttttgaacatgagagggtgcctcctcgtttgt

SEQ ID NO: 13521 - DNA, 484 bp, Homo sapiens
  misc_feature (1)...(484): n = A,T,C or G
agaggccnnnnnnnnagnnaacctgattaccntaggaagactgatggccntcgcctcgcacgctgataacaattctgggcacggtgaagcccaatgcaaacagaattgctttagatttccaaagagggaatgatgttgccttccactttaacccacgcttcaatgagaacaacaggagagtcattgtttgcaatacaaagctggataataactggggaagggaagaaagacagtcggttttcccatttgaaagtgggaaaccattcaaaatacaagtactggttgaacctgaccacttcaaggttgcagtgaatgatgctcacttgttgcagtacaatcatcgggttaaaaaactcaatgaaatcagcaaactgggaatttctggtgacatagacctcaccagtgcttcatataccatgatataatctgaaaggggcagattaaaaaaaaaaaaagaatctaaaccttacatgtgtaaagggtt

SEQ ID NO: 13522 - DNA, 473 bp, Homo sapiens
  misc_feature (1)...(473): n = A,T,C or G
gcggggatgnnnttttgatcgcggtacattagtccagngcggtggaattcgtcttcaaaaatacctaagtcctgggcttggttcgggttggcagggccaggactctatagtggggcagtgaggcactggcctgtggggcagaattttaaaggggtgccaaaacactcagtaactcagatcgatactattttaatgcagcgtgttttttaaaattaattttaaaaaaacatgttggacaaaatatccaagtttaaatcaagacagagtctgactttgtactgcacacttggcctcatttgccttaccctagtcctggacacgtcagctcctgcctttatttaaaatgttgatagatattttgttcatcagggattggagtacaaaccagtctgatatgggggtcacttggatttccctgtgaaaatcatgaatgactgtggctaccatgtaaaaccatccctgattctttggtg

SEQ ID NO: 13523 - DNA, 479 bp, Homo sapiens
  misc_feature (1)...(479): n = A,T,C or G
naatgattacccntggccanngcgnatgattactttgatgnggacggngagggaacgggaatttcactgaaagcgcctgagaaccagtaagagacctgcaacagctttgtgctccactggcgaatgcttcctcccctaatacacattatgtgtgcttggagacacaaggagtaagatacagcccctcaagggactcgtcatagggagaggacacagctttgggaataaaggggccacaaaggaggagagaggagtttgctgaaacttcccaagctcccattccagcagttcctgaaggattcatttctctctgaggatctcatgaggtggcttagcagctagaatctcttccttaacagtgggaagaacaactcctggaaatttaggtcgactttgactggatttaaaagaaagctgtataattccacttctgtatatacaaccaaaggaaatgagatgtgcatacccatgttcaatgg

SEQ ID NO: 13524 - DNA, 473 bp, Homo sapiens
ggccactgaggccttagtccgaatagaggacctctatgacctctgtgtgtactactaaaagggtcatcagctacttcttctggttgatacctgagactgctaaggacaaaaattttaaacccctgatttatatagatatcttcatgccattacagctttctagatgctaatacatgtgactatcgtccaatttgctttcttttgtagtgacattaaatttggctataaaagatggactacatgtgatactcctatggacgttaattgaaaagaaagattgttgttataaagaattggtttcttggaaagcaggcaagactttttctctgtgttaggaaagatgggaaatggtttctgtaaccattgtttggatttggaagtactctgcagtggacataagcattgggccatagtttagtaatctcaactaacgcctacattacattctccttggatcgtcttgttattacgct

SEQ ID NO: 13525 - DNA, 473 bp, Homo sapiens
  misc_feature (1)...(473): n = A,T,C or G
ngggcgatagatgaccattagtccgaatggaggacttctatcgagtgcggcggagggataaccgtggactatccatagacatctgacctcggcacttagcatcatcacagcaaactaactgtagcctttctctctttccctgtagaaacctctgcgccatgagagccaagtggaggaagaagcgaatgcgcaggctgaagcgcaaaagaagaaagatgaggcagaggtccaagtaaaccgctagcttgttgcaccgtggaggccacaggagcagaaacatggaatgccagacgctggggatgctggtacaagttgtgggactgcatgctactggctagagcttgtctcaatggatctagaacttcatcgccctctgatcgccgatcacctctgagacccaccttgctcataaacaaaatgcccatgttggtcctctgccctggacctgtgacattctggactatntctgtgtn

SEQ ID NO: 13526 - DNA, 465 bp, Homo sapiens
  misc_feature (1)...(465): n = A,T,C or G
nataggagattagtaggccatgcggnggaactctattagtgaagttcgcaactaaactaaacctgtaaaattatgatgattgtattcaaaagattaatgaaaaataaacatttctgtccccctgaattatgtgtacatgtgtgtttagatttattattaaatttatttaacaatgttctctctttttaagctaataattgacagtggtgttagttgagaactgaatttacagttggtcttttgggcagtaagaaatgcaaaccatagactgaatttccttcatagtacatgatttttcctaaatataggaaagatcgaaggggtctctggtttatttgcaccatgtttatttaggcatctattaaagcaatgcttgtggtgctacttgcttagtagaaaagctaattataaaacttaatgcaaaaattcagagtactacctttctctttcctctttcctattgag

SEQ ID NO: 13527 - DNA, 480 bp, Homo sapiens
  misc_feature (1)...(480): n = A,T,C or G
nctagaaaactgagaacactacgcagagncgnggaattctgcagattcaaccagccaaggatcgaaaatactcagaaaaaaaataaaaaacaacacaatgataaaaagtagtataaaaaacataactatgttatatctatatctagcatttacattctatcaggtattataactaacctagagaccatctaaagcatacaagaagatgtgtctacaatatacggcaccaatttaatccgggactggagcatctgcagactttgctatccaaggggggtcctgaaaccaacccctagatactgagggaccaacccccagatactgagggatggctgtcatgtcatgaggtgttcccacagtacccactgcgtggcatgcaactgacaacgttcttacttaatctggcacccagggccacccctactggagggatccttgcaccctgaggggaagggggaggctgtgtgggggccccacgcc

SEQ ID NO: 13528 - DNA, 503 bp, Homo sapiens
  misc_feature (1)...(503): n = A,T,C or G
tagcggcnnnnnnnnngttagcgtacctacgcacngncgnggaattcgcatcttgctcctctgatactcagaaaattgcaaatggagcagtaacggtcaccctcatgagcccagtcccatgacccggtcaggggagaccccagttttctactggggttgcctgtttggctttccttacttatcgcctgacccctggtctccttattttttgggataggaattatctgtatgaccgttcgctctggaactccgtctgcctggagccctctgcagctgttgtctggcacgtgtccctcttctccgcccttctgtgcatcagcctgctccagcttctcctggtggtcgttcatgtcatcaacagcctcctgggccttttctgcagcctctgcgagaagtgacaggcagaaccttcacttgcaagcatgggtgttttcatcatcggctgtcttgaatcctttctacaaggagtgggtacgaattataaacaaacttcccctttaggg

SEQ ID NO: 13529 - DNA, 463 bp, Homo sapiens
  misc_feature (1)...(463): n = A,T,C or G
agagaaaaanatttcgtagcctcgagnatcattagtccagtgcggtggaattcgtggagagagcgagctgagtggttgtgtggtcgcgtctcggaaaccggtagcgcttgcagcatggctgaccaactgactgaagagcagattgcagaattcaaagaagctttttcactatttgacaaagatggtgatggaactataacaacaaaggaattgggaactgtaatgagatctcttgggcagaatcccacagaagcagagttacaggacatgattaatgaagtagatgctgatggtaatggcacaattgacttccctgaatttctgacaatgatggcaagaaaaatgaaagacacagacagtgaagaagaaattagagaagcattccgtgtgtttgataaggatggcaatggctatattagtgctgcagaacttcgccatgtgatgacaaaccttggagagaagt

SEQ ID NO: 13530 - DNA, 445 bp, Homo sapiens
  misc_feature (1)...(445): n = A,T,C or G
ntttgacttcctaagaccactagaccangcggnggaattcgataccgccgaccctcgagactgaaggccccgaggaagcccgcggcctgtgatcgtctgtctacatcaagaacacagacgtccggggcaagaccctcccccgtcgcctttctcgaccgtggcacgcgacacacggagtggactgccctgatcgaaggacgaaaacgcatcgacatggccgacaagaggcaattgtattaccacgagaccaagggcagcgtggccgtgcgcgtggctctgggggaaacccagctcgtccaggaagtgcggcgttttctcatagacaacggggtcagcctggattccttcagccaggctgcagcagagcgaagcaagactgtgattctggtcaagaacctcccggcaggcaccctggcggccgagctgcaggagaccttcggccatt

SEQ ID NO: 13531 - DNA, 471 bp, Homo sapiens
  misc_feature (1)...(471): n = A,T,C or G
nagtccgccggctgnaaaannnaagtttccanagnannntcnntnnnntnngggnaacangccgaggcaggcgaaccgtggcaccgagagcaagaaaattttcttttagctcttcaccctgacctatggtgccggggggacccagctatgtaaggactatgaaaatgatgaagatgtgaataaacagctggacaaaatgggctttaacattggagtccggctgattgaagatttcttggctcggtcaaatagttgggaggtgccatgactttcgggaaactgcggatgtcattgccaaggtggcgttcaagatgtacttgggcatcactccaagcattactaattggagcccagctggtgatgaattctccctcattttggaaaataaccccttgagggactttgtggaacttcctgataaccactcatcccttatttattccaatctcttgtgtggggtgttgcggagaa

SEQ ID NO: 13532 - DNA, 441 bp, Homo sapiens
  misc_feature (1)...(441): n = A,T,C or G
naatgatgaccatttggacagcccgttggaantccttggctaagcaatcctctcaccttggcctccagagtgttgggattacaggtgtgagccactgcatctggcttgagtttttatttaaagccccaaacattaatgagtccctgctgtgtgctgatacccacaactgacagcttatggccacacggtctgtaggatagacaagcccataaataattctgtacacaatggtaaaacaagaactgctgttgatgtgtgtaccagaagggcagtgacgtcagcctggagagttggcctgggcctggcagggagtaaggaaagaattctgggtgcagaagacagcaaataccaaggcctaaaaaagaatgaattatttgctgtttgggaaatggaagcccacgctgagtgctgaagcacagggactctgcgcaggaagaggag

SEQ ID NO: 13533 - DNA, 470 bp, Homo sapiens
  misc_feature (1)...(470): n = A,T,C or G
gtggggttnnaattgatagctttacgtagngcggngcaattcgcccgggtcatcatagaaaagtactacacgcgcctgggcaacgacttccacacgaacaagcgcgtgtgcgaggagatcgccattatccccagcaaaaagctccgcaacaagatagcaggttatgtcacgcatctgatgaagcgaattcagagaggcccagtaagaggtatctccatcaagctgcaggaggaggagagagaaaggagagacaattatgttcctgaggtctcagccttggatcaggagattattgaagtagatcctgacactaaggaaatgctgaagcttttggacttcggcagtctgtccaaccttcaggtcactcagcctacagttgggatgaatttcaaaacgcctcggggacctgtttgaattttttctgtagtgctgtattattttcaataaatctgggacaacaaaaaaaaaaa

SEQ ID NO: 13534 - DNA, 453 bp, Homo sapiens
  misc_feature (1)...(453): n = A,T,C or G
attggagacttgtagaccgtgcggnggaattccatgaaaaaattcatggaggaggaaaaacctttgattttaaagaatgtgggcaggttttgaaccccaaaatatcccataatgaacaacagagaattccttttgaagagagtcaatataaatgtagtgaaacctctcatagttcctcccttactcaaaacatgagaaataattctgaagagaaaccttttgaatgtaatcagtgtgggaaatccttcagctggagctcgcatcttgttgcacatcanagaactcacacaggggagaaaccttatgaatgtagtgaatgtggaaaatccttcagccggagctcgcaccttgtttcccatcagagaactcatactggagagaaaccttacaggtgtaatcaatgtgggaaatcctttagccagagttatgtccttgttgtgcatcaaagaacta

SEQ ID NO: 13535 - DNA, 489 bp, Homo sapiens
  misc_feature (1)...(489): n = A,T,C or G
tggggccnnnnnnnnagggagaattgatnaccctnngaanaactggagattctcgtacangcggnggaattccaggagcgtcactgagcagaaaccacaagtagcacagagcagagtcagacttcacattagtactcttccactctcaccatgagaaaacgatgctctttctctttaaaggcctcccagttagcttgcaagccccttctacattcctaagggtgaattacccttataattattatcagtattgaatatttactaagtacccatactgggtgagatcatgaagttgtttgacacgtatatatggcagaaatattccaagtgtatttagccactgttaatgttcttccagagctgaaaatagcagggacgagtgtacttgacctgatcttttgcatgttgactcctttaactaagtctaaacagagcagaaaccttgccatcagagaagcgtttgcaaaagggagaccaggtcagagcatg

SEQ ID NO: 13536 - DNA, 465 bp, Homo sapiens
catcgaccatcgtagatccctagtcagagtggtggaattcctcgaaatgaagcggaaagcagatatgcgcgtcagcatactttggcggaccagtcccagtgctgaccagtcccatcgtatctctgacggtgcatatcaggatccgcattgatcagatgccgaaaccatggcttggaatggctgcgatgaagctgagctgcgattcaaacccagctttccttcacgtacccaggaccttttcttctgcagccttgccttctccagggactcactgttacctgtgtccagactgtggaaggatgatgagtgtggagaagacatatctgcccttcagtcttggcccagaaacaatgctgatacctccactgacattccactggcaagaacagcccgtgcgccacacctggaatgggaaggatggcgaggaaatatcattgctgattggatcaacacatcttctcgggg

SEQ ID NO: 13537 - DNA, 548 bp, Homo sapiens
  misc_feature (1)...(548): n = A,T,C or G
attccgattactantccgtgtggtggaattccgagcggccaggggtaggatagtataggaagtagaaggggaaggagggttagatagagaatgctgaataggcagtagttgggagagagcctcaatattgggggaggggagagtgtagggaaaaggatccactgggtgaatcctccctctcagaaccaataaaatagaattgaccttttaaaaaaaaaaaaaaaaaaaaaaaaaaaaaaggcgcccgttcaatttaaaaggcccctttaaaccccgttgaaaaccctgaaggggcctttttagtgcccacccttttgtggttggcccctccccgggcctttttttgaccttggaggggcccccccccattgtcttttcttaaaaaaaggagaaaatggcctccctttgctggagaaggggtctcttttttttttggggnnnnnnnnnnnnnnacnccncacaccacncnaccccnnccacnacaaccaccaccaaaaaaaccccacccccccccccccccncaccacccacaccccaccccccccccc

SEQ ID NO: 13538 - DNA, 488 bp, Homo sapiens
  misc_feature (1)...(488): n = A,T,C or G
nggaggccccggnnttnnngnncaatcgagacttctgnccgaatcgaggcccattcgatacattggtgggggctcatcaggattggagatgacagatgtactgtcccctttgcctgcgatactaggtccccggggccaggagagacccggcatccaaggtgtgccacagctgagcttcacccggatatatagaccagctctccccacgtcccagcaccctgcctggcagcgcaatggaaccgaggatggggctgcaggacgataccagcacttcaggaactgtgacagaatcttgctccgctgccaaggctggagtgcactggttcaatctcggctcactgcaaactctgcctcccaagttcaagtgattctcctgtgtcagtttctttaggaatacagcactccatattgctaccataataatgaaacggattcccatggctacagcgatgaagcagcagaaaataaatggagatgctgtcaaagaa

SEQ ID NO: 13539 - DNA, 506 bp, Homo sapiens
  misc_feature (1)...(506): n = A,T,C or G
cggggcnnnnnnnnttttgattgctatctctacgccangncgnggaanncggcaagacggaagggagaaggaagaagctcccctgtacagagacagagggacggaggccccaaagctgagagagggaaccccacctgccacagataccatctaggctggagtgcaatggcgtgcagtctcggctcaccgcaggctccgcctcccgggtacgggcggttctcctgcctcagcctcccgagtagttgagaatgcagatggagtttcactcttgttgcccaggctggagtgcaatggtgtgatcttggctcactgcaacctccacctcctagattcaagcgattctcctgcctcagcctcccgagcggctgggattataggcatgtgctaccacgcctggctaatttttttgtatttttagtagagatgaggtttctccatgttggtcaggctggtctcgaactcctgacctcaggtgaaccgcctgccttggcttcccaaagtggtgg

SEQ ID NO: 13540 - DNA, 476 bp, Homo sapiens
  misc_feature (1)...(476): n = A,T,C or G
atttgaaccccntnnnnnnnnnattgtagacccttagtccagtgcggtggaattcggggaatccggggctcgccctagtcgcggggacaccgccttccaggagctgtccccaggcaaactcacagacatcttcaaagaggcttcttggacattctgctttttgctcctcataacaggcttcgatggagtttctctcttattttccaggctgcagtacagtggcgtgatctcggctcactgcaacctccacctcccaggttcaagcgattctcctgtcttagcctcacgagtagccgggattacaggcacatgcccccattcccagctaatttttgtatttttagtagtgacggggtttcatcatattggtcaggctggtctcaaactcctgacctcaggtgatccgccttggcctcccaaagtgttgggattacaggcgtgagccacccactgtatctcttgttcggaggaatatn

SEQ ID NO: 13541 - DNA, 576 bp, Homo sapiens
  misc_feature (1)...(576): n = A,T,C or G
cgcgctcccccnnaattgaaaaccatcgatcacctatccgagnggngcaattcgcctttnttcagtgctgtaagaaaggacggaggctgttatctatggcagatctatccaatataggagagaatggaccgcatacgcctggttctcatcatatgcaataaagagtttgaccatctgcctccaagaaatggggctgactttgccatcatggagatgaagaagctgcttgaggatctgggttacagtgtggatgtagaagagaatctgacagccaggataacgtgtccaggagagacagcacaaggggctccatcttcatcacacaactcatcgcatgcttccagagatattcctggcgctgccacctagaggaagtattttggaaggttcagcaagcatttgaaagtccggaggcaacagtccaaatgcccaccatagaacgagtgtccatgacaagatatttctacctctttcctggcaattgaaaatgggtaagcattgagaggtgttggtggtgtatgaaataaatgaaagtgtgatattggagcaggataccacaagcagcccagccctccn

SEQ ID NO: 13542 - DNA, 484 bp, Homo sapiens
  misc_feature (1)...(484): n = A,T,C or G
gggcaaccccggnngtgaannnaaactgagactctagtatagtgcggcggaattcatggtgtctaaatgcctcagtcagtgcctaactgcacatacaaaaataaaaccttctttctgtaatctaccaaaataaacgcaatggtatttctgctatttaaacacatctttagcttatttcttcatgttctgctctggttttcagtcagtgtctatgtaaagacacttttagaggaaaatgttgtaatcccaaaagaatttttgtttaaccaactttcagagttactaaaaggattatctttaattcagtaaataatagaatataatcttcaaaattagaagatattctcttaaaatttataacaattaatgcaacaaaaatcagcatattttgataaatgtctcaagcaaatgagcaactcacaggccccacaggtgcctacagcctgaccagctatacaaaaagcctgcaacctgattctaggat

SEQ ID NO: 13543 - DNA, 485 bp, Homo sapiens
  misc_feature (1)...(485): n = A,T,C or G
tggtggcccngnntggggnnnaactgagactctagaactgaggctgtagnccaggcggggccacttgggacgcctgtctaacaagggtcaggcaaacgctaaaggggctcatgctactgagtatttttcacctccgatgaggcaacaaaaaggcgaggccatgtgaacagcttaaatggccatagtgggaaataacctagagttcaaacccaagggagaagttcatggagtcactgagttgtatgttacaccattgatttaataactgctttgtaccacatgaaatgccccatccattgcaagaagcagcatgtgttccaaagtgttctaagtgaaaataaagcctgtcacagaatcaaggacaaagggaaattatacttgtcttagggatgaggtcaaggtcatagactgaagtatcaataagtcaaaaaaccaagccaaggattcaggctggatggaaagatgaagcangaattgaagggtgt

SEQ ID NO: 13544 - DNA, 476 bp, Homo sapiens
  misc_feature (1)...(476): n = A,T,C or G
tgggccnnnnnnaagaaacctgagaccntaggaagctgatggacctcctaaacacagngnccctaacagaggtggcatcagaatatatgtcatgaccaacctctctcctcatacgagggagctcatcctcatgtttgtgtactctttctttgtattgggttgaaatatgcctccttgaaactgcccaagtctgttttccggagcaacttacagaatgcctccctcttacagatcatgaccctttaaattgcaatcttcagtcctgtgtcctaggacttgtcttcaagccatctgcagttacttgtccattcttcctaagattggattccgagtctctcatcttccttgttgctgtctcctggaagctctaaaatagtgtttcccaaactgtgctttggaacagttggggagattttaataattattttttttttaattaaaaagaatggagtgtgaaggtggtagatgccatggcc

SEQ ID NO: 13545 - DNA, 482 bp, Homo sapiens
  misc_feature (1)...(482): n = A,T,C or G
agggccggccatagtagacattaggattgagggccgttagccatcatcaaagtgatgttgcacaactgcaaataacaccatcaacaaaggaagacctggcaaaacagaccagaaaacaaggccagggtggcctctatctcctgcccttgtgttctgcccgccttggcctcccaaagtgctaggattacaggcgtgagccactgtgcccagccttttgcccattttaaaactgggttattaggatttttcctatagggttgtttgagttccttatctattcgattattaatcccttgtcagatgtatagtttgcaaatattttctccccttctgtgggctgtctcttcgccttgctgattgtttcctttgctgtgcagaagctttttaacttgatgggatcccatttgtccatttttgctttggttgcctgtgcttgtgaggtatttttcaagaaatccgcccagacccccacggngaggtgg

SEQ ID NO: 13546 - DNA, 569 bp, Homo sapiens
  misc_feature (1)...(569): n = A,T,C or G
gttggaaatacgaanactagtccagagnggngcgaattccgagcggccaggggtaggatagtataggaagtagaaggggaaggaggactagatagagaatgctgaatatgcagtagttgggagagagcctcaatattgggggaggggagagtgtacggaaaaggatccactgggtgaatcctccctctcagaaccaataaaatagaattgaccttttaaaaaaaaaaaaaaaaaaaaaaaaaaaatgggggcccctttaatttaaagggcccgttaaaaccccgtttataaccttgaaggggccttttttttgccccccctttggtggttgccccccccccggggctttttttaccctgggaggggcccccccccctggctttttttaaaaaaaaagagaaaatcccccctctttttccgagaggggggtctttctttttttggggnnnnnnnccaanccttntcaacacatctcgctacancgatcatctttttagataacatctatcttgcctacctccccccacttgcgcgtatcctcattactcactaaatatacacacttgccg

SEQ ID NO: 13547 - DNA, 476 bp, Homo sapiens
  misc_feature (1)...(476): n = A,T,C or G
cttcgacaccccnttcgtagacccttagaccatgcggtggaattccccgctgctgacccgagcaaggcaccagcaccacctccagggttgcctggatgccctcggccactacaagcagtcaaaagacctggccctggcggcagaggcgctgcgggtggcccggggtcacctgacccggctcacaggtggagggggtaccgaggagatcctggacatcatgtttcaggacttctgtgtgggcaattgacgggatccagggaagtcgcacccaagctgcgtggagacccaggagcctcgggggatctggaaacagtttaggccaattgggattctcattcgcctgagaaagaacttgattctcaaatagcgaagcaacacagctgagaggtagcgagatccctgcaaggactccctggagattcangccctgcaatggtgctgaatggaggtcccgttcgacccttgatagctgggca

SEQ ID NO: 13548 - DNA, 518 bp, Homo sapiens
  misc_feature (1)...(518): n = A,T,C or G
cctccagtgttgggattacaggcctgagccacgacgcccggccgtccttcctagtcttaagtggcactacctaatgaggagaggggaggaagttgaatgaggaaagaaaagcagtcttgtatttcctcttacagtatgctatgggagaattagtagtatttgctaagggctgatagcattaaaacccagttataatcatcacctgatgggattttaaactcctggaataatctcagtacgtcactgtatgagattttaatcaatttctgtattttaaatttagatctcttctataggattcaccttggctgataaagtggatggtccattcttcctggagatagattttattggcgtgtttactgatccagctcatacagaagaatttgcctatgaaaattctccagagcttaacccaaggctttntaaataaagatcatatatggaagttggtttactatatctaaggtactagcatctaccatgatatnagacaaataaaatatttctttaatgcg

SEQ ID NO: 13549 - DNA, 513 bp, Homo sapiens
  misc_feature (1)...(513): n = A,T,C or G
gaggccnnnnnnnnngnncccgataccattgnannnncctagttantctnagnacgngncgngnaannngngaantannnggacaannggnaaaanngggatanggactgggagnnaganaanagnatatcagggggaaactgcctaanngggaanangaggatggaagagaagggctttatttttaggtaatgtacactaaagtatttagggattaaaaaattaaaagtcatcaattattcacgtaccctagaggtttaagatatgctcaagagtgttttactaatagaatggaaaacgagtgagaggtgggcagaagagagattataggacatatctaccaaaaatgataaaagtcccctaaacaagtacttgttatggtgtcctttgaacatcattatttttgggaggcaggccaattggagaaaccatgcttgtatttggttctgtcatcaggtatatgggagttctggaagctagccatgattggtgttttactgggatgaataggga

SEQ ID NO: 13550 - DNA, 451 bp, Homo sapiens
  misc_feature (1)...(451): n = A,T,C or G
attcgangaccctagncttgggtggccgcttttccaaaactgcatattcagtacaagtcaagttttgtgcaggagtggcgctgccaaatctaaagcaacgtcctttgagagaaaaggcacagcaatgcatatagcctctgctaatggccttcctgcaatacaagaagaattccttgtttctcatgtaacatacctgtcttgccaggacaaaaacatggaactgaggattattggattgtacaggatttgagggctactaggcaaattttcaaagccatttatctggtgatacctgatgcttatacattattcatgactttaaccagtgagctgtactggtgttcagtcttgaatctgaaggatgccttcatctgtattcccctgagtccagagtcccatgaagtgtttgcctttgaataggaagactctgacactaaagctaaatgatagt

SEQ ID NO: 13551 - DNA, 409 bp, Homo sapiens
ggcccagtgctaaacgacggtataaaaaccagaagtttggttttggtggaaagaagaaaggctcaaagtggaacactcgggagagctatgatgatggatctagcttccgggccaagacagctcatggcagaggcctcaagaggcctggcaagaaagggtcaaataagagacctggaaaacgaacaagagagaagatgaagaacagaacacactaaatagcatctttgaatacgcagaaccaagaaaaaggaatgaagactcgcaatttcacgacacactttgatcccttctgttggtgtcatgttgtaaacatttctttcaataaactaaagaaaaattatgaaacaaaaaaccaaaaaaaaaaacaaataaaaaaaaaaggggcccgtttattttaaagggccctttt

SEQ ID NO: 13552 - DNA, 421 bp, Homo sapiens
ccactggattgtgaacctcctgaaattagggctgtgacttgtaccttataagtatcacatagatgagaaaaaatttcatcgatgtaatggatggaacactagataggagatcagtaaggaaatagaagactttaaaaacactgtaaaccagctagacctaacagacactgctttctaacggcgattgaagagcacattccacccagcaacagcagaatacacattcttctcaagtgcacacggaccattctctagcatagatcatatcttaggccacaaatcaaatctcaataaatttagaaaaattgaaattacacaaaatatgttctctgacaacagagtaatgaaattagaaggtcaaaaacagaaggaaatttgaaaattcacaaatatgtaaaaattaaacgacacactcctaacc

SEQ ID NO: 13553 - DNA, 455 bp, Homo sapiens
  misc_feature (1)...(455): n = A,T,C or G
attgangaccattagncttgcatgacgcttagtacagtgcggtggaattcgtgaatgtggaccccggcgtactcctgcatgatggagcggatcaaacggaccttgttgccaatgagggagctgagcaccttggcagggatggagacctctacctcggctatgttggactgaaaccaaacacagggcaggaggaggaagacacatttttgcggcaaaaagggcagaggaaaagataaactatcatctttggtggtgatgaacacgcaggcctagagccctggagatgccacttacaagcactgaccaaacttctccaagccatttttgacctgcacgggggaggagagtgcacgtcctggggagagtggggtgcgcccagcagagcaggcgcgctgggaggtgtttaactcaacaggacccagagtcctcgtgaatctatgctggattgngaggtg

SEQ ID NO: 13554 - DNA, 447 bp, Homo sapiens
  misc_feature (1)...(447): n = A,T,C or G
nccgatgatccctagncttggtggcgtattaacggaactgcctcaggtttgggtcagacctgcatcctggggcatctgctgaaatgtgagcacacaaactacctcctttggcccagaagccccccaggcctagcatctcagtgccccaaccctctgcccagctgtggtatccagcaggtccttgggtccccacttgagcaggcacttggctgggatatggagcaatttaaagcccacaggggttgttcagtttctatgaaatggagcatggggtgcctgctagcctcaatcccccgaagtgggagcctcatgatagagtatagcttgggggtgggaggtgaggaaaatctgaggtacccaggggaacccccagctaactggtctctcagaggagtcccccagggcccgccagctatcacagggactcagaaacacccatttcctaag

SEQ ID NO: 13555 - DNA, 503 bp, Homo sapiens
  misc_feature (1)...(503): n = A,T,C or G
agggccggnntnnctnancctggtngtangcagnggactgantatcctggaangncgcnnnggnngannttttntgattcagaattatagaaaacttgataaatacttgattttaaccaatgagactacaggcagatgggactaagtgtttatgggacaattatgtactatttaacttaaatatattttgtttaataggaaatatataataatagcattttatgtaataaaatatgggcaacgattatcttggaaattaaagagtcaaagcaaagaaatgaagggctggtaaaatgaattttgtaatatcctcaggatacttttatcttanaagtatgttgctaaagattttgtaaattgtatttcaacaattttaaatgtgttgagcaagttgcagtgcaaacactgtcattatgtagagagtttatatgcacataataacctgtacctataaatcgtgcaataaccatatgcgactattttggcatggagaaatctgacag

SEQ ID NO: 13556 - DNA, 464 bp, Homo sapiens
  misc_feature (1)...(464): n = A,T,C or G
ggcctcanattcggtcccatcgagagtcgttgaactaacaaggtaggtcagagaatttgtttctggccagttttgtacagaatgacggaaggaaagttagagcagtatttttaagttttatggctggctttggggaaagggggttctggtttctgtgacctgctatgaggaagagagggattccagtttctgtggctgggcttaggggaggctgggactgagagacaggagggcaggagggggtcagagagaaactttttcttgtgaggcttttatgctggagtactgcttcccgactcccaacgtttgctacttgtaaaattttgtgattccacaggaaaggcaaaggcatggaagtcatgagaaggcaatgctaccttaacttcttctcattttattttttatagtgttcagtttaaaggcgtaaaaggctggaggagcagtacaacacagatatgtctgat

SEQ ID NO: 13557 - DNA, 449 bp, Homo sapiens
  misc_feature (1)...(449): n = A,T,C or G
atttgaaacttgaagacctctagacagngcggnggaattcgtcacagacaatggcagtccacaggaggactgcctttcagctatgctttacaactttcaagagtggcaaatctttgcaaaagcactttcactcaacccaaatattgcttatttagaatccaacatcatgatctacccaaacaagtggcccgttctccctttcttggttaaacagatgaagaaataaaaatgccattttcatttgtaaacttgtatttttgtatttatatttaggagtataaaatgtacttatatttaggactacaaaaatgtacctgggaaggtgacgggacctctatactcaggttaagtctcgactgcacactgacaggagtatgtagaccattccatttccctgaagactcagccttgttagtatcaggactggtcggcagatgtgcaggaaaagg

SEQ ID NO: 13558 - DNA, 453 bp, Homo sapiens
  misc_feature (1)...(453): n = A,T,C or G
natcgagattgtagnccatgcggnggaattcatgggaatctcataattttcatgtcagaaaatattctatattaaaaaaaaatttataaatatgaaaactattcttagctagcaggtagccatggttatacaaaaacaggcagcatgtgggttgtaatttgccaaaccgtgggttagaccaaggacttgagaacatcctacacaggcaagtcaggtcactcactcagaacttaccaaggatgcctaggatcccttccacaggtaagccaatttattttcctgtcaagatgagtccctttagacacaagaggcaaggaaatgctacttcccctttatcctaacctaatctggttggtgtttggcagcatatacccaccacggtatcaccacacacataggtaaacaaggacatgtcatcacatctgtggctatagggaagagaagtcctacgtt

SEQ ID NO: 13559 - DNA, 477 bp, Homo sapiens
  misc_feature (1)...(477): n = A,T,C or G
cctagagactgagagcactangcagngngcnggaattcgaggggagcaaggctcagcagctggctgaggtggaggtgaagaagttcaagcagatgacagaggccataggccccagcaccatcagggaccttgctgtggctgggcctgagatgcaggtaaaactgctccagtccctgggcctgaaatcaaccctcatcaccgatggctccactcccatcaacctcttcaacacagcctttgggctgctggggatggggcccgagggtcagcccctgggcagaagggtggccagtgggcccagccctggggaggggatatccccccagtctgctcaggcccctcaagctcctggagacaaccacgtggtgcctgtactgcgctaactcctgattaatacaatggaagtttctgggcnnnnnnnnnnnnnnnnnnnnnannnnnnnnnnnnnnnnnnnnnnnnnnnnnnnnnnnnnnnnn

SEQ ID NO: 13560 - DNA, 463 bp, Homo sapiens
  misc_feature (1)...(463): n = A,T,C or G
natggaagatagtaggccatgcggnggaactctaaacaggtactgctgggccggaaggtggtggtcgtacgctgtgaaggcatcaacatttctggcaatttctacagaaacaagttgaagtacctggctttcctccgcaagcggatgaacaccaacccttcccgaggcccctaccacttccgggcccccagccgcatcttctggcggaccgtgcgaggtatgctgccccacaaaaccaagcgaggccaggccgctctggaccgtctcaaggtgtttgacggcatcccaccgccctacgacaagaaaaagcggatggtggttcctgctgccctcaaggtcgtgcgtctgaagcctacaagaaagtttgcctatctggggcgcctggctcacgaggttggctggaagtaccaggcagtgacagccaccctggaggagaagaggaaagagaaagccaagatccacn

SEQ ID NO: 13561 - DNA, 396 bp, Homo sapiens
  misc_feature (1)...(396): n = A,T,C or G
gcattgtaggaaatttggcttcagaaaagagcctttgtgtgtagcctgtgcccagcatgcatcatcaggtatttttagatccccaggaattttttttttctttgttacttcatttgttcctttacctattacaggcccattctgtctactcaaagctggttgtttccttcttaaatcaaataggcttttttaaattgggtcctttgtatgggctataaatcagcttttctctggagcctgttcaaattgtccttgatcaattaattatctgaggtattttgttaaaagtattgttgtccctaagcccagtcacctgcttcagagattactcctgccctgcttggagtaagctgaaaatcggtctaaagatggagattttcagtgttctgagtatan

SEQ ID NO: 13562 - DNA, 473 bp, Homo sapiens
  misc_feature (1)...(473): n = A,T,C or G
ggagcnctnnnaattganncccatcgagaccctcatccatgtggtggaattcgtgacctgcagggaaaggctgcagagagccgacctgtggggctcagtggaccaggtctactcagggatgatgctgttggaggctccaaccccatgtggcagcagctgcgaagtctgcagcccagcgtccctggaagcaggggaggtggggaagatgcactgaggggccccctgctcactggaactctggaaagggtggctcagccaggctctaaaaaggtcccaagcgtgatctggtgtgactcctgaaagcccctgtccctttggtgggcatgcacacttggagggcagggctcctctgccctacgtggttctggcccaggggaaccacatcccatatgcctggaataatttctatccaattttctgttataaatacataaatatatatatatatatatatgcctaaaaaaaaaaaaaan

SEQ ID NO: 13563 - DNA, 450 bp, Homo sapiens
  misc_feature (1)...(450): n = A,T,C or G
ntttgatgacccttagnctgggtggcggtattcgaacacggntccatcatcacccaggcgcggagggaagacgccctggtgctcaccaagcaaggcctggtctccaagtcctctcctaagaagcctcgtggacgtaacatcttcaaggcccttttctgctgttttcgcgcccagcatgttggccagtcaagttcctccactgagctcgctgcgtataaggaggaagcaaacaccattgctaagtcggatctgctccagtgtctccagtaccagttctaccagatcccagggacctgcctgctcccagaggtgacagaagaagatcaaggaaggatctgtgtggtcattgacctcgatgaaacccttgtgcatagctcctttaagccaatcaacaatgctgacttcatagtgcctatagagattgaggngaccactcaccaggtgtatgtg

SEQ ID NO: 13564 - DNA, 469 bp, Homo sapiens
  misc_feature (1)...(469): n = A,T,C or G
gggggaattcgtagacattagnncattgatgaccattagtcagngcggtggaattccctccacataatattgcttgtgtgtgaacatgaactcgttcccctacaagggaagacgctcttcttttttagcctcgcagctaatagcttgtatagcagagtctcagtggactggggaaaatgtatgaacccattcagaaacatggtgctggagatactagatgtttctggaaatggctggacagtggacatcacaggaaactttagcaatgccatcagcgaaagccaggccttctctttgattcttgcccaccacatcatgggtgccgggtttggcttccataacatcaaagatcctgaccagaacacatttgctggcctggccagaagttcagtgagacacctggatctttcacatgggtttgtcttctccctgaactcacgagtctttgagacactcaaggatttgaagg

SEQ ID NO: 13565 - DNA, 463 bp, Homo sapiens
  misc_feature (1)...(463): n = A,T,C or G
aggggnattgtagacactagnccttgaggngcaattcgntggcgcatgcctgcaatcccacctacttgggaggctgaggcaggagaatcgcttgaacccgggaggcggaggttatagtgagccgagaccgcaccattgcactccagcctgggcaacaagagcgaaactccgtctcaaaattaaacaacaacaacaaaaaaggacaatctatgatatgttgtaaaatcattcggacttttggattactgttattttgtttcagcagcagtgggacagagagaagctatgccatatccttcccttagactatgctcaaagatattatgttatactggcttttctgatgatatttactttttgtttttatagttgttgcattgatgttactcatttaggaaaggtgaaagagaaatccctatgagaagcacaatgttaaatcaagattcattttagttataaatat

SEQ ID NO: 13566 - DNA, 432 bp, Homo sapiens
  misc_feature (1)...(432): n = A,T,C or G
atcgagcccctngnnattgaggaccattantccatgcggtggaattctagaaagagtttcctacatgagaagaactcacatttgcaattttcttccttgttcttttcttctagtgacagatgagaacagtgagtctgacagtgacacagaggagaagctgaaaggtgaggagagccactactgtgcaggactcaggcaggtgacttggaagctgcaaaggtggcccctcctccttagtatgagggacagaagcgtcctgccggagcttgcttggcaaggcgtggacatctcgggagacagtggggccacagggtgctccagagccggtccgtcatgggcatgatcaaaatggcactacagttgctgagagccagggtggctgcagtaacggcagcgacccctgctcccatgcctctccctatgtcctgaggg

SEQ ID NO: 13567 - DNA, 478 bp, Homo sapiens
  misc_feature (1)...(478): n = A,T,C or G
nnaagggcgccggnctgnnaaccggaagttcanganagtcncgnctggnggaattnggaaccatttcactttactacctaagagctgttgacacagtccctgcatctttcataggcatctttcatgccacgcgggcaagctgtagccagcgaagaaacagaaagagcccttctcacatatgtcagtctcagaaaacttgcatagcagctgtgctaggtaccgatgaggattactatagacccagttgcagggttttatgtggataaagagacaactggctttctcaggggagcactttgttggagattgcagcaatagtgcatccctgctgttgctagaagacattgtgaccatgtagtacaaaatcagtgccagataaaatcagaaagtaacaaaaagcaagaagaaaactcggagtttttttaaatcttanagtgagagacgaaaacaaatgttctgggcttggttcattcacttg

SEQ ID NO: 13568 - DNA, 487 bp, Homo sapiens
  misc_feature (1)...(487): n = A,T,C or G
cgttctnacccgatacctgaggcacngtcgnggaattcgtggntaaatttccccttttttgtaaggataccagtcgtattgaattaggacccactatagtgatctcattttaacttgcttacctctgtaaatatcgaatctccaaataaggccacattctgaggtactggggattacgactccaacatatctttttgcggggaggagaacacagctcaggccataacgagccatttgtagagattagctcactatctgtttctgactcttctttccatacctgcctacccatttctctccacactgtctcttgacagaacctgtggtctggaaaacatctggtcaacttagtcacactgaggagtaagtggccaaagctgcctttgtctatctgtagtatacagtggttcaaaaggataaaaataatgataggaaactgttaaattttatatgttatccctcctcgaaatactgcattntaacaaat

SEQ ID NO: 13569 - DNA, 475 bp, Homo sapiens
  misc_feature (1)...(475): n = A,T,C or G
cgcgggcctnnnaattgaaaacccatcgaganccctatgnagtgtgctggaattcttgctatataaggacagatttttctgcttcaccagtaacttttctctaagaacagctacattgtttttggtatagttcttctggtacatttgtttcctgttttttcaatcaggtgtaacttgtctttttttctagttttgaggggtaactaagatgatgttggcaccggaagcccaggaaaaagccaggcaagggtggctccaaggggagcaggagagaatcccagcgctcttgccatgctgtttatacctgttcccttttttaggaagatgagactaagccagaagattgcataccagatgtaccaggcaatgaacacgccagggaatttctggctcatgcaccaactaaaggactttggatgccactggggaaagaagtcaaagttatgcagtgtgagtgtgggagagtttccctaat

SEQ ID NO: 13570 - DNA, 471 bp, Homo sapiens
agcagggcttttaattgaatccccattgagagccgttgaaatccaacctcaacccgctcaaggagccactcggcttcatcaaggtcctcgagtggattgcttctatctttgcttttgccacctgtggaggttttaagggccaaacagaaattcaagtgaattgtcctcctgcagttactgagaataaaactgttacagctacttttggttatccattcaggttgaatgaggcatcatttcagccacctccaggtgtaaacatatgtgatgtaaattggaaagattacgtcctcataggcgattactcttcttctgcacaattctatgttacctttgcagtctttgtgttcctgtactgcattgctgcccttctgctttatgttggctacacgagtctgtatctggatagtcgtaaacttcctatgatagactttgttgttacacttgttgccacttttttgtggttggtga

SEQ ID NO: 13571 - DNA, 475 bp, Homo sapiens
  misc_feature (1)...(475): n = A,T,C or G
cctagagaactgagatncntangcagagagcnggaantcgcaaagcaaaacaaattattaagggtttgatggtcagtgttatctaaacattgtgtaaacttttaaatgtttatgaatcccatctcagaggtgtaactaatatttgtttgtgtgtgtgtgtgtgtgtgtgatacactgagcaactgtataccacctagcaagtggcattcttgcttagcgacttacactggcctgtttactcaccctgctgtaaagatcttcattgtcctttccgaaggatgtatttcttccttactctacccatggtcagtatataaccttctggtagttcaagctgtctgcagcaaaatcctctaaggaaagatggctgtctaactcttttcttcagtctttgaggtattacacagctctcagctctctgtgggccctttatccggaaggcagtcttggctccaaagcaggcaacattcttgta

SEQ ID NO: 13572 - DNA, 472 bp, Homo sapiens
cctagaaattgagagcagtgtgcgaggaaccggcagattgggctctaagtcattattctctcagttactccattggtgaaaaggccctttttctctttgcagttcagtctaagtctcgtatttgctttgctgtctgtgtgctgaagctcgtcccgtgtgagttgctgtctgccccttgtcaggctgtgaggtgctcgtgtagacctggagcatgcaggctgcctccgtttttgggtactgagttgtgttttgctctgtctaaaaacatctgcatagttttcaactggaaaaagaaaaaacttaaaaatgggatgtcctaaaatgaaagctgctcaaagtcacagaacaaccgagggacaaaggagattggatgactgggaagcgctggcccggaacagcccctgcaactgtggggcctgcacacagcccttccacagttggcactgcaggtgcaggccaaccctttaaagaa

SEQ ID NO: 13573 - DNA, 471 bp, Homo sapiens
  misc_feature (1)...(471): n = A,T,C or G
gggggagacnnnnncccnagncnncgtttgaagactttgtagacttggagaccaattcaaacctctagggagtgtcagctagagacttctgggcccacttggccagatgatggctcttgccaacaattgaaggagacctcatgtttaattccaggagcacctgacccagggaagcttcagcatgggatactacagacaggccagggtgaggcaccagcctgaaactgggcataccgaatgagcgatgggcccagcagtcagttccctggccaggcaggaggtggggagtccctgctgagggaggttgaatgcccccagagaagtgtcctacagctcctgcctgccagacccccaggcaccctgcagagggaaagttagtgatggcgctggccccacagaaggcttgctgtctaccttagtgcttcagtgggatcagacccctgggtcaccagccatctgatgaaagccccc

SEQ ID NO: 13574 - DNA, 486 bp, Homo sapiens
  misc_feature (1)...(486): n = A,T,C or G
cggtccgaggcnncgggcncggggnaattgagnncctgatnaccctacgccangncgcggaattcggctcgaggagatggggttcactatcgacatcaagagtttcctcaagccgggcgagaatacgtacacgcagcgctgccgcctcttcgtgggaaatctgcccaccgacatcacggaggaggacttcaagaggctcttcgaacgctatggcgagcccagcgaagtcttcatcaaccgggaccgtggcttcggcttcatccgcttggaatccagaaccctggctgaaattgcaaaagcagagctggacggcaccattctcaagagcagacctctacggattcgcttcgctacacatggagcagccttgactgtcaagaacctttctccagttgtttccaatgagctgctagagcaagcattttctcagtttggtccagtaaagaaagctgttgtggttgtggatgatcgcggtagagctacagg

SEQ ID NO: 13575 - DNA, 445 bp, Homo sapiens
  misc_feature (1)...(445): n = A,T,C or G
tgtgcggtnnnnnnnaatcgtagatcactagtcattgaggtgcaattcagccctccagcaaggattcagagtgcccctccggcctcgccatgaggctcttcctgtcgctcccggtcctggtggtggttctgtcgatcgtcttggaaggcccagccccagcccaggggaccccagacgtctccagtgccttggataagctgaaggagtttggaaacacactggaggacaaggctcgggaactcatcagccgcatcaaacagagtgaactttctgccaagatgcgggagtggttttcagagacatttcagaaagtgaaggagaaactcaagattgactcatgaggacctgaagggtgacatcccaggaggggcctctgaaatttcccacaccccagcgcctgtgctgaggactccctccatgtggccccaggtgccaccaataaaaa

SEQ ID NO: 13576 - DNA, 432 bp, Homo sapiens
  misc_feature (1)...(432): n = A,T,C or G
attgagcccttngnnatcgaggacattataccgtgcggtggaattcactcaaggtggtctcaaaattcctgggcttcagcaatcctcccaccttggccccccaaagtgctgggatgacagggataagccaccgtgcccagcagagtttccatttttaagatggtagagggcacacctttctctccctcttaaagaaccagatgtgaaaatgagaaatatagatgtcatctttgatgaaactaagaggttcagaaagtgagaacggagaagaaatcataaacagtacaagaaaacagtagggctgaagggcatggttgaaggcccagtcagtgcacagcatcaaagcaggtcacagaatttcaggtcacgggagctataacaaaaattctgaaagattctggaggtagagagctgcacagaggagatttgctg

SEQ ID NO: 13577 - DNA, 474 bp, Homo sapiens
  misc_feature (1)...(474): n = A,T,C or G
cctagagaactgagaggcntancnagngngcnggaantcgaggatatgtacaagactatgaagacttcatgtgacattttatcttttcttggtgtcatctttatgttgcccacaatcccttgaacatgtagcacaacttcctttcctttcagttctgccaaatgctacaatcagaagtgcagtatcttttgtgctggttatttaaccccttgacacttaggtgctaatgtgcaaatgagggaacttggatcttgctgccaaggggttaaaattgggaacctaagttgctactaaatcatagttcaaaacctaataatgttgtcgttgttgctatctgatttcatagcagcagtcactaaattggaaacaaaaggttgcaacgtgacaaaaaaaattgtgtagtatttaccagcaccattcagtaatacagccttaaccatacctccttgaactacttcataacttgtcaagaaa

SEQ ID NO: 13578 - DNA, 559 bp, Homo sapiens
  misc_feature (1)...(559): n = A,T,C or G
ttcccgcacattcctcttctttggcacctgctgacctcctatctgccgcgcctctctcttctcctagggagacccgcnccagcnggccccnnnntttgaagatatagtccatgcggaggaacncgngagaccctgnctctaccaaaaaaagagaaaatgttaaagtttaaccaggcatggtggtgcatacttctagtctctgttactgggaaggcttaagcaggaagatcacttctgccagggaggtagaggctgcagcgagctgtgatcacgccactgcactccagccagggtgacagaacaagactacatatatatatataaaaagaacaaatacatcaatataccaaaaatataatgcaaataacaaactatgataaagtttgtgagaaatacgacatactaattgttgcaacaaaaatgacttcataatataaataaatcttgaaaaataaattcaaatgcttaattgcactagacatcaagaaatgcagatcgaaacatatttttgtatatgaaataaggaaagattgaaaaaatttttttttctggacataag

SEQ ID NO: 13579 - DNA, 457 bp, Homo sapiens
tttgaactggtagacacttggacagcgcggtggaattcggagagggtagaacatgtaaataaaccttattgtcctcaattttctacttaaagtatgccaacttatattttattacacacaactaagataggttgagaaagagcagcctcactggcatacattttgaaattagattatttgtatatcaccaaggacagaagcacaaaaaattactatgctggaagtaagacttggggtcaactattggctttcttcctaacatgctgtgtgatcctctgcaaaaatattaacctaagggacttcactatggattggtaaattgagttccctataaatgtatgatcctgaagtaagtgcattggggtgcatcattggcaaaataagcaacaaatcaaaaagtaatttacctaacttggaggagcagatgatagagttcaaaatgctttgttagggtaaa

SEQ ID NO: 13580 - DNA, 451 bp, Homo sapiens
  misc_feature (1)...(451): n = A,T,C or G
attganccccattgaagaccctagtccgtgtggtggaattcattatgttacccaggttggtgtcgaactcctggattcaaacgatcttcctgactcacacttctgagtactgggactacaattgggcaccactatgcccagctaataatttatttatttatttattttagacatgaagtctccctatgtcgcccaggttggtcccagattcctagcctcaggcactcctcccaagtacgtggaattataggcataagccacggcacctggcctcctaaacttatgagtgttccaacttgtaatagactttgaaacatatacaacttgttggtgcgtcccaggccaatcctcacatttggctttgattagcctttatcaaattattctgcctcaacagacttaattttggtcaacaatttaactgaggtactttatagataacagtgtccat

SEQ ID NO: 13581 - DNA, 487 bp, Homo sapiens
  misc_feature (1)...(487): n = A,T,C or G
cgcgcgnagnnnnnnnaactgaaactcnnactgananactttgcanatnccggnggaattntatcagagataaactattaaaactttaaaaaatactcaaaaatatgtaagttttttggttgaacctttagatttgctcataatgtttaacataacaacatttatttcaaatcactgaattcatggagatgtggacacgcttggtttgctctatttttgtttatgtgtgatagtggttctgtcatcatcattcatgttttttaaggcctggtcataaaactttaaattttactagtgttacttaatgtatattctaaaaagagaatgcagtaactaatgccctaaatgtttgatctctgtttgtcattactttttcaaaattatttttttctgtaaagtataatatataaaacttcttgcttaaattgaatttctatattagtggttaattgcagtttattaaagggatcattatcagtaatttcan

SEQ ID NO: 13582 - DNA, 477 bp, Homo sapiens
  misc_feature (1)...(477): n = A,T,C or G
nnaagggcgccggnctgnnaaccccggtttccanganagaccgngcgctggaattncagcatctttctcaagccgggagagggcctgtagggagtaagagggaccatctcctcatgaacgtcaaatggtactaccgtcggtctgaggttccagattctgtgtatcagcatttggttcaggatcgacataatgaaaatgactctggaagagaacttgtcattacagacccagttatcaagaaccgagagctcttcatttctgattacgttgacacttaccatgctgctgcccttagagggaagtgtaacatctcccatttttctgacatatttgctgctagagagtttaaagcccgagtggattcatttttctacatattaggatataaccctgagacaaggaggctgaacagtacccagggggagattcgtgtcggtcctagtcatcaggccaaacttccagatctgcaaccatttn

SEQ ID NO: 13583 - DNA, 491 bp, Homo sapiens
  misc_feature (1)...(491): n = A,T,C or G
agaaagtagattcccctcnnannntttgataacctcatcagtgtgctggaattcgtgctgctgatatggccaaaagagaacggtttgagctgctgaagcatcagaaactcaaggaccagaatatctttgtctcccgaaccaggctctgcctgcacaatctcccaaaggctgtagatgacaaacagctcagaaagctgctgctgagtgctactagtggagagaaaggggtgcgcatcaaggagtgtagagtgatgcgagacctcaaaggagttcatgggaacatgaagggtcagtccctgggctacgcctttgcggagttccaagagcacgagcatgccctgaaagccctccgcctcatcaacaacaatccagaaatctttgggcctctgaagagaccaatagtggagttctctttagaagatcgaagaaaacttaaaatgaaggaattaaggatccagcgcagcttgcaaaaaatgagatccaagcctgcg

SEQ ID NO: 13584 - DNA, 463 bp, Homo sapiens
  misc_feature (1)...(463): n = A,T,C or G
tggcgggcggttttnatccgtgcagtgctgcatngngcaggaacnngnggaggnggcaagaagagacgagagagaacacgctttgttgcttctaaacctctggtttgtgtttaaatggaaggtccagtattaccgaagatctggctaccgatcaccaggtcttcactgcctacctttaattttagatcccctgagatcacaacttcctctccatcacccatcaattcgtctcaagcattaacaaacaaggtacaaatgacctctccgagcagcactggcagtcccatgtttaaattttcatctccaatcgtaaaatctactgaggcaaatgtactacctccatcatctattggatttacatttagtgtgcctgttgcaaaaacagcagaactttctggttctagtagtactttagaaccaattataagtagttcagctcatcatgtcactacagtgaacagta

SEQ ID NO: 13585 - DNA, 441 bp, Homo sapiens
  misc_feature (1)...(441): n = A,T,C or G
cggcggtnnnnnntttggagaccttagtcattgaggtcgaattcggaaggaaaagataaaaggtttctaaaacatgacggaggttgagatgaagcttcttcatggagtaaaaaatgtatttaaaagaaaattgagagaaaggactacagagccccgaattaataccaatagaagggcaatgcttttagattaaaatgaaggtgacttaaacagcttaaagtttagtttaaaagttgtaggtgattaaaataatttgaaggcgatcttttaaaaagagattaaaccgaaggtgattaaaagaccttgaaatccatgacgcagggagaattgcgtcatttaaagcctagttaacgcatttactaaacgcagacgaaaatggaaagattaattgggagtggtaggatgaaacaatttggagaagatagaagtttgaagtggaaa

SEQ ID NO: 13586 - DNA, 472 bp, Homo sapiens
  misc_feature (1)...(472): n = A,T,C or G
tggcggcctnnnaattgagaccctttgcagtgcggtggaattcgctcaagagaagcacatgaaaaccattacctgactttagagcttttttacataattaaacatgatcctgagttatctgtattctcaacttccttaattgagcagaggcaggaaatcactgcagaatgaaggaacataccttgaggtgacccagccaacctgtgcccagaaggagggttgtaccttgaaaagacactgaaagaatttggggtgcaaagtcatggtgggcagaggaggtagaaaatcaactcagttgtcgcatcattcatggttctttcatattgatgttcagtgcagtggcctgagaatatcccagcctctcttctggtttggtgagtgctatataagtaaacatggtggaattgtttgggggcagatatagtgacccttggtcactggtgtttcaaacattctggcaagtcacatcaat

SEQ ID NO: 13587 - DNA, 462 bp, Homo sapiens
  misc_feature (1)...(462): n = A,T,C or G
attgagaccaatgtagaccctctagacagngcggnggaattccgcacgtggaggttggttaaagggaagacctgggttttagtcctgtctccatcattctcaagaaatgggacctcatggaagggaggggaggcaatgccgaggatgtgctcctgagcaggtgccacaattcttcacctgtaaggctgatctaagaagattcctaattatcaattgagagcagagatattccacttccaattacatggcctgcctgctcactcttacttcctattcacactctcttggagaccactttgtgattctaccaaattctataggagaggtgacaaccccaaagagaaggctctagaaagatgacatttggaaatgtgtacgctagtgtctgctggctcctcctgagccatttttactctgtgaatgagatcaaaggccacctaactgcctaaatcaccacaaagg

SEQ ID NO: 13588 - DNA, 495 bp, Homo sapiens
  misc_feature (1)...(495): n = A,T,C or G
natcgagacccctagtccagtttggaggacctccgctggtcacttttgactggcgcagtcagaaccgcgctcctgctggtatccgcccctgagccccaggagcactgcagcccgagacttccaacctgagtggcggagaagctgggaccctgggctggactgtcctttcctgcagccccacagtcctgctggctgagctccgcggaacggtccttagaccccgctgtgccctgtgctgtagcttctttccaggcctttcccaaggagtagctgaaaggaagacgcgattagtggttaagacttccaagccagaagacagagggttcgaatcccagcactgccgtctactcactgtagtagtagcagctacagaaaggtagtagtgagacgtgaagccagctggacttcctgggttgaatggngacctggagaacttttctgtcttacaagaggattgtaaaatggaccaatcagcactctgtaagatggaccaat

SEQ ID NO: 13589 - DNA, 478 bp, Homo sapiens
  misc_feature (1)...(478): n = A,T,C or G
gggcgagnnnnnnaactgaaaccccactgagcccctggaannacacananaatgggagatatatttgcagatcacatatctaataagggacttgtatctgaaatatctaaataattacaattcagtaataaaaaggaaataacctgattttaaaatggcaaataatttgaatagagatttctacaaagaagatatccaaatgcccaataagcacctgaaaagaagctcaacatccttagtcattagggaaatgcacattaaaaccacagtgattccagtttacactcacaaggatggtcagaacaaaaaagccagataacaagtgttcgtgaggatgtggagatattggaactcgcatacattgctggtgggaaggtaaaatggtgcagccactttgaaaaacaatttggcagttcctcaaaaggttaaatataaagttaccatatgacccagcaatttcactgccacatataatatg

SEQ ID NO: 13590 - DNA, 447 bp, Homo sapiens
  misc_feature (1)...(447): n = A,T,C or G
gcgcggtnnnnnnaattcgagatcactagtcctgtgaggtcgaattcctttcccctttcccttcaactcttcgtacattcaatgcatggatcaatcagtgtgattagctttctcagcagacattgtgccatatgtatcaaatgacaaatctttattgaatggttttgctcagcaccaccttttaatatattggcagtacttattatataaaaggtaaaccagcanaaaaaaaaaaaaaaaaaaaaaaaaaaaaaaaaaaaaaaaaaaccaccaaaaaaatataaggggggccctttaaaataaagggggccctaaaaacccccttttaacccccgggtggtttttttttttcccccccccttggggttttcccccccccgggggtttttttttccgggggggggcccccccccctttttttttttaaaaaaaaaagagaaaagcgtg

SEQ ID NO: 13591 - DNA, 448 bp, Homo sapiens
  misc_feature (1)...(448): n = A,T,C or G
aattgaagacactggntttgacgacattagtccatgcggtggaattcgcagggatccatgggagatgtcgggatgaaggtgggagccggaggtgcagggggacctggaacatggatgggagtggacaggcctttctccttagaggccagaggtgctgccctggctgggagtgaagctccaggcactaccagctttcctgattttcccgtttggtccgtgtgaagagctaccacgagccccagcctcacagtgtccactcaagggcagcttggtcctcttgtcctgcagaggcaggctggtgtgaccctgggaacttgacccgggaacaacaggtggtccagagtgagtgtggcctggcccctcaacctagtgtccgtcctcctctctcctggagccagtcttgagtttaaaggcattagtgttagatacagctccttgtggctggaaa

SEQ ID NO: 13592 - DNA, 469 bp, Homo sapiens
  misc_feature (1)...(469): n = A,T,C or G
ncgggtttnnaaatgagaccatggatgccctggaanngcacnnnggtaagcattattctagaaatagggacacaaatgttggacacagcttgcacaggtttattatgcaggtgatgggaagggttctgatatgacacgtgctctggaccaagggccttgcattttaataagtggagtgaataaaaatttatagccaaatgtcatgttggcagcaatggaagtgtgctccggaggtgacaaatgctttgaggaatatagagtgtctgacagcacaatgtgaagaaatgacagctgccatctttgcctgtctttttctctgtgctgcatttgctttgctcttgtcacctttcttaggctggttactgggcagttggaagagactgtggagaattcaattcagttgtttggcttaaggacataaaattgaactgcataattcatggataggtatctgcagcatcgtcttcgg

SEQ ID NO: 13593 - DNA, 501 bp, Homo sapiens
  misc_feature (1)...(501): n = A,T,C or G
cccccatcgannnccnttnnnnnnatcgtagaccatatccatgtggtggaattcgtatcttgtgctttaatactttatggcaggattgtactataagcaaatgaattaaacagctatgtaaatcataaagaaaaactaaaaatgaaccaaagtgaaaggataacttccaggcagtatctttctattgtaacctgttatttaaggaaatactagtgatttcttctaaataggatgtaaaacttctttcaaattactcttcctcagtcctgcctgccaagaactcaagtgtaactgtgataaaataacctttcccaggtatattggcaggtatgtgtgtaatctcagaatacacaggtgacatagatatgatatgacaactggtaatggtggattcatttacattgtttacacttctatgaccaggccttaagggaaggtcagttttttaaaaaaccaagtagtgtcttcctacctatctccagatacatgtcaaaaaaagaa

SEQ ID NO: 13594 - DNA, 482 bp, Homo sapiens
  misc_feature (1)...(482): n = A,T,C or G
ntttgcagtccctattccagngttgtggaatccccatggctcaggtggatgcttggaaacaactccagactttcttccacaaacacttgggtggccgcgaggggacaatcccatcaaaagtgtaaattttatttgatcatgtggcctctctgttgctaatctctcctggaaacatctgccacatttagtgtgtgtatgtgtattcattcttttgtttttaataactaaagttttttcccctcattattaaaatgaatttaccagtaagaatgagtttttaagatttttataaactgtatactttatcagtttgggaagggagtaactgtaggaaacacaagaagtggaaaaagtctcctcttcctatctcaacacacaactgataaggctttagttctgaaaggaaaagtgagtaacatcaattaacagtgtctggtacgtaaatggagttcaataattatttgctgaatgagtataagcga

SEQ ID NO: 13595 - DNA, 485 bp, Homo sapiens
  misc_feature (1)...(485): n = A,T,C or G
agagataacattcnaanntttgagatccctattcagtgtggtggaattcataaaagcccacagatgagaaaacaagatgccagaaataaatgttaatcaaccaccatatctgcaaacagctggccttgagaaaagataaaaattccttgtacttgtttctgggtatggagcttgtgttcaaaatgtttccaaagaccacaagaatggcaaaagcatattgtcttcaaatgaagtacaacttctttactatctttttgattaacttgtgtatttttcttcctgattagagaggcttagagcttgttcccatttctttggaggaaaagtatagaatcattcattgctccctgtagttttacctacagaaagaatttacaatggaataaacaattactggctgggcacggtggctcacacctgtaatcccaacactttgggagaccgaggtgggcggatcatttgaggtcaggagttcgggaccagcn

SEQ ID NO: 13596 - DNA, 479 bp, Homo sapiens
  misc_feature (1)...(479): n = A,T,C or G
gccctggctttgagaccccttgnaatcgagaccactatcagtgtggtggaattcggccatcgtgaaaggcgtctgcaagcccagcgagtttgacaagttccggatgttcattggagacctggacaaagtggtgaacctcctgctgtcgctgtcaggccgcctggcccgggtggagaatgccctcaataatttggacgacggcgcttctcccggtgatcggcaatcactgcttgagaagcagagagtcctgatccagcagcacgaggacgccaaggagctcaaggagaacctggaccgccgcgagcgcatcgtctttgacattttggccaactatctgagcgaggagagcctcgcggactatgagcacttcgtgaagatgaagtcggccctcatcatcgagcagcgggagctggaagataaaatccaccttggtgaagagcagctgaagtgcttattggacagccttcagcccgaaaggg

SEQ ID NO: 13597 - DNA, 508 bp, Homo sapiens
  misc_feature (1)...(508): n = A,T,C or G
agggggccatcaanacccnctnggnanatagcagaaccctagtcagngcggcggaatatcgaactgatggcttctatcattatttagccccacctttgtattttaaaatccttcagaatacatttatgaaccaatgcgactggacttatccacacacaatggaaattcagaccttgactatttggtgtttccagttcacaaaggtgatgaagactgtcttgggagcagcttaatcccaaaatttgtacatttcttgctgctcctggcgtggaaacttaagtgagaccaccaaatacattggtcctgtccaattctactgaatgggggtggacctggcatttatctggccaaaaacaggagccagagaaatatgaatataccaaagttgtttgtttagcctccaacttaaattacattagtcaacttatagatactcatatgatcacttttctttntagatactacatcaactagattcaggagtatatcatttgcagtgcttgtattg

SEQ ID NO: 13598 - DNA, 492 bp, Homo sapiens
  misc_feature (1)...(492): n = A,T,C or G
naatggttacccttcgcagatagcaggacttcgtaaatcacaaccaagatcttatgaacgcattcatatgtgaggggggcaaatatgtttttaaaaacttagtgtgcaatagagtccattatagaaattaaccactgctatatgttttaagtagttcaatcacctgttgtggttcagtcttgattattggttattttgataggtgataagtaggaagatgcacttgttatcccacactatctcttgttttgttttgttttgtttttaaataatgaacagtgcaatctttgaacttgagtttttaataatgatagcaaagacaatggtgagaacttgaaacagccagcatattttatattgccaaagtacttactgatgactgaccacactgtcttgtgaggaactgggtcccctgcactggatcagagccaaatgcaagccacccatcagttcagaggaagcagganaacatcttttgggtggtgcatagaa

SEQ ID NO: 13599 - DNA, 472 bp, Homo sapiens
  misc_feature (1)...(472): n = A,T,C or G
cttcgcccccctngnnnatcgagaccactatccatgtggtggaattctgccttttgagtttctttttaaacagtattaatgtaataattaatgtaataaaaagaacaaaggacgaattcgttcgattgttttaagttctgtgtaatgtttaaaaccgcccctgcttcagtgtatggcttattattgcttcaagatgttttaaaggccctttaagttgacccatctcgctttgatgcttcatccagacatcgtgctgcttaaaacggagtgataatagtatatttcgagccgcttcatgtagctacacagtattgtaaaattagtactcggtaacctcaagtagtgaaatcgcatattttaaataacgcaagtccaggaaaggccacgtggaggatacccagaaccgacgccggctcatgggacgtcgtgctgtcccataagcttcatctttaaaatgtaaagggtgtgagtt

SEQ ID NO: 13600 - DNA, 480 bp, Homo sapiens
  misc_feature (1)...(480): n = A,T,C or G
ggaaaaaccnnactgagtccccactgantacctcagcananccggnggaantntttgatttgagacattctgtgggataaggaatagttttctattgaactgtggtggcttttgccactaatcaggatttagggctgtgcacctccatctgttaagtgaaatggaacttggcttcctaaacactatattagaccaacttgagtcaatacttttattaagtttaatcagggattctcaaaatatttaggattcaaattagcccaattagaaagcagtgcattaaatgttaccaaaatatctgaagatactttagaactattttacacaaagcttatgtctttcctatggaaagtatcatacataaaattttacattcttttaaaaaacagaatctaatgtcttcagatacctagagcttggaaattataatagagttgggctttgacccgaagtcagcagttcttttcattttagaatttc

SEQ ID NO: 13601 - DNA, 464 bp, Homo sapiens
  misc_feature (1)...(464): n = A,T,C or G
gatagatgaccattagcnagngcggnggatgatcaacatnctgggactacaggtgcatgccaccatgccaggctaatttttggagttttttgtacagactgggttttgccatgttgaccaagctggtctctaactcctgggcttaagtgatctgcccgccttggcctcccaaagtgctgggattacagatgtgagccaccacacctggccccaagcttgaattttcattctgccattgacttggcatttaccttgggtaagccataagcgaatcttaatttctggctctatcagagttgtttcatgctcaacaatgccattgaagtgcacggtgtgttgccacgatttgaccctcaacttctagcagtatatcagttatgaactgagggtgaaatatatttctgaatagctaaatgaagaaatgggaaaaaatcttcaccacagtcagagcaattttattattt

SEQ ID NO: 13602 - DNA, 455 bp, Homo sapiens
  misc_feature (1)...(455): n = A,T,C or G
aagaataaatccgaacnattgtanacgcggnggaantntntanagaattctgaatttcagtatgtatttaccatttttagtgacatttatactttagtatttttcatattgttagttagcatttcggcatatcaatgtgaagatttcttccagaccatggctggagaaggaaagaaggtgtgttttgcctgattcagggactatagagagaaccaagttctgcaggcctgtcacctaagtctcagatgagtatgaattctcttgtgtttttcacagatttttgcagtggcaggaccaagttcaaatgagtcatagccaagtctacagtaagatgtggtagtattctgttttgaaccgaggaccatgattggcaagcttgccacttggtcaagtgcttaccctctaaagatgtcttccttggtctttgcctccagctgggtgtcacatactctggg

SEQ ID NO: 13603 - DNA, 482 bp, Homo sapiens
  misc_feature (1)...(482): n = A,T,C or G
ntttgagacactatcagngcggggattgagcgctttatgcccatgatgtcatttcaggctcaaccaaagaggatcaaacaggaattccatcttggcttccctaagacagattggctttctaatgagtttaagtgggcagaagtgtagggttcagtgtgtcctgactcccttgaggcttataatgggccaagttgaagactgttgatgatccctggtgggtaaattgcagacatcaaatgctagggattggcataggctagtgtttagcttgtctatttgccatatctattttttttaaatttccatacacttgtaaaagtagttagttgcttttgattgagttatatagcagtttttcatttggtcttccactcacctttcactatatttgagtgttcccttacaggtatgttggcatgtgttggaaaatttacacaattaggtttaaattcagtaggatgtgattntaggatgctactgat

SEQ ID NO: 13604 - DNA, 488 bp, Homo sapiens
  misc_feature (1)...(488): n = A,T,C or G
natggagacactagnccagngcggtattgatgacatagtccangcggnggaattcgtagctctgtggtcagcctacttgtctgctctgagggagagtgcgtggggagccatgctcaccgtggcaaacacaggaaccccatgactcgcccctcacctggcgtggagctgcctggtttgggctggagcagagctggtttcctggaatgttcctttggcccacatatggttctgtcccggtgagctctgctgtcacaagctcacgggacagaaccacatgctatggtctaaggcccctgtctactgataggcatgttgctgtgtcagaaagcacttctgatgacacatatgactctccagacaggcaggatcttacgaaacacacggacctatttggactgtatgatggccccatgcggaatataggcttgccactgagcgggattgtctgctgagtgggaagagccaacttcagtttcttaagggaaccg

SEQ ID NO: 13605 - DNA, 457 bp, Homo sapiens
  misc_feature (1)...(457): n = A,T,C or G
gggattaaaaatgaaannccagttttgcccggaaanaccnnnanggnncatcgngaggcagaaatttaaaaataataagtactgaatttatttactccaagaaaagtaaaagctaaggcccagagtgtggcaaggcaagggttaaaaagaaaaaagaaaagcacaagttttcctctgcctagcagctcacttccaggaccttatcaagaagataacgatgtccaaatagccaaggccaaaggaatgggctccagacacccctcccttccagagcaatgttgaaggaaaaaaaaaaaagagacagattcttttactgttactcttttgcaagtcttcttaagcattattatgttttacaaatgtctgtatttagccagttcttgtttttctttcaatgcagctacaaggacactggctatgcaaggccataaattatgttatgctatagattacatgn

SEQ ID NO: 13606 - DNA, 458 bp, Homo sapiens
  misc_feature (1)...(458): n = A,T,C or G
atggcctgnacccagganccctgaagngccagcacaaccgnnggaantnnncatgaagaacgcccaccgggaggaaatggagcgggagctggagaagagccagcggtcccagatcagcagcgtcaactcggatgttgaggccctgcggcgccagtacctggaggagctgcagtcggtgcagcgggaactggaggtcctctcggagcagtactcgcagaagtgcctggagaatgcccatctggcccaggcgctggaggccgagcggcaggccctgcggcagtgccagcgtgagaaccaggagctcaatgcccacaaccaggagctgaacaaccgcctggctgcagagatcacacggttgcggacgctgctgactggggacggcggtggggaggccactgggtcaccccttgcacagggcaaggatgcctatgaactagaggtcttattgcgggtaaagg

SEQ ID NO: 13607 - DNA, 446 bp, Homo sapiens
  misc_feature (1)...(446): n = A,T,C or G
gggggcctnaaactgaaancctggggtgcccgaaaacnnnggaantgggcatatgccatattgactgatgtatcaatcaatgctactggcatgtggtatttacagcaaaaaactaagtgtgctcgtttagctgtaacatgtctttagcagaagagataagtcagatgttaacatttgatacctgcatctatgggaggtgaagtagagaatgctgttttctctagttacattcctttgtttcttcttacacttatttatagggtgaccatatgtcctagtttgcctgatacagtctggttttccaaagtctaatagtgccccttttcattcacagaattgtcctagtctaggtggtaaattaaatggcagtattacttacataacatttaatgtatgccagactctcttctaaacactttacatacattctcacttaatcttcatgg

SEQ ID NO: 13608 - DNA, 457 bp, Homo sapiens
  misc_feature (1)...(457): n = A,T,C or G
cggggnanattggatcgataccatctgcccgngcggtggaattccttaacactatttgcctttttgacatacctaacacatttctttccttttctagcatgattatgagatgagggtggatgatttccttcggcgcacacaagctgttgtcgggggccggagaagtagaccccgtgaaagagaccgggaacgagagcgagaccgccctagagataacagacgagacagagagcgagatagaggacgtgattgagaaagagaacgagagcgattatgtgatcgagacagagaccgaggggagagaggtcgatatagaagataatgggcttttggaagcactgattgtttaaagatacaaaaaatcttgtattttttttttgtgtgcgtttacaagtagtaaatttattttcagctgtctgcctatgaagttcattgggtagaaggatttattatgact

SEQ ID NO: 13609 - DNA, 487 bp, Homo sapiens
  misc_feature (1)...(487): n = A,T,C or G
cccccccgccgcgccaaaggagaccaaactgagacataggacagngcgnggaattcgtaaaattgactttaaaaatattgcagcgctattttttcttaatcagattggaaaattttcaaggccttttgaagagcataagaagatgaagattgtaaacttgtataaaattatcttggtgagaagacaaattgtaaagaagatatttgtaatcttttaccactttggggttgcttttttcccggaattcatcagaactttgaattttttttttaaatgggctgtttttaatgcaggggcttttcttccctagaaacccaattctaagccgaaaaagaatataaacacataacatagaacacccctacaaaaaaactttaaaaaaaatggcagcgaagggtagttttcatctggtgtcttttatttaagttttttaagttaagaaaagctggagacatatttatacgtttttgcgcaaaaataaatgaat

SEQ ID NO: 13610 - DNA, 445 bp, Homo sapiens
  misc_feature (1)...(445): n = A,T,C or G
taagacgcctctggantaggananctccgcagnggcnggaattctcaaaactgtaaatcaaaggactagaatcaattattatgaaaatttggactatataggatttcagaaaactggttaccaaaattttggctaattttgtaaggacttttttctttttttgagacggagtttcgctcttgttgcccagctggagtgcaatggcgcgatctcagctcaccacaacctccgcctcctgggcttaggtgattctcctgtctcagcatcccaagtagctgggatttacaggcatgtgccaccatgcccggctaattttgtatttttagtagagatggggtttctccatgttgcttaggctggtctcgaactcccaacgtcaggtgatctgcccgcctcggcctcccaaagttctgggattacaggcgtgagccaccgcgtccggccc

SEQ ID NO: 13611 - DNA, 481 bp, Homo sapiens
  misc_feature (1)...(481): n = A,T,C or G
naagggcgcccgtcttgnnnnnnaagcctttagnanaggcnnnncnnntnnnntnanaaaacngggcaagacacagtccctgctctcaagatgttaacagggccttgcttcaagaacgacatttccaactgcagtgggaatgctgaagaggaactaagttacagaaaaaataacaaactgttcctcagagaagtgtctggcagcatatctaggcaaaggttctaagaatttatatcccagggttgccgcactgacaaagggcttcctaaagaaaggaaacatggctgaaccctgaaggatgggtgctgttagctaagggagacttgcaacctctccccagtgaccagtctctctcttgatttctggcgcccctttacacaggatccacatatcaggaaatgcagaaaagcatgaactaaaagcacattggtagatatgagccaagtgcgtaggagtaatagggagggtggcaagaacagtt

SEQ ID NO: 13612 - DNA, 469 bp, Homo sapiens
  misc_feature (1)...(469): n = A,T,C or G
cgcctatctcnnnattgaagaccactagaccagcgcggaggaattccgagcggccacatcttcgagggccactggcagctgaggaatcacaggactttggatagggcatggatgaactgggatggattgaggcttaaggaagatgtgggaggagggagtggacccacaagcacggtcagttctccggcggctgcagcagggcctgtgtgggaaggcttanagatgacaacacaccttcctgatggaggtgtccggctgttggagaagtctgggggcttggaaatcatctttgatgtttaccaggccgacgctgtggccacattccgaaagaataaccctggcaaaccctatgcccggatgtgcattagtggatttgatgagcctgtcccagacctctgcagcctcaagcggttgtcttaccagagtggggatgtccctctgatctttgccctggtggatcatggtgacn

SEQ ID NO: 13613 - DNA, 491 bp, Homo sapiens
cgcccaaagaaaccctagccaatagaggacctccttatacaatattgagtctacccatccatgagcatggaatgtgtttccttttgtttttgtcatctatgatttctttcaacagtgttttgtggttttccttgtaggggtctttcacctccttggttagttacattcgtaagtattttatttttacagctatcataaaagggtttgatttgattctcagcctggtagatgttggtgtatagcaccgctactgatatgtgtacatagattttgtatcctgataaatagattttttgtgtatttctaaatagcaataagatttgaaatattcccaacacaaagaaatgatcaatgtttgaggtgattaatatcctaaagaccctgatttgatcattacacattgcatgcatgtaccagaatctcacatggaccccataaatttgtacaattattctctatcaaaaacatttttttaagaaacatgcaggaat

SEQ ID NO: 13614 - DNA, 455 bp, Homo sapiens
  misc_feature (1)...(455): n = A,T,C or G
ntggaaggccccattgaaggaccctctagtccagtgcggtggaattccgcggcctctgttctcagccaggagctgccgctgatcctgaaaactcacagctgcttttcttgttttaactgaggggatttcacacgatgtcactggtgacttaacaggaaggagaggcacactgcacttccctagaggaggcctggaattctcttggctcccagaggtgtccctaggcagtccctcaggacccctatcctttaccagaccccttctcccaagccccttagccacagtacccccaaccccgctgacttctggccagtcactgcagcacgtgctccatccctgacgccatccactcccagcggcctccctcctggggagccacagccaaccacgcccctttgtccctgctcagacaaagcctgggtcctgaggttggcggcacgagtagggcgcccact

SEQ ID NO: 13615 - DNA, 497 bp, Homo sapiens
  misc_feature (1)...(497): n = A,T,C or G
agggaatcgaccccctcgantatgagaccatcgcagngncgnggaanncgaccaccacaagagctcattaagtgccaccagctgttgtgggggtgatgacactgtgccttcagttccactcagtctgtgtactttattatcccacagacacatcctgtactttcctacctcccctttggctgtgatcccctctactcaaaacaaacactcttccctatcttcattgcattttgttgaaatcccatggctcttcatagctctcctcagatgcaggcccacccccacccgtgctgtttcctccttgtctcatcctgcctgtcacgttctcctgctcggcgggctccacctcttctgctgccctctaagagatggccagcctttcctgtgctgccactgttgtctcaccttacagtcttcctggctccagatgagtttgagagcttttgcttatctttgtaacccatttagtatctaacgtggcattttatacataggag

SEQ ID NO: 13616 - DNA, 452 bp, Homo sapiens
accaaatgccaggggatcaggcagattcacccacaggtgtgccaactgctctgccaccagagcctgtaaacactgtgcctcccaccacggcccagcgcaagccccagcctagagctgcccctctaacaaccgtctagcgacagagctgcaaggcccagagcacggggcagtctgcacctcctgagcagcaagggcccggctccctccatgggaggcacatcagaagtgccgagaagcgctccgctgagaactcacgctcctccagaagaacaccaagcagcagaaagggcgcagtgagtgtacatcctgggagacctgcacgttctgattccacccagacccaagtggcaagccttgcctctgaagcggtcacaatttccgtggtacagcaggccctttcccgtgaagctgagaagcacctggaaaagagtaagaaaaattagaacgcaagt

SEQ ID NO: 13617 - DNA, 450 bp, Homo sapiens
  misc_feature (1)...(450): n = A,T,C or G
atcgagaccttagtcagngcggtggaattcctattttagttctggaattagacataaagacattaattttgtaggtataacaatcagctcaaatgtacttccaaattctttcccctacctttcaagaaaaattaatacatcattaaaaagtttgtgcacagaagagcctcttagagggcagcttttgggagccagttggtgttctcaaaggtggggccccagttcagaaagggtatgggaacatcaccctcttatattccccataaactgtgttgcttcatgtcagatagaccctactgggtccagggcagggaagagctccattaattcacatagggccgatttctcttaatcgtaaaattttaaggtgacatcaatgcttaatgagtcatgggagaggaatgaactaatgttagggcaactctggctttttatttctcttgtgtcctn

SEQ ID NO: 13618 - DNA, 497 bp, Homo sapiens
  misc_feature (1)...(497): n = A,T,C or G
atcgagcacccttgcagattgagaccctaggcagngtggnggaattccaggaaaatgtgacccttaaaaaggggagaaagtcattcatagaaaaaggcccagaggtgacccacatatttgaattagcagataaaaactttaagaactattataaacatgttcaagggtttaagtaaaaataatagcataataggtaaagagatggtaattacagacagaacaatgaaaactataaaaaccaaatgaaaattttagaattgaaaaatacagtacttgaaataaaaattcattctgtgaacctaatagaagattggagacagaagaaatgatcagtaaacttaaaggcagggaaatacaagctatccaaactgatgcacaaaagaaaaaactattgaggaaaagaaaagaatagcacctcagtgaactatggaaccacacaaaacagactactgtaagtgtaattggagatcaagaagaggggaagagggtgggagagt

SEQ ID NO: 13619 - DNA, 501 bp, Homo sapiens
cggcccaaattgagacccctatgccagttggaggaacctcgcgggagaggggctgcggtcaccgccaccgccgtcgccaacaggaaggcagaggacgcatgagccaagagcaagggacgccgccacggtcatcttcgcctgccccgccgccctcttacagacactcattgcctatggatcatcctctcccagcttttgcaagcaccgggctgctcgcccgctgattttcctcctccataggctcactgcggaggccacggcgaggtgtccgatttgtgcacttgaggcccgcaatccgggacggcggggaatctgcacctcctggccgggcgtgagcacccctgctggaaaggcagctgcagggcagcggtccatgacgggcgctggccacggaagtgagtcttgtaccatgataaagaggaaggctgcacacaagaagcataagagccgacccacctcccagcctcgggggaacatcgtgggctgcagaattcatcacgg

SEQ ID NO: 13620 - DNA, 468 bp, Homo sapiens
  misc_feature (1)...(468): n = A,T,C or G
nnaatgccgccgtctgnnccccaaggttccganagacangcnctnnnttaagnaaccagcaccttggacacagtcttaaactatgggattatancatattttgttgcctgaaaacatacactgntcataggaaggtgaaatattgcatatttgccaatttttcagttactggtggaaagtggattgtgtctggttccgaggataacctggcttacatttggaaccttctgactaaagagattgtgcataaattacaaggccatacagatgttgtgatctcagcagcttgtcatcctacataaaacctcatcgcatcagcatcattacaaaatgacaaaactattaaactgtggatgagtaaccactaatccctttgaaaatcaagtagtaaagccaagttggccaaactactttgatatttaaaaagacggattcttttaattttggcagcctggattttaaaaattg

SEQ ID NO: 13621 - DNA, 472 bp, Homo sapiens
  misc_feature (1)...(472): n = A,T,C or G
nnnaaggcgcgccgnctgnnnngggaacttgangaagtcggtccattnnnatacttggacaatcaccatggtgatgaagagtgacccatttaaagtgtaaagtctattttgaatacagataatcatgaagcccgggacggtaatgaacagtgcagccaggagtcggaaggagcctgggtttctgaatcatcacatggaggggagctgtcttcagctgggagagctgtcttcagttggatactgggcacaggttatgtcccttgtctggatgaacccatgagcagaatcctgctgcctgcctgtcttccagaaccccctcccacatgttgcccatggagatcacctacaagcttgctggggacaacagttttgtgcatcacgatggaagtggggatggaggtggcatcggcctcatttgaaccacatggactaagaggggctatgggagtattccccaaaggaagactgaggn

SEQ ID NO: 13622 - DNA, 502 bp, Homo sapiens
  misc_feature (1)...(502): n = A,T,C or G
ccccccatcganncccttnnnnnatagagatccactatcagtgtggaggaattcgcaaactctaaatttaacatttgggggacccccttggagagtagttgagagctatgtgctccccttttcagaaaaatgctctcaaatagtgcataagcccacagccttagcaggttcccagaccttaggtcagcaatcctgttctaaggcatacatcacgagcagcattttgattttcatctggggaacttatagttcataaagacctactgatccattaaaatttccacttgattttgccattagtaatctcttaaacaagtccaaggaagccagaggaagttatttcttgaatgcttttatactagtgctttcaagagttcgtgttgctgactccagtttttaaaattattattctcatcttctgcaatgcctcgaggcatgtttttagctgaatagcaataattatgggattgtgcaatactggaagaagcagtaaaaataaaat

SEQ ID NO: 13623 - DNA, 470 bp, Homo sapiens
  misc_feature (1)...(470): n = A,T,C or G
ggccatagtatgcgtcngnnnnnactgatgtcctctagtccatgcggtggaattccaacaatacgattttaccgatggaataacagatttgctggcattcactgaaagagtgcaaatattcggtccttgtgacttccactgactcttccaaattttatgaatgtatcggtgtgttggataagcccagtttcagaatgatggagaaggaatgttggaccaagtgatgcggctgattggcagtggtacgatttctggcccgtgggtttaaaatgcacttaaagtcctgttctcgccttttattttctgaacttgccgcttttgcattctttgagttcagtttaaagacagttactttgagagcattttaaaccctcgggctggaaatcgggccactgttgatcggccacattatttggtctaactttttttttttatcattctgaagctgggtttatctaatacattgataa

SEQ ID NO: 13624 - DNA, 454 bp, Homo sapiens
  misc_feature (1)...(454): n = A,T,C or G
gaggcccccngnaattacccaggagctacgccattcagctacgnanaactngnagntaanaanggaggagtggcagggggcacaaggtcacagaaccatgctgaggaagaagaggttgcctggagggtgggacccagaagctactgaaatgtcgcagcagaaatggccattgaacgccccttctaaggtcctcggtgggaaagtcaagtcctaacatcctacatggggaaatctacgcagttagcagagccaaatatgacagcgacatgagccagccactttgggaaacagtcaagtcctaacatcctacatggggaaatctacgcagttagcagagccaaatatgacagcgacatgagccagccactttgggaaacagtcaagtcctaacatcctacatggggaaatctacgcagttagcagagccaaatatgacagcgacatgagccagcca

SEQ ID NO: 13625 - DNA, 459 bp, Homo sapiens
  misc_feature (1)...(459): n = A,T,C or G
attgangacattagnnnnnnntttgacgtaccatctatccagtgcggtggaattcaacagaaagagacgtcctctacataaaagctccatgtgaaaagctactcctagtcttaacatttgcagtccttgtgtcactgtcttctgggcctgatgtagtcccactgtttctagaagtctcttttaagcattatttttgaaaaaaaaaatatttttatagatgaatactcaggctaacctaggggatgcgaccttggaacttccatgattattcacttaaagatcaaagtattatctgctgtgtgctttttaggggtttgttagtactgcgaaggcaaaaatgctttctacatggacattcattcctattttactgggcacctatgaatgtatagctggtgctagaaatacactagcacatattcctatagcatgttagtgtgactgcatgtttgctgaaaa

SEQ ID NO: 13626 - DNA, 471 bp, Homo sapiens
  misc_feature (1)...(471): n = A,T,C or G
naatggggaactgaaggccactgcggcagagcggcggaactcctgatagttcagtaatggacggtaaggataaaacaaactaagcctacagagatttttacatctttgctatttaatatgtgatgaacctccatattcaggaattttatttacaaacaccttatctattctttgtccttcctctttagagtggatgtaactgaaattcagatagctttagtgattgtctttgtgttgtctgcatttggaggagcaacaatgtgggactatacggtaaatctgaatatttaaatttgtatttaagtacttttcaaatatttaggaaaaagtattgcattgttaattttcttcaaaaatccttggcattgtatttaattttttttttttaatagggggatttaatattggttccatttcttaacatttctttcttcattttataatgcgcattatcctatataccttatggcg

SEQ ID NO: 13627 - DNA, 464 bp, Homo sapiens
catagagattcgttggcagtgcggggaattccgagccgctcttgtcctgttagcaactgtatttatagccacttacacccacttttaattagatgcaaattaagaagcaggctaatgcaaattgaggggcaggttattcctaactttctaggaaaggggcagtaacttcctggtcattgccatagcatctgtaaatatgccccagaggaagtatcttatgctaatgaccagtgagggtagctagggatggtttttgttgccatctgctggttcctgccggtttcttcattttatctaagcggcaccttgggagctggaaataattcctgccagtcccctacttcattccccctcagagattagatactcctccttaatcttaaaggggcggccaggtgtggtggcttaagcctgtagtcccagcactttgggaggccaaagcaggtagatcacttgaggccggg

SEQ ID NO: 13628 - DNA, 478 bp, Homo sapiens
  misc_feature (1)...(478): n = A,T,C or G
cttcgacattcgatacccntattccagngngccggaattcaaaactgaaggaccccagttttgagaaagatgtatgtaatataagcaaagggaggaaaactttaaggatacacattacatattaacagtggctctggtagttttttctttcttctttctttcagctagctacaatgtctctttatgaactgaaagaaagggaaattattttgtttcatatttctttttttttttttttaaaagggagttgggctttgtggcccagcctgaagggcagggcccctttttgggttaaatgaaacctttgccttaaagcaatcttcctgcctaaccctcccaagaagttggaattacgggggggggccgccccccccaggaaagtttttttgttttttgaaaaaagggggtttcactgggttgccaaggttggctttgaactcctgagcttagggagcccacctgcctaaccctccgaagg

SEQ ID NO: 13629 - DNA, 464 bp, Homo sapiens
  misc_feature (1)...(464): n = A,T,C or G
gggtgcccccngtncttaacccagggaccttcgncctggcggcttcgnanagnctgnnggaattnnnaggagctnccagcatttctactacgatggggagctctttctttcccaaaacctggagactgaggaatggacagtgccccagtcctgcagagctcagaccttggccatgaacgtcaggaatttcttgaaggaagatgccatgaagaccaagacacactatcacgctatgcatgcagactgcctgcaggaactacggcgatatctagaatccggcgtagtcctgaggagaacagtgccccccatggagaatgtcacccgcagcgaggcctcagagggcaacatcaccgtgacatgcagggctttcagcttctatccccggaatatcatactgacctggcgtcaggatggggtatctttgagccacgacacccagcagtggggggatgtcctgcctgatg

SEQ ID NO: 13630 - DNA, 287 bp, Homo sapiens
  misc_feature (1)...(287): n = A,T,C or G
natcgtagaccctagtccatgttctggatatactcccgcatcgcggtcgctatattgcggcctgggcggtgatttacccactgattgtctggtggctgatgtatggcggtttttttgctcttgagcgggttgaaacccggcaatggggcgggctgacgctaactttaattattgcatcagttgggattgcgggggcgctaccgtgggggatcttactggcgttaggtcgccgctcccatatgccgattgtgcgtatcttatcggtcatttttatcgaattcgatatc

SEQ ID NO: 13631 - DNA, 468 bp, Homo sapiens
  misc_feature (1)...(468): n = A,T,C or G
nnaagcggccgnctgnccccnaaggttcaganagacagntcnntnnntnanggaacctgncgaaagagaagaccttttaaaggatttgacacatgtttatttttagaagaccagattctcttttatctcagacgggatgaagttgtataggtagagatattaagtgctgaagtatgtatgacaaaaatatgccagtccttgtttttattcccttttagcctgttggattctgagaataggtttgtattgatagacttatattggcctacttggatgtttaggatagggtgttgctctggcggcatttgaaacaaggaagagaaagatgtaatggggtccttatccctaataaaatttgatatggtacttagaatcattcaattgtatgattcttctcaaaggtgagaaacattgtacaggtaattcagccctttattttagaaaggaggaaaacaaggtttagaggan

SEQ ID NO: 13632 - DNA, 488 bp, Homo sapiens
  misc_feature (1)...(488): n = A,T,C or G
natcgagatcgctagtccgtgtggnggaattccctagcccttcactgaccccagctcttcccttgctgcagccgcacctgcagctccagggagttaactcttcttctgggggactgagaactgtagaaagccacacactactacatcccttcacaaagagtatatgctagtttcttgtagatattcacagctcattttagagctctgtacataatgttgtgggtctttgttttgttgttttgtttgctttgggatcttgttggatgcacttagatatggaaaatggaagccaaattttatctttaaagactgtattttcaaaataaaactttttcttgtttgtttcnnnnnaaaaaaaaaaaaaaaaaaaaaaaaaaaaaaannnnnannnnnnnnnnnnnnnnnnnnnnnnnnnnnnnnnnnnnnnnnnnnnnnnnnnnnnnnnnnnnnnnnnnnnnnnnnnnnnnccccaacaccttccccccccc

SEQ ID NO: 13633 - DNA, 457 bp, Homo sapiens
  misc_feature (1)...(457): n = A,T,C or G
gcgtgcccccntnataancctagggggcttcgccatgcagctacgnananncnnnnanctannnnnnngcataaagatgtaaaattctatcagcaaacccagtgcctggagctcaacaaatatttattaaatgagtaaatcatgaagggtggataatgctgaaaggtgggaaggatagagtccttatcagggaggggaagttgagccggcggaactgaggaaaatcaaaaagagaaagcaaataagctgtaagtctgcctttcttcatggtctacaacacagccttcctgtactcaacttatcaccagatcctcagctaacagaaaaacctctcggaagaactggttgttaaagagcacctctgccttcttcctctgttgccatgtgatctctgcacacgctagctctccttcgccttctgccatgctggaagtagcctgaggccctcaccagaaan

SEQ ID NO: 13634 - DNA, 466 bp, Homo sapiens
  misc_feature (1)...(466): n = A,T,C or G
ntagagattcgtagacactacgccgagtggtggaattcgtagtaggtgacctattgaataaaggccctttactttgtcccctgatgtgcttagcatgcataatagtctgtaggggtaatttggtgagaacaccatttgtaaatacctggcctcaaggtgctgacgtgatgtctttatttctgtactgtcctggccagtagtgatcttgccccaaagcccttccttattgacgggagcaatggcagctctgggaacctaacctgcttaactgagggatgtgatgctgggttgattcagcactcctacccttcctggagcatagctggtgactgctccaatgattttgagtctttcctcttcctcttcctcattttcctttcttcttctccaactataaaccacattcttggaaagctttctgactactggtctaaggaagctctagcaacatcaacttaaatattta

SEQ ID NO: 13635 - DNA, 467 bp, Homo sapiens
  misc_feature (1)...(467): n = A,T,C or G
natggagactgaggctatgcgcgggaactccgacctacgcacacgagaacatgcctctcgcaaaggatctccttcatccctctccagaagaggagaagaggaaacacaagaagaaacgcctggtgcagagccccaattcctacttcatggatgtgaaatgcccaggatgctataaaatcaccacggtctttagccatgcacaaacggtagttttgtgtgttggctgctccactgtcctctgccagcctacaggaggaaaagcatggcttacagaaggatgttccttcaggaggaagcagcactaaaagcactctgagtcaagatgagtgggaaaccatctcaataaacacattttggatnanaaaaaaaatataatttcttattatccaaaaataaaaacaaattctttaaaagctctcttactaatantntaaagaagctctcctcccttttaacttagctctctt

SEQ ID NO: 13636 - DNA, 455 bp, Homo sapiens
  misc_feature (1)...(455): n = A,T,C or G
catagtagacattattccacgcggtggaattccagacacagagaggatatgagagtaggggtgagcacctcagcccctctttccccaacctcgggcacaagcgtgggcatgtctaccttctccatcatggactatgtggcgttcgtcctgctgctggttctctctcttgccattgggctctaccatgcttgacgaggctggggccggcatactgttgaagagctgctgatggcggaccgcaaaatgggctgccttccggaggcactgtccctgctggccaccttccagtcagccgtggccatcctgggtgtgccgtcagagacctaccgatttgcgacccaagattggttcctgggctgctgctactttctggggctgctgatacctgcacacatcttcatccccgttttctaccgcctgcatctcaccagtgcctatgagtacctggagctttn

SEQ ID NO: 13637 - DNA, 453 bp, Homo sapiens
  misc_feature (1)...(453): n = A,T,C or G
ctttgagtccatagcccangcggnggaattcattttgaccttgaaagatgaattccttcaagaaaaataaaataatgcttaagataatgtgtacgaaattaaataaaggactttatttacatactacataaggtagcaaactgttgaatgagtttgaaggtatcacttattttttatgcatgtgattttagctttagaaagaaatgcgttatagaaacaagtaatagcaagaaaattgatgtatattttaatgatacattaaaattcccttttaatcataatagttaactctacttactgttttaacatacatttgatttaacaaattgttcagcataacacttctaattaagtttatcaagttgtactgtattagataatcagcagtgtatctggagtatgtttaaagagaacagttcgcaatacaaaaagttacatggagctttacatctt

SEQ ID NO: 13638 - DNA, 451 bp, Homo sapiens
  misc_feature (1)...(451): n = A,T,C or G
nattgtagacattagtccangcggtggaattccntgggaccaaggtgtgggtgtgggcggaatgtatcctagtagaaacagcgaacctcagatatgaataaataagcaagagaccgaaagttaagtgtgtgacaacctcagtactgtagttaagctacattctttaaattagcttttgtgaactgattgggaacctaatctcttttgtaactgtttgagaaaaactctgaagcacctgatattcaaacaaacttatggtacttacttaactcatttgtaaattggcgatctagctggctgtagtattgctttgataatttttttcttttaacttacctaatatatataaggaaggggtttggatatattaaaataggtgttaattttatctatttaccaataaattcatctctcttgggcngagccagaaccgggggcgggccatctgtac

SEQ ID NO: 13639 - DNA, 452 bp, Homo sapiens
  misc_feature (1)...(452): n = A,T,C or G
ggggcccccntnataacctaggacctacgncatgcggctacgaannnactcngngnnagngncagncatgacagctctgcttgttagcatactacttaaatataactagaatgattcaaaactcgggttctgtgatatgaggatatagataggttttcatctatttcctggcttataactcccaaaacccttgttttaggcttttgttataatgttgggcacttcgggcctcagaaaacagcaggctgtttctcagatcttctcctgacctcctttcacctgctgctttttctccccaaggcaggccatagaaactaaaagtataatcttcctttgcccgtcttccagttggccataaaaagaatcctctgacctaccttgtctgattttaggtcatgagacccccatttcagaagggattctgccccatacctgagaggaagaaatgtagn

SEQ ID NO: 13640 - DNA, 457 bp, Homo sapiens
  misc_feature (1)...(457): n = A,T,C or G
ggggaactgagcctatcngnnaaactgagatcatcgtacangcggnggaattcctaatgcgcttgtttttaaaactgtggaaaatttttaaaagaaaataaatctcaccagtcatccagctacccagaagtaacattttcatgcattacctattaatttttttctctgcatattttttcatagatgagataatttagggaaaaccattttgtgtccttcatatatggatgaatacaatataattttggtattaatatcatagcaacaaagaaggcattgaaggctttaaatctgtttacagtgaattgaaaagacaggatgaagtggacacagcatgtgaagacaattctttcaagaagtttggctgtcaaggaaaacagagaatgtgagtagccaaagcagaatgacagtgaaagagagaaattgggagccagacaatacagcccgacagtttacg

SEQ ID NO: 13641 - DNA, 503 bp, Homo sapiens
  misc_feature (1)...(503): n = A,T,C or G
ggggncatcgatacctttcgcanttttgagaccctagtccanngncgnggaattcatttaaattaagataatggataagataatactcacaaatcacatctggttgaggagtataggctttacaaagccctgaaaagctgctgaaggattttaggtagggtatagtaggctgtaacagagctggagaaaaattcttatttgtgttttcaagacccagacttttgaggtttattttattggtagaagaaactcttattttgctttccttctccagcatttttttctgggaagaaaagttgaaaggcgaaatatatctttctctggaaatcatatctcatagatctttttgtattacgttcatctttttatccaaggcttttgagggtcaaggattgttttaaccaggacgttatctggctgcccttgacatctaatcaaagctgcacttgaaatatgaatacttcagtaggactttcactaggcaggattatcgagtaggtggn

SEQ ID NO: 13642 - DNA, 472 bp, Homo sapiens
  misc_feature (1)...(472): n = A,T,C or G
cggaggctccggntttnnnnnaaactgagatcactagnccgactggaggcattcgaagaacccgaagaacctaaagtgctaacaccagaagaacaattagcagataaactgcggctaaagaaattacaggaagagtcagacctcgaattagcaaaggaaacttttggtgttaataatgcagtttatggaatagatgctatgaacccatcttcaagagatgactttacagagtttggaaagttactaaaagataaaattacacaatatgaaaagtcactatattatgccagttttttggaagtcttagttcgagatgtgtgtatttcattggaaattgatgacttgaaaaaaattaccaattcactgactgtgctttgcagtgaaaaacagaagcaagaaaagcaaagcaaagccaaaaagaagaagaaaggtgtggttcctggagggggattaaaagccaccatgagagatg

SEQ ID NO: 13643 - DNA, 465 bp, Homo sapiens
  misc_feature (1)...(465): n = A,T,C or G
agggggccgggnttnnggggaaactgagactctagnccgatgagtgccattcggctcggcaggagctgccgtggccacccccgctgcccagtgtctgccctctagaagtaggctgtgtttccaggtgttcacccgtggtgcccacagtgccgacccgtggctgggtcggagctccatgttcctaagctaggtctaggtctacactcctaggacgcacgcatatcagcccgtgtaccctgtgacagtgactgtccccacctcctgtgttagtggtgcccttactgccgtcgctcatccactcgtgtgggacgtangattgcacagggctgtgccagtggcgtgtagggaacactgccctggctcagcgtgcgagctaaggtggcgatgtatgcgatgggactctgcatgggatagtacagntgtgtagacgtcttccaatanattatgtgttgtgcatcgacatgt

SEQ ID NO: 13644 - DNA, 457 bp, Homo sapiens
  misc_feature (1)...(457): n = A,T,C or G
gggaaactgagnccntngnnnaactgagaccactagtccgtgcggtggaattccttaggttttcttcagaaggacactgccagaaagttggtactgttgccgggcgtggtggcacatgcctgtaatcccagcgctttgggaggcctaggtgggaagatcgctggagcccaggagttcaagaccagcctgggcaacatagtgggacctcgtctttacaaaaacataaaacaatcaatcagctgggcatggtagcatgcctgtagttccagctacttgggaggctgaggtgggaggatcacttgaccctgggaggttgaggctgctgtgagccgtgatcgcaccactgcactccagcctgggtgaccgagcaagatcctgtctccaaaaaaaaaaaaaaaaaaaaaaaggcgcccgttcgatttaaagggcccctttaaaccccgttgataaccttggg

SEQ ID NO: 13645 - DNA, 463 bp, Homo sapiens
  misc_feature (1)...(463): n = A,T,C or G
natagaagatagtaggccatgcggnggaactctgaaaaagaaaatttggcaatattagagaaattaggaagactgaaagacaagagcatttaactgcaaactgttgtcgttgtcaactgggttgtcttcctgaagtatgaatccggtatgtattgtgtggaggagcattacgtactgaacttctcacaaaacagggctgaagcagtgcctactcgacagaaccggtcatcgtacaaagaaatgccacgtgactcaaaggcaaagccagagtgcagcttggagcaaagaagatgatgtctcactctgtcacccaagatggagtgcaatggcacgatctcagctcactgcaacctctgcctcccagtagagacggggtttcaccatgttgggcaggctagtcttggaactactgacctcaggtgatccgcccactttggcctcccgaaagtgctgggattacagg

SEQ ID NO: 13646 - DNA, 465 bp, Homo sapiens
  misc_feature (1)...(465): n = A,T,C or G
cgagggcccccngnnatttaccttgaaacctanagnnccagtttggcnagtagaancannnnaaatnggggngcaggactaagagtagggacgcctgcaaaagctctcgttttaccacctcatcttccaactttcatgtgggtgaaaacgttcatgctaaataattgcttctaattctgaagttttgtgattccttgaaatgtactttggggatgacagccagcatttccatttcactgcaatttcagagttttgcagtggtttgccaatcataacactttctaattggcacaaaatccacctacctgttgcctctcaggcttgggtaacatacttcagacactttcttaggtaagtcttggcccttggggtgttatttgcccagatggtaaaaacatttaagtaggtctgattatttcattttcagtggtttcaacgcatttttgtggcctgggtggttactga

SEQ ID NO: 13647 - DNA, 460 bp, Homo sapiens
  misc_feature (1)...(460): n = A,T,C or G
agggggcccgnagtanataaacctagganngcccgnacttgaggcctnngnananncnnnnnnngtnngggaaancacctgggcagnacacagttttcacccacgttttctagatcttgttctcggcttagaatctttgtgtttctgcctgagaagccactgcctcctagtttgtggtctctacagttatagccaggttggacttccggctccgtcctttgataactgtgtgctcttgggcaaatttcttaacttgcaggttcttgtgaggataacatgagttaattgagggcacttaacactacctggcacagattaagctcatctgaagtgggagctgttacttaggggcgtttgcctagaacacagggtccagaggctctctcccggaaacttagacccagtgagtcagaagtgaggcctgcaaaaagcagcaggagtggggttaagaattccagcg

SEQ ID NO: 13648 - DNA, 470 bp, Homo sapiens
  misc_feature (1)...(470): n = A,T,C or G
nattgagnactgnagancattccgccagngcggnggaattcatgacccccagtgacagaccaggaaatggaggtttcaggagctcaagagctcgtctaagaacatggagctcatcatgaggtgcacggacaggatgcggtttggccaacgtccctcatgtgcagggcagagcctctgattcatggacctgcctcaccagggccgctgctctccatctgcccgagcaggaggcccggtctccactgcctgacactcctgagtcgctccctccaagttgacccggtgacttaccgtgggtcagacgcaccatgaccacacagacattccatccaggaaaaggagcaagtgaggcccatgcacacccgagaggccacatgcaagttcaagtgagccctgcactcacttgacagcctatgggggctgccacaagggctgcctcgggtctgccctccctcctactctgccagacc

SEQ ID NO: 13649 - DNA, 489 bp, Homo sapiens
  misc_feature (1)...(489): n = A,T,C or G
gccaggccncncccaatgaaaactactgcgtcgcaggaancncaaccatacccacaaaatgcttaagaattaaagaggagaaaaagccatcaagaagctcattgcttactgtgatctttcccttgccctggagaagagcaaacacttgcttgaggagtaacaggcatgagggcttggcgaattgctttttcccagctctgtgctacatcaagtccaactccagtggcagcaagaacaggattatgagagctgtccccattgttctcaccaacgaagtataccatagtatcagtaatgatttcaaaacagtgtggattgctgccttgtgaaatgtttgtgaaatctcgtggtgaagatatgcggagaatttctgaaagtggaatttcctgaagtaaaaaattaagcattgaaaaataagaatagatctttgtttttatttttaaatacactaaagaaccagagatatgcatttcaatgaatgccattaag

SEQ ID NO: 13650 - DNA, 457 bp, Homo sapiens
  misc_feature (1)...(457): n = A,T,C or G
cctcgagtagcactacatcgggcggngcaattcgaaaatgacttccctcccatctcaaagtacaaaacctttttttgagtagcacaaatagtaacaggccataggaagcatttcttatctctgtacacaccaaagctcctcagcataatttttcatgcacagtaggtactctatacgtttgcaaagtgaaaattatgatgcgtgtaaatctattgtggcacatgttacatatgtacacaggcacgtatatggaacatgtaaatgtggtacgtgttagttacaagctgccacttgaggtgagtaggaatagttaagatatcaagggaacacatataatctcgatttataatttctattaccatttgaagacaggtttttttttcacaagacctaccatattatcaacacttaaatattaagcagtaagaatataacttcctaattttgattagctgcg

SEQ ID NO: 13651 - DNA, 432 bp, Homo sapiens
  misc_feature (1)...(432): n = A,T,C or G
ctgagggctggtgttgcctgcctcccctgtgcttgtgccttgtcccaaaataaatcctttcagaatgtagcactcacgccctaataaggagcgaatcctacatccaccaaggcgggcgctctggccctcccttccttaagcccagtcctgtgtcctctgaaagaggtgcagtcactcacacctgcttgcgctcaccatcaataaaagtaatttcacccgaaaaaaaaaaaaaaggaaaaaaaaaaaaaaaaaaaaaaaaaaaaaaaaaaaaaaaaaaaaaaaaaaaaaaaaaaaaaaaaaaaaaaaaaaaaaaaaaaaaaaaaaaaaaaaaaaaaaaaaaaaaaaaaaaaannnnnnggcgggccttttaaaaaaggggggcccaaaaacaccccggaaaaccccgggggggtttttttaaacacccacaat

SEQ ID NO: 13652 - DNA, 477 bp, Homo sapiens
  misc_feature (1)...(477): n = A,T,C or G
cgcgagacannnaatcgagatctctgtctttgtcggcgaattcctcccccgtggaattgtcatgttctttctttaaataatgcaaatatcctcatattgttactttcttagttttgatattttgggggcttttcttcaaggagactctgtttttctttgatctgagatataataataatttgatagtttaactctttatatatttttttattttcaagttactggaagaggcacccatactcacccggncttattttcttacttgccctcttgattctcctgccaaaaaggatctttacccaaccccaaattttatcttccctccatccatccatccacttactcacccattcacctacctacttacttaactactgatcagcctacctctccatccacatactgttagaacctctatggtttaaatgagatggaaagagttaataaaaaaaatattaatggcagtgttagtttctg

SEQ ID NO: 13653 - DNA, 482 bp, Homo sapiens
  misc_feature (1)...(482): n = A,T,C or G
cggcagggccnaattgannccctnatcgtagactctagnccgtgtggtggaattcctgcacctagccaagaagttaccttttaagacagtagtctgtttctggagggctcattacttctggatggttactattcctgggccttttcagtagacagagctaggaaatatctctatcagtagatagataaaataccttatgagttcatgttgatacttccagttcaacatatggacctcagagatttttacctctcttctgggacttttttttttttttttttttttnaaaaaaaatttttttttttcccccgggggggggggccgggggggaaaaaaggtttaatgaacccttttttttccggggtaaagggatttttatccccccccccccttttttgtggggaataagggggggcccccaaacccccaattatttttttttttttttaaaaaaaaaggggttcccccttgggggccaaacg

SEQ ID NO: 13654 - DNA, 470 bp, Homo sapiens
  misc_feature (1)...(470): n = A,T,C or G
tggtggcccggnttnnnggnaaactgaagatatagnccaatgagtggcattcgggaggctgaggcaggagaatggcgtgagcccggaaggcagaggttgtagtgagccgaggtcacgccactgcactccagcctgggtgacagagtgaaactctgtctcaaaaaaaaaaaaaatttaaaaaatttaaaaaagatgcttttaaaaaagtaaaaagttggaaaacaaaaggggcatcttttatgttctgccattctgggggggttttttcgttggtttgtttaaaacggggtctgctccacccaggatggagggcaggggcacaatcaccgtttactgcacccttgacctccagggctcaagggatcctcccatctcagcctccctggaagctgggaccggaggcttacaccatcacactcagctaattttttaaatcttttgtaaagagggaggtctcgctttgtgacgta

SEQ ID NO: 13655 - DNA, 461 bp, Homo sapiens
  misc_feature (1)...(461): n = A,T,C or G
cttgagaactgatgatctccgccgngcggnggaattcgctgttacgaaagcttggcttctgtcatggagacggaaaagggcaagcttccttccgtagcctcttgttaatccttaaacattaaatatttcgggggtaatagagccactggtgagtaaaaacctatataaaaaccaaaattataggattttttcttttttagtaaaaaccggcatcaaaaccaaaattataggatttttttcttttttagtaaaaacctatataaaaaccaaaattataggattttttcttttttagtaaaaacctatatgaaaaccaaaattataggatttttttcttttttagtagaaacctgtgtaaaaaccaaaaatataggatttttttttcttcttttttagagagagagattataaaacgacgttaggaatttcactttaaaatgcgcattacaaacttcttaggg

SEQ ID NO: 13656 - DNA, 465 bp, Homo sapiens
  misc_feature (1)...(465): n = A,T,C or G
nattgagacctgagnncgtgcggnggaactccacaagcaaaactataaaactaataaaatttaaaatagtattaaatagtgatgttttgacaaaatgaaattgtcacttgtaatgtgattatggtactgagtgctacagtacaggctcttttcagttcaacaggcatgtactgccatgtactatgtgatgacccaattcaccctgttttctcctattcagactattactttaatttgttcagcacatagtgatgttatttggtcctcatctagcctgaatccatcattcccctattaaaacagcctctgttctccataagccttccaccactaatgtagaactgggccttaacagggaagtcaatacaaatacaaacctaagcactgagatggttctgccaatatttggttttaatacaattatccaaataattcagagcatgaatattattttaaaatgtttcn

SEQ ID NO: 13657 - DNA, 457 bp, Homo sapiens
  misc_feature (1)...(457): n = A,T,C or G
nttcgcctagccgacgattagnccatgcggtggaattccagccctggcaacatggagagaccttgtctttaaccgcctcccaaaaaaagctttgtgtttttcagtgctgcatgtggaaacaaacaaaaagatgatttcctgaaattatagaggacatttgacattcctaggtcaaaactcaccttgcttaatctttgtggtacaaataataattcatgaatatttataccatcctcttatatagaagttagagtttttctcttgcatgttgaaactgaaaaagcacttttttacaagaatatttaagttggtagacaaagtttttgtattcacagtagaatggagttgtgggatttatccttgttatttctagtttggtaaactagagtggattgatattttggtttttctccacagttcgtaatggacctgaaagtggcagcaagattatggttcn

SEQ ID NO: 13658 - DNA, 464 bp, Homo sapiens
  misc_feature (1)...(464): n = A,T,C or G
catcgactacgttgaccatcgccncgngcggnggaattaggaggtcttattgccaaactgattgtaatgaggcagtaagggtgaaaactttgtacatgttgcgaagaaagtatttaaatccagcttttgaacagatttaacaaacatgaggaacttttttatttagaaggataattttgaagatgaaaatgtattcatcttaattgttttttcaaatttaagggaataatttataccatcttttcagacaagaatgtccagcataactaaggggaacagtagtatactgagagtgtgtgtatgtatagtgtatgcctttccaagcttgccagtctttttggctttgaacactgcccatcagctacagtcattactgttccccaacccacaactatcttttaagaagtcttacttcacagtgaaaggaatgatgactttgaaattatggatttatattaatggca

SEQ ID NO: 13659 - DNA, 487 bp, Homo sapiens
  misc_feature (1)...(487): n = A,T,C or G
cggggnacgcanaatcgagacctctagnnattgacgatccctagtccatgcggtggaattccccaatagacagtagaccccctagagacaaatataagtctattgattttattgattcttgtggtttctactcgcacagtgcttggcacacaggaagcattcgataaatgtgaatgagtggattgatgaattaattcattaattgtaccctgtgggcatagttatcataagataaagagaataatgaagttcatgaatcccaggatcagtgtctaaagaaaataagcccttccaccttaacctctcaaaagcaagaaattataaaagcacgtaatagagctgcttcatgcatgaaatagacattaatttcattatcatctatttagtagttcaatatctaagataaaatttaggaacaagttttcttcactcccagatctaatttgccatctcttttatgacatgatttttttttaaccaaagcagg

SEQ ID NO: 13660 - DNA, 459 bp, Homo sapiens
  misc_feature (1)...(459): n = A,T,C or G
gggaaatgagcctatngnnnaactcgagatcactcagtccgtgcggtggaattctgccagggaggggaggaggtggaaggtaggaggtgggacaggggaggctctcgtttcggagcagccagggagggcctctttgagaagatgaggccagtggctgtgcctttccaagcctcccctcctccatcatgaggtgctcaggactgaaaagaacgcacaggaagcacttggcactgggctcaccattagagcccaatgactgggtcctgttattatttttagagacgggggctcgctctgttgccttgaaaatatttaggaagtgccagccaggtgttggctcccattgctgccactatgatcgtcagaggtgttggtgtgatttgtgctaggacctcgggccagccatgtcccccagggactcagtttccttatgcagaaactgggcaggattggctgtcc

SEQ ID NO: 13661 - DNA, 462 bp, Homo sapiens
  misc_feature (1)...(462): n = A,T,C or G
natcgagatcgttagtccatgcggnggaattcgtttgagatcagcctgggcaacatggcataactctgtctctacaaaaaaatatgcaaaaattagctgggcatggtggcacatgcctgtggttcccaactactcagaaggttgagatgggaggatcacctcagcccagggaggttgaggctgcagtcctcacgccactgcacttcagcctgggtgacagagtgagaccctgtctcaaagaagaaaaaaaaatatccaccacttccttttcttgagctcttcttttttttttttccccccaaccccctttggcccccttctttccttaaaaattttttaaccccacccaaaatcttttgaaatccgggggtaaaccttataaatggggtggttttaaggaagaatttggacaaggttggccaggctttgggccattaggtccactttttttatgctggcggg

SEQ ID NO: 13662 - DNA, 449 bp, Homo sapiens
  misc_feature (1)...(449): n = A,T,C or G
nnnaaatgagacctatagacactgtggnggaantcgctcttttgtacattttccgaaactacagttaaagcggaagtctgttttcaggaatagtttcaagggagaagggcaagtttatcaaaaacattgtttcaggagaagggagcataagtttacagcctacaggacgtacacaatatcctgctgctgggaaaaccacagcattttatctattttttattttaataggtttggtgcttatcttctaataagatttaaatgtcacaaactgtagcacaaataatataatttataatttacaaattgactaaaattgggtatagtatggtatttgaaagaataagcatatgcttctgtttattaaaaaaagaaaccttccaatgtccaaaactgctaaccctcgacgtggccgccaagttagtcgctccttgctaaccggtgagtgaccg

SEQ ID NO: 13663 - DNA, 456 bp, Homo sapiens
  misc_feature (1)...(456): n = A,T,C or G
ctttgatagcgtacatctgnccangcggtggaattcgtgatagatgctaattggatttggcatactcttgtgatttcatatggcttaatattaaagagacaggttttatagggcgccaatgcaagttgatctaggccatgagtgaagttaacaagcgttaattaagtgccacgtgtgaaaccacttctgttcttaacaccgagaggactccaaaaggataaaatacggtactcccaatgttcatggtaaatgatatgtgagagggccaaagatttatatatgagaaaatttatatcagttgttgataagagtgaaaatcataaacaaactaaatgtccggcaacagagaaatggttaaaaaactatggtacataaaatttgcaaaataggtatcatcatgcacaatcatcttttccaaaaacatttaatgacatgggggaaattttcccaatataa

SEQ ID NO: 13664 - DNA, 465 bp, Homo sapiens
  misc_feature (1)...(465): n = A,T,C or G
ggggaattgtagcctatngnnnnaactgatgntccattagtccagtctggtggaattcatctttactggtgaaatgaaaggactattgtacactgaaatgcttaaatgtatctgaaagcacaaggtgatactcatttttatggtcttcccatttgtgctggtttttgcctctttgacatctgtcatcagtatttagagggtgagaagtgaatgtaacaggtataaataacatttttaaaaacaataactttgctataatcacagttgttccagagcactgtcagatacattctaatgaccagaactggtttaaaaaaagaaaatacaaccatgggaaagaaatcttaaatgaaaaacgcatctcattgtaggcatttttgcctcatattttactgggccatgtttgtttcctggtactcatgtattttttttttccagatctctttccccaagttgctattggaa

SEQ ID NO: 13665 - DNA, 482 bp, Homo sapiens
  misc_feature (1)...(482): n = A,T,C or G
tggaggagccnngnnttannnggnnaaactggagactatagnccaactgaaggtcattcgggncaacgaacaaactgacagaaatcaaaaagatgcttgaaacaaataacaatgcaaatacaacattccaaacctaagggatacagaaaaaccagtgctaagaggaaagcttatagcaagaaatgcctacttcataaaagttgaataatttcaaataaacaatttaatcatgcaactcgaggagctagaaaaggaagaacaaacccaacatcaaattagtagaaggaaagaaatagaatcagagcagactaattgaaggtagagactaaaaatacaatataaagattcaatgaaatgaacagctgcttttttggaaaaaataataaaaaatcaaattggcaaatcactacctacaccaaccaagaaagagaaaatacccaaacaaaaccagaaatcacaattgatgtcacaacatacgagat

SEQ ID NO: 13666 - DNA, 463 bp, Homo sapiens
  misc_feature (1)...(463): n = A,T,C or G
natcgatgatcactagtacagngcggtggtagttccctgtcattgcaggcttagtcgtggctactgttctcctgtgccgctgcatcgctctctcccgggaaagaacaggtcgtgtctcctcctagcagtgcgcgccccgcctgtgtgtgcccttccagcagggaccctcccttctagtctttatttatgggcgagcccttacctatcctcagcccatagtgttctgcgtgggtggtgatgggggttcacctgaacacagagtgtattttcttattgaggccctgtaccttctgctgtgtgtgtgcatatataaagcaccagtctgctccccaaaaaaaantgttacccaaaaaaaaaaaaaaaaatacaaaggggccccaaagaaaaagggggcccttaaacccccgggtgaccgcctaggggggcttttttattgaaccgccttgttgttcccccccccccg

SEQ ID NO: 13667 - DNA, 448 bp, Homo sapiens
  misc_feature (1)...(448): n = A,T,C or G
aatagatgaccctngntttgtagaactctgtncatgcggtggaattccaaccactggaaggaggaggggggcgcggctgagaaaggatttttgtttaagtttctgcaggcacacacacagcattcccaagttgtttgcagatggtttcatctggtttctgtttgaggggaagagagtatgggatgatcagtaaggagagggggcggggagagggaagagtcttctcttgaccagaaaatgatacctgtggtgtcttttcctgaaactgaaaacattaaagcattctgatcccagagaaaacaaattctctgggatataagggttcaccttttgggggtggattacacttttcaggacaccagagaaccatagagcaaattacttcttccagagtgctaaatgatcccctggtgccctggaaagagaccgtttacctccaaaaggtgag

SEQ ID NO: 13668 - DNA, 443 bp, Homo sapiens
  misc_feature (1)...(443): n = A,T,C or G
actcgagacctctggttggacggccgtattnttagtcactagcaagtaataagagaattgctttcctcttgaatgctttggtgtagctaccaacaggaaagaaagtgggcgtgaggctagaggagaagcagaaagaggatgaaatgaggacttactgataaagcattctaagcattacacacataagtatgtgtgtaaaattaagcagattcccaatgcgttttcatggaagtaaaattcatctgtgaaaaccaagttcagaactcccactctaacatgtcaatgtcaacctcaactctccaagggttccacaattcctttcctcatcgcctcctagggaaaaaattctttgttttaatctgcctttgacagctatacaaattatgcgatgtgtatttcagcacatttgtgttcccagtgtacttggatcacatgatgaaggg

SEQ ID NO: 13669 - DNA, 459 bp, Homo sapiens
  misc_feature (1)...(459): n = A,T,C or G
ganaaatttanccttgatncccctnnnattgtagtacattagtcagtgcggtggaattcctatttccttggttctccctctccctggcctgtcctgctccacaccctccctcccagcctctcacatgctcactctcctatgccctggatctgacctgcccaacaccagaggggcctgtggcagtctcccactcaccaagccctgaccctgatgctctctgtccacagagaggactggaagccagtccttacgataaactccataatttatggcctgcagtatctcttcttggtgagtaggaataggtggttgggtctggggagattggccttctgtccctctggcctgttgaccccccctacctgtactggccacaggagcccaaccccgaggacccactgaacaaggaggccgcagaggtcctgcagaacaaccggcggctgtttgagcagaacgtgg

SEQ ID NO: 13670 - DNA, 460 bp, Homo sapiens
  misc_feature (1)...(460): n = A,T,C or G
gggaaatgagnccattgnnnaactgagatcactagtcagngcggnggaattcggaagttcaaacaaagttagaaagtgagcgaaggcatatggatgtaaaggaacatgacccattagggagccagcccggacatcaagaatatggacccacgcagaagattaacgggtagagctaataagggagacaggctaggtcattggccatgggggagggcctttttgtttttttttagagaggagttctccctttgccttccaggctggagtgcggnggtgccgtcatagctcattgcagccttgactcctgggctcaagtggtcttcttgcctcagcctcgcaagtagcagacactagaggcacaagccaccacacctggctagttttttaatttttgtaaagatggggtctcactgtgttgcccaggttgatctcgaccacctaggctcaagcaatcctcctg

SEQ ID NO: 13671 - DNA, 473 bp, Homo sapiens
  misc_feature (1)...(473): n = A,T,C or G
gggtggcgcggnttgnnngnaaactgagactctagnccgatgagtgtcattcgcgnccaggtctaagcggcgtgccgtggaaagtggggttccgcagccgccggatcccccagtccagcgcgacgaggaagaggaaaaagaagtcgaaaatgaggatgaagacgatgatgacagtgacaaggaaaaggatgaagaggacgaggtcattgacgaggaagtgaatattgaatttgaagcctattccctatcagataatgattatgacggaattaagaaattactgcagcagctttttctaaaggctcctgtgaacactgcagaactaacagatctcttaattcaacagaaccatattgggagtgtgattaagcaaacggatgtttcagaagacagcaatgatgatatggatgaagatgaggtttttggtttcataagccttttaaatttaactganagagagggtacccagtgtg

SEQ ID NO: 13672 - DNA, 484 bp, Homo sapiens
  misc_feature (1)...(484): n = A,T,C or G
gcggtcaaatgagccctngnnanngnattgtagacattagtcagtgcggaggaattcctaaaagttctgcagtacaaaagaaaaagacattcatgagcaacacatattcatcctggggtacaaaagtcactggtaatagtaagtacaccgacaaatacagaatagtataacactgtaattgtggtgtgtaaactactcatcttgagtatgaagatgaaaaggcaaacctatcaataataactgcaacaacattttaagatatatgtattatgataatatgtaaatagaaatgaaacaagttaaaaagtgtggagcttttattagttttttgcttgcttattttttagtttctttacttttcaattagagttaaattaccatcagtttaaaataataggatataagatgttatttgcacctaatggtaacttcaggaaaaaaaaaataaacctaaagattcacttttagatcaagacacaaacag

SEQ ID NO: 13673 - DNA, 410 bp, Homo sapiens
  misc_feature (1)...(410): n = A,T,C or G
gcgcgcggtaggttgggcttctccaggaggcagcggtttgactccaatggggaatgcgggatcgggcggttaaacggatggaacgaatctggaaccagtagacggacagcctaaggaaagcgctgggaccagtcgtccaatcggctctccaaaagagggaggtcttcgatttggggttgtgaggaaggggagtcggtgcctgtaatggcgtgtgagggtggatgttttatncacnatnacttctttaaccaaacctttatgtctcagttccatacacctccttgaaagcgtaagtttgctcctgtattcctcgacttgagcattttttccccgccccctcaccactttaggtttggggaacaggaagtggtttttttggttgttgcttttaaagaaaccttgacaaccgc

SEQ ID NO: 13674 - DNA, 459 bp, Homo sapiens
  misc_feature (1)...(459): n = A,T,C or G
nttttaattgaagacctttagtccgtgcggtggaattcctgaaacagagtttgggggttgtttgggattagtgaagctactgcctttgccgccagcgcagtctcagagtttgattatttgcaatgtcaggctttgaaaacttaaacacggatttctaccagacaagttacagcatcgatgatcagtcacagcagtcctatgattatggaggaagtggaggaccctatagcaaacagtatgctggctatgactattcgcagcaaggcagatttgtccctccagacatgatgcagccacaacagccatacaccgggcagatttaccagccaactcaggcatatactccagcttcacctcagcctttctatggaaacaactttgaggatgagccacctttattagaaggtaagatttgttgcaacacttgaagtactcaatagtattcagctggttagtgan

SEQ ID NO: 13675 - DNA, 331 bp, Homo sapiens
gctttcaagggcacacttggatttaaatctcagtttgtccatttagtagctgtgaatgcccttgggcaagttaatctctttgccttggactggttatcctccaaatgggataaccctacctataatgaggaatgaaatgcagtaacgaacaggaagccactaagcacagtgccttacacagaaactttaataatagataaaaatatttgtatcaccttctgggtgccaagtttgatgctaggaaataatccaatgggctataaaagtatgatttggtaatttgtttggagcatgggtaaatgaaaacagtaagaatacataataggcttaa

SEQ ID NO: 13676 - DNA, 334 bp, Homo sapiens
  misc_feature (1)...(334): n = A,T,C or G
gttactcagttatgttgagaagaatctggagctaaaagcagagatgtttgaggtgacggtaggaatgtgagcaggatggtgatgggggtttttgttaaaatgcatctgagcaagtcagccagccccgaagtcccctcagtgtgtgtgtctcgagtggctacctgttgggcttgtgggcagtgattgtacagagcctgtccattgggtgcagtcatgtagatctgaagccctgaaaagcctcatgtctgcatcccctttccaaggctgcttccctggagtgtctgttctctcctctgtcccaggtgctgggagcgtcctcttcagcgtcttttcn

SEQ ID NO: 13677 - DNA, 447 bp, Homo sapiens
  misc_feature (1)...(447): n = A,T,C or G
taaaaactgacgacattagnccggagggccgtattcctggccacatggctggccttcagaattcaacccgttctgtgagagtgtgtgtgtgtgtgtgtgtgtgtgtgtttagtggtagtcaccccttttatgtgagctgaaacaatcagaagaatagctgatttgtttaattatttttggtgtattggacttaatcagtttttatctgtaggtggtcataaggtacagtatttttaagtgactacctcatctgtagtataagccaagtaatttatcagtactcacaggatgggtacatgttgtaatgaatttattgcctagagagggcctcaaaatatgccaaagagggcgcaatttttatttttggtttcaggctgtatgcattccagtgttggtagccctgatatacacaatatccaaaccatttcagacccatttacagttcan

SEQ ID NO: 13678 - DNA, 334 bp, Homo sapiens
aaagttcgatgttgcagatacctttacaccctggtcatcactgacaaagagaaggcagagaaactgaagcagtccctgccccccggtttggcagtgaaggaactgaaatgaaccagacacactgattggaactgtattatattaaaatactaaaaatcctaaaaaaaaaaaaaaaaaaaaaaaaaataaaaaaaaaaagaaaaaaaaaaaaaaaacaaattaaaaatgaaaaaatggcgaatacgatagatgggggagtgcacgcggcggtcgataagaagacaaaggagatgcttgggcgcagcctcattgagagaacaccctacacgctcag

SEQ ID NO: 13679 - DNA, 336 bp, Homo sapiens
gaggatctgccttctgaacatctcccgagaaaggctccagcagagcaaaatcttgaaagtcattcgcaaaaacattgttaagaagtgccttgagctcttctctgagctggcagaagacaaggagaattacaagaaattctatgaggcattctctaaaaatctcaagcttggaatccacgaagactccactaaccgccgccgcctgtctgagctgctgcgctatcatacctcccagtctggagatgagatgacatctctgtcagagtatgtttctcgcatgaaggagacacagaagtccatctattacatcactggtgagagcaaagagcaggtggc

SEQ ID NO: 13680 - DNA, 446 bp, Homo sapiens
  misc_feature (1)...(446): n = A,T,C or G
attgatgacctngnattgtagacattagtcagtgcggtggaattctcagccccacgtggaggccctggaggaagccctggctcaaatccacataataaacagtgccctccagaagcgagtggaggcagtggcagctgatgtccggacattctcggagggctacattaaggccattgaggagcatcgggacaagctgctgaagcagctggaagacatacgggcccagaaggaaaattccctgcagctgcagaaggcccagctggaacagttactggcagacatgcggactggagtggagttcaccgagcacttgctgaccagcggctcagacttggagatcctcatcaccaagagggtggtggtagaacggctcatgaagctgaacaaagttcaatatagcacccgtcctggagtaaatgataagatacgcttctgtcctcaggaga

SEQ ID NO: 13681 - DNA, 486 bp, Homo sapiens
  misc_feature (1)...(486): n = A,T,C or G
tgggtatgaccnagggannnnnnnnaactgatgacattagtccgngcggnggaattccaagaacttctcttccccgaataaatcagcgggggactctttgaagctgcacattctgattcagcaggcctgagattctacatttgtatgtcttctcagaaacaatcggcctggaaggttatatttaaaaagaaagtttctcttttgaatattgccacaagaataatgggtggtcagaaatctggaacagagtatcctgagaatctgcccaccatgaaggctacagttgaaaataaagattctgttctgaatacagccaccaaaatgaaggatgtacaaacatccacaccagaagaacaagacttagaaatggcatcagagggagagcaaaagaggcttgaagaatatgaaaataaccagccacagcaactggatgatgctcgcaacaaagctgacaatcaagaaaaggcaatacttaatattcangcc

SEQ ID NO: 13682 - DNA, 331 bp, Homo sapiens
ccctttttcttaaggcctctttgcacctccacgtgccttcagtgcaatctgacgagctgcttcacagtaaacactcccacccacttgactcaaatcagacttcagatgtcctcaggtttgttttggaacagtacaatgcactctcctggctaacctgtgaccctgcaacccaggacagacgctcatgtctcccaattcattttgtggtgctgaatcagttatataactttattatgaatatgctgtgatcttcatttgatggaactgtgcaagaaaagaacaaggaaaaatggatgtttcgctgcaggattaagttacaattatcttctcg

SEQ ID NO: 13683 - DNA, 514 bp, Homo sapiens
  misc_feature (1)...(514): n = A,T,C or G
gggatgccggnnnngnnnnnaattgagnatgatgatcactagcccagngcggtggaattctgaattcaaataactttaagatttatgaagctgcttaatttcatgcagttgttccactcccttagataatgtcaaagcactgctttcatcataaagctgagtctagcacttggataaaaaaaaggtaaacaatgttataaaggtgtgaatttagaaagcccccatctgactttctttcatattttttatcattttcactttctatcaaaaataatgcaaaaacattcttgaatgatgacttgtacaaatttatattatctggaaaatatattttcacaaaaatcctaaggtcaatgaaatattgttgataacaaaaataattaaaatatctttatgataaaaaatgggcatgatgcaataagaattattcattagtagtcatattctggtagctatgtttttataacaacgtttatgaagattcattttaatttaaattatttatttatttgct

SEQ ID NO: 13684 - DNA, 466 bp, Homo sapiens
  misc_feature (1)...(466): n = A,T,C or G
nttggagaccttcggacaanctncnnnttgaggaccatctgaacacagcggnggaatttctttacaaagttatcactgtataccgagaaatttttatttactaaatgtttacattcatttaagttggggtgctcatattacttaatagttgactagacgaatcacttgaaggagtatctgtgttttcttaggatatgctttactagtctttgagcatgtccttgccttccaacaattttcccaagtttattttgagttttcactgctcctgaactagaatccacgcataacgatggtttccatttttctattcctaggggttgctttttctttgaggtgttatttttgagaggtaagaaagtggaccatgcaggtgacacattctttcaactttagccttttgccccagaactggtaaaataaaatttgagaaatatcgcgtgagaagaaagcacatattgtattc

SEQ ID NO: 13685 - DNA, 459 bp, Homo sapiens
  misc_feature (1)...(459): n = A,T,C or G
nctgagactgagatcctagaacangcggtggaattcgatgaacagcctatcgaagttaaaaagcttttcgttgggggtgctccacctgaatttctaccttccccactcagaaatattcctccttttgaaggctgcatatggaatcttgttattaactctgtccccatggactttgcaaggcctgtgtccttcaaaaatgctgacattggtcgctgtgcccatcataaactccgtgaagatgaagatggagcagctccagctgaaatagttatccagcctgagccagttcccaccccagcctttcctacgcccaccccagttctgacacatggtccttgtgctgcagaatcagaaccagctcttttgatagggagcaagcagttcgggctttcaagaaacagtcacattgcaattgcatttgatgacaccaaagttaanaaccgtctcacaattgagttg

SEQ ID NO: 13686 - DNA, 448 bp, Homo sapiens
  misc_feature (1)...(448): n = A,T,C or G
nttgcgaccctatccttgcggccggaattaattatgctaatttgtgagttctgatcacttttgagctctgaagctttgaatcattcagtggtggagatggccttctggtaactgaatattaccttctgtaggaaaaggtggaaaataagcatctagaaggttgttgtgaatgactctgtgctggcaaaaatgcttgaaacctctatatttctttcgttcataagaggtaaaggtcaaatttttcaacaaaagtcttttaataacaaaagcatgcagttctctgtgaaatctcaaatattgttgtaatagtctgtttcaatcttaaaaagaatcngtagnaaagaaaaaaaaaaaaatttaaaaaaacaangggggcccttcaattttaaggggccctttaaaacccgttaaaaaacctgggggggcctttttattggccagccttttt

SEQ ID NO: 13687 - DNA, 480 bp, Homo sapiens
  misc_feature (1)...(480): n = A,T,C or G
gggtagnncccttgactacctgttgagaacntgcgacaacncaaaaaantaaatctgtttttatagtctgaagtaacggggacttactcattttgctttaatctataaggatagggaaatttggcttattttttcacaagtgaaaaataaaggtttttctataaagctttggaaagcataatcttcaatactataattagtataaattaaccttttctatgtatacattaaacttaaatgaactttctgagtgacatttgggcatggtaaagttgttatcttagataatatactattagtaagattggaaatagatgttagtgctgttttaaatggggtcaagtgtggtacgtgtttacacacaaatatgtacttaggtaattgtgaggaaaagtactatggcacaaactaggaatatgagtagggtcaagtaatgtttctttttttagtataatagcacctctattctaatttgctttn

SEQ ID NO: 13688 - DNA, 447 bp, Homo sapiens
ttttcatcgtagacatctggctgtgcggcggaattctcttggacaagttacctaacttttttgagtctgaatatatttaatctgcaaaatgagaatcatgataatacgtcataggcttaattaggaggattaaatgaaataatttataggtggtgccatggttacatacaagtattagtagttaattcttttcctttgtttacttttatagtataggttggatgaaggttccagtataggcaaaaatactacttgggggtaaagtagagtgtgatactttatttgaaatgttccctgaatctgatctttactttttgttactgctgcactacccaaatccaaattttcatcccaacattcttggatttgtgggacagcgtagcagctttccaatataatctatactacatcttttcttaactttggtgctttttgtcatgtggtctc

SEQ ID NO: 13689 - DNA, 453 bp, Homo sapiens
  misc_feature (1)...(453): n = A,T,C or G
attgagattagtagnccatgcggnggaattctgattttcctcatccgcagtctcaaggggaagccaggacaatgagaacagccactttccattatgagtcactgcaaggcccccagggtgggatggtggggagataagaaccgtgagagaagttggcacaaaggagttatgggacaaagggtccaagataggcagaaaagaaaatgttgccagttgatggggaagaaaggaagtcggagggctcatacactgagggggacagaacatctccatgtgcagtctcatctcttatagtcagcaacaggtatccacggggagggccctacatcatctgctaccctgaaggatctggaggtaggaggctctggtcggaggtgcagcgaccccgcaggccagccctcctaccttctctcgcagcggggactgagtgcccctctgccagctgagacagcc

SEQ ID NO: 13690 - DNA, 462 bp, Homo sapiens
  misc_feature (1)...(462): n = A,T,C or G
ntttgaaactcgagtacactaggacagngcggnggaattcgactattccaactggcccaccatcccgcaagtgtacctcaatggcgagtttgtagggggctgtgacattcttctgcagatgcaccagaatggggacttggtggaagaactgaaaaagctggggatccactccgcccttttagatgaaaagaaagaccaagactccaagtgagggcggccaagtcctcgctgagcagagagggagccgttcatgtcagagactcactgccagaaaagccttacccattttggttttcactattgagaccgcaactgcttgcactgatcattttggttcgtgagcagttggtgattttagttggtctggtgttcgggctaagaatattttattgtggacttaattacaaccactgcactggaatgattcaatgctgtattatgatattgctgtaaacaaaattc

SEQ ID NO: 13691 - DNA, 469 bp, Homo sapiens
  misc_feature (1)...(469): n = A,T,C or G
tgggtcttccccgggaannntnnnntttgtagaccttagtccatgtggtggaattccctactgctgcccctgtgcccctcgccccgccgggcgtcgcgggccaacatgggccaggaagaggagctgctgaggatcgccaaaaagctggagaagatggtggccaggaagaacacggaaggggccctggaccttctgaagaagctgcacagctgccagatgtccatccagctactacagacaaccaggattggagttgctgttaatggggtccgcaagcactgctcagacaaggaggtggtgtccttggccaaagtccttatcaaaaactggaagcggctgctagactcccctggacccccaaaaggagaaaaaggagaggaaagagaaaaggcaaagaagaaggaaaaagggcttgagtgttcagactggaagccagaagcaggcctttctccaccaaggaaaaaacgag

SEQ ID NO: 13692 - DNA, 512 bp, Homo sapiens
  misc_feature (1)...(512): n = A,T,C or G
gagggccggnnnttnntnnnncctagntggctttgnanngnacatgantatctnngnaaanncnanannangnnanntggnacattcattttctcagttgaagaagagaaaatttgaaaatgtccttatgcttttagagttgcaacttaagtatatttggtagggtgagtgtttccactcaaaatatgtcaacttaaaaaaaaataggccctttcataaaaaccaaactctagcaagatgcaaatgcatggcaaatcctgtcggtctccagttggttatctgaatagtgtcaccaattccaccaagacagtgctgagattggaaaagggcactcatttggattgccttacttctcttgccttanatatatcccatatatttaatatgtcaaaaagggcttgaggtgaatttcattaaatggaataatatgatgccactttgcaactaaaataagctcagtgatacctccttgttaaaaaaaaaaaaaaaaaaaaaaaaaaaggggccgctcc

SEQ ID NO: 13693 - DNA, 189 bp, Homo sapiens
  misc_feature (1)...(189): n = A,T,C or G
atgtgggggtgacccccccccccccctttttttttgggggggggggggcccccccctttttttttttaaaaaaaaaggggaaaaagttcctccttttggggggggggggtttttttttgggggngncaaaaanaggaatgaggaaagggggaagatactgtgcccaactaacaaagggttggctcatca

SEQ ID NO: 13694 - DNA, 453 bp, Homo sapiens
  misc_feature (1)...(453): n = A,T,C or G
nattgangaccactagtccacgtggtggaattcgaaaaagcgaattaaacagcagttttcaccaggtacaccagcctcctcactccaggaaaaagtctacaggctgatcagcagaactaaagggatccattttacgtgtttggcaaggggcttggtgtctgcgttggcttccctgaagcagccggtagcagcagtcagctttatagagatggttactgcagagaaaaatgacaaccggttgcaggcagccacccacttttgagacctagaaggttgttcctgaaacgctcattatgcttctccaggctctggcagctccaggtcccctgaggccctgaggaaagagtcacttgaagtggagtggaccctggtactacttgcaattcctccaagagactgggtctcgcaacgttgcccaagctggtcttgaactctgacctcaagtgatcctcn

SEQ ID NO: 13695 - DNA, 476 bp, Homo sapiens
  misc_feature (1)...(476): n = A,T,C or G
tgggtnccnaannnnacnnaaaactgaaaccctaggaagctgatggcattccgactttctgtctccccgcggtggtgatgacggtgaaaactgaggctgctaagggcaccctcacttactccaggatgaggggcatggtggcaattctcatcgctttcatgaagcagaggaggatgggtctgaacgactttattcagaagattgccaataactcctatgcatgcaaacaccctgaagttcagtccatcttgaagatctcccaacctcaggagcctgagcttatgaatgccaacccttctcctccaccaagtccttctcagcaaatcaaccttggcccgtcgtccaatcctcatgctaaaccatctgactttcacttcttgaaagtgatcggaaagggcagttttggaaaggttcttctagcaagacacaaggcagaagaagtgttctatgcagtcaaagttttacagaagatagca

SEQ ID NO: 13696 - DNA, 433 bp, Homo sapiens
agtgaatttggatggaggactgtctagtaacttcttaacaaaacattgattagaagtctttcttggcggggcgccgtggctcacgcctgtaatcccagcactttgggaggcgaggcaggtagatcatgaggtcaggagatcgagaccatcctggctaacatggtgaaaccccgtctctactaaaaaaaatacaaaaaaactaggcaggtgtggtggtgggcccctggagtcccagctactcgggaggctgaggcaggagaatggcgtgaacccgggaggcggagcttgcagtgagccaagatcgcgccactgtactccagcctgggcaacagagcgaggctccgtctcaaaaaaaaaaaaaagggttttttttgggtgggccccggggtctcttacttgaacccccaccttttgggggggtggaagtggccac

SEQ ID NO: 13697 - DNA, 471 bp, Homo sapiens
  misc_feature (1)...(471): n = A,T,C or G
aggggnaatcgagnccccttgnnnattgacgnaccactagnccgngcggtggaattcccaggccccggggccgcgacgcgtctctccagcccgggatccggggagctgggctgtccccagaccgacgggacagcggcatctcctccacctgaaaaggaaagaggaccagtttgcaggactccgaactgggcccgcgagatctccacctgcgcaaaacgaaagggcggattctccttggactcacgaggcaaccgctccccggggtgagaacgggggactcattcctcctgcactgggagaagacgattctttaggaggaggacagggaagcgaatgctacccagcaaccactagaatggaagctgcatgtgggcatggcttagttttgtccactgctggatctcagcatccaaaacagtctaccacctgatgtctcagtatactggctcgcggcacatcgggcaaatgaac

SEQ ID NO: 13698 - DNA, 470 bp, Homo sapiens
  misc_feature (1)...(470): n = A,T,C or G
ggtccnnnnnagnagatgagacatctgaaaactgagacatagaacangcggnggaattccccaaagtgcctcgattacaggcatgaggcaccatgcccagcccttaaaaaaactttttttgtgaacattaaaaagcagaaaaaagggcatttagggatcttagagcaatgggtgaatattaaataataaaacaatttatttcttatttattcaatgttaagtgaaggtattattttcagcatttctcagctactttgtctttattagtttgagattttagtccgtcacttgccgtttgaagtaaaagaattcgaatggaaggcaggcatgtgctcccactgttgacgtctcttatttcatcaaccatgtctccttttgggtttcagcacaggcttttaattaggttaatgttcttggtgggtacccaaagtagtctgggctaggtgctgaagaaattagaaacagtttcc

SEQ ID NO: 13699 - DNA, 502 bp, Homo sapiens
  misc_feature (1)...(502): n = A,T,C or G
ccccgcccccnnnngnnattgatncccctnnnnnnnnccntttgatgactattagtccagtgcggtggaattcctgagatcgagaaattcgataagtcgaaactgaagatgacagagacgcaagagaataatccactgccttccaaagaaacgattgaacaggagaagcaagcaggcgaatcgtaatgaggcgtgcgccgccaatatgcactgtacattccacaagcattgccttcttattttacttcttttagctggttaactttgtaagatgcaaagaggttggatcaagtttaaatgactgtgctgcccctttcacatcaaagaactactgacaacgaaggccgcgcctgcctttcccatctgtctatctatctggctggcagggaaggaaagaacttgcatgttggtgaaggaagaagtggggtggaagaagtggggtgggacgacagtgaaatctatagtaaaaccaagctggcccaaggtgtcctgcacgctgtaa

SEQ ID NO: 13700 - DNA, 459 bp, Homo sapiens
  misc_feature (1)...(459): n = A,T,C or G
agagaaaaaanttcgagactcgtagacattagtccatgtggtggaattcctccagtttttcccagtgggaagttgggaccaagcacaaactccatgtctggtggggtacagactccaagggaagactgggctccaaagccacatgcctttgttggcagcgtcaagaatgagaagacttttgtggggggtcctcttaaggcaaatgccgagaacaggaaagctactgggcatagtcccctggaactggtgggtcacttggaagggatgccctttgtcatggacttgcccttctggaaattaccccgagagccagggaaggggctcagtgagcctctggagccttcttctctcccctcccaactcagcatcaagcaggcattttatgggaagctttctaaactccaactgagttccaccagctttaattattcctctagctctcccacctttcccaaaggc

SEQ ID NO: 13701 - DNA, 459 bp, Homo sapiens
  misc_feature (1)...(459): n = A,T,C or G
atttgacctgattaccatagaccangcggnggaattcctctgctgttaagaagttgtacttaaagcggaggagctaagccacctgccaaaatgtgcaaaggacttgcagctttgccccactcatgcctggaaagggccaaggagattaagatcaagttgggaattctcctccagaagccagactcagttggtgaccttgtcattccgtacaatgagaagccagagaaaccagccaagacccagaaaacctcgctggacgaggccctgcagtggcgtgattccctggacaaactcctgcagaacaactatggacttgccagtttcaaaagtttcctgaagtctgaattcagtgaggaaaaccttgagttctggattgcctgtgaggattacaagaagatcaagtcccctgccaagatggctgagaaggcaaagcaaatttatgaagaattcattcaaacg

SEQ ID NO: 13702 - DNA, 460 bp, Homo sapiens
  misc_feature (1)...(460): n = A,T,C or G
gggcccgatccttaatgaaattatcacntgatacctccgaagngncccggaantcttctgtctccgtcatggggagggtccctgctcagttctggagacactttagttggggtgttggtggntctgcattcccttctcctgctgatagcagtcagcttgaggaggatgacggaaggcagcctcagacaggaattaaggcaatgcccaggcgggcctgggcactgtattctgagcaagggcctgggcccaggagccagccagggatgagtgccatcatggctctccactcagactgtgcctggcccctgcacttacaacttcctgccgctctgtggccttgccctgtaatcactcagtgcccttagctagcctgactaagtcccagatcccctacagcttccttcggtgtggtatcttttgccacatccagggcgagggttgaggcaaaccagccctcctn

SEQ ID NO: 13703 - DNA, 470 bp, Homo sapiens
  misc_feature (1)...(470): n = A,T,C or G
ggttccaaananaaaaaactgatacataggaagctgatggcattcgtcagagaccaaaggattcagcagtgcagttgggtgaattttgtgttctggatgaggctcattcattcattcaacaatccttttcttgagcacttcctgtgtgctgggctctgcgcttagagcactgctaatggacaagtgaacaaaagaaacaagaatgtctgccccaggctgttctggggctggcgggaaacaaatgaagatgaatcggccaggtgcggtggctcacacctgtaatcccagcactttgggtggctgaggtgggcggatcatttgaggtcaggagttcaaggccaccctggccaacatggtgaaaccccgtctctactgagaatacaaaaacattagctgggcatggtggcgcatgcctgtaatccctgctacttgggaggctgaggcaggagaattgcttgaacccaggaggc

SEQ ID NO: 13704 - DNA, 454 bp, Homo sapiens
  misc_feature (1)...(454): n = A,T,C or G
nttcgagatcgttagtcagtgcggnggaattcattgagttctaatgttacatctgaggaagtatgtaatttgagaattgtaacttctaagggattcactgcatcatagctatgcctgtatggagtctaacatatgaccaataccaacccataatccagctgaacaaagatactgtaacattatgatttgagtggtgcttttccttgctttgttaaccatcacgagagtctgcagcacaacttttaacaaagctagaacagttttggcttcttaaacttcatatttgggtaggttaagctgccatacgtgttcagtgtgaatagtgtttaagttgaaaatattgtaaaaaaattatattttttcaaaaatatttaaaaaaataaataatagtagaactgaggnaaaagaaacaccctggaaagcaacacctacagaaagaaaatccatatgaagt

SEQ ID NO: 13705 - DNA, 460 bp, Homo sapiens
  misc_feature (1)...(460): n = A,T,C or G
cttcgacatcgtatngaccctagtccagngcggtggaattcgttttttgtcagaatctgccagctgttagaggctctttgaaacaaaacgagtgctgtctcggctctgcagaaggaggcccagggaggttgccgtgatgtgccaagagtcaaattaccgaccacttgtgcgggaaaatagcctcttcttatttacagggctgttgggtacacttgataacaagcaagatagaagttaaggtcggccagagacacaaagccactaatcctgaggtctcttggtccctttcagcaaagccttgagcataacagggtccctcctagggagtgagctgagagggtcactgtgaggttcctttcagaggggttgtgacagatgcccacagctctcttaatgggactgcggtggaggaagtacctggggaggtcacaccctcagcaatgaagctccattctgcagg

SEQ ID NO: 13706 - DNA, 458 bp, Homo sapiens
  misc_feature (1)...(458): n = A,T,C or G
ntttgagaccctaggaagttgagtgccattccacaaacagnagatttaagcttgtttgcacagttctttttttccattggaaatggaattcattgccttatgtctttttaaatagtgtattattatcgttggggctggctctatgcttgaaaaccagtttatttataacctgctataagtgctatattctgtttgcagttaggaaatgcataattcaaagcgatctcctagcttgtaagcaaactgagatgcactatcccttttctataaaaaataagttaatgtgtcaagaaaccaactctattaaggtggggtttaatattaccctttcctatgtgttttatctaattattttggttgttaatatggtgataatggaaagtcaagttaaattttaaatattaagaattctgatttattgagattgaattatgccaccacgtttatgtaaaaatgag

SEQ ID NO: 13707 - DNA, 456 bp, Homo sapiens
  misc_feature (1)...(456): n = A,T,C or G
ccgcgcccccnnnnttagagatcgatgtccatgcggaggaactcccgatgtgctcaaatactgcgtgtgtgtgtatgtgtgtatctttaagaaaacgtgtgccaaaattccatgaggagacaattgcgcaggggaaaaagtcaagaatgtgaaattccctgaattatattttttctgttggatttgaaactccagggggcaatgactatctatgtatctatctatctatctatctatctatctatctatctatctatctatctatatacacacacgctatggaatactcttcagctgtagaaaagaatgaaatcatgtctttgcacaatcatggatggacctggaggtaattatctaagtgaaacaagtcgaacacagatagacaaatatcacctgttcttacttataagtggaagctaaataatgtatacatgtagatgtagaatgtggaatgat

SEQ ID NO: 13708 - DNA, 445 bp, Homo sapiens
taaatttgtagaccttagttttgatgacgattatacagcgtggtggatcttgattgcctgaccgttgcgggcataaacaggcgccaccccagcttgaccttcatagcaggtgaatcatccatgataatggaaatagaactccagagccaggtgctggatgccatgaactatgtcctttacgaccaactgaagttcaaggggaatcgaatggattactataatgccctcaacttatatatgcatcaggttttgattcgcagaacaggaatcccaatcagcatgtctctgctctatttgacaattgctcggcagttgggagtcccactggagcctgtcaacttcccaagtcacttcttattaaggtggtgccaaggcgcagaaggggcgaccctggacatctttgactacatctacatagatgcttttgggaaaggcaagcagctga

SEQ ID NO: 13709 - DNA, 480 bp, Homo sapiens
  misc_feature (1)...(480): n = A,T,C or G
tggtcccnnnnaaaanaaaactgatnccntgggancctgatgaccctagtacatgcggtggaattcatttgtcatcagtagactttgagtaaggcagacagcccgtcacaatgtggatgggccttatccaattagttgaaggcctttgaaaaaagactgagatcccaaacgaagaaggaattctgcctccagacagccttccaactcaagtagcaacataacctcctccctgcggctctagcctgctggcctttcctatagacttcagacttgccagccccacaatcatgtaagccaattccttaaaataaattctctgtcctgtttttgccccctctctctttctgacagcacacacatgccctcttggttctgtttctttgaagaaccccaggaaaacacacaaaggaaaaacaactcgatagacagaagattcttcaatgacaacaatggaagccatcttcaccattcaactaaacn

SEQ ID NO: 13710 - DNA, 458 bp, Homo sapiens
  misc_feature (1)...(458): n = A,T,C or G
agaaacgaacctgataacctagtcggaggcngtaattcgtacttgggtgtaggactctagtgttcttgggtgtattgcatgggctgcattatctactgcattgtacaataacaactagaaaaggcagtatacttcactgatgcttgtctggtaataatcacttctgtgttataatggaaggttttttgtgatgtatgaaacttgtgttttttatatataaatgagtatagttagtgttgtggtaatgcctgttttcatctgtaaatagttaagtatgtacacgaggcactacttctgatttattgcaatgttcagtcctagtttttacttttattcttaaagcattcagttttgctttcaattttatgtaccttagttctgagttagacctgcagatgtgtacagatagttcatatttatgtattgcacataatcatgctattcagcattgatgctat

SEQ ID NO: 13711 - DNA, 489 bp, Homo sapiens
  misc_feature (1)...(489): n = A,T,C or G
nttgagccctttgcagggctttgataccatagctgggggctaccttacagaaagtggttatgtcaatctgcatagagtacagattattatgttagcagttggttttgttgaggatagcatttttaaaaagagaaaggatgatgaggacagttttagaagacgacagaaagaaaaaagaaagagaatgaagagagatcaaccagctttcactcctagtggaatattaactcctcatgccttgggttcaagaaattcaccaggttctcaagtagccagtaatccgagacaagcagcctatgaaatgaggatgcagaataactctagtccttcgatatctcctaatacgagtttcacatctgatggctccccgtctccattaggaggaattaagcgaaaagcagaagacagtgacagtgaacctgagccagaggataatgtcaggttatgggaagctggctggaagcagcggtactacaagaacaaatttga

SEQ ID NO: 13712 - DNA, 462 bp, Homo sapiens
  misc_feature (1)...(462): n = A,T,C or G
ggtggccaggagnccaaactggangcctagggngctagcanantcaccaanagccactgattaaattgatatattgttctgaggcgcctggcctgtcccttcagtgagccatgcccacccttgtgttgtagtgagaagctgttgtcacgactaaccttctgtctctgaaattgtttgtttcaaataaagagttaaaattgtcaaaaaaaaaaaaaaaaaaaaaaaaaaaaaaaaaaaaaaaaaaaaaaaaaaataaaaattaaaaaaaggctctcgccaaaaaagaaagagggaacaaaaaacaggacgagcggctaaagggtgggagtgcaaaatagatgcaggctcctggggcccctccccccccctcgttttttttttcaggagaaggcccctcatttacttgttttataaaaagaaaagggtgtttttatggttgtttggtacgggggcgtcttttat

SEQ ID NO: 13713 - DNA, 478 bp, Homo sapiens
  misc_feature (1)...(478): n = A,T,C or G
tgagttnnccnnnngtngnnnncattgacgactttaatcgaatggcgtggaattcgntcgagagagagtcttcgggagaggaggaggagtagggccgcctcggggctgggcatccggcccctggggccaccccttgtcagccgggtgggtaggaaccgtagactcgctcatctcgcctgggtttgtccgcatgttgtaatcgtgcaaataaacgctcactccgaattagcggtgtatttcttgaagtttaatattgtgtttgtgatactgaagtatttgctttaattctaaataaaaatttatattttacttttttattgctggtttaagatgattcagattatccttgtactttgaggagaagtttcttatttggagtcttttggaaacagtcttagtcttttaacttggaaagatgaggtattaatcccctccattgctctccaaaagccaataaagtgattacacccgaaaaaaa

SEQ ID NO: 13714 - DNA, 457 bp, Homo sapiens
cactgatgaccctaggacagttgatggccttctggactaccacccgcttttgtgctgcctgcaagctaagactaatgtttacatttttaaatggttggaggaaaaaagaaaacttatgacatgaaatttatatgaaattcagatttcagtgtccataaataaacttttattgggacgttgccatgctcattcatttacgtgttgtctgtggcactcttacgctacaagggcagaactgattagcttcaacagagactgtatggcctacaaagaccatatggcctaaaatttcaagtatctggccatttatatatagtttgctgatccctgatctaatagcactaattctaatagcaactattcctttcaattcacctaaagacagacctttagcctttagacagacttgtaagtggaaaggaacatgggtttctgtgctcatttcatagcgtagact

SEQ ID NO: 13715 - DNA, 470 bp, Homo sapiens
  misc_feature (1)...(470): n = A,T,C or G
tgtggctgngtttcgancccatcgagaccctagtcagtgtgccggaattcgccaaaggaaccaccatcactggaacagctggtaccactgtgggcaaaggagttacaacagttactcttccgatgattttcaattccagttatctccgacgaggtgaaagtcattggtggatgaagggctcaacccctacccagatctcagagatcatcattaaacttatcaaggatatggcagcaggtcatctgtcagaagcttggtcccgagtgacaaaaaatgctattgcagaaaccatcattgccttgaccaagatggaagaagaatttaggtctccagtgagatgtattgcaacaactagactctggcttgctctcgcatccctatgtgttcttgatcaggaccacgtagatcgtctctcctcggggagatggatgggaaaggatggacaacaaaaacaaatgcctatgtgtgan

SEQ ID NO: 13716 - DNA, 488 bp, Homo sapiens
  misc_feature (1)...(488): n = A,T,C or G
tgcccagncagaggcnaactgatncctagtgcgtcgcgagancnccatctacacaaactctttagagccgggcataatgggaacagcaactccacctgtcatgttttacctccaggaaaacgtgatacccaaactcaacagagaaaaaataaacttacagaccagtctcactcatgaacataaacagaaatcctcaacaagatattaacatataagacctggcagttggccaggcgtggtggctcacgcctgtaatcccagcactttgggaggccgaggtgggtggatcacgaggtcaggagatcgagaccatcctggctaacatggtgaaaccctgtttctactaaaaataaaaaaattagccaggcgtggtggcgggcgcctgtagtcccagctacttgggaggctgaggcaggagaatggcgtgaacccgggaggcggagcttgcagtgaggcgagatcacgccactgcactccagcctgtgcga

SEQ ID NO: 13717 - DNA, 456 bp, Homo sapiens
  misc_feature (1)...(456): n = A,T,C or G
cgcgccgttccataagaaaccatcgantgagggcgtacgaacnaccaggagctgttnctgtatttttaggagacacggatgtgctgcctccgttccatctctgaaggagtttcagaagcctgagcagcccactccaaggaaaagcccctatggtccccctcccactggcctgtttgatgatgatgatggtgatgatgataacgactttttctcgacaccccacagcataccttccaaaacaggcaaagtccaatccactgctgatatctttggtgatgaagaaggagatctgttcaaagaaaaagccgtagcatcgccagaagccacggttaccttaccttccagcaaaaatctcaagccctcgtcagaaacaaacactcagaaaggcttattttaggatcaggaggactctgaggatttgttttcttctcaaagtgcgagtaacttaaaaggtgc

SEQ ID NO: 13718 - DNA, 466 bp, Homo sapiens
  misc_feature (1)...(466): n = A,T,C or G
ggggggccactgagnccntaactgaggaccancgnaagngcggnggaaatcggaagccatgatgagcatttggcctttttatgtcctgttttttcttggtgtatcatttgccagaatagagggctggccatctgacattcaccccacaggcctgtgtggacatcaggagcaaagttggagccagaatccaagatgaggcgttcatggtctggtggtcctggtcttgcaggggaaccgctttgctagtagcatcctgaaccagcgggggagaacagcacaggagggcagctgctgaggcttgggtctgtgttgcaaagtggcattcactggcctggaggaacaagtgtcaaaggtggaggctggcttaagggcatgtgtggaattgacttaatgtgcattactgagcacagagcagagccttcggatgttaaatgaagaacaaagaactttccccaaaaaatctgtt

SEQ ID NO: 13719 - DNA, 497 bp, Homo sapiens
cgccccccgaaaatttgatacctagccagttgggtacatcctcgagtggatagataattcgcatatatttgtttcagtctgcggcttctctttttttattttcttaatggcgtcatttgacgatcagaagtattacattttgatgaagagcaatttgtcaattttgttcttttatgagtcatgcttttggtagcatatctacataaacgtttttattcatctatttattggatgtatttattttgagacaggagctcactctgtcactcaggctggagtgcagaggtgctatcacggttcactgcagcctcgacttcccaggctcaatcaatcctcctgcctcaggctcccgggtagctgggaccacgggcacgtgctaccacaccaagctgattttttgtattttttgaagagacggggtttcgccgtgttgcccaggctggtctcaagttcctgggctcaagcaatccaccagcctcggcctcccaaagtgttgg

SEQ ID NO: 13720 - DNA, 477 bp, Homo sapiens
attgagaccctagccagggggtaattcctacaggcaatttgccatttcattttaatagaatgttccatgctgaaaatgtctaactgctcagaagtggaataggagtgtaaatttattatctgagaaaagaaaattaattgacacaggccaaaaatgtaatggaattagacccatgtgccttagtgagaacttaggaactcgatctgggctctatggagtgacaaaattatgcaaaaaaaaaatgaagtatgtcatttttgcacaaagctcaggatttctcaaaggaatattacataaaataatgaagtctcctttatctccaagacagtccagtcttagaacgcaatggaacatgccatttgaaataaaaaacaaattttggttttggtttggtttggtatgtttggggctattttaagtatttaacatttcataagagagaattagcaattaatgagataaagttaaaaaaaatcg

SEQ ID NO: 13721 - DNA, 496 bp, Homo sapiens
  misc_feature (1)...(496): n = A,T,C or G
tgggcggggnncgggnnnnntnnnaatcgagaccactggccagtgcggtggaattctttttttctttcttcttgcagtctcagtgtatgtccaaatctgtacttgtctttcccctgaaaatgtgcccctttctttccaagctaatggcagtattcaactgataactatggtttttttgtttgtttttgagacggagtctcactctgttgcccaggctggagtgcagtggcgagatctcggctcaccacaacctccgcctcccgggttcaagcgattctcctgcctcagcctcctgagtagctgtgactaaaggcgcgttgcaccatgcctggctaatttttgtatttttagtagactcgggtttcactgtgttggccaggctagtctctaactccttacctcgtgatctgcccgcctcagcctcccaaagtgctgggattataggcgtgagccgccacacccggcctcaaataactatgttttattcacttttagt

SEQ ID NO: 13722 - DNA, 514 bp, Homo sapiens
  misc_feature (1)...(514): n = A,T,C or G
aggcgagaanaagccacacattgattccctttggagntttgatgtacctattgagcgtggnggaattcgccagttctggtgactcagtccgcagctatagttccagcatgaactaaaaaacgtttcacatctcctatttatcaacctaaatttaaaacatacaaggagtttatgcaacatgcccggaaagcaggattggttattcctccagaaaaatcggaccgttccatacatctggcctgtacagctggtatatttgatgcctatgttcctcctgagggtgatgcacgcatatcatctctttcaaaggagatgatagagagaactgatagagagaactgaacgaatgaagaagactatggcatcacaagtgtcattttattggctgggtgcggtggctcacgtctgtaatcccagcactttgggaggctgaggtgggcagatcacctgaggtcaggaatcgaaaaccagcctgaccaacgtggagaaacctcgtctctactaaaaatgcaag

SEQ ID NO: 13723 - DNA, 500 bp, Homo sapiens
  misc_feature (1)...(500): n = A,T,C or G
cggggtnnnnnaagggcggggnncngagggagatgnaccactaaaactcctcccagctaccctccgcagnnccnggaannnnaggnnnaaattttttgaggcgaggnttnnaggacttnangttattattggnttaantttntnattatntggtggatgcccaggtaatatttnactttacatncaaacatnactttggcttcgaagccgcgcgcctgatactggcattttgtagatgtggtttgactatttctgtatgtctccatctattgatgagggtcttanaaaaaaaaaaaaaaaaaaaaaaaaaaaaaaaaaaaaaaannggggccccttatttaaagggggccccaaaaaccccggggaaaaccccggggggggctttttggggccccccctttggggggggcccccccccccgggtttttttttggtggggggggggcccccccccgggcttttttcaaaaaaaaaggaaaaaatcccccctttgggggggg

SEQ ID NO: 13724 - DNA, 443 bp, Homo sapiens
  misc_feature (1)...(443): n = A,T,C or G
natgacngacacatggacagcccgttggaattcgaaagatgtacattatatattgtgaaacgaaaaaagcaattttcaaatggtatatattgtatcccatttttgtaaaaaaaatgtatatttatatattaatatgcaaagaaaaagctaaaagtatagacttcaaaggcataacagtggttgtgtggtaagataataggtgattttttaaatttttgttttatctgaatttctcattttttcaggacaaacgttttacttgtgttgcaaaaatatataatgaaaaaatcacacaattttgaagaaaactgtcaatcagcttataacgacaatgtggcacttaataaatacttgtcagaactttanaaaaaaaaaaaaaaaaaaaacataaagatccgaggaaaaacataaaaaaacataattaacattatatgttaagagag

SEQ ID NO: 13725 - DNA, 421 bp, Homo sapiens
  misc_feature (1)...(421): n = A,T,C or G
gtgaagggaagccctcgagggccggccgggagcccggaaaccgaggtcccccttcggccagttttaatccccccgccctcccctctgccccaggcccggcagccatggcggtggaaggaggaatgaaatgtgtgaagttcttgctctacgtcctcctgctggccttttgcgcctgtgcagtgggactgattgccgtgggtgtcggggcacagcttgtcctgagtcagaccataatccagggggctacccctggctctctgttgccagtggtcatcatcgcagtgggtgtcttcctcttcctggtggcttttgtgggctgctgcggggcctgcaaggagaactattgtcttatgatcacgtttgccatctttctgtctcttatcatgttggnggaggtggccgcagccattgctggctatgt

SEQ ID NO: 13726 - DNA, 453 bp, Homo sapiens
  misc_feature (1)...(453): n = A,T,C or G
cctggactcctgcntctagtccangcggtggaattcgcgggacccaaccgcggcgaccggacgtgcactcctccagtagcggctgcacgtcgtgccaatggcccgctatgaggaggtgagcgtgtccggcttcgaggagttccaccgggccgtggaacagcacaatggcaagaccattttcgcctactttacgggttctaaggacgccggggggaaaagctggtgccccgactgcgtgcaggctgaaccagtcgtacgagaggggctgaagcacattagtgaaggatgtgtgttcatctactgccaagtaggagaaaagccttattggaaagatccaaataatgacttcagaaaaaacttgaaagtaacagcagtgcctacactacttaagtatggaacacctcaaaaactggtagaatctgagtgtcttcaggccaacctggtggaaatgtn

SEQ ID NO: 13727 - DNA, 492 bp, Homo sapiens
  misc_feature (1)...(492): n = A,T,C or G
ggaatgccccctagaggggncctgaaagctgacgncntcgcagaancntnctncntaancatcctgagaaagcattagagttatttatctttatttttccagaagttttgattttaattggttctggtgtaggctctaaattcataagatcaataatttcaggctccattgtgggttgaagagagtagtattcgcattaataaattaagtattagaagaccaaatgtctatttagaatagagtgggacaaacagatagctgagggtaaggagcctgagagcactcttccctctgtctttaattggtacgtcttcattaagttcttcactggttttctgttctttcctttatttttcttttttgggtttaagtattctttgggaataggtactaagattctttgggaataggtactatatattctgctggttgggatgttggcctcaaggtacttccctgaagattattagaaagaccaatatattggagcct

SEQ ID NO: 13728 - DNA, 483 bp, Homo sapiens
  misc_feature (1)...(483): n = A,T,C or G
ngagcggtnnntntcctcgagaccttaggccagcgtcgnggaattccatcagagtctggcacacatcaggaccttagggaatcgttattaatggaaggaagaaagatacatgaaagatggtgttagcccccatttcacagacagggaaactgagggtggagctgatctcattccatggaattgccgcccagcctgggtttccatgatgctccccgagctctgagctcgctgctggctacacaggaggaggcatccccttcagatgtctgctgcacaaatgctgctcacaggtagtgccccaaaccattctacacccccctctgcccactctctccctgggccatgccaactggttgcaatctttcaaaggaaactccccatgcagagaggatgctatgattttccacctactcacccattacagaatatacttaattacagaattaattaaatagttacaggaattaattgaataaattcctt

SEQ ID NO: 13729 - DNA, 498 bp, Homo sapiens
  misc_feature (1)...(498): n = A,T,C or G
gtccgnnncagggcggcccgngattgatnccaactgagtnctactatcagtgtggtggaattcgtgtacttccctaatttatacaaaataaaagtcaacattatgtttagtggagaaatatcagtagcgttaccattaaagtcaggagtatgataagaatgttttaaacaaataagagagagaaaatagacatatacaaattgaaaagaagtaaaattatcattacttgcagatcttatatttgcataacccaagagaatcatctgaaaaagattataaaaattataattcagtaaggtagcttaatgtaaaatcaatatataaatatcaaaagcttttattccttttaagcaactgccggatagatgtcatggaagaaaagacccttttacactttcaagaacatcaaaaaagctaaaataaccagaaatanatctaagaaatattccatatgtatatcaggaaactttaatcctgagagacaacaaagcacagaga

SEQ ID NO: 13730 - DNA, 487 bp, Homo sapiens
  misc_feature (1)...(487): n = A,T,C or G
atttgagaccctcggacnngncgttttgagacactaggccaagcggnggaattcgaagaatgtctgacacatagcggcgattattcattgaataaatggacccagcgatagtacattacctatgctatatgcatacattaaagatgtagattatcgactttcaaaagataattaatgtaacttcttactgcttctgaacatgtttgtgagttatattgctgagggacctttatcttctcattctttcatcttaacccagtgttataaaattgaaatcaccaatattattccatatctaaaattaatatctaccttgtaaaaaatatcactctgctgcatttgagaatagactttttaggtaataatgatgcaatccatagggttttttgggggcacagaggtattcatgctaacagaacattttattttctattttcccagagctgtaaaacatgaaattagggtagtataaggcatatttttactn

SEQ ID NO: 13731 - DNA, 456 bp, Homo sapiens
  misc_feature (1)...(456): n = A,T,C or G
gaaatcttagacactcggaantcggtagaaccgtcgacanacnccctgcctgaaaaagatttttcatggtcaggtatttttaaatacttgtatactttggtcagaattctgtatacattaaaaaaacatgttctctttaagaatattctggccaggcacggtgactcttgtctgtaatcccaacacttttggaggccaaggcgggaggatcacttgagcccaggagtttgagaccagcgtgggtatagcgagacctttgtctcnnaaataaaataatactaaaacatttataaaatatgattttttttattgagtggggggccttttagaacccccgtgtggccccccgggtctcctcttgtatccccacttaatggggatgccctacccacaccccccttcctgtgggggggtcgccccccccaaccctttatattgtattggaaaaaaagatgc

SEQ ID NO: 13732 - DNA, 474 bp, Homo sapiens
  misc_feature (1)...(474): n = A,T,C or G
ctcgaccccccntngnttttgtagtccctagtcagtgtggtggaattccctgcatgtgcacatccagacggctggttcctaccttaactgatgatattccaccacaaaagaagtgaaaatggctggtccctgccttaactgatgacattaccttgtgaaattccttctcctggctcatcctggctcaaaagctcccccactgaacaccttgcaacccccacccctggccaccagagaacaaccccctttgactgtaattttccattacccacccacatcttataaaatggccccatccctatctcccttcgctgactcttttcggactcagcccgcctgcacccaggtgaaataaacagccttgttgctcaaaaaaaaaaaaaaaaaagggaggttttttaaaaaatccccacccccagaaaaaaaaaaaaaccccccaaaaggaatttatataaaaaaaaaattttcagggca

SEQ ID NO: 13733 - DNA, 467 bp, Homo sapiens
cttgagcccctagcagtttgaggccatctcaccagcgagcgtcattgttgtctttctgggaactcattcccatgagatcagaacctcttcgaaaaaagaagaaggtagatcctaaaaaagaccaagaagcaaaggagcgcttgaaaaggaagatccgaaaactggaaaaggctactcaagagctaattcctattgaagattttattacccctctaaagttcttggataaagcaagagagcggcctcaggtggagctcacctttgaggagactgagaggagagctctgcttctgaagaagtggtccttgtacaagcagcaagagcgtaagatggagagggacaccatcagggctatgctagaagcccagcaggaagctctggaggaactgcaactggaatccccgaagctccatgctgaggccatcaagcgggatcctaacctgttcccctttgagaaggaagggcca

SEQ ID NO: 13734 - DNA, 472 bp, Homo sapiens
  misc_feature (1)...(472): n = A,T,C or G
cccccaatagaagatccntaggcttgtgtgcgcgaattccatgccagttctcaaagttgttctcacccaggccaataagctgggtgtctaaaaggacagcttctcttccactcaatattgccatttttccaaagaaacatgttaaaaaaaaaaattataagacatggactagtcctcattagcatgtttgcatagcaaccagtcaagagcatttacactatttctgctgatatactcaccttagaactgctcagaaccctggggctttatttttgttttaatcttttgttgccagggatgattttcctattctgcaaatagtgtatttcctggattacacatagtatggtttcctgaagtattctgataaatgtgttttttaaaacctcaatatactttttagaaaaggagcatctggttatgcataaagcagagctaaaactaaatttctttcatgtcctccctacttcct

SEQ ID NO: 13735 - DNA, 444 bp, Homo sapiens
  misc_feature (1)...(444): n = A,T,C or G
natgatgcccccctgatgaccctctagaccangcggtggaattcgtcatggggttgtgccaattaattaccaaacattgagcctgcaggctttgagtgggagtgttgcccccaggagccttatctcagccaattacctttcttgacagtaggagcggcttccctctcccattccctcttcactcccttttcttcctttcccctgtcttcatgccactgctttcccatgcttctttcgggttgtaggggagactgactgcctgctcaaggacactccctgctgggcataggatgtgcctgcaaaaagttccctgagcctgtaagcactccaggtggggaagtggacaggagccattggtcataaccagacagaatttggaaacattttcataaagctccatggagagttttaaagaaacatatgtagcatgattttttaggagag

SEQ ID NO: 13736 - DNA, 469 bp, Homo sapiens
  misc_feature (1)...(469): n = A,T,C or G
gacaaactgatnaccntnggnannnactgaagacactaggacangcgcngaattcgctttggagacctccaggattatttctctgtcagccctgtcacatatcactaatgacttgaacttgggcatctggctccctttggtttgggggtctgcctgaggtcccaccccactaaagggctccccaggcctgggatctgacaccatcaccagtaggagacctcagtgttttgggtctaggtgagagcaggcccctctccccacacctcgccccacagagctctgttcttagcctcctgtgctgcgtgtccatcatcagctgaccaagacacctgaggacacatcttggcacccagaggagcagcagcaacaggctggagggagagggaagcaagaccaagatgaggaggggggaaggctgggttttttggatctcaaagattctcctctgtgggaaagaggttgagcttcn

SEQ ID NO: 13737 - DNA, 482 bp, Homo sapiens
  misc_feature (1)...(482): n = A,T,C or G
ggagcgtcnnnnnnaactgataccctgagaccctacgaggaanccctttngaaggaaccgacatgtgggaaaaaaacgaccagagctgtgaaatcatgctgaaccatttggcaacagcgcgattcatggccgaggctgcagacagctaccggatgaatgctgagaggatcctggcaggttttcaaccagatgaagaaatgaatgaaatctgcaagactgaatttcaaatgcgattgctatggggcagcaaaggtgcacaagtcaatcagacagagagatatgagaaattcaaccagattttaactgccctctcgcgtaaattggaacctcctcctgtaaagcaggcagagctttgataactctccagagaacctttagaatatcttttcaagtttccccagcttcatctttgggaaagcttactgtttttgataaagtaataatgtgcaaatctgacaatatacaagcttttagtatccaca

SEQ ID NO: 13738 - DNA, 475 bp, Homo sapiens
  misc_feature (1)...(475): n = A,T,C or G
ngggtcgtccngatcgaagacacattgtacgactctagaacagngcggnggaattcaggagatctccaagcgaactcagcctcctcccaagctccctgtgggtcctagccacaagctctccaacaattactattgcactcgcgatggccgccgggaatctgcgcccccttccatcatcatgtcgtcgcagaaggcgctggtgtcaggcaagccagcagagagctctgctgtagctgccactgagaagaaggcggtgactccagctcctcccataaagaggtgggagctgtcctcggaccagccttacctgtgacactgcaccctcacggtcacccgactactttgcctccttggatttcctccagggagaatgtgacctaatttatgacaaatacgtagagctcaggtatcacttctagttttactttaaaaaataaaacaatagagacagagtctcaccatgttaaaaaaaaan

SEQ ID NO: 13739 - DNA, 288 bp, Homo sapiens
  misc_feature (1)...(288): n = A,T,C or G
aaaaacctgagaccctagcagngctgagaaccctctctgaggncctggncccagctactcgggaggatgtcttgagcccaggaggcagaggttgcagtgagctgagatcacaccactgcactctagtctgggcaacagagtgagactgtgtctcaaaaaaagaaaaaaagtttaaatactatatatttttctaaaaagaggagatgtttctgatttctcacaatttgattttttcttattgaatgaagttgtagccctaggggaagaacatcattcaaaaaaaaaaaa

SEQ ID NO: 13740 - DNA, 486 bp, Homo sapiens
  misc_feature (1)...(486): n = A,T,C or G
nagtccgggccaggnagantttaancctagggggctttgcccacncngcancgnagngncngacannananatacgacctgctctccggttctctggaggtcatccgcaagtgggcggagaagatccctggctttgctgagctgtcaccggctgaccaggacctgttgctggagacggccttcctggagctcttcatcctccgcctggcgtacaggtctaagccaggcgagggcaagctcatcttctgctcaggcctggtgctacaccggctgcagtgtgcccgtggcttcggggactggattgacagtatcctggccttctcaaggtccctgcacagcttgcttgtcgatgtccctgccttcgcctgcctctctgcccttgtcctcatcaccgaccggcatgggctgcaggagccgcggcgggtggaggagctgcagaaccgcatcgccagctgcctgaaggagcacgtggcagctgtggcgggc

SEQ ID NO: 13741 - DNA, 496 bp, Homo sapiens
  misc_feature (1)...(496): n = A,T,C or G
ggccggncaagccattttgataccttgcagtttgtgacttcctgagaactccatgtcacctcctcagatctttaatctggaagtgacaaaaggtaacacagtgcacggacctttgagctatcatacttttgccttctgctcatgaggggtgtatcaatttccactcccacaccctcactgttatgtggaccaaaatgtctggtatactatttggcgattaaaatatttaagcccagttttcaggtactacatctgtaactagtgaatactctgttgattagaaagttaatttaccactcaaaatggctaacttgaatggaggaagtagtaaactcttctattaggatttgggccagtgttttttgtttgttttttggtgcagtttcagctcactgcaacctccgcctcccgggttcaagtgattctcctgcctcagcctcccaggtagctgggattacaggcatgcaacaccacacatggctaatttttttattnt

SEQ ID NO: 13742 - DNA, 466 bp, Homo sapiens
  misc_feature (1)...(466): n = A,T,C or G
gtcgccgcgnnnnnnngttttaactgantccatactncgngtcgaggaactctctcacaggaattctcagtcttttgtttagctcttaaaaatatcctggcagaattgtaaaccttgggactggcatgaaatgacttgccattttcctcttaaattattatttaaaatgttttttccaagtcttattcaaattcttcagtgctcgttgactctcctcacttttttcctaaggagtgttcaggcaaaatttatttttaagaaaaaccatggtatgtttttaatattatgcatatttcttttttcttttcattaggagaaagacctttgaatctccgaatgcctaatttacagaacagacaaccccatcattttgtggtggatggggagctgagcagactttaccccagtgaggcaaagtcccactcatcaggtgagaacgtgctatatgatgagagggtaacacttg

SEQ ID NO: 13743 - DNA, 470 bp, Homo sapiens
  misc_feature (1)...(470): n = A,T,C or G
cgcgacgagnnnnannnttttaacctcgatacccctcttcangctcgagaaccntactaagngacgtggaattcgccgctgttgtgacttaggattgtcctggcctagatgtgaaccgtggggctgtggttagctgacgggccggtgaactattacattattatttaccatgttttttccacaccttattcaaattattcagtgctcgttgactctcctcacttttttcctaaggagtgttccggccaaatttatttttaagaaaaaccatggtatgttattaatattatgcatatttcttttttcttttcattaggagaaagacctttgaatctccgaatgcctaatttacagaacagacaaccccatcattttgtgggggatggggagctgagcagactttaccccagtgaggcaaagtcccactcatcatgtgagaacgtgctatatgatgagagggtaacacttga

SEQ ID NO: 13744 - DNA, 437 bp, Homo sapiens
  misc_feature (1)...(437): n = A,T,C or G
natgatgaccacttgaagccgtcggaannccaggcgacgtgtcgaagatcacagtgctggcagcagagctgagttccaattttggtctgtttctgagcttatctgatgatgttggattacaaaaggctttgtgggctttctggtccgactttatctgcatctggcagctggggtcacggcaggatactgattggatcacacaggtctttgttgaggtctctgacagctttctaagtacaactctgcaaggtggcgtgctaatctgtttctcagtgaggcagaagctaatccaagggcaggagttcttcctcagtgttaaacattccatctacactagatgcctgattcagcagtttaggagcttagttttggatagtctttgttttcgtgctatataggtcctgtgtttattacctttgtgtttcagatgctcgaca

SEQ ID NO: 13745 - DNA, 490 bp, Homo sapiens
  misc_feature (1)...(490): n = A,T,C or G
cgcgttgagccttttgagaccctccgccaggncgnggaattcatgactcctccctcttaaggagtccctgcagaggacagctgctgggcggctctctaatctgcctgttccacaccatccctactgcgactcctgcccaagctctctcactctcctcctagagagtggcagccatgtcttaaatacacctctccaagtcctcaaatccaccctccacatggctgccagggcgttctcactaatgtgaccaagggcattgattgccaattgtggcttaacctgcctcccagagcacgtactacacttgccaggatttctgattgccttaactaacacccacttccaccagggctgtcagcttgtcctaaaagcacacctgctcccatggtgagtgtgtgttactaagctcaatcaaagcagaagtctcgcccaggcgcggtggcttacacctgtagtcccagtattatgggaggccgaggcangcagatan

SEQ ID NO: 13746 - DNA, 469 bp, Homo sapiens
  misc_feature (1)...(469): n = A,T,C or G
cggagtgcacaggntgcnaaaaccaatactgtatcgaacngtancgaanancnnnngaaancaaggantnatggatgcgtgagggatgactgtatatcatacacacttaaagtttactggcttttgccaacaaattttgagcccattagccaaccagcctggtcaacgaatgtacatctaaagtaagatatatacgtgctaaaattgtttttaactaaaaatgccatatgtagtgtagaaatgaaaactagacactatttcattcgcatccattgagataatagtggtgagcacttaggataagcaccaggcttgacttgctgctcttgtcacttgtccttggaaatttaggctctattacaccaccaactctcaaatcatttccctgttgtagagctaaacttgacgtcctacagaatttctctaacttaacatgttgagtctctgagagggcaaaacttgaaacaag

SEQ ID NO: 13747 - DNA, 487 bp, Homo sapiens
  misc_feature (1)...(487): n = A,T,C or G
ggtgactggacccttcgagagcgtggaattcggagctgaatcctaagaagaagatttgggagcagatccagcctgatcttcacactaatgatgagtgtgtggctacatacaaaggagttccctttgaggtgaaagggaagggagtatgtagggctcaaaccatgagcaacagtggaatcaaataaaatgcttccactaccaaaagacattagagaaaaccttaaaagtaataaagagaaatatatttgtcacttatacctaaaatatgagtggctcatttttgcattactctcttctagacttgactagtcatttacttggcatatattgttttcattgattggggaaacactagatttttacctcggtttttgatcatttataatggagagaggaagttgcctatgttttgtaataatttattttttagcaggaatattgattagcagcttttttttctttatacacatagataactaactagatn

SEQ ID NO: 13748 - DNA, 490 bp, Homo sapiens
  misc_feature (1)...(490): n = A,T,C or G
gcggatgagcccaatcgagaccctaggaagngncgnggaattcgaatcatcactctgaccggccccaccaatgccatctttaaggctttcgctatgatcatttacaagctggaggaagatatcaacagctccatgaccaacagtaccgcggccagcaggcccccggtcaccctgaggctggtggtgccggccacccagtgcggctccctgattgggaaaggcgggtgtaagatcaaagagatccgcgagagtacgggggcgcaggtccaggtggcgggggatatgctgcccaactccaccgagcgggccatcaccatcgctggcgtgccgcagtctgtcaccgagtgtgtcaagcagatttgcctggtcatgctggagacgctctcccagtctccgcaagggagagtcatgaccattccgtaccagcccatgccggccagctccccagtcatctgcgcgggcggccaagatcggtgcagcgacgctgcgg

SEQ ID NO: 13749 - DNA, 470 bp, Homo sapiens
  misc_feature (1)...(470): n = A,T,C or G
ggggcctccctttgagaccctagattgaggccatagcggcatcgncatccagaaaagcatggatcagttcagcacggctgtcgtcatcgtgtgcctgctggccattggcaggtattcggggcggcatttttaccctcatatttgccagactgaacattcgccttcgaaactgtctcttccgctcactggtgtcccaggagacaagcttctttgatgagaaccgcacaggggacctcatctcccgcctgacctcggacaccaccatggtcagcgacctggtctcccagaacatcaatgtcttcctgcggaacacagtcaaggtcacgggcgtggtggtcttcatgttcagcctctcatggcagctctccttggtcaccttcatgggcttccccatcatcatgatggtgtccaacatctacggcaagtactacaagaggctctccaaagaggtccagaatgccctggccagn

SEQ ID NO: 13750 - DNA, 480 bp, Homo sapiens
  misc_feature (1)...(480): n = A,T,C or G
agtgccanaataagaacgctgagaccttgtgaangactgatgacactagtacangcggaggaaataccagttgatgctgacagcaggacccattgttgccgtccctccccaggcaccttttggttatggttataccgcaccaccgtatggacagccacagcctggctttgggtacagcatgtgagatgaagcgctgatcctgtagtcacctattttcgtactgaaacatcgtctttacccacttctcagtttataatgggggaaaacaggcaacgtgttcttgtaacctttatttcatgaaggacttctttttgtttctaactataaacttggatcacctatgttaaaaccttatttcacattccacatcattttagaatttattttcgaaggggaatagtttcaatgttttattcacttgggctttttttcttccccctctttctttaaagaactgctcaatattcaatctggtgagaa

SEQ ID NO: 13751 - DNA, 477 bp, Homo sapiens
  misc_feature (1)...(477): n = A,T,C or G
gagagggccggnnagnataattcaggacctaatgtcagncgctncggannnncaagngnnngnnnnnanntgngaacaggaataaggatagtgccctcccaggatcattaggaagaatgaatgtctgcgcattataaaatgcccggcccagggctggcacacagcaagtgcttggtagatgtgaatcctccccttccccgacgtgtcccggacccatcagttgtagagttgctttgctgtctatatatggtcaagaatgtgtagaaggaaataattctggtaacctggccggtgctcagctctttgcagaacgctttacacaggatctaatcccagagcaataaatcaatttcagtcacagcctaatcccaggctcctggcaccaggcacgtctcccaggtctgggttttttttagctgccgtggtgttctttgaccagccaggttacacgaggtcagcccacctgggaatttaatc

SEQ ID NO: 13752 - DNA, 429 bp, Homo sapiens
  misc_feature (1)...(429): n = A,T,C or G
nttcgagatcattagtccttggcggtcgtattctataaactcgcttggcctctcagttcctttttgaactcagtgtccaggaacagccatgattccaaaagcacccacaagttctgaacttcaactcagggcctattgattgtcctctgtgaggcattttaaagcccctctggagtctcagggtgggtcaagattaagggcaaagatattgcgtggacacaggaggaagctttttgggtcatggaggaagaaaataaggtctttcccacatgtggttctctctttagcccctctcccttccacaggctcagagagccaacacagacctgctcctctgtggggagggagctgatgatctcattctcttgggctgccccatcactgagtgtggagggctgggcccatggtactcagacctgaggcagctgg

SEQ ID NO: 13753 - DNA, 488 bp, Homo sapiens
  misc_feature (1)...(488): n = A,T,C or G
ccggatgagccaactgagaccctaggccangncgnggaattccaagctttatgagctcattttacaggtgagtgatttgttcaagatcacacagctaatattggcagagctgggctttggactctggtctgtgtggctccagacaccaccttctttttcatattcccccacagcctccttggaggatgccgagaaacctttcaaattttgttgcctttctggttttgtagttctgctgatggaacagccagccatgaacaagataatgttgaaagcctaaattggagaccctggccaaacggctcttctggcctctttcccagtgatgacaggctgtcctgctgcttctacacacagtaggtactcattgtttgctgaatcatgggaacaaatacagctttccaagttggttactgaaaatccacatacagtaagtattcccaagatacactgcagtccagaacaatggggcaggaagccacctcctn

SEQ ID NO: 13754 - DNA, 452 bp, Homo sapiens
  misc_feature (1)...(452): n = A,T,C or G
nggggccnnnattcgcggatccctagnctgtgtggcggaattcatcaaaagcacatcagtgccgaagaatcggtcatctaatgttaaaaccacttaaggaatttgaaaatacaacatgcagcacactgacaatacgtcaaagcttggatttgttccttcctgataaaacagctagtggtttgaataagtctcagatcctggaaatgaaccaaaaaaagtcagataccagcatgctgtctccattaaatgctgctcgttgccaagatgaaaaggcacaccttccaaccatgaaatcctttggtactcacaggagagtgacccacaaaccaaatctgttgggttctaaatggtttataaaaatattaaagaggcatttctcatctgtatcaatggaaacatttgttccaaaacaagacttcccacaggtgaagagaccactaaaagcatccagg

SEQ ID NO: 13755 - DNA, 461 bp, Homo sapiens
  misc_feature (1)...(461): n = A,T,C or G
cacattgagcatacgctagngcggngcaattcagcattcaaatctgctttctaccctcattaacaattagcagggcactggccagagtttgtaccctgtgttttaccttaacaacattctatttgctctttgtatatttaagtgttgtaaggaaacgtgtttcaatcaaaactgaccatgagataaaggaaagagatgtggcttttgtgatattctatcacaaacacttattgtatctctgtaaaatacaatgtatgtatgcatgtaagtgtttttgtcctaatgttgctactcccatggcaaagaaaaaaaaaaggaatgaaaaaaagaaaaaattttggaaaaaaaaatcaggctcatagcagctactgtgtaaaaaattccccctacttctaatttgctgaatgaaaaaaaaaaaaaaaaaagtggggtttccttgtttggggggctccggcaaaaat

SEQ ID NO: 13756 - DNA, 490 bp, Homo sapiens
  misc_feature (1)...(490): n = A,T,C or G
cgggattgacccaatcgagaccctaggaagngncgnggaattctctccctataccctgaggctctggatctccctacactgtgagggtctacagggggcaacgtctaccttgcccatccttgcacagtgcttgacacgtagtacgcactgagagagatttgtctgactttgtgctgggccctgggcccatcacaggatcctgacatgccagcgtcaccctgacacccagcatgtgatgggtgctccccgcctatgggaagacagggagaaagggaagaaagaagaaagggatggatgaatgaattaatgaattaaagacagatatcagtggtccctgccctaggggatattaccattcagaaactagacatgcatcaagtcatttgaaacaatagaagacagaattttatttaataagaaacaaaggagccagacagatctcctggttggacagggatggggagtctgggtggcttcagcatctcactgg

SEQ ID NO: 13757 - DNA, 473 bp, Homo sapiens
  misc_feature (1)...(473): n = A,T,C or G
gggagggcagggcccccncncaactgaactgcatacgctagaccangcggtggaattcagaaaaaagaaggggtagggatttggctatgccttcactacaacattagaatattgtaactcacatgccttctaaacgtgaactaagatttcctttggcaatatcatattctaaaagtaataaattccaatacaagttacatacatttaaaaaacattttacagattttatggtactaatgaaatttacagtgatagaacaaaagaggattagtagaaaatacattattagaatataaaaaatgttattactgaggaaagggaggagaggacaagtgtaataaatcaaaattgacctcaaaagaaaatgtgtaacagagttgaggttgttaaaacagaaaaggttctgaataatgaagattaacctaatgcagaattgctaggtaaagaggtcaggggaatgctaagccagttct

SEQ ID NO: 13758 - DNA, 442 bp, Homo sapiens
attagtagattagtagtccatgcggtggaattccagcagtggtgtggctgcacagggcgcactagagagagctcagcacccctgctgcccgccagcagagcccgtgctgagggaatgccgcacagatgctgatgcactgggtgaaatttctagtattgaacgtaaaggtgtacagtgtcttgctgttattttatgatggaaactgattttgaaaccaaaaatagctaactaactttatttaaggaaaggatattaatttgtactaacagagggtgaaagctgttcacatttgtcaacaaaatctgcttgctgcagtagtaacctcaagtggttaaaacttgatttcccgagaaaactaaaacctttgtgcctaaaactgatgacttgagttcaagtgggatgagcaagaagatgtgttatcttgttgttcaacagtattgag

SEQ ID NO: 13759 - DNA, 492 bp, Homo sapiens
  misc_feature (1)...(492): n = A,T,C or G
cggctgtatgagccttcctgagaccctgcgaagngccgnggaattcggccaatcaacgagcgcccgcgcccccatccccatcccgtggagtggtcggcgacaagatggcagcagcgtgtcggagcgtgaagggcctggtggcggtaataaccggaggagcctcgggcctgggcctggccacggcggagcgacttgtggggcagggagcctctgctgtgcttctggacctgcccaactcgggtggggaggcccaagccaagaagttaggaaacaactgcgttttcgccccagccgacgtgacctctgagaaggatgtgcaaacagctctggctctagcaaaaggaaagtttggccgtgtggatgtagctgtcaactgtgcaggcatcgcggtggctagcaagacgtacaacttaaagaagggccagacccataccttggaagacttccagcgagttcttgatgtgaatctcatgggcaccttcaatgtgatcc

SEQ ID NO: 13760 - DNA, 482 bp, Homo sapiens
  misc_feature (1)...(482): n = A,T,C or G
cgtgactgagctnattgaggccgtcgaaacgccaaatctgtttcagttttaaggattgaattcaaatgtgtaaatagcttaagagtatccggcataatcactatagaagcgtctgctattactctgcagagtggcagtggtgaattatctgatattttttccttaacttgaatagcaatccacattacaatggataacaatacccattgtttatgatttgaggcatccaattataactgtattattgaagtgttatcaaattaccaaggctgtagggtatatttagtattcctagttaaaggtttgaactaatttgtatactagggcatgtttcttaatgggaagggggtgaaggttataataaaagtcacccctaatgcttgtttaaaattaaagaggaatttgtgggcctgggaccaaccttagacttatccaggccaaggtatgttgtttgacgaacaccgcangtgatcctgatgtgc

SEQ ID NO: 13761 - DNA, 441 bp, Homo sapiens
  misc_feature (1)...(441): n = A,T,C or G
nttcgagatcgttagtccagtgcggnggaattcctttaaaattcagcttggaccatagacacctccaggatcttgtttatgttctgctctcaattgaccaagcactgcgttttgcacaatcagaagtctcacaaaagcaaacagttatgactgcatatctgatgtttatatcctataaaatttcaggaagattcagagtcaatcttctatttgtacatgatgtagacaaaattagctgctccaattgttagacaaaaaattgccattggattacactaatgtgctcatctgttgttttaaaagtttggtatcaggcggggcacggtggctcacgcctgtaatcccagcattttgggaggccaaggtgggcggatcacctgaggtccagagttcaagaccagcctgaccaacatggtgaaaccctgtctctactaaaaatac

SEQ ID NO: 13762 - DNA, 457 bp, Homo sapiens
  misc_feature (1)...(457): n = A,T,C or G
ggacctgatacatatgaagngnctgagaaccatcatacanggccgcnncttctctgagtccatgaaatgggaaggatctgtccctaccttcttcctttccagggctctttggagtcagatgagataatacaaattcccagcatccacatgattgcactggccaagcattgtgttaggtactttgtagaattctgtgaagtgggtattgaagccctaactgtatagctgagaaaaatgaaactcagtgaggtgatgtcctcaaggtcttagggcaagtgcaaaacataaaccagaaggagaaccaagttctctccacttcttcggcctgggatcttaacttgttatgctttattgctgctgaattgtgcaagtgtatttgccaaatgaatgaatgaaatgtaacgtttcaggaaaatggtcgctgtactctattctataaaaggacagctgagctttn

SEQ ID NO: 13763 - DNA, 487 bp, Homo sapiens
  misc_feature (1)...(487): n = A,T,C or G
cggatgagctctttgagaccctacgaagnngcgngaattcgtaattctggccagtaacaaagaatctttagcaaaccagtacagccattagttgcttgtttggcttttgaaatgtggaacaatcactttggaacctttgttactgtgtttaataactccattttggaaaccgctccttgcagcttgcacagcatccctgcatacgtatttcttgtattctgtaataaatcctttcttagaactgcagttgcacatgcatattttttaatatgtactcccacagcctcgagtatcacacagacatacacacatgtgaagaaggcatagttggttttctcattgcgtctataccaaatagatatagagggaaattggattaaataagatatttttaggtgaagatcagtaggagaacacaagctttagcaggtggttgttcagccctgggattntcacagtaagggctaacagcaaggatgggactgtg

SEQ ID NO: 13764 - DNA, 444 bp, Homo sapiens
  misc_feature (1)...(444): n = A,T,C or G
gatgacgaccctactgacgaccttagacagnctggtggaattcaggggaaccaagagaaccacgtagaatcctcaaccgtgcggaccatcaaccttcgagaaattccagttgtctttttcccagccgcatcctgcctgtagatggccggggaaggctctagaaaaggggcgcattgcgatccaaccatcggcagccgattccgtgtcttgatcacggggtgggagggaaccgtggcgtccctgcgtggggcccatgggtgagacactccagtactgagacctaaagtccagatgcttgtaggagccaagtcgcgtgctaagtatttatttataacaactgagtcatgcttcactaacaaagacccatttacaacagcatcaaaaacataaaatactcaanaatccgctcggccaaggaggcggaggacttgtacaatgacaacn

SEQ ID NO: 13765 - DNA, 453 bp, Homo sapiens
  misc_feature (1)...(453): n = A,T,C or G
atagaaaacctcgatgaccttagacagngcggnggaattcatctcaggaattgcaggggaaagagggggagcgtgttagtgtaggctctccggagtagcagaaccaacgcacagaggagatttaggatgaggaatctggtttatgtgactctgggggctgagaaggcccaccatctgtgttgcaagctggaaacccagggaagcctgaggtgtgattcaaactcagctcaggtctggaggcctgagaaccagggcagccgatggtggacatccagtccaggggcaagagatgacgagatgtcccggctccagtggcgaggcaggaaatgaggggtgaactcctcctccctctgctgtctgttctattcaagttcttgagggattggattatgcccagccacttggggagggcagtccaccttcctgagtccacaattcaaatgctgatctaan

SEQ ID NO: 13766 - DNA, 441 bp, Homo sapiens
  misc_feature (1)...(441): n = A,T,C or G
nttagaagatcgttagcccatgcggnggaattccagtcactgtgcctgaagcagaaaatcctagagacagtcttgtgctgcctccaacccagtcctcttcagattcctcacccccagaggtgtctggcccttcctcatcccaaatgagcatgaaaactcgccgactcagctctgcctcaacaggaaagcccccactctctgtggaggatgattttgagaaactaatatgggagatttcaggaggcaaattggaagctgagattgacctggatcctgggaaagatgaagatgaccttctgcttgagctatcagaaatgattgatagctgaaggtggtagtgaggacactttaaaaaaaaaatcgccaaaaaactggacttagtttcatctattgtaacatttacctgagatgatcatttctttagtctagaatttgccccaa

SEQ ID NO: 13767 - DNA, 447 bp, Homo sapiens
  misc_feature (1)...(447): n = A,T,C or G
cttcgacttccgtgatccctagtccgtgtggtggaattcgataaacacttactgccagaacatcaaggagttcactgcccaaaacttaggcaagctcttcatggcccaggctcttcaagaatacaacaactaagaaaaggaagtttccagaaaagaagttaacatgaactcttgaagtcacaccagggcaactcttggaagaaatatatttgcatattgaaaagcacagaggatttctttagtgtcattgccgattttggctataacagtgtctttctagccataataaaataaaacaaaatcttgactgctaaaaaaaaaaaaaaaaaaaaaaaaaaaaaaaaaaaaaaaaaaaaaaaaaaaaaaaaaaaaaaaaaaaaaaaaanaaaaaaaaaaaaaaaaaaaaaaaaaaaaaannnnnnnnnnnnnnaaaaaaaanacccccca

SEQ ID NO: 13768 - DNA, 408 bp, Homo sapiens
  misc_feature (1)...(408): n = A,T,C or G
attggggaaagggaagtcatgctgttaataaaatagtgaggcatgttgtataaagtgtgttttatgtctcaattgaaatgttatagagataaatttaaaatagatcatgatgggttttgaatctgatttctaattttaaaatgttatgagcttttgttgctttcctatttcatacacatttctttatgggtttcacttagactgcatgaaattgcagatgccaattaccttttaacaaaattaaattcacatatatgtataatttgcatgtatatatccatggaattttttattctacacgatatattattttaaaatggtttttcaatgacaaaataaaaagtatttttctattttanaaaaaaaaaaaaaaaaaaaaaaaaaaaaaaaaaaaaaaaaaagccgccc

SEQ ID NO: 13769 - DNA, 410 bp, Homo sapiens
gaaaatacaaaaaatagccggggatggtggtgtgcgcctgtagtcccagctactcgggaggctgaggcaggagaatcgcttgaacccgggaggcggaggttgcagtgagccaagatcatgccagtacactccagcctggcaacagagtaagaccttgtctcttaaaacaaaaaaaaaaagatttttttcaccccgggcgtgtttgtttgaaggccgctataaaacccggtttttcccccagggggggtttttatttacaggccttttggtgggtggcccctccccgggttttttttttgctgggggggggcgcccgccccatttttttttttaaaaaaagaggaaaaaccttttcacttgtcgaggggggggtgttcattttgggaattcaacatgcatcacttccttga

SEQ ID NO: 13770 - DNA, 456 bp, Homo sapiens
  misc_feature (1)...(456): n = A,T,C or G
ccttgaaatcgatgtacactaggcaagngcggtggaattcctcgataatttttgagacatcaagattttttaaaatatcaatactggaaagatgaaaccttcaaattaaaacctaaaattgattagaaagaaaagtaaaatattaatgcagtaaatttaggatggttacagatactcaccatcaacataaataaatggagttctaggataaattatttgtggaatactaatggccaagtcacataagagtaaaatcttttggtgaggagacacatttgacaactgctaaagaattaactaaatttgtctttctaaatagttttctttataaagtaacagaaacattgtgaaaggataaataaatgactgtcataatgacttaggatgttgtaagaatgtctgccacatttattggttatttctggtgaaatctgaaggaatcgatacatctgataa

SEQ ID NO: 13771 - DNA, 452 bp, Homo sapiens
  misc_feature (1)...(452): n = A,T,C or G
nactgagctgcatagcattngcggnggaattnctgtgggcacacaaatgacctgctgatgttaaattaactgacccgtgtatgtcataaggtttctctcaattctgttcacactcttggaaaaatgcctcagaaagttttcttagcccagcacctgtgtattaaccaattagtaatatacatacaggatatacaagcagaagtgtgatcacctgtgcaaccagaatctggcaaatctaaggtcaaacacctttcctttgaccaagttttctctcttttagtgtcactgtcaatggcgctacatggactttgtaataaccctttgaggcacatagctgggtgccatgtagaacatgtatctgttacgataagtgtgtgcccaagaaatcagaagaatggactttaatctcattttagaaagtatgatattaaatgatttacccaagccatact

SEQ ID NO: 13772 - DNA, 408 bp, Homo sapiens
cttgttaaactctgatgtagaagtctgggagaaaaaaagcataggttaagaggcagatttaatactattggtgtgtgtttttatgtacataaatgataacttcccgacaattcctcaaatgtaggtctaatgggtgtgataaagcgggggggtagatattgctgaaagctactttggtcctttggtttactctgttattggaccactcctattttacctgtttcgtacaaaatgtatcaaggctgtggaaacattaagggtatcagtcccctgtggacattgtcagaaagaaatgaacagtaatctctctctctctctctttcctctctgcctatattgggataaagaaatatgagatcatagattctgaaagatttaaaaatatatacttactgtcattgtttatca

SEQ ID NO: 13773 - DNA, 459 bp, Homo sapiens
  misc_feature (1)...(459): n = A,T,C or G
agagaaaaaaantttgtagacactagtacgtgcggtggaattcctgggatagaggacagactgatagtttctttctttcatatcacatgtatagagaaataattatatcagaaactcacaaacctagacatggaaaaacagattactgtctattgtcagcatcattttcatctgtaagtcactactggaatatatttttcttttaatttccagtgactttagaatacacacagtttttccgacttttcaaaaatttgattaaatggttttatagtataatattgggaccccataccgttagcccttgtatgtataccaacactgccaaagtaaaacattaggtcaggcatggtggctcaggcctgtaatcccagcattttgggaggctgaggcaagtggataacttgaggtcatgagttcgaaaccagcctggccaaaacagtgaaaccccgtctctac

SEQ ID NO: 13774 - DNA, 457 bp, Homo sapiens
  misc_feature (1)...(457): n = A,T,C or G
attgacgcccattgatgacccttagnccangcggnggaattcaaaattgtaaacataaaagcatactgtcgcatgcatttcagtcagtgaattcaaagtgcatgttaggccgggcacagcggctttcacctgtagtcttggctgcgtagaaagctgaggcaggaggattgctggagccctggagttcgagcgcagcctgggtaacataggcaggccccatctctaaaataaataaacttttaaaaatgcttgttagcagcataaaattgtgtgggaaaatgtttggttcgttttaattaaaggatgtagagagctgctggtagacagcaaaatacttaacaactattgtgctgattgtcctgtggtttgatttaccaacctagtcattgtagaattagatatataagatacagaattgatgtggctacctgtattttgactttgtaacattttaatc

SEQ ID NO: 13775 - DNA, 501 bp, Homo sapiens
  misc_feature (1)...(501): n = A,T,C or G
gaggccgcccaatgagaactgagtcactgtggtggaattcgttgaaaaaattgcctttgttttgaaattatatcacctgtgttctgaactaaaatgatgggagttcattttgtatttactttgcagtaagtatcatgtaaatatgcaaatgttgaatgtaatatagattgtgtcctcattgagtttttgggtgatacagtttataaatataacaattatacaccctcatacattcgtctgattttgagcttgtaagatgagaactgctttttacacatttaataaaaaaaggtctctgaanaaaaaaaaaaccccaaaaaaaaaaaaaaaaaaaaaaaaaaaaaaaacaaaaaaaaaaaaaaannaacanaacnnnnnnnccnnnannnnnnnccccccccnnnnncccccccaccccnnnaannccccnnannccnnannnnccccnanaacaaaacacgaaccatccctccccaccccaangggaaaaaaaaatataat

SEQ ID NO: 13776 - DNA, 462 bp, Homo sapiens
  misc_feature (1)...(462): n = A,T,C or G
aggaaaaaaaantttgtagactctagtancgtgcggtggaattcatcaagaaaattttgattcacacaaatgtaagcaaaaataataggttttaaacatacatctcaggaaattctttaattagagatagctaaagttattcaaggtctatacaaaaataagttatcctggtagtggaagttaatacataagcagtctccagtgtggtaaagtagggtatgtaacacatcagaatgtgcgtttttattaggttttaaaatatgcacgtataaaaactaaatttgaatcaaacccttttaactcacctccaagaagctagactttggccaggaatgggctaaaaaccactggttaacgatgtgacagttatgatcttggagattggaaatctttcttccacattagagttctttaccttaattccttattctgaaaaattgtaagattttatgaaggtttgaa

SEQ ID NO: 13777 - DNA, 477 bp, Homo sapiens
  misc_feature (1)...(477): n = A,T,C or G
atggttccnnnaaatgatnatcatcgatgacataggaagngcggnggaattcccctaattacaagtgtcaccatatagttggggcttaggtacttgcttacaggaagagcaattccctagcaaaggtcattagctcctaaggcactgagtcaaagtgacagccctgaaggaaattgcactccagccctcctccaggatgtctaataagatgggaaacttggatgcccagccattttggtgacctgagagtctaactactccagttagacctaagggcacaaatgcagaattcatgaccttgtagttgtggcagggtctaggaagtcctctctccccaagtagaaaatattctcttgccattcctgaaattccacattcatataatggctgtgcaatacatgcttctcaataagaaaattaactgcatgtttactgtgtgctgatcacatcagatttttatgtttaaaaaaatctcat

SEQ ID NO: 13778 - DNA, 442 bp, Homo sapiens
  misc_feature (1)...(442): n = A,T,C or G
ctcgacttcgtagaccttagtcagngcggtggaattcgggatttcagctgtacagcttgtaaggacagttggccacaccactacaaaccacttaatcccagcattgtgcacaagcagtcctcagacacttcccatgaacaattcctgcctgacaaatgcagtgcacctcaataatgtcagtgttgtttctccagtcaatgtgcatatcaatacacggacttcagcaccatcgccaacagccttaaaacttgccacagttgctgccagtatggacagagtgccaaaggttactcccagcagtgccatcagcagcatagcaagagagaaccacgaaccagaaagattgggcttaaatggaatagcagagacaacagtagctatggaagtgacataacctaaaacacgtggctctgacctgtgctgatggtgtgcagtcattcat

SEQ ID NO: 13779 - DNA, 443 bp, Homo sapiens
  misc_feature (1)...(443): n = A,T,C or G
ntttgtagatcgttagtccagtgcggnggaattcggacaagttccgcttcttcagcatggtgcgcgacctcatgctctggatggaggatgtcatccggcagatcgaggcccaggagaagccaagggatgtatcatctgttgaactcttaatgaataatcatcaaggcatcaaagctgaaattgatgcacgtaatgacagtttcacaacctgcattgaacttgggaaatccctgttggcgagaaaacactatgcatctgaggagatcaaggaaaaattactgcagttgacggaaaagaggaaagaaatgatcgacaagtgggaagaccgatgggaatggttaagactgattctggaggtccatcagttctcaagagacgccagtgtggccgaggcctggctgcttggacaggagccgtacctatccagccgagagataggccag

SEQ ID NO: 13780 - DNA, 499 bp, Homo sapiens
  misc_feature (1)...(499): n = A,T,C or G
tgcggnnnnnnttatggagactcactacgaacgccnggaannntnnntntaatatcacagacctgtttttcacaaattttacgcattgataatatatttatctgttaaaggaagaaaatttttcttctaagtagcttctttttctgagttcagtctattactgcaatacaatatttataaacctattggcagtttgccccagtaaaagtagtacaagatatttacaggaatatcttaattcacaattaaagtaatgataattgtttgctttatataatatgttagttcttctgatcttagagtaacccactcctttgggtcatatattcttattcatatttatctatctacgtttacgtcatgttatttgcagtatagtaggatagtttcttggtgtatgtacagtctctaaagtctaagtattttttggaatatctagggacatgaaactcatgcataaaaatcaattataaaatagtacatgatttagaatcaaatg

SEQ ID NO: 13781 - DNA, 503 bp, Homo sapiens
  misc_feature (1)...(503): n = A,T,C or G
cgagggtgnnnnnaaccgttgatgtcggtagngacgngcaannntanagtnnntnctaacaagaagcgaggtggttgaattatggaagcacttcttgaatcttttttttccatgctcttattgaattttttcatccgctctgtttagtttgatattaaagcacaattaagaggccttagttcttcctatagaacttttaatatggcaaaagctatattgtctaaatttcagtactgaggcaaatactgagtagtgttttaaattcagaaatagagcttctattatgaacacatgagaatgatttttttctcttaatcattattaaggaaatattttaatttcatggtcatataatggcgagtaagaatacctgattgtttccttttctgttctagtaactcagaggagatacgtgttttatttgtgatagcaaattcctacatgaacattaggcaagtggtatcattatcatgccagctgcagcctcttgccttgacctgcat

SEQ ID NO: 13782 - DNA, 441 bp, Homo sapiens
  misc_feature (1)...(441): n = A,T,C or G
ctcgactttcgagacattagnaagngcggnggaattccacgattacagtatagcctacattttaaaatatgagtcctttgggaaaatacattaaaattctctctctctctctctctctctctctctgacacacacacacacacacacacacacataattttagacagttttgaaacaagacttttaaaaaacctattttaatcctaattgtatttctctattcctgaagagttctgtaacatgatgtgttgattgggtgtgttaatgttggtccctggaataagattctcatcatctccttcaatcaagcagtcccactgatcaaaatctttatgaagtcctaaatgcttttgtaagaatgctaatgaagctttgttgctaagatcaatagctgcatttgaatctatgtctccctttaatttgagcatgtgtccaattatt

SEQ ID NO: 13783 - DNA, 501 bp, Homo sapiens
  misc_feature (1)...(501): n = A,T,C or G
ggaatcgaaaaccccctggnnnnnnncnaatcgtagtacactagtacagngcggnggaattcagtcagaagaatcatttgtattaaatgagacaaagaaaaatatagttaacacagatgtgccccatcaacatccagaattacttcattcatcttccttggtaaagccaccagctcccaaaacaggaagtatacaaaataacatgttaactcttaatctagttaaacaacatactgggaaaccagaatctaccttggaaacatcagttaaccaagatacaggtagaggtggttttcacacatgttttgagaatctaaattctacaactattactttgacaacttcaaattcagaaagtattcatcaatctttggaaactcaagaagttcttgaagtaactaccagtcatcttgctaatccaaactttacaagtaattccatggaaataaagtcagcacaggaaaatccattcttattcagcacaattaatcaaacagttgg

SEQ ID NO: 13784 - DNA, 483 bp, Homo sapiens
  misc_feature (1)...(483): n = A,T,C or G
tgtncncgaacgcggccgncccgggattgagnccccattgagaatccttagaccangcggtggaattcggctgatgatgtcaggagcaaagtcagcagagcaggccagggagaaaagcccctgtcacgggtttggtcactgggaggccattgctgaccttggtgaggacagcagagggtacagatgcctggccatagggagcacagtgaggtgggagggagcaggccgggacaaggagggagtgacggttgggggagagtgagccttttcttgctggagcagcaaagccagaaggaataacatcgcagcagagaggggccccacaggtcagcaggaggcaggctgagctgcccaccggtgcctccctgtgtcttgcagttattggcatgaagtgtggggcccaccatgtcggctacatgttcctgggtgaggtggccctgggcagagagcaccatatcaacacggacaaccccagcttgaaga

SEQ ID NO: 13785 - DNA, 478 bp, Homo sapiens
  misc_feature (1)...(478): n = A,T,C or G
naggcgggccgtctgtnnnnnnaagcctttagnanagactnnncnntnnnttnaangaaccngacgcaggagaattgtgtgaacccangaggtaaaggttgctttgtgctgagatcgngccactgcactccagcggggagacagagtgggactccatctcaaaaaaaaagccgtaaagatcaagatcaagtagcactgggctaggcttatgtttctccctggcaaaaatcagctggagctgggtttcagtggggcattactggaggtgctattcagttcatcacagtcctttcttgactcagttccttgtgtgcattatgtgtctggtccctttaagtgttttaatttttgcctcctgacctaaaatggtagtttctattttaaattgtgttttagggtcatgtgggtgctgaaaaagaaaagggtctagttgagtgcttttaaaaggagacaattcaagttgtgtctatcanacagt

SEQ ID NO: 13786 - DNA, 478 bp, Homo sapiens
  misc_feature (1)...(478): n = A,T,C or G
agccaccgancgcggccgnnccgaactgagacanttgatagtcatgcggaaancctctaaggaaaaaacctttggaagacttagtctgtaaactcgcagatataagtatttattatgtctatgaacgaaagtcagagcaacatctaaggtttgtttctactctgcttgactccttttcttcaagccgagtatttaaaatgctacttggtgatgaaaaacagagtattgtccaagccaaacctcttgaaatagccaagcttgtacaaaaaaatcctgcggtgcagtttttataccacaaactgataggttggctaaatgaagatcaaaggaaggattttggtttcctggtggacattttgtacagtgctctccggggctgggacaatgatatggaaagaaaaaaagtcttggatgatctaaccaaggtggacttgaaatggaattctcttcttaagattattgaaaaggcatgtcctag

SEQ ID NO: 13787 - DNA, 477 bp, Homo sapiens
  misc_feature (1)...(477): n = A,T,C or G
cccccaatcgagaccactatgnagtctggtggaattcccgctgcaatgctgccgcccaatgtcatagacactgatttcatcgacgaggaagttcttatgtccttggtgatagaaatgggtttggaccgcatcaaggagctgcccgaactctggctggggcaaaacgagtttgattttatgacggacttcgtgtgcaaacagcagcccagcagagtgagctgttgactcgatcgaaaccccggcgaaagaaatcaaacccccaacttcttcggcgtgaattaaaagaaacattcccttagacacagtatctcacttttcagatcttgaaaggtttgagaacttggaaacaaagtaaactataaacttgtacaaattggttttaaaaaaaattgctgccacttttttttcctgtttttgtttcgntnttgtagccttgacattcacccacctcccttatgtagntgaaatatctagcta

SEQ ID NO: 13788 - DNA, 464 bp, Homo sapiens
  misc_feature (1)...(464): n = A,T,C or G
aatggagaccctatcgtagaccctaggacagngcggnggaattcgggatgcgtatgaccagctctgccctcaatagcggctcaacacagggtgaccttcattcttccgttaaagtatctgccccatgaaagcagggatttgatgtttttctctcccctccttcatccacttctgcatgcccagtgcttaggagagtgcctggcacatagaaaggttcttggataaacaagctctgacgatcattcccaaacaagagttcaaaaatgttttccgcaatagcaatgatatggacggaaaggatgccctcctgcactgatgcctctggaggaccacactttccattcagagacacgctcagcactcaactcatgctgcacacccggccgaccccagtaccgacactcacagaatgcaggttggagagagatgccgacttccgaggaggtgtcttcttcggactgaac

SEQ ID NO: 13789 - DNA, 368 bp, Homo sapiens
gtaatcagaaatgttgattaccagaaagagaaggagtatgacatagtgaataattttttaaatagtaataaagttcaaattattgccaatagatggaaaattatgaacagactatgccagtatcagaaaaatataacctcagcttcatttactggaaataaaccagtctattttagtagattctttgttgctagccacaggaacttttgtaaagcttaatattttattctccttcttattccataaagctctttaatttttgatacgtgaaatgtgatcctgcaatccagggactttgcttttaactctcctattaatcacctctgatatcaaatacattcttctagttaagagagagagaacattta

SEQ ID NO: 13790 - DNA, 402 bp, Homo sapiens
  misc_feature (1)...(402): n = A,T,C or G
actcagtaaactaaaaattaaaagatggaataggatgaagagacattttgatttattcctctcacctatccatattttatgatccttccaatctccattttcatttcctttattcaggagaaccctcaaagcaataaaaaagaagaactggaaagtttggacagttcctgtgatcagaggcaagatttgcccagtgaacagaataaaggtgcttctttggatagctctcaatgttcgccctcccctgcctcccaggaagaccttgaatcagagatttcagaggattctgatcaggaagtggacattgagggcgataaaagctattttaatgctggatgatgaccactggcattggcatgttcagaaaactggatttaggaataatgttttgctacagaaaan

SEQ ID NO: 13791 - DNA, 444 bp, Homo sapiens
  misc_feature (1)...(444): n = A,T,C or G
nttgtcgaccatagttagtgtggcggaattcgcctgatccagatgctgggggagcctcttgtcccccaactccaagacaaagtgcacttgttgaagctcctgctcttctatgctgcggacttgaaccctgatgcagagccctttcaaaagggctggagcggctcctgagggcctgccaagcactgaatgccaagaatacctcctgaactctctctccaactgctcagaagctctaaaagcatgaaaagtggttaaaatcttacaggaccaaacctgcattatttaatcagtaggttgtaatttctaactctagtaaatatctttttttaaataatcctatcctagcctgttctcaaatatggcttaaatatacaaggtatatatattttttaataaattatttatctatacttttttgaaacaggttaatactctgtgcatcan

SEQ ID NO: 13792 - DNA, 458 bp, Homo sapiens
  misc_feature (1)...(458): n = A,T,C or G
ntttgagacccattganggcgttgaaannncacgacggagcaggtgaccaggggaacagatgtgaactattgattaaaactggcggataaggctgtttactgaaactatgcacgagttaaatggagaacagggaactgaacatacatgctgagtcctctaagagaaatgtataactcactgtatccaacagacccttgaacaaaagacagattagactgggcgcagtggctcacgcctatattcccaacactttgggaggctgaggcaggtggatcactataagccgggacttcaagtccagcttggtcaacatggcaaccaacacggcaaaaccctgtttctatcacaaacaaaaaattatccagacgtggcggtgcatgcctggagtcccagctactggggaggctgagatgggaggatcccctgatcccgggaggcggaggctgtggtgagccat

SEQ ID NO: 13793 - DNA, 455 bp, Homo sapiens
  misc_feature (1)...(455): n = A,T,C or G
attgancatcgtagaccattagtccagagcggtggaattcgtttcttgatgcatttcacagtaagtggtgaacatccgcttgtgcatgtcgctgactagagttcagcattaaaaacagagggaattataatgacatctgactcgaggcaggggagaggcacccaggcaggtggacctggctgaagttggaagagaaggttccttttccctgctgtttctgcgtctggaaacttctggggccacgtctgggtaacttcagggtggggcatgccatcccacagggcaggccgggctgctgcaggccagtcttccttaagaggcccccagctggtgccctcaaacactgttgaggctgcattgctgttgctgttgttgttgttattttatttattttttgagacagagtcttactccatcacccaagctggagtgcagtagcacgatgtcggcttact

SEQ ID NO: 13794 - DNA, 489 bp, Homo sapiens
  misc_feature (1)...(489): n = A,T,C or G
gggtggaattgagacctgaatcaccgtggnggaattccgaattatacggaagcgtctcctcattgatggagatggtgctggagatgatcggagaattaatctgctagtgaagagtttcattaaatggtgcaactctgggtcccaggaagagggatatagccagtaccaacgtatgctgagcacgctgtctcaatgtgaattttcaatgggcaaaactttactagtatatgatatgaatctcagagaaatggaaaattatgaaaaaatttacaaggaaatagaatgtaccatagctggagcacatgaaaaaattgctgagtgcaaaaagcaaattcttcaagcaaaacgaatacgaaaaaatcgccaagaatatgatgctttggcaaaagtgattcagcaccatccagacaggcatgagacattaaaggaactagaggctctgggaaaagaattagagcatctttcacacattaaagagagtgttgaaga

SEQ ID NO: 13795 - DNA, 475 bp, Homo sapiens
  misc_feature (1)...(475): n = A,T,C or G
nattgaaattcattcccatggccangngcgggaattcgccctgcagttgagactgccaaatcccagcaccaccgcaaagcaggtctgctgtccagggggactgttcatcctttcctatttgtctactaagtgaggatcatgataactacttcgcagtctggttaaaggagctacatgactttgataccaagaaggtacttagaatggtgcctggtccagcaagcacgctatgactcagagatgaggggggcaacaccatgcctccctatccaggcgccctcctcctttccagccagtgatccaaccccttcacaatgcaacccaagacccgcagccctgcccatggggctccgcccaccactgccattgacgaacatttccgggctactctgttgcactctcactccgtcctctacccacatttcttgagtgtcaactctgtgtggatgctggtgtacacggcagaaccagcccg

SEQ ID NO: 13796 - DNA, 448 bp, Homo sapiens
  misc_feature (1)...(448): n = A,T,C or G
nttggggaccccngtttgtccgaccctagtccgtgtggtggaattcccgccgtccgcgccagccgccccgagccgactgcccttctgcccccaagatgtggcacagcgtcgggctgactctgcttgtgttcgtggccacgctgctgatcgtcctgctgctgatggtgtgcggttggtattttgtatggcatctttttttatcaaaattcaagtttctccgggaactggtgggagacacaggatcccaagagggagatcatgagccttcagggtctgaaactgaagaagacacttcctcctctccacacagaatcagatccgctcgccaaaggagggcacctgctgatgaaggccacagacccctgacatagtcctgtacttgtgaaggatgaaaaggcagttgccagcttctgtcttttactgacttcgctttgaaatttactaatgg

SEQ ID NO: 13797 - DNA, 443 bp, Homo sapiens
  misc_feature (1)...(443): n = A,T,C or G
nttgctcgaccctagttcgtgtggcggaattcgataggtgagccactgagctctgtgttgaccttgaggggcctggctgggggcccccaggctccatgccttcttgggagggtggccgccaacgcctttcctgtgttatggcaacagggagtgggcatctcatctgcctgtggtcagctctcagacggcagggagcggagctgacgttggctgtgcttggtcaccgctgccatgccgcagaggatgcgcctagctgggctggggccacacgactattatgttggccttgaacggggactgcagagccctcagtttgtctcccttgttcctctgtggctgaggtgggagggggagagggggggnnnnccccagcaagaaagagggacaggagcaccccaggcaggaccaaggagncgggaggcccctgccttctgtcctccatg

SEQ ID NO: 13798 - DNA, 447 bp, Homo sapiens
atagaagacttgtagtccgtgcggaggaattcgaatcccaatttaactcatgttatcatcattagtgatctgtgttgtagaacatgagggtgtatgccttcagcctggcaagttacatgtagaaagcccacacttgtgaaggttttgttttacaaatcacttgatttaacacactcaggtagaatatttttatttttactgttttatacccagaagttatttctacattgttctacagcaagaatattcataaaagtatccctttcaaatgcctttgagaagaatagaagaaaaaaagtttgtatatattttaaaaaattgttttaaaagtcagtttgcaacatgtctgtaccaagatggtactttgccttaaccgtttatatgcactttcatggagactgcaatacgttgctatgagcactttctttatccttggagtttaatcct

SEQ ID NO: 13799 - DNA, 454 bp, Homo sapiens
  misc_feature (1)...(454): n = A,T,C or G
natagangatcgttagnccgtgcggnggaattcgaatgttaagagcaaacattctccacagaattagtcacctctctctctgcttttctttcttttttactgcttcaaaatatcaacccaagcatctggcagagactcttagagacttgaaagaaccagatagtggcatgcactttgtcctcgtctggaaagacaaagagggaaactaaacgtctggccggatgctggctcttggaaggcaggagtggaggcgaaatttactcctctaccatgagctagtagtgggctctcgccttcatacttctctttccttcccgcctttctgcagctttaggtttcaggcctctcagtcaagagggagaaatttaattgtgttaaattcttggccctggacaagatcattttcagtgccaaagctcgttcaggctttccagggagacccggcacaggaagc

SEQ ID NO: 13800 - DNA, 455 bp, Homo sapiens
cactgattaccctaggattgtgcggcgacttcaaggggaaagggttggttaggcaatcattctagggcagaaagaagtacaggataggaagagcataatacactgtttttctcaacaaggagcagtatgtacacagtcataatgatgtgactgcttagcccctaaatatggtaactactctgggacaatatgggaggaaaagtgaagattgtgatggtgtaagagctaaatcctcatctgtcatatccagaaatcactatataatatataataatgaaatgactaagttatgtgaggaaaaaaacagaagacattgctaaaagagttaaaagtcattgctctggagaattaggagggatggggcaggggactgttaggatgcattataaactgaaaagcctttttaaaattttatgtattaatatatgcattcacttgaaaaactaaaaaaaaac

SEQ ID NO: 13801 - DNA, 403 bp, Homo sapiens
gtggctcacgcctgtaatctcagcactttgggaggccaaggcgggcggatcacgaggtcaggagatcgagaccatcctggccaacatggtgaaaccccgtctctaccaaaagtacaaaaattagctggctgtggtggtgtgtgcctgtagtcccagctactcaggaggctgaggcaagagaatcacttgaacccgggaggtgaggttgcagtgagccgaggctgtgccactgtactctagctctggcaacagagcaagactccgtctcagaaaaaaaaaaggttctgaaagtggtcataaactcttgtatcacataataaattaaaactgcagctgtcccacggctaatacaagagctacatgtaaacagagaaagttgcctgatggcattagtaagtcgttc

SEQ ID NO: 13802 - DNA, 489 bp, Homo sapiens
  misc_feature (1)...(489): n = A,T,C or G
ncctcgtagaccactagtccagngcggatggattcgcgatatcagctgcctctaccaaccaccctctatcagcagtggcccaggaaggaggtcaagcatcttcggccgatatttaaacatgggcagcttccttcaggatgatcaccgaggctcccgtgactttgaactccctactctccagaatccaggggctatagcgatggggactgcggaattacgagggctggctgttttacaccggtcacattttctattggcagtgactgattcatgggaaagggctttgaaggaactacttcagtgcacacacaaggtacgaacctctcaggcctttcgaagaactttcataattcatgaaagcccagttctgaagattcacgtatccatctggagacctacaggaagaaagtgattgggttcctctggttcttgcctgcttcactgtggatgggaagaggtgacaacctcagtctccctttgggacctgtg

SEQ ID NO: 13803 - DNA, 462 bp, Homo sapiens
  misc_feature (1)...(462): n = A,T,C or G
aatcgaattgcgtcaccattgccangngcnggaantcccccacttgcccttcaaggtctacttcagtttgataaagctataaatgcagcactggctcaaagggtcaggaacagaatcaatttcaggggctctctaaatacgtacagattctgcgataatgtgtggacttttgtactgaatgatgttgaattcagagaggtgacagaacttattaaagtggataaagagaaaattgtagcctgtgatggtaaaaatactggctccaatactacagaatgaatagaaaaaatatgacttttttacaccatcttctgttattcattgcttttgaagagaagcatagaagagactttttatttattctagaattgcagaaatgactacactgtgctataccagagaattccagtagaaagaaacttgtaactctgtagcctcttacatcacctttattatacagca

SEQ ID NO: 13804 - DNA, 471 bp, Homo sapiens
  misc_feature (1)...(471): n = A,T,C or G
ctcgaccnccnttngnnnnnattgtagactattagtccatgcggtggaattcaaagaggtggatactgagatctaagaggaaaggatagtcattcacgttctgagatatgcgctctctctattgttctcgtacacaaagggatagtctcttttctggagctgatgtccctgcttggaggttagccccaaaacatggctcttgtattgttctaagagaaaaggctttcattttggttcttctgattggtgttacctactgcctaatatgtgttcattttttgacagagaggcagactattgaaaaagtctgtgtgaacagagagcagttcattaagcccattgctttcagtaatgtggccttgaccccttctgcttcccccttctcccatggagcatggcagggcttggttatttagagtccatacatgcaagccattgagagacttgtttgctcaaatgcaagtttgctca

SEQ ID NO: 13805 - DNA, 491 bp, Homo sapiens
  misc_feature (1)...(491): n = A,T,C or G
cggtggtaggagactncgggacgtcgcccangcggnggaantccgataggctgtctcaggggattcagcagctgctgcaggccgagaagctttctgactataaggtggacgaggcccgcaaaagaaggaaccggaggctgaagcaggccaaagaagaagctcaggctgacattgaacagtaccgcctgcagagggagaaagaattcatggcctaggaagctgcggcattgggatcccgtggcagttgcagcactgaagtggagaaggagacccaggagaagatgaccatcctccatgacatactttcggcagaacagggatgaagtcttggacaacctcttggcttttgtctgtgacattcggccagaaatccatgaaaactaccgcataaatggatagaagagagaagcacctgtgctgtggagtggcattattagatgccctcacgaatatgaagcttagcacagctctagttacattcttatgatatn

SEQ ID NO: 13806 - DNA, 431 bp, Homo sapiens
gtcacaccagatgtattacatgtttggcttcctatttctggtgtttatcattttggttattacctgttctgaagcaactatacttctttgctatttccacctatgtgcagaggattatcattggcaatggcgttcattccttacgagtggctttactgcagtttatttcttaatctatgcagtacactacttcttttcaaaactgcagatcacgggaacagcaagcacaattctgtactttggttataccatgataaggcggttgatcttctttctttttacaggaacaattggcttctttgcatgcttttggtttgataccaaaatatacagtgtggtgaacgttgactgaagaagtccagtgtgtccagctaaaacagagataaagtatactcttcatcaacaaagacctagttttgtgactgccttga

SEQ ID NO: 13807 - DNA, 475 bp, Homo sapiens
  misc_feature (1)...(475): n = A,T,C or G
gatgcgagccccccactgatnaccctcgattgagcaccctaggccangccgaggaattcctgggcctgactgtgggtctggtgggcatcattattgggaccattttcatcatcaatggattgcgcaaaagcaatgcagcagaacgcagggggcctctgtaaggcacatggaggtgatggtgtttcttagagagaagatcactgaagaaacttctgctttaatggctttacaaagctggcaatattacaatccttgacctcagtgaaagcagtcatcttcagcattttccagccctatagccaccccaagagaggctatgcctcctcgattgctccatactctaacatctagctggcttccctgtctattgccttttcctgtatctattttcctctatttcctatcattttattatcaccatgcaatgcctctggaataaaacatacaggagtctgtctctgctatggaatgcccc

SEQ ID NO: 13808 - DNA, 483 bp, Homo sapiens
  misc_feature (1)...(483): n = A,T,C or G
cgtgggttttagacatgataacntcnnggaanncgnnggacaaagttgctttcacttgaaaaactatttctgataataaatttatacattactgattgctctctgagaattatcaatcagtgtcttgtttttgagacagaatttcactcttttgcccaggctggactgcagcgatgtgatcaccaggtcattgcagcagccttgacctccctggctcaagagattctctcacctcagcttcctgagtagctgggactacaggcatgtgcctctgtgtccagctaatttttgtatgttttatagagacagagtttcgccatgttgcctaggctggtcttgaaatcctgagctcaagcgatcctcctgcctcagactcccaaagtgttgggattacaggtgtgagccacggcgcctggctgagaattattaatgctttattttgaattctagtatgtagatattaacacaccagcaattcagtgg

SEQ ID NO: 13809 - DNA, 491 bp, Homo sapiens
  misc_feature (1)...(491): n = A,T,C or G
agtggggatgagacattgatgacattagnccagngcggtggaattcgatgattcctagtcggagattgggagaaaaagaagatgagcctgaatcatttcatgtacctaacagaaagaaaatactctggctgggctcagtggctcatgtttgtaattctagcatgttaggaggtcgaggtgggtgtgttgcttgagcccaggagtttgagaccagcccaggcaacatggcaaaactgtctctacaaaaaatataaagattagccaggcgtggtggcatgcacctgtcatccgagatactcgggaggcagagaggtgggaggatcacttgagcctgggagattgagactgcatcgagctgtgatcatgccactgcactccagcctggaagacagagtgagaccctgtctcaagaaaaaagaaaaaaaaaagatgttgctcatcaagttaatggacaaactgtgcaatatccaaaaaactttaacattcttaag

SEQ ID NO: 13810 - DNA, 457 bp, Homo sapiens
  misc_feature (1)...(457): n = A,T,C or G
ntttgagaccctaggaagttgcaggcattccccggtcagcttacaaagtgctaggattacagggggagccactgtgcccagccatttagttttaagtaggggagcaacagcacattttaattttataaaattcgctttggccatagaatggaaaatggtttggagaagaatgaaacgtgtagtgaggagaaaagttacaagcctagtttaatcgtccagtgaagagataatacacatttgaactaggggtgcatttgaactatgatggtaatatggatgtggattttatttgaaagaagtttacaaggcataattgacaggatctagtaactcactgagtgattgggggaatggtaatggaacaggaatagtcttgtttctgacttgattgtctttagtcacgatagagaatgtaggagaagctcttaggatggagagaggagtggcataataagat

SEQ ID NO: 13811 - DNA, 448 bp, Homo sapiens
  misc_feature (1)...(448): n = A,T,C or G
nttcgcagatccctagtctagtgtggcggaattcgacaaaacaagaaagacgcactttggcttataattctttcaatacagatatattttctttctcttcctccttcctcttccttactttttatatatatatataaagaaaatgatacagcagagctaggtggaaaagcctgggtttggtgtatggtttttgagatattaatgcccagacaaaaagctaataccagtcactcgataataaagtattcgcattatagttttttttaaactgtcttctttttacaaagaggggcaggtagggcttcagcggatttctgacccatcatgtaccttgaaacttgacctcagttttcaagttttacttttattggataaagacagaacaaattgaaaagggaggaaagtcacatttactcttaagtaaaccagagaaagttctgttgttccn

SEQ ID NO: 13812 - DNA, 489 bp, Homo sapiens
  misc_feature (1)...(489): n = A,T,C or G
natcgatagacactccnccagngcggnggaattcgatggcttgtatcttatatatgcaaaggagccaatctcagaagcacaaagaaaaaagtgtgcataccttattttgtacagataaagatgatgtctttttgttattgtctgtctgttttgtatgtgtctgagataagggatagagaggaaacatccgtcaggctaatttaactacattttattttaaaaatagagaaacataacctctagatgggacagcagaggacagttagtagaggccacaaactgttatgggctgctgtgttttgttctaaaatcaatatggttggagcatgtatatcttaggtgatcatttcacatcttaggaatgcctactcattttattttattctagtgatgctcaattcactatttaatttattatattttctcttctgtggcacttatacaaaatatctcttcacctacttagttctacagggttttaactttgga

SEQ ID NO: 13813 - DNA, 456 bp, Homo sapiens
  misc_feature (1)...(456): n = A,T,C or G
ctttcgaccatgatgaccattagnccgngcggnggaattcatgtttttaaaatcgtctatccatacataggatagatcttaagaattataaaacatacagtgggataccatgcagctggtctttaaaaagtgactttagggatttattttaaaaatttatcctaaggtcataaaaaagattatttcaaggtgtgaaataatctttgtgccaaaacaatttacataaacatgactatcactgcttgctaccaatgagtcttttcccagtggttcttccatgaaatacagacttgtgacaacttccctttttagcaggtaagggatattagcaaagttgtatttgtaaatttcttaatcttttaatatatgttaatataagcaaagactaatgcaaacacaaccctaagagcttcagtgggctttaacaaacatttctgaggattatgagttggtttt

SEQ ID NO: 13814 - DNA, 448 bp, Homo sapiens
attggagttcgttgccagtgcggggattccgcctcccaagtgctgggattacaggcatgagccaccactccctgtcaggaaacatttttattttgtgcattttaaatttgatttttagcttaggtttgatcaataaactaaccacctcactatccctcgcaagaccaagacctctttctttagtttcagaataccttgaattttggtgcacatttttgctattttcagaaaatacatcgaagtagccttatatcaaaggtagccttatatatggagagccttatgcaaagatattagagtatttaatttctagttattttttctagaattgagaatctcgggtatttctgagcatataagaactttgagaagagttctctagttatgggtaaaatatattaagtacattgagaatgtctttacattttctgacatttgtacttacatt

SEQ ID NO: 13815 - DNA, 475 bp, Homo sapiens
  misc_feature (1)...(475): n = A,T,C or G
aggacagagccggggggnnaattgactgagtncntangccgngncgtggaattcctattattgatatagattgaaaaaagaaaatgcccaaaatgacaaacttcagataatatacaaatactacaaacatcacaaaatcagaaaaataagattaaaaaaagctaactgctgaacactccgtcatcttgaaaatgcccctctctcctcctctattttttggctgtgaactctttgctcaccttttcatgtgacaatgcttttgtaatatttcctacagagaaaatagaataatttattattacttttattgttgttggattattattatgatcaattcaatatttttctactacccacacactcactgtcttctgtccaacctctggcctgcaccaggggaaccagcaggttcccctgccatagggtgtccctggagaccacacatatagcaggatagatatagcaatttaattag

SEQ ID NO: 13816 - DNA, 475 bp, Homo sapiens
  misc_feature (1)...(475): n = A,T,C or G
gatgcgagnccgccaagataacctcgtaggatcaacnttaggaagngcggcggaattcggnttagataacacttcacatgcattatctcatttaatcttcatttggaaagaggctttctcatacatatataaagaaagagagccgaacttaactacagaatatagttgacagcacaaaataaagtgacactaagtgaggtaccacgcaggaactgcataggtttctgttgtaatcctctcctgaatgtgtccattgcttatataatgccattcagtacaagatagttaccatattatttccctccttatctcttggtacaaatagtgcacaaagtaggaagattagctgagtgatgcttaaaatctcttctagatatatctcttctttgttagccttctttacacattatctaagcataactttggaagttcttgaattattttttccctaagaaactgcatgtcttccagtata

SEQ ID NO: 13817 - DNA, 465 bp, Homo sapiens
  misc_feature (1)...(465): n = A,T,C or G
gtgagaggcgcctacgatactctcgttttgacacatccgcaaancacnagacagnaattttgctttccatccagtatgctagttcttattcgagatttatggtcagagtttatttggatatgagtatcctttgcttatctttgtagtactgaaaatttgccgaagtaactggctgcgcagaatgtaatagaagcttttcttattcttttattcttaagatcagtatctttttacaggattctttctacatgatccttttttgtacatttaagaatatttcgattatattaaacaagactgctgattttgctactttttttaaggggtcttcaagtaagtaaaacatacatcgtagctagaagaaaaatgtaccttaaatttgcatcttccctctcatacccaagctgtaaacaattgaaatattttgtcttaaatcacttggttcaatacatgcttatttgtttt

SEQ ID NO: 13818 - DNA, 481 bp, Homo sapiens
  misc_feature (1)...(481): n = A,T,C or G
gatgcgcagccccctaggataccctcgatagatcaacctaggccagagcggnggaattccaagtaagaaacttttcaggaggaaattcctatttaaaatagattgattttagatgattgttcatccacaccattttatatagatactaggattaagatcaaaagcttcctcttcctcaggacagcttctactttagatgatccaataatgattaaagaatacctgtacctgcagattccagtttcaaagaaatttaattattatttacacaggtaaggaacaggtgatacattttcatttgttagaaactgatctttctgtaataaaatagattttcaattccaaaaaaaaaaaaaaaaaaaagaaaataaaaaaaaaaagaaacataaaataggaaaataccattttattacccaaactgaaaacaaatgaaaaaatttagaaataaagcacgtgggtcaatacatggcttttctttttn

SEQ ID NO: 13819 - DNA, 450 bp, Homo sapiens
  misc_feature (1)...(450): n = A,T,C or G
atcgagaccnnnnattgtcgatccatatccatgtggtggaattcggaaatcgccatttaattaaggtctttagtaatagctgctaaaatcataaaaagaaaggcaaccagatactggaagtatagaataccacctataaagtattactgccaaaaaactcaaacgctaaatctcaagcctcaagatctatttacaaaaaacaaaaaacaaacaaacaaacaaaaaacagcaatgcacagcatttgcgatgcaagcagcaaaattcagtctcaagccctggacaaacagtccaggttgttcaacaaacaaattacaaggggaaaaaaaaggttggaaggcaaccaataaattcaaaaaaggacttatgagacactatcaatcaattgcaaagcatggaccttatctgtatactgattaaaaccaacaaacctttaaaaaacttatgtgatn

SEQ ID NO: 13820 - DNA, 453 bp, Homo sapiens
  misc_feature (1)...(453): n = A,T,C or G
cctagacccccaacatgagatcctagcacangcggnggaattctgatgaggcaacattccaccaaattagccttccaaaagttgcagtatcatgtataattatgacagcagttttgttttaaaaccagagtcagattgaatgtagcttttttacagctgaaatttatgccttatgtgtattcataaaatattgataacttagtgtcacattatctttactctttggttatactcttcttgaaaagtaaatttacttatcaaatgataaagtttcagggaaagttaaaaaaagttttttttcttaaggcttcatggaatagaattccatgaatcataatgactacgtaagacccttttctggtaatgaaagcatggagtcttaaccaaaaagctaagcagaattgttagatcttttggtttctgtcataatgtactattggaacttcaagtaan

SEQ ID NO: 13821 - DNA, 406 bp, Homo sapiens
  misc_feature (1)...(406): n = A,T,C or G
gaaactgaagcctcctgccaacaccaacaaggaactgagacctacttccaacagccatctgagtgatcgatccatcctggaatcagatcctccagccccagtcaagtcttcagatgactgcagccctgaccagcatctcaactgcaacctcgtgaatgaccctgagccagaaccatgcaactaaactctgcgtggattcatgacccacagaaactgtgagatggtagctgtttgctttgttaagcctctaagtctggaaagaatgtcttaagcagtagcagacaatgaacacaagattattattcagctgttgaattggaagaggaggggaagaaaaaattttcagatcacaaaatattcattgtgtaaaacttcaaaaattctgaaatttaaggaaaaaatatcn

SEQ ID NO: 13822 - DNA, 474 bp, Homo sapiens
  misc_feature (1)...(474): n = A,T,C or G
tggcaggaggcgcctaggatacccttcgaatgatcgccatnccgaggacacgcccacggttacagatctcagacaaaatcaacagaacatagttctctaaagtgtcatatcctgttgaacaaaatcaacagtctctagtttgaaacaaatacaactggtgaccagcatggtgcttcccaatttggcacaacagaaaaaaagaaaatggagcacccaagaaatcatattgaagaaatacgttttcagggagcaagataggaaagattatgagttctgagttatcttacaactgctgatcttcagatggtaaaggagagaactaaaggctgtaattcaacacacgcaattttgtgagttgagagtttctgctaccttgaagttcaggcctggatttagtccaatatattcttctacaaaagtttgctccagcagggactcatttgattcaaaaaatggcaaacttttaaaaaggag

SEQ ID NO: 13823 - DNA, 477 bp, Homo sapiens
  misc_feature (1)...(477): n = A,T,C or G
cgactcccccgccccccccnnnattgannatcgtagaccatagtcagtgtggtggaattcttttcttcatccccaaatgaactgttaattcactgaaagacatttagacttttgcagccaaggagcagagccgggcaagctcactaaggaagccttagcttggtctcctgcatgggccccggggcctccagatatgcccacggtcaccctggcaagggccccacaccctcagaatgaaaaggattgattgggttattgtcagatacccccattagttcccctaaagtctgcatctgcagagctcttttagctcatctttttgttgtcggtgttgttttttgagacagagtctccctctgttgcccaggctggagtgcagtggcgcgatctcagctcattgaaagctccgcctcccgggttcgggccattcttctgcctcaccctccccagtagctgggactacaggcgcccaccacn

SEQ ID NO: 13824 - DNA, 476 bp, Homo sapiens
  misc_feature (1)...(476): n = A,T,C or G
cgccccccccggggnnnnnnnnatagtagatcgttagaccatgcggnggaattcgaaaaagtattttttctccaccagacaaatggaaaaaaagaggaaagattaactatttgcaccgaaatgtcttgttttgttgcgacataggaaaataaccaagcacaaagttatattccatcctttttactgatttttttttcttctatctgttccatctgctgtattcatttctccaatctcatgtccattttggtgtgggagtcggggtagggggtactcttgtcaaaaggcacattggtgcatgtgtgtttgctagctcacttgtccatgaaaatattttatgatattaaagaaaatcttttgaaatggctgttttttaaggaagagaatttatgtggcttctcatttttaaatcccctcagaggtgtgactagtctctttatcagcacacacttaaaaaatttttaatattgtctatt

SEQ ID NO: 13825 - DNA, 468 bp, Homo sapiens
  misc_feature (1)...(468): n = A,T,C or G
gggaccaaanaagcnaccctgagaccctggaagctgatggccttcggaacgggcagtctgtcctcttccccataaaaatgttccaaaaagttatctccagagagagtcccttatgaagacagttgccaagctgtattctcattctttaaaccaatacccaggtcagggctagttcacactagcactgttagggacatggtgtggctagaaatgaattgagtgtgacttctccctacaaccccaggcccagggataggaggaggcagaggggtgcctggagtttctgcactctcatcagtgatgttcatgttacacttgcacaagggctgatttccacgtatgtgtgtgttaatttattcacttagtttcaaaagattttctctccccagccattcagaggtttccaaactaagccactgagtttgagtcagggaattccacgtaaaaagatcagattaaggtaaattt

SEQ ID NO: 13826 - DNA, 435 bp, Homo sapiens
  misc_feature (1)...(435): n = A,T,C or G
agggttctccctcattacctcnacgagctgtcgcananccaaacananagtattnaaagactcattgctgagtgttagagagaaattttatcctctcctaccttcacattcacaaaaaccgtccttgtgtgcttgactgccctagacagtggtgactcttatgtttcattacgaatgtggaatatcagagtgtgggaaggcccaggcgagggccaatgttgtgtttcttaccccctctggaatgccaaaggcaaggtactaggtgacctcctggtccccaagaaaatgtgatttattctgagggcgaacagccaagggaggactagtctggagcacgctcggccgtcctggcaggagctgagcctcaggtgtctggcggtgccccaacagccctggattcacccaacaccagagatccacttttctaaatccacc

SEQ ID NO: 13827 - DNA, 447 bp, Homo sapiens
  misc_feature (1)...(447): n = A,T,C or G
tgggatctcccaatgaaaccncgctagngangttagcacangcggcggaantcgatgacttatactaattgactgttgaatgtcaaaccaaacttatcattcttgtaatagaaaccagcagggtgtgtacgcgtttgtgtgtgtgcacaggtttatacacataaacacaataatacttggacttatttatttaaaatttagatttattagagggagcatggccataaaataaaataaaataaaatttagatttaagtcaagctcagtggctcacatctgttatcccagcactttggaaggccaaggcaggtggattgtctaagctcaggaatttgagaccaacgtggtgaaactcggtctctacaaaaaccacaagaattggccgggtatggtgtcacatgcctgttgtcccagctacttggagggctggggcaggagtattgcgtg

SEQ ID NO: 13828 - DNA, 458 bp, Homo sapiens
  misc_feature (1)...(458): n = A,T,C or G
cttgtagacactagtgagngcgctggaattcggncaaggtaatgaatacatacatttttctgtgataaaactcttaaaagttaattttaatgtattaatagtattcctaatgtgtgctgcagaaatggctatgagcctcttaaatttacatttgcaacttaaaggtagttttagaaggaagtacaaattggctttcatcttgcaaacaatcgttttttacttcattatcttaatttgctttgtcactcataaaaaggaaaccatacctgagttgtagacaatgaggaaacacttgaggcttctgctgtgtgttcttttgttattgttgttattgttgttactcagtaacttgaatattgtttaatgtgttgtaagacgtagagtttatctcaagctgttaaaaatggtaatgtacaaatgtgaatagacacttatctatataatatgggtaagttttg

SEQ ID NO: 13829 - DNA, 443 bp, Homo sapiens
  misc_feature (1)...(443): n = A,T,C or G
ntttgaagttccactactccagagtggaggaattcggcgtgatgtctcacagaaagttctccgctcccagacatgggtccctcggcttcctgcctcggaagcgcagcagcaggcatcgtgggaaggggaagagcttccctaaggatgacccgtccaagccggtccacctcacagccttcctgggatacaaggctggcatgactcacatcgtgcgggaagtcgacaggccgggatccaaggtgaacaaaaaggaggtggtggaggctgtgaccattgtagagacaccacccatggtggttgtgggcattgtgggctacgtggaaacccctcgaggcctccggaccttcaagactgactttgctgagcacatcagtgatgaatgcaagaggcgtttctataagaattggcataaatctaagaagaaggcctttaccaagtactgc

SEQ ID NO: 13830 - DNA, 465 bp, Homo sapiens
  misc_feature (1)...(465): n = A,T,C or G
nttcgagatccctagtccgtgtggtggacttccatggttgaacattagaatgatataaaaaattatatatattctccaaatccacgctagacctgtcaaattagagaatctagagattagacctggcgtgtcagcaaggtcatccaggaagcagaggctgagacggagttaggtgtgattacttacatagtcgattacattttacaaataacattttatatgtctcatttactgtgctttctccccatcccattttgtatcttttcctttgctttgctagatttgtcaattttctctctctttctctgtctctctctctttcaatatctctaataatttgaaagtaattcatcataactaaatatctattggggttatgcttcacttacaaacttctgaaaacggctttactgagatataattgatatatttaagtgtacagtttgttaaattttgcacatattt

SEQ ID NO: 13831 - DNA, 439 bp, Homo sapiens
  misc_feature (1)...(439): n = A,T,C or G
ttggttctcccccagggaccntttgagacccctcgaaacccacngcggcctgagaactgtgcctggtcaacactgatctgaatcatactaattaaacctgacaaagctgatgaaaaattttaaaaatttgtgagagtaatacaaagccattgcctgctctttcgttgacacttgccatgattatataaaagcaaaagtgggtacaatggctggtttctcaacataaatcaaggcagtggtaccaattacattagtagtcattctattcttcactgtcccctacaggtaaaaaacatagcctgaatttcttaagaatgtctttgatgaagcagtaaaaattaatgttgttaaatcttgacatgtctctaatattctgaataagtggaaagttaaccagaagcgctttttttttttgtttttaaagaatccgggatttaac

SEQ ID NO: 13832 - DNA, 490 bp, Homo sapiens
  misc_feature (1)...(490): n = A,T,C or G
ataatgatccctnctggganatggacgagcaatagganagngccgnggaattcctttctctgtattcgcgatgaatcccaaagccctttgctggtgtttcggtggaggcacattggggcaaccctgtaagcaggggagggggagcctgttctcagacagctgcagaggtaagggagcctcccagaacagggtcttggaaattgagttgctgggtctcgaagatgcaaaagcaggttcaaacggtagctgctgattaccctccatgaggccgccgcagcctgagcctcgtgggcagagtcagacccagcaaggttggcctggggccccactgaggcccagggcctctccaccagaaaggccagtgcaggtgaagagccatctggcagaagatggggacactatgctgagaaaagtggtgagaatatttggagctgcttgagatagacctgtgggactgtctcccttatcagaggccgagccagcacctgtg

SEQ ID NO: 13833 - DNA, 495 bp, Homo sapiens
  misc_feature (1)...(495): n = A,T,C or G
cgcccccccccccccccccaaatggagaccanattgacgagcggtggaacaccacganaacacccatcgaggtcaggagtcactggaaaagttgttaggccggtatttctacatctcgcctttgtcaacccttgccaaaacggtgaggcagcggtgtgttacctgctgacagcaagatgggagtcaaggtccagccgttccgcccagcatacgagcttgtggagcagccccctttgaaggtctccaggtggacttcacggagatgccaaagtgtggaggtaacaagcatgtactggttcttgggcgtacctactctgggtgggtggaggcctatccaacacgaactgagaaagctggtgaagtaatccctgtgcttcttcgagatgtgattcctagatttcgaccgcccttatggatcggctcagacaacgggcctgcgtttttggctgccttggtacagaaaacggcaaaggtattggggatcgcacggaaacn

SEQ ID NO: 13834 - DNA, 468 bp, Homo sapiens
  misc_feature (1)...(468): n = A,T,C or G
ttgagaccctcgannnattgaggactattataccatgcggtggaattcgtcttactgagctgggtgggtgtctgtgttgagcttatttagagtcctagttttcctacttataaagcagaaacggggagattgttttgtttttctaccttaaagggagatggcaagaaacaatgaatgtcttttttcaaactttattgacgagtgattttcacgtctgtgttcaaaaatatattcatgtacctgtgatccagcaagaagggagttccagtcaagagtcactacaactgattagttgtttaaagaatgagaaatggaacagtgaggaatggaggccatatttccatgacttcccttgtaaacagaagcaacagaagggacaagaggctggcctctacatcactctcaccttccaaatcttgtggaagtgcatctacttgccagaaccaaattaacttacttccaagttct

SEQ ID NO: 13835 - DNA, 482 bp, Homo sapiens
  misc_feature (1)...(482): n = A,T,C or G
catagccacccctgggaatggagaccataggaagngcggggaattctgaactaggcctgaaggatgagtttgagctcttcagggaaagtatgccaagagagaattttcctggtagaaagtgaagaatgtgcaaaggacctggagtggaaaagtaaggatcccagtgaatgccaggaggctgaagtgtacagagggacaaagtgaatgggccaggttgctgtaaatgtagccagaaataaaggtctccaagattatgtggacttgcttcattaattcattcattcattcatccatgtacttactagcagtaatttatctactatcaaatatgtaaaaattacataaaccaaggaacacttatttatgttggaaacctttaaaataataagaactatatggtttccatttcttagatgtgttgtgaaattgagcagtgtatatttacaaactggaggaaaacgttttcagatcccatctgagga

SEQ ID NO: 13836 - DNA, 471 bp, Homo sapiens
  misc_feature (1)...(471): n = A,T,C or G
nggncgtggccaggnnnnnntttgaaaactgagacgctagaccangcggtggaattctgacgacctacgcacacgagaacatgcctctcgcaaaggatctccttcatccctctccagaagaggagaagaggaaacacaagaagaaacgcctggtgcagagccccaattcctacttcatggatgtgaaatgcccaggatgctataaaatcaccacggtctttagccatgcacaaacggtagttttgtgtgttggctgctccactgtcctctgccagcctacaggaggaaaagcaaggcttacagaaggatgttccttcaggaggaagcagcactaaaagcactctgagtcaagatgagtgggaaaccatctcaataaacacattttggatttataagagaaaggaaagaaggaggataattaccccttagataagatataaaactcttatcaccattgtggggcgtcagaag

SEQ ID NO: 13837 - DNA, 483 bp, Homo sapiens
  misc_feature (1)...(483): n = A,T,C or G
cggggnnnnagncgnnnncnaggganattatatgaaacctgtcagtagctncgannnncnnnnnnannagnaaaagacagaacaacacaaatatttttgctggagtcaggagcactgtgaggcacagaacatctcccagaaagcagattttttttttctgccgaaaaaccaatatatatatgtatcatcccaattaaaagacaaaagcaaaggagccccaaactgcctgtcttcagctttgcctgggagctgctacctttgctcttctagcatcttctaggtatcaaggatattagccacttgagggtgttgggcatatttgtttcattgtaggcaaaatcctcttgtggtttcccctccccaggtattgttgagtctgttcaaagctgggtgtgttgaaacactgcacaaatcctgccactcttgatgtgccgcttgtctcatccttggcagaggctgagtctgttcctgtgcccacctgtc

SEQ ID NO: 13838 - DNA, 480 bp, Homo sapiens
  misc_feature (1)...(480): n = A,T,C or G
atcagaccantntgcgattttgaggccatcggagngcgcnggctgcagcctcgggagggtatcgccggatcgaactccgggaaagggaatcttaggcatggaacctccgcacactggatgagaatccatcttccattcgagctgggaatagactttgtgaaagatattatgtaatggagtctcgggaaccctgagacctctccagcgaagctgaagtgaattaattaagtgctttaaacggtcttggtaaatattccgcgggagctggggaggaccgttgggatggctgtagcttgagttgaattttaactgtcctcattctgggttttgtcgctctgctttctgtgccaaggtgctgtgttacgggagagagtgactggaaagtaacaaagctgaatctttctccctggagtaaggccgaagactggattactacacgcctagacgtgacactacacccatagatctcatgcatcatta

SEQ ID NO: 13839 - DNA, 466 bp, Homo sapiens
  misc_feature (1)...(466): n = A,T,C or G
gacgggtttcctactgaaaccacgactagnagctncgnanangcggnggaantatnnnnattacggggctactttcctgcctccctaaagtcatctttcccagcatgctgtttctggactttatttagtaccgtggttacctcctgcaggctgtgtggccccatccttcaccaaaatgtcacctcaattaattcggcggccatgagacagatccatcagtggcccgccganncccgtcagcaggcgcccatgagtgatgggcacctccacgcctcccgcggccccccccccaccatgtggagtcagccgggcaggactcaccatccnnntgggcacgagggcatctggctggcccgagtcctctcacaccttatgctgagggagacttcagcctcaggaggagaccccaggtgcattcactccacctagctggccttgttccccagccctgcactcagggatgcct

SEQ ID NO: 13840 - DNA, 447 bp, Homo sapiens
  misc_feature (1)...(447): n = A,T,C or G
nctgagtgcctagcacgngcggnggaattccggcgcgtgactgggcttggtggagtttcaagatgctgatgaacttaaggtctggcgcttgaaagaatcagtgaagcttttcaagtagaggagtactctactttgaagaaaggaatggaacagaaggtgtctgcataactaaatggggatctagagaaagtggagactgcctctggagcagggaggattatgccaccatgactagaaggccccctaatggagtttatctgcactgcaaggggccagttgtctcacaatcatcctccgttgacatctccatctccaggacagctccacactaatctgtttcaaagacaaaatccagtctaatcagtttgatgtatgtttctgggaatagagccgaatgttgtagctgatggaatggagtctcataccattgattttgcagctggacan

SEQ ID NO: 13841 - DNA, 460 bp, Homo sapiens
atcgtcgaccctagttcagtgtggtggaattcggaagagttgtcattcaaagtggtggttttgtcttcctgcactgtctctcctaatcctaaatactgataatattcattatgttcttgaatgacagagtctaaatcagaagctgaactttgagaagacaaggtactaatctgattcctattttcctgaggtgacgaaatttgcggtgattttgttatggaagaagaaccaatcttgaatagggaagtgatgctacaaaaatgctaaaaaatgaattaatataatgcaaatgtcagtttagtaaatataaataatgatgcttatctatatggaaagaaggcaaaatataaataggtagtctattcatagatattacattgatccaggtattaagaacatgaaatcattaggctctattaaaagaaaaattcattggaattcatacttattttctaatcac

SEQ ID NO: 13842 - DNA, 448 bp, Homo sapiens
  misc_feature (1)...(448): n = A,T,C or G
cgtgggtcacccactgatntcccgcctaaagggctagcacangcggcggaattncnttatgcccacggctacctcaagggcaccaagggccctggtttcactggaacctaaggggatcccactggagcaggtcccgaggcgtgcctagagcctggggccgactctgtgtcgatgcaggctttctctcgcgcccagcctggtgctgctcctggcatctaccaacaatcagccgaggcgagcagtagccagggcactgctgccaacagccagtcgtataccatcatgtcacccgctgtgctcaaatctgagctccagagccctacccatcctagttctgctctcccaccggctaccagccccactgcccaggaatcctacagccagtaccctgttcccgacgtctctacctaccagtacgatgagacctccggctactactatgaccccn

SEQ ID NO: 13843 - DNA, 516 bp, Homo sapiens
  misc_feature (1)...(516): n = A,T,C or G
ggggccccggnaatagagaaccanntggcnaatggatgagcaatctgcctannnncagggggtccacgcccagcttctgatnnagcatcgcttctcagttacctcttttggtatagttggccttttcctttgcagagaacacctgattncctggcaaagaggttctcgtttttaggacaaggtcgtgagagtagcccgtttccagtgtaatgatcntttatgctntttttatttaattncctgttaccaaataggactttaaaggcttcccagtgtttatgagaatgaagctacgtgatgtaagttttttctaagatatatagactgtaaatcacaaataaatcatggaaggtgttgtttccagtaagaaattattttagtaatgacagccagtgaaattccctcaatgatcacagtactgtcagtcaaatgtcgtgggttgagcagtgaacactccgtcctgatcctcagagcttgtggatgtgactctttggaaaaaggtcttgcagatgtgat

SEQ ID NO: 13844 - DNA, 468 bp, Homo sapiens
  misc_feature (1)...(468): n = A,T,C or G
gcgtggtttaaactgaaatctnggctagntagctnagnanangcggnggaantcagnggnnngntcacttacactggaaaagggcattttaacatttatcccaacaagaattctccaccagaaccccgaggggcgaataaactgggaatgattgccggcgggacaggaatcaccccaatgctacagctgatccgggccatcctgaaagtccctgaagatccaacccagtgctttctgctttttgccaaccagacagaaaaggatatcatcttgcgggaggacttagaggaactgcaggcccgctatcccaatcgctttaagctctggttcactctggatcatcccccaaaagattgggcctacagcaagggctttgtgactgccgacatgatccgggaacacctgcccgctccaggggatgatgtgctggtactgctttgtgggccacccccaatggtgcagctggcn

SEQ ID NO: 13845 - DNA, 496 bp, Homo sapiens
  misc_feature (1)...(496): n = A,T,C or G
agggcccgcaaatgaanacccttggnanatgatgaccataggacangcggnggaattcggcatgcggagggtcgacctgacagggaaagcgaagggacccattgagaacgtgtcccatgagcagttcacagcatccatgtcccacctgttgaaaggaaactccgaggagaagagtctcatgattatgaaaatgatttctgccacagaaggtcccgtgaaggccatagaagtccaaaagtttacagaggatctggttggctctgtggtgcacgtgctaagccacagacaggagctgagaggctggactgggaaggaagccccacggcccaacccccgggtgcaagtgctggctgctcagctgctctctgagatgaagctgcaagatggcaagagacttctggggccccagtggctggactatgactgtgaccgagctgtgatcgaggactgggtgttcacggtcccccatgtggccatattcctgagtgtggtcatt

SEQ ID NO: 13846 - DNA, 458 bp, Homo sapiens
  misc_feature (1)...(458): n = A,T,C or G
atcgacgtccctagtccgtgtgccggaattcttatatgtgactgaaagttctgtttgctttttgccaggacagtgtggcactgaaggggggccgtggcagtgcttccatggtccagaagtgcaagctgtgtgcaagagaaaattccatcggtaggtcaggctgtgcgtactgagttctgccagggtggcccacagcttcctggcaccaggctgaaagtagactcatgttacctgagggtggagtcaggcctaagatgccgacacctgtacagcgtgatctttttcagggccacatgtgggcacctggctggggccagggtatggactcaagtcaactttgtgttctcttttctatttcagagattttaagcagcaccatcaagccttacaatgtaagtttgctgctgtagtggcagggatggtgggcttaaatcctaactggagttagtaggtctggn

SEQ ID NO: 13847 - DNA, 442 bp, Homo sapiens
  misc_feature (1)...(442): n = A,T,C or G
agggttctccctctggtgaccttacgtgnctncgngaaanncacgnggagaagtacagggagactgatttccattccttattggggaaaacgttgcactcagaacatacaaggataaatgggctgccaccagaggtgaggagtctcttgtcactggagaggttaagatagaggctcaagaacaatgcaaggaaaatggaggttttcaaacacaaagtggatggtggtatgagacaatgtttaatgtccttctaactccgagagtccttgattctggagaggcacaggatgaacatctgttgctactgctgagtatacacactcttgcctctgagatggcgtgaccagcacaaaagaaagctcagggctgtggcttcagaattcatggaaacagagccactgtcaagaaggaatctgctcagagcagattctgagttttcacg

SEQ ID NO: 13848 - DNA, 487 bp, Homo sapiens
  misc_feature (1)...(487): n = A,T,C or G
cgcgccccccccgccccccctttgagncccctnangtagacctctgtccgngcggtggaattcggcttggagagagagccatttgtaagcctctgtttctggatacaagtgtcatatcccccagcccatgcaagaagcaaaatgggaagagactaggaggtagcctgggcaagagctgacagctgagaatcctgaggtcagagagaccttaggatgtcaaggagctgaccctgcaagtctccggacaggcagctgggccttgtaggagagatctgacaggaaaaggaggttcacatgcaatagggttataagctaggggacacaggaccctagggacattctcaccagctaaccattcccacaggttgcagaatttcctggtcagaggtggaaatggtatatagggcaaacaagtttgctgaggtcttgggagagggtgagtggtggacataccaggtgagggaaacgagaaataaaaagaactgca

SEQ ID NO: 13849 - DNA, 487 bp, Homo sapiens
  misc_feature (1)...(487): n = A,T,C or G
cgcgccccccccgccccgcccaatcgaganctatgattgangngccgtaatacgatcgatttagatgagttgacattgttagatactttctattataagaggttgtctttggtagaattctatgattctaaagtgctgtgactacaagtgtggacaggtgtaatcactttacctctacactgcccgctgcatgctgacactgcctttcatatggtgggcattcaacagcaacattcctgtggagtatagatggctatgactaaggtagtgtaagtggtggtccttataaaatatgctctgcttgccttaggggaaaatagttccttaaaaacgttctcatccaactcctcagtgttaagatatctaaacaaaagtgaccacatctatacacaacagtaatgacacctgaaagaattttttaacagataaagaacagtactcccatggttatgtaaccaaccaactaggaaggagagactttaaaatt

SEQ ID NO: 13850 - DNA, 438 bp, Homo sapiens
  misc_feature (1)...(438): n = A,T,C or G
cttcgacttcattaccccgngcggnggaattcgtttgtaccctacttatttttgagtagtcttttattcgctcataaataggttgaagacacctttccatgtcagtacatctgtctttgccttttacatgactattgaatatttcattttatggctgtattataatttaacttcttattgatggacatttacagttctaatttttttgcaattataaatgttgaggttatcaatatatttgtatatagatttttttggttacttaagtgtttgtatagaacaaaatcatacaaatgaaattttaattgacattaccaagttactctccccaaaggtaatttgataatatctatcaaatttaccttcccaccaacactgagtgaggaattatcagtccttaatttttgccatttggctaggtaaaatatctcattttag

SEQ ID NO: 13851 - DNA, 478 bp, Homo sapiens
  misc_feature (1)...(478): n = A,T,C or G
cataaagcaccactccggaatgagcggtcgtaggacaaggccatcaagacttaaggaaatacagattgtgagcaggtcttaagaaacattaattaactaattcacaaatattaagcagtctttgaggtgctaaagataaaatggtgagtaaaacctctataaggttagagatttttggccgggtgcggtggctcatgcctataatcccagcactttgggaggctgaggtggcggatcacctgaggtcaggagttgaagaccagcctggccaacatggtgaaaagccgtctctactaaaaatacaaaaattagccaggtgtggtggtgtgcgcctgtaatcccagctactcaggaggctgaggcaggagaatcacttcaacccggcaggcagaggttgtagtgagccgagatcatgccactgcgctccagcctgggtgacagagtgagtctccatctcanaaaaaaaaaaaaaaaaaga

SEQ ID NO: 13852 - DNA, 452 bp, Homo sapiens
  misc_feature (1)...(452): n = A,T,C or G
natggtcgntntcgnantgacgacgatcanaccagncnggnggaattcctgaaaactcaccacagcaggtcttctccactgagtttgatgtgaaggagtacgttctgcccagtttccaggtcatagtggagcctacagagaaattctactacatctataacgagaagggcctggaggtcaccatcaccgccaggttcctctacgggaagaaagtggagggaactgcctttgtcatcttcgggatccaggatggcgaacagaggatttccctgcctgaatccctcaagcgcattccgattgaggatggctcgggggaggttgtgctgagccggaaggtactgctggacggggtgcagaacccccgagcagaagacctggtggggaagtctttgtacgtgtctgccaccgtcatcttgcactcaggcagtgacatggtgcaggcagagcgcagc

SEQ ID NO: 13853 - DNA, 499 bp, Homo sapiens
  misc_feature (1)...(499): n = A,T,C or G
cgatggtggccnnnaattgagaccanatcgatgagcactcggaaagngcggnggaaaacgagtcttggtctgtcgcccaggttagagtgcagtggcaccatctcggctcactgcaacctccacctcctgggttcaagtgattctcctgcctcagcctcccgggtagctgggattacaggtgctcgccactgcgcctggctaatttttttttttttttgaattttgggaaaagagggggggtcaccgttttggccaggctggtctcaaactcctgaccttgggatttacccacctcggcctcccaaagggctgggataaagggctggaccccccccccccacctggcaaaaatcaattttcttgccttttccatttttagaggctacttaaggtttcttggcttagggttcctttcctccatcttcacagncagcaactttgaaacttttggaccatttttctgaagccatatctccctctcttttttaaagaccctggg

SEQ ID NO: 13854 - DNA, 483 bp, Homo sapiens
  misc_feature (1)...(483): n = A,T,C or G
cccccccccccccccccaatgagaccntcattgtagacctaggccanngcgnggaattctggggatccaagacctgagataaagcaacagcctgcccagatccctctgttcatcctatcccttccaaggttggtccatgccaacataacctctgggcatcagacatcagcaggtctgtgtgcctcagccctgttaaggggcaggtttctctttagccctcttcctgcacttgggagcaaaggcactaccagtagagaagggccatccagccgtgccccagcctggacccctggggctcagatagaggtgctgagcccctgtgtcaaagttgttaaatgtttttgttttgttccattgtagctctttttttttttttttcccctttcccgggggagggatttaccaaaaaaagttacctttttaaaaagcccttgaagggaaaggggggggggggaccaggaaaaataattatttccggggggg

SEQ ID NO: 13855 - DNA, 467 bp, Homo sapiens
  misc_feature (1)...(467): n = A,T,C or G
cacacacccacaaaanntttgtacttgagacactagaccangcggnggaattcgttgcagcaaatgtgaatctcctacagatgggtttggggacttacctgttcaaatagcagcccggtgtcctctgtgggtggggggaggtttgtctgtcctttcattctagtaaatccaccatcctctgcacgagagccaggagaatccacatcacttcaaaagagcccccaaatccttactacgtactacagcctcctttcgaatgttcctggttgagagggagatcaattgcattatttacaagtcaaaaaattttgtatcaaacttcctatgagcttgggcactcatggcctatggaggcccacccagacgcagccccgccatcatgctttttcgttgttttgtggatgtacccagggctatttacacactctttcattaaaaggcttatttttatatttaaaaaaaaaaag

SEQ ID NO: 13856 - DNA, 473 bp, Homo sapiens
  misc_feature (1)...(473): n = A,T,C or G
aaaataaaagtgattaccctntgaanaactgataaacctcgcagagngcnggaattccactgatcccacagcccctctactttctagaaactccccaccctattaaaaccttctgcaatcagggcgagtattcaccggacccacattctctcccagttctgtgatcctggatggcctcctgggcttgcatcctgctggtcaggcatcaagacaggcagggctgggacctgacaaggacagcaggttagtagacagagcaggcgggcaggagggaccttgacacaggatagggatcctgaccaatcatcgaagcattacggaccagatgccccctgccatctacctatcagccaccacctttgcttggcgtcatgcatgctcctcctacaacccatcttctgttatgcttcttgctgttcctgagacccacgggctgctctttattagctcacacctttgctttggtggatctt

SEQ ID NO: 13857 - DNA, 553 bp, Homo sapiens
  misc_feature (1)...(553): n = A,T,C or G
ngttagatcacagtccgagtgggttagattgccaatcagcgcggaggagatcattgctaaataaggagtttataaagtaaaacacacacaaaaagtctttccccacaaaatcctattacatagatttgaccatgatcaacaacttattacatatcctctcacattttcttgttggcctaatcaatgcttatatatatgaaacaaacatatttgttttatttttaccaatatatgtctaactatccagattgatttgaaatttcctttctcttccacttaacaaagttatttaccaaactcttactatgtgccaggcaatgttaggtgctggaaattcatcatagtcactcacattattgaatactactgtataccttgtaatgggccacgtacattatgttcctgatttcattcccttaataaacttaggagggtaaattctccctaatctgggatgtangaaagttgaatacattgactaaaattatatnaggccctgcaagaaagtgctgaattagaatgtcatataatcactgtatttacattntaatat

SEQ ID NO: 13858 - DNA, 488 bp, Homo sapiens
  misc_feature (1)...(488): n = A,T,C or G
catggggccnnaattgagaccaactgagaccgtcggaacgcctnngagaaagaggaaaaggttaatctatttgccctccatgccacttagcccctgaccatcccaaaacacagaagtcaacatccttgggatgaattatgagcagagggagaaattccagggcaggggagcagacatcaggaaaactgagatccttcttctgaaaggacataaaaagttaatatttttgtaaattggaacccaagcatttcaggcctggtgggatgataaggggttaaagcttccacggagcaaacctaaagtagcttggaagggtgcggcccccaatttgatttattttagaagcatggaaagccaatgaatgtgcttctggccacaagacaggacaggtgagaaaaaagaaaggaaagaggcctggtttgtgtttcctggaaagggagtgtcgttacagctctcctggggagcacacacacgcctctcgtagatgt

SEQ ID NO: 13859 - DNA, 482 bp, Homo sapiens
  misc_feature (1)...(482): n = A,T,C or G
tgattttnannaggggannnncctcgatgacactattgagtgccgtggaattcggcacgtacactgaaatttaagtcatccaagttgggacttaagatagcaggttaatattgtctcaggcgagacttagaacgtcttttctggtatcccagtctgcagtgggcaaatctattgtctttatttctcatttaagggcagaatggagggatgacatatttttacttttcaagaggcggttgccacttttaagtcactgttgtgtgtgtgtgtgtacatacacaaacatacgatagtgtgttttcagagcaagtatcaaaggctaaagacttggagtgatactagtgtttaaaagcctttttaaaaaaattaagatgtgatgagaaactggagaattgacttttaaaaatttcttttctgtagaagaggctatcttcaaaatggagtcctaaagtatatctgatggatagaatttaaattcttac

SEQ ID NO: 13860 - DNA, 454 bp, Homo sapiens
  misc_feature (1)...(454): n = A,T,C or G
catgacanatagnngcctcgcccgngcggnggaattcgtacaccaagcattggctataatttatgatctatttaaatacttctttagaacctttttaggtgctagncattattcttggcactttgcataatcttcctagtatgtgtgtttttgtaatttcttggttcttcctcaaaggcagctatcactttatactattgtcaatatatggaattcttttttttttttttttttttggaaaaaaatttttttttttcccccccgggtggaggggaagggcccaatttcaatttattggaatttccccccctggggtaaaaaaaaatttcctgccctacccccccaaggggggggaattaaggggttgcccccccccccttaactatttttttttttttaaaaaaaaagggggtttcccccatttggccgggggggttcaaaacccctgacctaa

SEQ ID NO: 13861 - DNA, 456 bp, Homo sapiens
  misc_feature (1)...(456): n = A,T,C or G
cactgagatcatagcnctngcggnggcattccaggagatagagaccatcctggctaacacggtgaaaccccgtctgtactaaaaatacaaaaatattagccgggcgtggtggtgggcgcctgtagtcccagctactcgggaggctgaagcaggagaatggtgtgaacctgggaggtagagcttgcagtgagccgagatcatgccattgcactccagcttgggtgacagagcgagactcagtctcanaaaaaaaaaaaaaaaaaaaaaaaaaangggggccctttaattttaaggggcccttttaaaccccgtgaaaacccctgggggggcctttttattgcccccctttttgtggttgccccccccccgggcttttttttgccttggggggggccccccccctttgttttttttaaaaaaaagaagaaattgccttccttttgtgggaggggggtt

SEQ ID NO: 13862 - DNA, 450 bp, Homo sapiens
  misc_feature (1)...(450): n = A,T,C or G
nactgagtacattacacctngcggnggaattcctgccaggaaccatgagtgaggcccgcatggacagcacgagcagcctgcagcgcaagaagccaccctggctaaagctggacattccctctgcggtgcccctgacggcagaagagcccagcttcctgcagcccctgaggcgacaggctttcctgaggagtgtgagtatgccagccgagacagcccacatctcttcaccccaccatgagctccggcggccggtgctgcaacgccagacgtccatcacacagaccatccgcagggggaccgccgactggtttggagtgagcaaggacagtgacagcacccagaaatggcagcgcaagagcatccgtcactgcagccagcgctacgggaagctgaagccccaggtcctccgggagctggacctgcccagccaggacaacgtgtcgctgacca

SEQ ID NO: 13863 - DNA, 496 bp, Homo sapiens
  misc_feature (1)...(496): n = A,T,C or G
cgtggtnccnnaattgagaccanatcgatgagcactacggaagngcggnggaattcgttttgaaaactatacgtgaagggttgagttaaatgtgtgtgttattttcccctttccgtcagctctggaggctgccatcgagaacctcaatgaagccaagaactattttgcaaaggttgactgcaaagagcgcatcagggacgtcgtttacttccaggccagactctaccataccctggggaagacccaggagaggaaccggtgtgcgatgctcttccggcagctgcatcaggagctgccctctcatggggtacccttgataaaccatctctagagaggacatccctgctgggctgctgtgcagagtataagattttggacttgttcatgtcccctctctccctataaatgatgtatttgtgacaccctatcttgtcaataaacagcattctgattaaaacatataggttggaaggaccaaaaaaaaaaaaagggggcg

SEQ ID NO: 13864 - DNA, 490 bp, Homo sapiens
  misc_feature (1)...(490): n = A,T,C or G
ggtggtcnccnnattgagacccatcgaggcctcttggaaancccctacaagtccttcttgatcctgaactgggttaggtgccgctgttgctgctcgtgttgaatctagaaccgtagccagacatgggactggaggacgagcaaaagatgcttaccgaatccggagatcctgaggaggaggaagaggaagaggaggaattagtggatcccctaacaacagtgagagagcaatgcgagcagttggagaaatgtgtaaaggcccgggagcggctagagctctgtgatgagcgtgtatcctctcgatcacatacagaagaggattgcacggaggagctctttgacttcttgcatgcgagggaccattgcgtggcccacaaactctttaacaacttgaaataaatgtgtggacttaattcaccccagtcttcatcatctgggcatcagaatatttccttatggttttggatgtaccatttgtttcttatttgtgt

SEQ ID NO: 13865 - DNA, 493 bp, Homo sapiens
  misc_feature (1)...(493): n = A,T,C or G
tgagggcccnnaatgagactaactgagagtcataggaagngcggtggaattcgcttcttcgaatttgcaattcaatatgaaaatcacctcggagctggtaaaaagaggcctaacccctgtctttagatttacaggccaatgcttcactcagccattttacctcacccccaaaaaaaaaaaaaaaaaaaaaaaaaaaaaaaaaaaaagggggggccccttaaaaaaaaggggcccaaaaaaacccgggaaaaaacccgaggggggcttttaaaggcccaacacttgggggggcgcccctcccccggattttttttagaagaagaaggggcccaccaactttttttttttaaaaaaaaaaaggaaaaatgcctcaatggccaagaaaggggcaaattataatgnggnggggacttaattcacccagacttgaataactgaggatgagaaaatgaacttatggtcttggaaggaccaaatgtgttttatatgtgga

SEQ ID NO: 13866 - DNA, 492 bp, Homo sapiens
  misc_feature (1)...(492): n = A,T,C or G
cgagcgtgccnaaattgagacctnatcgacgaccgctggaaancgcattttgnaggtcactcttctcctttgtactattttgtttctgccctgatgtcccttgggtctccatcctactgcctggctttcttggccctcatttctcagcttctgcatttccttccctgctcctaacaaatgaagaagcaggctgcagcctgcattgtggaagatctccagcctccttgtaggggataaggggatgtgcagcatctgtgtggattttcacggacaagttccagtaggtgggacagtgatgccgtcaaggcttagttatgatcatgtgtggtgataaagaccatccaccatcacccttttcccctttggttttgaaggccttgccctaagctacctgagggtttaggaggtctgaacacacacagtggagaggttaatctaggttgggaaactgagtaaaagtccagagcaggaatgagcctgctgtggcgtggn

SEQ ID NO: 13867 - DNA, 449 bp, Homo sapiens
  misc_feature (1)...(449): n = A,T,C or G
natcgacgttcattancncgngcggnggaattcggagtgtangccggccggcgagactgcacctcccagcatgccttgcagccaggactggagtcggtacttaagagtgatggggttccctagatactttaggccgtcgcatcgattatagagattgaggtggaacccggggcctgggaactggacgcacgcggagggcgaagatggaagcctggcgctgtgtgaggaagggctacggccactgtgtggtgggaagaggccgataccccatgtttccccatcactcgaggagtctgggcagagactggactacaccgtgggagaatctgcaaaggtgttgctggaacagacatatttctagttgtatgaggtggcctggacattactctcgagctccttacccatacttcagtagtaggcatttttcactaaattggagaccaccctgt

SEQ ID NO: 13868 - DNA, 458 bp, Homo sapiens
  misc_feature (1)...(458): n = A,T,C or G
ttatgcctccgatggcatcgcccgggcggnggaantctgatgacccagtttgagcaggaagtatccaacctccaagatatcatgcatgtcatttttaataaagaagaggtgctcactcaaaggatgcacagccttaatgagaaatttcagaatattacggatttctggaagagaagcctagaagaaatgaacattaatacagacattttcaaatcagaagcaaaacatatacattctcaagtaactgtccaaattaactcagctgagcaggaaataaaattgctcactgaacggctaaaagatttggaagatagcacactaagaaatattagaacagtaaaaagacaagaagaagaagatctcctgcgagtagaggagcagctaggctctgatacaaaggcaattgaaaagttagaagaggaacagcatgccctctttgccagagatgaagatctgan

SEQ ID NO: 13869 - DNA, 423 bp, Homo sapiens
ctcaaggagagataacgagctgcaatttccttttcttcagttttctgctttttgctctctgaggagtagtctgcggagtttctgtgcttctcagcacctcggaaactggctgatggggatactgaagagctcttgatggagtctctgtctctttggtgatcattgtcatggtgcttcttctcatctttaattggaagatgggactgacctcctagagcactggagagggccagaagcccggcactgctaccgatgggtggaatggcagggggctggagccctgaagggtgtggagtcagaggtacggggagaccatgtccatgtgataaatgctgggcctggagttgttgctgcccaatgatggcgttcagttctgccatggtcacctgcttggcccgttccacagcctgcaccacttgttgg

SEQ ID NO: 13870 - DNA, 455 bp, Homo sapiens
  misc_feature (1)...(455): n = A,T,C or G
cactgagttcatagcnctcgcggnggcattcgntccatgttccccagatttgagatatactaaagaaagaaattcaaaagtagctatttggggtccacaaaaataactattattttagccttagagccttacacttgtttcatgaagagaaaggacttgcataaccaaaataaacaaagcaagacaaattaaaaatatgtgggggagagatcagtgaaaagtggttttcttaatgcagccctgctggtccccattaacaattgcttgaaattcacatggatgtaaaattataattgtcaggatcttattcagatgatcttttaaggtttaactggttttgcttttgtttatctatatgtcaaaatacttgtaaattgggaacaaacttctctcagcttcttgaagttgttcaactatccttgccactggaagaccaaacaaggttttcactgctt

SEQ ID NO: 13871 - DNA, 439 bp, Homo sapiens
atagacttcgctgtccctagtccgtgtggtggaattcccagcctgggcgacagagcgagactccatctcaaaaaaaaaattcagatcgttgggaaaaattagaagtgagaagttggtgatgacgatgatgctttttccgagatttatttattttcacttttttaaagtagaataattatcccattaacagaataattatccagttacgctgacccatttccatcaactattttgaaatagatgagatattttcatattggattttgtaaagtctcatactaattaatgagtctcatttattttgttattttctgcaatggctgcccatactcacacacgtgtgtgcacacacatacacacacacacaccatctatgtgataccaaaactctgtatgaagacaagccagtggattattgaaattttttcaaaaaagttct

SEQ ID NO: 13872 - DNA, 475 bp, Homo sapiens
  misc_feature (1)...(475): n = A,T,C or G
ctcgacatcgatacccctggccangngcnggaattcgtgatgaggagctactcccacttggggaagagctgctaactttacttttccgctgctgttggttccggttcaaagctcggtttgggaagtaagaggaggactcggagactttgaccagagcactccaggccaaagttttcttccagttcaggtctgtctcttcgtcccagccccgacttaagatcagaacctagatatttgaactagcccagtgaccctgtgaattctaatgcacaggtctgtactgcatgtaagacttggctcagatttatgaaccagaagcaatgcatgcacgcgcacgcacgcacactcaaagaagggggcgatccctagaaaataccacatcgggctgtgtgtgctttggttgtgctgccacctgcacccctttgtcccttagagccaactttataatttccatatgttcatgcctaaggatggg

SEQ ID NO: 13873 - DNA, 469 bp, Homo sapiens
  misc_feature (1)...(469): n = A,T,C or G
cttcccctggatcccctctaanactgagaaccntatcnagtgtgctggaattcgatttttgttttagcaaacgaagcaagttaataaatgtggagagaaattttcacggaagaaacattatcttgaaacgatttattacctcatcttcctcaacagtcttggcagctaggaaaaaacagctgattgcaatacaactcaagtattttggatgagcctaaaattttgaagagggaaaaagcaactttagtgatttttcaaaaacagtttaactttttgtaactgttttaaaaacctatatatgcagatgagacaggtatacacaaaatactatggaattcaattaatgtgactgccactcattactttttagatcagagctaactttaagaacaggaaagaaagtttattaaaaagctttagagcagtaatgaaaggaaggaaagtacacttgcaagatcaagtgtgtcta

SEQ ID NO: 13874 - DNA, 455 bp, Homo sapiens
  misc_feature (1)...(455): n = A,T,C or G
nttgagattaggagcctcgcccgngcggnggaantcgcagaatgctggaacacaccagacatagagggagggaggtcctgccagatgtgtcttttcaactgtctacatagcatgacagcagcagtggattcgggacccacctgtacatgtttccaaagctccttcctgcacactcgggacctcagctccaaggcgtgactcatttctcagtctcaccatcctttgttggctcagacatcgcatgcctctgccccactggggttgtgtgcctgcgtctctcacttctttgagggtggggaaagcctagtccagaaaatgaaaacccatagaccagcctaacttcctttcaaccaagtgacggcctcctggttcctctcagttcatcatcaaaatcagtgtgtacatgtcatacaagccaagagtgttcatgtcctcgttcctttcaaaagaaggag

SEQ ID NO: 13875 - DNA, 483 bp, Homo sapiens
  misc_feature (1)...(483): n = A,T,C or G
catcgaccnnccnctcnnnnnattggaagacccttagtcagagccgaggaattcatttatttcccttccccaaggttgttagggctttggtaaaaccctcttctgataggttttggtaaaatagtttcccttgaggcaggccttgttaagaatagaaaacccttggtgtgtttcaaaatggtgactttactcctccctctaccagagcagctggggatttttctctggtcttcacaggagaacctgatgggcctcctgtaggtaaaactcaagaaagtgtgggtgcgcccctaagactggaccccctcagagtatttaattctcaagttagttgacactaagcctccagaagtttgttaattacagtttcaagtattcctccagatagtggctgcagcttcaggcttctgctcccactaagctgtgattgtctgtatctgcatgtctatctctccagttttagtggctgcagtttgctctatt

SEQ ID NO: 13876 - DNA, 450 bp, Homo sapiens
  misc_feature (1)...(450): n = A,T,C or G
ggggntnnntttggtagacactagtctgtgtggcggaattccactaatacttttaatacttccttactttactatctttcttctctaccttactattattttcttacacatttataagagaaagaatgtattgaaagaagcctactctcataatttatgggatggtgcaaggaaaacagtggcaactctgtgggatggacatgcagccgtttggcatggttatgaagttcatggaatggaaaaaataccagaagatggaccagcacttataattttttatcatggagctattcctatagatttttactatttcatggctaaaatatttatacacaaaggcagaacttgccgagtagtagctgatcactttgtctttaaaattccagggtttagtttattactggatgtgttttgtgctctacatggaccaagagaaaaatgtgttgaaan

SEQ ID NO: 13877 - DNA, 508 bp, Homo sapiens
  misc_feature (1)...(508): n = A,T,C or G
aggagggccnnnnnnnaattgagctcgctatcactagtcagngcggtggaattcgagtcagggagagagggagagaggcagggaagaaaggagggagggaagaagaaggaaggaaggaaggaaagaagagatgagctgggtgtggtcatgtgcacctgtagtcctagctacttgggaggctgaggcaggaagatctcttgagctcaggcatttgaggctgcagtgagctaggactgcaccactgcactctagcccaggtggcagggcgggaccctgtctctgttttagaagagaaaaagataacgactaagtgtcatgaaaagatgtgaagaaatacaatgagatgcccgagtgaaggctctgaaaacacctgctcgagttcgaatgtgtgctctgacacctgactcgttaatgtccttggccaagtaactttacctgtctgtgcctcccatgccgatccgtacgtgggggatgatgacagtagtatctgccccacgaggggttgttg

SEQ ID NO: 13878 - DNA, 489 bp, Homo sapiens
  misc_feature (1)...(489): n = A,T,C or G
cgccgccccccnnnngnattgtagaccatagtcagngcggttggaattctcgaaacttgttagaaatgcaaattcctgggtcctactgctgacctactgaatcagaagctctgagatctcagcccagcaatctgttttaactggtcctacaggtgattctgatgcaaaatcaattttgagaaccactgctatatttagtgtgatgaggaattaaactccattatggtagactctgaaggggcacctaaattaataatgttagaatctaatgtatttcttgcctttaaaatcccagcactttgggaggctgaggcaggcggatcacaaggtcaggagatcgagaccatcctggctaacatggtgaaaccctgtctctactaaaaatacaaaaaactagctgggcatggtggcaggcgcctgtagtcccagctacccgggaggctggggcaggagaatggcgtgaacccgggaggtacagctatcgcaccc

SEQ ID NO: 13879 - DNA, 404 bp, Homo sapiens
  misc_feature (1)...(404): n = A,T,C or G
ccggctcgagcgcaagccccgcttctaagtcaccacgcggttctggaaaggcacttgcctctgcacttttctatattgttcagctgacaaagtagtattttagaaaagttctaaagatataaaaatgttttctgcagtaaaaaaaaagttctctgggccgggcgtggtggctcacacctgtaatcccagcaccttgggaggctgaggtgggaggatcatttgaggccaggagtttgagacctgcctgggcaacataatgaaacttcctttccagggagaaaaaaaaaaaaaaaaaaaagctctgaaagcatcttattttgtttaaaggcaaaaaaaaaaatttccttttgggnggtcnnnngaanaaaacaaaaacaaaaaaaaaaaaaaaaaaaaaaaaagaa

SEQ ID NO: 13880 - DNA, 460 bp, Homo sapiens
attgagcacactagttagagcgctgtgaattcgtcagggcgaaggtgaacactacatattttatagatggttaagttgagaattaattatgtttatcatggatggctactaataccaagctcatgattgttgcagcctcaacgtcttatgcagtaaaacttgtctgctgcactaaagggggagaaacccttatattttgcacactgtccattcgttaaatttattgtaacctaataccaaaaactagccgttcttcatattatttccccacctcctacttttttttttttttttggctgctcgcaaaagcccccttttagaaaaagacccataaccgggatgtgaccaaccctttccgctccttttccttgccagccattacggactttttctagagaggtcctttcacaataatgtcatttggagcactgtggatacaactttgtcaactgtagacggg

SEQ ID NO: 13881 - DNA, 510 bp, Homo sapiens
  misc_feature (1)...(510): n = A,T,C or G
ngagggcggggnnnnnnnnaatcgagaccactagcnagtgtggtggaattcgcctcgccgctgctgccgtcgcggactgtccttcgtctacttggattcagttccaagacagttgttacatttttctccaagaagccatcaaagtagaaagcatagaggatgtcagaaatcagtgtactgaccatggagcggacatgataagcatacataatgaagaagaaaatgcttttatactggatactttgaaaaagcaatggaaaggcccagatgatatcctactaggcatgttttatgacacagatgatgcgagtttcaagtggtttgataattcaaatatgacatttgataagtggacagaccaagatgatgatgaggatttagttgacacctgtgcttttctgcacatcaagacaggtgaatggaaaaaaggaaattgtgaagtttcttctgtggaaggaacactatgcaaaacagctatcccatacaaaaggaaatatttatcaggaagaa

SEQ ID NO: 13882 - DNA, 454 bp, Homo sapiens
  misc_feature (1)...(454): n = A,T,C or G
cattgagttcatagccctcgcggnggaattcgagggaaggaaactccagccagaactggcagcggttttatcaactgacaaaactcttggattctatgcatgaagtggttgaaaatctccttaactattgcttccaaacatttttggataagaccatgagtattgaattccccgagatgttagctgaaatcatcaccaatcagataccaaaatattcaaatggaaatatcaaaaaacttctgtttcatcaaaagtgactgccttaataagaatggttgccttaaagaaagtcgaattaatagcttttattgtataaactatcagtttgtcctgtagagggtttgttgttttattttttattggtttcatctgttgttttgttttaaatacgcactacatgtggtttatagagggccaagacttggcaacagaagcagttgagtcgtcatcactt

SEQ ID NO: 13883 - DNA, 497 bp, Homo sapiens
  misc_feature (1)...(497): n = A,T,C or G
cgccgcccccnnnnngnattgagaccttagnaagngngtttgtagactattagnccatgcggtggaattcagcgcaggtgcagagaggaaaagctgtcagctagtgccagcctccaagggccagcgctcacccttcaacagctggaggcaccactgtgcgaggctttccacaccggcctccctcaggaacaagacatcctcaccaggcaggggtgaggtatgggctccaggactggcttcagcaggcaccaggctgaagaagagacaagacaagctcaggctggtcagctccaacacacaccattcccagccaggggaccctcacccctctgggccctgtgtggggactgacacggttcctgcaggaaaccatttgtgccgtttcccacacacccggcagcctgagctatgtggctgacaggtgctcatgactaacgtgtcctcggaagggcaccccatctggggagcgggaagggaggttcactgcactgctctta

SEQ ID NO: 13884 - DNA, 334 bp, Homo sapiens
caggctggtctcaaactcctgagctcaggcaatctgcccgccttggcctcccaaagtgctaggattacaggtatgagccaccatgcccggctggcagttgtattttttaaagcccttctgatgattccaatgtgttggaaagtttaccttgtctcagatgtaactggtaaaggctgatttctaaattttctgtaattgcagcaacctttctctcctgtctacccttttagtttactgtatgccatggttttgttttggttacattgaaagaaagttaatttggaaaatttgggagaaatctaatcatgcctattaaggatgtaagacattacag

SEQ ID NO: 13885 - DNA, 330 bp, Homo sapiens
ggcgccttattaattgtcaatctaccaagcaacttggaaaaagaaaccacacatcgatattgtgccaatgccttcaaacttcacaggttgcctatccctcgtccaggtgaagttttgggattagttggaactaatggtattggaaagtcaactgctttaaaaattttagcaggaaaacaaaagccaaaccttggaaagtacgatgatcctcctgactggcaggagattttgacttatttccgtggatctgaattacaaaattactttacaaagattctagaagatgacctagaagccatcatcaaacctcaatatgtagaccagattcct

SEQ ID NO: 13886 - DNA, 468 bp, Homo sapiens
  misc_feature (1)...(468): n = A,T,C or G
ggggaaatcgaacttgcantnctatatgcagngncgnggaattccagcctcccaaagtgctggggttacaggcatgagccaccacacccggcctaatttttgtattgttagtagagatgggttttgccatgttgcccagcctggtctcgaactcctggactcaagcaattagcctgccttggcctcccaaagggctgggattacaggtgtgagcctttgtgcccagccaggctgcaacaatttgaacaggacaaagccccagctgtctctactgagatacgcagaccccaaacagggaatttccaggggtacaggaattaggaaaagttgagtccatggcatacagctaggcatacatccaggtgagctcaccatgtctagggatcaggaaaggctctcgtggggtgtgatgtgtaagctgagatccagaagaaagggtagaaacaagccacataaaaaacgggaggn

SEQ ID NO: 13887 - DNA, 489 bp, Homo sapiens
  misc_feature (1)...(489): n = A,T,C or G
nctgagatcgatagccatgtggaggaattcgtatattgtagatttttttcattcatgtgttatttaatttacactgatctctgctattttaaccccccaaataagttatttgtcctttaaggttggttactataatacccctcagtaagattccagtattaatttctgggcagtttgttctctgtatacaattgcaaatgataagcatttttgtgagtgaccacctttgcaatatgtttgttaatttacttcatgttgggttctttctgaaatgtacatctttacatataaaaacctcacattctacttgatttacacttcctagtctacattacatgtggntgaaggttttatacattctatatgcttttactaaatatacaagatttactactagaaatttggagaaagaacactaacacatgtacttgtgatttgttcatgttatattaaaacttgagatttgtgtatttatgtagagtctgtatc

SEQ ID NO: 13888 - DNA, 415 bp, Homo sapiens
  misc_feature (1)...(415): n = A,T,C or G
tcggctcgagcggcctcccctcccttcagggcacccactggttcccaggctggaaccagggtctctctttacctcctaccccatggtggcaccacagaggccctcagccgagtcctgcctgagtgttgcaagctcaggcctttaaggactgctgatgccccctcaggcctcccccaagtttgctgggctttggtggaagccctgagagcttcaggtcctgctcagcccgaggagcagtctggcatgggagtgaggccccgtccttctcactgcctggtcacatggtgcctanggatgcagggctggaggccagaggtgtcagcaacactgtgacccaccacaacctccagcctcccttttcagagcacagcattaaagtttggggaattctgtaaaaaaaaaaaaaaaaaaaaaa

SEQ ID NO: 13889 - DNA, 451 bp, Homo sapiens
atagaaaacctgatgacccttagaccgtgcggtggaattcgcggtcgggtccgggcgcccgcgcagaatcagctgtctgagctgcccaggcggcgggggagcagcgagcgggcttcagcgagccgcaggaggcacaggcctgtcctgggtccccgcaggtctgcgcgtctgttgttcccagcgctctgagaggcctgaaaaggaagagcaacctgtccagaatccccgcaggaaaggaaaaggaggggaaatctcgacatggaaaaactcttcaatgaaaatgaaggaatgccttcgaatcaaggaaagatagacaatgaagaacagccaccgcacgagggaaagccagaagtagcttgtattctggaagacaagaagttagaaaacgagggaaacacagaaaacacgggcaagagagttgaggaaccgttaaaggataaagaaaagccag

SEQ ID NO: 13890 - DNA, 469 bp, Homo sapiens
  misc_feature (1)...(469): n = A,T,C or G
nattgatgaccattagnacangcggtgagaacctcagaagnggcaattagtgaatttagcaggtgcctcgagctgctcttccgggcctcacctgaggaaaaagaacaaggggcagctttcaactgtgagcagggatgtaagtcagatgcggcactgcagcagcttcgggcagccgccctaattagtcgtggactggaatgggtagccagcggccaggataccaaagccttacaggacttcctcctcagtgtgcagatgtgcccaggtaatcgagacacttactttcacctgcttcagactctgaagaggctagatcggagggatgaggccactgcactctggtggaggctggaggcccaaactaaggggtcacatgaagatgctctgtggtctctccccctgtacctagaaagctatttgagctggatccgtccctctgatcgtgacgccttccttgaagaatttcgga

SEQ ID NO: 13891 - DNA, 438 bp, Homo sapiens
  misc_feature (1)...(438): n = A,T,C or G
nttgaagacctcatgaagccgttggaannccatgcacacacatacaaacagaaaagcttaaaagcttattctaagaaatagtaaatgctgaatgctagaaaggcaaaaagggataattgttggcatgttcacagagtggaaagaaaatacatctctctacaagtcacttgtgccattgtttgaatggtagagaggctagaagttggaagattcagactcagagatgacccagccaacgttttctgtaaaaagatgattgacttttcagaaacacatatttgaacttctgactcatgggaattgaaccaaaacctttcagccttagttaggccttaatgctttttgagatgaaaacttttttgacaatccatctttattcctaatatccatgctttatatagtattaatattgtgaatacacagatgtttgcatttagt

SEQ ID NO: 13892 - DNA, 472 bp, Homo sapiens
  misc_feature (1)...(472): n = A,T,C or G
nnnaaaattgtagnacctctagttagagcggcggaattcgaagatgggtcgttttgagagaggtaatcttattgttgcattcatttgggctaggttcatttctctttctctttccctcttttgacgtgtatttctctgaagttcttgtttggggcctatattactccttttttgctactatgactttattattattattattattattattattttgagacggagttttgctcttgttgcccaggctggagtgcaatggcgcgatctcggctcactgcaacttccacctcctgggttcaagcgattctcctgcctcagcctccccagtcgctgggattacaggcgcccaccaccatgcccagctaatttttgttatttttagtagagatggggtttcgctatgttggccaggctggtctcaaactcctgacctcaggtgatccacccacctcagcctcccagagtgctgggg

SEQ ID NO: 13893 - DNA, 419 bp, Homo sapiens
  misc_feature (1)...(419): n = A,T,C or G
atctggccagaaatggtatcaagaaaccccgatcacaaagatacgaatctcttaagggggtggaccccaagttcctgaggaacatgcgctttgccaagaagcacaacaaaaagggcctaaagaagatgcaggccaacaatgccaaggccatgagtgcacgtgccgaggctatcaaggccctcgtaaagcccaaggaggttaagcccaagatcccaaagggtgtcagccgcaagctcgatcgacttgcctacattgcccaccccaagcttgggaagcgtgctcgtgcccgtattgccaaggggctcaggctgtgccggccaaaggccaaggccaaggccaaggccaaggatcaaaccaaggcccaggctgcagccccagcttcagttccagctcaagctcccanacgtacccaggcccct

SEQ ID NO: 13894 - DNA, 465 bp, Homo sapiens
  misc_feature (1)...(465): n = A,T,C or G
aggcgccgggggnntattgatagcgtccctaggccgtgtggnggaattctgcacagtaggcgtgtttattaaacagatgattggctgggaaagtttcaaaatagctactgaatttacagtatcagtgctattactgtctttgtgtatttggtagagcataccgaagtaattaatcttctaatgaatgctgatgatattttattagaatgaaagcacagattagcattaatattttttattctggaaatcctttggcaagtattatgaagcccaaatttagaaaactatgagatttcaaaccacataaacatgattctgttttccattttattttttaactgttaggtatttgcagttctgttccgtggaacttctgcaggcctgtatttagcatgctgtaagtacttttgggtgaaataggctctgagtctaaattctcagacatgtttctgatgtattaccatg

SEQ ID NO: 13895 - DNA, 461 bp, Homo sapiens
  misc_feature (1)...(461): n = A,T,C or G
atcgaatccgtctgcgtgngcaggaancccatattcaagaaatcaatgctcaaaccacaggcctccggaaaacaatgctcctgctggatatcctaccttccaggggccctaaagcatttgatacattcctagattccctacaggagtttccctgggtcagggagaagctgaagaaggcaagggaagaggccatgaccgacctgcctgcagggtgttggccatgatccttatgatggggaggaagggaatcaccaattttctaccccatcccactgagcaacttagagatgacctaaggcctcgttacctgtgtggagtaactgggaattggaaggtgaggtccaattatatccaagtcttggcatcaaactgtgaaagacaaaatgcactggacaattaaggatatgattttattcatgcccttgcaatagggagaacatttattaatgaagaataactcg

SEQ ID NO: 13896 - DNA, 473 bp, Homo sapiens
  misc_feature (1)...(473): n = A,T,C or G
tgggnnccngnnnnnttagaacatagtagaacattagtccagagcggtggaattcgcactacctctaagccccacctcaccctaagaatccactcttgagggttttgaatgggtccttggctatgtatgaagagtcccctgggcaattctgcagtggttaagtctacatgttttaaaattacactgaagttcttgggcgatactctcatcccatgtcttttctccctcatattgcttttgatatgcagccctgttgaggtatggacattgagtcctgcatggtatccacagtatgcattcatcacgtttcacttactgattttcctcttgatagataagtaggtcccctccagttccctgttactgtcagtgctgcctcagtgaactgttcctgccccttctgggcctatgcacaattcctctggtatacgtttccaagtgtggagttgctgcatcagaagggatttgcttgc

SEQ ID NO: 13897 - DNA, 467 bp, Homo sapiens
  misc_feature (1)...(467): n = A,T,C or G
tggnngagggccgggnnnnnnnnaactgagactanctgaagccgttggaaagcctggcccctcccttctggaccccagagtgccctgtgggcactattactgctaacgtttgagtgccagctctgtgccgggtgccattctgggcagtcgcaccagctaccactaccacctgtagcagtcctgcccccgttcacagaagacattcaggagcccagcctgtgggggcagttcacatctgggatctcaagtcctaacacaaccaagcaatcctcgctttacagatgatgaaattgagccgccatggtggggaagcccaacccaaatgtgtcatctctgctgtgagctagacagcacagtggctgtgggcctggagggcagggctgcctgatgggcagccatcctgggaatgtctgcaagggtctggtgcttggtacagaccagtgagtctggggaattggggtctccac

SEQ ID NO: 13898 - DNA, 493 bp, Homo sapiens
  misc_feature (1)...(493): n = A,T,C or G
ncctggagaccctaggcagnngcgnggaattttgagaacccttcttctcaggcatgaacatgtactgttctcttcttgaacactcatgctgaaagcccaagtagggggtctaaaatttttaaggactttccttcctccatctccaagaatgctgaaaccaagggggatgacatgtgactcctatgatctcaggttctccttgattgggactggggctgaaggttgaagaggtgagcacggccaacaaagctgttgatggtaggtggcacactgggtgcccaagctcagaaggctcttctgactactgggcaaagagtgtagatcagagcagcagtgaaaacaagtgctggcaccaccaggcacctcacagaaatgagatcaggctctgcctcaccttggggcttgacttttgtataggtagatgttcagattgctttgattaatccagaataactagcaccagggactatgaatgggcaaaactgaattataa

SEQ ID NO: 13899 - DNA, 472 bp, Homo sapiens
  misc_feature (1)...(472): n = A,T,C or G
aggnnnaggcccgggnngnnnnnaactgagaccncattgatgccctctgaaagncnggnggaattcatatcttcaagtggattgttagcaaatttagctcatctgcaaaagatgaagttaaactcctctacttatgtgccacctacaaagcactagagactgtaggagaaaagaaagccttttcatctgtaatgcagcttgtaatgaccagcctgcagtcaattcttgaaaatgtggatacaccagaattgctttgcaaatgtgttaagtgcattcttttggtggctcgatgttaccctcatattttcagcactaattttagggatacagttgatatattagttggatggcatagagatcatactcagaaaccttcgctcacgcagcaggtatctgggtggttgcagagtttggagccattttgggtagctgatcttgcatttcctacgactcttcttggtcagtttctaga

SEQ ID NO: 13900 - DNA, 551 bp, Homo sapiens
  misc_feature (1)...(551): n = A,T,C or G
aggaacannnccttgaaaccccnctcgaaccacacttcgtgtggtggaattcggtggatatggtagcagaaggttctaaaaacagcagaaaagggctacagttcttagcaggagagagagcgaggagttgtcaggaaagctgcaggttactttgagacagtcgtcccaaatgcattagaggaactgtaaaaatctgccacagaaggaacgatgatccatagtcagaaaagttactgcagcttaaacaggaaacccttcttgttcaggactgtcatagccacagtttgcaaaaagtgcagctattgattaatgcaatgtagtgtcaattagatgtacattcctgaggtcttttatctgttgtagctttgtctttttctttttcttttcattacatcaggtatattgccctgtaaattgtggtagtggtaccaggaataaaaaattaaggaatttttaacttttcaaaaaannnnnnnnnnnnnnnnnanannnnnnnnnnnnnnnnnnnnnnnnnnnnannnnnnnnnnnnnnnnnaaancccccctcccca

SEQ ID NO: 13901 - DNA, 545 bp, Homo sapiens
  misc_feature (1)...(545): n = A,T,C or G
gaancacaaatttgataacccctcgatcacgttcgngnngggcaattccaacctgcaactctgagctccctacttcctgcctcatttcatgcagtcttttctgaacagcctatgctgctgccctgctggccccttgtgcacggcagctggccgtgtccgtagctgtcagtatgacttagatctagctcctacctactggttgatgtgttttttccttttgccaagtgattgagtctgtttagtagtttccatcattctagtctttaagtaaaaatgacactattgaggaaagtcagtctactcccttcttcctccccccaaacacgtgttctcttttgtcaggaaactcagccagtggactgtggcagagaaagtcctccactcagaggcagagactgagttaagtcataggtggccttatgcatctgcattgtttgcaggnggtaagttttccttccagtgagggctggagggatgaattagctggtacctgaagccccgcttagctctgacactctgccaacatcctctgattctaggtgtgg

SEQ ID NO: 13902 - DNA, 468 bp, Homo sapiens
  misc_feature (1)...(468): n = A,T,C or G
agggggccggggggntatagatagcgtccctaggccgngncgnggaattctctcactcagaccacagcggctccatgttatccattaatacagtttgggagagagaggatatgcctgtccccccagagctcatcacatcactagagaatttcccagtccagaaccccttattacctccagaccaagacctctctctctggagtagtaccaactgagctgagggcccagggctaatgatcaaaaggacatcagtgtgttcgtctagaaataagaaggagcagggagtttaaacaaattttcagagaacagttgaatctagagaaagggtgactaaagatgatcatgattattgttgtcaagtagtagaaagtttctcacatataaaagagagcagattgttcttaatacccctgaaagacataattagtccagtgggcagaagttacagtgagaaagggtttgatttaa

SEQ ID NO: 13903 - DNA, 413 bp, Homo sapiens
  misc_feature (1)...(413): n = A,T,C or G
gtgttcctgtgggtacatccacagcaatttatgactacttcaaaatcagttgtaagcttcttctatgtttgaaatccagcatttatgtgtgctttaggagacactgaaaatgctcttaaatgagatatgtaaaagccagtgaaaagttaaaagcagcttataaatgcaaggtattgttattattggaagaacattagttatgcaatgcctgtcagtctcttctacggtattctcctggatgaatgcattattcccttaaaactattccagtaagtctgactttagataatatgcaggcagacattattttcatatcccttgttttcattctctgagtgttgacatatttcaaatcggcgagtgaatccataaggtactcaaagaggcagtgtggtcttcccaccccagaacan

SEQ ID NO: 13904 - DNA, 449 bp, Homo sapiens
  misc_feature (1)...(449): n = A,T,C or G
nactgangacatattgatagccctgaggaaagcgcgcggagcttcctccgttgccaagggcggggcttagagctcaacccagacacctgcaggtgccggaagctgcgaaggtgacacatggcttttcagactcagcagggtgacttgcctcagaggctatatcccagtgggggaacaaagaggagcctggtaaaaaacagccaagcccccaagacctcagcccaggcagaagctgctctaggacctgggcctctcagagggctcttctgccatcccttgtctccctgaggccatcatcaaacaggacagagttggaagaggagactgggaggcagcaagaggggtcacataccagctcaggggagaatggagtactgtctcagtttctaaccactctgtgcaagtaagcatcttacaactggctcttcctcccctcactaagaagaccc

SEQ ID NO: 13905 - DNA, 451 bp, Homo sapiens
  misc_feature (1)...(451): n = A,T,C or G
atcgagttcgcatacccgngcggnggaattcccgaggtgtcaccaccaaagagttgtatccagagtttgggctggacatgaatgactgagcaggctcatcgccccttgtccacagctcccagggacagaagggtgtggacatgataaacactgagagcccaaccagcacacctacagagtttccagcgagacaatgccagaagcacttttctagagagcccaagcccaatcaggaggaggctagagaagaggcgggcagggaggaaggggcgttcccagctccaaggttcctgaaatgtcgcagtgatacttgtgtaggggtacatgtactttatttgtcaataaacgtatctgtacactgaanaaaaaaaaaaaaaaaaaaaaaaaaaaaaaaaaaaaaaaaaaaaaaaaaaaaaaaaannnnnnnnngggaggtggcgcttctgagtcg

SEQ ID NO: 13906 - DNA, 586 bp, Homo sapiens
  misc_feature (1)...(586): n = A,T,C or G
cattagatgcccgctcgngngnnccnnnnattagaatccctatcagagtggtgcgaattccagcggtggaagtcattctgatatggagttggcattggaagcttattctttctgttcactggagagagagagaactgtttacagttaatctgtgtctaattatctgattttttttattggtcttgtggtctttttaccccccctttcccctccctccttgaaggctaccccttgggaaggctggtgccccatgccccattacaggctcacacccagtctgatcaggctgagttttgtatgtatctatctgttaatgcttgctacttttaactaatcagatctttttacagtatccatttattatgtaatgcttcttagaaaagaatcttatagtacatgttaatatatgcaaccaattaaaatgtataaattagagtaagaaattcttggattatgtngttaagtcctggaatgcacgcctgtaagggggagggttgaaccctgtttggattgcagagtgttactcagaatcgggaaatccagctagcggcagtattctgtacagtagacacaagaattatgtccg

SEQ ID NO: 13907 - DNA, 480 bp, Homo sapiens
  misc_feature (1)...(480): n = A,T,C or G
aggcgcgnnnnnnntnnnaatcgtagacattagtcagtgcggtggaattccgttcctgtgtgcttagtcatcgggtccgacacaggctggactgatctggggagccgcgaagggcctgccttcacaaagggacgtaacgcaagtactgcgggcagtgtttgaatatggccctgaacaatgtgtccctgtcctccggtgatcagaggagcagggtggcctaccgctcttcccatggcgacctcagaccgcgggcgtcagcgttggcgatggtctccggagacggcttcctcgtttccaggcctgaagcgattcatctaggacctcggcaggcggtgcgaccaagcgttcgggccgagagccgtcgagtggatggtggcggccggagcccaagggaaccagatggccggggccggagccgccaagccagattctcaccttacccaatccctgccgttgaacccgatctcctaagaagtgtgc

SEQ ID NO: 13908 - DNA, 459 bp, Homo sapiens
  misc_feature (1)...(459): n = A,T,C or G
agcgcggncctcccatgatagcatacnagnggcnggaattcaaactccctttttaagaaaatactacttttaacttgaaaagtataatcttcattttaataccaactggataaaaatcaaagtattcaaattctttataattgaatattcaaagacttcctatcagattttccatttgctttttgagccaagaatgagaatcaaaggcacatttagccagttttaaattgacatggtaagatagtattaaatatggtttttctcaccaagattgactgtctcttactcacccattaaatagataaactactccaggttgagtttgttggttttgtttttttcttttttttttgagatggagctttgttctgttgcccaggcttgaatgcagggntcnatctcgngtnaagnnnnctnngcctncgtggataaagcaattctgcctcagcctgatgagag

SEQ ID NO: 13909 - DNA, 476 bp, Homo sapiens
  misc_feature (1)...(476): n = A,T,C or G
ggagcggggnnnnncctgagaactgagaaccgtgggaanccgcctncccgaaaccgcagtcagccggccactgaatgagatggtcttgaccccactgacagagcaggagggggaagcctacctggagaagtgtggcagcgtgcggcggcacacggtggccaatgcccactcggacatccagctgctggccatggccaccatgatgcactcgggcctgggggaggaggccagcagtgagaacaagtgcctgctcctgccacccagcttccccccgccccaccggcagtgctccagtgagcccaacatcaccgacaaccctgacggactggaggagggggccaggggcagccaggagggctcggagctgaactgtgcttccctcagctgagtcgccacccctgggcctttccatctcctgttttgcaaccaggatgaggacccctccatctccgtggattactgaggngggctcttgg

SEQ ID NO: 13910 - DNA, 409 bp, Homo sapiens
  misc_feature (1)...(409): n = A,T,C or G
caaccacattcaataaggaattgtggggttcgacatgagttaactttgaaatacgtatgaattctggagaatcctgaaaaagacggtgcttcaaccagcttgcatagcacagagaatattcttggttacagaattcatatgggaactaggcttttaagatgttaataattagctaagctttagtaacccttactgtgctagtagattttagtagatattggtgttatattgtttgatgtttgaaaatatattaatatatgtgccgaacaagaaaccgaaagctatattgtactgtgtatttttactttagtcctcataatcatgttgaatttatgtgatcattgattttatttcatatggaaaagctaatttcttcttaaatttacattacctaatattctcactagcn

SEQ ID NO: 13911 - DNA, 450 bp, Homo sapiens
  misc_feature (1)...(450): n = A,T,C or G
nttgagttcgagaccttaggccangcggtggaattccacgattgcggccaagcaccacatctccattgctgagatctatgagacagagttggtggacatcgagaatgccattgcccactacgagcagtctgcagactactacaaaggcgaggagtccaacagctcagccaacaagtgtctgctgaaggtggctggttacgctgcgctgctggagcagtatcagaaggccattgacatctacgaacaggtggggaccaatgccatggacagccccctcctcaagtacagcgccaaagactacttcttcaaggcggccctctgccacttctgcatcgacatgctcaacgccaagctggctgtccaaaagtatgaggagctgttcccagctttctctgattcccgggaatgcaagttgatgaaaaaattgctagaggcccacgaggagcagaa

SEQ ID NO: 13912 - DNA, 454 bp, Homo sapiens
  misc_feature (1)...(454): n = A,T,C or G
nattcgacgtgcgactacnccagngcggnggaattccttgggccctgtgagagaacgttagagtggagctggcacaggtgaatggtccactctgccggctgaatggacgctggagcggctcggggcctctcctggctgaggcgggctgtgcaagcaggaggatgcggggcccacgaggtacaggggcacagggagacctcctcctccagcaccagtgtcctctcctgaacctgaacagtttgctctcaacatcccacctggtacatcctgcctgcctccctcaagggaccctgacctccaacatctaacagtaagaatgtgaccagccagcattgcaggaggggactaagccagccccaacacagcatcagtgcagggactttttttttttttttttttggaaagggagccccctttttttcccggcttgaagggaggggccccaattttggcg

SEQ ID NO: 13913 - DNA, 462 bp, Homo sapiens
  misc_feature (1)...(462): n = A,T,C or G
ttttaattgaagacctctagtccatgcggtggaattcatagattctctttcctagctctgtccactgaaagggccaggatgcagtgacacgttgcaaacaaggttatattagtttccaaatactgttcccatcaaaagggcaggactccctggagtattacatgattccaggtcttgcattagatgaacatgaaacatcttgtgccagaaagcaaggaattgctgaaagagtgatgggaagatgtcaaaagaacataggaacgaccacctgactggctaaatttgagacaatgtgaaaataaaaaaaacgacaatgatagattatagaacattgaatatccagaaaataatgacaaggaccctcagactaatccagattgtaggacatttcctaagacaattgatctgaactcttcaaaaaatgtcaacgtcatgaaacactgaaatgacagtcactgaaan

SEQ ID NO: 13914 - DNA, 464 bp, Homo sapiens
  misc_feature (1)...(464): n = A,T,C or G
gggcgccgggngnntaagttagcgtccctaggcagngncgnggaattcgctgattacatattagaggtttatttttatgattctatataaacgtgcacgagtaatttaaaacctgcattgggattgattggaatattgtcctaaattaattaaatcttgcactgttttgaatgcatctgctatttatacatctgcaagtgggtatgtcataaggagtcagattatctttaatttaaaatgaatacttagttttacctttttgtttattttttgattaattttgtttttataaatgttttcaagagttatagcaaattgatttctaatttttattgctattacaactgatgtaaatggtagtttcagtttttgtgagatttaaaaaaataaagcacttattctgaattttttgaattgatttttaattatttttatttagaatatagctgaaaagctgtaatatt

SEQ ID NO: 13915 - DNA, 467 bp, Homo sapiens
  misc_feature (1)...(467): n = A,T,C or G
nttgagaccactatgagngccgtggaanacggcnnatataanttaaattactggattcaacattataaatgtgaagatggctaagtcatgatggccatattttgtcaaaatgctatttatatgtgaaaatgttggttttacttgacgcttattattgggtattataatttttatgtcaaagttcaggtaataaattgtgtcttactttgatttgcatttttaaattaatgagattgaaatatttggatgtcgtatgttaatttgtttcctaccttttaataatttatccattttgattatttgtatgaatttcttgggtaataatgtatcttttccatatttatcgcatgtatttttttcccattctttgctgttgtttctgttttttggagcaagggacatcgatatttcttaacttttaagtggtgggaacatcaaagaaaggtgggctgagaatacacgagtgc

SEQ ID NO: 13916 - DNA, 547 bp, Homo sapiens
  misc_feature (1)...(547): n = A,T,C or G
agtaaaaaaatttgatnacccctcgagcatcgttcgngnggngcaattcccacaaagcaaaaagttgcatagccacaacgaagatctagttggatatagtttttgatttatgttgcagttatagccaatttaggctaatgcttggttttggagcttttatacacaacgtttttgttaggcatcacagttttgcaacctctgctccaaagagaaaaatagaatgagttttctttctttttttttttttggggggaaaagtctcccttttttgcccaggctggagggcaatagcgcgatttgggctaattgaaacctcgccttcctgggtaaaagcaattttcctgccttccctcctgagtacttggaataacgggcgggtggcccccccctgggttaatttttgtttttttattaaagacagggtttaaccttgccaagctgttttggaactcctgacgcagggacccccccgccttgccctcccaaagaactggaataacgggcgggagcacttgcgccgtgttgagttttcttaaggggagctaan

SEQ ID NO: 13917 - DNA, 470 bp, Homo sapiens
  misc_feature (1)...(470): n = A,T,C or G
ggggccgnnnncctgagnactgagatcatagcccagagcggaggaattctgagagaagagaaggacagggaacagaagatctgtccatactggacgtgcagcgagcttgacaggaagatcggtagtgccagaaaacaaagaaagcctgccccagcctcgacagggaaacagcacatgtctaaggcccacaagccttggccctaccggaggaaaagtcaattttcttctcgaaaatacctgaaaaaagaaatgaattccttccagcaacagccaccgccattcggcacagtgccaccacaaatgatgttacctccaaactggcagggggcagagaaggacgctgctttcctcgccaaggacttcaactttctcactttgaacaatcagccaccaccaggaaacaggagccaaccaagggctatggggcccgagaacaacctgtacagccagtacgagcagaaggagcgccc

SEQ ID NO: 13918 - DNA, 544 bp, Homo sapiens
  misc_feature (1)...(544): n = A,T,C or G
aggaaacaanccttgatcatcgnctgggagggcacttccctaatgaccctgagcccaagccctcagtggaacctgtcaagagcatcagcagcatggagctgaagaccgagccctttgatgacttcctgttcccagcatcatccaggcccagtggctctgagacagcccgctccgtgccagacatggacctatctgggtccttctatgcagcagactgggagcctctgcacagtggctccctggggatggggcccatggccacagagctggagcccctgtgcactccggtggtcacctgtactcccagctgcactgcttacacgtcttccttcgtcttcacctaccccgaggctgactccttccccagctgtgcagctgcccaccgcaagggcagcagcagcaatgagccttcctctgactcgctcagctcacccacgctgctggccctgtgagggggcagggaaggggaggcagccggcacccacaagtgccactggccgagctgggcattacagagaggagaaacacatcttccctagagggt

SEQ ID NO: 13919 - DNA, 480 bp, Homo sapiens
  misc_feature (1)...(480): n = A,T,C or G
gaaggttnaaaaggaagnnnttttgaacccctnattgtagtcactagnccagtgcggtggaattccaaccctgatgaagctgttgcttatggtgcagctgtccaggcagccatcttgtctggagacaagtctgagaatgttcaagatttgctgctcttggatgtcactcctctttcccttggtattgaaactgctggtggagtcatgactgtcctcatcaagcgtaataccaccattcctaccaagcagacacagaccttcactacctattctgacaaccagcctggtgtgcttattcaggtttatgaaggcgagcgtgccatgacaaaggataacaacctgcttggcaagtttgaactcacaggcatacctcctgcaccccgaggtgttcctcagattgaagtcacttttgacattgatgccaatggtatactcaatgtctctgctgtggacaagagtacgggaaaagagaacaagatt

SEQ ID NO: 13920 - DNA, 486 bp, Homo sapiens
  misc_feature (1)...(486): n = A,T,C or G
gggaggaggcgngccnnnnaaattgagacttgagacctagcccagngcggnggaattcacccggaggaaggaaatgacccaaaaattggaggcactccatctagaagctctttgtgaagaggttcgaaaactgtgtgtttgtgtaatgattaacaactgttgaaaataaagataattatgcttagaagttgaagattgtaccctttatccactctttataaatagtaatgatgactaacttttctagatcatgtgctatgtgccaaggacattataggggctttatatagataatctcttttaatctttacaatgattctttgaggtaggtgtgttatgaactgcatcatgggaaacttttggcttagaagttaaatgacttgcctcagatcacatccctgctaagtagtggagccaacagtgtgctggagtccacttgcattggctcacaagagccaaatgtgcacatctcttctcagctctgta

SEQ ID NO: 13921 - DNA, 473 bp, Homo sapiens
  misc_feature (1)...(473): n = A,T,C or G
agaggggcccnnnnnnttagagatcgtagtcattgcggnggaattcgcgtctgcacaggccagcctggcatctaaagataaaactcccaagtcaaaaagtaagaagaggaattctactcagctgaaaagcagagttaaaaacatcaggtatgaaagtgccagtatgtctagcacatgtgaaccttgcaaaagtaggaacagacattcagcccagactgaagagcctgttcaagcaaaagtattcagcagaaagaatcatgagcaactggaaaaaataataaaatgtaataggtctacagaaatatcttcagaaactgggagtgatttttccatgtttgaagctttgcgagatactatttattctgaagtagctacattaatttctcaaaatgaatctcgtccacattttcttattgaactcttccatgagctgcagctactaaacacagactacttgagacagagggctttat

SEQ ID NO: 13922 - DNA, 467 bp, Homo sapiens
  misc_feature (1)...(467): n = A,T,C or G
ntagagcccttggnnnnccnttagtagaccttagtcagtgtggtggaattcgatgatcctatgtgcctagaaaggacactgtgtgctgctcatgacctgcaacaggaaaaaagccatttcttgttagcagtgtaagaaccttagagcaaaggagttgaccttctgattgaatataagcacaaccatattaaatgaatcaatacaagaaaattatttctgatactatgtatgtacatatttcttctctaaaatgtatcattcttttctaatgtatatgatctaacaaaaatgaaacatgaaatgcagtagcaaccactaaaaaaaaaaattcaaggacatctaactttttctctcacttttgccctttgtttatccttccctgtgattagataaacaaaataaaaaacaaaatgctgtatttctcttcttacgccagtcagaaccaatccgaaaagaatgtgtgttgn

SEQ ID NO: 13923 - DNA, 457 bp, Homo sapiens
  misc_feature (1)...(457): n = A,T,C or G
gcggtaaattcgtagacactagtccattggagggcattccttcccctaaatctctctgtagctgatgccccaatttcactattagctcttcagacttggatgttaagcactgtgccttcccctggacctctctttaaatgtcacagctatttctggcaggtaagactattgctttggttagtgtgaacacacaccactgtggatcacaaggcacctgagagaaaaggctgccgaaagcaggaaaataactcagaaaaaagaaaaaaaaacacatggtgctgaaaaatacaacagatatgcatttgtatacttatgatctaatttatgtcagtcattaaaagaaaataaggtgtttagaaaatacagngctgtctatggttatatttaatattgggaccacttaatacaaagcaaagcattcttgcttgctctcatggagagtgcaatttagaattgn

SEQ ID NO: 13924 - DNA, 471 bp, Homo sapiens
  misc_feature (1)...(471): n = A,T,C or G
agggcgcgcgnnntnnnaatagaatagcntatcntgngaggnggcattcctggatgtaatgttagggcatctatgggatagggagatcttagcgctggtctaaggaatacaaacatgactttagttggtgtctaaatccatagatgctcagcaccgaactcagtctgacttccagatgctaacaacacaccccaggcaggcgaaggggcatgcttttccatactcttccttttgactggcttgatcacagactgctgctccaaagctggtgttacgcacagctcctcgtcccctccctgcctgcccagggccagcatcaggggctgtcatcactgggggatgcagagctacctgtaacagcaacaaggaccattgtcaactccgttcccgtctgacacccacactgcacctttcagagctgaccataagggttaccctcacctgcccagctgccagggaagaggagggctg

SEQ ID NO: 13925 - DNA, 410 bp, Homo sapiens
  misc_feature (1)...(410): n = A,T,C or G
ggaataatagcatcgcatagaaaattggaaggaaaattttttccttctcatcggatgcatggtggggtttgtgaattcctaacttttctcccacatatccccctcacggatgataggaagaaatagacttgaaggcattaactctttctggaagcctttcccaatacttctcacccctgcctgtcttcctcctcagccactggttaggtcccccatccctgttaacaccctgaaaacttccatctcacagccactacattatcttaaaattaactatttacttcttcatttctcccacaatactgtgagctccctgaggggaagaacttgtgctatttatctgtcttctagcatgatacctggcatatattaggtgcttaagtttattgaatgaatgaaagccaagaatn

SEQ ID NO: 13926 - DNA, 477 bp, Homo sapiens
  misc_feature (1)...(477): n = A,T,C or G
nttgccgccgtcttttnnnnnaagcctttangaagnctnnncnnntnnnnntaagaaccnaacctaagtgtgcatcaggctatcaagctgagtagttgaattatctttatgaagttgtttttctttaaaggcaggagagagtttacgtgcctgtcacccttattttccgacaggttttaactagggtcttaacctcatgtagaaaccagaaataacaaacagtatggaaaaccgtctttaatgtagttgagctccaggtttggggtagagaaaattgggtaatttttcagttcccgaagttgagtcctcatagtttgattttctagtattgttaagtaccaccgcaaaaacaaacaaacaaaaaaaaaacaccacacctgtgtttacttgtcagcaaagctaattttcgtgtcagcttgggaacattgttttttcagttgactatttgattctttgactgagaatcattaactgttg

SEQ ID NO: 13927 - DNA, 502 bp, Homo sapiens
  misc_feature (1)...(502): n = A,T,C or G
ggggnagcgcggcnggnnnnnnccttgactgcgtncntacgacanngcgnggaanttcccaattacagcccacctcttgcatcgtcacctacaggtatctaagcaatggatccaagccctggaggttggtgagagccatgtattacccctagatgaaattggacaagagaccatgaccgtaaccctcctcgatgccaatcactgtcctggttctgtcatgtttctctttgaaggatattttggaaccatcctctacacaggtgattttcgatacacaccatccatgctaaaggagccagccctgacactggggaaacagatccatactttatacctagacaacaccaattgcaatccagccctggttcttccttcccgacaagaagctgcccaccagattgtccagctcattcgaaaacacccacaacataacataaagattggactctacagcctgggaaaggaatcactgctggagcagctggccctggagtttcagacn

SEQ ID NO: 13928 - DNA, 451 bp, Homo sapiens
  misc_feature (1)...(451): n = A,T,C or G
cggggnaaatgtttccactacccgtgcggnggaattcgtttaacatgggatttggagaggacaacatctaaactataacactaccctttatatcacgtaatgtttcttagtatgactatctttggaagaaactgatttctaagtttggcttttattttatgaaagttgtaaattttgtgtaactaattaggtctccttctttgcgtaaaccactataaggccaggcgtggtggctcatgcctgtaatcccagcactttgggaggctgaggtgggcggatcacctgaactcaggagttcaagatcagcctgaccaacatggtgaagccccatctctactaaaaaaaatacaaaattagccgggcatggtggtgcatgcctgtattcccagctacagggaggctgaggcaggagaatcgcttgaacccgggaggcggatgttgcagtgagccg

SEQ ID NO: 13929 - DNA, 466 bp, Homo sapiens
  misc_feature (1)...(466): n = A,T,C or G
tggcggtnnatgagtgcgtacgctcggcgngcaantngnttggcaagaagatcccggagcatcactatgaaaagaaagcgggaagactctgctcccttatcctctgcggcccggagagggagttgctctcgaactccacgtgacgtttctggtcttagggatgtcaagatggtgaagaaagccaatactatgatgaagaatgctcacaagaagatgaatcggtcggggaagaaaggggaggcggatagacacgtgattgatatgaagcccaagcacttgctgtctgggaagaggaaagctggtagaaaggacaggagatattatccgtttggctggcgtggcttcgctagaggggtggtgtttatttcctggtttggcacagaatggattcatgaaattggagctctgtataaactggaaaagacaaaataagtaaagcacttgttgctttgctgaaaactatgag

SEQ ID NO: 13930 - DNA, 461 bp, Homo sapiens
  misc_feature (1)...(461): n = A,T,C or G
nattgaagnatcgtagactattagtccagagcggtggaattccgatgtgcaaagtgtgggaagagtcttgaatcaacaactctgactgaaaaagaaggtgaaatctattgtaaaggtaaaattcatttcagttactgctgtccatatgaatattccacactggttcttgtttaatgaaatgtcactggcattaaaaaaaaaaaaaaaaaaaagtttgcccctattttttgaaaataaaatatcccaaaatgcttataaataacaaaaaaccccagttaagttcctgatcatttaaaactcccccccaaataaaaaccccacaaaaagccatcttttgccttcatgtcttgaccaaagcgtaagtttatggaaaaaaacagacaaatacttaccttacctggcctgactaatgcttgcaactcagcaggaccacgctgaacactatagggccaaaatgggtg

SEQ ID NO: 13931 - DNA, 449 bp, Homo sapiens
  misc_feature (1)...(449): n = A,T,C or G
tgggcgagatcgancccatcgtagacatctgtccangcggnggaattccccagcttgaaacggtggagtccgggcaaatgagctctgaggacggcttctgggtctggccgtgacccagattgcagtgagagttcccgcaggccccgcctctttctgggcctcgtgtctcccagccgccgggccgggtgcgaggccttacccctctgatctgctgcaggatgggcctctccgctgcggccccgttgtggggtcccccggggctgctcctggccatcgccctgcacccagcgctgtcggtgcccccgcgccgggactactgcgtgctgggcgctgggcccgcgggcctgcagatggcctacttcctgcagcgcgctggacgcgactacgcagtgttcgagcgggccccgcggcccggcagcttcttcacacgctacccgcggcaccgcaag

SEQ ID NO: 13932 - DNA, 451 bp, Homo sapiens
  misc_feature (1)...(451): n = A,T,C or G
agagccgngattganncccatcgtagaccattatacagtgcggtggaattcctcgttcacagagctgacaccttggccccccgtccacgagggcagggacggtctctcctggctggctttggggtgtggcccacttgccatgggtggctgagtctctgtccattcagcccttcattcagcaggcacttctcaggtgtctgcagggccagatgctggtgaccgcctggccctggccctgctctcatggcatttgtagcgggaggtgtggcagacaggacagtgcccaaagaaggccaggagaggcctctctgcagagcgacgtctgagcggagacctccatgaagaggtcagcagggagaaggagacacaggcagctgggcagagctgaaggcaggccaggctgggcagcgcctgcatcccgcctgaggcgtccaggtccgttcggggaagn

SEQ ID NO: 13933 - DNA, 465 bp, Homo sapiens
  misc_feature (1)...(465): n = A,T,C or G
natagagatcattagnccangcggttgaagtccctcatctctactaagaacaaacaaaacataaacaaaaacaaacaaaattaaccgggtgtggtggcacatgcctgtaatcccagctactcacgaggctgaggcaggagaatcgcttgagcccgagaggtggaagttgtggtgagcagagatcgagctattgccctccagcctgggaaacaagtgaaactgcatctcanaaaaaaatattatataaaaaagaaaaaaaaaagggggggggggggcttttcaaaactctcgggaaaaaggggggggggtaaaccccaaacaaataacttggaaggaagaagggggggaaaattatttgttttttattaggggagggaagggggatttcccctgggaaagccttaaaaaaaaaaacttaaggccttttcccttgaaggacggggtttaaaggttggccccaattta

SEQ ID NO: 13934 - DNA, 433 bp, Homo sapiens
cagagacattatttttttaagtagggtgagtaggtggaaagtgcaggaagaaaaactagggcaggaaaacaaaatctgagacatctgcagcaatatacctgtgatgtgctgaaggtctgaatttctattactgtgtaggaaatggaaagtcctacatctcagtaagtgtgtgtaaccagctaacagcagtatagagaataatatctttaaaaagttcttttgttttaaattaacacctgatttgagtgttaatacttaatgagctgagagttccagatttgagagcagctctgagcagtatagcagcagcctgaatactcttctccagaggaattgttttgctaaaaggtgcagtgactttgggtgaagtgtgaagaatggagaccatgtagcatggcagggggaacatggattttggagccaaactgacctt

SEQ ID NO: 13935 - DNA, 458 bp, Homo sapiens
  misc_feature (1)...(458): n = A,T,C or G
ggggcacgnnnnncctgttagataccantggccangncgnggaattcggcttagtccttgcagctgccccagagtgctgtttggagtgtaccgtcctcagtaatgtatccagaagaacaaatcgtgacatggcttatatctttgggagttttagagtcccctaaaaagaccatctgtgatccggaggagtttttaaagtcctcgctgaaaaatggggtagttctgtgcaaactgatcaacagactcatgcctggctctgtggaaaagttttgtctggatccccaaactgaagctgactgcatcaacaacatcaatgacttcctgaaaggatgtgcaaccctccaagtggaaagtcctgctgttttgcccaggctggagtgcagtggtgcgattttggctcactgtaacctccgcctctttggttcaagcgattctcctgcctcagcctcccaagtagc

SEQ ID NO: 13936 - DNA, 468 bp, Homo sapiens
  misc_feature (1)...(468): n = A,T,C or G
tgcgggcnnntttgaatgagtgcataggacangcggggaantcaacagctgcagatgataaaaccatctaccatcaaatcttccagaggtttccactgtgttttgtcagtgcagtcagccctctgtattcttgaggtcctcatcttcagattcaactagccacagatcaaaaatatttggaaaaagaacaattaaaaaaataaaaaataatacaaatttaaaaaccaatatagtataacaactatttacatagcatttacattgtattaggtattataagtaatctagagatgatttctagaaaagggccgggcacggtggctcatgcctgtaatcccaacactttgggaggctgaggtgggtgtatcacctgaggtcaggagtttgagaccagcctggccaacatggtgaaaaccatctctactaaaacacataaattagccgggtgttatggcgcgcgcctgtagt

SEQ ID NO: 13937 - DNA, 489 bp, Homo sapiens
  misc_feature (1)...(489): n = A,T,C or G
cganagggcggcgngccnnnnaaaattgagaactganagctacgcaagngcggnggaantaatgtacccttggcagacttcagcatataccaaattttaaatttaaatcagcttgaattcagtggggtatacaaatcattttagttgttttagggctttttattgaatagaaaaaatataaacaatgttgtagagtaatgagaaatcctccacactgaaaaaaaactagtagttttaatttttttggaatcatattttctgaggtgtaactggctttcattagatgatcatacttttcctgacatttttacaatgtattctttctttaaatataaaaactgacaagataaatatagtgtttcaacttcttagcctattatttgtgatttttctgttttcctctgacccatcattgattctataaaaaagtgccaggccaagaaacaatagttagagtaattcttcctttaagttctttcagcagtcttg

SEQ ID NO: 13938 - DNA, 487 bp, Homo sapiens
  misc_feature (1)...(487): n = A,T,C or G
gggaggaagccggnaannnnaaaactgagatcgtaggcattgcggnggaactcgtggctttttgtcacaggactacagaaccaacctccttttgtctccaagcatgaagagccagtatctgagaattaaagtcctccagagagtagactttagctaataattggtagatatatagttataagtattccagctctgttgttctgtttgagacaactgtgatttgtgacctgtattgtctccagtgtccccctattggattgtgccaaagtgatcctaaatggtaccttggttgatatcaaaatattggtcggccttcttcctctccctgttgcatggacccactccctggtcactatatttttacttggaccacttcctaatatatcactttccgatgagtcctcaatcagagtcagcttatggggaacccaatctaaaggcacagccaagttgttttccaaaatatttcttttactttacactcttg

SEQ ID NO: 13939 - DNA, 589 bp, Homo sapiens
  misc_feature (1)...(589): n = A,T,C or G
cattaggaagcacagctcagngnnncncnnnnnatggaacactagtccgagtggtgcaattcaataggttaactgtacaaatgtcagctagttttgactactaattgagggaaattttagataatttttaaattcaaagttatttataaaatgctagaatttgttttaattttttgtattttgagccacttcacatgaagactcagttgcatttttatcgaatacatttttatcaacagttaaagactatggtggttttttcagagtttggctaagaatgttgttaccatcttctttgtttgtggtacaatattttcagtgcaaaagagatgtcattcagttaaaaagacaaacctctagatgtgtaattacatggaaaatactagcaatgtgaatgcttttgtagtaaccatcttgtagtacctgtgaaatctataactcagaaatggtcagatggtcaggagccagctatgcagcagtataccatctgtttaattattttgtaggtcctgtgtgtggaaccaactataaacccagttctaaagttgtgtatgatggtgaacctttgngaatagttcttatcaacttn

SEQ ID NO: 13940 - DNA, 439 bp, Homo sapiens
  misc_feature (1)...(439): n = A,T,C or G
tgagcggtttgagncctttaggacatcgaacggccgggaattcgttatgctgtgcgtgtggtggctccaagccaagcacctggtatgcaggcctttctcttcccaacgggcgtggcgtcgtcctcttcacagatgccacgttgcagccccaaggcctcaccattttgcgttttttagaaacccattttcttggtcatttataaagctgctttatagatatctttgatcctggcatgccttggtttcctctcccttccctctttccaatcctggcttcctaacctcctcttgtagtaattctcaactcaactcatagtcccaagaatttggaaaggtaggatgctgtgcggggagctcgaggctgaggcataatcactgcttcggttctgctcatcaggggacacgctcccttactcatggcagtcatgtttgattgccg

SEQ ID NO: 13941 - DNA, 447 bp, Homo sapiens
  misc_feature (1)...(447): n = A,T,C or G
cggggcggttttgancctttcgtagacattagtccatgcggtggaattcgcaggatgtagacctcgctgaggtgaagcctttggtggagaaaggggagaccatcaccggcctcctgcaagagtttgatgtccaggagcaggacatcgagactttacatggctctgttcacgtcacgctgtgtgggactcccaagggaaaccggcctgtcatcctcacctaccatgacatcggcatgaaccacaaaacctgctacaaccccctcttcaactacgaggacatgcaggagatcacccagcactttgccgtctgccacgtggacgcccctggccagcaggacggcgcagcctccttccccgcagggtacatgtacccctccatggatcagctggctgaaatgcttcctggagtccttcaacagtttgggctgaaaagcattattggcatgg

SEQ ID NO: 13942 - DNA, 478 bp, Homo sapiens
  misc_feature (1)...(478): n = A,T,C or G
ngtgataacctttccaggttgggaactctcaaactaaggatcagggaaatgaagtgacttgtccagggctacacagctagtgactggaagacagaaaatgcaaatcaggtctgcttggctctatgccaactctccctccaccaccccacactgtcttcaggcaggtccccaaattctgtttctgttttcagtcctgcccacctcccagcccccagtgctgggatggggccttctgaggcctgggggaggtagagaagcagtggaacacctccacccagcccctctgaaccctggaacgtcagtgcttaccctccagcaccacctccttgcctgtcttcttgaggacctgcaccgcctcatcatgggtagcagaggacaagtcttccccattcacagacaggatggcatcccccacaaaaagggcctctgtctggtcagctgccaatcccttgaagatcttggaaatgagaataggcat

SEQ ID NO: 13943 - DNA, 438 bp, Homo sapiens
  misc_feature (1)...(438): n = A,T,C or G
gggcagattgagacaatgagagcatgcggaantccgaggggttcatacggcgttgttctggattcccgtcgtaacttaaagggaaattttcacaatgttcggagcccttgatgtcctgcaagtgaaggaggaggatgtccttaagttccttgcagcaggaacccacttaggtggcaccaatcttgacttccagatggaacagtacatctataaaaggaaaagtgatggcatctatatcataaatctcaagaggacctgggagaagcttctgctggcagctcgtgcaattgttgccattgaaaaccctgctgatgtcagtgttatatcctccaggaatactggccagagggctgtgctgaagtttgctgctgccactggagccactccaattgctggccgcttcactcctggaaccttcactaaccagatccaggcagg

SEQ ID NO: 13944 - DNA, 482 bp, Homo sapiens
  misc_feature (1)...(482): n = A,T,C or G
tgcctggtcgccngatgaaaccctgctagntancctcaggaangccgnggaattctttttattatatatcgtcttttctagggtaccagccaaagaaccggagctttggagagatgaagtttaaacagtgtcctacagagaacatggctcgtgagcatttcaaaaagcatggggctgaacactactgggaccttgcgctgagtgaatctgtgttagagtccactgattgagactactgcaagcccttgcctctcctcccttgcctttgtctcttcagtcctctcacttattctatttcccaaccccctcccacttgtttgtgtgatctcagaactgtgccaagcagacactgggacaaagggagaatatcttgctcccctcctgagtcagcctggtgttgccctttattccccttatgtgcatatgattaaagagttatttttaaaaaaaaaaaanaaaaaaaaaaaaaataaaaacataaa

SEQ ID NO: 13945 - DNA, 426 bp, Homo sapiens
  misc_feature (1)...(426): n = A,T,C or G
gaagatagcgccattaacacactccaatgagaaaactcttgttacaacaaccctttactcaggttactgctgttcttcatgttcattggaatctctaggcctttcagtatgtcatttncttcctttttttttttttttttttttttaaaaaaaaaaattttttttttccccccaagttggaggggcgggggggaaatcaaatttaatggaattctcttttcccggggtaaaagagtttttatgtttttcccccccaagtttttgggaaaaagggggggttgccccccccctattttttttttgggtttggccaaaaaaaggggtttcccctttggggccggggtttttttgaccccctgcccttaaggggccccccccccctccccccccaaaggggtgggataacggggggggcccccttccccc

SEQ ID NO: 13946 - DNA, 452 bp, Homo sapiens
  misc_feature (1)...(452): n = A,T,C or G
ntttgtaagaccacttgtccagcgtggtggaattcattttgtgtctcaggtgtcagtcttaggaatggaagtttaataacaaatgggccaaactcgcaggacattccttctatgagcgcttcagaattttgctgtgaacagtcctcttggacacaggttggggtgcccttgtttgggtttgttttggtggaaaacatcacaaacctggcacaccatttgaatatccctaatatcattccagtcgctttcctcatcagttgcctttctatttcagttcattcacagatctcacttctgaatgtgccacttccagtagacatgctggtcaaagagcagtcatcattggggtgaagtgttcttgacagtttaatatgattcacttttctccaaagacatgtaaaaggctgttacgaaagcttggcttctgtcatggagacggaaatgggcaagtt

SEQ ID NO: 13947 - DNA, 450 bp, Homo sapiens
  misc_feature (1)...(450): n = A,T,C or G
agttaaaaactggagaacctacgcagngctgaggaccntttacgntatatgctaacaatcacgtagtgacctatcatcaagaaataattttaaatgaccagcagactactcaattaggtattccttcagtattgttgaaagctgagaacagtctcttgacttgcagaagcactacttacttaataattagcgaagcccttagtctttcttgagttaccagtgtttccttgtctctgtgtgtagctcctaagagatgtttattttctggagcatttttgtcatagtaagattctaccaggctagagaaatgcctttccttcatacatccttagaaaaataattgggggactggtgcggtggctcgcatctggaatcccagcactttggaaggccaaagtgggaggatcgcttgagcccagttcaagaccagcctagacaacaaagcaagac

SEQ ID NO: 13948 - DNA, 456 bp, Homo sapiens
  misc_feature (1)...(456): n = A,T,C or G
agttaagactgatagcantctnaannctgatttacntcctccanngcgnggaattcatttttatttgaaaattatcatgtaccaattgagccttttattgaatgataccatatttctcaaagtgctgtgattctttccgttgcatttgatcaagaaaaaattttctgagacaaggtgttgttttggttactattacataattgtctatgagtaaaattggaactcactgtggaataatatgtcataatagctttacttgtaagtgaataataaagtataaacaggaaaattaaagcaaagttatttttagtgtgtgtagtaactccacaagaataaatgtcttatgcatagatatgtaatgcatcatgattgaaacgacaaatatattgtatttatatttctgtgcttggaaacttatggggaaagagattctggaacataaaagcttatttctan

SEQ ID NO: 13949 - DNA, 473 bp, Homo sapiens
  misc_feature (1)...(473): n = A,T,C or G
tgccaggtgcgccctatatactctgctattgcgtctagacaccngcnngccaaaaggntagggaccactgttacagattatcaggtcctcaagatgctattttctatatgatttttttaacatgtgacattatcatcatcatcatcatcatcatcatcatcactgatgatactatttaccagggcatggtttgaattggtgactttggtgcagttcattattggcagccaaatgctttatccataccttcatattgaagaatttgttatcaggaaactaccagtcctgctttacaggaagtctgttatcagatatcagatggcaagttccccatgtcttcagatgttcaaacaatattgtggatggtctagaaagagtttaagacatgctgttaaatgtagggctagataattctctgattctttgatgtagtctggaaagaaacaatccattgtccagttaataaatattta

SEQ ID NO: 13950 - DNA, 447 bp, Homo sapiens
  misc_feature (1)...(447): n = A,T,C or G
nttaaaatgagaacctatcagnctgaggaccntccgatncttcgctaggnttgtcaaggacttattttgtcttcctggaaccaaggacactgccaggcacctggtagttgtgcaataaatgtttataaaataaatgccattcatattacaaagtcttgtagttgataaaatgtgaacctggattttaaaattttttattggtgtatgtctcttgtaggtgcagataggttgaatatacctaatccaaaaactccaaatcgacaatgcttcaaaatccaagacattttgcatgctgatgtgttgctgaaaggaaatgctcattgggaatattttggattttgaatttaacttaaattatgcttaaccagtacatagtatgcaaatattccaaaatccaaaaaatattgaaatccacaacactttgtgtcccaggcatttcacacaagg

SEQ ID NO: 13951 - DNA, 458 bp, Homo sapiens
  misc_feature (1)...(458): n = A,T,C or G
ttttnattcgcngacccctagtacagcgtggtggaattccctcaatgctctgtgttgtgttttttctgagacatcaataacagttcttattgatccgttgacatttgggattaaaaagtcatatgcccacttagaataaaaactggttaatgtcctcaagataataaaaatcaaaatagtggtgtcttttgtagaaggacagaaaatcatgtcactgcatcttaacagttttaaaaaattataaaataactagacactaatgaattgtaccaaattaagactctctaggcctagagagtcagatgactcccagacaggcctcagaaaatgctctcaactaggccaagtgccgtagctcatgcctgtaaggccaaggggtaagaagatcacttgagcccaggaatttgagaccagccttgtcaacatagtgagagcccatctctacaaaaaaatttaan

SEQ ID NO: 13952 - DNA, 476 bp, Homo sapiens
  misc_feature (1)...(476): n = A,T,C or G
gcncacgagtagcccaatgatactctagatgaaaggcgtcggcacnnnccgcgcagngatgtccttgtactgtcttaagttagagttgcttgtttttgttttgttctcccatgtttagttgcaattactggctctcaagctatagtttgttttcaaaaaggaaaaacaaaatagttttttactggattaaaaatgcttattttagaatcctcccctttttgaggctttttggtaataattgcttttttccagcccaggtgtggttttgtttgtttttttctatgtttgagggttttttttcatctgtacaagaaattttgttatgcactactactttttgtattctagacagttttcaaaagttggcagatttttttttttgtttttaaggaaaaaggcatgctttctgactgacatgatcttttgcaatacctcatttttgaaatataggaaagaaaatgatattttctaagtag

SEQ ID NO: 13953 - DNA, 454 bp, Homo sapiens
  misc_feature (1)...(454): n = A,T,C or G
aggccagccnnnnnnnaaacggattcgagcgtctcgncnangcggtggaannagccatctgaaaatgaggcaggacatactagtgaatttaacataattgtttattttcctagggtagataaaaatagctttttcagtttgggaattttctcctttcaaaaaattgtttctgttgtgtattagtgttaaatatgctagaaaggaacagctgtaagaataggaatttgtccatagggacccacactcaaattgcttcattactttaaatagcactaagctaaatatatgtgctttctgagaaatagccatgtatttccaagatgacatttatgtatcaatttatataaacaacaggctctggaatatacagaataagcctaagacattgctgatacatgttgaagaaattgatccaatgtacagaaagaatattcatgacaatttgtagagaacc

SEQ ID NO: 13954 - DNA, 554 bp, Homo sapiens
  misc_feature (1)...(554): n = A,T,C or G
aaaccgttccaagtcgagattattctgtgatagttactacacgtacgatcccacaagggaacccccacccccccaatggaaaccntggnatagagcaccttgcgccangcggnggaantcctcggaggaggccaaggggcaacttccttcggtcggcccgaatccgggttcatccgacaccagccgcctccaccatgccgccgaagttcgaccccaacgagatcaaagtcgtatacctgaggtgcaccggaggtgaagtcggtgccacttctgccctggcccccaagatcggccccctgggtctgtctccaaaaaaagttggtgatgacattgccaaggcaacgggtgactggaagggcctgaggattacagtgaaactgaccattcagaacagacaggcccagattgaggtggtgccttctgcctctgccctgatcatcaaagccctcaaggaaccaccaagagacagaaagaaacagaaaaacattaaacacagtgggaatatcacttttgatgagattgtcaacattgctcgacagatgcggcaccgatct

SEQ ID NO: 13955 - DNA, 479 bp, Homo sapiens
  misc_feature (1)...(479): n = A,T,C or G
ngtggtcctnaaaaactgaaaanccaagggggngtccagnacaanccgnnggaanntncccggctcgagcggccggttatttactttntcctttagttttatttagtntggctcatgtgattcagcccaaatgggaatacataggggagatgataagcactattgactataagcaccttttttgtttcttgggagacagagtcttgcgtctgtcacaccaggcgtggagattcagatggcacacatcattgggtcacatgcaacacttgaacatcctgggctcaagtgatccctctcgcctcagcctcctgggtagctgggactacaggtgcatgccaccttgcctattttatgattatctgtctgccagcctttctctctgtattgatggatatgtatttatatattttacaaaaataaatgtattggtcagtctgaaaaaaaaaaaaaaaaaaaaaaaaaaaaaaaaaaaaatgccg

SEQ ID NO: 13956 - DNA, 440 bp, Homo sapiens
gggccggaatcgagacaatagagagcgtgtggaattccacatctgacgacgtgaaggagcagatttacaaactggccaagaagggccttactccttcacagatcggtgtaatcctgagagattcacatggtgttgcacaagtacgttttgtgacaggcaataaaattttaagaattcttaagtctaagggacttgctcctgatcttcctgaagatctctaccatttaattaagaaagcagttgctgttcgaaagcatcttgagaggaacagaaaggataaggatgctaaattctgtctgattctaatagagagccggattcaccgtttggctcgatattataagaccaagcgagtcctccctcccaattggaaatatgaatcatctacagcctctgccctggtcgcataaatgtgggtgtgtactcaagcaataaaatga

SEQ ID NO: 13957 - DNA, 446 bp, Homo sapiens
  misc_feature (1)...(446): n = A,T,C or G
cgagccncnnatcganncccattgtagaccattagacagngcggnggaattcgaaccattgttttaaaggcagaaaactgaggcccagtttgcataatcgtttccttttatgaagcagatttcaagttctcattccattctagttgcttcatacaacaaacagtttggttttattttcaggtctgtggacatgtcattgattacagttaattgtcttgattactgtttatagcttaattatcaaaccagttgtttcttgaatttgtattatgacagggtgcatgtagtctttggactggttatttctggttttgaagtaatcgaacaaattgaaaatctgaagaccgatgctgcaagcagaccatatgcagatgtgcgagttattgactgtggagtacttgccacaaaatcaataaaagatggtaagaacttttttgacagtagat

SEQ ID NO: 13958 - DNA, 442 bp, Homo sapiens
  misc_feature (1)...(442): n = A,T,C or G
ccttgacgtacgattacnccagagcggaggaattcgctgagcctgtccatctcatggcaagaaggttgaagtgtcgcccagggtttttatcttcccctcagggcccacagcaaatgtgtggccatcacactccacctgcacatgagccatgaaaaccttccagatgggctgggataggacatcttggcgctaagggtatcacctgggtccattccatcaccagtttcagtggatcaatgaacagaaaaacatcttaaatccaacatattttctcggggtgggaggtggggtgagtggaagtgaagtattctaattcaaaagagaatccagggcaccccctcgggtggttgaatacgtgaggaatcgtggtggccatggccctgaccctggagaacctgggcaggtctggctctggcctctgcctcctaagtgatgaacttca

SEQ ID NO: 13959 - DNA, 484 bp, Homo sapiens
  misc_feature (1)...(484): n = A,T,C or G
catcgaccncccctnnnattggagaccactaggccagngcggnggaattccgcttttttttttaagggtttcaatacacaatggaaaattcttaaaattaaatctctaaacttattgtgtgttctaatggcatactgcatgttctatactcagaacttttacagataacaggttacagaatatggctttccagagaatctgaagattttcaatagtatttcaagaggcaactattatatcatcagcaagaaggagcaggaaatgcaaaaaaggcattttatagtcaacaaacgctcaaaccagaaggaagaaaggcctttagggacaccaagtagatcaagtcattttggcgggccattaaaggctccatgcaaaatctagctgacatcactttaggcaattttgatatgccagtattattactgggcagacccttggtatagttctatgatcagttgaaaagcacatggacgtaactagaaan

SEQ ID NO: 13960 - DNA, 479 bp, Homo sapiens
  misc_feature (1)...(479): n = A,T,C or G
catcgacaccatnggattgagcacactaggccagngcggnggaattcgagtagcctatttttttgctttgttttttggttgatcgtttgtttttgagacagagtctctctctgtcaccacgctggagtgcagtggcatgatctcagctcactgcaacctccagctccctggtttaagtgattctcctgcctcaacctcccgagtagctgagattacaggcacacgccaccacgcccagctaatttttgtattttttttttttttttttagaaagaacagggtttcaccctgttggccaaaagggtataaataccctgacttcttgaaccgcccaccttggcctcccaaagggttgggattacaggcatgaccccccccccccggccaaggaccctgtttttaaagattcaccattattggggggaaatgattgtttatccaatatttagggacgcgccttcgggagaaaactgtcaaat

SEQ ID NO: 13961 - DNA, 243 bp, Homo sapiens
cttatggctgtgtgttactacttacaagagtcttgaaaattatacagaactttgccttctttttttaatgtcttccacaatggtgtgactgattataaccctgtttcccctcagagaagagctatggctcagggatctgtgttgactctggcatttagtggctttgtgaaggaaagaaaccattaaatgacctgacaaaaactgactcatgtctttaaagtagttgaagccacttttagaatg

SEQ ID NO: 13962 - DNA, 479 bp, Homo sapiens
  misc_feature (1)...(479): n = A,T,C or G
catgaacccccttggnaatagagatccctagtcagtgtggtggaattcgacgacctacgcacacgagaacatgcctctcgcaaaggatctccttcatccctctccagaagaggagaagaggaaacacaagaagaaacgcctggtgcagagccccaattcctacttcatggatgtgaaatgcccaggatgctataaaatcaccacggtctttagccatgcacaaacggtagttttgtgtgttggctgctccactgtcctctgccagcctacaggaggaaaagcaaggcttacagaaggatgttccttcaggaggaagcagcactaaaagcactctgagtcaagatgagtgggaaaccatctcaataaacacattttggataaaaaaaaaattgctgaaaatggacttattctaccaaaggggtacaagctttatgaaggctcttgatacgtactgccaaattgctttctgggaagttctt

SEQ ID NO: 13963 - DNA, 560 bp, Homo sapiens
  misc_feature (1)...(560): n = A,T,C or G
cctgttcggcnggggggnnnnaaaggagagagacagaagacgacagagagaatgcttgaagaaataatggtcaaaattttccctaaatttaatgaaagacataaatataaacattgaagaagttcaaggaactccaaggataatgaactaaaaaagacacacaccaagacacattataatcaaactgtcaaaagtcaaagacagagaatcttgaaagcagcaagagagcagtgacttgtcacacacacagggtatacttaataaggtcatagaagatttctaatcagacattttggagctcagaaagctaataatgtttaaagtgctgaaagaaaaaaaatgtcaaccaggaatcctatactggcaaaacacgaggaaggaaataagacatttccaaataaacaaaagctgagggagttcatcaatctactagatcttccctgtaagaaatgctaaatggagtcctggaggttgaaatgaaagggcactagacagtaattngaagctgcatgaagaagtaaagatcatagtaagggaaatatatggggcaatataanatg

SEQ ID NO: 13964 - DNA, 481 bp, Homo sapiens
  misc_feature (1)...(481): n = A,T,C or G
catcgacccctntnggattgatgaccactagnccagngcggnggaattcgaaacagtagcgtccaggtatgcaagagaccgcggaacattgcactaaacgttgtagagctgcactatgcctggcctgagcctctgaaatcagcctttcctttgctgctggcccgcctctctggaccttggctttcttacacatattttgtatatatatatgctctctgtccgatctgagcatgtgatttttctttttccgtgagtcaaagtctgacctttattttcaacatctgttcttggtgttaagctatcttttgtaggaaatagtggggcacactactcagagacattatttagcagtaaagaaagacacaaataacaatgataaaaagacatcctaaaatggtgaagttgccatgacaataaaggtcatagaacctggtagtgtcaaatttaaccctttgaggactgtaattgcatttctgtgccn

SEQ ID NO: 13965 - DNA, 489 bp, Homo sapiens
aaaaagtcgaagaccctagtccagtgtggaggaactcgattttttggaagtttgtaattacattcaaagtatactttttttgtttgtttgttttccttgagacagagtctctctctgtcgtccaggctggagtgcagtggcacagtctcggctcgctgcaacctctgcctcctgggttcaagcaattctcctgcctcagcctactgagtagctgagattacaggtgcacaccaccacgtccggctgacttttgtatttttggtagggacggggtttcaccatattggtcagggtagtcttgaactcctgacctcatgctctgcccagcttggcttcccaaagtgctgtgattacaggcttaagccacagcgcccgacccaaagtgttcttttttccttgaaaagaagtacagattttttaaaaagctaatattgctgtgattcaactctcaagttacttgatgctatttcttcatttctattggattca

SEQ ID NO: 13966 - DNA, 449 bp, Homo sapiens
  misc_feature (1)...(449): n = A,T,C or G
ngtcgttcttaaattcggtatacccganctntcgggaaanncnnnnagggnnnnnngggngatctaggccttatggagaggagatttatgactttgttttccatgttgcgctctggggttcctgggctggggcgtctggaagcgaggcctggatgccctcctgcagcatctgctcattcaaggccgcccacattggagtccctggggagaagctggccccagcccagtccaggcctgcctctgaggagccctcccaggatgggtgacaggcagctccgccaggctacccggggtggcaaggagcctcaggggccagcaccccgccaaggtcctgcacaagacgccctcctgcagcacctgcagccgtcgctctgagggttccagccaccggaaggccccagctgcatctgtctgcccggggcagggcggccggtcaggaaaaccaaaag

SEQ ID NO: 13967 - DNA, 475 bp, Homo sapiens
  misc_feature (1)...(475): n = A,T,C or G
agggagggccgggccannnnnnncctgaactgcatagcatttgcggnggaattccctgaggattcctcaagtgatggtttaaggcaaagggaagttcttcggaacctttcttcccctggatgggaaaacatctcaaggcctgaagctgcccagcaggcattccaaggcctgggtcctggtttctccggttacacaccctatgggtggcttcagctttcctggttccagcagatatatgcacgacagtactacatgcaatatttagcagccactgctgcatcaggggcttttgttccaccaccaagtgcacaagagatacctgtggtctctgcacctgctccagcccctattcacaaccagtttccagctgaaaaccagcctgccaatcagaatgctgctcctcaagtggttgttaatcctggagccaatcaaaatttgcggatgaatgcacaaggtggccctattgtggaagaag

SEQ ID NO: 13968 - DNA, 427 bp, Homo sapiens
  misc_feature (1)...(427): n = A,T,C or G
gcanagagaaaggaagcaggcccgttggaagtggttgtgacaaccccagcaatgtggagaagcctggggcttgccctggctctctgtctcctcccatcgggaggaacagagagccaggaccaaagctccttatgtaagcaacccccagcctggagcataagagatcaagatccaatgctaaactccaatggttcagtgactgtggttgctcttcttcaagccagctgatacctgtgcatactgcaggcatctaaattagaagacctgcgagtaaaactgaagaaagaaggatattctaatatttcttatattgttgttaatcatcaaggaatctcttctcgattaaaatacacacatcttangaaaaaaaaaaaaaaaaaaaaaaaaaaaaaaaaaaaaaaaaaaaaaaaaaaaaaaaaaaaaaggg

SEQ ID NO: 13969 - DNA, 486 bp, Homo sapiens
  misc_feature (1)...(486): n = A,T,C or G
taccgatcactctgannntcnagtactaatagtanngcgcgnannnatagaaaggctgatgagatttgcagggaagacttgattcctcactgaaatgcgcctggcgtgtgttgacctttgcagtggaacatgtgggaaaggggcccgcactcacttttcagttctgcctcggtgattccaggagccccggggatgggagcggggacaggaccttgctcctgagtcttaggtgtggtgtctctcgccccttgctgcattggcgggaccctcggtgccgcggcctcagttgcagggcggccagggctgctccgtgaaggaggcgctcactccatggagctgcaggacgctgcattctcctcactctggccattggcgctgtccttcctgcttcctcttttctggtgagggagggctccaaagacttgctggttggtcccagaagccagcacttctgcatcttcccctcctctcctggctggcacttcg

SEQ ID NO: 13970 - DNA, 232 bp, Homo sapiens
  misc_feature (1)...(232): n = A,T,C or G
ttcttctacacatggctttttgccatcagcatcagtgaagagtaagtaattttaatgaacattttgatttggggcagactgataccctggttttctgtcccagcctggctttctgtcataccttatgatgtgctggtctctcccagggttcatagtccacgtgtagtcctgaaacttggaaccaaccctgagctttgttcactttgggttggtggtggctcatgccataccn

SEQ ID NO: 13971 - DNA, 454 bp, Homo sapiens
  misc_feature (1)...(454): n = A,T,C or G
gtggtcctnaacccagcncnncctggggngaccagtacaanccnnnggaantnnttgnattgaatgctgtcttgacatctcttgccttgtcctccgttatgttctaaagctgtgtctgagatctggatctgcccatcactttggctagtgacagggctaattaatttgctttatacattttcttttactttccttttttcctttctggaggcatcacatgctggtgctgtgtctttatgaatgttttaaccattttcatggtggaagaattttatatttatgcagttgtacaattttatttttttctgcaagaaaaagtgtaatgtatgaaataaaccaaagtcacttgtttgaaaaaaaaaaaaaaaaaaaaaaaaaaaaaaaaaaaaaaaaaaatatttaaaataaattataatatataaataattattttnttttctttttttttttttcc

SEQ ID NO: 13972 - DNA, 448 bp, Homo sapiens
  misc_feature (1)...(448): n = A,T,C or G
ngtggtccttaancctggggnacctgatgtctggcanaancaaggaaggaaaatagagatgctgggaagtagtgcctggattattaaggctgtgggattgatgattaaagaggggcccggctaggccaaggtgaggaataggaggggaccaggaagagaaatcacttgatgagcagttgtcataggaagtgcagttagtaactgttaagctatccggactcagccaattggttccaaactctactgataggtctactgctccctcttctatcctttagtcattcttacagggttgtttcaaagatcagatgagatagtatataacgtgcttactacattgctgtaggtgctcaagttttaccacccaccccctcagacatttacttaaaatatgttctgggggctgggcacggtggctcacacctgtaatcccagcactttgagaggc

SEQ ID NO: 13973 - DNA, 488 bp, Homo sapiens
  misc_feature (1)...(488): n = A,T,C or G
ggtgccnnaatgaaacctcganaacctacgccangncgnggaattcgacactctagcacatgcctttgcctttgttgttgtaaagcttatttacattttcaacagcttttttatattcatgaaaatataatatacaaataagttatgattctaagatttctgttgaattttctattttagtcttctcggttttaattatctgatgtgccgtctgctatacccagataagtctaactgaatgggtagatctataatctttggatccagggtttgagactgtctcacacttatttgaccgtgtgaatcaaccttaggattgcagaagggtgactgatatgctcatggtcttctaaaacctacattttgttattttgttttttttgttttggtttgttttgtttttgttttgagacagagtttccctgttgttacccaggctggagtgcagtggcgcgatcttggctcactgcaacctttacctcctgggt

SEQ ID NO: 13974 - DNA, 472 bp, Homo sapiens
  misc_feature (1)...(472): n = A,T,C or G
atcgaccccctnggnnatagagatccctagtccangtggnggaattcgagtacaaggccctgatgaggacccggcgtcaggatgcccgccagagctacgtgatccccccgcaggctggccaggtgcagatgagctcctcagatgtcctgtaccctcgggcagcaggcatgccgctggcacagccactggtggagcactatgtccctcgtagcctggaccccaacatgcctgtgatcgtcaacacctgcagcctcagagaggagggtgagggcacagatgacaggcactcggtggctgatggcgagatgtaccggtacagcgaggacgaggactcggagggcgaagagaagagcgatggggagttggtggtgctcacagactgatcccggctgggtgggcctggccccttctcctctggggaagaccttgtcccaactcgatgggcacagccagccaacctaagactatgttg

SEQ ID NO: 13975 - DNA, 466 bp, Homo sapiens
  misc_feature (1)...(466): n = A,T,C or G
natcgagaccctangacangcggtggaattccccagccttttctggctgtcctggagtccctcaggcccccaccanagtgcccctcatcgctgagaaaagtcacccatggccgtcccagcagcagcttgcccaaagcaaaacttttctttttctaatattttttatttaccttagaagtccatgtggattttgcattccattgcatatttccaagtcggctttgctataaacacaaatattctccagaaagacttgccatgggcatccttcaggcatgtattctagggatacacatacccacttaagtagcagggatggctgtcaaacagcaccccacacctcccacccaaagctggagccctctgtttcctatgtgacctcatgcaagttaacctctttgagccaagtctccttaaaaatggggctgagaccaggtgcagtggctcacgcctataatcctaacan

SEQ ID NO: 13976 - DNA, 483 bp, Homo sapiens
  misc_feature (1)...(483): n = A,T,C or G
ggggntttttggaccttgaaagtctnggaaanncgcagggaggaagaagcgcgaagagccgttagtcatgccggtgtggtggcggcggcggagactgcgggcccgtagctgggctctgcgaggtgcaagaaagcctttgaggtgaaggtgtatgaaagtcatcataacagatgttttccaaaaacttgtagaaggttgtgaaaaaactactaggatcacgcggcatgtattgagcatataggttgctgtagatgaatgttcttagctgtcatgtttaaaaatacttctgcttcgttacctcaagtgtggcatgcagcattttggaaggaaaattgaagacgtgttcaagaaaacatgaacagaagcaaatgatgaaaatgagcattttacttgatgttgataacatcacaataaattatggagaaaaatacatatttggctaacttttaattgctgaacaataaagtgttttcttttaaatcn

SEQ ID NO: 13977 - DNA, 453 bp, Homo sapiens
  misc_feature (1)...(453): n = A,T,C or G
ggtaactcgagacactagnaatttgagngccattcggcactgcggcgcaactccttccctctgccccccacccctactcctcaacagtttttgtttgccctgacttttctacggctctggcttgttcccgaagagaggtaggagccatgtacgcacgcggtgggcgaactgcttaatttcactacatgtcgatgtacttgtcttccggcctgcaggtcttttctatataactttatgccacccttaaatgaatcattgggtatacctgtcatgttggatcctgtaatcacagntttccctgctcacctttttgtctaagatctattgagaaagggaaatatgggaaggagaaccatttgatcagaatacaaccaatagtctttaagcattgttaaagtatgaaactgaaatacattcaaaacacttaatccttgaggcttgtgatctgagtaa

SEQ ID NO: 13978 - DNA, 498 bp, Homo sapiens
  misc_feature (1)...(498): n = A,T,C or G
ggtgggnnccnnaattgagacctaatcgtagagcatctggccagngcggnggaattcctgctatgtaaaaccacatccttgactagtacttcatctttccacagtcattcatctgctaatcaggtgaaatatcagctcagcagaacaaagcaagttatacacaaatttcccccacattcacactgatgccgtacttagtaattctggttctaccattcccttttgcacttttgcaagtcaaattcatgtggaaaaatgttctgtttgtagaactcatagtattcacttatagtgctcatgtcaggaatggcaagtgagtaagagcccctgataatctgcttttgttagaacgtaatgcaaagataataaaacatgtccacttcttttctagttctaatcagtttttagacatcaagatttatttactttgcatgagatttgtttcctattatttgaatatgtgctatacacttgaattagaaaaacctgcttgaatgg

SEQ ID NO: 13979 - DNA, 474 bp, Homo sapiens
  misc_feature (1)...(474): n = A,T,C or G
natggagaccaatggattgagcgcctaacncanngacannntcccttctattctgctttatattaaaagcccattagaaaatgggaacctggtgaatatataatgaattgtaaaatattttaatgtgtaactttttcaactgtgaaactgacttgattttttgatgaaaacagctgctgataaagtattttgtgtaaagtgtagttcttattaatcaggaaaatgatgacttgattagactgtatatgccctcttggattttattttaaatggattggtgactttcacataggtaaaacacagtccatctgtattcttttttccatcaaaaatcgagtgatttggaattataaaaaaattgtgagcagcctatttgaaaggcatcatggaaatttcacagcacaataacacggatttgttttttcttaatgatgtaaatccgtttaattcatactttgatcaatagcccatgct

SEQ ID NO: 13980 - DNA, 472 bp, Homo sapiens
  misc_feature (1)...(472): n = A,T,C or G
aaatagacctggaacccctatnancctgataccctatgcagtgtgctggaattcccgagcgccgctccggctgcaccgcgctcgctccgagtttcaggctcgtgctaagctagcgccgtcgtcgtctcccttcagtcgccatcatgattatctaccgggacctcatcagccacgatgagatgttctccgacatctacaagatccgggagatcgcggacgggttgtgcctggaggtggaggggaagatggtcagtaggacagaaggtaacattgatgactcgctcattggtggaaatgcctccgctgaaggccccgagggcgaaggtaccgaaagcacagtaatcactggtgtcgatattgtcatgaaccatcacctgcaggaaacaagtttcacaaaagaagcctacaagaagtacatcaaagattacatgaaatcaatcaaagggaaacttgaagaacagagaccagaaag

SEQ ID NO: 13981 - DNA, 464 bp, Homo sapiens
  misc_feature (1)...(464): n = A,T,C or G
nttcgagacactagtccgngtggaggacttccaattagccaaaaagagactgaaaattaatgctaagtgtctaacttaaaaatttagaaaagaacaataggataaacccaaggaagcagaaatatagccagagatttatacctgaattctgctgttttgggtcgatgctttgacttctttagaaataatctttgctaggtgactatgagctttgatccttttctgtaaaactgactgttggtttctaggtttgagacagtctctaagtcagttttttcaataattccctcaccaagttattttttttagggaatggtaagataaatcatatttcaagtataactcttttccctcctggttttatgttgttttaaaactgacgtctaattttataatttcatgtctaacaatcttttggttcctgatgtttcttcttatgcagttggaaaaccaaagaaccaggt

SEQ ID NO: 13982 - DNA, 468 bp, Homo sapiens
  misc_feature (1)...(468): n = A,T,C or G
gacttcgacatcgataccctttccangtggaggaacctccatccaccacagtctagaaggccagacgggccccgcatctgtgatgagaatgtaaatgtgccagtgtggagtggccacgtgtgtgtgccagtatatggccctggctctgcattggacctgctatgaggctttggaggaatccctcaccctctctgggcctcagtttccccttcaaaaaatgaataagtcggacttattaactctgagtgccttgccagcactaacattctagagtattccaggtggttgcacatttgtccagatgaagcaaggccatataccctaaacttccatcctgggggtcagctgggctcctgggagattccagatcacacatcacactctggggactcaggaaccatgccccttccccaggcccccagcaagtctcaagaacacagctgcacaggccttgacttagagtgacag

SEQ ID NO: 13983 - DNA, 468 bp, Homo sapiens
  misc_feature (1)...(468): n = A,T,C or G
ggtcgggcccccnncggaataannccgntngcccgcctgnncctacnganaactaaagganagaggaganntntgtgtgtnctatnctagnanccagnttctcttcccacagtcctctcaggtgttacatgctgataactatggagatgtattccttaaatgtttttttaagttttatattcttggcactggtcttcaaatgtgtacatgtgtgccagggagcaaatgccttcttgtttctgaaattggtcttttagactgttcttttttcccatcttctcacctcctgcccctccttcagggtacttccgtggccagaacccctccaggtcagaggcagaagagaagcctcatgcggcacagcagcagatgtgggctggagatctattcatttggttttggcttgaattttctgaatgggttacttgatcttgggaaagatatatcttgccaggaaaaatgatatgc

SEQ ID NO: 13984 - DNA, 484 bp, Homo sapiens
  misc_feature (1)...(484): n = A,T,C or G
aggcgggccnnnnnaggaataancctgggacctcagcctagncngctncgnagagccngnaannncaaaaannaaaattcaggggtcataaataaagntttattagaacatagctacctacactcattcatttacatattgtctgcggcttctttggtaccatgttggcagagctgagtactaacaacagagaccatatgctccacaaagcccaaaatatttactatctgcccttcacagaaaaagtttacctgcccctggcttccaacgtggtcaatttttaatgttttaggtgttcttggaaaaaatctgtactctccagataacatatgcaggggtttatatatgttgattagattaatcttactgactgtattacacaaagttatatacttataacattttgtctgcttaatctaccaaatactgagaaatgtaaactaaatttcctactttggcagnggatctgttaagcttgtatttt

SEQ ID NO: 13985 - DNA, 488 bp, Homo sapiens
  misc_feature (1)...(488): n = A,T,C or G
ggggagacccggnnngnccnattgaaaccctactgagaaccactagaccagngcggnggaattctggaggtgtgttttttatcctggtttatgccatgacccaagcattaactggttgtctagctttcctgtgttacctagtttgatcctcacagcatctctggcaagtggctagagcaggtgatcatctaccttcccattttgtgagtgagccctgagtccctgggatgtttggaggcctaccctggctgcagggcttaaggtgtgcagcggagtagcctgacttatcagatgtcctcgcctgatcctagacacacatgtccatgctgctgctgcctttccccattgtagctgttgcatttcttccctgggtagagtgaaggaatgttctgttggattcctaccagattgcaatgttaggggacagagctgaaaggtgcatggtgctgtgtaaggccagagaattgtggcatgctctgggccgggct

SEQ ID NO: 13986 - DNA, 433 bp, Homo sapiens
  misc_feature (1)...(433): n = A,T,C or G
cttggaattaaatattgtaagatatgtataatgctggccattttaaaggggttttctcaaaagttaaacttttgttatgactgtgtttttgcacataatccatatttgctgttcaagttaatctagaaatttattcaattctgtatgaacacctggaagcaaaatcatagtgcaaaaatacatttaaggtgtggtcaaaaataagtctttaattggtaaataataagcattaattttttatagcctgtattcacaattctgcggtaccttattgtacctaagggattctaaaggtgttgtcactgtataaaacagaaagcactaggatacaaatgaagcttaattactaaaatgtaattcttgacactctttctataattagcgtncttcacccccacccccacccccaccccccttattttccttttgtctc

SEQ ID NO: 13987 - DNA, 455 bp, Homo sapiens
  misc_feature (1)...(455): n = A,T,C or G
ggaattgagccctngnnntttcgagaccttagtccgtgcggtggaattcggcatctgcagaaataaggatttctttaataatttcttatgttgggcacttggaatgtcctgccacaggtacatgcaccatggaactggcaagtgggcagacagaaaggacaggctggcagtgcaggtttcccaggatctcatgaggtagggctgctgctgctgctgctgcaatatctgctggccggaggctttgcttccattttagacatcccaaacaaagtcatcttgggggacctagccccaaaccaatcttggtacttagatcaggctgcctgacataactgagtctcattttctgtttcggatactcccaggttctcatgctgcttcccagtgcctcccccattagatggtacctaaagtaagaaagccattgacacagagaggagagaggaagtgagacn

SEQ ID NO: 13988 - DNA, 439 bp, Homo sapiens
ggccaacgtcaacattgggagcctcatctgcaatgtaggggccggtggacctgctccagcagctggtgctgcaccagcaggaggtcctgccccctccactgctgctgctccagctgaggagaagaaagtggaagcaaagaaagaagaatccgaggagtctgatgatgacatgggctttggtctttttgactaaacctcttttataacatgttcaataaaaagctgaactttaaaaaaaaaaaaaaaaaaaaaaaaaaaaaaaaaaaaaaaaaaaaaaaaaaaaaaaaaaaagagacaatataaaagacaaacatatagaagtaggccctaccccgagccttacttgacccttggaagggccacttcccatggcctttcctgcgtcaatgaggaaagcgcctcccaccgcctgagtaagtgtcattcttttttgtgaaaa

SEQ ID NO: 13989 - DNA, 488 bp, Homo sapiens
  misc_feature (1)...(488): n = A,T,C or G
tggnngggccccggnnnnnnnnaattgtagaccatangaagngcggtggaattccccgaagtgctgggattacagacatgaaccactgcgcccagcctaaaatttagtatactttttatacagctttagcaagtattccagattattttgtaaaatattttcttgtaaattgcataattttttcatatacaaaatgcttagatggtaacaaatgtctgtgtattatataattataggatatattttagaaattagttcaatttttaagttgttcaaattttatgtatatttttaagataactttttaaaagtttctaatgccttaaatgtagtgatctgagaataggcattcatactgttttaaacaaagtagatttgccaccattttatactcactaatttttttattatatgacaggattgactaacttttcccccatttgcttggttttacagaatcttgagctcagaaaatatatctccaggtt

SEQ ID NO: 13990 - DNA, 495 bp, Homo sapiens
  misc_feature (1)...(495): n = A,T,C or G
gggnngtnnncaggnnggggnnnnattgannnccntatcgtagaccactagtcagtgcggtggaattccaatatcacagaatcagaccatgtgtcccatggcaatgtgaatccaatagtcaattacataatgactatagaaacacaacagtcaccaaattaaactagacttactattttagtgagttaaaaattacatactaaaagtttattggtaggtaataaatgcttttgagtaaatagtggaaaatgtctcatgttgaggctatggttttgtaggaacaagtacccttattttcagagcatcatgtacttaagtataatggtcttggtaaagatagttcatataagttgtatctagacaactgtatcgtctaaattgtaaacaattatctagtaccaattttccctttttatttttcagcatcaagagaaaaccaatcagcttcatcaaaacagaagaaaaaggctaagtcccagcaatacaaaggacatn

SEQ ID NO: 13991 - DNA, 478 bp, Homo sapiens
  misc_feature (1)...(478): n = A,T,C or G
ggggggccaaannaggatanacctgggccttcgacttgngacatacgnagagaccncncatntntaccaaaacacacaaaagttagcaggcgtggtagcacacacctatagtcccagctaattcaagaggctgaggtgggagaatcacttagacccagaggcagaggttgaagtgagccgagatcatgccactacactctagcctgggtgacagagtgagaccctgtctcaaaaaaaaaaaaaaaaaaagccccggggaaccaaaaaggggcccgaaaagccccgctttccaacccaaagggagctttttcgggggcacccattggggaggtcccccccaccctaccttgttttaccaaggaaaggggccggcccccggcccttttttaaaaaaatgaggaaagggataacaattgggaccccagaggtaaatttcttcccgacaaccaactgatttttaacaaagtggacaaaaata

SEQ ID NO: 13992 - DNA, 429 bp, Homo sapiens
ggaagtggcctgtcactgtagcagcctgaggtccagaactttcatggtggtgcttaacgtcaacaaggccctcatctacctgtggcacggatgcaaagcccaggcccacacgaaggaggtcggaaggaccgctgcgaacaagatcaaggaacaatgtcccctggaagcaggactgcatagtagcagcaaagtcacaatacacgagtgtgatgaaggctccgagccactcggattctgggatgccttaggaaggagagacaggaaagcctacgattgcatgcttcaagatcctggaagttttaacttcgcgccccgcctgttcgtcctcagcagctcctctggggattttgcagccacggagtttgtgtaccctgcccgagccccctctgtggtcagttccatgcccttcctgcaggaagatctgtacag

SEQ ID NO: 13993 - DNA, 465 bp, Homo sapiens
  misc_feature (1)...(465): n = A,T,C or G
catgagaccctttgacggcgtggaanancacgccagncgaggcatttttattctttcgtggaggctataaaatgctaaaattgtagtcagtaaaccacattgtgtttttgtgtttgtttgtttgtttgtttgtttgtttttgagacaaggtctctctctgtcttgcagtggctgatctcggctcactgcaacctccacctcctgggttcaagcaattctcgtttctcactctcccaagtagctgggattacaggtgcatgtcaccacccgcggctcatttttttgtatttttagtagagacgggctttcaccatgttggctaggctggtcttgaactcctgacctcaaatgatctgcctgggcctcccaaagtgctgtgattacaggcatgagccactgtgcccagccaaaccaaatgttatgtaagccatccatctgaggaaagtgggcctgcatttgtagtca

SEQ ID NO: 13994 - DNA, 484 bp, Homo sapiens
  misc_feature (1)...(484): n = A,T,C or G
catcgaccnccntngaattgagcacttctggccagngcggnggaattcgttttgtcccacagtcagcaggccactagtttattaacttccagtcaccttgatttttgctaaaatgaagactctgcagtctacacttctcctgttactgcttgtgcctctgataaagccagcaccaccaacccagcaggactcacgcattatctatgattatggaacagataattttgaagaatccatatttagccaagattatgaggataaatacctggatggaaaaaatattaaggaaaaagaaactgtgataatacccaatgagaaaagtcttcaattacaaaaagatgaggcaataacaccattacctcccaagaaagaaaatgatgctaacttaagaagactcgattttacaggaaatttgatagaagatatagaagatggtactttttcaaaactttctctgttagaagaactttcacttgctgaaaan

SEQ ID NO: 13995 - DNA, 483 bp, Homo sapiens
  misc_feature (1)...(483): n = A,T,C or G
catcgacccccctnnaattgagacctttggccagngcggnggaattcaaaacacagccttttattagcaaacttcttggtatgggcgacattgaaggactgatagataaagtcaacgagttgaagttggatgacaatgaagcacttatagagaagttgaaacatggtcagtttacgttgcgagacatgtatgagcaatttcaaaatatcatgaaaatgggccccttcagtcagatcttggggatgatccctggttttgggacagattttatgagcaaaggaaatgaacaggagtcaatggcaaggctaaagaaattaatgacaataatggatagtatgaatgatcaagaactagacagtacggatggtgccaaagtttttagtaaacaaccaggaagaatccaaagagtagcaagaggatcgggtgtatcaacaagagatgttcaagaacttttgacacaatataccaagtttgcacagatgn

SEQ ID NO: 13996 - DNA, 475 bp, Homo sapiens
  misc_feature (1)...(475): n = A,T,C or G
aatggagaccctaggattgggcgcgatagcanggnccccgcacatgtgagggctgcaagggcttcttcaaggtaccgcgcagccccaggtggggccttttgttggaaatggagagaggctggcctcatcccattgggacctgtggtctccccctgggttctcctcctagctaagtcctgtcctgcagggtgggatcagccctgccaggtgggccgccttcctggagacccgtagatgccagggctggaagctttcatttgccgggacactcgggcccatgggattgcacagagctggagggaggggtgagataggggcagataggagctgcaggggtgcctggcgagcctctggttttcctctgctcctctgcctgtcctctcccaactcaaggttctagtgggaaggggtgcccccaggctctcatgttcctggcgtgagatgaaaggatccctgcggagggtttggttcttga

SEQ ID NO: 13997 - DNA, 478 bp, Homo sapiens
  misc_feature (1)...(478): n = A,T,C or G
ngtttaatagagacattagtccangcggtggaattcgatcaatgcccgcacagagttggcggtccgctacaatgacatctcaccgctggagaaccaccactgcgccgtggccttccagatcctcgccgagcctgagtgcaacatcttctccaacatcccacctgatgggttcaagcagatccgacagggaatgatcacattaatcttggccactgacatggcaagacatgcagaaattatggattctttcaaagagaaaatggagaattttgactacagcaacgaggagcacatgaccctgctgaagatgattttgataaaatgctgtgatatctctaacgaggtccgtccaatggaagtcgcagagccttgggtggactgtttattagaggaatattttatgcagagcgaccgtgagaagtcagaaggccttcccgtggccccgttcatggaccgagacaaagtgaccaaggccacn

SEQ ID NO: 13998 - DNA, 480 bp, Homo sapiens
  misc_feature (1)...(480): n = A,T,C or G
caatggagaccantanggatagagcggcgataggacntagcaanggctacaaatttggaaaaactgtggtgagctgtgaaggctatgagtcctctgaagaccagtatgtactaagaggttcttgtggcttggagtataatttagattatacagaacttggcctgcagaaactgaaggagtctggaaagcagcacggctttgcctctttctctgattattattataagtggtcctcggcggattcctgtaacatgagtggattgattaccatcgtggtactccttgggatcgcctttgtagtctataagctgttcctgagtgacgggcagtattctcctccaccgtactctgagtatcctccattttcccaccgttaccagagattcaccaactcagcaggacctcctcccccaggctttaagtctgagttcacaggaccacagaatactggccatggtgcaacttctggttttggcagtg

SEQ ID NO: 13999 - DNA, 461 bp, Homo sapiens
  misc_feature (1)...(461): n = A,T,C or G
gtcgagcccccactgatgatcctacggaagngcggnggaattcgttaagcatgcagcaactacagtcatttgttctcagaggtctggaccaaagagaaacaagaaaagctggagtcacactaccaaaggccgaagctgagcaacagagctctggagtcagctgcctgggttcagcatgcagcgctgccgtggacgatctgtctctcttgcatatatgacttaccagttttactttcagtctctccatttctaattaaatgagatgcagaaatgctggtgccttgctatgatgtttgcagttattatttctaggaaaaaaaatattattgttactcagtatctggtacatcaaaactaagccagaaacgtttaaaaagaacaaaagtatcatttctacttaattctctagctacttggacaactggactatgcccctcctttcaagggagggcaaagcattt

SEQ ID NO: 14000 - DNA, 471 bp, Homo sapiens
  misc_feature (1)...(471): n = A,T,C or G
gtgtgcctgnnaatcgancccatcgagangcctaggcagtgngcaggaattccaaggttgacaagtcctgcttggaaaataatttaactgtagagacattgccatgtgccatgtgcaggtggagttgccaaaaccagatgaattttgtgaaaacaagtctggccttctcctcccgctccctgattaccttctttgtctatttacccatcatttagttcccttgtgctgcaaagctttttgtgtttttttatggactcaatgcttaactatatgagcttttcattacccattctaaaatcgtgactggttgtaatgtaaattgtataacacatctttctgcagcttcagattctgcaacttaaacctcctaggctgcttatctgtctcccaccacctacctgcgttttatgcactgcacttggcattcttgatttttcctttcatattaatttcaatggtgcccagaaggtt

SEQ ID NO: 14001 - DNA, 464 bp, Homo sapiens
  misc_feature (1)...(464): n = A,T,C or G
attgagnactgangacnttagcgccgngcggnggaattcccgtatcatcaccaagtgtcaaagaactcttagctcagtctgtgattgttttgtcgttaaattatggtccacatgccaaatccagcacacagcctcgtttggtacagtttgcaattaagaatgtattttactttttttttttttttttttttttgggaaaaaagtttttttttttccccaaaactgagttgttggggggaacttttttttagggacattcccccctcccgggttgggggggtttttttgcctgacccccccctattagtggggtaaaggggtttttcccccgcccccaatttttttttttttttttgggggaaggggggtttaccctttggtgcccgggaggtttttttttcccccggtggtattttccccccctttctcccccaaaagggtgggttttaggggggggccccccg

SEQ ID NO: 14002 - DNA, 485 bp, Homo sapiens
  misc_feature (1)...(485): n = A,T,C or G
cggggcnaatgagacactgatgacgtcgcggaanncggcagnggctcacgtatgtaatcccagcactttgggaagccaaggagggaggatcacttgaactcaggaattcgagaccagcctgggctacatagtgagaccacatctctactagaacttaaaaaaagttagccaggcacggtgataaatgcctgtagtcccagccactgaagccagaggatcgattgaaccagggagatcatggtcacagtgaactatgattacgccaacctgggtcacatagcaagactctgtttcaaaaaaaaagggggggcgggggacgggtgggtgcagtgcctcacatctgtaaccccagcactttgggaggctgagatgggcagatcacttgaggtcaggagttcgagaccagcctggccaacatggtgaaaccccatatccattaaaaatatttaaaaattagccagacatggtggcacgcgtctgtggtt

SEQ ID NO: 14003 - DNA, 488 bp, Homo sapiens
  misc_feature (1)...(488): n = A,T,C or G
cggggnnnattgagnccctgatgacattagnccagngcggnggaattcgtttgaaaaccctgtttttattgtgaattcactaagaaatactctacttaaactagcagaaatttgataacctttgaggccttatggacttaccaaggtagaactttttgggtaaaagctggatctctatacttttttggattgggatatcttttgcttattttgagtttgtttcaattaccttagcttcagaaagtattaaaatgccaatgtgggtcacatccttttaaagggatatatatctagtcaaggttgtttggattcctcagacagggttcttaactggacctaagaagacttaaaggaagaaatctcattaaaaatgaaagcataataaaagtttgaatatattattagatgtgctgcttacggtttttgatagtttgcttattttttgtttttgttttttagatttgtttgtgagggaacagtagaagaaa

SEQ ID NO: 14004 - DNA, 472 bp, Homo sapiens
  misc_feature (1)...(472): n = A,T,C or G
ggctggcttttaatcgtanccatcgagangcgtaggaagtgcgcaggaattccatcatttggccttcagagttttagaacgctatcaactaatgattttaaaatgatatcctgctatttcatgacttacatgtccttttacaatattttttctctttttacacaaacggatgaataaatatggctttaaaaatcctcaagctgacccctgccctttattaaggcacccacaaaaggactaagattatatctcattttgcagttgaagacattgggactgagagatgtcatgtgacttgcccagattcacacagaaatctgaagccttagaattcttagcctttacatttttatccaccatgaccattaccttgaaagtgcattgacttgaaagtgactttgtttttttttcccccatcacgtctaggactgtgaattaccatcatgtcatcctcccccagctgccccggaaa

SEQ ID NO: 14005 - DNA, 477 bp, Homo sapiens
  misc_feature (1)...(477): n = A,T,C or G
tgaggtttcattgagacattagacangcgatgagaccatagaagagacagaactagtatgttgttcctataaaaaatagatcataactcatgatatgtttgtaatcatggtaatttacatttttatgaggaatgagtatctggaaatattgtagcaatacttggtttaaaattttggacctgagacactgtggctgtctaatgtaatcctttaaaaattctctgcattgtcagtaaatgtagtatattattgtacagctactcataattttttaaagtttatgaagttatatttatcaaataaaaactttcctatataaaaaaaaaaaaaaaaaaaaaaaaaaaaaaaaaaaaaaaaaaaaaaaaaaaaacaaaaaaacaaaaaacaaaaaaaaacnaaaagcggcctcttaaaataaaggcgccttaaaaccccgggaaaacccccggttggtttttttagacccaacttttgttt

SEQ ID NO: 14006 - DNA, 453 bp, Homo sapiens
  misc_feature (1)...(453): n = A,T,C or G
atagacaaccctntttgaggccctctgaccangcggnggaattcgnggggaccagacaggactcgtggagacatccaggtgctgaagccttcagctactgtctcagttttttgaagtttagcgatggcgtctttctctgctgagaccaattcaactgacctactctcacagccatggaatgagcccccagtaattctctccatggtcattctcagccttacttttttactgggattgccaggcaatgggctggtgctgtgggtggctggcctgaagatgcagcggacagtgaacacaatttggttcctccacctcaccttggcggacctcctctgctgcctctccttgcccttctcgctggctcacttggctctccagggacagtggccctacggcaggttcctatgcaagctcatcccctccatcattgtcctcaacatgtttgccagtgtc

SEQ ID NO: 14007 - DNA, 465 bp, Homo sapiens
  misc_feature (1)...(465): n = A,T,C or G
natagtaagatagtaggccatgcggnggaattccacccaccagcatcatgacggtcccaggaacacccatatttggtgtaaagatgggtggcaccacagttctgagaaatctccatctttttccaggaatgctcatgagtattttaccccttggttaaaaaaatccaaaaagggccagcgtggtggctcacgtctgtaatcccagcactttgagaggctgaggcaggtggatcacttgaggtcaggactttgagaccagcctggccaacatggagaaaccctgtctctactaaaaatacaaaaaattagccaggtgtggtggcgcctgcagtcccagctgcttgggaagctaaggtaggagaattgtttgaacccaggaggtggaggttgcagtgagctgagatcgtgtcactacactccagcctgggctggacagaacaagactccatctttaaaaaacaaaca

SEQ ID NO: 14008 - DNA, 472 bp, Homo sapiens
  misc_feature (1)...(472): n = A,T,C or G
ctgcggctnnnaatcganacccatcgagaccctagtcagtgtggaggaattcattcgaatggcatactttaatttccagccattaggaggagacatcaaaattaaagattgttgagcatcctaagtgcttttgatagttatcaaagggacatttacataaagtcagagctgggggtggtggcacacgcctatggtcctagctacttgggaggctaaggaaggaggattgcttgagccttggagattgaagctgcagagagccatgattgcacccctgtactccagcctgggcgacagagcgagactgtgtctctacaaaagaagtgaaataagctgggggtggtggtgctcgcctatagtcccacctactctgaaggctgaggccatagtgaactgtgattgcattactgtactccaccctgggtgacagagaccccatccctttaaagagtttgggttaaagatcaccttc

SEQ ID NO: 14009 - DNA, 462 bp, Homo sapiens
atcgagcacccttggacagcgcggaggaattctaagacttagatttcttcctgttctagcaatctgcaagaccaccaggcttaactttttagctgccagaagacaaacccccttttctgtttcggcaatttgtcctggcacgtgttttggacttcctccgatttacacgaaaagctctgatattcattggagtactttattttttttcctcagttttgtttcttttctcatgtaaaaacaaacaaaaaggtcaacaaaaaaaaaatggaggtttttcttgtttctatctagttcatgctttctttgcggggtttgaacagtagtctgttaacttagtaggtggtacctggaaaggtattttaagtatagggactgtttaataaatacttaattggatgatggaggaggagaaattgttttcttcccaggattctctttgggggtcattttgtgtgacagata

SEQ ID NO: 14010 - DNA, 472 bp, Homo sapiens
  misc_feature (1)...(472): n = A,T,C or G
nagcgcgccngnctganccccnaagtttccagnaacggcgnngcaanttantgtccaaacctagtgacacataaaattaaagcctgtggcatttttaaagttgttaatcactatacatatgtatgtgtatatgtgtggacacatatataattttatgatcaatatcttagatattttagaaattccctttgaatagtcttggcgtgccgtgaaaaatagaaaatcagggagatataataattcatttgtcatatgctacagttgaataaaaattaaatttgtccccctattttgtggccagtagactgggaagtattaaactaaccagtactcatgtatggagattataaactatgctaattgaaaagtaccaggtgatacatagcctggtacttttttgtcaaagaattgctttatgaagaagcactttctaatgggtaaccagaaaagggcttcacccattttgttttgg

SEQ ID NO: 14011 - DNA, 479 bp, Homo sapiens
  misc_feature (1)...(479): n = A,T,C or G
ggaccgtaccgggggggttttnatttgtatagcgtgcattngncgnggcantcccaaaacccttccacactttattagcctgtcgcccttctttcatgtttacagcaaatatttttcgagtgcctaatgtgtcccacttactgtgccacgtgcgagggtgcacgtgtcaggcaagatcgctgttccaaggaggctgagaacaagtaaatggtaattaccagttatgaccaaagctgtgaaaggaacagatacatcagcctaacagcagcactgccgttttctcccttataatcagcagaggcgggctagagcaaggattctcaaactctgccccctcagaaccctagagtacggttgctgaaacttctgttttttccttttgaacaaatctagtaacatgctgtgagccagagaggtaatggtttggctcaaagaaggcacatgcatctggtttctttcttcttttttgagacggagtg

SEQ ID NO: 14012 - DNA, 465 bp, Homo sapiens
  misc_feature (1)...(465): n = A,T,C or G
tgcgactgggaatgataccttgaagcgtagaagnggcgggaattctgcagttcttagtgcagagatgttttaaggtgcaatatatctcttcctttcccgtggttttagagccaagctcatggtagtaggacgtagggtcttattttgttttcaaacccccatcctcagagcgcagatacatgcagaggcttctgccaggataccacggggccttagtgggaacaggtggagaccagcactttcctttcctgctgctgaggtagggattggggggtcagaacccactcacttttgcctgttaaagttgccctcctgacgctggcagctctgccttggtcactggggatgcggctcgttgctcagccaccagtggccttgcggtattgtccaccatccactagagtgggatgaagtccagagtgtgggtatacatttcagatgcacatctacccactggggacttcg

SEQ ID NO: 14013 - DNA, 440 bp, Homo sapiens
  misc_feature (1)...(440): n = A,T,C or G
gggttttcccctgggaccttcagagnatctncgaaaacncacannnacatgaatgngaccacataaatactaaacagtgctctattgcaggtataacatgctacagttagtggggagccaggtgcagggatgtgtgttgaacattccagaatcctcttcttcctagggaaaagttgagataatgcctcagactgactagcaataaaagcatgtgaaaaaaaatatgtgcagttttcaaaggtttgggaaaaaacaatccctctttctgctgatggaaggatagcttagtggaatgtttctgagggctggttggtctctatatgttaaaagcattaaaagtgtgtacacactttgacccaggaatttgagctctaaaaaaaaatcagagttgtgtgcaaatacattaagctgcttaccacaacaatgtccactggtagaaa

SEQ ID NO: 14014 - DNA, 465 bp, Homo sapiens
  misc_feature (1)...(465): n = A,T,C or G
natcgtagatagtagtccatgcggnggaattcgtgggaatgtggccctgcagttgacctgagctgcttcacatggttgtccattctggggcttaaagaactgggaccagaccaagtagaggccttggtgctggttggggtggggcctgcagagtcttagttactgatttcattttcaataaatgtaggtttgttacatgagtttcccaattaaaaaaaaaatgacttcttgtccaaaaaaaaaaaaaaaaaaaaaaaaaaaaaaaaaaaaaaaaaaaaaaaaaaaaaaannncggcccccttttaaaaaaaggggcccttaaaacccccgggaaacccccggggtggtttttttttggcccccccttttgggggtccccccccccccggttttttttttgggggggggggggccccccccttttttttttttaaaaaaaaaaaaaaaatttttcttttttttgtc

SEQ ID NO: 14015 - DNA, 501 bp, Homo sapiens
  misc_feature (1)...(501): n = A,T,C or G
agagacnnnnnntttgatggcntacctacgccangncgnggaanncaagtaaatcacgagcctgcttagttttaagaaaattggcaacaatgccatgaatgtgcttttgactctgcgtgggtgtagggccttgatcctgcaaatcgtagaacttgatctcaattacctcttttataaattaagaatcagaagggttattgtgatgattaactaagatatacataaagcatctagcccggtgcctgggcaggagcccaacaagtgtttattttcctgtccttaatatatacctgcagacccttctgtaaattatttctgatattttgttaatatgttagaggatagcacaagtagtttctttttctttttttaaccctattgtctaggttaattgtttcttaaaagaacactgtcagaacaaagaatactgctttatggattatttataattttctgtccataaaagtctgtatctgtctgtatctcaacgataacttggta

SEQ ID NO: 14016 - DNA, 478 bp, Homo sapiens
  misc_feature (1)...(478): n = A,T,C or G
gggagcgtgngggggggttttnaactgattagcatgcgcangngcnggaattcgccaagaccaccaagaagcggccacagcgggccacatccaatgtcttcgcaatgtttgaccagtcccagatccaggagtttaaggaggctttcaacatgattgaccagaaccgtgatggcttcattgacaaggaggacctgcacgacatgctggcctcgctggggaagaaccccacagacgaatacctggagggcatgatgagcgaggccccggggcccatcaacttcaccatgttcctcaccatgtttggggagaagctgaacggcacggaccccgaggatgtgattcgcaacgcctttgcctgcttcgacgaggaagcctcaggtttcatccatgaggaccacctccgggagctgctcaccaccatgggtgaccgcttcacagatgaggaagtggacgagatgtaccgggaggcacccattga

SEQ ID NO: 14017 - DNA, 485 bp, Homo sapiens
ccccccccccccccccccccttcgtagaccttagatagttgactattagtccgtgcggtggaattctaagagctcaaaagaaagagaataaatgagaatgagggtgtgtgtgttcagtttgatatctggagaagcagtgagagtcaggttacaaatcacaaagcatttggtaactgcatctccagaaaagttgtgaattagcttctcagtttgataatggagaaggcaaaatgactgcagaggcaattcacacatagactactattgatatatggcagtaattatgtgattgtgtatatacatatagatatctaaatatatatatatatacgtgtgtgtgtgtgtgtgcgcatatctcaaagtgtagataaactttacccccaagcgaggcatgagagttattagtgttgatcatttgatagaatctagagcatcatctcatcctggtaacatattagaatcccttgggtagcctttaaaacatg

SEQ ID NO: 14018 - DNA, 473 bp, Homo sapiens
  misc_feature (1)...(473): n = A,T,C or G
nattgannattcgtagaccattactccagagcggtggaattcgaaattttgatgaagaaattgatacaacaatgagatggaaactcctccctcattcagatgaaccttaaaacctcaaacctagtaattttttgttgatctcctataaactcatgttttatgtaataattaatagtatgtttaattttaaagatcatttaaaattaacatcaggtatattttgtaaatttagttaacaaatacataaattttaaaattattcttcctctcaaacataggggtgatagcaaacctgtgataaaggcaatacaaaatattagtaaagtcacccaaagagtcaggcactgggtattgtggaaataaaactatataaacttagaaaaaaaaagaacaaaatactataaaataataaaaaaaaaaaaaaaaaaaaaaaaaaacaaaaaaccgcccttttttatttaaaggccccattn

SEQ ID NO: 14019 - DNA, 464 bp, Homo sapiens
  misc_feature (1)...(464): n = A,T,C or G
natagtagatcgtagtccatgcggaggaattccctccctcttgtctcatcacaggatgaagggcagatgagaagacagccaggagggtcctgggccctcagctgtgactccccgagaggcaggtaccaagggcttcctttgtccttgcttcccagccagcgcgtggcccctgcccttgggagggtcagctcctcctccgtcccactgaacactgatgcctcaggactggactccttggggcagcagagacccttccgtctttccttccctagctctgccttgcaaaggtgcagcctcctgagcctcagagtgtctgacatctctctgcctaggcaccctctctgaaacattgtgtgggcttagaaaccgtgagccttgggaaggaccatcttcctctgagctctgggcgtgttgaactgcggaggcttaccacttcctcgcctgtggtcatctccagcctgacc

SEQ ID NO: 14020 - DNA, 477 bp, Homo sapiens
  misc_feature (1)...(477): n = A,T,C or G
gcagtccaatgagacattagccangcattgtagacattagaccgactggaggcttgtccagacttgtcccttggtaaagacgtagggctagccagccacagagctgggtattgaagtcggcaagttgtatcccggtgcaggcgtccttaaatggagagtactcagaatctgccagccttaacctgcccactagccaccctaatcaagcattaaatatctgatccaatctggccactggtgtaactccgtaatcagacatcctgtttgtaaacagctcctccttctctccctctccctctcagagacagaagtggtgctggggtttggagtttgaaaataaccttcctatgacaggaagtgggcttttgctattagttgcccaactcttagaggatcccagcttgtgtctttagacaaaactgacagcctttggaacgatcgcatggtggcgctgccttccagccaacagttctggct

SEQ ID NO: 14021 - DNA, 456 bp, Homo sapiens
  misc_feature (1)...(456): n = A,T,C or G
atagaccaccttnttcgatgacccttagtacagngcggnggaattcgtttgcataattctgagaactgataaaagacagcaataaaagaccagtgtcatccatttaggtagcaagacatattgaatgcaaagttctttagatatcaatattaacacttgacattattggaccccccattctggatgtatatcaagatcataattttatagaagagtctctatagaactgtcctcatagctgggtttgttcaggatatatgagttggctgattgagactgcaacaactacatctatatttatgggcaatattttgttttacttatgtggcaaagaactggatattaaactttgcaaaagagaatttagatgagagatgcaattttttaaaaagaaaattaatttgcatccctcgcttaactaaatttatttttcagttttcttgcgttcatccatan

SEQ ID NO: 14022 - DNA, 433 bp, Homo sapiens
  misc_feature (1)...(433): n = A,T,C or G
cggaagaattgcttgagcccgggaggtggaggttgtggtgagccaagatcgcgccattgcactccatcctgggcaacaagagcgaaactccgtctcaaaaaaaaaaaaaaaaaaggtattccttaattttaggggactttggggggaccaaaataacaaaaataggtccacctttgcttttttttgccttaaaaataaattccatttttaccgcccccctaaccgttttacggaaatagtatataagggtataccgaccattttttgttttttttaatgggattggtttttacccaaaaaggatttttaaaaattaccctattttccaggaaattatgccttccttgtttttaaagggaacccccattccaaacgggttaagtccctagggggagggtttgtacccatttagggggcctgtgcgacatacttn

SEQ ID NO: 14023 - DNA, 446 bp, Homo sapiens
atagtagactttagaccatgcggaggaattcgtctgattacactgcacagttcaggttgtgtgacactagaactcattataaatcaacttcaaggtgaaaaattggaaacatttaccccggaggatattgtggccctttatagaatcttgcaggcatgtactgaaaaagtggatgaacaccaaacatttttaaataagataaacaacttttccctatcaatagtttccaacctgagtcctaaattgattagccaaatgctcactgccctggtggttcttgatcaaagtcaagcatttcctctgattataaaattgggcaaatatgtcgtgaggcatgtcccacatttcactaacgaggagcttaggagagtcttggaggcgttcatatattttgggcaccatgacacattttttacaaaagccctagagcatcgtgtagctgcggt

SEQ ID NO: 14024 - DNA, 471 bp, Homo sapiens
  misc_feature (1)...(471): n = A,T,C or G
nttcgtagacactagtccaatggatgccatcagacagnccggaggaattccaccaggagccaatagctggtcactctcagcaacacactgtaccaagagttgcttatctatgttgatgatcacccgggtgtccctgcgcagcttccggcagttcttggaggagagtctgggctaactccgctactcaaatattgagttcatcaaacactgcagattgttttcagagggaggcaacttttctcctaaagaaatcaattcactgtgttcccgactggagaaggaagctgcccggatagagttggttgaaagtgtcatcatgctcaacatggagaagttggagaatgagtacctggaccaggccaatgatgtcatcaacaagtttgaaagcaaattccataacctgtctgtggaccttattttcatagagaaaatccagcggttgctgacgaatctgcaagtgaaaatcaagtg

SEQ ID NO: 14025 - DNA, 464 bp, Homo sapiens
  misc_feature (1)...(464): n = A,T,C or G
natagaagatcgtangccatgcggnggaattcgctcaagcaatcctcctgcctcagcctcccaaagtgctaggattacaggcgtgagccacttacccggcctctgcctcttgttaatttgaccacatcatgtacctgctgtgcccgttccttcctccgtagaagagggtgctggtcctgcccttttgaggcctccatgagggccaaatgtgccatgggacacttagtgccatgcctgcgcagacctgtggaataaacagcaattctgagcaggctcattttaaagggacttgcaaatttgggcgttccttgtgtgccttcctcataaaacccactcctcccagaatatgcttagaggtgctgctgtatttacctgagagctatgcttttcatcaaaaacctaaacgtgatcatctcttggatgaggtgtggccctgcaccctcgcctgctcgtggaaggagtct

SEQ ID NO: 14026 - DNA, 451 bp, Homo sapiens
cgtcgagtaccctttgaggacccctagtccgtgtggtggaattccaaaatcttactttccagaatcccaaaatgatgtaggaaaacagagtaccaaggaaactctgaaaccaaaaatacatggatctggtcatgttgaagaaccagcatcaccactagcagcatatcagaaatctctagaagaaaccagcaagcttataatagaagagactaaaccctgtgtgcctgtcagtatgaaaaagatgagtaggacttctccagcagatggcaagccaaggcttagcctccatgaagaagaggggtccagtgggtctgagcaaaaggtacgtcatctggtcatccggtagcagtcattgaaatggaaagtatcggtgctttacttctttggattgatcttgcagcctggggcccaaggttttttacgatttctaaattataaatgtgtgaaattg

SEQ ID NO: 14027 - DNA, 446 bp, Homo sapiens
  misc_feature (1)...(446): n = A,T,C or G
gtttgatnccctaatgatgactattagacagtgtggtggaattcgtggaaaccaaagttcgagctaaaatccgtaagatgaaggtgacaacaaaagtcaaccgtcatgacaaaatcaatggaaagaggaagaccgccaaagaacatctgaggaaactaagcatgaaagaacgtgagcacggagaaaaggagaggcaggtgtcagaggcagaggaaaatgggaaattggatatgaaagaaatacacacctacatggaaatgtttcaacgtgcgcaagcgttgcggcggcgggcagaggactactacagatgcaaaatcaccccttctgcaagaaagcctctttgcaaccgggtaagtttgcttgttttccttgcttttggacatagtctgccaggtcaggacatggatacatttttctccctacggctctgtgctcaagccctgcan

SEQ ID NO: 14028 - DNA, 502 bp, Homo sapiens
  misc_feature (1)...(502): n = A,T,C or G
gagccnnnnnnnnntgactgccatcctacgccangncgnggaantccagagaaaagatgtgaaacaagcattaatccagtggcaggagcgaattgaatttgcccataaactgttaactcttcttaattcctatagtcctccagaacttagaaatgcctgtatagatgtcctcaaggaacttgtacttttgagtccccatgattttcttcatactctggttccctttctacaacacaaccattgtacttaccatcacagtaatataccaatgtctcttggaccttatttcccttgtcgagaaaatatcaagctaataggagggaaaagcaatattcggcctccgcgccctgaactcaatatgtgcctcttgcccacaatggtggaaaccagtaagggcaaagatgacgtttatgatcgtatgctgctagactacttcttttcttatcatcagttcatccatctattatgccgagttgcaatcaactgtgaaaaatttactgaa

SEQ ID NO: 14029 - DNA, 472 bp, Homo sapiens
  misc_feature (1)...(472): n = A,T,C or G
agcgttannanaaactgagacactgattagcgctgnggaattcgatgggatagcttaaagcaagtttacaagtaattaaaatggacagtttgccattaaagatttttaatagtggttttgcagtgtactggcttgaattttctggacttgagttaactgaaggagagcctcaaactatagtaacttcatttttaaaagttactagaatttggtatcctgatttatattgcagtgtttcaaaggtgtcactgtcagacaaatagaaacactgccaacttggtgtaacttaagctttcatttaactaaaacattcttttcttgcaaaacttatttttcatgatcatttttggttatttattatacttgattccaaaatagaacagccttgaatctataaaactgtgcagtcattatgccagaaattatcttatatatataatgggtcaccttgctgttcaaagggtggtgcaag

SEQ ID NO: 14030 - DNA, 520 bp, Homo sapiens
  misc_feature (1)...(520): n = A,T,C or G
ngagtgccnnncaatgagaaactcgagancgctaggcgcaagtgcgcgctatgaaaaacctacagttaacctcatacttaatggtgaaagactgaatattttccctataagatgaaaacaaggttaggatatctgctgtcactactcttatttaacataggactggcaatcctggccagtgcaataaatcaaaaaaaggaaatacaaatcatacagattgtaaaaaaaaaaataaaaacacaaagaaaaaaaaaaaaaaataaaacaaaaaaaaaaaaagccctgtttaaatttaaaggcggccctgaaaaagaaaaaggccccccaaaaaacccctttaaaaccccccccgtggttttttaaccccccccccttttttttttcccccccccggggggttttttttggggggggggggcccccccccaggtttttttttaaaaaaagaagaagaagtttgtttctttttgtatgggggntttattttcattgtgcnggnnnntctccatacaagtcattg

SEQ ID NO: 14031 - DNA, 430 bp, Homo sapiens
tgtgtatatatgtttaagcagtaaataaatatacatttaagcagcaacagttaagttattatcttaagagtgactgggaagatgcttgaagaatattcttttgtcgactctcatttaaggagcgttgaatttagcatgcattcaaaacctaaacttctgctgactgctgggtaacaatcagatgtggtttcttggtattttctaaagccgctttggtatgaatttagaggtgtgtaggtcagagtgaactgggtgaaaaaagtaatttcttaccagtcgagcaagaaaggactcttgtaatgatttaaaaaaaaagttttatcaatatttcctttaggttgatatttataccgcgttcatcaggttggaatctagcacaaatgcctcacttactaggttaattggcctttgtggatagcgaatcagtttg

SEQ ID NO: 14032 - DNA, 462 bp, Homo sapiens
  misc_feature (1)...(462): n = A,T,C or G
tcggaaaagagacctttcggntatgganagcctccgcagagnccnggaattccttgctctgtcacccaggctggagtgcagtggcataatcttgattcactgcggcctcaatctcctgggctcaagcgggcctctcacctcggcctcctgagtggtcgggactacaggcgtgtgctaaaatacccagctaatttttttaatatattgtagcaacagggtcttactatgttgcccaggctggtttggaactcctggcctcaggtgatcctcccgccttggcctcccaaggtgctgggattacaggcatgagccaccaagccaaaccctagttcttctttttttttttttttgaagagggagtatctttttggttcccacgggtgaggggctggggcggaattttggatatagtgaaactttgtcttccggggtaaaggcatttttcttgcaccgccctcccag

SEQ ID NO: 14033 - DNA, 505 bp, Homo sapiens
  misc_feature (1)...(505): n = A,T,C or G
aggcntannnnnnttaggagagtcatactgtagngacgngcaannccagctaattnttttgtattttttttagtagagacagggtttcaccgtgttagccaggttggtttcgatctcctgacctcgtgatccgcccgcctgggccttcccggagtgctgggatgacaggcgtgagccaccacgcccggctaattttttttttatttttcttttagtagagacggggtttcaccgtgttagccaggatggtctcatctcctgacctcgtgatccgcccgcctcggcctcccagagtgctgggatgacaggcgtgagccaccgcacccgaccaccaatttcaatttcaacaaagaataacaagggcagatttcaaggcttaccgccaagccaaagtcatgaaaacaccaggggaacagacaaggagaggaggaggcagaactaacgctgggcaggcgtccccacacccccagcagaagggtcgcagtgcagggacgtgggagagcct

SEQ ID NO: 14034 - DNA, 500 bp, Homo sapiens
  misc_feature (1)...(500): n = A,T,C or G
aggaccnnnnnnaagtagacatcgtaggaacngccnngaanncaaaaaaatgccaatttctactcagtggctgatcttaagccctcattaatctctctatatttcccacaaatgccacatgaagccattggcactctaaattggaattttactggctactgttctttcagagaaagaaagtttgagaaggaaaatatttcagttctctcaagttatcttagtgatcacttaaatttgaataagacaatgaaaatcattgaccagcaacaaataagtatcaataaacatttaggaatcaaaaaaagggcttgccagtcaggatttgcaccattagataaagagccacaacttaaaaatccatgtataatatattgattgattaaattctcttaggcccatatagaacacactaaaattttggaagaaagaaacaaataaataaaataaatgcctttgctgtcttaatacatttaacaaatatgtgtggaatagctattaag

SEQ ID NO: 14035 - DNA, 563 bp, Homo sapiens
  misc_feature (1)...(563): n = A,T,C or G
ggatcgatcccgntcgnngggttgattctcattatgaacaggacagaatattatgggttcaagccatgtatagggccacaggtcaatcatataaaccagttcctgcaattcaaacccagaaactgaatcctaaaggaggaactctccatgcagatgctcagctttatgcagatcgttttcagaaacatggtatggatgagtttatttctgcaaacccctgcaagcttgatcatgccttcctttttagaatactccagaggcagactttggatcacagactgaatgattcctattcttgcttgggatggtttagccctggccaagtctttgtgttagatgagtactgtgcccgttatggtgtgagaggctgtcacagacatctctgctaccttgcagaactgatggaacattcagaanatggtgctgtcattgaccctaccctgctccattacagctttgcattctgtgcctctcatgtgcacggcaacaggcctgatggaattgggactgtttcagtggaagaaaaagaaagaattgaggagataanagagagactctcttcn

SEQ ID NO: 14036 - DNA, 464 bp, Homo sapiens
  misc_feature (1)...(464): n = A,T,C or G
natttgagttccatgngcagtgngcaggaanccaaatatgtttaatattaagactttggccttttagtgtaaactgatattcaaaaatttcttcatagaacatttgcttctttgcttgatcatttttctaattctgtacatctaaaatgcccagaatttgagttgctgttatagtctactaacatagaactttggagtaataagatgggaatttgtctctcttttgccaagacaagcattcgtaatctaacacagtattgttgccacgagtacgagtatgtgatagactgttgagaataaagaaagcaggcacagttggtcagtcctaagataaaggagatgtttttcttatatgtttgtgcattaaagaaaaaaaaatcttgaatctgaccaatgatgtttttttttccttgtaagaaaatttaacaaatgtttggcaagcttctggaatctaaatttgaaan

SEQ ID NO: 14037 - DNA, 458 bp, Homo sapiens
  misc_feature (1)...(458): n = A,T,C or G
ccccaattgagtacattacattaggccgngcggnggaacgcgcggtctttgtctcttgctgccgctggagctccagatctcttgttcactgctctgtgttctctgctcatagaggcccagcctttgaggccctttgacctgcaggtattgggagatccacagccaagagccaggaccccctagaagtctagaaatgccagaactgatcacctgtctggagcaaggaaaaaaacctctgaccgtgaagagacatgagatgattgccaaacccccagagatggagtctcgctctgtcacctatactgaagtgcaggggtgtgatctcagctcactgcaacctctgccttttgggttcaagaaattctcctgcttcagcctctctagtaactcggattacaggtgcccgccaaaacgctcagctaattttctgtatttttagtaagaaagcgtacattatg

SEQ ID NO: 14038 - DNA, 473 bp, Homo sapiens
  misc_feature (1)...(473): n = A,T,C or G
tgcgtcacnnnaactgtagacaactgatgacgtctggaattcaaatttgtccttcattggacgtattatttggatttgggtgagcaacaaaatggaatgtggcctgttaggagcattctgtttgttcttttgtccctgatgtgatgaatcattgccacatgctagatggactcttcatatccaggttgtgtccctcagggctgagcactgtattaaagagcttttggtgagtcattcaaccttagagtccacatccagatcaactgtccaatggggaagacgagtgctgatttggaatgaatgcaaaacatcactatcattttcctaagtacagaggagcaaaggttatcttcagccctttcaggtctatgctcacatattcaaatatcatatgtagcttaggtggagttatttaataatcaagtctttcaatatctgttgcaagaaaaagaacacactctgaaaattctgca

SEQ ID NO: 14039 - DNA, 511 bp, Homo sapiens
  misc_feature (1)...(511): n = A,T,C or G
aagtngccgnnttnnntnnnnccagcnacctactgaagngnactgaatatcatcgaaagaacaccantancaagaagggatctatcacctctgtacaggctatctatgtgcctgctgatgacttgactgaccctgcccctgctactacgtttgcccatttggatgctaccactgtactgtcgcgtgccattgctgagctgggcatctatccagctgtggatcctctagactccacctctcgtatcatggatcccaacattgttggcagtgagcattacgatgttgcccgtggggtgcaaaagatcctgcaggactacaaatccctccaggatatcattgccatcctgggtatggatgaactttctgaggaagacaagttgaccgtgtcccgtgcacggaaaatacagcgtttcttgtctcagccattccaggttgctgaggtcttcacaggtcatatggngaagctggtacccctgaaggagaccatcaaaggattccagcagatttttgg

SEQ ID NO: 14040 - DNA, 441 bp, Homo sapiens
  misc_feature (1)...(441): n = A,T,C or G
attgacgatcatctgcccagngcggnggaattcccgggcaaggccgctgccttcctggagcaggacagtcagggagctcactgctttttggaggaggaatgtaggtgagaccgggacaggaaggggtatgggtgcccagaaccggctgatgtgaaggagtcccacttagggatccaggaacagtgggaatagcactgctgggggccaagaggggcacttgctccatgggcccaagcagtctagacaccttgggggatgagggagcctcccctggtgtcaggagagcctgggggtcccccacacacagtgagggaaggggaaaacccacagcacttgcctcaaggctgcaggttttgaagaccttcagaaatttccctgtagcagcccctggaggaggcctgtggggctaggtcaagccaaggcctcggagtctgaacagtn

SEQ ID NO: 14041 - DNA, 481 bp, Homo sapiens
  misc_feature (1)...(481): n = A,T,C or G
ggggngaaaggggaannnnaactgagaaaccctgagatctacngaangcgnggaattcgncttattcaagtaataaatggagtgcttggaggcatatgtggcttttgctgctctcaccaacagcaatatgactgctaaaagaaccaacccaggacagagccacaatcttcctctatttcattgtaatttatatatttcacttgtattcattcgtaaaactttgtattaatgtaacatactccccacagtctacttttacaaacgcctgtaaagactggcatcttcacaggatgtcagtgtttaaatttagtaaacttcttttttgtttgtttatttgtttttgtttttttttaaggaatgaggaaacaaaccaccctctgggggtagtttacagactgagtgacagaactcagtatatctgaaataaactctataatgttttggataaaaataacattccaatcactattggatatatgtg

SEQ ID NO: 14042 - DNA, 573 bp, Homo sapiens
  misc_feature (1)...(573): n = A,T,C or G
nggatcgataccantcaggnnnatcgaatnactactccgagnggngcaattcgttgtttttatatgggagaagagaaagagcttggaatttcaattgtctaaacaattggtatgatttacaagatagcaaaccattcaggagatgttcaacagtgtatcattcttagcattcaatacaatgtttattataaaatatacacctgagtttatgtttttctgccaggctgaagggcaataatgtcttgctatgcaaacactctattttatgtgtgaatttttttaactgtaattttatgtgtgaatttttttaactaaactctatcatcattttctatgttgacatcttttttttttttaatctgttcccaactttgagtctgtgaactatcttttttgactggaggctggcctaaaaccctattagggcttaaacagacctcaaaacactctgaacctgtaggccaatacagaaatgtggttctttgatatatcttgggtccttgagggcttcaacaaacagggccataattggtttaaattcagggttttctggaaaataccttcttctaagtn

SEQ ID NO: 14043 - DNA, 456 bp, Homo sapiens
  misc_feature (1)...(456): n = A,T,C or G
atcgaaaccctagtccacgtggtggaattctcctccaattgcagaaacatctgtactgcctccttcagtagcacaaatagaaaccccaatacaaagaattttacgctctgctgtcatagctggagagcccttaggaccttgcgctgttcctgtttccataaggcctgatcccaataatccacagcagtttattcatgaacacaccccactagaatttcagttgttgaaggaattaaaaactagtgtggtcaataatggagtacaaagcccatggttcccagaggaaagaacactagatgtagaactctgggaacaagtggggagaaatcttaaacaacatcaggtgcaaaggcatcaggtcccagtaaaatctttaatgttatgggctttaattagagcagccctggctcagttacacacagaagagcctaaaaagaggaaggaggagaaaatgtn

SEQ ID NO: 14044 - DNA, 467 bp, Homo sapiens
  misc_feature (1)...(467): n = A,T,C or G
aacggatttaaattgagacctcggctacgnangctttgnaagngcggnggaantncttatgngtattatagnaaatagatgattttcagattcaaggttcctaagagtttgatttgctctgttttttcctagaataaatattgggtctcccaactgttaagttctaggtattgtacttccaattttaacttcagaaccaagatgttggcatgaaccaggctgctgttgaagtacatgtatattataaattatcttatttgtgttatactcttacatgttatcttttctaagaaaacaaagtccctattattcctattgcaaagcacacaggaattaagaaagtacagtaatttttaaaaaaaaatccggtaaatgtagtattcttaacctgttctatattacttatacctattgtctatatagctttaatttatagttgtcaggttaactattggcatgtctggcag

SEQ ID NO: 14045 - DNA, 464 bp, Homo sapiens
  misc_feature (1)...(464): n = A,T,C or G
atcgttaatgataccatangcagtacttggagcctcccgcagngccccgaaatatgctacggacccgagtgatggctgccagctcagttaccccagcgtcagcagagtcagctgtgccgggcagatgctgggagtgcagccaggattgtatttcggtggggccgcggccgtcgcggagccagatcacctgagggaagcgggcatcacggccgtgctaacagtggactcggaggagcccagcttcaaggcggggcctggggtcgaggatctatggcgcctcttcgtgccagcgctggacaaacccgagacggacctactcagccatctggaccggtgcgtggccttcatcggtcaggcccgcgctgagggccgtgcggtgttggtgcactggtctctttttcagtcatgcaggagtcagtcgaagtgtggccataataactgcttttctcatgaagactgaccaa

SEQ ID NO: 14046 - DNA, 574 bp, Homo sapiens
  misc_feature (1)...(574): n = A,T,C or G
gggttcgaacacanttnnnnnnatcgaaccacagtccgtgtggtggaattccatctctgtcatgataatcagaagaggaaggcagagggtactgttggaaacctgaactcagcgagttctcacagggttctccaccaagtggcatgggagggccgagcttgcattctagcacaggccctcctacacgtggaggcctcccctcgcccgctcaggttgattaatgacgtctttccctcctcccgtctctttccccaggtctgttgcggttctcccacttttccataagcagaacaagaaccaaatcaaacgtcttaacgcgtatagagagatcacgttccgtgagcagacacaaaacggtggcaggtttggcgagcacgaactagaccaagcgaagggcagcccaccaccgtatatcaaacctcacttccgaatgtaaaaggctcacttgcctttggcttcctgttgacttcttcccgacccagaaagcatggggaatgtgaagggtatgcagaatgttgttggttactgttgctccccgagcccctcaactcgtcccgtggccgcctgtttttcn

SEQ ID NO: 14047 - DNA, 501 bp, Homo sapiens
  misc_feature (1)...(501): n = A,T,C or G
tagtccnnnnttnntnacctagctccttcgnanngnactgattatctctgannncncnnanantttgntacatgtacccactgtattccatcgaacgccatatgccaatgatgctaagatgcactgttattttatgtatctcttagaaaaactgcttgcaatgaaaccatgacacgtaatggattgaaaggcatgtcctctttcagggatgtggcaatgcgaggaaatgtacatcttagtagttcatgccatgtggtggtcccgtttgtctgggatctctacagccacatgggcactggtggtgtcttcacatggccctgaaatgagcaagttgtggaaggcacggtcctgggtgggcttgaccatcctggcccagggaagtaagtgagagatcccgttaggtgcagccgtgtgggtcaagagccaccttcagcaagtgtgtttaatgaaatccttgtgccgtgaagatatgattcatacctgaaattttttcttgaaggg

SEQ ID NO: 14048 - DNA, 497 bp, Homo sapiens
  misc_feature (1)...(497): n = A,T,C or G
ttcgagaccctttcagnggcttcgagttccctagtcagtgtggcggaattcgggaagaacaaggatggagtggggagacaacaccatgagagaattaagctctctacatggcagctgatcaatacagaattcctaaaataggacagttaggtaggaacaatataagcgtattatttagaaacacagcgatatacacaaaaaagaaatgagatgtaggagttgatggtaactgccttggggcaggacttgggagcgtggagaggtgaggcgaggccactgctgatttccaaactatctatatatattctttgataaatagaaattaaacttttataagagagtccacatgacatgcacacatcccagctcagcttttcaggctgagggatcagatgaggatttgcggtcaaagctctgatcgaaataaacgatgcgtctttatacgcgtttctgcagataccccttgaggacctgacacagtggttggaggccagtag

SEQ ID NO: 14049 - DNA, 467 bp, Homo sapiens
  misc_feature (1)...(467): n = A,T,C or G
agcggcctcnaatagagttcgaagaccattgcgccagagcggaggaattcacagacctgagcaaagccttcctcagcagagattccagctctcctctgcctttcaacagcagcagcaacagatacaacagttgcgattcttgcagcatcaaatggctatggcagcagcagcagcacaaacagctcagctacatcatcatcggcatacaggcagccagtcaaaaagtaaaatgaagagaggcatgccaaccactccaaaattttgagtcttgcattactttttgttccttttttaaaaacacaagagcactgaatcaaaagaattgagtttctactttttgttttttttaatgcgtcagtattttacattgctagatgtacaaactttatacagaagcacaaccttatcatttttaaataaaaacagggaaatggtttaacaaactagggttggtttgcctaagtcat

SEQ ID NO: 14050 - DNA, 466 bp, Homo sapiens
  misc_feature (1)...(466): n = A,T,C or G
gcagccctcnnaattgaattcagtaagcactgcggcggaacgcagaaaagtctctttttgtcatttaagccttcagtcttccaccaccacgccacaacttgtgaaataattcctcccccataaacccgtttctccagccagtgactcaccatttctcagatacttccaaagcactccgttctctgcatggtgtacctgtgtagtgcctgttcaaccttactgtgtaagtatcactttacagttcacaaagcaccatcctatacaacatcccacttgtttcacatacacaggctctgcagcatatggaccaattaacctttatccccattaaatcagattccatgacttgcccaaaatcataagctagagtgaaaaccttgtattaatggattttctttcatcttttaaaaattctattttaacttctttcaaagttaatggatcattctgttcttagaagttggcn

SEQ ID NO: 14051 - DNA, 450 bp, Homo sapiens
  misc_feature (1)...(450): n = A,T,C or G
cactagatgaccanttgatagccgtcggaannccctatacggaaaacattacgcctctggatggatgatgttaatgagcaaaaccccacggacatatcgtatgtgtacagtgggtatgccccgctcagtgtgcggctggcccagctgctttcccggcctggctggcggagcatcgaggaggtcctccgcatcctcccagggccccactttgaggagcggcagccactgcccacaggactgcagaagaaacgtcaaccgggagaaaaccgagtgactctgatatttttccttgggggcgtaaccttcgctgaaattgctgccctgcgatttctctcccagttggaagatggaggtacagaatatgtcattgccaccactaaactaatgaatggaaccagttggatagaggctctgatggaaaaacctttctaggatgttcagaggagactt

SEQ ID NO: 14052 - DNA, 471 bp, Homo sapiens
  misc_feature (1)...(471): n = A,T,C or G
agcgactttaatcgaacccattgagtgtcgtggaattcgaaagatgtacattatatattgtgaaacgaaaaaagcaattttcaaatggtatatattgtatcccatttttgtaaaaaaaatgtatatttatatattaatatgcaaagaaaaagctaaaagtatagacttcaaaggcataacagtggttgtgtggtaagataataggtgattttttaaatttttgttttatctgaatttctcattttttcaggacaaacgttttacttgtgttgcaaaaatatataatgaaaaaatcacacaattttgaagaaaactgtcaatcagcttataacgacaatgtggcacttaataaatacttgtcagaactttannaaaaaaaaaaaaaaaaaaaaaaaaaaaaaaaaaaaaaaaaaaaaaaaaaaaaaaaaaaaaaaaaaaaaaaaaaaaaaaaaaannagaaaaggggggccn

SEQ ID NO: 14053 - DNA, 471 bp, Homo sapiens
  misc_feature (1)...(471): n = A,T,C or G
agagggaccggnnnnccccccactgatgacccttagatagccctgtggaanncgatgccacagcgagaccagaaagaggagtcgccttaaggtatccctacaaagtcacctttctgataaaaaggagggaaaaaaaagttagatatctaaaataagcctagaatctcacacacagctgtgacttctaagtgaaactcttttctccctcatgtccttaaatagtcacagaatcacacacagcctgacttttaaagacaagcttggctacaggaaatgaaccaaccccaaagactcttctaacctgtctcctgactgggctccttcagaaagtgttctcctgttccatctgtagggctgcttactactggaacctaaaacaaaacctgttgtttgtaccatcactttttctggtgtttcctgtgcttttgtgattccaagtctgttcataagttctgaagataaattatgtga

SEQ ID NO: 14054 - DNA, 454 bp, Homo sapiens
  misc_feature (1)...(454): n = A,T,C or G
atagaccccccactgatgacactagaccangcggnggaattcggaaaggttagtctcttcagtaaatggtgctgggagaaaatatccacaggcaaaataataaaatcagacccttatattaaggaatgcaaaaaaacaaaaacaaaaacctcaaaatggcttaaagacctgcacataagacctgaaactacaaaaccccgacaagaaaacataggtgcagagctccttgactttggccttggcaatgattttttgcttatagctccaaaagcacatgcaatagaagcaaaaataaacaagagggactacatcaaactaaaaagcttctgcacagcaaaggaaacaatcatcaaaatgaaaaggtagcctacagattgggtgaaaatatttgcaaaccatacatctaataaggggctaatatccaaaatatataaggaactcacacaactcaata

SEQ ID NO: 14055 - DNA, 568 bp, Homo sapiens
  misc_feature (1)...(568): n = A,T,C or G
ngggttcgaacactgtccagtgtggttgagattcnacagaaaatgatattgttctttaactgctcagtggactttanaatgtttagttttgagggctttcaggacatttttctgagggcagggttggcaacataatttgtggggcccagggcaaaatgaaaatgtagattcctttttcaaaaattattaagaattacaagatggtgatgacagggtattgaaccaaaggcaactgcgtaggtcacacaccatgagccagccctgtctgagagcttaatacatgaacatggtacacagcaaacatttaataaaaatagttgttgaatgaaccaaaacccggggctagttgcttttgaactcctctgaggactngcccgtattttagaaaaaaactgattntatttggcttcaatttcaaatttccttctattgttctccacccgggngtccagatctttatggaacagccgattcctgcacanggttntacagcaggaatcctcccagaccagcttngctttgttattctcttgcactacgagtgtggcacttggggcaccacaccaan

SEQ ID NO: 14056 - DNA, 482 bp, Homo sapiens
  misc_feature (1)...(482): n = A,T,C or G
agggtgccnnnnntttgagccctcgagaacctacggaagngccgnggaattcaaactaccaacctaaggttactgaagatggagtaaagattgtcagcagcataccagtacttaatgtttgcaccatacagatacaacagacatagcttgacagagccaattcgctattaaaccagactcaacagccttacaggtatctcattgaatcagtgcgtcagagagattctaagattgattcactgacggaatctattgcacaacttgagaaagatgtcaggaattggcagcaatgaaacagattctcgttaagatgcatagtaaacattctgagaacagcttacttctcactaaaacagaaccaaaacatgtgacagaaaatcagaaatcaaagactttgaatgtgcctaaagagcatgaagacaatatatttacacctaaaccaacactctttactaaaaaagaagcacctgagtggtctaaga

SEQ ID NO: 14057 - DNA, 498 bp, Homo sapiens
  misc_feature (1)...(498): n = A,T,C or G
ntcgagtccctttccanggcgtcgagtcccctagtcagtgtggaggaattcgtattctctcactgccctcactcacctcattgtcagctcattaggtgggagtgtgccttggccctgaggaatcacctgcctgctagagcctgaccggctccccagcatgaattcacccatgaatcagcagcaggacagccagtcccctgagcccaccgggctgccaaggccagagggtggaagtggaaaacaagtccatgcaggcggcacacctggtgcacagcctccagctgtacagacacacagacagccacatgtgtatacatcctcctaaacacaggcacaggaacacggccaggccctgcagccccccaggcccatccgcccccaaactgctgcgataatgtgcctctgagatgaaagtatcactcactatgccaccctctcttcatgagaaagntcacaccccttcaatgaaaatataagacttcgggatctttcttctgc

SEQ ID NO: 14058 - DNA, 484 bp, Homo sapiens
  misc_feature (1)...(484): n = A,T,C or G
aactgaagctacngangnactgantccctggaagncccnaaaagancatgttntgtgcctttcgcatctcagattgttgtgtacatgctcaagagtatagaggaatcataaacattccagaaggaggccctggtgtactatgcgaagtttttgccacatagctatgggaggaatctgtgtttcttgaccaaacacttgaggttatgggactgcaagattccaaatgtgcatttcaacaggtcgtgatggggcaacttgttttgtgatacatagcactataagtagaatacattctatagacaagggattcttagccaggcatgcatggtggggcttcagaggctctgggaacattctgtatgtgtgtgtgcattttactggagagagagctcctaacttttgtaatattctcaaaggagttcatgactcaaaaaaatcatttacaaaccattgttctccggcaggcgcggtggctcgtgcctgt

SEQ ID NO: 14059 - DNA, 473 bp, Homo sapiens
  misc_feature (1)...(473): n = A,T,C or G
tgccgcncttttaattgatacccatcgagaccgtggacangagcgagaactctcgggaagcgcacgcccggcggggaggggccgcagtgtgaaaacacaattgatgtgcaattttagtaaattctgtgaagctgatgtctccagtgaccttcgaaaagaagtataaaatcattataagctttctttacctgaagatttctatcacttcaggaagttctgtgaataacttgatcctgaaaagccatctgattcactttctgcaagccttggacttcaattaggtgggccttatgatatccttgctggaaaacatagaacgaagaaaaaatcaacaggcctgaattttaaccttcactggaggttttactatgatcctcctgagatccagaccattattattggagataataaaactcagtaccacatggggcatttcagggattctgctgatgaatttcctgtatatgttgaga

SEQ ID NO: 14060 - DNA, 470 bp, Homo sapiens
  misc_feature (1)...(470): n = A,T,C or G
cgctgacttttaatcggaccctatcgagtgccgtggaattcccgagaagcatttgcagactgtaccatgctgaccattgcccatcgcctgcacacggttctaggctccgataggattatggtgctggcccagggacaggtaccgagtccttcaggaactttggcttggcatgtctgggaggaaactggcccctggcagggatggactgattgccatctttgtagggttctgggcattcagataagcacttgcagcagcgctatttacttgctattgggagggatacagcctccgaatcacaagattactcaggcacctctgatggggttctcattttactttactaatttgtccttttgttgcttgtgagtagcgacactgacttaagtcagagagtacatgtacttagtgattcattcacatacacaatgatcacccctggcatacttaggccagagagtatagatacn

SEQ ID NO: 14061 - DNA, 557 bp, Homo sapiens
  misc_feature (1)...(557): n = A,T,C or G
ncttgaacaccgtccangnggttcgattcgccgattctgttctgttcgtcttcaagtaacaaatgcctgcagtggagatatcttattttgatgattaacaggaagcttttaagctttgaagaaagcaaacaacattttccatggacctttaagagctgggctaatatttttgcccacacagaactctaattcatttcagagtcaagggcaacaatagaatactttttcaaggaccttgcatttgttaatacaggttttcataatagaaagcaatttaaatattcagaactaacgtaacatggaagaaacaactttttcctgaaatatttgagagacaaatataacaaacaattcatctttactatgacaatctcaacggaaagacttcagtgtggtcatattaatgcattntctgttcccagcaggcaagtaaggcaagggaagcatcagctcccaggctattgtagtcatccagatggagatgaggangctcaaatgcagtggtggagcanggagaaganntaaattcagatgtagttaagatgagcaacaggttg

SEQ ID NO: 14062 - DNA, 405 bp, Homo sapiens
ggacttcagctctctgcgttctcggctccgggaggcctcggtgattcatccacagcctctgcctcccgatgctctgtgacctgagggtattggacaatttgtagctaagactgccggataccctgaagacgggaaatgctatatgatatcctttcacccaagacctttcaccagtgcaggggatagaagattcattccacagacttatactgaaaagatactagaaatgtggacatgagaatttaccattaagaaaaggctgtaaacgtgtgaatgagtgtaaggtgcagaaaggagttactaatggagtttaccagcgcttgtcaactacccagagcaaaatatttcaatgtaatacatgtgttagagtttttagtacatcctcacattctaacaaacataaat

SEQ ID NO: 14063 - DNA, 443 bp, Homo sapiens
  misc_feature (1)...(443): n = A,T,C or G
taagaaacttttagncctgtggaccatagtccatgtggtggaattcggaaacattctcacatccctggcctgaaaaaaacaatttcagggagatcgcatggcagcagccctctctgggctccccagctaaatggttgtacgaaacacatttcaaagctctctgaagggcttccttgaagttcctttcactgggtttcaaagtagaaggtagtaactcctttgtccaagaaggctgaattgagcacttaacaattctccaaagaaatttcttcattggtctctatcctagaccccttctgtatccttgatatggctgaggattctaaaaaatgaccagtcttacatgggagggctgggatataaaaaataaaataataaataatgataaaaactggggnnnanannnnnnaannnannnnnnttaaaaaaaaaaaaaaaaaaaa

SEQ ID NO: 14064 - DNA, 469 bp, Homo sapiens
  misc_feature (1)...(469): n = A,T,C or G
attgagacccctggccaattgagagcccttctgaaggnctctattttaagaactggtttggtttatagggaaaagaagagaaaagagtagctaaagtgtatcctgtgattggaggtcattttgggttagccttagttcactgccatcttctcagtgggtttttagaaggtagagctagtggcctgcataaaagttgcgtttttcggctgggcatggtgacgcatgcttataatcccagccctttgggaggccaaggcaggcatattgcttgagctcaagagtttgaaaccagcctgggcaacatggcaaaaccccatctctgcaaaaatttaaaaaaaaaattagctgggcatggtggcgcagatctgtggttccagctacttaggaggctgaggcacaagaatcactggagcctatgaggcagaggttgcagtgacccatgattgtgccactgcactccagcctgggg

SEQ ID NO: 14065 - DNA, 441 bp, Homo sapiens
  misc_feature (1)...(441): n = A,T,C or G
atcgacatcgatgaccctctgnccgngtggtggaattctcagtggacagaaattaattggtacattatctcgtgaaagagtctgtttaagtgtggttacattcttgatcttacagggaggggaagaaaaaacaattgtcccttttagtgggtctggatctcaggcagatgaaggaacttcagcttcatcctgtgccagggagagaggatgagggggagaaggtcagagagaccttgaggcttctttagttcagcatatcaaaacgccattttggagtatgggtttctgagccttaacagatggaattgttttgtatctgggatgttgaataaagtagccacaggttactattgagcacttgaaatgtggctagttagatgaggaattggattttaaattttatttaattaaaatagatggctactctcttggatagcacag

SEQ ID NO: 14066 - DNA, 443 bp, Homo sapiens
  misc_feature (1)...(443): n = A,T,C or G
aatacgaagcctcgatagacccattnaggaggagattccgcccagctaatttctttgcatcttttagtaaagtcgatggttcaccatgcatatccacggtggtcctaatctactgacctcatgatccactcaccttagcctcccaaaatactggggttacagatgtgagctaccactcacggcccaaatcttcttgatcatatgtttaaatatattttttaatatttggagcatgagacgtcacttcttgtttgccttttttataaggaaatgttggagagttacatcattgctaatgtagaaatgctatgtggaaaaatatacagtttggtaaaataaactagattctacatttatttgtgggtttttttcccctcctttctttccacagcacttttgatatcaagcaagtggcttcctttttgagatattaaaaaaaaaaa

SEQ ID NO: 14067 - DNA, 499 bp, Homo sapiens
  misc_feature (1)...(499): n = A,T,C or G
nttcgaaacccttttccanggcgttgatgtccctactcagtgncgaggaataccatccaccgaggcgaaagactagtgctcccttccactgatatgtacaagcacacagtgagtgagttgttgcttacttgaatgatgcctaagaaagaagaatgtttctgggaaaacaaaacaaaacatagcgaccggcaaaactgtatgatgccgtgaaggagaggggggctgcatcatgtacagatgcttttcctttgttgtcctgagtatctgaagtgtcatcttgcagaggccacaagtttgttcctgagccacttaattcccctttgctcagttctgtcaccttccctgtggcacagttcctgctgctcttacccaaagtgctggtgtgtgtcccctgacaggtggcgttcaagatgtacttgggcatcactccaagcattactaattggagcccagctggcgatgaattctccctcattatggaaaataaccccttggtgga

SEQ ID NO: 14068 - DNA, 474 bp, Homo sapiens
tgcaggccttttaattgaaaccccattgcagagccctggaattcggcgtctccaggtcaatcatcttctgtactgggctctgaccactattggttttgagaccacgatgttgggagggtatgtttacagcactccagccaaaaaatacagcactggcatgattcaccttctcctgcaggtgaccattgatggcaggaactacattgtcgatgctgggtttggacgctcataccagatgtggcagcctctggagttaatttctgggaaggatcagcctcaggtgccttgtgtcttccgtttgacggaagagaatggattctggtatctagaccaaatcagaagggaacagtacattccaaatgaagaatttcttcattctgatctcctagaagacagcaaataccgaaaaatctactcctttactcttaagcctcgaacaattgaagattttgagtctatgaatacatacctgcg

SEQ ID NO: 14069 - DNA, 479 bp, Homo sapiens
  misc_feature (1)...(479): n = A,T,C or G
gagattcttacccaggggnnttttnnattgtacgtcattagtccgtgcggtggaattcgaagctcttccctctttttcaaatgtctattgatattctcccattttcactgcccaactaaaatactattaatatttctttcttttcttttcttttttttgagacaaggtctcactatgttgcccaggctggtctcaaactccagagctcaagagatcctcctgcctcagcctcctaagtacctgggattacaggcatgtgccaccacacctggcttaaaatactatttcttattgaggtttaacctctatttcccctagccctgtccttccactaagcttggtagatgtaataataaagtgaaaatattaacatttgaatatcgctttccaggtgtggagtgtttgcacatcatttaattctcgtttcacctttgtgaaacatgcacaagtctttacagctgtcattctagagtttaggn

SEQ ID NO: 14070 - DNA, 462 bp, Homo sapiens
  misc_feature (1)...(462): n = A,T,C or G
ttttnattcgangaccaatagaagacccctagtccatgcggtggaattcgacagtgtaaagaaaacctcccatctttatgtagctgacagggacttcgggcagaggagaacataactgaatcttgtcagtgacgtttgcctccagctgcctgacaaataagtcagcagcttatacccacagaagccagtgccagttgacgctgaaagaatcaggcaaaaaagtgagaatgaccttcaaactaaatatttaaaatagaacatactccccaatttagtctagacacaatttcatttccagcatttttataaactaccaaattagtgaaccaaaaatagaaattagatttgtgcaaacatggagaaatctactgaattggcttccagattttaaattttatgtcatagaaatattgactcaaaccatattttttatgatggagcaactgaaaggtgattgcagct

SEQ ID NO: 14071 - DNA, 460 bp, Homo sapiens
  misc_feature (1)...(460): n = A,T,C or G
aggaaaaaattttngatgcctnnnntttgtagacccctagtcagtgcggtggaattcgccattctgaaataaatctcttaggaagaaaaactgctttttgactctagattttgtttatagcattaaatattatttaaacactatgtcactgaaactttcaaatcctaagcttaattagaaatatacaacactttaaaagcttacaaattttgcatttttaaattattttcatcatatcacaaattatatgacagcttatatcacaactcatgagaagatactgatcttgggttaaacagctgaagagggcaattagctttagactgcacctattttcatctagccatctggaaaatgtaagctgtggtcacacagtggacagacagagaaggagactaaattactaaaattcaaactgcattcctgattactcataacgtatacatatggatcagaaaca

SEQ ID NO: 14072 - DNA, 482 bp, Homo sapiens
  misc_feature (1)...(482): n = A,T,C or G
ggggcgggattgagaccntcgnnaactgagagtctaggccagnngcgnggaannccatgacttcctgctttcattatgaaggaggggaaactagttcccttgtatggtaactccaaagttaaaaaattgtgcatgtctgaggggttgaatatattttgtaaaactctaaatacatttgtatttctgtgctgttctaaagtttacctttttacttatatgaaagataactatatatttaaatcatgtaagtggaacacagtgtagggggtttttccaatcttatttttcatcaggttctcacacccacgtagtatgctgctcaaattttttcgtgtgtgcaaatgtgaacatttgaacatttcagttaggtactgagccagaaaaggtaattgaagttttcagaaagcttctgtgcttagaaaatattttgttgttttcttaaaatattagtattttgtagctggaagaataagatcaaggcg

SEQ ID NO: 14073 - DNA, 462 bp, Homo sapiens
  misc_feature (1)...(462): n = A,T,C or G
tggcgtgcnnnttttncctgaactgcatggcatngngcaggaacncgngngttctgtggatgttaataggtgatactgttccagaagttctgtggcaaactaattcaggtcttctcagaacctttaatatatgtttcatatacatttacatttcaggcctctgaaaggcagaatcctcaaatttatttatccatggaagctttttttcccctcagagcaactcacaggactactttgggaaacactggctaagtgttcctaagatctcatgaaaccccttagggaagttttatcccaaacagacccagatcatgtttgtgttagaaacaaaaatttcatcaacagtttaagaaactacttacatgtgccagtattcgttagttacatatgaaaaactcagttcaacaagcgtaagcaaacaaaagcgtgtaccagccgatgtcactggagcccgggctggct

SEQ ID NO: 14074 - DNA, 486 bp, Homo sapiens
  misc_feature (1)...(486): n = A,T,C or G
cccccccccccnnattgtagaccatttgagnactattagtgcagtgcggngaaattcctctaaacaaggaaaggcaagctaaaagaggataggaaagaacatcttatcaaaatgaacatgttgtgtacaaaacattaaaagaaaaggctctggtttttgttaaagtgacagaaaattaaaataaaaataattgcaggcaccaaagttataaacagggaaggcaggatgctagctggaaatgcgcagcactagggagctaatttgttgttacagattatatatctgcaccctgcttggagaagtgctactttgttccattttccagaagagaatggtttttcttcttaatgcttgtgtgaatgcccacttaagttaacacaggccacaactttgaggaatgagaaatggaattgcattctgcttgcgaagcatccaacttcaaacgaagaaattggttgtgtacaaaaaaaaaagtagaatttcatt

SEQ ID NO: 14075 - DNA, 453 bp, Homo sapiens
  misc_feature (1)...(453): n = A,T,C or G
attgatagcttacgcacgtgcnggaattcgtatgtaaaacacttcataaaatgtaaagggctataacaaatatgttataaagtgattctctcagccctgaggtatacagaatcatttgcctcagactgctgttggattttaaaatttttaaaatatctgctaagtaatttgctatgtcttctcccacactatcaatatgcctgcttctaacaggctccccactttcttctaatgtgctgttatgagctttggacatgagataaccgtgcctgttcagagtgtctacagtaagagctggacaaactctggggggacacagtctttgagacagctcttttggttgctttccacttttctgaaaggttcacagtaaccttctagataatagaaactcccagttaaagcctaggctagcaattttttttagttgcaactaagtaagatatactacaa

SEQ ID NO: 14076 - DNA, 496 bp, Homo sapiens
  misc_feature (1)...(496): n = A,T,C or G
ntcgaaacccttngnangncgtcgaagtccctantcagtgtggtggaattcccgagggaccatgtcgaggctcagctggggataccgcgagcacaacggtcctattcactggaaggaatttttccctattgctgatggtgatcagcaatctccaattgagattaaaaccaaagaagtgaaatatgactcttccctccgaccacttagtatcaagtatgacccaagctcagctaaaatcatcagcaacagcggccattccttcaatgttgactttgatgacacagagaacaaatcagttctgcggggtggtcctctcactggaagctacaggttacggcaggttcaccttcactgggggtccgctgatgaccacggctccgagcacatagtagatggagtgagctatgctgcagagctccatgttgttcactggaattcagacaaataccccagctttgttgaggcagctcatgaaccagatggactggctgtcttg

SEQ ID NO: 14077 - DNA, 461 bp, Homo sapiens
  misc_feature (1)...(461): n = A,T,C or G
nattaaacctcggcaaatgggtctccagagacagncagcttcgctccgcatgagagggagaccgggggtgagggagagtgagagggagagggatagggagagggagagggagagagagaaccgatcgattgattttcaacaaaggagccactaccttttaatgtagaaaagacagtttcttcaacaaatagtgctgggaaaactggatatccacatgcaaaagaaggaagttgcatccttacctaacaccatatacaaaaatattacccaaaatggatcaaagacctaaacataacagttaaaactatgaaacacttagaaaaaaatctttatgacgttagattcggcaataatttcatagataggactctaaaagtataggtaacgaaagaaaaatagataaactggacttcatcaaaaataaaaagttttgtacatcaaaaaacactatcaagagagtg

SEQ ID NO: 14078 - DNA, 434 bp, Homo sapiens
  misc_feature (1)...(434): n = A,T,C or G
attgtagacattagntttcgagtactattagtccgtgcggtggaattcggataatctgagcaggtacatttctgattctgattgctatcagcaatgccccaaactttctcataagcacctaaaacccaaaggtggcagcttgtgaagattggggacactcatattgccctaattaaaaactgtgatttttatcacaagggaggggaggccgagagtcagactgatagacaccataggagccgactctttgatatgccaccagcgaactctcagaaataaatcacagatgcatatagacacacatacataatggtactcccaaactgacaattttacctattctgaaaaagacataaaacagaatttggtagcacttacctctacagacacctgctaataaattattttctgtcaaaagaaaaaacacaagcatg

SEQ ID NO: 14079 - DNA, 442 bp, Homo sapiens
  misc_feature (1)...(442): n = A,T,C or G
gagcggtgnnnnnaatcgtagacattagtcttggaggtcgatattcgctaaagccaagactgccccataactttaaaagccatcattggtcactgccgatgtctatttttgaagggttgagatggacagatttcccaagatgcatatcttttgctttcagttctaacaaatgttctattagctaaaatgtgttgtactccacagagtattgggctcgtaattcttcttttttttttttagaaagggagttccatttttgttgcccaggctggagggctttagggaatttttaatttaccaaagcctccgccacccgggttaaagcatttttcttgtctaaccttcccaggtagttggaattacaggcatgccccaccccaaccgtttatttttatacttttagtaaaaagggggcttttccatgttggccagcctgctctca

SEQ ID NO: 14080 - DNA, 437 bp, Homo sapiens
  misc_feature (1)...(437): n = A,T,C or G
attggagcccctngnnatcgtagaccattatccagtgcggtggaattccaacatcacatgggctgatgtggaggccaggtatcctttgtttgaagggcaagagactggtaaaaaagagacaatcgaggaatgaggacaattttgacaacttttgaccacttgcgctaataaaaaaaaaaaaaaaactacttttatgtccactttacaaaaaaaaacagcattgtgattactcccagggaccgtattttattttcaggggctgcctgattttacccccacaattaaagttgaaggaatcctgaaaaaaaaaaaaaaaaaaaaaaaaaaaaaaaaaaaaaaaaaaaaaaaaaaaaaaaaaaaaaaaaaaaaaaaaaaannanngggggcccctttaaaaaaaagggccctaaaaaaccccgttaaaccccctggttgtt

SEQ ID NO: 14081 - DNA, 424 bp, Homo sapiens
caacatctgagtcaccaagaagtaacactttttaaacttgttagaaatccctggaggcatttcaaattcatcttctaacctacctaagcactttaaaatacagcctccttctgttcctctgttccccttcatgcctccttttgaattgatatctcagctgtcaatatttctttgacttcagcattgttattttatttctctatatcaatgtgtccttagttttcttagcctgttaatttaaaaatccagacttgggggtcattgtgttgctacccaagagaaaatgctacagttttatagattgcacatcattctttaaggcatacttttacctcaggaaacttactctagtatgttctcatatattgaattctcaactaagtaactatttctttatacctataaactagtacctaattcactg

SEQ ID NO: 14082 - DNA, 498 bp, Homo sapiens
  misc_feature (1)...(498): n = A,T,C or G
cgtcntgggcggcgggccggnnnaaaattgagactgangagctatcagcacagngcggnggaattcggccaggagtttgagaccagcctgaccaacaagacgaaaccctgtctctactaaaaatacaaaaaaatagcaaggcgtggtggtgtccgtctgtggtcccagctactcaggaggctgaggcagaattgcttgaacccgggaggtagaagttgcagcaagccgagatcatgccattgcactccagccttggtgacggcgcaagactccatctcaaaaaaaaaaaaaaaaatttctttttggaatttgggaggaaaaatttgtccccccctggcctccgggtatatgggcccgttttcaccctgttgaaaaaacctccttgaaactggttatttgaaaaaaaggggaggttaatttgattcacagtcccaagggttaaacagaaaccttggtgggaaggcctaagaaaattaacaatcatggtggaaggtgagg

SEQ ID NO: 14083 - DNA, 448 bp, Homo sapiens
  misc_feature (1)...(448): n = A,T,C or G
nttgtagatcactagtcctggatggccggaattaatttttgtatttttagtagagatgaggcttcaccatgttggtcaggctggtctctaactcctgaccttaggtgatcccccacctcagcctcccaaagtgctgggattataggcgtgagccaccgcacccatccaaaaccaagttttaatggaagcttttctgactttttagtgaaggcagttgattttgaaattttaaaactatcgtgtaggccaagtataatatctgtggactgccatttataaactctgctctgagcagatgcctgggggctcacttttttggctcagttggtgccataagttggggagcaccttctgagtcagttacacatgcccgtacacctcaggagcccctttcattttccggaatgctaaactccctttacccagtttaagtatgggctgcgcgcgg

SEQ ID NO: 14084 - DNA, 405 bp, Homo sapiens
aatcatacaaacacttgatgacagtgccccttatgtaaccattgacccctcctgtggacccagaggtgcctgcgttcagcacaggaaagtggaggtgcagaggagacggtttcctgcctcactgggcccccaggtattgctaccaagcagcccacccctccccaccaaagctaaaggggaaacagtcaaaatgctgcagaaaggatttctagacaaacaagagtaccctccagagaccccaccccacagagtcctggcccctctggcctgcctccaagagggtgctccatcggtgagggacagctgggtctgagccttccatggggaggagaaagagggtgtaaggagcagttagttcccaagtgccttcccatgcagggggcgtaaaaatgacatcacccacct

SEQ ID NO: 14085 - DNA, 445 bp, Homo sapiens
  misc_feature (1)...(445): n = A,T,C or G
gagcgggnnnngnaatcgtagacattagtcattgaggtcgatattccctttgacttccacgtgcccatctcaagacattccactcacagatttgaggttctggattccaggtctggagttttccaatgttaatgtaaacagaactggcacacacacattaagatgaatgtaattattattcctcttgctggtcactaccgtcgctttctatttctctttctttgtgtgaatttatttaaaagaaaaaaaaactttttgtaacgactatttgcagtttaaaaatcaataaaccccgttttttcaagaaaaaaaaaaaaaaaaaaaaaaaaaaaaaaaaaaaaaaaaaaaaaaagacgccttaaaatacanagnggaagcgcccccgcgagtgatagcggacttgaaaattcagttgtatgcccaattggggagcctcatcacccct

SEQ ID NO: 14086 - DNA, 454 bp, Homo sapiens
atcgagacccttagtccacgtggtggaattcggggaggcagcacagtgcagcaaatgtttcttgggaggaagaagcctgatccatcaccatctgcttgactatgtagcttggattctcctttgtacctatccctttcgatttggctttaccttcatctatcttgatcctttcctggccaaatatcctcttgggcccaaatgaacattgtaccatagtcttctggaaagcaaacatgcttcctgctatgtaattgctaacattcatattagatgatgtgctgtagcttgatcttccttagcctactgccactgaggcagtaggttttaggtggtatcgtagtgccttttgattaatttaagtatttaattttcatcttccttctttggatctatttggcctctcaaatgaactgagattcctgttaaaaaagattgatgttattgtctcttgtag

SEQ ID NO: 14087 - DNA, 388 bp, Homo sapiens
gatggcggccaccatgaagaaggcggctgcagaagatgtcaatgttactttcgaagatcaacaaaagataaacaaatttgcacggaatacaagtagaatcacagagctgaaggaagaaatagaagtaaaaaagaaacaactccaaaacctagaagatgcttgtgatgacatcatgcttgcagatgatgattgcttaatgataccttatcaaattggtgatgtcttcattagccattctcaagaagaaacgcaagaaatgttagaagaagcaaagaaaaatttgcaagaagaaattgacgccttagaatccagagtggaatcaattcagcgagtgttagcagatttgaaagttcagttgtatgcaaaattcgggagcaacataaacctt

SEQ ID NO: 14088 - DNA, 457 bp, Homo sapiens
  misc_feature (1)...(457): n = A,T,C or G
atcganaccctgagaacttagtcagagtggtggaattccaatcacagctcactgcagccttgaactcctcctgggctcaagtgattctcctgccttgttctcccaaaatgctgggattacaggcatgagccactagcccaacccagacttcttaatatattcattttataagaaaggtataaattgcatagatttgatctagcttttgtagcaagaatgcagcagggtatagaagtataaccagtttgactagtgcaaaaccacttggccagtcctttgtcagccccattactctatgtgtgacactgctctagtcatcccagcaagtgacagctgccagatccatttgcagaggtcaggtggccaactccagccatgtagacatctttcatgtttaattggtaaattgtagaaataaagctaattattaaagatgatagacacattgacaatatgg

SEQ ID NO: 14089 - DNA, 422 bp, Homo sapiens
acatttaggggccgttaacaaatctgtaatggaacatagctgtgaaaacaacttgcaatcgttttaatttggtcatttttgtgggcttttgaatagtgctgtctgtcactaagctaacgaatagtgaatgttttgtaaatatttgttatttagtctaaactaaaatgaaaatttttagcttttcctgtgaaagctaaaaattttcattttagtttatattaaataacaaatatttattcctgtgaatcagtagtttacacagataatattgagaggctttcttgggaatttgaaaggagtcttcaaatcatcctttccctcagagatgaaaaaatattttaaaaaaattactgtcttgtatatttgatattttgaaaatggcagggaatcaacaatttgttaatctgttgttaagatcagtt

SEQ ID NO: 14090 - DNA, 442 bp, Homo sapiens
  misc_feature (1)...(442): n = A,T,C or G
ggcggtnnnnnaattgtagacattagtcttggcggtcgtattccaataagcaatatgtggtgataatgaaaagaatgattcagtcttgacggtgaatggaagacacttacctaacaagtactgctcatttacactcaaattaatcttgaagtagtcttaaaatgtgaaagaagttaaaacttgcgaagcaaataaatgcctgcaaaaagaatatcattttgcatacagagaaccggatgaatataagcaatgaagatgaacatttattgatcttctacatacaagacttcaccataaggccaggagcagtggctcacaccttgtaatcccagcactttgggaggctaaggtgggcggatcaccttgaggtcaggagttcaaaaccagcctgaccaacatggtgaaaccctgtctctactaaatattagcggggtgtggtggg

SEQ ID NO: 14091 - DNA, 458 bp, Homo sapiens
  misc_feature (1)...(458): n = A,T,C or G
ttttgattgtagaccattagtnggcgcgtaggaattccagcgctttgggaggctgaggcaggcagatcacttgagaccggcttgggcaacatggcgaagccccatctctacaaaaaacacataaattagctgggcattgtggcgcgcacctgtattcccatctagtcaggaagctgagatggaagaattaattgagcccacgagttcaaggctgcagtgagtcgtgattgtgccactgcactccagccggggtgacagaagagaccttgtctcgaaaaggaatctgaaaacaatggaaccatgccttcataattctagaaagttattttcaactgataaatctatattcacccaaataatcaagggtgaaggtaaaataatacatttttagacaagcaaagactcaggggttacctccatgtgccctttttagggaagctgttggagaaaatactcca

SEQ ID NO: 14092 - DNA, 481 bp, Homo sapiens
  misc_feature (1)...(481): n = A,T,C or G
tggttgttcnccaagannnnnnnnnnacgtagaccactcgaagtgcggtggaattctgagtctcgtttattattggacatgcctagcccatcaccagtgacctgcccgcatattgctggcttcccttggataacggagagcctatcaccacatgcctttgttgtcttccatcatatcaagtgagttgctttctggactttttccatctagagcctgctaggtttggttttgagaaaagatggtgaagtttcttttcatgagtttgtagggcaaaaaaattctttttaaagatggtaagggtggaaattaatcatggtaccatctcattaaaaatagatacctcaaaatgtttacctttacaagtcaagaagagtatctgactttcttggaagtgtcaagaattgcaggttgtctgaaaagttagattgagaatctgaccttgntacttatgattctttcttcccttggggtctcgggatgn

SEQ ID NO: 14093 - DNA, 424 bp, Homo sapiens
gaaatccttgcagtatgaaaacaacttttctattccatggagccaaacctcattataacagataacgtgaccctcagcgatatcccaagtattttcctgttctcatctatactatggcaaaggggcaaatacctctcagtaaagaaagaaataacaacttctatcttgggcgaggcatttcttctgttagaactttgtacacggaataaaatagatctgtttgtgcttatctttctccttagaattattgaatttgaagtctttcccagggtgggggtggagtgaagctggggtttcataagcacatagatagtagtgtctcttagcttccgtttaaatatgggggtagcgatgtggagggcccagaagtatcagagaggagagacaggctgctctgattgcctttgtaaaatgcacatttgag

SEQ ID NO: 14094 - DNA, 424 bp, Homo sapiens
accaaacttgggcctgaggccttctggtttaactccggcagagaggccgtggccacccagctgagcgagagctactacatcctccggccagaggtggtggagagctacatgtacctgtggcgacagacccacaaccccatctacagggagtggggctgggaggtggtgctggccttggagaaatactgtcggacagaagccggtttctctgggatccaagacgtgtacagtagcacccccaaccacgacaacaagcagcagagcttctttctagcggagacactaaagtatctctatcttctgttctctgaagatgacttgctctccctggaagactgggtgttcaacaccgaggcccacccactcccggtgaaccactcagacagctccggcagagcctggtgcagacactgaccccatctcc

SEQ ID NO: 14095 - DNA, 408 bp, Homo sapiens
attttcatctctttgccccagttttgccatctgaaggaaattcttattagaatatgtctactttttagcaggattccttaatataaaatcgagtctcatgaaactttaggaacaaattagaggagaatcatagctaatagttattactgacataataatgccaaaacgaatcataattattgacacttattgggtgaatgccatgtgtcaggcattggtctaaactctttctgtatagcacctaattaaatcctattaagccattttttacttatgagaaaactgagggggggcacaaagcgattaaattacttcctccaaagtcacacaaatagctgagtcttgaaccctggtcctaaactactagtctccgctacctccccaatgtaaacatgtgcactgtatttg

SEQ ID NO: 14096 - DNA, 484 bp, Homo sapiens
  misc_feature (1)...(484): n = A,T,C or G
catgagccctctggnatgagcgccgttagcangngcgngncagccggattgtgttcattgagggaaaccttattttttaactgtgctatggagtagaagcaggaggttttcaacctagtcacagagcagcacctaccccctcctcctttccacacctgcaaactcttttacttgggctgaatatttagtgtaattacatctcagctttgagggctcctgtggcaaattcccggattaaaaggttccctggttgtgaaaatacatgagataaatcatgaaggccactatcatcctccttctgcttgcacaagtttcctgggctggaccgtttcaacagagaggcttatttgactttatgctagaagatgaggcttctgggataggcccagaagttcctgatgaccgcgacttcgagcccttcctaggcccagngtgccccttccgctgtcatgccatcttcgagtgtccagtgttctgatttggg

SEQ ID NO: 14097 - DNA, 456 bp, Homo sapiens
  misc_feature (1)...(456): n = A,T,C or G
attgancatcgtagacccttagcccagngcggtggaattccaaaagcatcacatgttgctaagaatcagctgattgtacatgcgtctgctcccacaaccaaacggaaagcaacttaagagaagcacttgaggtgacaatgagatgagtcccccaaattttagaaatgaggctgacgtctgataattaaacactttgtaaaaacgggatagaaacagagaaatataatgtcccctgttcccgttattaagctgctggctctcagctccaaacctacctttccataccctggtctgtggtgctggagctggaattctgaaaaactgcacttctgcttcaccagcagctctcttagtctctgctaatgggagtgctcaagggagctacaagtctagaagaggaaaaggctttgctctttcctgtttgctttttgtggaattggtttgagcatcacttan

SEQ ID NO: 14098 - DNA, 461 bp, Homo sapiens
  misc_feature (1)...(461): n = A,T,C or G
tgcgcgggcgnttttnaactggctgcatggcatngncaaggaacncctgttctttcctttattcccagctttgttctttttcttgtgttttatattttttcaccttcccttcctgctaagctttttattctgcttgcctcttttgtctaaattattatctttatgtctactcttgtagcatacccagtaaaactatttagataatctaatgttgcagaacaagcagtataatttggaaaagattaggtagaattttcattttctgaaagttttaatgtaaagtgttttcccctcttgttaatattactttctctacaaacattaatttcattggcttatgtggtgtgtatagttttggcttgttggtaatgcacagttgttcgcagtagtgaatactcaggttcaatttcagtttgtttcccacataaaccaagaaataacttaatacatttggactgcta

SEQ ID NO: 14099 - DNA, 454 bp, Homo sapiens
  misc_feature (1)...(454): n = A,T,C or G
catagagnccccactgatgaccactaggacangcggnggaattcggcgactccctggccccagcctccgccccagggaaaccgaggctgcgtccaaaacccagagtagcccgctgggggccggggcggggtctcggccaccctggtggtgcaaacaggaaggatgcgcctggttttggctttaatgttcaaaatggaaaaaaatacaagaaagttgtacagtatttttcctgtaaaggttattattctacatagaacaaaaaggaagaaagcaggcgtggtgagagtgcagacccgcctgggcccggcctgaggttggaggctcagtcccgtttatcctgtgggatttggtccagggtttttgtagaggccttaactgtttgaggctgtctgtcttcacaatagcactgatgggagctgcgtgattccaactcttaacttgaattttgtagaga

SEQ ID NO: 14100 - DNA, 437 bp, Homo sapiens
  misc_feature (1)...(437): n = A,T,C or G
ggaaaaaatgtttcattaaagggaacggttatcatcattgcaaatcatggtgacagaattgatatcccacctggagcagtattagagaacaagattgtgtctggaaaccttcgcatcttggaccactgaaatgaaaaatactgtggacacttaaataatgggctagtttcttacaatgaaatgttctctaggattctaaaataggcaggtactttactatgttactgtaccctgcagtgttgatttttaaaatagagttttctgcagtatgcttttagtctaagaaaagcacagatggagcaatactttccttctttgaagagaatcccaaaagttagttcatcttacagtgcaatattggttaatcttaaaactgggcaactttggaagaacttttaacagaagcctcaatgatgatcactttgaattgcttgtgn

SEQ ID NO: 14101 - DNA, 388 bp, Homo sapiens
gatgttttatgtgttttcacctttggaatatattgttacatttccttgtacagataattttggtggctttgttaatgtagctagtaatttttatgactactaagtgaccagttttcggtgccttttattgtgggatgcatgattatgtatttattgtacggaagtcactgacgtgtgtatttttgtactttgctgaaagtaatggttgatcctgatgtacatgatgatgaaagacatctttcccaaagggcactgccttgagatcatccttctcaaataaaaagaatgcatttgaagaaaaaaaaaaaaaaaaaaaaaaaaaaaaaaaaaaaaaaaaaaaaaaaaaaaaaaggggcccttttattttaaggggccctttaaacccccg

SEQ ID NO: 14102 - DNA, 471 bp, Homo sapiens
  misc_feature (1)...(471): n = A,T,C or G
gcgtaaaanaactgatgacatttgaccagcgctgtggaattctttttctcaatttgggaggagtttgggagcttctaactatagttcccagactcttttaatgattgtacaacttttactttctactctcaatattataaatattgttgaaacctcccaactcacttcctttttagacttgatgtttcccaaaataattaacattttcccctgaaggtctttcatcttttttagctgaagttgcttccctctaacactgtctcttggtggacttacaaactaccatttgggtaataaagccttaagaaaaagtagaaattttttcttagcaatctctccccaattaactgtctataatgactttcacccccacctatctcctaaaattgtgccttcacaatttaccaagaaactcctttttgttaggaaattcagtcactattaaactgcaatatttttggtattagaata

SEQ ID NO: 14103 - DNA, 462 bp, Homo sapiens
  misc_feature (1)...(462): n = A,T,C or G
natggagaccgtaggccagngcgaatgaagnccgtaggagaccaccatggagtgtagtcatcaggccagaggggcagcatttggcattgcatccttaatgacattcttggtaaggaaaaaggggaaccagctgcaccaggatcctagccatctggtgattctatgtctacagtctggatagatggtttgggtaaatagccctagctagtaatttctctaattagcccctcttgctctgatttcatattcatcaatcaactgttaggtaacaatttatcttcttgagcagttatttctacaaagaagaaatgtgttgagtactaaacttcttgactccttttgcagtcacattttcaagtttaaataaaggaacatttaggtatcctggcttatgcattttcctcttttgcttttgggttgtatgatgcagttcctggaacaaattcccaaagctgaatctaa

SEQ ID NO: 14104 - DNA, 481 bp, Homo sapiens
  misc_feature (1)...(481): n = A,T,C or G
ntttgtagaccantaggacagngcattgaatatccctgagcaccngcngctggcatcgggccctggcggggtagtagcttgcctagagatctcagccgcaccctctggcaaggccatctttgtcaaggaacgttgtcggtacctgctgcccccaagcaagcagagatggcacacatgcagtgccttcctacccccaggtgacttcctggtgtgtggtgaccgccggggctctgtgctgctattcccctccagaccagggcgtgatggagcctactaccagctgtttgtacgagacggccagctccagccagtcctaaggcagaagtcctgtcgaggcatgaactggctagctgggctccgtatagtgcccgatgggagcatggttatcctgggtttccatgccaatgagtntgtggtgtggaaccctcggtcacacgagaagctgcacatcgtcaactgtggtggaaggcaccgttcgtgg

SEQ ID NO: 14105 - DNA, 488 bp, Homo sapiens
  misc_feature (1)...(488): n = A,T,C or G
nattgaaaaccctttnnnnnnnncatttgagaccattagcacagngcggnggaattcattgttaatgtggaacaatttaacactaatctcatcagagagcgagatgaatgtggcaattgctcattttattttgcatatattaaattgagtaggttcagctctaacataccttaagaaaaatgcatatcggtgcactgtatgtatttcaaaatgcctttcctatgattgtcatgtcctcctttaaggcttttccctcaaatttattacaaatttagtatttttagtacttgatgactctaattacatgaatgcacctggaatgacatttgtaacagaagacggtctgacttgctttcagtattcacaagttctttccagtttccaagtcttttcctagcagtaatttaggggagacagaggagtttcatgtaaagagcatgcagtttggagtcagaacctgggtatgactctgtggccttgatgaagca

SEQ ID NO: 14106 - DNA, 479 bp, Homo sapiens
  misc_feature (1)...(479): n = A,T,C or G
catcgacnccnntngnntttgagaccactagtcagagtggtggaattcatttcggcgatgagctcccagaaaggcaacgtggctcgttccatacctcagaagcaccagaatacgtttagcttcaaaaatgacaagttcgataaaagtgtgcagaccaagaaaattaatgcaaaacttcatgatggagtatgtcagcgctgtaaagaagttcttgagtggcgtgtaaaatacagcaaatacaaaccattatcaaaacctaaaaagtgatggagtctccctctgttgcccaggctggagtgcagtggcaggatcttggctcaccacaacctccgcctcccttgttcaagtgattctcctgcctcagcctctcgagtagctgggactacaggcgcacaccaccatgcccagctaatctttgtatttttagtagagatggggtttcactatgttggccaggccggtctcgaactcctgacctt

SEQ ID NO: 14107 - DNA, 442 bp, Homo sapiens
  misc_feature (1)...(442): n = A,T,C or G
agggtttttacaactagtaccctcagatagcgtggaanncaccccgactgaatacaggccgcttttttgttctccctcggccttggagggcctgggacgttcctgttgcccaacatcctgaataacagagtacaccagtcatcataagaagaaaaattcacatttaaagtttggaaagcaacaggacaaaggtctgtcttcagtggtgcgtagacatgctcgtgattgaattggaaatagttctctttccttctctctgacttcctaactgaaaagctgcagcgtggggagaaaggctgctcagaagcctggagccagaacacgcaccccggcttttgcagggccggctcacttggttagaatcaaaggaaaagccttgttatttgggaagctgggcgtcctcaccaaattaagggatttaatttgcagatatctaaggagt

SEQ ID NO: 14108 - DNA, 476 bp, Homo sapiens
  misc_feature (1)...(476): n = A,T,C or G
attgagaccctatccangcggtgaattctttgcncgagcgcttaaaggagatgaacctagagtcaaagagtgggggccgagttcagagacgttctgccaagatagctgtataccacctacaggagctggcctctgctgaactggccaaggaatggcccaagaggaaggtgcttcaggacctggtacctgatgatcgaaagttaaaatatactcgtccagggctacctaccttcagccaggaagtactacataaatggaagacagatatcaagaaatatcatcgtattcagtgtcctaaccagggctgtgaggctgtctacagcagtgtatctggccttaaagctcacctgggctcttgtacattggtttgtaactttttaaacttactatcttaacatgtcctctaaaatagtctgacatggaagagaattcagtttaggtgaacagctagttgtcctgtttaccattatcttcag

SEQ ID NO: 14109 - DNA, 483 bp, Homo sapiens
  misc_feature (1)...(483): n = A,T,C or G
natggagncctntngnnaactagagactctaggacagngcggnggaattcgggaaaggtggctaatgctcctatcttctgtcccttcaaggtggttcagtcaggtggcaaaaacattgaacttgctgtcatgaggcgagatcaatccctcaaggtaatcaccaagtttgtctgctttctttacctgtcagttttctcccatgatcagggctgagcagtaccagtttcgaaggaaacatcatagggccattctgtggttttaacattaggaaaatgtctttctgaggcttcccatacgtcaaagagaagattcccatcttcctctgattagatggtccacgcgtgttctctgggcatgctgagcggctgccagtcagatctgctgctgctgctgcttaatacttgtctaggtcaggccagcatcctcttgtttttcttgaggttcctctccaaagaggctgtatgagcagcagtgccaaagccn

SEQ ID NO: 14110 - DNA, 492 bp, Homo sapiens
  misc_feature (1)...(492): n = A,T,C or G
ggggaaatgantnccntnnnnnnnnnaactgagtaccatagtncagngcggnggaantcggccattcagccgccgctgtccccgctgcgcgccctcgcgcctctgcctgagaagccaggcgctgttcccccaccccagaagaggatggcaaaggtggctaaggacctcaacccaggagttaaaaagatgtccctgggccagctgcagtcagcaagaggtgtggcatgtttgggatgcaaggggacgtgttcgggcttcgagccacattcatggaggaaaatatgcaagtcttgcaaatgcagccaagaggaccactgcctaacatctgacctagaagacgatcggaaaattggccgcttgctgatggactccaagtattccaccctcactgctcgggtgaaaggcggggacggcatccggatttacaagaggaaccggatgatcatgaccaaccctattgctactgggaaagatcccacttttgacaccatc

SEQ ID NO: 14111 - DNA, 472 bp, Homo sapiens
  misc_feature (1)...(472): n = A,T,C or G
nactgagacctggaangcgtgaaatcactagaaagcctatgccctgcactttgtcccaccttttacctctgcccttctcactccaggggatgcttttcctctgagacagtacgtagtatcaaataaatagtcctttagctttctgctactagatctataaatctacctgcatctataggtatctcttctttatgaaaaattacttcttacatatgtactctagattattctgtctactttgagtcttcaacctcttcatctgtgaaaagcgttttcagttaaaatacataaaatgtcattgcagatcagcatttatagatgaacagttgctctcagttttaatgatagggaacactaactttgaaccccaattaaatgaactgttatctccctccaaaataattatattcttagtggtaaacttataaaagattatatctaattattagtattagcatatttaacatttctg

SEQ ID NO: 14112 - DNA, 485 bp, Homo sapiens
  misc_feature (1)...(485): n = A,T,C or G
natgatncccctcgnnnnnncattgagtaccctagcaccgngcggnggaattcggccgctcttcctggggttgtttctccgtgtgacgtgtggcctttgagatcaactctcctgtaccagcgtaggccgcatgagtggggggcgggctcccgcggtcctgctcggcggagtggcctctctgctcctgtcttttgtttggatgccggcgctgctgcctgtggcctcccgccttttgttgctaccccgagtcttgctgaccatggcctctggaagccctccgacccagccctcgccggcctcggattccggctctggctacgttccgggctcggtctctgcagcctttgttacttgccccaacgagaaggtcgccaaggagatcgccagggccgtggtggagaagcgcctancagcctgcgtcaacctcatccctcagattacatccatctatgagtggaaagggaagatcgaggaagacagtgagn

SEQ ID NO: 14113 - DNA, 487 bp, Homo sapiens
  misc_feature (1)...(487): n = A,T,C or G
ngtgnaatcgagactctagtcagtgtggtggaattcagtgttaggggttttgaactaggtggatactaaatctcggccccactcttcattggcttaacctaaaaaccagaggtgcttttccttgtctgtgtgccagttgctggctgttttagttgcttgcccttcattttgctactgattttccttaatttgtgggaaggagtaggcaaagaatatgcttacatgattacacctgtaaagtaagcccaaacatcccaaatgtccatcaactgatgagtggattaataaaatgtttccatggaatattccttggattactcagccataaaaaggaatgaagtactgacacatgctgtgacatcagtgaaccctgaaaacatccttctcagtgaaacaagccagagagatgtacaaggctacagactgtatgattccatttatatgaaatatacatactaggcagatccatggagatggaacatagatt

SEQ ID NO: 14114 - DNA, 557 bp, Homo sapiens
  misc_feature (1)...(557): n = A,T,C or G
ctctccatcgctatcaannnnnaatgctgtgttttgagcttattttgaacctagatccttgtgaaaggtacaaatagaggtaatagttaagttatggtatttattagaagttttattatttggcttcctttataattattgtgaagtttaaaaatatcctttctcctgcaaattttcctagtatttagtaactgttagtgttctatatagcacaaacttgaatctctcagccaaaaaagggaacatatatactgtttaagtatggcaagttttctttggtaccaatttgtttagataattttaaaaatgttttttagttctagctactaaaacctgtatgaactcaaatggataggcatcttgtgagggtgtgtttttcccagcgtgaattggcttgaagagccatgggctaaatgggtactagaacaacaactgcccctcatgtacgccaaggatgagctctagatcatttgagaggcacagatgtttcggagtcagggactgcagatgagcgcaactgccccatctgaccactgactcanatacgaactgcttgn

SEQ ID NO: 14115 - DNA, 477 bp, Homo sapiens
  misc_feature (1)...(477): n = A,T,C or G
catagagccctctaggccaatggagngccatccgaactttcctgggtattttccccattttacattagagagtattgaaacttaaaaaggactcgtgatttatccagtgatccaaagtgtgtatttcataaacacatacacacagtgcgtgcattgtttaggcatacgttactttccacagtatctcaaatgccttttacatgaatcccatactatcaaaaattggtgataacctaaaatgtagtgcaataatacaataaggcatttattttcttagagttgagttgatggatttttagatttttattcaagatcttttgtttgtttggctttgcttggaagatactgatttattctttcatattaaagcaaatcctgccaaagcactaaatagaccgttttgggttggttttttagtgtaatattaatacgggtccacaggtgaattgagtctgttcagatgtaaggattgaacct

SEQ ID NO: 14116 - DNA, 492 bp, Homo sapiens
  misc_feature (1)...(492): n = A,T,C or G
gtggcnnnnaggaaaaactgagaccactaggccangnggnggaattccaggaaaagctattgacagatgagaatagtggccagaagagaaatataggtgaagtgttctggcctacccaaaccctcagtctccagcccagatcctcggctcctgaaaacactacaaaatactcccccagtactccacccctgccactagcaagtatcacttgcaggcccatcctttgctctcttaaccatgcccacatgctctttcccaccgcgtcttattcctcctctctaagaagtcttattctctgtgtaagaaagcttaagtcctctgcttgttcagcctagcttgaactgaaaccaatatccccaataccagctaaagttagctaacgtgatctaattcctggatatttagggccccctctaactgcctctgtcaccagcaaaatcacctgctgggaactgactctcagcccaggttctatttctgtcccccacccgc

SEQ ID NO: 14117 - DNA, 473 bp, Homo sapiens
  misc_feature (1)...(473): n = A,T,C or G
catcgagcacccaattgccgngctgtggaantcctctaatcaataggggtttagctttcttttctatttcactcgtttctagggttttttatttgcagtttatgaactattaggaatgtcaggactttatcagcaggggtaaaactaccacctggcctagcctaagtaggaagtgaaaagataattcaccaaacaatgattaatcagatagaagttctagtcaagagggatattgttgaagttacctcttttagcctagatacatggattcttttcaaatcaggaaagattagaaaaggaacccaaaaaaccctttaacagtgtgaatctttatagtatttgaaaatgagaagaagcagcagattgtaatttggtttattggatgtgatggacgttctgtaatagaaaacctgaaacgatgattgaatgggaaaaagagactacaaaatttgtcgtaggatgtatacagactt

SEQ ID NO: 14118 - DNA, 475 bp, Homo sapiens
  misc_feature (1)...(475): n = A,T,C or G
attgagaccctagccangcgttgaattcgtcatancatacccangcttggcctccctgaatttctctgcttttccatgggcctttaggaagaatgagctggcccgttttcctcgttcctggacactgcctatctgggcacactgatttgtatgagccaacctgctattcttatattttctatattccaagacaggttttacttgattgatttacaagtttttacatccacctagagagtcagaatctcctttggaaggtaactgcagtccagaacattagactctaagggcatatacttccaagcagcctggccacttctctctgggtccctccatgtctgctgagagcctgtgcttctcacctgcacttcttcacccggtttcatgagtgtgctttgctgactgtactgggtagggaaggagctggttcttatacctgctggcaaatgacttcagttttaaattgatcctgagg

SEQ ID NO: 14119 - DNA, 450 bp, Homo sapiens
  misc_feature (1)...(450): n = A,T,C or G
agggatncccccactgaaaccccgactgagangccagcacannccggnggaantccaggaggggccggagtattgggaccgggagacacagaagtactttcgccaggcacagactgaccgagtgagcctgcggaacctgcgcggctactacaaccagagcgaggccgggtctcacatcctccagaggatgtatggctgcgacgtggggcccgacgggcgcctcctccgcgggtatgaccagtccgcctacgacggcaaggattacatcgccctgaacgaggatctgcgctcctggaccgccgcggacacggcggctcagatcacccagcgcaagtgggaggcggcccgtgaggcggagcagctgagagcctacctggagggcctgtgcgtggagtggctccgcagatacctgaagaatgggaaggagacgctgcagcgcgcggaacaccc

SEQ ID NO: 14120 - DNA, 489 bp, Homo sapiens
  misc_feature (1)...(489): n = A,T,C or G
gccccccattgagncccctggnnaactgaagactctagnccagngcggnggaattcattgcaggcgtgagccactgtgcctggcccccaggacttttctgattgcaaaaacccacctgtttcttgagcttgggcccctaagtcatttctacaggatcaccccagtgggtggggctgggagatgtggcactagccaggcatctcctctctgttctgagctctgggttcctagtgtcataggatgaaaaggggaagacagcagaaaatgtatgggccaggcagtctgctgcccagaagaaagcctggcccactataagggacagcctgtagcccagtggggtacaaaaaggtaggcggcagagatgggccaccccctacctgcaggaaaggttcttccatatgagatgggtgactgggccctctgagtgatctttgccggttactggccattcttctgggcctcagagccaggaggggcggctttgtgggg

SEQ ID NO: 14121 - DNA, 447 bp, Homo sapiens
  misc_feature (1)...(447): n = A,T,C or G
cccccccgtaatgagaccttaggcaattgagngccatccgcgagggcggaagaagcgcgaagagccgttagtcatgccggtgtggtggcggcggcgtatactgcgggcccgtagctgggctctgcgaggtgcaagaaagcctttgaggtgaaggtgtatgaaagtcatcataacagatgttttccaaaaacttgtagaaggttgtgaaaaaactactaggatcacgcggcatgtattgagcatataggttgctgtagatgaatgttcttagctgtcatgtttaaaaatacttctgcttcgttacctcaagtgtggcatgcagcattttggaaggaaaattgaagacgtgttcaagaaaacatgaacagaagcaaatgatgaaaatgagcattttacttgatgttgataacatcacaataaattatggagaaaaaaaaaaaaaaaaaa

SEQ ID NO: 14122 - DNA, 445 bp, Homo sapiens
  misc_feature (1)...(445): n = A,T,C or G
ataaaatttgtagntccactagtcctgtgtggtcgaattccacttagggcagggaaggaaatgggtttccatctgagaacgtgctttggagaaagctaggtgtggaaaagctccaatgcccatttgctattatttgtttccagtttgttcctttaaatatgagccagaagtgtttgtgttggtgttttaaaaacaaaaacaaaaaccgtgttggggtcctgactgggggagggggagagtgaagtgtttgctgaggacattgctcctctgactcccatctcactttgtccatcgcagccttttgttgggagatgacactgtcagtcagcccatgatgtctgttcacacgagatgcttttttaatagaattgaccaatgttttgctgccactgattaaagtattatttattctannnaaaaaaaaaaaaaaaaaaaaaaaaggggg

SEQ ID NO: 14123 - DNA, 492 bp, Homo sapiens
  misc_feature (1)...(492): n = A,T,C or G
cgagggcattgaaaattggtagaccactagnacagngcggnggaattcgtttgatacaggaattattaggagtaattcttttctgtttctgtttataatgaagaacactgtagctacattttcagaagttaacatcaagccatcaaacctgggtatagtgcagaaaacgtggcacacactgaccacacattaggctgtgtcaccattgtgtggtgtacctgctggaagaattctagcatgctacttggggacataatttcagtgggaaatatgccactgaccgattttttttttttcctctttgcagtggggctaggacagttgattcaacaaagtatttttttcttttttctcagtcctaatttgaacaggtcaaagatgtgttcaggcattccaggtaacaggtgtgtatgtaaagttaaaaataggctttttaggaactcactctttagatatttacatccagcttctcatgttaaatattttgccttg

SEQ ID NO: 14124 - DNA, 465 bp, Homo sapiens
  misc_feature (1)...(465): n = A,T,C or G
ctcgagccccctaatcgagaccctaggccangnggnggaattcgttctcttttttactgtaccaacaaaatacactaaatccaagcgcaccgaaccctgcatacggaacagattttaatcacagaaggtcaggagcaaagcatttaatgtaggcagctcacaaacagaaatttatcttacgcggtgggggggtgtgtgtgtgtgagagagagagatccctcatgcacccaagttcaggtggagcatttgcaaccttggtagtcacagcctcctggagaagagtcctcctgttttccaaaaatcagccactgctcaaacacgctcagccaggtccaaccaggccccaaggagatgtgaggtaggatcagggccatcacctcaggaatactttgccccttccacctccacccagtgtgtgcaagtaacctaccagacctagattgtacagaagtgaaagatttgtag

SEQ ID NO: 14125 - DNA, 480 bp, Homo sapiens
  misc_feature (1)...(480): n = A,T,C or G
catgacccctctggnnnattagagacattaggcagngcggnggaattcgtcttgcttgtggatccagtagtgacttttacattttatatctaaatagaagctggaggctttgttggggactcataggcataaaatattatgctatttattatagagttaaatgctacaaagacaaatctaattaataggcctattttcctttttaaattctactcataatttcttcatagtttttatgataaaaggttggattttgattagaactcccatgcttttgtgtcagaattaaaactggtattagaataaataattcaaaagctagagaaagagtacaatgagaagccatgagttgcatttgaattataatattatgtcttacagatttggggtatatactaaagttaccaagttgtagaaaatcaggccgggcattgtggctcacatctgtaattccagcactttgggaggccaaggtgggcg

SEQ ID NO: 14126 - DNA, 486 bp, Homo sapiens
  misc_feature (1)...(486): n = A,T,C or G
gatgtgattgagacttgatcacngtggnggaatccgntttttgtttgtttttccgcttaatttcaaagataaaatgcagttacttttgggggtggaaggctcatcttaaaacatgagcattaaatatatttggaatagcagaaggttaagtaatttcttatgtatagttaaactaaagcagtacttcagtgggacttaacaagtattttttcatcactgaaaggttttttttttttatcactaaattgtatttggcaattgcaagttgcctgcagatagggccgtgatactgtgttttgagccacaaaaggttgtgtgtgtgtgtgtgagtgtgtgtgtgtgtgtgtatatgtgtgtgtctttttcctcctttttttggggaaatccgtgaatatgagggagcttatttcgtcaattaattagggtgcgtggtgggagagaattttgtcagtccactatggacacacaggaaatactttttcttag

SEQ ID NO: 14127 - DNA, 491 bp, Homo sapiens
  misc_feature (1)...(491): n = A,T,C or G
gcgggaattgagnccttgatgaccattcggaccgngcggnggaattccaattctatccagggtggagcacgccaatatcatcaaggtattggatatatttgaaatccaagggttcttccagcttgtgatggagaagcacggctccggcctagacctcttcgctttcatcgaccgccaccccaggctggatgagcccctggcgagctacatcttccgacaactagtgtcagcagtgggatacctgcgcttgaaggacatcatccaccgtgacatcaaggatgagaacatcgtgatcgccgaggacttcacaatcaagctgatagactttggctcggccgcctacttggaaaggggaaaattattttatactttttgtgggaccatcgagtactgtgcaccggaagttctcatggggaatccctacagagggccggagctggagatgtggtctctgggagtcactctgtacacgctggtctttgaggagaacc

SEQ ID NO: 14128 - DNA, 579 bp, Homo sapiens
  misc_feature (1)...(579): n = A,T,C or G
cagatcagtacaatatgtctatttgtgaaaattgacatcttaagtctactataatagaccttgacattattgctttgctgcccccncccccnnaaggtgttttgaacctgatnacactcgnggaacccacaaaaagaaaaaaagagctttgtcctttatcagtcccttgggcacagcaggtcctgaacaccctgctctacaatgttgcatcaagaggtcaaacaacaaaataaaaaatattaagaggaaatccccatcctgtgacttgagtcccttaagtctacaggggctggtgacctctttttgctaataggaaaatcacattactacaaaatggggagaaaactgtttgcctgtggtagacacctgcacgcataggattgaagacagtacaggctgctgtacagagaagcgcctctcacatctgaactgcatactgagcgggcaagtcggttgtaagttcagtaaaaccctctgatgatgcaaaaaaaaaaaaaaagtattaagttccacaagctgttggaacccaaatatattttctcagtttcaaatcctttgcttttgtattgagggaaaagc

SEQ ID NO: 14129 - DNA, 463 bp, Homo sapiens
  misc_feature (1)...(463): n = A,T,C or G
nnnaaactgagttccatgcactngagcnggacnncgncttggtctctttaagtggacaataaatggtgggctcgatctcctcaggactgtacatctatttcatatgtgactgaaagttctgtttgctttttgccaggacagtgtggcactgaaggggggccgtggcagtgcttccatggtccagaagtgcaagctgtgtgcaagagaaaattccatcggtaggtcaggctgtgcgtactgagttctgccagggtggcccacagcttcctggcaccaggctgaaagtagactcatgttacctgagggtggagtcaggcctaagatgccgacacctgtacagcgtgatctttttcagggccacatgtgggcacctggctggggccagggtatggactcaagtcaactttgtgttctcttttctatttcagagattttaagcagcaccatcaagccttacaatgcn

SEQ ID NO: 14130 - DNA, 467 bp, Homo sapiens
  misc_feature (1)...(467): n = A,T,C or G
aatgagaccatttgcaggcgtgngaancggcgaaactcacccataacattggttaggcctcaatctctttaagggaggatgagtagaagacaattctttgaaaacttaaaaaacctttttctatggttttactgtcacttcttgagtatcaatttaaaaaatcatatttttaaagaaaaacatgcattttcagagaattttaaaatttgttgtctatatataattataattaaaaatatttttctctgtatctctggttattgcttctttctcatttctggtctttttagttacttttttcctttcttttattagacttgccagtctttttaaggaaccagcacttgagtatttcatcagttctattttttctatttgttataatattaatataacttttcatctttaattccttccttatttttaatgtttattttggtgctttatgaatgttttgtactaattga

SEQ ID NO: 14131 - DNA, 475 bp, Homo sapiens
  misc_feature (1)...(475): n = A,T,C or G
agctatcnnnnttttgagacccnattgatgancttagaacagngcggnggaanacgaatgagggaacatgtaatgaatgaggttgatactaacaaagacagattggtgactctggaggagtttttgaaagccacagagaaaaaagaattcttggagccagatagctgggagacattagatcagcaacagttcttcacggaggaggaactaaaagaatatgaaaatattattgctttacaagaaaatgaacttaagaagaaggcagatgagcttcagaaacaaaaagaagagctacaacgtcagcatgatcaactggaggctcagaagctggaatatcatcaggtcatacagcagatggaacaaaaaaaattacaacaaggaattcctccatcagggccagctggagaattgaagtttgagccacacatttaaagtctgaagtccaccagaacttggaagaaagctgttaactcaa

SEQ ID NO: 14132 - DNA, 484 bp, Homo sapiens
  misc_feature (1)...(484): n = A,T,C or G
aatgagtaccctggaannnccatgagtaccctaccccangcggnggaattcgcccgcccgcaggccagcttctctcgggagcctccacctttgcgcatggctccatgaagcaagaggaggaggcagagcgcgagagatcccgtccgccccagccgcgtctgggccaggagaaaagcaaaaccatattcctgctgctgtcagttttgatgcactgagaaaacttcagagacctaagctttttccagagaagagaagctttactggtgttccagccctaaggctcatatgacattaacagacaagacacttttcagaaagacaggcaacgtgttggaccttccggagcttctcagaagacagagggttttcttttgagagacagggtctcgttctgtcttgcaggctgttgtgcagtggcctgattatggctcactgtagcctcgaaattctgggccgaagtgatcctcctgcctcagcctccaag

SEQ ID NO: 14133 - DNA, 488 bp, Homo sapiens
  misc_feature (1)...(488): n = A,T,C or G
agtgggattgagacttagtcactgtggtggaattcaaagttgtgggactgcatgctactgtctagagcttgtctcaatggatctagaacttcatcgccctctgatcgccgatcacctctgagacccaccttgctcataaacaaaatgcccatgttggtcctctgccctggacctgtgacattctggactatttctgtgtttatttgtggccgagtgtaacaaccatataataaatcacctcttccgctgttttagctgaagaattaaaaaaaaaaaaaaaaaaaaaaaaaaaaaaaaaaaaaaaaaaaaaagggcgccccctttaattaaaagggccctttaaaaccccggaaaacaccccgaggggcccttttaattcccccccctttttttgttgccccccccccggtcctttttttgcccggggagggcccccccccccttgtttttttaaaaaaaaaagagaaatttccctccatttgcgggan

SEQ ID NO: 14134 - DNA, 499 bp, Homo sapiens
  misc_feature (1)...(499): n = A,T,C or G
cgcccccatcgatanccntttccangtggaggaactcataacataaccacatttatttaagaacgtattccaatatctaatggcaaattccaacaatgcgaaaacttcaattgcttttgcactcacctaatagcaaccaggtctctcaggaacaaatagagtgagatctcactctcacccccacccctgaagggtgggcattaacctgttcatgagagatcaacccctgtgatccaaactcctgccatgaggccccacctccaacactgggaatcaaatttcaacacgagatttgggggcaaatatctaaactgtagcaccgctggtccttgcaactgaagacatggtaactgatacatcatgcaaatttcttactgctttagcaaacaactgaaatgatggggaatccgttgaatcaacttggtatgtggagaacaagcaaggatttcagttctgatcacaggttaagtttggttgggtttcagccagggttctttag

SEQ ID NO: 14135 - DNA, 471 bp, Homo sapiens
  misc_feature (1)...(471): n = A,T,C or G
gagtgccnnnnagggnnnaaatgagaccatcatagatgccntgagnacggcccaggcgccgnggctcacatctgtagtcgcggcactttgggaagccaaagcgggtggatcacttgagcccaggagttcaagaccagcctgggcaacatggtgaaaccccatctctactaaaaatacaaaattagccagatgtggtggtgtgcacctggaatcccagctactcaggaggctgaggcacgagaatcgcttgaaccctctaccgggaggcagaggttgccgtgagctgagattgtgccactgcactctagcctgggtgacagagtgagactcggtctcaaaaacaaaacaaaaccccaaagtataatacacctgacttcaactttatgacattgctgtcttttattacatctttttatattaaaaataaataaaaatgtcataaatagtaattgtgtaaatataacaggcctt

SEQ ID NO: 14136 - DNA, 497 bp, Homo sapiens
  misc_feature (1)...(497): n = A,T,C or G
catgggacccttgcagattgaganccntatgaagtgtggaggaattcgcaccattatagctcactgcagccttgaactcctggtcttaagtgatccacccaccttatcctcccaaagtgctgggattacaggtgtgagccactgtgcccagccaatgtctattttaattccctaatctaagccagttaagaagttaagatgcccatgcaaacaattataatgcaataagatcattgtttaatggaagagtcttcaaaactacagttaggaatatataaggaacaccaaagttcacctgagagaaaagggatgctgttagagaagttagcatttaaacagatacctaagaatgagtaagaatgtaccagatagacaagtggaaaaaatggtgctgcagtatttacagaaggactagccataagaaagcatgttcagtgttgctagagcatgaaattgagttggaaagtggtagaaatgaggctggagagtaggcagct

SEQ ID NO: 14137 - DNA, 467 bp, Homo sapiens
  misc_feature (1)...(467): n = A,T,C or G
nnnnnaaattgagataccgtgcactngngcnggacnnccctcaatctagaagagtagaggtccaaaggtgccatatgttcacactgtgagcctgcatgatctccacgttaacaaaggaaaactcttcctatgaatcttcatgatgataggccatgtctcttcttatttttgttttaaataaacatccaccttatcatgatttcttttggtttattgtggggttttgtccttgtctttttaaaaaaattttcagtttttagcaagaattattccatcaacatctagtgtttctctagagatgatgtatgcactttatgctaatcaggaacccagagaggagaattttatttctggagcaacaactaaatggtagttcattgtgccccaatttgatccctgcccctttctgtaaacactgatagaatcttcctgtcagattttaaattacacaaatttaagaaagaagg

SEQ ID NO: 14138 - DNA, 462 bp, Homo sapiens
  misc_feature (1)...(462): n = A,T,C or G
gggcgcgcggnnnttatagatagantncatggcagnggcgngaattcccagagcagggtaagctttctgtagacaggagcttcgatttggacatggctacatccttagtgcccactaagcgtccagctaaaaagaggtgttcaatcgtgtattttcttgagtactaaaaatgaattaacagtaccttctagattactaaggaagttatataatctttggtataggcaatttcctccatgaaatattttttttaaatacccactactaaaacatatcagtgccagccatatgttctgacttaacagtaccctcttttggtatatagcttctattccttttttcaaacatctaagttcaggggtacatgtgcaggtcaaaaaaattcagctctaacagcttcagagacaggtcttgatttcacctaattctgatggttctctatacagcacctaattatctaat

SEQ ID NO: 14139 - DNA, 477 bp, Homo sapiens
  misc_feature (1)...(477): n = A,T,C or G
catcgagcccttatcgtagactttaggccagngcggnggaattcggcagcaatggcagctctcctgtacaggctgagtttcagccacaccaagaagtcaaagctaaccgaggctgtgccttccgagacccccgggatggcccctgggaggccaaggagtcggggactgggtacccggagcagagtcactgtggccacggagaaccgcagctgagctttatgaagccacgtggccacacctcccggtgcctccaccccaagcaaacacagatcgctcagaaaatgggaacccagggcaaattgtatgtgctccttactgggtttattataagtgtcacatgttttttataataaaacataggtgatttcaccttannaaaaaaaaaaaaaaaaaaaaaaaaaaaaaaaaaaaaaaaaaanagggggccccttttaattaaaggggcccctaaaaaccccgggaaaacccctggggggt

SEQ ID NO: 14140 - DNA, 454 bp, Homo sapiens
  misc_feature (1)...(454): n = A,T,C or G
nctggagtacattacantgngcggnggaattccggcaagctccgcctcccgggttcacgccgttgtcctgcctcagccgcctcccgagtaacagggactacaggcgccccccaccaccctcggctaatttttttgtatttttagtagagacggggtttcactgtgttagccaggatggtctcgatctcctgacctcgtgatccgcctgcctcagcctcccaaagtgttgggtgtgagccactgtgcccggcctttactcagtttttaatcttccttttgttttgtctcctcagcttctgccatttatcttgcttcttgctgggtgagcaagaaggggcgggtgccctttcaccttgcttctgctctctgcttttacgtattttaccctttatccaacttttaattccctttgctattcttctgcctcattttccctattctcctttctcactgc

SEQ ID NO: 14141 - DNA, 482 bp, Homo sapiens
  misc_feature (1)...(482): n = A,T,C or G
gggaggggccggccgggnnnnttnnnattgtagactctagtacatgtggtggaattccttgaagtaggagacccagcgcccctaggagcagggaacctggggcctgaactcatcaaggaaagcaatgccaatcctatcttcatgcgcaaggacaccaagatgagtttccagtggcggattcgaaacctcccctatcctaaggatgtctatagtgtctctgtggaccagaaggagcgctgcatcattgtcagaacaaccaacaagaagtactacaagaagttctccattcctgatctagatagacaccagctacctctggatgacgccttgctgagctttgcccacgccaactgcaccctgatcatctcttaccagaagccaaaggaggttgtggtggccgagtctgagctacagaaggaactaaagaaggtgaagacagcccacagcaacgatggggactgcaagacccagtagttgggccc

SEQ ID NO: 14142 - DNA, 469 bp, Homo sapiens
  misc_feature (1)...(469): n = A,T,C or G
aggggcgcggnnnttttncatagaattgccctacnagtgaggnggaattcgagggtttcagattattaacgttttagtgtagtcgatgtatttccatcacatgtatcgcggggacttggcagtttatcctttgctccccagctctccttacacagccaccctccgtctcccttacccacctaccactttcatgaagagaataaaaccagtaggaagctcaggtacatagtgtttcatcactgtctcccttactgcttttttaatgacaggctgtgctgtcataaatacacttgggtttgtttgaatcactagaaaagcccaatatgataaatgtaaacatgtgtggtttaagatttgcagtcctgcttgatttgcgtggcaagaagagttcccatgaaggaaagaccagttcttccctcatcagaaagttttactactcgccaggatctccaaggtaaatttcctctcc

SEQ ID NO: 14143 - DNA, 478 bp, Homo sapiens
  misc_feature (1)...(478): n = A,T,C or G
gacgcacacggganaggaatcgnaaatggagancttttgaantantganagcaatctgnagngncgnggaanncatgaagctcatcaccaaagctagtgtgcagcaggagtatctggtgcacaaataggtgttttacagcaatcccacgctctaggtattcttgtgggggctctcaaaggaaacaagacagatggaagtcccggagtttgtggccaaagtgaatgacacccaccccagttcctttccgtggcagtaaatgaggcattgagagaagaggaggagataccccgtgcccgagatggcagctgccgttggtgacgtgacaagtgccagtgttagtgccagttccagttccagggcctatgccatggctgaagcaagcatcagcaccagcaccaatgcaagtgccagttgccagtgccagggctagagccatggctggagcaagtatcagtacctgggacagtgccagtgtgn

SEQ ID NO: 14144 - DNA, 467 bp, Homo sapiens
  misc_feature (1)...(467): n = A,T,C or G
tacgagaccacttgaagaccgtggaanacccagngctctgggaggccaacgtgggaggatttcctgaacccaggagtttgagaccagcttgagcaatatggtgagacccctgtaagaattagccagctgtggtggtgagcagctgtggtgagcagctgtggtggtgagcaaatgtgggcagctgtggtgagcaggtgtgagcagctgtggtgagctatggtgagcaggtgtgagcagctgtggtgagcaggtgtgagcacctgtggtgagcagctgtgagcacctgtggtggtgagcagctgtggtgagcagctgtggtggtgagcaggtgtgagcagctgtggtggtgagcaggtgtgagcagctgtggtggtgagtaggtgtgagcagctgtggtggtgagcagctgtggtgagcagctgtagtgagcagctgtggtgagcaggtgtgagcagctgtggtgagca

SEQ ID NO: 14145 - DNA, 464 bp, Homo sapiens
  misc_feature (1)...(464): n = A,T,C or G
ntggcgaccgtagtccatgtggnggaattcctgccacacagatttgcggaagaacctgaccgtggacgagggcaccatgaaggtagaggtgctgcctgccctgaccgacaactacatgtacctggtcattgatgatgagaccaaggaggctgccattgtggatccggtgcagccccagaaggtcgtggacgcggcgagaaagcacggggtgaaactgaccacagtgctcaccacccaccaccactgggaccatgctggcgggaatgagaaactggtcaagctggagtcgggactgaaggtgtacgggggtgacgaccgtatcggggccctgactcacaagatcactcacctgtccacactgcaggtggggtctctgaacgtcaagtgcctggcgaccccgtgccacacttcaggacacatttgttacttcgtgagcaagcccggaggctcggagccccctgccn

SEQ ID NO: 14146 - DNA, 465 bp, Homo sapiens
  misc_feature (1)...(465): n = A,T,C or G
gggaaattgactcgcgntccctaggccangncgnggaattcattcaaacatactgaaagaatatatttgatatggtgtagtcccacttcttaattttaaaagcaactaccataaaacagaattttacatgtctagatctatttgatttgaaattcagcataaggctggaaaccacactggtttgtttcgtcagtaaataaaaagggcagaatttgccttgttaaagtttggcccctattgaaatcagcccatacctgtaaagatgacctctttgcttcttctacagtcacattagcaaagggttcccagaaaatacctttttcctgtttcacacgttccactttggcagcttcagtttcatctacaaacccagtctgccagggaccatgaaaaaccaagcaaatagcaacatgttagcactctactagatatgaaatggccacataatttaagtgctgagtgttn

SEQ ID NO: 14147 - DNA, 492 bp, Homo sapiens
  misc_feature (1)...(492): n = A,T,C or G
attggaccctatccaagtggaggaacttcagaagttttaaaaggcatgctgtgttcccacttatccccttgtatccctgcctttcagcatgaaaaacacagaatgagagacacagagcacagatctcaaccagagccaagcctaagccagatatgtcacatttatgctgcatatctcaaggcagaaatatctatttattgttgtaagcctcggaggtttggaggaatgcttcactgctgcagcaaaagttgactggtgaaaatggagacagcagattataaaccccttgaaaaaagaaagaagctgtgtctatgacaactacatagctgctacggaacctggcacagtgctagcacacagcaggggatcaataaatgttgcttgactgactaacaaaaaagtgaacattaaatgaagacagtcaggtgaaattaaattcctccttatcctttaaaaaaaannnnnnnnnnnnnnnnnnnnnnnnannnnnnn

SEQ ID NO: 14148 - DNA, 453 bp, Homo sapiens
  misc_feature (1)...(453): n = A,T,C or G
gataagcctgatggccntntnaaaaactgagtatactggtaagngncgnggaattcctcaaactcttgacctcatgatccacccgcctccgcctcccagtgttcacatatacaggcataaggcaccacgtccagcccgaggttgttatttagatatacctagtggctttatcagaaaaagcaaaacagttcatccactgtaaaaaaaaatagaaacttctgtagcttctcaactggctaaattccagatgattttctaaccactcatcaacaatctatatagcttgccctccacaaaacttactagtttgatgataaaaagcttctgtaatgaggcagttgtccatctcacctgcccaggccacgcagaccctggagttactaacccgcattgcccattaagcatttcttaaacagaactttcaaagatggtagtaattattataaagataaa

SEQ ID NO: 14149 - DNA, 430 bp, Homo sapiens
cggacagggtacgagatgctcacgctctcgaatgctgccgtttggtatggtctcttccaacatcctgtatcagcattataaaataaaatggatacttcaagctttgccttcacttatttctttgctttttaaaaactatttgtaatgtaattttaatgcattttttacaggcccagtaatggttaaatacgtcagcttactgaataattttaactatttattcttctaaggatacagcttgtctctggattttccagtcttaattttatattttattaatctattttaatgcttgcttttcccatttatagacgttgtagcagtaattgcaagaagttcttgagctgaattcctgttgtgacaacttcctataattacagtagataactttttcttttagtcgtatataacttttctataacttgtgatg

SEQ ID NO: 14150 - DNA, 465 bp, Homo sapiens
  misc_feature (1)...(465): n = A,T,C or G
atgggcactgagactctccgccgngcggnggaattcacctcccccaccccagtgtgatttaacatccaggaactgaggcctgaaccattttgcatttccccctcctccagcctctgtagggccatggctgtatgtactgtcgctgtgtttttttgtttttttagaactgggtttgggggctgatttttatttctttgggggcttttttttcttggcaaatactaaaaatctcgtcaatgtaatttctgtggtttctattcagcttgggtttcatgttttaaaataaattttaaaaagcccaacaaaaaaaaaaaaaaaaaaaaaaaaaaaaaaaaaaaaaccggcccctttcaattaagggggcccttaaaccccccggaaccccccccagggggctttttttttgccccccctttggggggtgcccccccccccgctctttttttagacttggagggggccccn

SEQ ID NO: 14151 - DNA, 453 bp, Homo sapiens
  misc_feature (1)...(453): n = A,T,C or G
nactggctgcattgcntgngcggnggaanncggacagtttctgaatcagagatttcccaagaagctgatgacatggcaatggaaaaagggaaatatgttggtgaactgagaaaagcattgttgtcaggagcaggaccagctgatgtatacacgtttaatttttctaaagagtcttgttatttcttctttgagaaaaacctgaaagatgtctcattcagacttggttccttcaacctagagaaagttgaaaacccagctgaagtcattagagaacttatttgttattgcttggacaccattgcagaaaatcaagccaaaaatgagcacctgcagaaagaaaatgaaaggcttctgagagattggaatgatgttcaaggacgatttgaaaaatgtgtgagtgctaaggaagctttggagactgatctttantaagcggttattctggtgttgaat

SEQ ID NO: 14152 - DNA, 444 bp, Homo sapiens
  misc_feature (1)...(444): n = A,T,C or G
ttaaaactgagaacctactcagngtggaggaccttgcaacctgnctgngctgaaggacacactaaagaagatgcagaagttctttggactgccccagacaggtgatcttgaccagaataccatcgagaccatgcggaagccacgctgcggcaacccagatgtggccaactacaacttcttccctcgcaagcccaagtgggacaagaaccagatcacatacaggatcattggctacacacctgatctggacccagagacagtggatgatgcctttgctcgtgccttccaagtctggagcgatgtgaccccactgcggttttctcgaatccatgatggagaggcagacatcatgatcaactttggccgctgggagcatggcgatggatacccctttgacggtaaggacggactcctggctcatgccttcgccccaggcactggtgg

SEQ ID NO: 14153 - DNA, 446 bp, Homo sapiens
  misc_feature (1)...(446): n = A,T,C or G
gggcncgnatttganccccattgtagatcattagtccgtgcggtggaattcattctctgtagtctgatctttatctggctattgcagtatgaccatgggtgatactaaatgaaatagaactcaactccccaaaatttggatttgtcttataagtcgtaatggctccaggtgggatactgtgtcagaccaaggataggcagatgatagtttattgccacagtcaaaagatcgaacccttttttttcatgttatctagaaatgaatctttaaaaaaaaaaaaaaagggaaggggtggaacttataatattttaccacctcataaaataacttgaaaaaaaaaatcttttggagggagagacaaaacagactgaaagactttgttaaaatttatgacttttattatcttacttgaaggctatttttgcccctctcgctattattaaacc

SEQ ID NO: 14154 - DNA, 437 bp, Homo sapiens
  misc_feature (1)...(437): n = A,T,C or G
ggagcannatcgagacatttgacagcgtgggaattccaaaggctatcatcttaaaatgattcaacaggaggagataaggaagctcgaggaagagaaaaatcaactggaaggagaaatcatacatttttataagatgaaagctgcctctgaagcactgcagactcagctgagcactgatacaaagaaagacaaacatggtaagaagcagtagtttctcttactattctgagagccttatcattctacatcccatcttcctgtgagattgtctttgtagcatttaactctaattgcagttctctttttaaaaattggcttgcttattgtatattttccccaactaaagcgtgaactcctagcagggcgtggtggctcatgcctgtaatctcagcactgtgggaggccgaggtgggtcgactacctgatgtcatgaagcg

SEQ ID NO: 14155 - DNA, 469 bp, Homo sapiens
  misc_feature (1)...(469): n = A,T,C or G
cgcnccgtttgatgaccattagtcagttgtgggcaattcgattcatcagagccaagcttgtgtgtaagactctagaaaacttctttgactcggctgacgaagagctgaccattgatcacgtgcctatttggtgtaagaacagccaaggacagagagtcatggttgagcagagtgaaaaactgaatggtgtccttgaagcgagccgcctctgggataacatgcggaagctgggggagtgcacagaagaggcgcaccagatgactcatgacggctacttgaaactctggcagctgagcaagccttcgctggcctcttttgacgccatctttgtggatgaggcccaggactgcacaccagctatcatgaacatagttctgtctcagccatgtgggaaaatctttgtaggggacccgcaccagcagatctataccttccggtgtgcggtcaacgccctgttcacagtgccccn

SEQ ID NO: 14156 - DNA, 463 bp, Homo sapiens
  misc_feature (1)...(463): n = A,T,C or G
natagaagattagtangccatgcggnggaattcgaaagttcatgaccaaccgactacttcagaggaaacaaatggtcattgatgtccttcaccccgggaaggcgacagtgcctaagacagaaattcgggaaaaactagccaaaatgtacaagaccacaccggatgtcatctttgtatttggattcagaactcattttggtggtggcaagacaactggctttggcatgatttatgattccctggattatgcaaagaaaaatgaacccaaacatagacttgcaagacatggcctgtatgagaagaaaaagacctcaagaaagcaacgaaaggaacgcaagaacagaatgaagaaagtcagggggactgcaaaggccaatgttggtgctggcaaaaagtgagctggagattggatcacagccgaaggagtaaaggtgctgcaatgatgttagcttgggccactgtg

SEQ ID NO: 14157 - DNA, 469 bp, Homo sapiens
  misc_feature (1)...(469): n = A,T,C or G
natggagaactgaagaccattccgccagagcggaggaattcaagacatccacaaaaaaaggtgatggaactaataaatgagttcagcgaggatacaggatataagatcaatatgtaaaaaatcaattttatttctgttgattaccaatgaacaattaaaatacggatatatttaacagaagtgcaagacgtatacactgaagacattaaaacatggctgagagaaactgaagaacatctaaatagatggaaatgggttccatggtcatggattggccgtttttcccaaattgatctgtagatttgttgcaatcctgatcagaattccagcagattttgataattccttttttgtggaaactggtaaaacagtcttaaaatttatatggaagtgcaaaggagtgagaatagccaaaacaattttgagaacgatgagaagagtagagggttactcttttcagtttcataan

SEQ ID NO: 14158 - DNA, 444 bp, Homo sapiens
  misc_feature (1)...(444): n = A,T,C or G
ntttgagaccttagntttgaagacccttagtccgtgtggtggaattcggcctccgtgctgcgaagtatctcgctagccctgcgcccgactagcgggcttctgggaacttggcagacgcagcttacagagactcaccagcgagcgtcattgttgtctttctgggaactcattcccatgagatcagaacctcttcgaaaaaagaagaaggtagatcctaaaaaagaccaagaagcaaaggagcgcttgaaaaggaagatccgaaaactggaaaaggctactcaagagctaattcctattgaagattttattacccctctaaagttcttggataaagcaaggtaaggatccttctctagggatgaagtcctcaggacaaaggagtaatatcaacttcaggtagttgtgtctgtagttcacacctgtgatagtcattggtcagtaggc

SEQ ID NO: 14159 - DNA, 464 bp, Homo sapiens
  misc_feature (1)...(464): n = A,T,C or G
cttgagnactgagacattacgccagngcggnggaattcgtcaaaaaaagaaaaaagaaaaattcctcatgacctggggttaaggttcctagacatgacaccaaaaacatgatccaccaatggcatgatggataagacttcatcaaaattaagtctgtgcttcaaaagacactatcaacaaagtaaagagagaataggagaaattacaaatcatatacctggtaagagacttgtacccagaatatataaagactcttactacccaataagacaactaaaaaaatgggtaaataatttgaataaacactgctttaaggaagatacacaaatagccaataagcacaagaaagaatgctcaacatagtatcagagaatagcaaaccaaaactagatagagatcccatttcatatccactagagtgactaaaatcaaaatgtcaggtaaacaagtattggcaaggatgc

SEQ ID NO: 14160 - DNA, 460 bp, Homo sapiens
  misc_feature (1)...(460): n = A,T,C or G
natggagattagtaggcagtgcggnggaattcggcagaggttgcagtgagacgagatcacgccactgcactccagcttgggcaacagagcaagactccgtttcaaaataaataaataaataaataaataaataagtttattcctgatattgtcaacttgtgttcatttataactggcttatttaggagtctgttgtttagttcctaaatataagaggatttttttttctatctttttaatttgtgattgcccattgaattccattgtaatcacagaaaatactctataattttaattcttttaaagttattgagacttgttttatcacccagcttcatctatcttaatgaacatatcatatatgtgaaagattttatattctgcagctgttgggtgttgtgttctaaaaatatcaaataggttaatatggttgataatgttgatcagattttctgtgtat

SEQ ID NO: 14161 - DNA, 443 bp, Homo sapiens
  misc_feature (1)...(443): n = A,T,C or G
aggggcgnattgatnccattgtagacattagtccgtgcggtggaattccaccgatttcgagggctggaaggctgcgattcccagtgccctggacaccaacagctcgaagagcacctcctccttcccctgcccggcagggcacttcaacggcttacgcacgggcatccgccccttctacctgaccaactcctcatgtgaggactagacggcgtggcccaagggtggtgagaaccggagaaccccaggacgccctcactgcaggctcccctcctcgggttccttcctctctgcaatgaccttcaacaaccggccaccagatgtcgccctactcacctgagcgctcagcttcaagaaattactggaaggcttccactacggtccaccaggagttctcccaccacctcaccagtttccaggtgggaagcaccaagacgccctcgagg

SEQ ID NO: 14162 - DNA, 437 bp, Homo sapiens
  misc_feature (1)...(437): n = A,T,C or G
natgaagaccttttgaagccgtgggaanncggctggtcttgacctcgtgatccacccaccttggcctcccaaagttctgggattacaggtgtaagccaccgaactcagccaaattataattatttcttatctcctatcttcagagtctagtgttacacagatagtaattctccaacattgctcatatgatttagtaaatcactgcatgttctcggtttagaaggattttccctgtcttataccttctatgaattaaaaagcttttggaccatggatgaatgacataagaatttaactactttttttttcttttcttttgaggcggattctcactctgtcgcccaggctggagtgcagtggtgtgatcttggctcactgcaacctcagcctcccgggttcaagtgattctcctgcctcagcctcctgagtagctggaa

SEQ ID NO: 14163 - DNA, 452 bp, Homo sapiens
  misc_feature (1)...(452): n = A,T,C or G
attgaanacccattgaagacccctagtccagngcggtggaattccaggctggcaggttagagttggtggagtctgaggagagatattttctctttgttgccaacatcctgtttaccaaaagtgtcaccccaccatcttccataagctgtgaaacaaaatcaatgaggtcactaacttagaagggaaagaaagttttctgggtctttgttttcttgatttggggtaatttatacaagggcatacaagttgattttaagatgtggaactgggaggtagactagtttggataagaactttgaaatgttccttgtggatccccatttctggtcatcaagatgtggatgtacatttcttaaaattattacatgctgcatctttcagcctggagactgtgcagaaacatgagaggtgatgacacactaattatgggaagcagaattactggctgatgg

SEQ ID NO: 14164 - DNA, 450 bp, Homo sapiens
  misc_feature (1)...(450): n = A,T,C or G
aatggggnccccattgatgatcatccgaacangcggnggaantcgctttctgcctcaatctatctgtgtaaggaacagggtttctctgaaggtatctttgaaatactctaccatcagttcatatttctactttcacctaagtcaatattgaatcctctttggaaatcttggggtcatccttcctttctgtcaccttctatcttcagtcaccaagtctttctgtctgttagcagctctaaaatctgacccttccttctccttcttactgcctctgctttagtttcttactctataaaatggagataatatatcactgtgtagatgccataatacaaatagcaagctcttatggcactaataattttttaatacatgttaaccatatgaataggtcttattattattatgtccattttatggatggagaggttaagtaatgtgttcaaactg

SEQ ID NO: 14165 - DNA, 440 bp, Homo sapiens
  misc_feature (1)...(440): n = A,T,C or G
aggccnnaattgtagacaattgagagccttgtggaattcacctaactccagggttgtgacctctaaagagttttgaaagattgaaaacattgtacctatgtcatatttaacaagccccttttgaagtcctatatttggttagtagactgaaaatttgaattcactgttaagaggagacatggaactgtggaaagaatattcatttgagtgtttcaggaagtttggattttttttttaccaacatattatttgtaaaaggagggaaatcatctgcctcaggaggttcttaacatataggaatgtaattatcagattcaaagctgaacagtagtgcgttgccctgtaacctaagtcttggctgttagcaaagaaaagccagtgtctggggtattggttccaggaccttccactaataacaaaatcccaggatgttccatctt

SEQ ID NO: 14166 - DNA, 553 bp, Homo sapiens
  misc_feature (1)...(553): n = A,T,C or G
ttatctatagtaccaatctagggccgaagtattagcgcacaactttttaacgtacaaacacgggacataatcagccaaanaaaaaanatttgagacattttgaacgctnggaannngncgaagagntaaggggcttgctcagacacccaagctggagtgcagtgtgatacaattatagctcaatgcaacctcgaactcctggtctcaagccattctcacacctcattctcctgagtatctgggactgcaagcgtatgccatcacacctgaataacttaaattttatttggagagaaggggggtcttcctatgttttccagactggtctcaaattcctgacctccagcagtcctcctgccttggcctcccaaaatgccgggattataggagtgagctaccatgccgagctacatttaaacattaatatttaaaagcagtatttcattcttaaactttatgtaattacgtgtaaaatgctggatgcattattttaaaaatgcatggatgcttaacttgggagaatctgagctaccatgccgaactacatttaaag

SEQ ID NO: 14167 - DNA, 445 bp, Homo sapiens
  misc_feature (1)...(445): n = A,T,C or G
atgggggccnnnnnaaggtccgaccatagtccatgtggtggaattcccagaacacatcctcagggcaagcaatctgaggaatctcagtatgcaggaccagttcagcaagaggtttaggttcaaatcaggagtgagggcaaagtctggctcatggtggaaccttagaaaagtccccaggcaccatgtgaggccatgtgccatgaagcccaattgcaggacagaaaaggatgcccttctacccacacagttggccagacccaaccctgccaagaacacgccttctggttccaagataacaaaaacaagtcctaggtcacaccacccacagtggtgagagcccaagggctgaagtaggcaaaggccaggctcccataactgagcccatagccattttccccactgggcagagtaaaagctaaagaagccttggggcgaaggtcaggaa

SEQ ID NO: 14168 - DNA, 442 bp, Homo sapiens
  misc_feature (1)...(442): n = A,T,C or G
gggcccggttgaaccaactgagaccattagtcagngcggnggaattcccggcctggtgcgcaaggccccgaacaacaggtcttcacacaacgagctagaaaagcacagacgagccaaactcaggctgtaccttgagcagctcaagcaactggtgcccctgggccccgacagcacccgccacaccacgctgagcctcctgaagcgggccaaggtgcacatcaagaaactggaggagcaggaccgccgggcactgagcatcaaggagcagctgcagcaggagcatcgtttcctgaagcggcgcctggagcagctgtcggtgcagagcgtggagcgcgtgcgcacagatagcacgggctctgctgtctccacggacgactcagagcaagaagtggacatagagggcatggagtttggccctggtgagctggacagtgttggcagn

SEQ ID NO: 14169 - DNA, 470 bp, Homo sapiens
  misc_feature (1)...(470): n = A,T,C or G
ngggcaatagangactattagtcagnatggaggacttcgttaacacatgacaagtggtctcaatgcagctaggaccatgccagaaacctggatctcttaagagattggtacctacctaggtacgaaagttctacccttggcatactcagcattcctcaaaaagaccatcagtgttagcacaaactgagcagaaaaaataagctgttgattttctacctgatacttaagccagtggcctactttaattcacaattccattttgattagcaggacttttccactttgaagataaatagcaactttatcaaagtgactgtactgcaaattaattcataatgcctgatagttttatatatagagacttatgtggaaggcatgttaataggtttccatgagacaccaaagaaaagaggactctatactgggtggagcagggtcttcacctttntgtttctgtcaactggtcataa

SEQ ID NO: 14170 - DNA, 501 bp, Homo sapiens
  misc_feature (1)...(501): n = A,T,C or G
aattgatnacccctggcagngncnggnanactgaagacactagtccagngcggtggaattcggcctgttactgggtgtgttacgtatccctatgtagaagtgccttagtactagttaggataccatgagactttagtagcaatcattcaaatctgcttagtgtgttcactcttaagatggtattgtgaagagataaaatagacctgatgcaaaatagcttaaaatctagacacttaacctctgagttgcatgcagatagtagtaatgtgagggtctactggtaagatttcaacaggaagttctttgtgcagtttgactgtatgtaaaggcactgaaatgccttgcctagaggaatgacaggaaagctgtgctgtaggaaggttgactggtatggatgggtagtgtaggcaaggctctaggtaaggacatagaaaagacggcttacctggtttgagtgccagctaggctgcttataacaatggttctcaagattaatgccag

SEQ ID NO: 14171 - DNA, 554 bp, Homo sapiens
  misc_feature (1)...(554): n = A,T,C or G
aatcgaatacagtncgagtggngcaantcatgcctgagcacccatggcagtgaccagcagtgaccatcatcacccaatgaggatggagagaaactgaggctggcctgagatgtcctgaggaatgagctggcaccggagtcccacaggtgaagggtgagcatggatgggccgggagcatgctccctgtaattgtgcatggcgcagaaggtcaggaacggcctggtggccccgtgggagactggttactccaatctggtccagcagaaccccaggcagcctcgtggcagcgtgggggaagtgtctatgcttagcgatgtggcagatgcccggagtgccgtgagctttaataacagtgagttacagaagtatgtgagcccgttcctgaaaacacacacagtctgaaaaacgtccagagggacaggcctgaaaatgttaagagcacttgcaatcctggggggtggntggtgaggtgcttccttctccgtggnggctgcacttgcagttcactgactgggagtcagaataatgtccccctccccacaaatgccaccttt

SEQ ID NO: 14172 - DNA, 447 bp, Homo sapiens
  misc_feature (1)...(447): n = A,T,C or G
atcgangacactagtccacgtggtggaattctggagacccaaatagataaactagttgcttccatttcatatggccattaaaaaaatacgtgaagcagtcatggttcctacagtccagaaacttttagtctagaccagcaactggataaataattgaattgtgcatcgtatggttggcacaatatatagatgtgtccagaaccttgggttttatttaggccactttatgccgttatgacttctgaattgtacacctgaagggatatttatgaatagaataattgttattataattttttttctttagtcagaatctcactgtgttacccaggcatgagtgcagtgacatgatcttggctcaccgcaatttctgccacttgggttcaagcgattctcctgcctcagcctccaaagtagctgggattgctggccccagccactgtggtn

SEQ ID NO: 14173 - DNA, 445 bp, Homo sapiens
ttgagaccctatccaggtggggcttcccaaacttctctccttgtccatcttgggctgcccactctccgagacacagacccattctccagcaaggatcggagatgggtggaagttgggcgccttgcaagtctgggtttcctgaactcttcagcccctgcgggactatgcagcccattgtgagcgctcgcgcgggacggggcgcggggagaagcagtttacccaccctcctcggttgaatggggctgaatgtctgtctatcctgacagcttcagaagaagaaatgtgcttttcagacattgatttcaggggaatgggggtggggggagcggaagagagagagagaaagagcgctcgagcgcgagagagaatgaattagttcagtaacttgaacaaggattaacattttttgatgttgtgggttatcagtggggaaggtgcagctgtg

SEQ ID NO: 14174 - DNA, 554 bp, Homo sapiens
  misc_feature (1)...(554): n = A,T,C or G
nttcgaatacagtnccagtggngcaattccaagaattcgtattgctaacaagttcccaggtgacactgctgctcctccagggatcccactttgagaaccactgttttctccatctatgtaaacacactgtatatgtttttttctaaattgtttgagagtgggtcacacatatcttttcctctttaggccatatactgtactgatttgtgtctcctaagaatgaggacattctctcatataaccacagtacatttatcaaattcaggaaacaaaactgatacaatgcttatatcaattttttttttttttttttttggacaaagttttgttttatggcccaggctggagggcaggggcatgatcctagctcactacagtctccacctcctaggttaaagccatcctcccacctaagcctcccaagaaattaggaccacaggggccaccacacccagttaattttttaatttcttaatacgagggggtttaccatgtggcccagggctgtcttgaactttgagctcaagaatctgctgccacgcctcctaagtgtg

SEQ ID NO: 14175 - DNA, 490 bp, Homo sapiens
  misc_feature (1)...(490): n = A,T,C or G
tggggngnccnaggnnggnnnnattgaacccctactgagaccactagtccatgcggtggaattccagggaactagagagctggttactttggaggctgcagggcttttctctgagagtagtgattactagttaaaagatgctaaatgtgaaacagttatttcttaggggccaggtgctaagaacttctcaacagggacaacttagtgagggaaatggaaaatgaatacacacgatataaaactttggctataaatacaagatgatttggggggtgggagcgaatggcattttgtttggtgttttctccattgtaagtcctgttgcctgaggtaaggtaaaattctttttcctaacataaatttaggaagttgagtatgaagaagaataaatgggtctaggctggaagaacttgattgattgaaataaaaaaattaaaggctttttgtcccacagtgataatcaaaacatccttctattatttaaaaaaca

SEQ ID NO: 14176 - DNA, 511 bp, Homo sapiens
  misc_feature (1)...(511): n = A,T,C or G
agggagccagggccggnnnncctgagaactgagatcctagccagtgtggtggaattcggaaaacattcctaatgattgtcagaccattttggtttcagccacaattgcaactagcatagaacagctagcaagccagcttctgcatagtcctgtgagaattatcactggagaaaagaacctaccttgtgccaatgtacgtcagattattttgtgggtagaagacccagccaaaaagaaaaaagtatttgaaagtttaaatgataagaaactctttaagcctccagtgttagtatttgtggactgcaaactaggagcatatcttttgagtgaagccgttcagaaaatcacagggctgaaaagcatatctatacattcggagaagtcgcatatagaaaggaaaaacatattgaagggattacttgaaggagactattaagttgtagtgagcacaggagtcttgggacgaggcctatacttgatcagtgtcaggctggttgtcaattttgatatg

SEQ ID NO: 14177 - DNA, 455 bp, Homo sapiens
  misc_feature (1)...(455): n = A,T,C or G
nattgaggaccattagtccagtttgatggcattccacctctgccccagagctgcctcctgcctggcactgccgccacactcccctcctggtatggggcttctgcttccgggctcactcaaggagactgcggcatgttgaccacaccagactgggtttcagggaatgggcatgccaggtgccaaggagccaaacagatggctttccaggcagcaaggtccttggggccttcttggaggagcttgggtgacagccaggtgagcacccagaccccagaccctcatgtgctgtgtgcctggccccttctgtactggccatttgtggccagggccaagcctgtgactcaactccaggggcaagatggggagtgagctgatggctccgagactggtcaggagcccaggccagtgagatggggcctggagccttgtctgtgtcacattaagtaccatgggag

SEQ ID NO: 14178 - DNA, 453 bp, Homo sapiens
  misc_feature (1)...(453): n = A,T,C or G
ntagaacatagtagacattagtccatgcggtggaattcaaacttctcaaggaagttttgaaggaagaaagacatggttagcaggaaggaagaaatagtacatgcgaaggcttagaaataagtcacaaatcacacacaggaagctgtaatgacttacgacacctggctagatacaaactgggacatgcagacagatggattatcgggaacactgatggattaacaggaacaccaactggggaaggattcttgacattatttattaagagcttggatgtgattgaggtacgtgggggccactcaatattcaatcatcatttattgaatacttaccagtacttaccaggtgctgggcatggggccaagtgctttaagtatactgactcatcttcacaacaaccctatcagttagagactagtattccctttttgcagatgaggaaacagatccaaa

SEQ ID NO: 14179 - DNA, 456 bp, Homo sapiens
  misc_feature (1)...(456): n = A,T,C or G
attgagacccttgnnnntttgatgacccttatacagtgnggtggaattcccttgggctcggattgggactgaagctggaaccagagctagggccagggcaaggtccagggctacccgggcacgtcgggctgtccagaaacgggcttcccccaattcagatgataccgttttgtcccctcaagagctacaaaaggttctttgcttggttgagatgtctgaaaagccttatattcttgaagcagctttaattgctctgggtaacaatgctgcttatgcatttaacagagatattattcgtgatctgggtggtctcccaattgtcgcaaagattctcaatactcgggatcccatagttaaggaaaaggctttaattgtcctgaataacttgagtgtgaatgctgaaaatcagcgcaggcttaaagtatacatgaatcaagtgtgtgatgacacaatcac

SEQ ID NO: 14180 - DNA, 465 bp, Homo sapiens
  misc_feature (1)...(465): n = A,T,C or G
agcgggccnntnnaatagagatcgttagtccagtgcggggaactcgcattatcctgggcctttgaaaaacccaactcagtgattgattttgtggctgccggtggcagcaaattcctcagcatgaattctaccaagtgaaaaagtatttcctataacttgctttaaatttccttagcattaacttctctgagtggcccagtctcttatgggacaatgtaataaggatctatcggttttactgcctagtacatatctttaatgcctaagtaaatctctcttatttttccgcccaggcttagtaattctgacttttgaaatctcctgtcgtgaacaaatctacactgcactttatttcttgccccgtcctggaattcagccactcctgcactacatttcttaaggtgaagaagtgaaagacgaagacaccaatccaagtgaacgtgtgttattctcttctataatgct

SEQ ID NO: 14181 - DNA, 470 bp, Homo sapiens
  misc_feature (1)...(470): n = A,T,C or G
acttgaaaacatcttgataacctaggaaanngcgaggaattcgtgacttgtagaccacagctgcctttacatatatgtacacatctgtacagaaaacctttgaaacccatcgcacacttcgagaggccataaccaagacacaatcacaatcagccatgtcttgaaagattagcaattcgacaagaggaaagggtgagaaagggcatcccgaacacggaagtggagaagctcagggtgtgtcaggcgagcggttgcgtgtagatattctcaagtttctttctctcctaataaagttctcattcctgtaggcttcaaagtaagtggcgagtagctcagaatttacctgggaaaacaactagaacgaagctggccacaagggggcagcgtgctaatgagtggcggagccaggacagcacctttgctgccgcctccctttttttctgagtcagtttgcttcctggggaagtgag

SEQ ID NO: 14182 - DNA, 480 bp, Homo sapiens
  misc_feature (1)...(480): n = A,T,C or G
tggttctccnanaaaggaaaaactgaaaccttggnannactgagaccctagtacangcggnggaattcgngcagtggcacagtctcgactcgctgcaagctctgcctcccgggctcatgccattcttctgcctcagcctcccgagtaactgggattacaggcatgtgccaccatacttggctaatttttgcatttttttagtagagacagggtttcgccacattggccaggctagtctcgaactcctgacctcaggtgatccacccgtctcggccccccaaagtgccaggattacaggcatgagccactgtgcctggccatttccttctgttcctagttttaggcaccactcttgcctttccctttttcgtttgtcctcaatccagatggagaccaggtgctcaccctccttcatgcagcaacacttcctgtactttaaggtggatgcctgaaggagggcagcttgaattttcttcttca

SEQ ID NO: 14183 - DNA, 489 bp, Homo sapiens
  misc_feature (1)...(489): n = A,T,C or G
gggcggtacaccaggangnnnnnnaatcgagaccctattgtagaccttagaccangcggnggaattcctaaacccatacgtatcaatgattacattaaatgtaaatggtctaagtgcatcaatgacaagagacacggaaaaaaccaacataacccagtgatctgctgtctataaagaaagtcaattcaagtgattgataggttaaaaggatggaaaaaccatgtaaacaattaaaaatggagtggttatatggacagtttcctaatgataaaaggtctagttcaccaagaagacaaaataatcctaaacgtatatgcacctaacagctccaaaaatttatgaagctagaacagctgaaaagagacaaactaatgcacaattacagctagggattaatttaacatccctccttagtaacagaactagtatatacacattaatcagtaagaatatagaactgaaaatcataagccgactggattaaattgn

SEQ ID NO: 14184 - DNA, 444 bp, Homo sapiens
  misc_feature (1)...(444): n = A,T,C or G
ttgttatgaaccttgcgagattgcagaccatcgagcacancctgatcctgggcatcaccagccctgcagggaagaagcgctatgtggcagtcgccttccctagtgtctgtggcaagaccaacctggctatgatgcggcctgcactgccaggctggaaagtggagtgtgtgggggatgatattgcttggatgaggtttgacagtgaaggtcgactccgggccatcaaccctgagaacggcttctttggggttgcccctggtacctctgccaccaccaatcccaacgccatggctacaatccagagtaacactatttttaccaatgtggctgagaccagtgatggtggcgtgtactgggagggcattgaccagcctcttccacctggtgttactgtgacctcctggctgggcaaaccctggaagcctggtgacaaggagccctgtg

SEQ ID NO: 14185 - DNA, 457 bp, Homo sapiens
  misc_feature (1)...(457): n = A,T,C or G
cgcatcgctatggaagccttanngaattcgctaactgctcgnaggnccnnnaannataggggannctccccatggaagatgatggcctacaagaggtttatcgtgtggctgagtttcaagctaactttaacgcccctcaagctctggggtttgaggaactactggcctacctactaaatgaacaacatcagatagcgaaggaactatttgaacagctgaagatgaagaaaccttcagccaaacagcagaaggaggtagagaaggttaaaccccagtgtaaggaagttcatcacaccctgattctggacccagcacaaaggaagagactccagcagcagatgcagcagcatgttcagctcttgacacaaatccaccttcttgccacctgcaaccccaatctcaatccggaggccagtagcaccaggatatgtcttaaagagctgggaacctttgctcg

SEQ ID NO: 14186 - DNA, 448 bp, Homo sapiens
  misc_feature (1)...(448): n = A,T,C or G
cgatcgataagaaacgtacgcagtacntgggacctcggaangancnggngcctgaggtctgtacgttacctcttaacaatttctgtccttcagatggaaactctttaacttctcgtaaaagtcatatacctatataataaagctactgatttcctttggagcttttttctttaagataatagtttacatgtagtagtacttgaaatctaggattattaactaatatgggcattgtagttaatgatggttgatgggttctaattttggatggagtccagggaagagaaagtgatttctagaaagcctgttcccctcactggatgaaataactccttcttgtagtagtctcattacttttgaagtaatcccgccacctatctcgtgggagagccatccaaataagaaacctaaaataattggttcttggtagagattcattatttttccg

SEQ ID NO: 14187 - DNA, 476 bp, Homo sapiens
cttgagatccctagtcagtgtggtggaattccagagatgtgtttaagtgctgtggccagaagcggggggaggggggggtttggtggaaattttttgttatgatgtctgtgtggaaagcggctgtgcagacatcaattgttattattatgtcttacaagcaaaaaaaaaaaaaaaaaaaaaaaaaaaaaaaaaaaaaaagcccccccccctcaaaaaaaaaggccccctaaaaacccctaaaaaacccctgcgggtctattttaataacccccttttttttgtaaccccccccccagtcttttttttttccaagaaaggggccaccccccttttttttttaaaaaaaaaaaaaaaaaaccccccctttttcaaggagggggttttttttttctggggggagccaagacagcacctttgctgccgccttcctttttttctgagacagtttgctttctggggaaatgacacggaacaag

SEQ ID NO: 14188 - DNA, 473 bp, Homo sapiens
  misc_feature (1)...(473): n = A,T,C or G
tggttccanannaagnaaagctgagacactagcagctgatggcattcggagaatgaagagggaatgctttggttttttgttttggtttgctttttctttttcaagtaactaaaacagcatctacatgtagagtgttgtggagagctgagaccagggtaaagtcaagtgcagcatcagtactgcgagacccaccatcccctggagagggtcagccgagaatctggtagtgaagcctgtctagggtcccggcaccctcaccctcagccacctgcagagaggccagggccccagagactagcctggttctgaagtgggcaggggtgctgccagagccctctgccccttatgttgagaccctgctttcaggacaggccagccgttggccaccatgtcacattctgagtgagtggcacaggtccctaacaataattttctgatctggagcatatcagcagaatgcttagcctgcaggg

SEQ ID NO: 14189 - DNA, 470 bp, Homo sapiens
  misc_feature (1)...(470): n = A,T,C or G
attgaaaccccctgatgacctctggacangcggtggaattcgagactttcaatggttaaggctccatttctcattttcccaacttttatatgattgtctatgggcagtttgaatttctggttttcaatttattttttaatgattaattcgtattaaggcaacaagacagtacaacaaataatctctagagaggtccactttgttgctgaagtaaacgttacttgttgcaacccgaggatgggcatgaggtttggccttaggtattcctgtctgggaaaatggagggggtgatattagtggttccctgtactatatcacagccaagagagattagagagagaaaatgtagatcaaggcgagctgcctacaaattactctgtctccaaaggcaacgtgaaaagaaatgatggggaggaaaaaaccccatagattgaattagcactttgactctcacttaattcaacgatttg

SEQ ID NO: 14190 - DNA, 562 bp, Homo sapiens
  misc_feature (1)...(562): n = A,T,C or G
natcgaattccagtccgcgtggngcaantccctctcagcgcctcaggtgtctgggcgtgtgcagctgtgttggcgcacacttgccgctacagcccttctgtcagccctttagcttcgatggggcgctggtggccgcctccccctaggttgtggatgagtcttggcctagggttcagggccctccggccgcgggaggatctcccgccaagcttgttgcttttccaagttagtgcctggcgtgtgtgtgggctgcataggggcacccctcgaggcccccttctcttctcccgcctggactgcgttcacgtttctaacatttctcagccccttctccccacatctggccttggcttacatagagtaagtttgctgtgagcacttgcctcgaactgtcggtcaagaggtgtgagcaacaaggcttgcagaggaacaagattaagactggacctctgtgacctgagtttagcacaccttttctttcccatcatccaagntngcgaatttcgggctctttctcgcactggagtccccagcaccccagagattactanagatgcacccn

SEQ ID NO: 14191 - DNA, 463 bp, Homo sapiens
  misc_feature (1)...(463): n = A,T,C or G
cgggcgccttccaaatggagaccatcaataganagctctggccangnccnggaattcctcccccttctttctgacttctctttaattctttgcaatttgtaacttacaactaaccttttcgcctaaagaattgctcgggcaaaaagagaaaattctttcaatgtccctttgaaaattcttcagcaacatgactgattaacatgagtggggtttgttgttgtttaccctacacactctagaaaccatcagtaaaattgtaaaattgtgttcagagacattcagtaagagtacgactaggcgtggtgtggttgctgacgcctgttatcccactactttgagaggccaagccatgaggattgcttgagtccaggaatttgagaccagcctgagcaacacaggaagaccctatctctaaatttagctgggtgtggtggtgcatgcctgttgtcctagctaataagga

SEQ ID NO: 14192 - DNA, 444 bp, Homo sapiens
  misc_feature (1)...(444): n = A,T,C or G
ccccatgaaccctcatgaggccctagacacaacaantagccgggcaagatggtgcacacctgtaattgcagctactcgggaggctgtttcagaattgcttgaacccaggaggcagaggtcgcagtcagctgagatcgcaccacttcactccagcctgggcaacagagcaagattccatctcaaaaaaaaaaaaaaaaaaaaatttttgttttttggaaaaacaaagggggttacacaatgaaccccgggttgaaaacggagtttggaccattggcccgggcccttaaaaaaacccccaggggagccctcggccttgggtcccttgcggggagttggcacaaccacccagcccccccttttaatctttaagttttaatcaaaaggggcccccccccgctggggaggggcttttccccacggggctctaaaaacccgaaaatcatn

SEQ ID NO: 14193 - DNA, 459 bp, Homo sapiens
  misc_feature (1)...(459): n = A,T,C or G
caatcgacagttnctntanttgnnacttcttcgccagngngcgnggaannncgtcctcacataaacacagacacacacacacacacacacacacacactttctccccactttttattaaatgactcgataaaagaaatggtattgttcagacttccatgttaaaaaaaaggctcatgaaagagatgtaagtgagctttaagccaaacatttgtttggctttgctgcagcaggctgcaggaatgtaaactttttttttttttttcaagggtttccccttcttatttgaaaccttggtttttttgggggggaccaaaaattttttttggccaaaaaattttggtggttttttttaacccattgggcaattaaaaaaaattttttttttttaaaaaaaaaattgttttttttttttccccccccttgaaaaggtggaaacccccaaaaaattcttttttttg

SEQ ID NO: 14194 - DNA, 452 bp, Homo sapiens
  misc_feature (1)...(452): n = A,T,C or G
tcccatagtagacattagatagagcgccgtaattccacggccggaaagtgagccgccttagctgctgattgtactagagcaggcaatacaagagtcggcccatcctcaaaaccactgataggatgtgagtttcactaaccccgttttacagatgaggaaattgaggcaaggccagggctcacacctgtaatcccagcactttgggagtccaaggttggagggttgcttgagaccaggagttcatgaccagcctgggcgacatagtgagacccccatcttcccaaataaaaataaataaatcagccggacatggtggcatgtgcctgtagtccctgctgctcagaaggctaaggtggaaggatagcttgagcccaggagttcgaggctgcagtgagctatgatcataccactgtactccagcctaggtgacagagggagaccctgtctcaaan

SEQ ID NO: 14195 - DNA, 452 bp, Homo sapiens
  misc_feature (1)...(452): n = A,T,C or G
cggagcgtcccgaatgatacccctantganggctgtcganggcgcagaacctacagcctcttcctacagaccctgctgagcagctcaggggcgcttttatcagggcttttgccatctgcctccatgcgattaaaattcctacggctgcatggcggcatggagcaggaggaaagaacagcagtgtttcaggaattttcacattccagaagaggcgtccttctttgcacggatgttgcagctcggggcttagatctccctcaagtcacgtggattgttcagaatacatccaccggattggaagaaccgcccggattggctgccatgggagcagcctgctcattttggctccttcggaggcagaatatgtcaactcgttggcttctcacaaaatcaacgtttctgagattaagatggaagatattttgtgtgttctgacaagagatgattggttt

SEQ ID NO: 14196 - DNA, 205 bp, Homo sapiens
  misc_feature (1)...(205): n = A,T,C or G
nattcgaatacagtccagagtggtggaattcgccaggctctgtgctgaccctcctgttgcactaaccccgggcgggtggcaggtggaggtgtcaggctgctggcgcctctgcaagggcagaacactaacctgaccgtgggcggggccttgcggtatccgcccccaataaaagcaattccaaccttaaaaaaaaaaaaaaaaaaaa

SEQ ID NO: 14197 - DNA, 493 bp, Homo sapiens
  misc_feature (1)...(493): n = A,T,C or G
gatgtaaggggcccccccctaatgagaccattattgagagcatcgagaancgcgggaggaggcgaccgaaaagatacccgccctgcgccccgctctgctgagggcgcttttggcgctctttctgtgctgcgcgacccccgcgcatgcattggggtgtcgagatggctatgaaccctgtgtaaatgaaggaatgtgtgttacctaccacaatggcacaggatactgcaaatgtccagaaggcttcttgggggaatattgtcaacatcgagacccctgtgagaagaaccgctgccagaatggtgggacttgtgtggcccaggccatgctggggaaagccacgtgccgatgtgcctcagggtttacaggagaggactgccagtactcgacatctcatccatgctttgtgtctcgaccttgcctgaatggcggcacatgccatatgctcagccgggatacctatgagtgcacctgtcaagtcgggtttacaggtaag

SEQ ID NO: 14198 - DNA, 472 bp, Homo sapiens
  misc_feature (1)...(472): n = A,T,C or G
tcggtatnnaattgatagcatacgtccgngcggnggaattcggggaactccgctggtgaggcagctggtgtgctcaagagccttctcctgggatggatcatgcttggagagaggagacccgtcgggggctgagctgggctctgctgctccctgggccccaccctggtctgtggccgcccctgggccccgtcctggcctgtttctaaggccccctgggcccctttcgtgtggagatggtgtctcatggtgggctgcgctcactgcttccagaagaaattctgagaggaaagagctctgaccctggagagaagtgtggtgcttcgggacagcctctgccccagcctagtcctgccgtggattgggccacctagagggggccgcgtccctcctgcctgtctcctctgtgtttgggtgaatgatagttcatggagctggaagcagtgccttcttgtctgctttctgacaaccctgg

SEQ ID NO: 14199 - DNA, 460 bp, Homo sapiens
  misc_feature (1)...(460): n = A,T,C or G
cccccccattcgagaccactgnatagaggacccttagtcagagcggtggaattcgctgggagaggtccagagggttcctataaggaaaaactatttaatacatgacctaggggaggcctaaaacccttttggggataatgacccagagtccccccactagacacaggtcactgccaagcatcagggccactcgggctcagaggtcactcagggtcaatactcagggtcagtgcaggttatgagatccttggggtccaccctagtctctgacacctgggacaggggtgcttttgctactttggttgtggtcactcccccacacctgcctgcctccttcacggactcgaagtgaccttcctggaggaggtgggcagctcacactccacatgctggtggtgcctgaggtctgatggcctctaataaactgtgtcctataaaaaaaaaaaaaaaaaaaaaaaaa

SEQ ID NO: 14200 - DNA, 482 bp, Homo sapiens
  misc_feature (1)...(482): n = A,T,C or G
ccccgcccccnnncnnattgaaaccctattgtagaccatctggacangcggnggaattccctttattgtctgcatgattttaggggatatggggagggaacatgtagaagggaagagggaaatggagagcatccttatgactttacaaagggtggaaatgaggatggagggatacagaagtctgcacagctgtaaaggttttatagatgtctttgccttcccttctgaggaagggaagaagtaatgaaagcacatgtgaataaccccttccatcccattcacagcatcgcactcccagtccttaaggcaaagggaggcagtgctgaagcattggtggtgcagtgtaaagagacaagacctgatcatctgatcacacttgtgccaacttgattcatattgggcattactaacaacccctggtcaaggtaaataggttgaacaatcaataacattatccctgcctgcatacatgtgaacaaaag

SEQ ID NO: 14201 - DNA, 460 bp, Homo sapiens
  misc_feature (1)...(460): n = A,T,C or G
nttcgagaccattanacaattgatgacccttaccccagnccggcggaattcgctttgtgtccatagtcctgagtgcgcctaagtagtttatgatgcacgcctaccatctgttgtaaagtttcatcacattaaaagcaaactatttttgcaaattaaagccttcagtaagttgatgaaaaaagcaattactgagggaaaaaggaaaaagcacaatccattctacatcacggtctatggctggagataacagtcaaaaacttaacccaaagtggcagctgcaggagaaatgaaaattgcctaccttatgttttcccttcattctgcatgtgtctacatcggcctgtctagatttccatgtcagtttctgcagggatcaagaaagaaatcaattacagcccacaggttgctgcgtttgattttagaagtaagagttcccttggggagactaaaggctgaacan

SEQ ID NO: 14202 - DNA, 550 bp, Homo sapiens
  misc_feature (1)...(550): n = A,T,C or G
tctcgttgctactatatcaacgacttcgggcattagctatatatccagcccccaaacactacgatgcaaccgacgaccacgcaanaaaanntgatttgcattacctacgccanngcgnggaanncgaacagnaaagggaccaagggaaaactcccccttcacctacagaagggggacagaaaatcagnggacaaaaggcagaaaaataggagaagaggcgtacacaattttattttaatgtgtgtaacacaggagaatcacaggacaatgattacccaataacccagtggggcacagatgcttatgtacccttcttcttatgggaaagagagatgcggaaatgtggatgattttaaggggaatggtaaatgatttttaggctgactcagtggactcagagaacatatagtgaggcctgggacaaaatcttttgggcccacagaacagacaatggtttgtgacaagagtctgtccaggtgtgttgacagacttcaatctttctccctgaaatatgagttaaattaatgaaaactcatggaggaaaccagaa

SEQ ID NO: 14203 - DNA, 464 bp, Homo sapiens
  misc_feature (1)...(464): n = A,T,C or G
ntttaaatcgagaccttgatcacngtcgnggaattcgattaaaggaacctttgggtgccaatgaaaatattaaccaaaatatactttctgaataagaattaattatggttctgaaggtgatagtaaaaattgtattaaaattttagtccctgagtaaaaagaacaaagctggaggtatcacgttacttgatttcaaactacactacaaatctatagtaaccaaaacagcatggtactggcataaaaacagacacatagaccaatggaacagaatagagaacccagaaataaatccacatacttatagccaactcactttcaacaaaggcatcaagaacatacattggcaaaaggatagtctctttaataaatgctgctaggaaaactagcatatgtagaagaatgaaattcccgtctctcaccatatacaaaaatcaacctaaatgtggctgggcatggtgact

SEQ ID NO: 14204 - DNA, 399 bp, Homo sapiens
  misc_feature (1)...(399): n = A,T,C or G
gtttcgcagcaaaagtgaagacctgtatgtaaagaaagtataacaattatttctttgtattttaggggctttaaccggaacatcgtctagctggtgttaggaatgtttgcttaatttccagactttttttttaaaaacacatcgtgggttttttgaggctccaacctgattagtgcatggtcagccctcaatgaaggctgaggcatctctgactgaggtgtttttgtttggttttgttttttaaaatcatgtatttgctacaaagtattgtacttgtctcaatgggaatggtgtaaaaaacaaaaggccttatgtgatctgtatcatagttaataaatgaatcttgtaaaaaacccccnnnnnnaaaaaaaaaaaaaaaaaaaaaaacatatcaactca

SEQ ID NO: 14205 - DNA, 449 bp, Homo sapiens
  misc_feature (1)...(449): n = A,T,C or G
tagaatttgaagatccttagtcctgtgtggtcgaattcccgcatacccctgggttgtgagctcgcctgcatatgcagggtctgtcatggaacatcccaagtctgtgctgcagggagccccatgcccctgggacatgaacccacctgcgtggaatgctgtttgtgaggtgtctacagggtttatagtagtcttgtggacacagaaatgcacaggggacacttacggacacagaaatgcacaggggaggccgagcataaccaggggtgaggggcaggcagcagttgtagttactgccgcggggcactgctatgtgcagggacagccagcacccagcccatcaccactccctgggctggctggcaggtatggcaccctgggagcccggcatatacccagggcacccctacggctgccgccagtctcatgcccaggtgggtgctctgggctgn

SEQ ID NO: 14206 - DNA, 459 bp, Homo sapiens
  misc_feature (1)...(459): n = A,T,C or G
cccccccatcgaccccttngttagaggaccctctagtccatgtggtggaattcccggctgctgacctctctctttcaggagcactttctttttgttggggctaattcctgaagcaatcttcccacagctcatttccccaggctataagcagaggctgaccaaggggccctgtggtcagaagttattgccacaagcaggaagtggttaatgccttccatttacttttagttggaagaggaaaggctgaatctttcttacaataggggcgggaaatcaacgtgactctaccagttattataccttcgggagggaaagcagaactctttcagggcatgaaggatgacatcttgaagctactctgccaccaacagaacaaggacgaggggaatttattacacatggcttgagttagagtgaatgggagatctcgcttgaccgatgaagccagtttcataactg

SEQ ID NO: 14207 - DNA, 455 bp, Homo sapiens
cccccatagaagaccattagatagagcgccgtaattcagcgcgagtgttcgttgtgccagcgactaacaagagaattaaatatgggtgatgttgagaaaggcaagaagatttttattatgaagtgttcccagtgccacaccgttgaaaagggaggcaagcacaagactgggccaaatctccatggtctctttgggcggaagacaggtcaggcccctggatactcttacacagccgccaataagaacaaaggcatcatctggggagaggatacactgatggagtatttggagaatcccaagaagtacatccctggaacaaaaatgatctttgtcggcattaagaagaaggaagaaagggcagacttaatagcttatctcaaaaaagctactaatgagtaataattggccactgccttatttattacaaaacagaaatgtctcatgacttttttatg

SEQ ID NO: 14208 - DNA, 461 bp, Homo sapiens
  misc_feature (1)...(461): n = A,T,C or G
ccttgagtagacgtncactaggccangncgnggaanncctaagcaaaaactgtacgagtgacggatggtcagagacgttcccagatttcgtcgatgcctgtggctacagcgacccggaggatgagagcaagatcacgttttatattctggtgaaggccatttataccctgggctacagtgtctctctgatgtctcttgcaacaggaagcataattctgtgcctcttcaggtggagagtgcagccccaggaaggtcgctggacattgcagggttgctgagctggtgcacgcagagccctgatttcaacccaggctctcatcactgcagcctgcacctctgtcactgtcagatggacgtggcctccaaaatcctttcccaccattgctaatgagcagactctggtccccctttccggaagccacactttctactacctccattgcccattggcagatccatac

SEQ ID NO: 14209 - DNA, 472 bp, Homo sapiens
  misc_feature (1)...(472): n = A,T,C or G
tgggtccnnnnnnangnaacctgatacattataagctgatggcactccggctggagtgcagtgccgcgatcttggctcactgcaacctctgcctcctgggttcaagcgattctcctgcctcagcctcctgagtagctgggattacaggtgcccgccaccatgcccggctaatttatgtatttttggtagagacagggtttcaccatattggccaggatggtctctatctcttgaccttgtaatccacctgtcttggcctccgaaagtgctgagattacaggcatgagccaccgcacctggtcaatgttttctattaaaattctacctaagcatctaggctctgttgggggcttatcataacttaggatgtgccaaattgggcaggtgagctgggttttcagtgccagtcccacagaccttttctcatccaaggagggatgctcccaagagtatttatactgtgctctgagtn

SEQ ID NO: 14210 - DNA, 477 bp, Homo sapiens
  misc_feature (1)...(477): n = A,T,C or G
aagaaaaaannaagaaagctgataccntngaanactgagtcactcgtacangcggtggaattccactgtcactgacctagtggagtatagcatcgtgatccagcagctctcaaatggcaaatgggtcccctttgatggcgatgacattcagctggagtttgtccgcattgatccttttgtgaggaccttcctgaagaagaaaggtggcaaatacagtgttcagttcaagttgcccgacgtgtatggtgtattccagtttaaagtggattacaaccggctaggctacacacacctgtactcttccactcaggtatccgtgcggccactccagcacacgcagtatgagcgcttcataccctcggcctacccctactacgccagcgccttctccatgatgctggggctcttcatcttcagcatcgtcttcttgcacatgaaggagaacgagaagtccgactgaggggctagagccctctn

SEQ ID NO: 14211 - DNA, 489 bp, Homo sapiens
  misc_feature (1)...(489): n = A,T,C or G
cgcccccccccnnngnattgtagaccctagtcagngcggtggaattccgagttcggagcctaggagccccccgcggctgcggcgcaggtgccctcggcctgagtcgggatggagctgcctgctgtgaacctgaaggtgattctcctaggtcactggctgctgacaacctggggctgcattgtattctcaggctcctatgcctgggccaacttcaccatcctggccttgggcgtgtgggctgtggctcagcgggactccatcgacgccataagcatgtttctgggtggcttgctggccaccatcttcctggacatcgtgcacatcagcatcttctacccgcgggtcagcctcacggacacgggccgctttggcgtgggcatggccatcctcagcttgctgctcaagccgctctcctgctgcttcgtctaccacatgtaccgggagcgcggnggtgagctcctggtccacactggtttccttgggtcttcn

SEQ ID NO: 14212 - DNA, 405 bp, Homo sapiens
  misc_feature (1)...(405): n = A,T,C or G
cctggtgtcgccatgggccgccgccccgcccgttgttaccggtattgtaagaacaagccgtacccaaagtctcgcttctgccgaggtgtccctgatgccaagattcgcatttttgacctggggcggaaaaaggcaaaagtggatgagtttccgctttgtggccacatggtgtcagatgaatatgagcagctgtcctctgaagccctggaggctgcccgaatttgtgccaataagtacatggtaaaaagttgtggcaaagatggcttccatatccgggtgcggctccaccccttccacgtcatccgcatcaacaagatgttgtcctgtgctggggctgacaggctccaaacaggcatgcgaggtgcctttggaaagccccagggcactgtggccagggttcacatn

SEQ ID NO: 14213 - DNA, 503 bp, Homo sapiens
  misc_feature (1)...(503): n = A,T,C or G
cgcctgcccccnnnnagnatttgatgaccctagnanannnnnnattgatgnaccattagtccagtgcggtggaattcgatttgttctgtggtgtaggtatgcacattccataggtatgcacacggccatgtaatatcagtatatcccaagttaatgaaagtgttcatttacataggcaatggagacctttgcattttgatccatagaacataggaggatgttcttagtctgtctcaaagctctatatgtttacatattatttctgtagattgttttcaggagaaagttttgcttctatggtaagagtgagcactttggcttatgtataagttagaaataattgttagtttttaatatgcacttcgtggggaaatttcttagacgtatgcaagcaagtgaaaacaattagggccagtggtattaactactttataaaattttatttttgtttgtaagaagtcatctacttaaggcccagttaatataagtggaatcatcatagt

SEQ ID NO: 14214 - DNA, 569 bp, Homo sapiens
  misc_feature (1)...(569): n = A,T,C or G
nattgatnccccctcgngnnnncctcgatcacctatccagtgtggtgcaattcganaacagctgctctcattttgttttggaggaaccctggtggtttgacagccaggagaaaggccatatgtgaaaccagtctcttgtggagattggaaatcctccctgatatttgggcagagcctaaacgtgcatgtttgtcactcaaacaccagaagtttgaatcagaggtctgagtgacctcttttgtggctgttcttgatggtttccaggcctcgttatgcatggtttgcttgatgcccattttttgtgccttgtgctgttggatggtaacgaccactcaccatgtaaacacagtacctcagttttctgtccacagctgcagtcgcttctgtccctcgtgcttcactgtgggcagccagggacaagcttctgaaagcagtgtgatacccaagtcataggtgcttctcgtatgtgaacaggtgtcattctacagatctgttatgtgttttcctgttgactcttaagagtccctgcatgtaaatctcaaagctgagcctggctcccagagtccaga

SEQ ID NO: 14215 - DNA, 484 bp, Homo sapiens
  misc_feature (1)...(484): n = A,T,C or G
ggagtnngcccccnnnagtngnnnnaaactggagacctntcgatagaggnctctgaanacgccgctgagaagagaagtcagagttgagctgggggaggcttcagaggctctgcatgcccaggaggcttctctgagactgggaaggagtggaaactcagtagcccgtggtcctggttgcgcgctccctcccatgtcttcattatctgatttggtaaaatatctacaagacgggggagtccgggctgctttctttgacactggtcatcactccacacctagacgctatgtccatgtctggaagatgcttttaaggaagttttgatgcagagaagagtggccggtgctcttcctcgcgtgccaccatctgcttacttccagaagctaattattttcatgtgactgatgtgactaatattttttaacgcctgcaggttctgaaaacagccagttacttcccaagagttgcacagagaagcctgcacac

SEQ ID NO: 14216 - DNA, 528 bp, Homo sapiens
gcggtggaattcgtcaggtttcaagggtagtgaaactctggagagagaatctctcaaaagtcaatcagaaagcagcagaatcccttgctgacccaacagagtatgaaaacctgttccctggattaaaagaagcctttgttgttgaagaatgggtgaaggaaacacatgctgatctgtggccagccaaacaatacccacttgtcacgccaaatgaagagagaaatgtcatggaagagggaaaagactttcagccctcaagatctacagctcaacaggaacttgatgggaaacctgcttctcctactccggttattgtggcctcccacacagccaacaaagaagaaaagagtttactcgaactagaagtagatttggataatttggaattagaagatattgacacaacagatatcaatctggatgaagatattttggatgattgactgtaatgctttccatttacctgactaaacagatcattattatatataggtattgattgctaccctgaccacagtgctttggact

SEQ ID NO: 14217 - DNA, 455 bp, Homo sapiens
  misc_feature (1)...(455): n = A,T,C or G
ttttnatacgagcactactagtctagagcgctggaattcgcatgcttccagctggagctgagtccaagcacacagccactcctgcacacgcatgcgtgcaaacagggaagcccaagtaggagaagaggaaagaggttgtagggatttgggaagaaccttgattattccctggaggaaaagacaaatctacttccctgaaatcaccctcgaatctacttccaccctcagaacttaaaatgaactgcatcctttttttcatcttcttttcttctccagtgaatatgatctccaaacccttattttttctttgaactgtaaaatttccactcatggacgatgcaaccaacagatgcaatctctgagaagatgaaaattgggacctcttattataaaattgacctagctggactcaggaaaccagggaagaagtcaatgcaggcatttaaaatgtaaag

SEQ ID NO: 14218 - DNA, 484 bp, Homo sapiens
  misc_feature (1)...(484): n = A,T,C or G
cgagtnngcncnnnnagtngnnnnacactcgagacctctagctcgagggcgntgagaacctccacatggatatctagagtttctagctgctcctttctctgccctttgtgtgtctttctggcatgcaatttgcagtttcagactgggggtgccacaaaatgtggggccatttctcttccttactcatggtttgcctatcccagtatccaaagcatggtccccgacacagagggggctcaaggaagggtaattgacggcatgggctgggggaaacccaggggcagccagcttccaattctagttctctttcctactcactgaggggtatttggcaactcagcctttctacttatttctcttctataatggatcatccctttcctccctgctccccagcatccatgcaaaagccgatagatctgaatgggcttgagactctaatgtgaaaggagatgtcagccaagtagcagcaaataggaactcg

SEQ ID NO: 14219 - DNA, 480 bp, Homo sapiens
  misc_feature (1)...(480): n = A,T,C or G
ntttgagaccctcgaannnncnnatgatgaccattagaccangcggnggaattcaaacctttagaatgaagaggaactgtcatttcactctagccgaagacaacagccttatgcacttgtgtgcgtctgtctttgctgcttctcgtgtttcaagcctttcctgtgggatcagcacagcaaagtgcaacttaccaaatggtttaatgactggttaattctttcttctcccaatggaaaagcaatggcaacacaacagtagactgctggcttgacaatcttaaacgcgagcctttgcacatgtaggtttatcatcatttgagtatacgactaagcaagtcaatgaactttttttttttttttaccagtttaatttggccctgaaaaggtgcgcacctttattaccccttttgaattaacccacttttccaaccaccttttaagctttaatttttaacactatcccccaagtttttgaaatcg

SEQ ID NO: 14220 - DNA, 557 bp, Homo sapiens
  misc_feature (1)...(557): n = A,T,C or G
nnttcgatncacagttcagagangggtagatatcctgtccagacgaagcaatcactgagcttcagccctgcacactagcagcttgtggacaccactcagccacccatagtacgtgtttacaggctttccagatcaccttcctgtggggtgaacgtaatgaggcggggctggtccttggaatttcccctggaaaatggtaacagactccatccttgacccggggatgagcatgaaggcattgtcccaaaggcagaggccaccgtggtaggaattccaccaaggccagaagggaaaaaggaagaacccaccgtgtctggctgtgcgggccctggggagggtcgtgagtgcagcccctctctacttctgtgcctttgtaaaacgtgtagataaccgcagtggttggctgagccaagaactctcctaaatcagtggctttctccccaccccttgctggggagtcattnttaaaaaaatctgtgggatataaaattggcctcctgctgcttcagcctacctctccctctgctgacttaatgtcgggattctgtttcttcaga

SEQ ID NO: 14221 - DNA, 459 bp, Homo sapiens
attcgaagaccactagaccagcgcggtggaattcctctaaggaaaaaacctttggaagacttagtctgtaaactcgcagatataagtattaattatgtcaatgaacgaaagtcagagcaacatctaaggtttctttctactctgcttgactccttttcttcaagccgagtatttaaaatgctacttggtgatgaaaaacagagtattgtccaagccaaacctcttgaaatagccaagcttgtacaaaaaaatcctgcggtgcagtttttataccagaaactgataggttggctaaatgaagatcaaaggaaggattttggtttcctggtggacattttgtacagtgctctccggtgctgtgacaatgatatggaaagaaaaaaagtcttggatgatctaaccaaggtggacttgaaatggaattctcttcttaagattattgaaaaggcatgtcctagt

SEQ ID NO: 14222 - DNA, 462 bp, Homo sapiens
  misc_feature (1)...(462): n = A,T,C or G
ataaagtagattccctctcnattttgagaacctatccagggcgggaattcggtctgtgtgggttgcagacaaaagctgtcagctggggctacattttaatctgaagactgggagtgtgggggttatatataaactcattcactggcttttttcttgcagcataatgttgtggaagttcatccatgatgtatcatctattagtatttgttcttttttattatgaaatagtatttctccgtatagatatagtacattttgtttatccatatactaatatatgggatagaaacctaagaatagtatcattaaattgcatgatatattcatatttatcagttttaagaaaaggccaaactattttccaaagcggtgatactattttatatttccatcagcattgtaaagggccctcatttagccacatcttcatggacatattttatcactggtcatttttattat

SEQ ID NO: 14223 - DNA, 489 bp, Homo sapiens
  misc_feature (1)...(489): n = A,T,C or G
agaaaattcgagaccctaggcagngtggaggaactctcactgcccttgctgccaacacattcacctgccccagtggctaccatgtcctgtgccggtgaccagtgccagtccccaacctggatggtgccctgccctcatgaagagccccccggatgttcacctctgcccagagacccggcctgcccaggaagagcagtctctgctcttgtgtgggtccctctgcccccaccctgcccagggctccccagcagcctgaggcccctaaggaagaacagccctcaatggtgattctattggtgttatgagttgtgtccccaaagagatatatcagtgtcctgacccacagtacctcagaatgtgactgcatttggagatagggttcttccaggggtaaccaaggtagaatgaggtcgttagtgtgggccctaatccaatatgacggctatccttataaaaagaggaacatttaggctggatacagtggctcat

SEQ ID NO: 14224 - DNA, 462 bp, Homo sapiens
  misc_feature (1)...(462): n = A,T,C or G
gcgggnnattgaattcatgacccctagtccagngcggtggaattcccggaagagctttggcgggaagtccctctgcattgggggaggggacctaaaagggaaacaggcctgctgtgctctactccctcttgttctccttcagtcctttttaatcctcaagacctaggctgtttttccttttttcatttaacatgattcctgcctcataacaaaaatgttaacattatagaagatacataaagcaaaaagaatgttatctctgcatatatgcatgttttcctttaacattatttgtatggaactatgctattttgtggcatttttctccttaatatacaatggaaatatactccatatgctaaattcctagcaatagaacaagatagactcatagaatttaaagatcgttcaggtatattgctaagttcttttctacttattttcatttctagtggttggcgn

SEQ ID NO: 14225 - DNA, 468 bp, Homo sapiens
  misc_feature (1)...(468): n = A,T,C or G
cccccaatgtagaccntggctttgagcccgaattccccagcccctgtgcatactaccgctcagcccaagggtgcagacccagcccctgcacactctgccgcccaggttgagggtggagacccagcccctgcacgcactgctgctcagcctgaggctgcagactgctctgaaggtgcaggtaccccctgtgcctattcagccgtccctactgcagactggagcactcagcctgccaggcaagcctgttctgcagctcccaatgctcaggcccctgaatgaggaggatcaaccactgagcggtctcaagctgttcttccacaggccaccagcaagatggaaataaggccgatggaaaataaacatcagtttctatttaaaacaatgatattcgggtctggttgcaatgtgattatttcatgaagtttaacagaattaccacatggcactgctctgagatgtgaagctgtt

SEQ ID NO: 14226 - DNA, 445 bp, Homo sapiens
  misc_feature (1)...(445): n = A,T,C or G
natgaagncccnatgatgaccattagacagncnggtggaattcctctttcagagtttagaagcaggaagaacatttccaacctcattttatgaggcctatgtaatcttcatataaaaaccttacatgggcaccaaattataattcagtccccatcatgaccacaaatggggaaagctttaataaaataggatcaaatgaaatctagtgatatataaaaaggaaagatatatcacaagttgaattctttttaggagtgcaatattggtattaattaacaaaaataaaaataattcttcatattacaaaataaaggaggaagaaaaatcatcttaatagatgtagaaaacatatttgatcaaattcaacaccttttcatgttaaggggtacttacagaaacctacaacaatcatgtttgaaggaaaattttaaattcttgctcacag

SEQ ID NO: 14227 - DNA, 502 bp, Homo sapiens
  misc_feature (1)...(502): n = A,T,C or G
ggggnnannnnnnnaggggggggnnccgagggganatttaatcctaaaaccactgtcagtnaggtaactgaaagncgnggaannnaaactacttaaagggggagtgtctgttactttttagcaaatttttttaatcacctcttgctacacccattcttttcatgtgcagccgactcaaaaattaccagttttggtgaaaggctaaattagataatttggaaccaggatactaatgatttctcatctttacttttttttaatcctaatataaagtgaatttgattgaaaaggcaaatagctattagggaagcagtttgccattgttgcagagttatctgtactttgtttaactgaaaaaaatgtagaaatatatgtaaagaatttaagacaagagtactgaatggatgatttgtcataggctttcccctttctttctgttctagcagcaggaaaagtttctctatatcctctccctctacctgtaacaattttgttttccact

SEQ ID NO: 14228 - DNA, 550 bp, Homo sapiens
  misc_feature (1)...(550): n = A,T,C or G
ggctcgatcctagtccgtgtngggtagatnctcagtacacgagaacgtgcctctcgcatatgattctctggcagcgatgtgctctgtgctgacagacttcattgctattctgtgacttgctggaggatggcagtggcctttgtcaaacacactgagaagatggaagggccagcacttaagagcagaactgtacccttagagaaacggacagaggcgagtggcaaacttcagacggttccaatggtcttgcagtttgaaatgtgatgttctaccattggttttgagtacgtgaatacttcctgtcctactgtttcccctaccctattctcaccttctctccgcccacatcctcaccaagagattgtgtgggacatgaccttgaaatgctggcgatgatccacactgggatatcatcgctggcgactgcactctcaggagcccaaaatcaggagtgaaattgccacttctagtccccttatttcctatggaaacaacgccttccgcacccctagcacctgccgtctcactgtaaggttcatcaggatcgtnc

SEQ ID NO: 14229 - DNA, 470 bp, Homo sapiens
  misc_feature (1)...(470): n = A,T,C or G
cccggccaatgagnccctnaactgagagcataggccanngcgnggaattctcaacaactaggttgttccatatcttggctattgtgagtaatgttgcagtgaatatgggagtgcagatatctttataaggtgataatttcatctcctttgggtatatacccagaagagggattactgggtcatacagtagttctacttttaatttctttaggaacctatatactgttttccatcatagcccataccaatctacatccccactgacagtgtactagggttcccttttctccacacccttgccgacatttattatctattgacaagctctgttttgattagcaaaataaggtctgggtgagtcaggcaccacgggaattagagcatcaatgtcacccacatttccctccttatttctatcctttttccctcctgctttaaacaattctctgacaccgttgttcaaaaaaaat

SEQ ID NO: 14230 - DNA, 440 bp, Homo sapiens
  misc_feature (1)...(440): n = A,T,C or G
natgatgacccttggacagncngttggaattcatctgaagcagcaggttgcaggacaaatgcttcagtccgccgagagcagtaccgtgtggccaagaggtggactcagagccttccttgagctaaactcggccaaccaaggcacgcagcatgtcccctcaggtctccagtcagtccaggttgaccctcagttctggacgtgtgtatatagctgtatttaatacctcaaggtcattgtggctctggggatgccggggcaggaggacgagggtgcgctgtggacacagcagtccgcggaattccgttctgggaagccaatggtcgccggcaccccttgcttcctccctctgttgtctgcctgtgtgacacacatcaatggcaataacttcttccaactcctcgcagaagtgggagaggccggcagcctgcaccgagaggggt

SEQ ID NO: 14231 - DNA, 410 bp, Homo sapiens
ggtgaggctgcagtgagtcctgatcatgctgctgcactcaatcttggacaacagagcaagaccctgtctcaaaaaaaaaaaaatatatatatatatatatattatttttatgaggggaagggcatcaaacttgggaaagatttgaggaggctgggaacctcctggaaaaccactccttgaaaaaagatatgagagacatttaaaagtgattcctgctttcaaaaggaggtggattcaaatacatcaaaagtcccttcctctgctaagtgtttatagttcaatgaataatttcaatatttttatgggttcttggcattttatttttttctgaaaaacttccaaaaatttgaaaataaaattacagcctttttttcttaaaaaaaaaagaaaaggaaaaaaatataactagc

SEQ ID NO: 14232 - DNA, 543 bp, Homo sapiens
  misc_feature (1)...(543): n = A,T,C or G
acgcatgcagtcgcccgacacacttcgcgcttagtttctctcctcaatgtaggaacacaccccccccaagaggccggccccccnnnattgatagcatacntcangcggngcaanncaagngacagacantcctctnagggagcgcctcctcctagggnntcctcatctgtcttacactgagtggatgtaatgctattttaatcctgctgtggcccccaatactagtacttgtccataccttcttgcatttttagcgtctgctctgtggggttgttaggccctggcactcccaggaactagtgctaaagctgcatctctctctcccctctagggatcgataaagtttcactgcagaaagtctccactgcggtatgctgacatctgccctgaaccttcaccctacagcattacaggctttaatcagattctgctggaaagacacaggctgatccacgtgacctcttctgccttcactgggctggggtgatccttggtgcctttgtttccacaaggccttttcctgccccctgccttgccaaagaa

SEQ ID NO: 14233 - DNA, 486 bp, Homo sapiens
  misc_feature (1)...(486): n = A,T,C or G
cganantnnnnagggagggccnagggagttaatactggangcttgcatgtggcactagaaaanacgcccaagnntgnggnatgatgtgcacacttgctagactcagaaaaaatactactctcataaatgggtgggagtattttggtgacaacctactttgcttggctgagtgaaggaatgatattcatatattcatttattccatggacatttagttagtgctttttatataccaggcatgatgctgagtgacactcttgtgtatatttccaaatttttgtacagtcgctgcacatatttgaaatcatatattaagactttccaaagatgaggtccctggtttttcatggcaacttgatcagtaaggatttcacctctgtttgtaactaaaaccatctactatatgttagacatgacattctttttctctccttcctgaaaaataaagtgtgggaagagaccccnnanaaannnnnnnnnnnaaaa

SEQ ID NO: 14234 - DNA, 441 bp, Homo sapiens
  misc_feature (1)...(441): n = A,T,C or G
gttgaggccctatgatgaatattagacagngcggtggaattcgggattacaggcgtgagccactgcgcccagcctgcatttaaattctcaataatttgtagctgctcatttctgaattttcaattatgaagtattttgctatttagaaatgttttaaatctgcacagttctattcagctcttaacacctgcagcctccagtattttctcatgttcagatatgaaggtatctgagctgtttctctatcagaagaatttatgtgatacatagagaatatgttccagtgatgttttttacagtgagttgtaagaatataatagaatcctcaggaatctatttcagtgtatcattatttaatggttagtatatcatgatttaatggttttttttttcataacctaataacgtacctaacacaacactcaaggttagaaaagatat

SEQ ID NO: 14235 - DNA, 416 bp, Homo sapiens
  misc_feature (1)...(416): n = A,T,C or G
cacagaggtggtcaccccagggacagccaggcacctgctcctcttgcccttcctgggggaagggagctgccttctgtccctgtaactgctttccttatggcccagcccggccactcagacttgtttgaagctgcactggcagcttttttgtctcctttgggtattcacaacagccagggacttgattttgatgtattttaaaccacattaaataaagagtctgttgccttannnnaaaaaaaaaaaaaaaaaaaaaaaaaaaaaaaaaaaaaaaaaaaaaaaaaaannnnnnnnnaaaaaannnnaaaaaaannnnnnnnnnnnnnnnnnnnnnnnnnnnnnnnnnnnnnnnnnnnnnnnnnnnnnanannnaaaaaaannaaannnnnnnnnnnnnaaaaaaaaaaaaaaaaaaa

SEQ ID NO: 14236 - DNA, 371 bp, Homo sapiens
  misc_feature (1)...(371): n = A,T,C or G
ggttcgatcacagtcagtgtgggtagttcntccgcacacgagaacatgcctctcgctaggatctccttcatccctctccagaagaggagaagaggaaacacaagaagaaacgcctggtgcagagccccaattcctacttcatggatgtgaaatgcccaggatgctataaaatcaccacggtctttagccatgcacaaacggtagttttgtgtgttggctgctccactgtcctctgccagcctacaggaggaaaagcaaggcttacagaaggatgttccttcaggaggaagcagcactaaaagcactctgagtcaagatgagtgggaaaccatctcaataaacacattttggataaaaaaaaaaaaaaaaaa

SEQ ID NO: 14237 - DNA, 443 bp, Homo sapiens
atggaagatccctagtcattgtggtcgaattcgaagaaccttaggacccatttcttcacataaggaggaatcagggtcttgacccctggacactttaagaaccttaggacccatttcttcacacgaggaatcatggtgctgacccctggacatctggtgcccctgacagtgcccccacagtagcaacaatagcagatgacagtcagttatttagaaatgggcaggagcagccctggttttggccatctgcttgctttgcacccagcagctacttgcatgcatctgaaagcaccagagtgagggtgtgtgtgcctcccaggcagtcttcctgaggcagctgttctcaacatccatcctcctggcccctgatctgcaggaacctccccaaccgcctggcttgtctaggcctgtagctgggaaggaagagacgaagacacagggag

SEQ ID NO: 14238 - DNA, 473 bp, Homo sapiens
  misc_feature (1)...(473): n = A,T,C or G
naatgagaccatagacattgagggcattcgnnnaacantttctgtggaggtggtgtctcactatgttggccagactggtctcagatgcctgggctcaagcagtcctcctgcctcaacctcccaaagtgctgtatgattgttttaaataggaaaaaatttagaattttataatatcaaggcacttaatttttagttagtgatataccatccaaaaggcatctgaggctgggcacgttggttcatgcctataatcccagcactttgggaggccaaggcaggaggatcgcttgatcccaggagttcaagaccagcctgggcaatgtaacaagatcccatctctaaaaaaataatgattaaaaaaatagagacaaaaggcatctgaaacataggaacctaattaaaacattatatgtatatacatattttcattaagcgtatgtgttaaaatatcatctagaccaatgttgtaaggg

SEQ ID NO: 14239 - DNA, 458 bp, Homo sapiens
  misc_feature (1)...(458): n = A,T,C or G
ggggcgttttnatcgagaccctaggctagagggcgtaattctattagaaaaaagttatttcttgagttacacctaagaggaagaagtaacatgatggaaagtggttggagatagcacccaattaacatcgacagccaagtcttctatttcagaatattgatttatttcgctttggcttttgatgccatcatgagatttaagtctgcagtttcaaaagctcatgctacttagaagagatgatttttgcagcttaaaaaattgcttgtgactgcagtatgtacacagttaaaaagctgttcactgcccctttcaaccttttcattttgagctttactaagagaatgtttttaggaacagaattcctaaagtgtaattttttatgtataaataaagttttatctatatctgaagannnccccnnnnnannnnnaaaaaaccaanaaaaccaagcccccccc

SEQ ID NO: 14240 - DNA, 478 bp, Homo sapiens
  misc_feature (1)...(478): n = A,T,C or G
ggggnnnnnaggcgggccgggngatgatcagctaccttctgatggcataagaagaacggggggcctgncggctggggatgccttcgagatccacgtccacaggcgcccccaaggggatagggctcctgcaaggttcaaggccaagtttgtgggtgacccggcactggtgttgaatgacatccacaagaagattgccttggtaaagaaactggccttcgcctttggagaccgaaactgtagcaccatcaccctgcagaatatcacccggggctccatcgtggtggaatggaccaacaacacactgcccttggagccctgccccaaggagcagatcgctgggctgagccgccggatcgctgaggatgatggaaaacctcggcctgccttctccaacgccctagagcctgactttaaggccacaagcatcactgtgacgggctctggcagttgtcggcacctacagtttatccctgtggta

SEQ ID NO: 14241 - DNA, 462 bp, Homo sapiens
  misc_feature (1)...(462): n = A,T,C or G
atgagaccctatcttgagggtcgatattctctacttcaggaatcagaaaggacactctggacttcagccaagaggattcctgagctgaagtgcagatgacacattcaaagaagaactttctgccccagctttgaaggatgaaaagctttccctcctggctgttattcttccacaagagagggctttctcaggacctggttgctactggttcagcaactgcagaaaatgtcctcccttgtggcttcctcagctcctgcccttggcctgaagtcccagcattggtggcagcgcctcatcttcaacttttgtgctcccctttgcctaaaccctatggcctcctgtgcatctgtactcaccctgtaccacaaacacattacattattaaatgtttctcanagatggaaaaannnnnnnnnnnnnnnnnnnnnnnnnngcgccncttaaattaaaaggccccgttta

SEQ ID NO: 14242 - DNA, 453 bp, Homo sapiens
  misc_feature (1)...(453): n = A,T,C or G
atcgagncccctggtagagcggcgtaattcccgagagaggctgctgcgaaggccgcgggcccgtgactgggcgcgaggcggccggcggttgcggcggcaccagcaccaccatgtcgcgctcagtgctgcagcccagtcagcagaagctggcggagaagctcaccatcctcaacgaccggggcgtcggcatgctcacccgcctctacaacatcaagaaggcatgtggagaccccaaggcaaaaccatcctatcttatcgacaaaaacctggaatctgctgtgaaattcatagtcagaaaattccctgctgtagaaacccgcaacaacaatcaacagcttgcacaactacagaaagaaaaatcagagattctgaaaaatctggcattatattacttcacatttgtagatgttatggaatttaaggaccatgtttgtgaattgctgaatactattg

SEQ ID NO: 14243 - DNA, 532 bp, Homo sapiens
  misc_feature (1)...(532): n = A,T,C or G
gctcgcggcgcgcccgcccacaaaagcgttgctcacattctccctactccccagaagcacaangcnccnccagaggggcgccccccnnntttgatgcgtcgttaggcgggcaannnaacnacagagaagnnncccagngagagagnggcccacagaggggacacctttacgcgggacccgagnctggnggaaggggctctggagcctgctacagctattcatatggctcagagacattgaaccaaaattagaaaagggggtggctgacagtttctatcttgcatctcataggattgattttatgagatcaaataggattattcacataaaaagcactctaattataaagttttcatctaaccaaaaagtgatgaaagatgatactcagttttcttactcaagagccctcaaactcctctggtgaatggagggatgttaggaaaggagatgagaaatagcagcggccatgagaacatgcctcctcctttcatgagcctgagattcctggctgtcaaccctgtttatcttttct

SEQ ID NO: 14244 - DNA, 460 bp, Homo sapiens
  misc_feature (1)...(460): n = A,T,C or G
cttgattgccgtccataggccangcggnggaantccccggagtgtggtacttctcctagttgcagtcaggcttcatacgctattgtcctgctcgttagagcagccagcgggtacagaatggattttggaagagggagtcaccactggacctccaaggaagccacgtgcagacatctacaaccttcgatctcctgacgagtttattgttggccaaaaccaggctttgattgaaccaggatgaatgcgggtgttggaagtagaatatatatatacatataaaattggttgggagccacgtgtaccagtgtgtgttgatcttggcttgattcagtctgccttgtaacagaaactggcgatggaatatgagaggagccctctggaaagaaaaggacagaccctgtgctttcatgaaagtgaagatctggctgaaccagttccacaaggttactgtatacatagn

SEQ ID NO: 14245 - DNA, 460 bp, Homo sapiens
  misc_feature (1)...(460): n = A,T,C or G
cactgatagacctcgatagngccgngcaattcgagagctttaactatttccttatttttatgcaatcattttaaagattgtggctatatctattttaaatttgctgatgattgaatctaaattcaagtgaagaccacagcattaatcccaaaggagattttttttatgtttagaggtggagatattagggtaaatcagtatattgctcctgtcatcaaagtttttgttcatttgtgtgccacatcgaatagcagcacttctcaaagtttgtcaactggaaaaaagtgtttaaaactgtttttttcttaagcagatttggtgatgtcatcaatatctatgatatcgattggtaaaaggtctttctttgttgaggatttgagctctctttttaagagtttattttattttaaaggaacatatgctttgaataacaattctctgggcatgtttaactaaccta

SEQ ID NO: 14246 - DNA, 462 bp, Homo sapiens
  misc_feature (1)...(462): n = A,T,C or G
ggggaacgaatcgcctccataggccgngnggnggaattcggatctttgtcagttggttaatgctgatgctccttattggctagtgggcatgacagaaatgactcggacgtttggcctcgaattacttgagtcagtcctcaatgattttccgcaggtctttttacaacaccaagaatttagtttcctcctcaaagaaagggtatgtcctcttgtgataaagctcttttctccaaatataaagttcagacaaggttccagcacctcatcttctccagcaccagttgaaaaaccatattttcctatctgcatgcgtttgctgagagtagtatctgttctgattaagcagttttacagtcttttggtaagtgctaatttccttatgtatttgtgtatataggtgcatgttgcgccctttgtaaaaagtggtctgttgcagcgcatttagttctttcaattcaaccn

SEQ ID NO: 14247 - DNA, 463 bp, Homo sapiens
  misc_feature (1)...(463): n = A,T,C or G
atcgacatcgtatgacattagcccagngcggtggaattcgtcttgctctgttgcccaggttggagtgcagaggcgcaattttggctcactgcaacttttgcctcccgggttcaagcgattatctttcctcaacctcctgagcagctgggaccacaggtgcaagcctccacacccagctaatttttgtatttttagtagagatggggtttcaccatgttggccaggctggtcttgaactcccgacctcaggtgatccacccgcctcaccctcctaaagtgctgggattacaggcgtgagccaccacacccggcccagtttattatttttaatagtttttaattacatccctatgaattttctatgtatgagatcctattatctgcaaatagacatgttttacttctttctttccaatttgtattttagaattttttttcttgcctaatcgcctctggagtaatg

SEQ ID NO: 14248 - DNA, 460 bp, Homo sapiens
  misc_feature (1)...(460): n = A,T,C or G
ctaggatacgacctcgctagngcggngcaannnggngagactcttcatctttttcctaatcttagaggaaaactttcagttttttaatcttcttttataatgcgagctgtgagtttatcatatgtgacctttattatgtagaggtaaattccttttacctctagttttttgagtttttatactgaaagactattacgttttgtcaaacgctttttctgcatcattaaaatgatcatgtgatttttattcttcattctgttaatgtaatgtttcacattaattgattcacatgtcatgccatccttgcaccccaaagatgaatcccatgatgtgtggtacatgatgtattgtcctagtcatgctgtatggtccttttaaagtactgtcgaatttgatgtgctagtagtctgttgaggatttttgttaatcaaggacatttgtgcctgtaattatcttttcn

SEQ ID NO: 14249 - DNA, 435 bp, Homo sapiens
attgcatttcctagaagcttgcaggcttgcaagagcactgttggcaggaaacgtgatagaaatgaaagtcaggacacaatgtccccgaacacctcggttatccaaagcggctgtcgaggccatcgcgttatcaaattcgcttttatttactgtcgtctcctgcaccctcccgttccccagccaagagggcgaagagtgttttcccccaagaataaaaacagctccgcgatttgaaaaaaaaaaaaaaaaaaaaaaaaaaaaaaaaaaaaaaaaaaaaaaggcggccctttaaattaaagggcccctttaaacccccgttgaaaccccaggggggtctttttgaggcccccccttttggggggccccccccccccggttttttttttgccggggggggggcccccccccgtggtttttttaaaaaaaaggggaaag

SEQ ID NO: 14250 - DNA, 490 bp, Homo sapiens
  misc_feature (1)...(490): n = A,T,C or G
catcgccnccctaatggagancactagnacagngcggnggaattcctttagttaaagttccttatgtttccacctaaaagaattggagggacctatcagagtacagtatgtgggatattgtttgaaatgagaaaattgtgacaaagagaacacaggaaaatcaagatgaagccagggtaaagagagtacttagaagcattctttaaaatacagcacactgtgaaaatttggctcgattttcctagtagccaatgcagaaagagaaatgagttgagtgggataatctggtaccccagaaaagcatggctgttccggctctgaggcttgagaggagcttgtctggtgggagattggcgggaggtgtcggtggcagcctctgactaggctgtttctgacagtgtagtgtacaccccctacccccacctcactcccattctgtggcaccagggcggtcctgcctctgaaggacgggttctctggggctgtttga

SEQ ID NO: 14251 - DNA, 448 bp, Homo sapiens
  misc_feature (1)...(448): n = A,T,C or G
gtcgttttttaacctggganacctgatctgcgtgaaaanccnanaagngntnctaataaaaaagtaaatcaatcttaacagtgtatgagaactattctatcatatatgggaacaagattgtcagtatatggtaatgtttgggtttgtctttgttttgtttatggatagacttacagacttggaaaatgcaaaactctgtaatactctgttacacagggtaatattatctgctacactggaaggccgctaggaagcccttgcttctctcaacagttcagctgttctttagggcaaaatcatgtttctgtgtacctagcaatgtgttcccattttattaagaaaagctttaacacgtgtaatctgcagtccttaacagtggcgtaattgtacgtacctgttgtgtttcagcttgcttttcacctataatgaattgtaaaaacaaacatac

SEQ ID NO: 14252 - DNA, 470 bp, Homo sapiens
  misc_feature (1)...(470): n = A,T,C or G
cccccccattgangactactagnccatggtgggcattcgaaaggaatcggaaatacagtacctgaaacaggagagtagctccctcaaggatgagctgcagacggcactgcgggacaagaagtacgcaagtgacaagtacaaagacatctacacagagctcagcatcgcgaaggctaaggctgactgtgacatcagcaggttgaaggagcagctcaaggctgcaacggaagcactgggggagaagtcccctgacagtgccacggtgtccggatatgatataatgaaatctaaaagcaaccctgacttcttgaagaaagacagatcctgtgtcacccggcaactcagaaacatcaggtccaagtccgtaattgagcaggtctcgtgggatacctgaaatgcacccgcttcccggcccatgcaggagagtctgaaggaaggcctgacggtgcaagaacggttgaagctctttg

SEQ ID NO: 14253 - DNA, 460 bp, Homo sapiens
  misc_feature (1)...(460): n = A,T,C or G
ctagtttgcgtccctaggccgngcggnggaantcgtagggacctcctaacctgatttcatgacccattacccattaatgagtcacatcctttagtttactggtgctttatatcccccatatatccttattgaagttgagccttcttatttctaatataatcatgacttccactccattacatgacttttgatctttcatcttttttcaaaaaatgataaagaaaataaatttttaatctgatgaatgcaagacctctttaaattatcaggcccaaagaggcattaaaatgagataggagtcactgtctcacatccccttgagctaagcaattatttcaaagttgcctgctatgtggactctagactgtcaccaagtagccacaaattaacctaacaatgccatacactggatactataactcatacgctacagttcagcaatatatagccaatcactaan

SEQ ID NO: 14254 - DNA, 458 bp, Homo sapiens
  misc_feature (1)...(458): n = A,T,C or G
ggtaataaaactgagaccnctgttggaggccgtaattccacaacgggttccactgtggtggggtatcatggcaggagactcttaacctgcaaaggcctcagagatgtgaggccactgtgggtcgatgctttattccagccagggcagctgccaccactggactagtttgagctccacggagtgggaggaacttcctctgagcccagcctcattctcttctctctccaaagaaactccctgaggacagaggggcggactccacatcctgtgcccctctctctgtcttacctcttcggcagcagctcctctttctactcttcaggagctagatgtcccaagtgtctggaagaccttccagtgggcttctagacccttcaggcctgagatcctcccctctgcatagccttctctcgcggaagaacctccttctcagccgggcagtgaacgcctgtaatccc

SEQ ID NO: 14255 - DNA, 470 bp, Homo sapiens
  misc_feature (1)...(470): n = A,T,C or G
natcgagaccatngnnnaattgatgacccttagtccgtgtggtggaattaccagccactattcatggatgggccccatgacccaaacacctcccaccaggccccacctccaaacactggggatcagatttcaacatgaaatttgaagggaacaaatgtccaaacgatatcacatatggttacttttgttatccatatagagacgaatgtatctgaaaagaccaacccaggataagcagttcttttttccaatactcaaatatgaagtttggctttattttgcagctactatcaatgtttattacacccgtcaagtttattgtttctgcaaatatctggactcctaccttagtttagatcttctttacctgggctctctcttaggagatgtttcatgtcctcgaaattctttgcagaattgcttgtatatgagcatatttgtattttggaagaatgccggccagagaaaag

SEQ ID NO: 14256 - DNA, 447 bp, Homo sapiens
  misc_feature (1)...(447): n = A,T,C or G
ttggagggccccgngtttgtccgaccatagtccatgtggtggaattctgcttgtgcagagtgaggctggctggtggaacctaggcccctctgtcccccccaggtggcagtggctgatctctggtcaggcatgaggggtgcctccatgtatgagttcagtcagggtgtggaaaaacttatagagaaagatgcaaaccttcttggaaggccaggaggtttttgcaaatcttcaggaaggaatgagccaaaggtggctgttctttcccagcggtaattagacagatgtagatacaaaggaatgtaggggagcttatctaaagaccttgtttgctcatgttgtcctaagaccgacctttgatcatttgtgggcagaactgctctctactgggggattgacaatgttaattacccactaatggtgtttactcgagacttttgtcatttaatn

SEQ ID NO: 14257 - DNA, 462 bp, Homo sapiens
  misc_feature (1)...(462): n = A,T,C or G
natagattgaagtcgataggccgngcggnggaattcctccaatctttttaaaatataaatatttttgattgacaaatcataattatacacttatgggggtataaacctcaatttttgtaaccctattttggcattttcctgtccttacatctcagcttaaatgctccctcttttgggaggcctttttctgccttcaacatagtagagccttttcccccacccctctgtaacataatgccctgttttatttttactgcttttattttcatgctttgtgggtgtccccactggagtgtaagccctatgggagcaagggctgacctgtgactgttttatctccagggccaacagcagtgttactgtatagtatgtactcaataaatatttgttggctttaaaaaaaaaaaaaaaaaaaaaaaaaaaaaaaaaaaaaaaaaataaaaaaaaaaaaaaaatacccgg

SEQ ID NO: 14258 - DNA, 483 bp, Homo sapiens
  misc_feature (1)...(483): n = A,T,C or G
ngggagaggggcnnnnncctcgagaaactgaggnacctncgaggaanccggcggngatagggtctcgctctgtcaccaggctggagtacagtgatgactgctcactgcagcctccacctcctgggctcaaagtgatcctccaacgtcagcctctcgagtagctaggactacaggcacatgccaccaccaagcccagctatttttaaaatttttgtgtggagacaaggtctcactatgtggcccaggctggtctcgaactcctgggctcaagtgatcctcctgcctcggcctccaggagtgggagttggagttgatgcctggatacaggagctctgtgggtgggagtgagacaaaacacagggtcctgagctctggggaccaagcaatgtcctctggtgaaaaaaatcctggacttgctggcagaaaaaaaaaaagaaaaaaagaataaaaaaaacgaaaaataaaaaagggggccggcggggt

SEQ ID NO: 14259 - DNA, 479 bp, Homo sapiens
  misc_feature (1)...(479): n = A,T,C or G
gccccccattgagaccattagnncaatgtaggtcattagtccatgcggtggaattcgagaaggtgaatacaaagcagcaggcagagtaaaatctgctgggactgcctggagatttgtcaggagctgcagacaagtaccttggagcattctgttatttttggaaagttcaaatatgcagggacaaggaggttgctgactgtactgacaggctctaagtcattttctccaaaaactatctattcaattatcaggggctggtcttgaggaaggaaaaaaaaaaaaaacgttcccaaaattcagtttccaaaatttttttttaaggggtttacacacacacacacacacacacacacacacacacacacacacacacacactatttttaaagggtgttttttttttaaaaaaaaaagtaaaatttctgaggggggggttccccccccgttttttatggaaaaattttttttacttttcagagc

SEQ ID NO: 14260 - DNA, 472 bp, Homo sapiens
  misc_feature (1)...(472): n = A,T,C or G
gaggccgcgcttctttttctatcaacttcgntagaacggcannnggnggaatgggcttggaggggagagggtggatgagatggtaggcatttcagaaggtattttccaggtctattcattaactagggctgcggtaacaaattaccacaaactgggtggcttgaaacaaattttttgtctgacagtcctgcaggccagaagtctgaaatcagggcatcagcagggccgtgctccctcctagaccctgcgtagaacccttccttgcctcttcatggcatgtggaggtggccaagggtccttggattacttggctcgcagctgcatcactcccatctctgcctttgctgtcacatggtgtttcccccgcgtctctctctcttcttcttctaaggacaccggtcacattggattatggctcaccctaatgacctcatgtgactagcttacatctgctctgtcctagtttccaaan

SEQ ID NO: 14261 - DNA, 442 bp, Homo sapiens
  misc_feature (1)...(442): n = A,T,C or G
ntttgtagatcgttagaccatgcggnggaattcccagagcccaaatccacagcttccccaaatttcatcagctgccacttgacgacttctccccgtctctctgaggcccggaaaccacggctggaggtggggaggggatggcggctgaggtccattcctcattctcagacctcattgctcagttgcactatttggggcacagaataatcaccaaaagtgagaaaaacgagtttgggtggctggggaggactttgggactcttgatgcaaggcgcaacttgagaaaattctgggtgtgatatttgcacagacaccctcctttcaaaaacagccaccccccaagctattctcagctccacacctgcagccccagctaaggtaccaggtctcctgagcaaggcagagagaagccttgagccttctctgtgtcttctttcaagaac

SEQ ID NO: 14262 - DNA, 477 bp, Homo sapiens
  misc_feature (1)...(477): n = A,T,C or G
aaaaaaaangttgatncccctntnnanaattgcaganccntattcagtgtgctggaattcgagctgcctgcaggctcagccatcacctgggctggttactgggcagcctctcccacctgccccaactatgctcagtgacctccttcctgtcccctctcctgccatccctatcaccatggcatgagtaatgcacacgtgtattagtccattttcacactgctgataaagacatacccaagactgggcaatttacaaaagaaagaggtttgattggactcacagttccacatggctgaggaagccccacaatcatggtggaaggcaaggaggagcaagtcacgtcttacatggatggcagcaggcaaagagagaggacgtatgcagggaaactcctgtttttaaaaccatcagatctgccaggtgtggtggctcacacctgtaatcccagcactttgggaggctgaggcagggggatca

SEQ ID NO: 14263 - DNA, 451 bp, Homo sapiens
  misc_feature (1)...(451): n = A,T,C or G
nttagaacgatgatgaccattgcggagggcggnggaattcgtgctttgcatagccctggattagaaacatgttatagcagttcttggtatagagcaaactagaagaaccagcaatcattccactgtcctgccaaggtacacctcagtactccccttcccaactgaagtggtatgaggctagctctttccaaaagcattcaagtttggcttctgatgtgactcagaatttaggaaccagatgctagatcaaataagctctgaaaatctgaggaacattgtaggaaaggtttgttaagcatctcttaagtgccatgatgagcataacagccggccgtggtggctcacgcctgtaagcccagcactttgggaggccaaagtgggaggatgacaaggtcaggagttcaagaccagcctggccaacatgctgaaacctcacctctactaaaaatan

SEQ ID NO: 14264 - DNA, 443 bp, Homo sapiens
  misc_feature (1)...(443): n = A,T,C or G
cttcgacnttcgatgacaattactccangcggtggaattctttctttctatgtaattttagattcgccttacaatgtaaatcttcacattggagataatattggttggaccttgcccatcttcactctagccttcgtatttgtgaaggactcagccaccttccttcttcaccccatgcttctcaccaaatctttgttgtcattgagggcacttggataactcaagttgatatttatagctgatcaatctatatgtgtcacagaactatgctgcctaaagtgatcttggctccttaatggtccttttggccccttggatagttaacagctgagtaattctaatctcttctgtgttttccttgccttaaccacaaattgtggtgctttttgtatattttatgtataaatcacaaagttgaattctgactatttttaagacaaaag

SEQ ID NO: 14265 - DNA, 467 bp, Homo sapiens
  misc_feature (1)...(467): n = A,T,C or G
gaataaatttgataccctattgagngtggaggaacctggtgagaaaacaagaaatgggaagggggtggggagaggaatgggcatagaataaaaaggtagaaacccttgggattaaaggatgcaactgaaagagcaccaaaatatgcgtcattttttttaatatgctgtctgggacccacaattgggatgcctctgtggtatcaacttttacatttaaagaaagggcataagattagatcattcaaccataagtggatggaagaaacacattattataaaaccttacaattccctttgaagttgatcaggtgtcaaggcagtgatttggttttcttttacaaactttctttttccagaaaaatttttactgtgggtttggagaggtgtttacaataaattcatagcacagctccagaagggcccaccccatctaatatcctctgtctcagcagattattgaagaagaa

SEQ ID NO: 14266 - DNA, 405 bp, Homo sapiens
cctgtcatagccaacggaggatctcatgaccacatccaacagtattcggacatagaggactttcgacaagccacggcagcctcttccgtgatggtggcccgagcagccatgtggaacccatctatcttcctcaaggagggtctgcggcccctggaggaggtcatgcagaaatacatcagatacgcggtgcagtatgacaaccactacaccaacaccaagtactgcttgtgccagatgctacgagaacagctggagtcgccccagggaaggttgctccatgctgcccagtcttcccgggaaatttgtgaggcctttggccttggtgccttctatgaggagaccacacaggagctggatgcccagcaggccaggctctcagccaagacttcagagcagacaggggag

SEQ ID NO: 14267 - DNA, 467 bp, Homo sapiens
  misc_feature (1)...(467): n = A,T,C or G
natgacgatcattagtccaatggagtgccattcgtgagcacgaagaggcacagacaggtctccaaaatcgatgttaggatttgggtgctacctgacacagaagtaggtctaaccctccaagtactggggatgataggataatcaatgaggtatatatatatttgtcattttgtataaaatattgtgaaaattgaaggaggacactcagtaaacatcctgggactatttgtaagttatggcaaaaccagatgagagaaaagggacagtcccctctgtatcctcgttgtctcttagtaacatcaaattgtagttaaaaaaattttaaactatgtacaagctacaaaatagcatctctttcatggtatgtttgagtgtgtaattttagtttcttttctggttgtatttgtggtagtcagatgtgttggattgattccaactggacagagtaaggaattccagcatcctct

SEQ ID NO: 14268 - DNA, 466 bp, Homo sapiens
  misc_feature (1)...(466): n = A,T,C or G
aagagaaaaaantttcgagattacgtagtaccattaggcgcgagtggtggaattcaagtggtgaatacagaatacaaagccacagaatatggcttggcctatggccatttttcttatgagttttctaatcatagagatgttgtggtgcgactacaaggttgggtaaccggtaatggaaaaggactcatctacctcacagatccccagattcactccgttgatcagaaagttttcactaccaattttggaaagagaggaattttttacttctttaataaccagcatgtggaatgtaatgaaatctgccatcgtctttctttgactagaccttcaatggagaaaccatgcacatagaatacggcacagtctggtcctttggggcttgggcagggccgtgacacaggttctggccaatgatttgcaagaggaattgatcagtatcactttaagtcctgcatttaattgg

SEQ ID NO: 14269 - DNA, 448 bp, Homo sapiens
  misc_feature (1)...(448): n = A,T,C or G
nnnaaatcgagatcgttagtccagtgcggnggaattcaaagaaaccccattcgaaaatttgttcgtacacctgaaagtgttcacgcaagtgattcatcaagtgactcatcttttgaaccaataccattgactataaaagctatttttgaaagattcaagaacaggaaaaagagatataaaaaaaagaaaaagaggaggtaccagccaacaggaagaccacggggaagaccagaaggaaggagaaatcctatatactcactaatagataagaagaaacaatttagaagcagaggatctggcttcccatttttagaatcagagaatgaaaaaaacgcaccttggagaaaaattttaacgtttgagcaagctgttgcaagaggattttttaactatattgaaaaactgaagtatgaacaccacctgaaagaatcattgaagcaaatgaatg

SEQ ID NO: 14270 - DNA, 408 bp, Homo sapiens
ccctgcgtggccaagtacttccagtcgaatgctgaaccgcgctgcccccactgcaacgactactggccccacgagatcccaagtgcgtgggccctgaggagctcatgggaggggctgggccagcaggacgtggggcctggtgccagggaagcccttggagacagggccctgaagggctccagggtgtgtgggggtccgtgttagcagcttgaatcctagaagaagccactgcaggaagtaaaggctgagctacgtgcaccgctccagaggactttctagaacccagctgaaattccaacgtgtatgagcattttgtctagacaaggctctctctctggcagccctctcaggagggggacgtgaaagctatgtccacagctccctcagtttgttcctctctgaactggg

SEQ ID NO: 14271 - DNA, 441 bp, Homo sapiens
  misc_feature (1)...(441): n = A,T,C or G
ctagacttcgtagacattacncagngcggnggaattccagtattcgtgcttctactcttgcccttcaattcatatagcacaccagtcttttgcaagcccaaatacattctcatccctgctcacaacctttttattgctcttaggataaggcaaaaatctttaacatggcctcaaaggcactgtgtcgtctgactcctctctaactctacagttaatcctgtgttacgttctcttggtcattgatctttttctgcccccttggatgtatcatgcttcctcctgccccaggtccattgcacaagcttttccgtcatccaagaaccttcttactcctcattccattctcttgttttaacttctcttccattagatctcagtttgatcaaaatgtttttttacatggaagccttccgtgactttctgacttggtctcttctctcn

SEQ ID NO: 14272 - DNA, 465 bp, Homo sapiens
  misc_feature (1)...(465): n = A,T,C or G
cgggccgnncgnaataacctgaaacctacgnncttgcnggccagtanaaccgnngnaantngnananntctccttttcctttgtttttttggcccctcgcgggtgtgggcattgttggttagcaaaagtgcagcctgaagatggctgatggcaacgaggatctgcgggctgacgacttgcctgggccagccttcgagagctatgagtccatggagcttgcctgccccgctgagcgcagcggccacgtagccgtcagcgacgggcgccacatgttcgtctggggcggctacaagagtaatcaagtcagaggattatatgacttttatctgcctagagaagaactatggatctacaacatggagactggaagatggaaaaaaatcaacactgaaggtgatgttcctccttctatgtcaggaagctgtgctgtgtgtgtagacagggtgctgtacttgtttggaagac

SEQ ID NO: 14273 - DNA, 439 bp, Homo sapiens
  misc_feature (1)...(439): n = A,T,C or G
ntttgagatcgatagccttgcggnggaattccactgcaacgtctgcctcctgggttcaggcgattcttctgcctcagccacccaagttgctgtgattacaggtgctagccaccgcacctggctaatgtttgtatctttagtagagacggagtttcaccatgttggtgaggctggtctcaaactcctgacctcacgcaatccgcctgcctcagcctcccaaagtgctgggattacaggcatgagccactgtgcctggcccatttgtctatatatgagtaccacacatttaattattttgctaaataatagattttaatagctaaattttttagaaatgataaaattagaatcagtcttccttcacaacttacctgagtgcactttttaaccacatctggcccaggtgtggcattgagaagtgctataataaggtaacgat

SEQ ID NO: 14274 - DNA, 443 bp, Homo sapiens
cttcgacttttcgagacattagtccagtgcggtggaattccccggatcgcgcgggcgctcgacacgagctggccccaaggaaccccttcctctctctcccttgctgcatgcagatcacagccataggtggttcgcccttaccccgggcctgccttgacccttgacagtgcctctgccacggtcctttccgaatggagagaagggaatgcttctccatggcgaagttaggatcattgtatgctctctaggaagacatttttccgtttgcttttgttccaatgtcaatgtgaacgtccacatgaaacctacacactgtcatgcttcatcattccctctcatctcaggtagaaggttgacacagttgtagggttacagagacctatgtaagaattcagaagacccctgactcatcatttgtggcagtcccttataattggtgcata

SEQ ID NO: 14275 - DNA, 481 bp, Homo sapiens
  misc_feature (1)...(481): n = A,T,C or G
tggccccgcncgcgcncgcccgggattgagncccattgtagatcatctagaccangcggtggaattcatcaaaatgtccttgataattagtacttcactagttctcaaggacattttgatattactgccaaagtttgggtttatatcttccctttgagcagcattctatcagtgctgcctttagctatactcagagagcagcagttgaggaataggtttttactcaaaatctggccatttgtgaatcctgtaaaccttgtgatcttcaattactttgatgttaaattaaacacagactcttctataaatattttcatgagatactgtgttacacaaagtccttgttttaacttaggtatgggtaaatttacattggtggtattgcaggaatttttcaaaaacattactgtaatgaataactgagtttcctatagaagaacctgaataattacttttgtagtaaccaagcaagcatcatatc

SEQ ID NO: 14276 - DNA, 441 bp, Homo sapiens
  misc_feature (1)...(441): n = A,T,C or G
nttagaagatcgttagaccttgcggnggaattccttttatttttaagtgtgaatgttaaaggttgcaaaataataaaatgacctctgtggatttgaaatttggaataatatttcttgtccatattgatattacaactcagaggaatttcaccctgttattttatgtgtctttttagtgagtgaaggtcagtgtacagtttatattcttagtcacctgtcgtcaacttcttggtcattttctctggaaaaattctggagatgatggcaacttttagattattttgtgttactttttatgcaaacttgttcattgtgttcccagagtggccagtcataagtctgtaagcaacacctgcccttttagtgtcttccatgtcatcaccatctgtaataaataagtaaatgtgtatttattttgtaaaacataatacttggaagtat

SEQ ID NO: 14277 - DNA, 424 bp, Homo sapiens
  misc_feature (1)...(424): n = A,T,C or G
caacccttgtctaataccctccccatgggtgtcagctggatccataggcttgctgctgttgcacagaatacagcaaacatgatgagaggttgattctgtgattagttgacaaaagatgtgacttctgtcttggactcttttcaatggcttttttttttggcttcgcacattttgatgaaaaaaccttcccatactgaagaggctcacattatatggaattctggacaacagctgtcaaagtactgaatataccatcaagcatgtgagtgagattgattataacttgtgagagtctctgaatagaaaacccagttaagccatgcccagattcctgcaccacagaaacttcgagataataaaggttttttttttttttgggggggaaaaaaanggccccaattttttttaaaaattcctttataac

SEQ ID NO: 14278 - DNA, 442 bp, Homo sapiens
  misc_feature (1)...(442): n = A,T,C or G
ctagacncctgagacaattgcaaagggcggnggaattccggggatcttagccctggaaaggcagcctgcaaggcgctcatcccgcggtaggaggtacgctctcggcgctcactgctctccacgccggggacatttccaccgaatgtagcatgaaagggctctgctctacgtgccagccttgggtgagagctgatgctgaagacaccgcggtgggattccagctgtctgattaatgagaaacataatgtattttggtggtacatgccagagtcctgctctcccggcccttgtccgtccaccagcccctcctttgcaaccatcgctggatattaaaccatttcttccctttcctcttgacactgcagctgcagtcaacctcttccccaatttcaatgcgatggacccgattcagaaagctgtaataaaccatacattcggggtt

SEQ ID NO: 14279 - DNA, 449 bp, Homo sapiens
  misc_feature (1)...(449): n = A,T,C or G
aatcgaagaccattttggaagccgtnggaanncgcgaaatatgtgaattatattgaattttatcttaagtttggaattttaataagaattgtaaaaccatgtatagtatttttctgtggattactaaaaagttaatcataaagtagttttatatttaaaggatttaagaaaaaaatactctttacattcatcaccaaagtctgataatttggccgggcacggcggctcacacctgtaatcccagcactttgggaggccaaggtgggtggattgcttgagcccaggagttcgagaccagtctaggccacatagcgagacgccatctctaaatttaaaaagcaaaacaaacaaaagaatgaagtgtgataatttaatatcttgtttgtcatgcattactttttgctaatagaatttttactagtggtttagtatataaattagagaaccaa

SEQ ID NO: 14280 - DNA, 450 bp, Homo sapiens
  misc_feature (1)...(450): n = A,T,C or G
attgaaaccctacttgatgacatctgaacagncnggnggaattcatttgttagttttccctgactgtaattttctttctaccttgtataaatgataaaaatagactctaataaactgagtgtgctctggcatactagttattgacatgtttatattcacaaatataaactccaggctggctgtttttcttggtgaatgttctccaggctggttatttttcttggtgaatgtaatgtactgtctttttagagtaagttactaagctggttactaaatcaggaatattttagttataaaactttagatttttaagaatattggccaggcacggtggctcacacctgtaatcccagcacgttgggaggccaaggcgggtggatcacctgagatcgggagttcaagaccagcctggctaacatggtgaaacctgtctctactgaaaatacaaan

SEQ ID NO: 14281 - DNA, 442 bp, Homo sapiens
  misc_feature (1)...(442): n = A,T,C or G
nttagacgatcgttagcccatgcggnggaattccccagcggcccaccccatgcctcagcttcatgtctgtcccattcctataccatccccaccctgttgtatgtattataggatttgtattttctccttttttttcccccttccattccttctcccctcttgcattcaagattatgaaactttgctatgggccctgcacttcctttgcttcctcctgttcaccctggtggtgtacggatgaggcggggaggtgggacccccaaacatatatcagcccaacagccctaagtctccttctttattattaggaaaacaacaacaacaacaaacaaaaaaatggcgtcatgaatatgaacagcattgtcagatgaattagttgaagtggttttttttttgtttttttttttttttggcccggggccctcaaattaaggggataagg

SEQ ID NO: 14282 - DNA, 292 bp, Homo sapiens
  misc_feature (1)...(292): n = A,T,C or G
nttcgactttcgtagacccctagtccatgtggtggaattccccggctcgagcggcaagacttccaccttgtcctgcttgccttccttgaccatctaccttgaactaacccactcccagctcccagcctggcatgagcttggacagtctggaccgccaccctccctgaaccagggagacagcctctgggattggaggccagaggccagggtcagacccagccaggactcctcatttcatctcacagacacaataaaaaagcatatttgtcctgccaaaaaaaaaaaaaaaaaa

SEQ ID NO: 14283 - DNA, 460 bp, Homo sapiens
  misc_feature (1)...(460): n = A,T,C or G
cccgcattgatgaccaatagacagccctgcggaannccagattcctgtactcataaatcaaggcttgcattttccaagccttgattctgaggtctgttatttgttggctttttgtttaaatacacctataggaagactctgcccagactttctctctgagctcctgaacatatacattttacatagaggttttatagacatctcaaacttaacaaatttaacacatccaaaaaacaaacttttggttttctcccaaaacctgtttccttcacattctctatcattaaatgataccacaatcatccagtagcttaagccataaatatagtgatctctggatttatctatttctctttcaccctcacatctaaagtctgttgattctaccttcaaaataaagcttgagtctgtacacttctttctgtctctgctaccactgccctagtctgcactaaaatct

SEQ ID NO: 14284 - DNA, 359 bp, Homo sapiens
cccttttcctgtaaaacctgcccaagcccctggcttggggagatttttttggggagatttgagcatttttttggggagatttgagcattgttttctgtctttttgccagttgattcacaataaagtctttcttttctcaaaagcctctgccataacattggcttctgtaaacatcagtcagcaagtccattgcttgcttagtaataggtattcatgtttttatttctaggataaccattaaaagaatagtatcagcaacaatctcactactgggtatctacccagagaaaaagaagtcattatacgaaaaagatacttgcacacacgtatgtatagtagcacagttcgcaattacaaat

SEQ ID NO: 14285 - DNA, 443 bp, Homo sapiens
  misc_feature (1)...(443): n = A,T,C or G
ntttgacgatcgttagaccttgcggnggaattcgatctacagacagccatttataaaggtggatcagggccggacacggtggctcaacgtctgtaatcccggcactgtgggaggccaaagcgggaggatcgcttgagcccaggagttcgagaccaacctggccaacatggtgagaccccatctttacaaaaaaatatatatatccaggcatagtggtgtgcacctgtggtcctgtggtcccagctactcaggaagctgaggcagttgaggctgcagtgagccacgttctggccactacactccagcctgggcatcaaagtgacaagaccaaaaaaaaaaaaaaaatgtggattggagggaggcaaaaaaaaagtcaggaaagggggggaatgtaagcccctaaggacacaatcttactcacaatggtatctccaacattggga

SEQ ID NO: 14286 - DNA, 441 bp, Homo sapiens
  misc_feature (1)...(441): n = A,T,C or G
ctcgacttcgtagaccttagtccatgcggtggaattcgtttttccttctggggagcccactccaactgcacagaagttctgggcctgacaggtagattccagctggaaggcaggcccgtgcctggttttgcgtctgttcccctgagggccatcgtcatcctggagcttcaatggggccttggctcctgtctgcctctcagtcagagtcagggctgacaaaggactcagcttccttagcatctcagcagaaaccttgctctgaagaccagagacagaagggacagaaacaggagtgcctcctgctgtgccaggcccatgggcagtgcaggcagatccctgaaggtcagcactcctgggtcttcatatgccaacaggggcgctcttgacactgtgccttcattttccagcccacagcctgggtctcagggatcttgaggggtn

SEQ ID NO: 14287 - DNA, 443 bp, Homo sapiens
  misc_feature (1)...(443): n = A,T,C or G
ntttgtagatcgttatnccatgcggnggaattccccgactcgagccaagaagcgtctcatcatgaccaaatcattggaaaacattttgactttggctggggagtacttcttgcaagcagagctgacaagcaacgtcttaaaaacaggcgtggtgcgctgctgcgtgggacagtgcaacaatgccatccctgttgacaccgtccttaccatgaagaagctgcccatcacctatagcaacaggaaggaaaacaaggggggctacctctgccactcctgtgcggagcagcgcatcgggcccctggcgttcctgacagcctccccggagcaggtgcgcgccatggagcgcactgtggagaacatcgtactgccccggcatgaggccctgctcttcctcgtcttctgaggacaaggcgcacgttctccgcagtgcagagcagcttgcn

SEQ ID NO: 14288 - DNA, 465 bp, Homo sapiens
  misc_feature (1)...(465): n = A,T,C or G
ggtccgttttaatcgaaacccctnactgagatccatatccaagtgcgtggaattcggcaactgttgaagatgaagcagcagctgcaaagaaacctttgaatggtaaagacagggagaggtttctgacaggtaatcagcggagttttattaacaataatctacacactcagagcttaaatagatcttctaaaggcagcagtagccttgatagattatattccagaaaaatcagaaagcagcttgttcatcataaacagcaacttaacctactaaaagcaaagcagaaggcattggtagaacagatggagaaaaaaaaaatatatggagtgaaaacggccttcccgaaagggaaaagaaggggcggctgggggaggagggaaaggataatggccagggtcataccaaaccgggttgggggggttttaaaaacctactcagggcactttgaaggaaagcaaattgctg

SEQ ID NO: 14289 - DNA, 450 bp, Homo sapiens
  misc_feature (1)...(450): n = A,T,C or G
catcgagacctcattgacgngcggtggaattcttttttcctactagtacattacctatctagtctatatccaactgtacagaaaaaagtaaaccgcaaatgaaattttattattatgtattaaacagcatctttggagcagtctatattaggaggtgtgtgtcaaattctgctcatcttaggaccctagacagttcctctaagagagcctgccacccttcgcttacaaaatgcagaccctgagctaagaggtggtcttgggcaaatcaggcaaaacaattcctaaatctaaaacgtttatcagcttttgttttttttttttcctaaagggagataaagttggaagttaaaagcaaaaaagagggatggattaaaaaatatttaaataagaggccaagtaacatgaattgcctgaaatagactgtttcaggataaaaactgtatcttggcc

SEQ ID NO: 14290 - DNA, 488 bp, Homo sapiens
  misc_feature (1)...(488): n = A,T,C or G
gggtccannnnaaagcnnagactgatnaccctaggaanaactgatgtcactagtcaagtgcggtggaattctggggtttcaccattggccaggctggtctggaactcctggcctcaagtgatccacccaccttgtggcctcccaaagtgcttgtggccacccactttggcctcccaaagtgctgggtttataggcgtgagccactgtgcctggtcaggttccctcaatttaaggccatgtttccaattattaatctgaaaaagtacaataaattaattaggtatcttccatatgctttcagactcttttttgttgttgttattgttttgtttgttcgtttttaaaattttttttggtattttttgtagagatgagatcttgctatgaggtgtgggctatgttgcccaggctggtctcaaactcctgggctcaagtgatcctcccaccatggcctctcaaagtgttgggattacaggcatgaaccaccn

SEQ ID NO: 14291 - DNA, 448 bp, Homo sapiens
  misc_feature (1)...(448): n = A,T,C or G
cttgacccccctntttgaggacccttagtccatgtggtggaattccagggtcttgctctgttgcccaggctggagtacggtggcgtgatctcagctcattgcatcctccaccttcgtgctcaggtgtttctcccacctcagcctccccactagctggcactgcaggtgcctgccaccacatccagctgatttttgattttttgtagagactgtttcgccacgttgcccaggctgatttcaaggaatgctatggtgcctggccccagctaatttttaaattttttgtagaggcagggtcttgctatgttgtccaggctggtcttgaacttgcaggctcaagcagttcttcccccttggcctcttaaaacatacctggctcggcctcttgatgcattttgattccattggggtggggaggggtgggagaaaggaaattctantatcaaan

SEQ ID NO: 14292 - DNA, 491 bp, Homo sapiens
  misc_feature (1)...(491): n = A,T,C or G
aaaaattgaatccntctnnnnnttttgagtccctattcagtgtggtggaattccgagggctggacgcagtggcttacgcctgtaatcccagcactttgggaggccgaggcggtcggatcacgaggtcaggagatcgagactatcctggctaacactgtgaaaacccatctctactgaaaatacaaaaaattagctgggcgtggtggcagacgcctgtagtcctagctgctacagctgaggcaggagaatggcgtgaacccaggaggcggagctggcagtgagccgagatcacgccactgcactctggcctgggcaacagagcgagagtctgtctcaaaaaaaaaaaaaaaaaaaaagggcggaaaggaatttgggtggggcgggccctacccaaaagggtttttaaaaaaacaaaagcccgggagggatatttttttaagggccggccgggtttttattaaagaatattggaagccggttaaccatttgag

SEQ ID NO: 14293 - DNA, 451 bp, Homo sapiens
attgaagacactagtccttgaggagcatttcccccaacagaggggaaatgcgagggcacatcaagtggcaaaaaactagatttacaagaggaaagaggcgcattgttaaaaatggagattgcattgttgcagtttgcaggctacactcgctccctctctctctcccccccaacctcctctttttcctcttcaaaatttgtgccagtgcagtgtctccaccgggcaggattgaaactttggcaaacacgtatccattgcattcatttctttccccttgttttggtctggttttctggaatgaaagaagcctcttgttttacaaacctctttgcatttctaatgtggtttctttcagatttttattagatatgttacttaaatgggaattaagggtttggacagattgtggcacacaaacacacacaaaaacatgtctgttttcacatcccta

SEQ ID NO: 14294 - DNA, 469 bp, Homo sapiens
  misc_feature (1)...(469): n = A,T,C or G
agaggcacggnngnnccccaactgatgacaactgatagacctgcggaanncacccttgaagggctttattaaagaaataaaaaagaacttttgtatcttttatcctgggagcactgcgttttcctagctgtgttattcctggtttaattcagcagagaaggtaaggtgtgaacctacctgccttggagagggcccaggtcccaaatctcttcaaattcttcacatgtttaactttaaggatttgaaccatgaagtcataggttacagacctcagttttatgccccattggatnactttnttttttttttttttttttttttttttaaaccctaaaaaacctttttttgggggaccccttttgggaaaaaaccccttttttcccccttttttgggcaagtttaaatgtttttttcataaacggaagttttttaaatttttaaaatgttttgaaaaagggggatggtgtaa

SEQ ID NO: 14295 - DNA, 456 bp, Homo sapiens
  misc_feature (1)...(456): n = A,T,C or G
ggggcttttcctgagaccctaggttgagtggcggaattcgaatatgtagcctgttgtgtgtctcccactacttgtaaacagagcatcacattaggggcagggaggaggtggaatgatattggaggtgcttaaccctactcgaggaattaattatgaataaagagcttataattagctaacatgactagaaaacacatgacttaggtggagagttagctttcttttctagtttgtgtatgacttgccatttgtgacgtatacaccaaaagatctggtgttttagacttctgccattcacttggcatttaaatctctctttgcttatgctgttaacgagtatgccataggataggacaaattcagtaaacaggaaaacttgtccatatttgcatagacatttgtaggggtttctttttctttttctttttagaacttcaccattggcttaagaatgtn

SEQ ID NO: 14296 - DNA, 462 bp, Homo sapiens
  misc_feature (1)...(462): n = A,T,C or G
agtccgttttattgaaaccctnnctgagatcctcatccagagtggtggaattcgctgcatcaagccgaacgaagccaagaagcccatagactgggaggatagcagggtaaagcatcaagtcgaatatttgggtctgaaagagaacattcgagtgagaagagctggctatgcctatcggcgcatcttccaaaaattcctacagaggtatgccattctgaccaaagccacctggccttcttggcagggagaggagaagcaaggcgtcctgcacctgctgcagtcggtcaacatggacagcgaccaggtccagctggggaggagtaaagtgttcatcaaagcccccgagtctctatttcttttagaagagatgagagagagaaagtatgatgggtatgctcgagtgatacagaaatcatggaggaaattcgtggcccggaagatatacgatcaaatgagagaaat

SEQ ID NO: 14297 - DNA, 456 bp, Homo sapiens
  misc_feature (1)...(456): n = A,T,C or G
ntttgagaccatgagaccatggaagaagcggagcacttgagcccaggagtttgagaccagcctacgcttcatggtaaaatcatatctctacattaattaacaaaaattagctgggactacaggctcctgccaccacacccagctaattttttgtattttttgtagagacggggtttcaccgtgttagccaggatggtctcgatttcctgacctcctgatccgcccgcctcggcctcccaaagtgttgggattaccggcgtaagccaccgtgcctggcctgctttttacttttctaaaaaaaataaaaaataaaaataaaaataaaaaaataaaaaaaagctactctctgccatgtaccactattgttttatgtcattgtgttctgacttttcagagaagcagatattatacaaatatgagtattgtattatcaagtcttattattaggcattgaac

SEQ ID NO: 14298 - DNA, 455 bp, Homo sapiens
  misc_feature (1)...(455): n = A,T,C or G
ntttgagattcactagcacangcggnggaattctgtaaactgacctgactccattttgtttttaaatgtgtgggttatgttgcagctgttgcagtcccccagatacctattattttacacaatgtgacctataggaggacactgagtaatttacaaacacaactgcattcataaatgggaatagaacgtgaaagccagctctttcagaatatcctctattaatactgaatttagatatctttattccatttattatggnacaaataactgatgttttaaccagagtaatgacctcagtggatttgctttaaccctcacatttttttttaatgtttcacatgttacattattagctgaatacgttagaaaatgacagatggtagagacttccatagaattaagagggttctcatggaggggataggaagtaggtttaaagcctaccagtgtaacct

SEQ ID NO: 14299 - DNA, 481 bp, Homo sapiens
  misc_feature (1)...(481): n = A,T,C or G
aggggnnagtnncgnnncncnnngnnnnttttnaatcgagaccctaggttgagtggcggaattcgggcagtagaacggaggagtaatgtatactctaaataggttcatttcctgactctcccacttatctgtgtgaccctgtatatgtcacttaacttctctgtgcctctataaaatgaggaatgataataatatctacctcataggtttgtggtaaaggttaaaagagataatggatcaagcatttaatacagtatagtaagttggataaatggtatagagttgggcccacttttggaatcaaaaggaatttgtaaaagtgcctcacacatgcctgtcctgtagaggtgagcaagtattttcaatcccttcctgatatctttcctgtggctaagaatacttacaggcacttgggacccctgccttccttgctgtggactaggatgcctgtaggtaccacgttagaagagttgcttcttgg

SEQ ID NO: 14300 - DNA, 477 bp, Homo sapiens
  misc_feature (1)...(477): n = A,T,C or G
ggcaggcnntttgaaaccctactgagatcttagtccgtgcggtggaattcgaagaagaagagaggacgttagtgtcttaagttaatgttaattgatatattagaagtgtttattctgtcgggtgtggtggctcacacctgtgatcccagctactccggaggctgaggcaggagaattgctggaacccaagagacggagattgcagtaagctgagattgtgccactgcactgcagcctgggcaacagagtgagactctgtctcanaaaaaaaaaaaaaaaaaaaaggggggggttttttccttcccggtttaaaaaaaaggtttaaaattttttaagggcccttttttttttggggaaaaaaactttggttttataaaacccaaattttggggaaccaaaaattttttttttgtttaaaaccttggggtaaacaacccttttttttttttacccggaaaccaagggggggcaaataaa

SEQ ID NO: 14301 - DNA, 492 bp, Homo sapiens
  misc_feature (1)...(492): n = A,T,C or G
aggggaagggcgnnncnnnagnnnngnnnnnntttcgagatccctaggctagagtggcgtaattcgacacaacaaaagaaaactataggccaatatttttaatgagcataaatgcaaaactctttaaaaaaaaaaccctagaaaactaaatccaacagcacagaaaaaagattatacaccatgatcaggtggtattttcccccagggatgcaaggatgcttcaacctacaaatatcaataaatgtgatacatcacatacatcacatcaagagaaaaaagaacaaaaccttgtgattatctcaatagacacagaagtagggtttgataaaattcaactcctctttgtgattaaaaaaaaccctctcaacaaattaggtatagaaggaacataccttaaaacattaatgttagtatatgataaacccacagttaacatcgtactgaatagggaaaagttgaaagccttttctctaacatagaacaagacaaagt

SEQ ID NO: 14302 - DNA, 480 bp, Homo sapiens
  misc_feature (1)...(480): n = A,T,C or G
agaggggtnnnnnncctgagacctgaggaacntncgnggaanccgagaaggagaagcacaaagtgaaggccgaggaagagaagaaggccaaggtggctccgcctgccaagcaggctcagcagaagaaggctcctgccaagaaggccaacagcacgaccacggccggcagacagctgaagaaaggcggcaagcaggcatctgcctcctacgactcagaggaagaggaggagggcctgcccatgagctacgatgaaaagcgccagcttagcctggacatcaaccggctgcccggggagaagctgggccgggtagtgcacatcatccaatctcgggagccctcgctcagggactccaaccccgacgagatagaaattgactttgagactctgaaacccaccactttgcgggaactggagagatatgtcaagtcttgtttacagaaaaagcaaaggaaaccgttctcaagcgggaagaaacagn

SEQ ID NO: 14303 - DNA, 472 bp, Homo sapiens
  misc_feature (1)...(472): n = A,T,C or G
cgcgacggccccggattgagncccctttgatgacatctagacagngcggnggaattcctcacccggcccggacacggacaggattgacagattgatagctctttctcgattttgtgggtggtggtgcatggccggtcttagttgggggagcgatttgtctggttaattccgataacgaacgagactctggcatgctaactagttacgcgacccccgagcataaaccagtgaccaactctagggacactcaggaagtgcctctggaaaaggctaagcaggtgttgaaaattatagccagctacaagcacaccacttccatttttgatgacttctcacactatgagaaacgccaagaggaagaagaaagtgttaaaaaggaacgtcaaggtcgtgggaaataaaaggcagttctacacagactgcagcaacggttgcatctgcatatcctaagaggaaaaaatgaccttcaaga

SEQ ID NO: 14304 - DNA, 457 bp, Homo sapiens
  misc_feature (1)...(457): n = A,T,C or G
ccccactgattgccttacatcgngcggngcaattcgctagatgacaaggtatctctatgaacttcaaaatacaactaagtgaggacaaaccactgaaccacatagtttcagtatctgtgggaggaagtagaaggaaggcagctggtttctgacagctctgcaaattggagaactacaacactgcccacagtttctcaactacaaagtgcagcgggccaatctaagaacagacactgaaactgggaagtgactacagaatctcatttgcagatgaatgttaaagcaatatgataaggtctgctgattgcattagagcagtctgggttttacgctgtgtacctcttgaagcttatgagacaaagcccagcactgaggacaaacttctagaattagaatccaaatgggcaggatgggtaaaataggacaaaggaaagaagatctagataagtattgggag

SEQ ID NO: 14305 - DNA, 457 bp, Homo sapiens
  misc_feature (1)...(457): n = A,T,C or G
nttttgatagccgtccattagaccgngcggtggaattcgagattttcaggtgggagatttggtactcatcatcctagacgaacgccatgacaattatgtgttatttactggtagtcctactttatattttctacattcagagtctctacctgccctggatctcaaaccagcttcaggtgcatctagaagaccctgggtactcggaaaagtaatggaaaaagaatactgtcaagccaaaaaggcacaaaacagatttaaagttcctttggggacaaagttttacagagtgaaagccgtatcatggaataagaaagtataacttatggacaaaattaatacattctatgacatttttttctgatttgtcctgcagtgctcattcatcactccaaaaacagcaggccatctttttatgcaaaagtcagcgtgacaatatacttcactggtgtacatcggt

SEQ ID NO: 14306 - DNA, 449 bp, Homo sapiens
  misc_feature (1)...(449): n = A,T,C or G
nattgacgaccactagaacacgcggtggaattcttccagtggttttaaaatttactgaagtttttaggtcaattatgtatgttgactaaatttacaaataaacttgtttatccaactaagtgtccaaaacctaaattgaatgtactaagttttcacatgtcccattatctaggtccttgtatactaatgttttgaacttagatcatttcaggtgttgtttggtggataaaggaaccttttatttataaagatactgtagaaagcatgtgaacagctctctgcttgattaagatgccataatagtgctgtatttgcagtgtgggctaagacaaagtatattaataagcttttcagcccccccactcccgttccgtagtgtagaagcccacaggtgtagaactcagtcttaaacttcagtatgaaaccagtttccttgtgcgatgatggcn

SEQ ID NO: 14307 - DNA, 466 bp, Homo sapiens
  misc_feature (1)...(466): n = A,T,C or G
atcgacnccntnatcgagaccntaggcagnngcgnggaattcgaacaagaccctgtagtaatagtaataatagttgaagtttggccaactcttaataaagttattttggtaactaatgttttatggcacttaagaataattagcagcgttaaattttgtttgtattaagcacttttaattttatccttcctaaaaatagtttattgtatctgacaagaaacttacttaaccattgtgtccttcccatcttttttgtcatctttgttttcttcaaatgccctcctcccatctgccttgagattcccttgtcttcacttaaaagccagagtgcaagtcatgatttgcgggagggctcttgaaccacttctggctgcaccacaattctgtacttgagtatcacagtcattgtttttgagacaaacatttttataattctaatttgggttaataaagattttaaatattn

SEQ ID NO: 14308 - DNA, 469 bp, Homo sapiens
gggctacccccaatcgagatcacatgaagagcgtggaattcctgttggcttatttgagttcagtggtgaaacaaacagattcttttcaacggctggaccggatccccagagaggccgcctctgctgtttttctggagcattttcaaggaagcaccttgaaatggcttcacgtctctcattgtctaactgtcccagatggctccgcactgccctggggggccgtagcacaccaagtggcaccagcattgctgggagaggcactttcccccatcagcccaggagcagcacataccccgcttcccaaagtcacagaggagcagatagcgtcagaatctgtcatgtcaggaggtgaatatcctctcctgctgcctcaagggtaaaagagcaggaagaaaggctcatgcttggcccttagtcttcactggagagaaagggaaggaacagctgagggaagaggaagggtaggcca

SEQ ID NO: 14309 - DNA, 463 bp, Homo sapiens
  misc_feature (1)...(463): n = A,T,C or G
gggccgttttntttganncccctnnatcgagatccctagtcagtgtggtggaattcggtaggtgtcacttgtgtgtatgtgtaagtgaagtatgatgcatgctcattcacttggtccctttgaaataagggaaaggatcacagtgctgctgggccatgatggtatgtagaagggtctgtcagcacacatggaaagcccccatttgcacagatgtagaactttaataatccagatgcaatcattggaagtatttaatatgcaattggtagcaccttagctaattaatctgcatatgaagcattttctgatatatttaataagaggtatagaagctcttcaagcattaaaatagagttgatgtttcattccatttgttttatccatcaaaaaatgcactctcacagtggagttgaagtctaatacatgatacatgtgggcctgttagtcttcgaagcttccagat

SEQ ID NO: 14310 - DNA, 553 bp, Homo sapiens
  misc_feature (1)...(553): n = A,T,C or G
natcggaccacattccagtgtcgtggaattccgtagctccatcgcattntatgtttctggcgagaagggaacggagttttcatcaggtagattggtttttgtgcggccgtcctccaccgtttcctccaggacagcacctagtcgtggccggaggagtctcagagctgtcagaaagaataagactgattttatgggaaaattaagcagatgctccagtttgagaaacctggatctgcgatctgtttgtggtctctatgaataaagaaaagcaaatagaatcttatcaggtaccagcatcaagatgatttatggtaataagatataaaaccaaggaaaataacctaaagtctgaaaaagaccagaatcgaagtttcctgattcatattttaatgttttgaaatttatactccaggctgggtgcagtggcttgtgcctgtaatcccagcacttttggaggccgaggcggccggattgcctggagtcaaagttcagacagcctgaccacatggtgaaacctgtcctacttaaaatacaaagagctggggcatgaggg

SEQ ID NO: 14311 - DNA, 562 bp, Homo sapiens
  misc_feature (1)...(562): n = A,T,C or G
nattgaggnccatcgaacatctatccgngnggngcaattcctttgaaagggcacttccctgatgagactcagaanagacaaggtaccgtagaaacgtgttatctatggtactggtgtaagcagccagtgcaagagagaactcgcaactgtcctcctgacttgacttctccatttgccagggcggagcacggtcccacttgcatggtgcttcacccgttggctggaagtccctctaagaccaaacttacgtggctactcagcatcgacctcaaggtgaagggcatgggagggggacctggaaggcaggtggtagtgagaaaaacaggctcttcccattccccccatgctgcagaaagaatcctcttctattctgatagaatcacaggctgtaagacagggaagggtctggagtgatggcctaactgctactctaccatctccaaagcctgtgatggccccctcttcttttttttttttttttttcgagactcattttatttcttgccctcaggctggagacacaggatgtggctaagctcaaccgaaccttccgcttccgggt

SEQ ID NO: 14312 - DNA, 407 bp, Homo sapiens
  misc_feature (1)...(407): n = A,T,C or G
agcaacaccccccatgtctacaaaaatgaaaaaccaaaaagcaaaccaaaagaaaaatctgaaatttccatctggggattaacttctgtctttctggtgaacaatatagcaattcacgcattcttcaagcagcaaaagttcccggaacaattagggaagacgtatggtctgaatttatccaggcagtgggtctgctttggtttttgctggaaatttatatcagtgtctgggctcccaagaacataaatgtaattgccaaagcaagcagtgatgtggggtgtttattttcttttactcatctaggaacttgacgcagctttatatttaataaaataatagagattgggnnnnnnnnnnnnnnnnnnnnnnnnnnnnnnnnnnnnnnnnnnnnnnnnnnnnnnnnnnna

SEQ ID NO: 14313 - DNA, 454 bp, Homo sapiens
  misc_feature (1)...(454): n = A,T,C or G
attganncccattgtggacccctagtccagtgcggtggaattctggaactcagaattaaagatctggaatctgaactctccaaaataaaaacttctcaagaagactttaataaaaccgaactggaaaaatataagcaactctatctagaagaattaaaagttagaaaatctttgtcaagtaaactaaccaaaactaatgagaggctagcagaggtcaacaccaaacttcttgtggaaaaacagcagagcagatctttgttcaccactctcactaccaggccagtcatggagccaccttgtgtgggaaatcttaataatagtttagatctcaacagaaaacttattccaagagaaaacttagtgatctctacctcaaatccacgggcttcaaataatagcatggagaactacttgagcaagatgcagcaggagttggaaaaaaatataactagag

SEQ ID NO: 14314 - DNA, 472 bp, Homo sapiens
  misc_feature (1)...(472): n = A,T,C or G
attgaaaaccnttttgagacatctgtaagtgcggtggaattccctgtctctgctaaaaatgcaaaagttagccaggtgtggtagcacacacctgtagtctcagctactcgggaggctgaggaatgagaatcacttgaacccaggaggtggaggttgcagtgagccgagattgcgccactgcgctccagcctgggtgacagagtgagattctatctcaaaaaaaaaaaaaaaaaaaggcggaccttagaaaaccttttgggccttaattccccctcctagaacattttttttaaaaaaaccctgcccaattgggaaccccctaccctttaaaagggggtgggggcattgggaaccgggaaatttaaattaatttttaataacctaatccccaaaacaaaggaccaaatcgtttttaaaaaatattaaggggttttggggggccgggagggggggttcacccttgaattcccat

SEQ ID NO: 14315 - DNA, 461 bp, Homo sapiens
  misc_feature (1)...(461): n = A,T,C or G
ngggtgccgggggggtttcccttgaaacctacggctagncaggctaacgaaannnctgggacacagcgcctgccttcgagggccgcaaggagatctgggatgccctcaaggctgccgcctatgctgctgaagccaacgaccacgagctggcccaggccatcctggatggagccagcatcaccctgcctcatggcaccctctgtgaatgctacgatgagctgggcaatcgctaccagctgcccatctactgcctgtcaccgccggtgaacctgctgctggagcacacggaggaggagagcctggagccccccgagcctccacccagcgtgcgccgtgagttcccgctgaaggtgcgcctgtccacgggcaaggacgtgaggctcagcgccagcctgcccgacacagtggggcagctcaagaggcagctgcacgcccaggagggcatcgagcccatcgggcag

SEQ ID NO: 14316 - DNA, 515 bp, Homo sapiens
  misc_feature (1)...(515): n = A,T,C or G
tctccttctttcgactcgtgtgtagttccatatactattattttcaatccaaacggggaccgcgccctcnaatgagaccttttgaaggctgtggaaancgccaaagggaattcattacctcaagcgtttattctttggtttacagacaacctaattacattcttttaggtatttaaaaatgtacaattaaattgcttttgactatagtcactctgtgtactagcaactgctacatcttactctttctaattatttttctacccattaatcttccccacttcccccagtcccctgctacactttccagcctctggtaacaatccttctgctctctgtctctatgaattagtttaattttagctccagcaaatgtgtgagaacatgcaacgtttgccttcatgtgcttggcttatttttcttaacataatgacctctagttccatccatgttgttgaagatgatgggatcttgttcttttttatgattgaaaagtactctgttatgtatgtgcacca

SEQ ID NO: 14317 - DNA, 468 bp, Homo sapiens
  misc_feature (1)...(468): n = A,T,C or G
ctttgagaccacattgaaggccgtggaacnacgcgctnaagcctgnnanctcatctctctgggaggccaaggcacgtggatcacgaggtcaagagatcgataccatcctggccaacatggtgaaaccccatctctactgaaaatacaaaaattacccaggcgtggtggtgcacacctgttgtcccagctactcaggaggctgaggcacgagaattgcttgagctcgggaggcggaggttgcagtgagccaatattgtgccactgcactccagcctgggcgacagagcgagactccatttgaaaaaaaaaaaagggtagaaccggtttttccctccccccaccaggaaaggaaagctctggttgtcccttgccctcacctgcattggggttgctggcgtttgagtaacagcaatcctggcggaatgctgaggaatcccattgtgctgtcggttacgcagaacccttgtg

SEQ ID NO: 14318 - DNA, 452 bp, Homo sapiens
  misc_feature (1)...(452): n = A,T,C or G
atcgacncccctnnttgaggacccttatnccangcggtggaattcctcttctccagcaaactcaagaagaggagccttccacacagtcatcccaggcagttgctgcccccttgggccctttgctggatgaggccaaagcccctggtcagccagagctctggaatgcactgcttgctgcttgccgagctggagatgttggagtgctaaagctgcagctagctcccagccctgcagaccctagagttctgtctctgctcagtgcccccttgggctccggtggctttactctcctgcatgcagcagctgcagctggaagaggctcagtggttcgtctgctgctggaagcaagtgctgaccccactgtgcagtgagtaaaggtccccatcctgagtcattttgggtatagagaggataatttggaggttaaagntggcattggctacttgggcata

SEQ ID NO: 14319 - DNA, 476 bp, Homo sapiens
  misc_feature (1)...(476): n = A,T,C or G
tgggccacnnnnnagaanaggctgagaccntgngannactgagtccctcgtacangcggtggaattcccctgctttaaagggttgtttgactaggttttgctaccccacttccccttattttgacccatcacaggtttttgaccctggatgtcagagttgatctaagacgttttctacaataggttgggagatgctgatcccttcaagtggggacagcaaaaagacaagcaaaactgatgtgcactttatggcttgggactgatttgggggacattgtacagtgagtgaagtatagcctttatgccacactctgtggccctaaaatggtgaatcagagcatatctagttgtctcaacccttgaagcaatatgtattataaactcagagaacagaagtgcaatgtgatgggaggaacatagcaatatctgctccttttcgagttgtttgagaaatgtaggctattttttcagtgtan

SEQ ID NO: 14320 - DNA, 451 bp, Homo sapiens
  misc_feature (1)...(451): n = A,T,C or G
nattgaagaccactagaccaccgtggtggaattcggagagcgtttcggggagcgtggtttcttcatcaagcctactgtctttggtggcgtgcaggatgacatgagaattgccaaagaggagatctttgggcctgtgcagcccctgttcaagttcaagaagattgaggaggtggttgagagggccaacaacaccaggtatggcctggctgcggctgtgttcacccgggatctggacaaggccatgtacttcacccaggcactccaggccgggaccgtgtgggtaaacacctacaacatcgtcacctgccacacgccatttggagggtttaaggaatctggaaacgggagggagctgggtgaggatgggcttaaggcctacacagaggtaaagacggtcaccatcaaggttcctcagaagaactcgtaagagcagctgtcagggaggcccagt

SEQ ID NO: 14321 - DNA, 480 bp, Homo sapiens
  misc_feature (1)...(480): n = A,T,C or G
ggcccccccccncccccttcgagcccccattgtagatccatatcagtgtggtggaattcttttttttaaatatatttgcatcagaaaatttaaaattgccttataaccatggccatctttgattttaccttgtttttttctcttgcttttattcagtagttcatcaatttttattattcctttcttcaaaatatgtatgtccaccctttcctcttcattctcacagtctgccttaggggaggtatgaatcatttcatttactgattcagtattattctgatcatcccttgggtctccattcattctcccctcgtttccattgaacgaataccaccatgaggtcagtttagatctttcagcgtaagtgagctgcttagaaaccctcagtggcttcccatctgcctataggataaaattaaaattcaagactcctttctctatagcctgcctccaactgatttctctgtcctctctcttact

SEQ ID NO: 14322 - DNA, 455 bp, Homo sapiens
  misc_feature (1)...(455): n = A,T,C or G
nttcgatagcagaccatctagnccangcggtggaattcgaaaacatcaacagatattattgtcagaactatagttgttcctctattacaaccatggtttggcttcagagaaaaacagaaatagtggaagcattttgtgagtattatattttattatttatatgcttgtgtgctatgcttcctttatatcagtagaatttgtaatgaactatgggtgcatatatatgtacactttttttccctgagagtagttgctaaacatttacatcatgcttctacatataatctatcatccaaactggaacacttttgagagtaaaagattgtgctgtaaataaacacatcagaatagcaggtgtaaactaacattgtgctgggcaaacaaggatgcaaggtcacctttcttataaggatcttacggcagtgttggaagcaatgctggggtaagcagtggcn

SEQ ID NO: 14323 - DNA, 478 bp, Homo sapiens
ccgccccccccccccccattgtagacatatggaagtctgttggaattcggcgcgatctcggctcaccgcaacctccgcctccaaggtttaagcgattctcctgtctcagcctttcgactagctgtgattacaggcattcaccaccaagcccgtctaattttatatttttagtagagacgggatttccccatgttggtcaggttggtctcgagctcccgacctcatgggaccgcccgcctcgacctcccaaagtgctgggattgcaggcgtgaaccaccgtgcccggccttgcccgcatgtgttttgaattttgctgcccggaattcactgcgaggactgggatcacccgtcaccccgccctggtctacggaaaatgaaatgtgtttactgatatagaaacggaataacggcgctgtgggctggggagtgccgagctgccttcaggcttctggtctccagctgcagggcactcacacct

SEQ ID NO: 14324 - DNA, 465 bp, Homo sapiens
catcgccccctattgtagaccatagtccatgtggtggaattcactactaccatcccatcctcagagtctggccccattgggtcccattgatcccatgcacctctcccttgctgttaaagcccaggatctcgaagctgatgctggaggttcggccagactgaatctcatgcaggtggcggaaaaggttgagccgagcccggccccgcccattgtccagctctccctgggtcaggactccaagcagagttgacttcccagagtccacattccccaggacggccacacggaggtctaggaactgtggatgaattgccagagataagaactccaatctctcacccctctaactgaagactgggtcaagggcagtgacgctccctagggagcaagtgatgaactggaagcccccaggatcccaggccaggagacagcctgccaccacagggcccttccacagtgtggaca

SEQ ID NO: 14325 - DNA, 446 bp, Homo sapiens
  misc_feature (1)...(446): n = A,T,C or G
attgatgactttagaccatgcggaggaattctagccatgctggacagcgccgcccctgaaaagcagctccccggtttcacccagaatgccatcctgaacctcctggaaaaggtggcctgatggccaagtggcctcggatgccaggctcaatcctttgaacttttcctgtgggctgtcaggacccatagaaggtctttgagcaggtgagtttggagcagatctggtaggcaagcgaacagatggatgcgtgcactggagattccgtgggttcccctgtgtacatctcttccctttgggaaactgccctgagtgaggggctaagggcaggatttgcattgaaatcctagctttgctgctgtcagcccaacttttaagcaacagggtcttggtttgatgtgacatttccaagtccatcttgtatcacaacctgtcagctgcagctcacn

SEQ ID NO: 14326 - DNA, 546 bp, Homo sapiens
  misc_feature (1)...(546): n = A,T,C or G
gatcgaatacagtncgagtggcgcaattcaagagaagcctcattggttcacagtcatgcagctcatactgtccacccttgtattctcagatgcaggacaattgcattttagttttattttgtggaggtgcagaatatttactctttctgtccaacccttgattctgccgaggaagacactgatggtttgatgagtgattcagctgtttttggctaagggcttttggagctgatggcaggggtttgatgaatccaaatgagctctagacattatcacagactgaatagatcttaactgtctcctacatgtgtgttttcaaatgtgtatagatgctattgttattaataaagttaccaattaatttaaaanaaaaaaaaaaaaaaaaaaaaaaaaaaaataaaaaaaaaataaaaaaannnnnnnnaaaattaaaaangggggccgtaaaaaaaagggggcgcctaaacccccgttttaccgctgcggggtttttttttccccccccttggtgttccccccccgcgggggttcttcccgagggggccc

SEQ ID NO: 14327 - DNA, 474 bp, Homo sapiens
  misc_feature (1)...(474): n = A,T,C or G
ccatagaaaactgacangcgtgncgaggaancnangacacattactcaaaacgtctcctagtcgtcaagcaacacatactgtagtcgtaaattatataagtccaagccaggagttttattattctcccaaaagagaattggcatatttatgctgcaaacataaggcacagctgacttacataccccttttgggtatacaccaccatttgggtgatgtggattgttggatgctacagtatggtgcctggcaatcagggtggaatatttgaaattgggaaccgacctagcttattggagagctattgtcaaatatagtcaaaagaaaatatgcgaaggaaggtacataacccaaactgaagagatttgtgttttctaaagtgttctgattgagaaattttaaaaactagaattagcctcagccatcagtgaagtctagaaagccttcgttggaattagattgtctaagtacgctgg

SEQ ID NO: 14328 - DNA, 453 bp, Homo sapiens
  misc_feature (1)...(453): n = A,T,C or G
ctttgatacatctacaccgngcggnggaattctanaaatgcaatatttttaatttattctactgaaatggtttaaaatgatgccttgtatttattgaaagcttaaatgggtgggtgtttctgcacatacctctgcagtacctcaccagggagcattccagtatcatgcagggtcctgtgatctagccaggagcagccattaacctagtgattaatatgggagacattaccatatggaggatggatgcttcactttgtcaagcacctcagttacacattcgccttttctaggattgcatttcccaagtgctattgcaataacagttgatactcattttaggtaccaaaccttttgagttcaactgatcaaaccaaaggaaaagtgttgctagagaaaattggggaaaaggtgaaaaagaaaaaatggtagtaattgagcagaaaaaaattaatt

SEQ ID NO: 14329 - DNA, 453 bp, Homo sapiens
  misc_feature (1)...(453): n = A,T,C or G
cttgaatagcagacattagaccangcggtggaattcgtggcatgcacctgtggtcccaactactccggaggctgaggtgggaggattgtttgagcccaggaggctgaggctgcagtgagccatgattgtgccacttgcactcaagcctgggtgacagagtgagactgtctcaagaaaacaaaaacaacaaaaacccaaacaattatgtttgccactttgcttttctgtaaaagttttggtatctgctttgcctttgctttcatggtgctcctttggataagaacttccatttctactaatagtgattgctaactacagactacaaatgatacagtgggaatagcttacagggcctggaagaagcagcaggtgatggggagcctacagcaatgagccttggtctgacccccacccccacctcatcccaaccacccaccacagtcattctctggt

SEQ ID NO: 14330 - DNA, 464 bp, Homo sapiens
  misc_feature (1)...(464): n = A,T,C or G
aggggcnnnnnnnnttttgtagnaccactagtttagtgtggcggaattcggcagcggctgcagcgctctcgtcttctgcggctctcggtgccctctccttttcgtttccggaaacatggcctccggtgtggctgtctctgatggtgtcatcaaggtgttcaacgacatgaaggtgcgtaagtcttcaacgccagaggaggtgaagaagcgcaagaaggcggtgctcttctgcctgagtgaggacaagaagaacatcatcctggaggagggcaaggagatcctggtgggcgatgtgggccagactgtcgacgacccctacgccacctttgtcaagatgctgccagataaggactgccgctatgccctctatgatgcaacctatgagaccaaggagagcaagaaggaggatctggtgtttatcttctgggcccccgagtctgcgccccttaagagcaaaatgattt

SEQ ID NO: 14331 - DNA, 477 bp, Homo sapiens
gcgccccccccccccatggagcccccattgtcgtccatagtccatgtggtggaattccccaagttcctggactcgaattttctgttggcaaataagctggtcagaacttaggaatgtagtaagttgatccaggaagaagttgaaggtttctatctgtgtttttctgtgcggttgtgtatgtgtaacacgtttgcagaaatagttgaagcttattattttcttcaaaagatcttattttctagtgtgtaaatcacaggtaattaaatatgagttaaagtaagagagagacccttgggctatctcagacttagctttgagagagagaatgatcatgggtctaaggcatcactcttggttttataggtttggaaactcaatgttattagttccatctaggagttatcaatgggggaatgggtttacatgcatcagaattgtaagatactgctaagaatgacagttcattaattgatgaga

SEQ ID NO: 14332 - DNA, 407 bp, Homo sapiens
  misc_feature (1)...(407): n = A,T,C or G
ccagtcctctggcccttgcctagccctgaattgcttctctaagctggtgttcccatgcacagggccattcaagaagggctgggggagtgtgtgtggcaataaagcttgaaggcaccgtgaaaaaaaaaaaaaaaaaaaaaaaaaaaaaaaaaaaaaaanggggcccttttaattaaaagggccctttaaaaaccctaaaaaaacccaaatggggctttttatttcccaaccattttgtttttcccccccccccgggtttttttttaactgggaaggggccccccccctttttttttttaaaaaaaaaaaaaaaatttttttccatttggggaaagggggttttttttattgggnnnnnnnnnnnnnnnncnccncccggggcgagaaggggaggcatatttgacggc

SEQ ID NO: 14333 - DNA, 452 bp, Homo sapiens
  misc_feature (1)...(452): n = A,T,C or G
nattgtacgtcactagaccaccgcggtggaattcggtgctttgtgtaaatacatctttaacatttgggtggagaggggccttaagaaggacagttcattgtaggaaagcaattctgtacatgagtttaagcattcttgttgcattgtctctgcagattctatttttgtttacaatattaaaatgtatgttagcaaaatgggtggattttcaaataaaatgcagcttccacaaaagttttgttatggtattctggtctgagatgcattttcatttttcctttctctttttattatcaatattgtcatttttccctaataaaatatacccaggtgattatatttgttgatctaccaaaagaaaaaaaaaaaacataaaacaaaaaaaataaaataaataaantaaatgcttcacgagaggccatgactctgaaaagccggctacctccaaaggt

SEQ ID NO: 14334 - DNA, 465 bp, Homo sapiens
  misc_feature (1)...(465): n = A,T,C or G
ctaaccatcgattcccttcgcttgatcgcattcccatatcntgctctgtgcagcagatgacagagctgaggcaagtttcttctcggatcctgccaaacttatttatagttatttcagctctgaaaaatcagcttcccaattctttatacaaaattggaggtgttagaaaatagaaattatgctcacagactatatctttaagtaaaaaaatatcctgatacttgtccacatctattggtgtagggaaatatgattaataattaagaatagttttagtaaagtactgtgtgcaacacaggcaaagtagtaagaactgatttttttaaaaaaactttttaaaatttactcatttgtaagaatttttttattatcaaaaatgtttagacacgatggagaatatatttcctcaatataatataatgcttcaagcaccagtacctgccattcactaatccttagaccatg

SEQ ID NO: 14335 - DNA, 405 bp, Homo sapiens
attttgtggtcaatttttcaaggtttaccttttaggagctctgtagtcctggataagtctatttcatgtgtatatatctctgttgcagagtgtagacatcagttggaaggttttatgcggctggtcgattttgtgtgcaggtggttattgctgttgtacagttgagctttctttaggctgttgctttttggcagcgatacagaacagaggtgtccttagaggagtcaaaacttaaaagaaatttgcactttgcaaaggatacaaatgatgagataaaatacctgatagtaatttgaatttcttctaggactttctatttatgtaatgagaaatcacccaaaagaaggtagtttgaaatttgagaccagacgcggtggctcacgcctgtaatcccagctctttggg

SEQ ID NO: 14336 - DNA, 483 bp, Homo sapiens
  misc_feature (1)...(483): n = A,T,C or G
gaanacgagcgcgggnnnnttttnnaatcgatgaccctgataaccgtcgnggaantctaggtgcctttatgagaattgagggtctgacatcctgccccaaggagtagctaaagtaattgctagtgttttcagggattttaacatcagactggaatgaatgaatgaaactttttgtcctttttttttctgtttttttttttctaaggtagtaaggactaaggaaaacctttggggaaaacaatcatttctctctgttgagggggatacttttcacaccgtttatttaaatgctttctcaataggtccaaagccagtgtttttgttcaacctgaaagtaatggctctgggttgggccagacagttgcactttttagtttgccctctgccacaaatttgatgtgtgacctttgggcaagtcatttatcttctctgggccttagttgcctcatcttgaaaaggagggagttggagtagattaatttg

SEQ ID NO: 14337 - DNA, 467 bp, Homo sapiens
  misc_feature (1)...(467): n = A,T,C or G
tgggccnctccnaatagaaaatagtagatcattaccccagagcggtggaattcatcgtttcctggctagttcatttcattaagtggctacatcctaacatatgcatttggtcaaggttgcagaagaggactgaagattgactgccaagctagtttgggtgaagttcactccagcaagtctcaggccacaatggggtggtttggtttggtttccttttaactttctttttgttatttgcttttctcctccacctgtgtggtatattttttaagcagaattttattttttaaaataaaaggttctttacaagatgataccttaattacactcccgcaacacagccattattttattgtctagctccagttatctgtattttatgtaatgtaattgacaggatggctgctgcagaatgctggttgacacagggattattatactgctatttttccctgaatttttttcct

SEQ ID NO: 14338 - DNA, 480 bp, Homo sapiens
  misc_feature (1)...(480): n = A,T,C or G
cgccccccccccccccatagtagacctttggaagtgcggtggaattccagagaattcatactggagaaaagccgtatgaatgcagtgactgtgggaaatccttcactaagaagtcacaactccatgtgcatcaaagaattcacaccggagagaaaccctatatatgtacagaatgtggaaaggtcttcactcacaggacaaacctcaccacacatcagaaaactcatactggggaaaaaccctatatgtgtgctgaatgtggaaaggcttttactgaccagtcaaatctcattaaacaccagaaaactcacactggagagaaaccctataagtgcaatggctgtggaaaagccttcatatggaagtcgcgcctcaaaatacatcagaaatctcatattggagagagacactatgaatgcaaggactgcgggaaagccttcatccagaaatcaacactaagcgtgcatcagagaatccatn

SEQ ID NO: 14339 - DNA, 466 bp, Homo sapiens
  misc_feature (1)...(466): n = A,T,C or G
agggcnctnnnnatagagaatagtagaccattacgccagngcggtggaattccagatttctgctgccaaatttgacactagatttaacactatgattattggctgcaatgagggattattgctcatcggtgattttcataaaaatgggcatttccttctatttagaataacctttggtttagctgggtctaatgtccaagctggcaacaatgacaaggagaatgtttagcctatgcccagtcaatgacaagggacaccatcctctgtgacttctcactctgtggcctgcccactcactaggactttgcagcatcagttgtgttgatataaagctgccccaaccaacactgctgtgtctttgccagaaatggtagcctaagagagaagaggtccaggaagatttctcattcttgaatcataggcactgtgttccacctgtagaggaaaggtagaagattggtagagg

SEQ ID NO: 14340 - DNA, 474 bp, Homo sapiens
  misc_feature (1)...(474): n = A,T,C or G
cctagacaactagcgacntangccangngcnggaattcttagagtctagataattatgtttgtatattgaaaaaatggtggccagtttttaagttccttaatagaagagaattatgtctcagcacatataacagtaatgctaatttattgaaactactgctgttagagcacttcttattcattgtcttttagtgaaatttatggcgtaacactttgtcagagaggaggctatataatttggagcggaaattgtctataagtaggcatttatttcatgattgatatgtcacagaaatcatggtagtaaatcacattgctatttgaataccctgtttttgtaagtttttaaaactcatattctgaaaagatttcattctcttagtgttagcttgggagttagattgccatgattaaactattatttatccttgtgtaatattagtttttaactttaacatctgtttctttntaatn

SEQ ID NO: 14341 - DNA, 466 bp, Homo sapiens
  misc_feature (1)...(466): n = A,T,C or G
ctcgacnccctatagangactattagnccagtgcggtggaattcctaaaaagcccatgataccttactgttgatgaaaaaggatgatcatatatatagaacttgattagtcagagcattgggcattccaaaatacagcctttggttcagtagattttaatgctttaaatagactgacgtcgcatacccttatagaattggaatatgatttctcaaaaattaatttgataatttcatgtatgatgtgcatatatgctaaaagaatgcagaaaatcattttatgaatagccaaatttggggttgatgtgaacattttatgttactcatttggtttatacttttttttttttttttttaacggggggggtttttttttcaaaaagtttttaggcaaattggccgggggtttcaatttttttttttttttttttggaaaggggccctctttttggccccccgggtggggg

SEQ ID NO: 14342 - DNA, 465 bp, Homo sapiens
  misc_feature (1)...(465): n = A,T,C or G
aattgaattgcgtaccactaggccagngnggtggaattcccaactttggccacggagcctcccattcaaatccctcccttgctgtcaaggggtctccccttcccccaaggtggctcccgcgagcctctaatgccctgacttcttccaatgtcacctacggcccccttagtctcagctcagccaaaaactttaatgcaaaggaaaagtctggattggttccacaggccttttaaaaagcggacttaaaagttgctggcaatgcattccttttcgtcagagtcgagggcaaactcgctgaaatctgggtgacccgtgtccttttccggagagcaaagcagagaagcgagagcggccactagttcggcaggaaatttgttggaagatgaagaagctaagatagggggttggtgacttccacaggaaaagttctggaggagtagccaaagaccatcagcgtttccttta

SEQ ID NO: 14343 - DNA, 445 bp, Homo sapiens
  misc_feature (1)...(445): n = A,T,C or G
nttcgagatccctagtcattgtggtgcaattcgcaggacgtgccttgttaacaaaatgtttacaagtagtatacttggtaaaagtcatcgccattctgtagtctcaataaagcaggggaacaatgcactgtggaaagccgcagggacctctgcccttgaaagcgggatattgtccaaggtttctccccatgtcatagcctgaaatatgggctcctgggatgagaaagacctgaccgtcccccagcctgacacccttaaagggtctgtgctgaggtggattagtaaaagaggaaagcctcttgcagttgagatagaggaaggccactgtctcctgtctgtccctgggaactgaatgtctcggtataaaacccgattgtacatttgttcaattctgagataggagaaaaaccgccctatggtgggaggtgagacatgtttgcagcan

SEQ ID NO: 14344 - DNA, 479 bp, Homo sapiens
  misc_feature (1)...(479): n = A,T,C or G
cgcccgcccnanannntttgaactgcataacctatgccangnggtggaattcggcagtgtggactgggctttggcaataagtcagctctaattacacacaagcgggctcactcggaagagaagccttgtgtgtgcagagagtgtggccaaggctttctccaaaagtcacacctcaccttacatcaaatgacacatacgggggagaagccatatgtgtgcaagacgtgtgggcggggcttcagcctcaagtctcacctcagcagacacaggaagaccacgtctgtccaccacagactgccagtgcagcccgaccctgagccgtgtgcagggcaaccttcggattccttatactctctctgaaggcaaagatggggacaaggactaagagtcagaatgttgacactttgatgaaatggagtagagaaatgcattctgtaagtggtcaaaggacatttgactgtttactttctccacactaa

SEQ ID NO: 14345 - DNA, 473 bp, Homo sapiens
  misc_feature (1)...(473): n = A,T,C or G
tgcgcactnnnaattgatnccnatcgagaccctatgcagngtgcnggaattcgcaatttcagcaaatacagaattacagaatattgaacaataataaatgctttgtaggctgcttatggaacacttattttgtgctaggtaccttttattagttaacttatttctgtgagggaagcataatttcagctactttactaaaatggaaactgagactcagctagatgaaaatatttgcccaaagtcatatagccagtaaaaggtagagctagtatctgacagacttgatttttataaagctcatgtactttctgctattgctatgtggtttcatttaaagtttttttcaaagtacctttatatataacaagaacacatatagttatctgtgttcatcatcagcatttccagtgactaaaaaacttattatgttatacagcaatcatgcaagagtacttcttgtcacaaaatacttg

SEQ ID NO: 14346 - DNA, 432 bp, Homo sapiens
  misc_feature (1)...(432): n = A,T,C or G
ctgctcttgcgatggcctcaccatctgggaggagcgaggccggcccatcgctggcaagggccgaaaggagtcagcgcagccccctgcccacctttgagcaggacctcaccttggctctgttgctgtcctccagggcgagcactttccacttccagagggggccagagggactttgcctgcccagtctttggagagctcagtacagggcaggagctgctgtggtgttcccttggcaaatgaaagttttattttcgtttgggaaaaaaaaaaaaaaaaaaaaaaaaaaaaaaaaaaaaaaaaaaaaaaaaaaaaaaaaaaaaaaaaaaaaaaaaaaaaaaaaaaaaaaannnnnnnnnnnnnccaaaaaaaaaaaaaaaannnnnnnnccccccnnaaaaaaannnnnnttttttttttttatccccccctttt

SEQ ID NO: 14347 - DNA, 458 bp, Homo sapiens
  misc_feature (1)...(458): n = A,T,C or G
nacactgatacataggccgctcgatggacttctcagcaggacaggccccgggcactgcctcacagccaaggctggactgggttggctgcagtgtggtgtttagtggataccacatcggaagtgattttctaaattggatttgaattcggctcctgttttctatttgtcatgaaacagtgtatttggggagatgctgtgggaggatgtaaatatcttgtttctcctcaaaaaaaaaaaaaaaaaaaaaaaaaaaaaaaaaaaaaaaaaaaaaaaaaaaaaaaaaaaaaaaaaaaaaaaaaaaaaaaaaccccccaanaaaananannnnnnnnnnnnnnnnnnnnnaaaanannnggggnncccccccccccccccctttttggcgggagggggccccccccccctctttttttttttttaacaaccaaaatttttttttttttttagaggaggggcct

SEQ ID NO: 14348 - DNA, 471 bp, Homo sapiens
  misc_feature (1)...(471): n = A,T,C or G
tggtccnnnnaaacaaaactgagaccttcgaanactgagattctcgtacangcggnggaattccgattgtctctaggattgatgataattttattttgaactgcagtagggattaatgtgttatctttttttaatgatcttcctttgcttctcatgcagctcttttacctgatatacttgattgattaattatgcagagtttcgtttccttttgtggaagcagggcccacttctttcctcccatttttatgagtaccttttaaatgatctccgtgtccagggctctgtcactgtgggtggtgatcacgcagccactgagagctaaagtactctcaggctaagtcccctgcatgagctgctacaggaaggggcactcctgttgctgcacaggaaaggattattaacaattcatttgggggttgtggctccaggatttcaacagttaatcatgccaattaagtaaaaacactt

SEQ ID NO: 14349 - DNA, 460 bp, Homo sapiens
  misc_feature (1)...(460): n = A,T,C or G
agggccctcnntttgagactgagaccgtgcggaggaactctccattcatgaagaagtattgattggatgagctgttgtttggcaaggctctaggaatgttgattgaggaagaagacacagatcccaagttacaaaagttctatttcagaaagtgacatctagtttaaaaaaaatgtaaatttatgtaggcagtatattttaaactctcttttatttcctgagaggtatgtaatattgttgcatgacttaatatgattcctttctgtgttttaaaaatgttgagggcaaaatagaattttggcctagaattgagagaaaatacatactaggaacaaagcagagttaactgcaagagaggagaaatgtgattctttaggattggagaactctgtttcaataaacactggttctttttgctttttcttttacaggtgtgagtgttatgactatttatttgatc

SEQ ID NO: 14350 - DNA, 453 bp, Homo sapiens
  misc_feature (1)...(453): n = A,T,C or G
nttgagnacgtatgacccttacnccgngcggtggaattcccgggctaaaactacccctgagtgtggtcccacaggatatgtagagaatatcacatgcagctcatctaagagaaatgagttcaaaagctgccgctcagctttgatggaacaacgcttattttggaagttcgaaggggctgtcgtgtgtgtggccctgatcttcgcttgtcttgtcatcattcgtcagcgacaattggacagaaaggctctggaaaaggtccggaagcaaatcgagtccatatagctacattccacccttgtatcctgggtcttagagaccctatctcagacagtgaaagtgaaatggactgatttgcactcttggttctttggagccttgtggaggaatccccttttctccatcttcttctttcagatcattaatgagcagaataaaaagagtaaaatggtaaa

SEQ ID NO: 14351 - DNA, 460 bp, Homo sapiens
  misc_feature (1)...(460): n = A,T,C or G
gcgggtttatccgaacctccgaagagcgcctcgnaannnccagnaaaaattcattcattcattcagcaaaacttactgagtacttattatgtgccaggtacattttttggttgttgggcatatgggaataaataagacatacgaagtctatgttttcatggcacttgcattgtaattggggatgagaatcaataaacaaaagagatataatatatcaaatggtgactaaatgtagtgaagagaaaatgaagcagggtaagaggatagcgaacacgaataagtagaggggtcaagctatgtatgtatctgggacagaaatattccggagaggaagactagtgcaaaggcaagttaaccaaacctagtaggtccagacacatccaggagacttgtgtagccacagcagagtccaagaggagatgggatccatggagaagcagcggccagactgcatggtgct

SEQ ID NO: 14352 - DNA, 438 bp, Homo sapiens
  misc_feature (1)...(438): n = A,T,C or G
ctagacttcatgacctctgcccangcggtggaattcgaggaagtagaagaaagtgaagatgaaggggaggatcctgctcttgacatcctcattcaggccatagcattccaggtattaaattgttcttttaaaaggcatcatacaatagttgacttggtttatagtgcttgcttacttcattgatcacctcatggcaacctctctttttccccctaacctcctaagccttaggagacaagctgtttctctgaggtacttagccagtgtgaatgaaaagttcccattggttcttcctagattttaagggccccacaacacttactatcttaatcttttttcattaaagaaatgagcagaactatttgctcaaagtgaatatagcccaacagaaaagatttttttaagaaattgcctaggataattttgtgtaagattttg

SEQ ID NO: 14353 - DNA, 451 bp, Homo sapiens
  misc_feature (1)...(451): n = A,T,C or G
natggagatcgtaggccatgcggnggaattctttttttaaggggggaggaaggggaagctagatggactaggagagacttgatttttttgctaaagttccccagttcatatgtgacatctttttaaaaaaaataccaccaaaaaaaaaaggagaaaaaggctaaaaaaaaaaaggtggggggggagccgtaaagggatttatttcacaaaacaaaattggggaaaaacaatttcttgaaaaaaaactttaaagggtttttgttctaaaaaaccggaggtttttctttaaagccctccccccgggtttttttcctggggtttaaaactcaataaaccttcaaaaaatggaaaagcaaaatttttgcttggccctgcccctcaataaaaaaaagttttttaaccttatcaaaccgaatttttggccaaccaatgctttttttggaaatttggg

SEQ ID NO: 14354 - DNA, 476 bp, Homo sapiens
  misc_feature (1)...(476): n = A,T,C or G
gcgtggtttttaccgaaaccttcgacctganagcatcagaaagngcggnggaattccacgtgtacgtggagactaattatggccgggaaatgacaagtgaggtgaaagtcataacaataaattgaagcacgcggagagcgctctgttacctgccacgggaggtcctgtagatccggtgcacgcttctcagaggtcagcaccccgcaggcacactggtctgcatttgcggcagcaacatgagaataaaaatcagcgccttctcagcgaaaaaaaaaaaaaaaaaaaaaaaaaaaaaaaaaaaaaaaaaaaaaaaaaaaaaaaaaaaaaaaaaaaaaaaaaaaaaaaaaaaaaaaaaaaaaaaaanncgggcgccctgtaatagagggggggataaaaaccccgcctggaaccccttggtgtttttttatagacccccccttttgtgtgtccccccccccccttttttttttatagag

SEQ ID NO: 14355 - DNA, 560 bp, Homo sapiens
  misc_feature (1)...(560): n = A,T,C or G
ttttgcgtgtgnnnnntnnnnnccaagtcttacatttctcaagtggacaaataggtacaaacttgctccaccctctcattaaattcttcccttccttcaaaaaatatttactgtaacaactttttaaacagaaaaacattacccagatggaagaaaagaaatcacgtttcctgaccagactgttaaaaacttatttcctgatggacaagaagaaagcattttcccagatggtacaattgtcagagtacaacggtatggcaacattatgttcagagaaaaaccactcagtgtgacacctgttcatctgtgctcagaaggtgccccagccttgcgtttctgatgatatgtgacacccatatttagggggtcagtttgaatgaatgtcccacaggcatgtcagtcaacttgatgtgaattatttttcacattctccttttttggtccattctttcaaaacagattnttaagtctgatcatgccccttcccaggaataactaactctcttccccacctgatacagagcaaacaaacacttcagatggttntaanatagtgaaaa

SEQ ID NO: 14356 - DNA, 484 bp, Homo sapiens
  misc_feature (1)...(484): n = A,T,C or G
caattgagaccanntggccattgaggagcaattcggctcctgcactggccccgggaaattcgaacgcacactggtctttcccttcatcttgaaatccacaaatgagtcatctgtgggcatgtgaacttttaggcttattttagggagggggaaaaggccatcttgtcagcccagaagagtgggcatgtgtgaattttagtagctgccatttgatggaaatcgttaaatgctgtgatcgataagaaaaaaagctgtattgggtggtacagtccagtgttatcagaatatctgcaaaagctcaaacaaaaacagcctttctcccccaggggaatcaaatcgtgtatgataaaacgtgaaaagatgtagcataaagtaggtctcaaaacgtctgcagcaccatactttagagctgtctgcatctttaaataaaaggaggtggactcaattttagcacttagtaacttatttaaggtctttttctttt

SEQ ID NO: 14357 - DNA, 490 bp, Homo sapiens
  misc_feature (1)...(490): n = A,T,C or G
gcccccccccttttgacnccttggntaatgagaccttaggacaggcggggaattcagagtatatccttggaaatcctctgaccccaagagtcactctttgccctcagattgtttaggaacaatatgataaaatacttgacctcattgagagtgggaagaaagaaggggccaaactggaatgtggacgaggcccgtgggggaataaaggctactttgtccagcccacagtgttctctaatgttacagatgagatgcgcattgccaaagaggagatttttggaccactgcagcaaatcatgaagtttaaatctttagatgacgtgatcaaaagagcaaacaatactttctatggcttatcagcaggagtgtttaccacagacattgataaagccataacaatctcctctgctctgcaggcaggaacagtgtgggtgaatagctatggcgtggtaagtgcccagagcccctttggtggattcaagatgtctgg

SEQ ID NO: 14358 - DNA, 448 bp, Homo sapiens
  misc_feature (1)...(448): n = A,T,C or G
actgacgtacattaccnctngcggnggcattccctgcttgttctaaaaaatgtgaaaggtcctgctgttgcaatgattttatgacacgattcttccaggaaaagcgcatagtaaatctttctctgacttcaggcgttttaggcaagcattgtattttactacttaaaatactaatgaaaataaatactgttactttctgttttatctgttttttaagtttgcatctggtgtgactgcttgcactgtaacgcanaattcacttaaaatacatacctattagtggagttgctcttgatggaatatctaatgccaaattgtattacagaatggtttgtcataacaggccctcaagggagtgaaaattggttcttgggaggagggcttaaaaaaaattctatatattacaatggttagtggtcctccaaagactcatagaatattaatatgg

SEQ ID NO: 14359 - DNA, 484 bp, Homo sapiens
  misc_feature (1)...(484): n = A,T,C or G
catcgacccccctggnntttgaagaccataggacangccgnggaattcgagaactgggttttctcccagtactccagcaattcatttctgatagcagttgagccactttattccaaagtacactgcagatgttcaaactctccatttctctttccccttccacctgccagttttgctgactctcaacttgtcatgagtgtaagcattaaggacattatgcttcttcgattctgaagacaggtccctgctcatggatgactctggcttccttaggaaaatatttttcttccaaaatcagtaggaaatctaaacttatcccctctttgcagatgtctagcagcttcagacatttggttaagaacccatgggaaaaaaaaaaatccttgctaatgtggtttcctttgtaaaccaggattcttatttgtgctgttatagaatatcagctctgaacgtgtggtaaagatttttgtgtttgaatataggc

SEQ ID NO: 14360 - DNA, 477 bp, Homo sapiens
  misc_feature (1)...(477): n = A,T,C or G
nattgagaccattggcattgacggccattcgcttaacgaaaatctgagaccaggattcttcaaagaattcttgctggagagaaacctaacaaatgtaatgaatgtggcaaggtcttctggcacaattctcacattgtacaatattgcaaaaattcatgcttgagagaaacaaaaacactgagagtgggaaaccattatgacttcaaacattcatcaacatcagagaatccatactaaagagcatttataataattatatgtgatagagattttccgcaggccaaagtctcactaggcatcaaaaacttttttgatgaaaccatacaaatgtaacgtgcatgcttaagcttttacccaggcatcaaaaccggaacatcacagggtttatactggagagtaactacacaaagataatgtaataagcctttcagtgtaatattcatgattttgtcgagagagatccactcaataaaaacc

SEQ ID NO: 14361 - DNA, 470 bp, Homo sapiens
  misc_feature (1)...(470): n = A,T,C or G
tgagcgtccaggcctannnnnnncctgagctgcatagcccgngcggnggaattctggagccgctgccattgctgggattggaggtgaaaaagctggcggttttgccccgtattatggagatgaaccaatggatttcaaaatcaacaccgatgagattatgacttcactcaagtctgttaatggacaaatagaaagcctcattagtcctgatggttctcgtaaaaaccccgctagaaactgcagagacctgaaattctgccatcctgaactcaagagtggagaatactgggttgaccctaaccaaggatgcaaattggatgctatcaaggtattctgtaatatggaaactggggaaacatgcataagtgccaatcctttgaatgttccacggaaacactggtggacagattctagtgctgagaagaaacacgtttggtttggagagtccatggatggtggttttcagttta

SEQ ID NO: 14362 - DNA, 472 bp, Homo sapiens
  misc_feature (1)...(472): n = A,T,C or G
ggagggtccggcccggnnnnnncctgaaactgagacactaggccagngcggnggaattccccagcttttgatagctacccctgcttcgacaataatttaataattttgaaatgaacaaaacaaaggagagtggtgggtctgctgatcccttctccacagcgtagaaagtgtgggagtctatacaaaggtttctcatcaccggataagagccatttttagatacatccccccgcaccccgctgtgtaaaggtgtgcttatgtgtgtgtcactattttacgacttccttagagtacagagtggcaggtttttatgaaatacaaatttgaattctgttaaataatccaaaagaaaatgtcattttctcaaaatctcctcagacctatattcttgtgtttgtttattcagcaaacatttactgaatgcctactaagtatcaagcactatgccaggtgctagggagactaagatttt

SEQ ID NO: 14363 - DNA, 482 bp, Homo sapiens
  misc_feature (1)...(482): n = A,T,C or G
cgcgcggcnnnnnnnnaatcgtagaccatagtcattgtggtgcaattccggcggtcaggagcaggttaccctccgtctgcatgcccaccatcaaggtatgaggatggtagaagctctcgtcgaaccagatggatgaagaccactaacggcttttgtttcctctggtaacagcaagagacagagcgacatgagagattggaccgcgggctgcactggagaatttactggtaggataattcatccctaaagagattgaagtgagcttcagaatggcaaaagaggagccccagagtatctcaagggacttgcaggaactgcagaagaagctgtctctgctgatagactccttccagaataactcaaaggtcagtttccaatcactatgtataatggaaaatcccaatataacactagcataaacaagatagaaagttatttctttctccagtagaaggaatttggaggtaagtcaagagtctttt

SEQ ID NO: 14364 - DNA, 492 bp, Homo sapiens
  misc_feature (1)...(492): n = A,T,C or G
cgatggtacccnnnaatggagacctcnatgatgagctgtggaaancctcgcacttccattgagcatatattgatatgcttaatgatgcttctgaagatctattcatttttcctttattcctttatattctgtgcctcagcccagatcatttcaatgcacatatcctcaagattgctgattctttcatttcctgctcaaatctgctgttgagcccctctagagaatattttatctcagttattacacttttcagactccagaatttctatttgccctttaaataacttaatctgtcgatattctgaatttggcggtgcattgatcccatactttcatttaattctttagacatggcttcctttagctcattgaacatatctaaaatacatgattggcctggcacggtggctcacgcctgtaatcacagcactttgggaggccgaggcaggcagatcaccggaggtcaggcgtttgagaccagcctggccaact

SEQ ID NO: 14365 - DNA, 454 bp, Homo sapiens
  misc_feature (1)...(454): n = A,T,C or G
nattgagatcgatggnccttgcgccgngcggnggaattcccctgattgtccccagcagagagagacatccactctgctgtggtcaccatccccaccgcctgctcccctgtcaccatcaggaagtccaccctacatctgacctccatccttccatcaggaagtccatcctacatctgacctccatccttccatcaggaaatccatcctacatctgacccccatcccttctgctgctgtgacagccacttcctctcaggctcctgtcctgcgggtggagaacagctggtccccatcgcctgcactgcttggccccacattcctgctccagtcagctgcctctggcctcacccttcctccagctcccagccccactgtcctccccaccccaggcacaggctggtggctccttgctcctcactgaaccttaaggagagcaggtgtgactcanggctga

SEQ ID NO: 14366 - DNA, 490 bp, Homo sapiens
  misc_feature (1)...(490): n = A,T,C or G
cgatggtnccnttaagagaccctaatgcnatccatcgaagngcgcggaanncgcaacatcagtaaggatcgcaggtatgcatacctcacagaagatcatttaccctccttttagagactgaaggatactatagccagagctctgcccttctggaatgaagaaatagttccccacatcaaggaggggaaacgtgtactgattgcagtccatggcaacagcctccggggcattgtcaagcatctggagggtctctctgaagaggctatcatggagctgaacctgccgactggtattcccattgtctatgaattggacaagaacttgaagcctatcaagcccatgcagtttctgggggatgaagagacggtgcgcaaagccatggaagctgtggctgcccaaggcaaggccaagaagtgaaggccggcggggaggatactgtccccaggagcaccctccctgcctcgattgtccctctgcccctcccacctgg

SEQ ID NO: 14367 - DNA, 486 bp, Homo sapiens
  misc_feature (1)...(486): n = A,T,C or G
catcgacccccctaggcattttgagacccatagtccagagcggaggaattcggccggcacacgcacacccgcatggacaacttgaccatgtcccttatagtctggctttgctgtgggcaggggacaagagggccgtgagtgggtggtcttnncttcaaaacgaagatcacaacaccttccgtgggtgggcaagattacttaaaatgacgcaggacagcgcccaaagcaacttggtgctccgggaacgccttccgcggaatgaagcggcccatgcccttgttgacgttgatgtttccgtcttcaaagaccatcttgccctggctgatgaccactagtggggagccgtggcactccataccctctaagatgttgtactccaccgcctgcaccaacagcctcagcgttacttcccaagatttgctctgccccaaacgagctgttcataacagcgattttgcctaacattatatcataagcgtgttccag

SEQ ID NO: 14368 - DNA, 558 bp, Homo sapiens
  misc_feature (1)...(558): n = A,T,C or G
ntcggaaccatcgaacactagtccgngnggngcaattcctactcanagggataagtttgttgaaattgacctaaagccagtctgcaaacactgttatgagaaaatgccagaagaatttaagaggcgacttgccaaacgggagagagaagcaaaggataaggacaagcagaaaaagaaaaagccagtctgtttgtaaacttttctatccctgtgtcatcattttcactactttctcctttggttagtcctttggaatatgtttttgttctgtttctgtcttttgctttcttccccccctgcaacttttgggcgtgtatttgtagtcatcagaaatttgggccaaggggagcggatcacgaggtcaggagatcgagactatcctggctaacaaggtgaaaccccatctctactaaaaatacaaaaaaaacattagccaggcgtggtggcggtcgcctgtagtcccagctcctcaggaggctgaggcaggagaatggcttgaaccaggaggcggagctttgagtgagccgagaccgcgccgctgcacttcagcctgggtgn

SEQ ID NO: 14369 - DNA, 465 bp, Homo sapiens
  misc_feature (1)...(465): n = A,T,C or G
cgagggccaggctgccnnaattgaaanacattgatgngccggaaanaccnccctgnnnntttntatatcaatacctcaataaaatttagttttaaaaaatagcacatgtaaaaagtttggctatttaaactaaaaagtaattatgtcctaaattattttgtatacaaagacctgaggacttgaaatattgtaataattggagcttgtctctgctttaagggcaccactcgcccctgatccatcttggtttcccgcacaaggcagcaggattgcccatgaatgaacatgggtgaaatcgttggatacaggtagtaaatacattctatttcctgaaaaatattacctaactacatgtctagatatggaattgcattttcaagccaagctggaattacaaattgtagcccatttgaaaatgcatacaaatgtgtgacatatacacccagaggaaaagaagtcacagtt

SEQ ID NO: 14370 - DNA, 474 bp, Homo sapiens
  misc_feature (1)...(474): n = A,T,C or G
nctgagaccctagcatagaggngcatttccanggttgcagattgggtgactgaccagacttgttggggtcctgggatgagttgccccgggctgcaaattaagagtacagctaagtgcgggggtggcggtggagggaacgaaaattgaacctgtctgcctgtgctgtgtcgtgtggctttatcagcccgaggaagggcaggtgtattctaatttgcacaaaggtgctgggtagactagtggcagctctcatgtgctgcacataagtggaatcagtatgaatagaagaacttgctgtataaaggaatttcatggcaacaatgctggtaagggcaattagcctcgcttaagttgccttttttacacaccaaaactttttacatgaagggctggtttcacatgaatactatactgaaatctgtgctctcaagatctagcagtgaccagggctgcccggcggnggctctcctggcaagn

SEQ ID NO: 14371 - DNA, 561 bp, Homo sapiens
  misc_feature (1)...(561): n = A,T,C or G
natcgagcnccatcgaacactattccgngnggngcaattcgttntgctcttgtcatccaggctggagtgcaatggcgcgatctcggctcactgcaacctccgcttcccaagttcaagcaattctcctgcctcagcctcccgagtaactgggattacgggcacgtgccaccacacccagctaattttttgtatttttagtagaaacagggtttcgccatgttggccaggctggcctcaaactcctgacctcaggtgatccacccgcctcggcctggcatgagccactgcacccggcccaaaatatttcttaaaaatccaaagttacgatttagtaatacttggacttatttactagttcattaaataacaggacttggtggcgcgtttactaaactacaaaatttagaagcagtgatggatataaaaggtattttaaagtttctgcaataactctaaggtgacatgaaaacatctgtggtttctattggtaacaaagtcacaataattctactctggtgggttttctatattangtttggacagagatgctgcatttcagtg

SEQ ID NO: 14372 - DNA, 558 bp, Homo sapiens
  misc_feature (1)...(558): n = A,T,C or G
natcgaaccacattcgagngccgnggaattcccctctggatgtttcggngagttagaagggagctggattgagagactgtgttaggggcggnggtatggaacgtagtggaaagggcagaaatttggatctcagttcgcgcccaccccgcaggcgcctcccgcgagccgggccctctgtgagtgagacaagctccccttcctttacgcgcctcacctggcgcgtggggagaggtcggcagccctccgccgcagaacctccggaagggatgtcctctgccctgcgcctctggccggggctgtggtccctccaggccgtcgaggggatgctgaggccggtccccagaggagcatgacttggctggtccggaggagctctgagggcatgggcaatcttggctcgctgcaacctcagcttccagagttcaagcgagtctcctgcttcagcctcatgagtagctgggactacagatgcgtgccactacgtccgtctgatgtttggtattttagtagagacagggtttcaccatggtggtcaggctgctctcgaactcagatctn

SEQ ID NO: 14373 - DNA, 442 bp, Homo sapiens
  misc_feature (1)...(442): n = A,T,C or G
atcgacatcgaggacctcttgtccagngtggnggaattcggcacatctaggttggctgcagtcgaaacggtttgagcgtggtcgctgtggctcatcgtcggcaccaattaacgaagcgatgacatctgcgttgttaggggtttcttaaactgagttggtagaaatgcgaagcgtcagggttcccgccggcttcgagcctttcttggcgtatttgtatcttgagctgatttctgcgtcagcccacatctcgctctgatccgcacaccccccgggttgttttgcagtagcagtctcagccctcttctcgtctcattcccaaatcgtaatttcagttcacagctttttatctataatagctttatcaactctttttccgatgctctgcaccagatctcttaaaatataaaattaccttgcaaggtattgtttggaatacacggta

SEQ ID NO: 14374 - DNA, 422 bp, Homo sapiens
ctgatttgaataaaacagctataaataataatatttttgggattattgaaaaatttgactatagattagttttcaggtgatattggagaattaatgttattattgttaggtatgttagcacggtcatgcagcaatgtgtctttctttttaagagatgcatacaaaaatatttgggtgtgaaatgttcttgtgctataatttgctttaaaattcttcagaaaaaaaagataagcaaaatagaaaaacaagataatgggtacatgttatctatttcttattctccctatttttttgtgtgttcaatttttaaaagaaatttactccatacatatatgccaccccctccactaaggacccccaaactataaattgctgtgaatataagaaaaagtgaaacaattctatgattttgagagaaagtc

SEQ ID NO: 14375 - DNA, 425 bp, Homo sapiens
atactattcagctaccatttctaaattttctagatagacgcctcaataatacaaaaacactaaaaaataacattagcagcaattaatatttgagcacttaccatgtatcaggcactaggcacttaatttgctcactcactgtcccatcatgtgggtactagtttaattcctattttagcatgagaatattgaatgtacggaggacaaagtgacctatcccccaggtcacatagttggctagtggttgagctggaactgaaaagcaggcctttctccgaaacccactgctttcactgcatacctcccctttgactataacagaaggttcaaagttcagccctcttcttaatctctctagagcaggcaccagcagtaccaaagacgttctggactgcatagttcttggctatgagggagagttgtgt

SEQ ID NO: 14376 - DNA, 475 bp, Homo sapiens
  misc_feature (1)...(475): n = A,T,C or G
natgagacctctgccattgagggcccatccattntactagggttagttcatttcatcctcataacaaccttgtgacgtagttactattgttatctcaatgtacagaggagaaaatgagacactgagtgggactcagggattgctccaggccacacagtcagcaggaggcaaagcccagattcaaatgcagattactcagctccacaatccacatcctcacaggaggctgcactccttgcccaagcgtcagacaggagcaaagagaaagaaggcaaccagctggctactttcttcccttcttggatgcctccaacagggtgagaaggactaaacaaatgaccaagtgtcatcccattttggacatacttaaaacaccccatggaatttttattctgactttcttctgcctgtgtggcatttatgtttaaataaaagagaattcaactcgtataaaaaaaaaaaaaaaaaaaaaaat

SEQ ID NO: 14377 - DNA, 478 bp, Homo sapiens
  misc_feature (1)...(478): n = A,T,C or G
gcgcgaannnnnnaatcgtagaccctagtcattgcggtgcaattcccagcagttgcagaatgaagaagagtctggagaacctgaacaggctgcaggtgatgctcctccaccttacagcagcatttctgcagagagcgcagcatattttgactacaaggatgagtctgggtttccaaagcccccatcttacaatgtagctacaacactgcccagttatgatgaagcggagaggaccaaggctgaagctactatccctttggttcctgggagagatgaggattttgtgggtcgggatgattttgatgatgctgaccagctgaggataggaaatgatgggattttcatgttaacttttttcatggcattcctctttaactggattgggtttttcctgtctttttgcctgaccacttcagctgcaggaaggtatggggccatttcaggatttggtctctctctaattaaatggatcctgatt

SEQ ID NO: 14378 - DNA, 486 bp, Homo sapiens
  misc_feature (1)...(486): n = A,T,C or G
cgtgggtgcccaatgagacccatgatgactgtggaaancgcagaattcaaggaaaggtggtggtgacccagtgctgccgttttctccttaggtgacgcatccaaagaagacattgacactgctatgaaattaggagccggttaccccatgggcccatttgagcttctagattatgtcggactggatactacgaagttcatcgtggatgggtggcatgaaatggatgcagagaacccattacatcagcccagcccatccttaaataagctggtagcagagaacaagttcggcaagaagactggagaaggattttacaaatacaagtgatgtgcagcttctccggctctgagaagaacacctgagagcgctttccagccagtgccccgagtgcctgtgggaatgctctttggtcagacattccctcacacagtacagtttaataaatgtgcattttgattgtaatctatcgaagtgattattacacca

SEQ ID NO: 14379 - DNA, 409 bp, Homo sapiens
  misc_feature (1)...(409): n = A,T,C or G
ctcattttctcagtgccccagaggtctaggataggatttctaaactggaatcatccttaatcaccttgaagatcccttaagaggcatttgactggtgctgccgtctgtgtcctcaaagcaatgctggtggcagcgtcctgtgtacacatgcagagctaatacccaaactaaaaactgggtaactggccctgaagtgcttcccaatcagtaagccacagggaaatgtttgatttttatgttctgttggattttggtttgcttggcatatctaaaggtgcctttactttncttttttttttttttttccttccggcttggttnggaaggacttgttttaccatggaaaacaagcccaaaaaactctcctttgacgtgaactttggccccagcccaccccaaattttaatgt

SEQ ID NO: 14380 - DNA, 453 bp, Homo sapiens
ttaaaatcgagatccctagtctagagtggcggaattcgcttcccatcagcatctgcatatgttgctgtgcatcgtccgtgcgttcagtccttcccacatttgtcaattactttgtgccaggctctgtgctaggcttaactgagcctggactttggcatctgatgtttaaatgttgaccctgccatttagcagctctgagtggatcacactccagtcctttctaagcctcagtgtttctcatcagtaaaatggggagctacattatcagcccgctcccaaaagacttcaggcattgggcgcctgatggtgcatgtcattgaagctacagaattaaaagcctgcaaaccaaatggaaagagcaacccatactgtgaaatcagcatgggctcccagagctacaccaccaggaccatccaggacacactcaatcccaagtggaattttaactgccag

SEQ ID NO: 14381 - DNA, 476 bp, Homo sapiens
  misc_feature (1)...(476): n = A,T,C or G
nnnaatttgtcgaccctagtctgtgtggcggaattccaggaggatcacttgagctcaggagttcaagaccagcctgagaaacatagacccccatctacatgaaaagaattttaaaaattaaccaggtgtggtggtgtgtgcctgtagtcccagctactctggaggctgagatgggaggatcacttgagcccaggaggctaaggctgcagtgagctgtgatcgcaccactgcactccagcctgagcaacacagggaggccttgtctctaataaaaatttctcttggcaggtatgtatgaaggataaggccattttgagcaataacaagtgttgaacacaatgtaagacacatagtaagaagtttggccagacgcagtgactcaatgcctataatcccagcactttgggaggccaaggcaggaggatcacttgagcccaggagtttgagacaaacctgggcaacccagggagacccca

SEQ ID NO: 14382 - DNA, 489 bp, Homo sapiens
  misc_feature (1)...(489): n = A,T,C or G
ggtgggnccnnaatgagncccaactgagaccctaggacanngcgnggaattctgaggctccactacgttgctgttattcctgacagagtgatgaaaggaaatttaaacaagtggcattttgtaaaaccaccccagcctgtgtgactttcaatgcctgtccgatttggctgggaaaatattttagatccccagggctacatactgttttttataccctcctctttgtgtcagtgatggaaaaggtgtcaatctgctctgaatctctctgaacacctcaggaaataggcttttggctcgcagagaggggatgagaaatagttttgaaccaccaagtctcttggagggtgtcagcagccccttgaagtaaaagtgtggctgcaaacccagctctctgcattagccaggtgaacctgagcatgctgcatacaccctcagtcttggtttcttaatatgtaaaatgggaatgaatatgcgcacctcgtggggtgg

SEQ ID NO: 14383 - DNA, 455 bp, Homo sapiens
  misc_feature (1)...(455): n = A,T,C or G
nttcgagacccctggacgtgcggtggaattcatcttaatctctcctaatttcccatttaaaggtttacaaatatgagtgtgtggatgctttaattcatttaacctcactcctcaaaggtaacatgcaacttagttctgttatatgagagtctttttctttaatgtactggaaaaagcctatgtgaatctgttgatagaatttaaaattccaggccgggcgtggtggctcacgactgtaatcccataactttgggaggccaaggcaggtggatcacttgaggtcaggagttcgagactagcctggccaacatggtgaaaccccatctctactaaaaatacaacagccaggtgtgatggtgcacgctcgtgatcccggctgctcaggaggctgaggcaggagaatcgcttgaacccggaaagcagaggttgcagtgggctgagattgtgccactgca

SEQ ID NO: 14384 - DNA, 449 bp, Homo sapiens
  misc_feature (1)...(449): n = A,T,C or G
cctgaaactacgagcntagacaangcggnggaattcctgtgaagagaaagaaactacctgtagatagtgtctttaacaaatttgaggatgaagacagtgatgacgtaccccgaaaaaggaaactggttcccttggattatggtgaagatgataaaaatgcaaccaaaggcactgtaaaaagtttcccgcgagactcttcagcaacataaactgcttaaggtgattaggaagaagcttgttcgtaaaacgctggacatgatcaagaagattgctgatgataaatacaatgatactttttggaaagaatttggtaccaacatcaagcttggtgtgattgaagaccactcgaatcgaacacgtcttgctaaacttcttaggttccagtcttctcatcatccaactgacattactagcctagaccagtatgtggaaagaatgaaggaaaaacc

SEQ ID NO: 14385 - DNA, 488 bp, Homo sapiens
  misc_feature (1)...(488): n = A,T,C or G
ggtggtgcccncaatgagacccnaggaagagctgtggaanncatcgnggaaagggaagtcatgctgttaataaaatagtgaggcatgttgtataaagtgtgttttatgtctcaattgaaatgttatagagataaatttaaaatagatcatgatgggttttgaatctgatttctaattttaaaatgttatgagcttttgttgctttcctatttcatacacatttctttatgggtttcacttagactgcatgaaattgcagatgccaattaccttttaacaaaattaaattcacatatatgtataatttgcatgtatatatccatggaattttttattctacacgatatattattttaaaatggtttttcaatgacaaaataaaaagtatttttctattnnaaaaaaaaaaaaaaaaaaaaaaaaaaaaaaaaaaaaannnnngggcgccccttttaaattaaggggccctttaaaccccctttgtaccc

SEQ ID NO: 14386 - DNA, 490 bp, Homo sapiens
  misc_feature (1)...(490): n = A,T,C or G
agaagttgcccnnnagggggnnnnaattgtagaccnttntactgatgaccattaggcagngcggnggaattcggaactgggcatatgggagccattggctgtgaagctgcagacttataagacagcagtggagacggcagttctgctactgcgaattgatgacatcgtttcaggccacaaaaagaaaggcgatgaccagagccggcaaggcggggctcctgatgctggccaggagtgagtgctaggcaaggctacttcaatgcacagaaccagcagagtctccccttttcctgagccagagtgccaggaacactgtggacgtctttgttcagaagggatcaggttggggggcagcccccagtccctttctgtcccagctcagttttccaaaagacactgacatgtaattcttctctattgtaagggttccatttagtttgcttccgatgattaaatctaagtcatttgaaaaaaaaaaaaaaaaaaaaaa

SEQ ID NO: 14387 - DNA, 494 bp, Homo sapiens
  misc_feature (1)...(494): n = A,T,C or G
gcgcggtnaccnngatggagcctnatcgatgatcctcgganagngcggnggaantcggngnttgaaaatctcatccagcgaggtgtcttgaagcagaaatgtgacttggaactgtgacagacgttttctcaggaaagggctctcctctcttttccttacaccccctaaggttctttgaacccccttgactttgctaatctcatgccctttcccagagagaggtgaggactgtgcaggctgcagggaaacactgtggaattattcatgctttccttttaactttccatactaaaacattcctgtgaaaagtgttcatttaaaaagttttccaaggaagtttcttgaatcaagtcttcaaggtgcaaagagtgcctagaaatgaacaataacattattttgttggaaaattgcaagcagaatatctgaaaatggaaatagagctgtcagtagtaattcacctcccccctcccatgcaacacatttccacttttgac

SEQ ID NO: 14388 - DNA, 484 bp, Homo sapiens
  misc_feature (1)...(484): n = A,T,C or G
tgcgccgcgnnnnnnnnnaatcgtagaccactagtcctgngaggtgcaattcctggatgttgaaacagcttggcctttagaagcaagtggaacatttcagtcttctagccaaccagctacttacccctgcaaggttgtgagtaggtggaaaagatagatcttttttttgagatggagttttgctcttgttgcccaggctggagtgcaatggcgtgatcttggctcactggaacctctgcctcctaggttcaaacaattctcctgcctcagccttccaagtagctggggttacaggcatgtgccaccatgcccgtctattgtattttttttagtagagacggggtttcaccatattggtcaggctggtctctatctcctgacctcaagtgatccacctgcctcggcctcccaaagtgctgggattacaagtgtgagccaacgtgcccagctggaaaaagatagatctaagcagctggggtaacta

SEQ ID NO: 14389 - DNA, 477 bp, Homo sapiens
  misc_feature (1)...(477): n = A,T,C or G
cattgatnnccgaccngcgtgngcaggaancntgangcatgcctggggncccagctacccaggaggctgaggcaggagagttgcgtgagcctgtaagcttgaggctgcagtgagccctgatggcaccactgcactccatcctgggtgacagagtgagaccatgtctcaaaaaataataataataaaagcaagcagctctagagtgtgaagcagctgtggccaggcagtgggtgggcaacatgaacatggtctgccctgtatgttgagcttgcgaaaccccactgaaacccgacagcttttcacatgaactgatgaatatgacctgcagacaacagataactcagttgtccctttctttgtcctctaaccatctctccctgtctctgtctcttgctctctgtgtctccccatttgaactgggcctttgaacacagggttgtgcatttgcctctcttctcctgcctctcatatttgatc

SEQ ID NO: 14390 - DNA, 416 bp, Homo sapiens
ggaatggaggaaaaccttgggactcaggctctgatgatggaaagtacaagatggtaggaacccgggtcagagaaggatcctgtggcatggagttttctcctccctgtacacagttggacttcttgcagtgaggaaataaatgtgttccctgctgaacttctaaaggtttgggtatacttgatactgacagaaactcaacaaccctcacataataaaacttaggagtatgatttttcaggacatctgaactcagtgtatgtcagaaaagtcacataggacaaatctcggacagcatcctgaatgaccatggcttttatccccaaagtcttcctcatcagacaggtaatatcataagaaatctgacattttaacaaatataggaaattcttcacacacacagacacacactcacacat

SEQ ID NO: 14391 - DNA, 485 bp, Homo sapiens
  misc_feature (1)...(485): n = A,T,C or G
tgagttgaccnnnaggggnnnncactggagnccntnaaactgagaccatcagnacangcggnggaattcgccggaagtgcatgagctgccgatgaggtgcttagtgattgcgggttcggtcgctctcccgtgtttcccgggctgggtatttgcctcgcaccatggcgcccaagggcaaagtgggcacgagagggaagaagcagatatttgaagagaacagagagactctgaagttctacctgcggatcatactgggggccaatgccatttactgccttgtgacgttggtcttcttttactcatctgcctcattttgggcctggttggccctgggctttagtctggcagtgtatggggccagctaccactctatgagctcgatggcacgagcagcgttctctgaggatggggccctgatggatggtggcatggacctcaacatggagcagggcatggcagagcaccttaaggatgtgatcctactg

SEQ ID NO: 14392 - DNA, 474 bp, Homo sapiens
  misc_feature (1)...(474): n = A,T,C or G
catgcgactctggcaatgaaggctatcgaganacatatctgaatagagttgggtttaaatgcactgaacgtgaaagcatttctctcaccaaattagaaagttcacccaggaagcttcataaagataagagacaggaaaataaacataagacctttttaccggtgaaaggtaacacagaaaaatcaaacatgctggagtttaaattatgtccagatatcttactaaagaatacaaactctgtggaagaacggaaggatgtaaagcctcatcctaggaaggagcaagcccctctgcaagtttcaggaataaaaagtacaaaagaagactggttaaaatttgttgctacaaagaaaaggacacagaaagacagccaagagagagataatgttaattcaagactctcgaagagaagcttcagtgcagatggatttgagatgctacaaaacccagtaaaagattcaaaagagatgtttn

SEQ ID NO: 14393 - DNA, 424 bp, Homo sapiens
  misc_feature (1)...(424): n = A,T,C or G
cctataggtaacaatatctttattagttcagttgaactttttcactttttcttatttattcagaagtctatcactattacagaaatacctcttttgcttgtcatatatgtgcagtatgcattatttctatttgaatggcatatttatgtttttgttctgatattctgtttttatacatttcaatcaatcttttagtttctggtgtctggattttgtgtcctacttggaaaggtgaacatacttcagaagtatgcctaaagaaattcatatcatttcattaatattttattcatttattacttgatatgatctatctggaatttttatacaataattactatagcaataataataatactgatgataaatatgggtactgactttccggtagttactgtactaagcacattacatgtatattttn

SEQ ID NO: 14394 - DNA, 468 bp, Homo sapiens
  misc_feature (1)...(468): n = A,T,C or G
ggttngaattgatgaccattagncaatgaggngcaattccagctactagctactcaggaggctgaggcaggagaatcgcttgaacccgggaggcggaggttgcagtgagccgagattgcgccactgcactccagcctcggcgacagagcaagactccgtctcaaaataagccagcaaggagggtcgccacgggggctggatgagagagtgcctcccagccgctccttctgctgcattctacccacttcctgtgagccagtctcaacccaaacactctttccccatcccgcagggattctgagaatcagggcaccccagacccaaggcagccacatttcccttttccactgagagcggaaagaggcctcggcacttcctggggcagcccaggatttggccgtgtttctgcattagcaagaaaaggcgtaatggaatttggatagacaagaaaaggggatgtaagcgtgn

SEQ ID NO: 14395 - DNA, 439 bp, Homo sapiens
ctagactttcattacactgagcggaggaagtgccatgctctatactaaacgaataacctatctgagagtcaactcagataatacagatatctattgtcaagggagttattcccagaaaacagtagcaagggcagccacgagggctaaccaaataacttactctactgccagggaggaggtcttcacagctcatgcccagcaggatttgataactgtcatgggcctgtgctgctgagtggactgtaacacagcctgctaatttccccctagattacattcttcccttcttccttttaataagagaatcctctaaattttagaggcatatggccacccaactggaaactgcagcttccaggccaggcgtggtggttcatgcctgcaatcccatcactttgggaggccgagggggtcggatcacgaggtcaggagttcatgg

SEQ ID NO: 14396 - DNA, 479 bp, Homo sapiens
  misc_feature (1)...(479): n = A,T,C or G
agagttgccnnnnngnngnnncactgagaccttaactgagggcctgaannctgncgatcgncttggaaggcccagccccagcccaggggaccccagacgtctccagtgccttggataagctgaaggagtttggaaacacactggaggacaaggctcgggaactcatcagccgcatcaaacagagtgaactttctgccaagatgcgggagtggttttcagagacatttcagaaagtgaaggagaaactcaagattgactcatgaggacctgaagggtgacatcccaggaggggcctctgaaatttcccacaccccagcgcctgtgctgaggactccctccatgtggccccaggtgccaccaataaaaatcctaccgagnacaaacaaaaaaatatgaagaaaaaaaacatgaaggatggaggaatggacctcaacatggagcagggcgtggcagagcaccttggtgatgtgatcctacta

SEQ ID NO: 14397 - DNA, 468 bp, Homo sapiens
  misc_feature (1)...(468): n = A,T,C or G
gggggaaatgagnccntngnnnaatgacgatccttantccatgtggtggaattcgaaagggcaggaaggtggatgggtgagagcacgggtgggtgggtggatagatggatcttcatatatagtgtaaaagtttatctttttttcctgatgatgtttagagtttggaaagttctctttttgtttgtttttacaggtggtatagttagggtcaaagaactggactggctgaaggacgacctctgcacaggtgtgtgtttctctcggacgtcccccagtatgattcagtgattcctttgtaatacctcagtgcccctggctctgtggtcttgacagagctgtagtcccagctgctgccacagtcccatcggcgcatggcagcttctctccattggccgatgagcaccaactgtcattctccgagcgcctgctgcatgctgggcacctcacgtttattttcttctccaggtg

SEQ ID NO: 14398 - DNA, 416 bp, Homo sapiens
gctgtttcttgtctgagccatgatcctgaaatagaacttggcagcaggaaagaacccagaaaatggattccacataaattcaaggaaaaccctgggtgcgtgttgtgcgcagtggctggaggcatcctgaagaacgagctcttactggcccagaatgtcatctcacatgcggaggcctgatttccgggagtggagtgctgaaaagcgctcagtcccagcagacagcccgtctccttactttatcactgcttctatccctttttaaaaagataataggccaggtgcggtggctcgtgcctggaatcccagcactttgggaggccgaggccagcggatcacgaggtccagagattaagaccatcctggcaaacatggtgaagccccgtctctactaaaaatgcaaaaaattagctggg

SEQ ID NO: 14399 - DNA, 460 bp, Homo sapiens
  misc_feature (1)...(460): n = A,T,C or G
natcgagaccatctgtccattgcggngcaattcgggctttggagagagaagtggcctgaagtagcacgcagtgtgggtggctggagtatatgcaggggctggagttacagcccagttttcttaattgctttgattttatttacctattttttatagaaacagggtcttgctatgttgcccaggctggtttggaactcctgggctctagcagtccttctgcttcaacctcccaaagtgctgggattacaggcatgagccaccgtgctcttggccttaattgttctgattttaataatggcatgatacccctgtaccccaagttatacagatgagagattttggctctggtatctctgtctctatcctgggtaaggtttctcagggttgtaggccagtctctttgtcaggaagagagctagtagttaaactgaaacaaaggtccgacagtctttattttgcn

SEQ ID NO: 14400 - DNA, 400 bp, Homo sapiens
agcagcgggggctgcgcaagtacaactacacgctgctgcgcgtgcgcctccccgatggctgcctcctgcagggcactttctacgctcgggagcggctgggggcggagtacgggttcgtccgggaggccctgcagagcgactggctgccttttgagctgctggcctcgggagggcagaagctgtccgaggacgagaacctggccttgaacgagtgcgggctggtgccctctgccctcctgaccttctcgtgggacatggctgtgctggaggacatcaaggccgcgggggccgagccggactccatcctgaaacccgagctcctgtcagccatcgagaagctcttgtgaaataaaagcaaggttggcctcagccctgtgggtctgtctcatgctctccctgg

SEQ ID NO: 14401 - DNA, 494 bp, Homo sapiens
  misc_feature (1)...(494): n = A,T,C or G
aggggnnnnnnccataagacttctctaggacggcaantcgncctggctatcaaaatacagttctgcctccttcagaacccagctttaatttttatttttttaattttaaagacaaggtcttgctgtgttgcccaggctggagtacagtggcatgatcataactcactgcagcctctaactcctgggcttgagcgatcctcccacctcagcctcctgagtagctgagaccacaggcgtgcaccaccacacttggccaacttcttaatttttttttggaacgatggggtctcattacgttgcccaggctggtcttgaactcctggcctcaagcagccctcctgcctcagcttcccaaagtgttgggattacaagcataagcgattgagcctggcccagagcccagattgaagacaacctttccaggctttctgctctgccttccagggggctcttagcagacctttatgtgtgagagtcattctccagtgtcgttc

SEQ ID NO: 14402 - DNA, 469 bp, Homo sapiens
  misc_feature (1)...(469): n = A,T,C or G
gccccaatgagnccntngnnaactgatgtccattagtccgtgcggtggaattcgtcaagactctttcttaagggccaagaaagcaacttgagccttgggctaatctggctgagtagtcagttataaaagcataattgctttatattttggatcattttttactgggggcggacttggggggggttgcatacaaagataacatatatatccaactttctgaaatgaaatgtttttagattactttttcaactgtaaataatgtacatttaatgtcacaagaaaaaaatgtcttctgcaaattttctagtataacagaaatttttgtagatgaaaaaaatcattatgtttagaggtctaatgctatgttttcatattacagagtgaatttgtatttaaacaaaaatttaaattttggaatcctctaaacatttttgtatctttaattggtttattattaaataaatcatat

SEQ ID NO: 14403 - DNA, 439 bp, Homo sapiens
  misc_feature (1)...(439): n = A,T,C or G
ctcgatttcatgacctctgtccangcggtggaattcgccggagttgcagttggaggctgcgggaatacaaagtgacactgactgccgggtaactgtctctcaggacatttgtgctttgagtctctgcaactctggaccatctctgcaggctaaaagatgtgcctgttgctaagaggaggagccctgcagcaggaatccggtgccagctgacctggaacaacctgatctccagaaagcatccctgttatactcaaatgggccttccagatgagccctgggtgtctacctttcaagaggaacaagaaaagagaggtgggaatatggaaccaagccaaagattctgcaggatcctgcacagtgagcattgttctggttcaggccactgtgctcaactgaacagtatcagtagcacaacatttggatgcccttgaatactgtg

SEQ ID NO: 14404 - DNA, 442 bp, Homo sapiens
  misc_feature (1)...(442): n = A,T,C or G
ctttgaagttcgattacaccagngcggnggaattccatgctggtaatctcagcactttgggaggctgaggcaggaggattgcttgagtccatgaatttgtggttacagtgagtaaaatcacatcactgcactccagcctgggtaacagagcaagaccctgtctctagataaatagatagatagacagacagatagaacagctgtataaaagtgtttctgtgtttctgttctctgtccactcagtagccttggtaaaactgaatttgaaaggtggagaaaaacattgtagttagcattcaaaagataatatttgctgtgacagtgacctttatgtgagattacttgaaaaattgttaaaacaggtttgcacagtcctgaacactgaactggagagtttgctgacaattccgattccaaaggaaagctttccaaatcagtcatg

SEQ ID NO: 14405 - DNA, 477 bp, Homo sapiens
  misc_feature (1)...(477): n = A,T,C or G
aataaatttgaaacccctnnnnaccgatctgccctctcagngngcgcggaattcaccgcgcccagcctttatgcttattttagtcagctctccttgtatatgtattgagatcgtagttgtagaattgtttctgggtcttgacagtatgtcatccaaaacaaagtctcccttcttcagacacttcccaaaactatccaaccaaagcccacagcctataataggttctttctgacacctttttactgatatacccacagttctctatggtgtgcattttccctagctgcaatgaacaacagattcaacttgtttaattataggtgtgtttccattggtctttggctgtagggcattaataatattatgtactattagtgcgttaataacattaataatgccctatagccaaaagtacttttaccagtgctagagatccaccaggctttctgctaaaggtcactctaacattacggacan

SEQ ID NO: 14406 - DNA, 466 bp, Homo sapiens
  misc_feature (1)...(466): n = A,T,C or G
nnccaattgaaaccctgaggactctctantccgagtggtggaattctcacaatataatattatgggtgttacgtataggctcactcacggggtagtaaaaagaatcattcctgcagtagcttccacaaatgcagtcattgcagctgtgtgtgccactgaggtttttaaaatagccacaagtgcatacattcccttgaataattacttggtgtttaatgatgtagatgggctgcatacatacacatttgaagcataaagaaaggaaaactgcccagcttgtagccagcttcctcaaaatattcagttttctccatcacctaaactacaggaggttttggattatctaaccaatagtgcttctctgcaaatgaaatctccaaccatcacagccaccctagagggaaaaaatagaacactgtacttacagtcggcaacctgtattgaagaacgaacaaggccgaatctt

SEQ ID NO: 14407 - DNA, 551 bp, Homo sapiens
  misc_feature (1)...(551): n = A,T,C or G
accactaagcacatcatcttcacgcagaaccagtatgtccgcgacagcatcacanccattctaccccagcaggggaagaccngggnnnnnnnnnntttcgagaccattagacaccgtctaggaangcggnggaanaagaagtacctaaggaaaatgacgagtcgatgggcgcaacaaaccatatatcacatgtttacctatgtaacaaacctgcaggttgtgcacatgtaccctataacttaaagtataacaaataaataaataaaacaaaataaatgggtttaaaaaaaatcgtacaggctgggcgagggggttcatgcctgtaatcctagcactttgggaggctgaggcgagtggatcacttgaggttaggagttcgggaccagcctggccggcatggtgaaactccgtctggtctaaaaaataaaaaaaataaaaaaaaattagccgcgcatggcagcatgagcctgtagccccagctactatggaagctgaggcgggaaatggcgtgaacccaagaggcagagcttaagtaagccaagattttgccg

SEQ ID NO: 14408 - DNA, 456 bp, Homo sapiens
ctcgacacccttggatagaggactcttagtccagagtggaggaatactttatctattagaactgccattttattaaacattttcatgcacagtagactcttgttgtgtctgaaaatatctcttgtgctttttgattttgctgactttaaaaggattaatctgggcagacattatgtaaaagaaaggttgcgtttaatatattttttgaactttgtaggacaaaacatagctggttaaccttgaagtgactgttgtaccatggttgtgcacatgcttcagaatcctatggaagagaatattcctacttgcagtacatcaaaggaatggatggtggaccctactattcatgttttgagacataaatgttcactttaaagcaattgcataatagataaaaacctgaactttcattggatttttgttaattttcctcattttgaattatgtgcactacca

SEQ ID NO: 14409 - DNA, 450 bp, Homo sapiens
  misc_feature (1)...(450): n = A,T,C or G
aaaaaaaaacctgagaccnctgaagccgtgggattccaactcccatcctggagcaccggctgcaagttgccagcgtcgccaaggagagtattccgctgttcacctacgggcctgatcaaacttgccttcctgttctccaagaccaggtgcaagttcttcagtctgactgagacaccagaggattacactatcattgtcgatgaggaaggattcctagagctgccctcctcggagcacctgagtgtggcggatgccacctggctggccctgaacgtggtgtccggcggtggcagcttctccagctcccagcctattggcatgaccaagatcgccaagtcagtcatcgccccactggctgaccagaacatatccgtgttcatgctgtccacgtatcagacagacttcatcctggtgctcaagcgggacctgccctttgtcacccacacgttg

SEQ ID NO: 14410 - DNA, 414 bp, Homo sapiens
caatgttctttgtagtttgttccttttattgtaatatagtctctatccctattaatgctttttcgctactgatacctgacttttttccccttaatctttgacttgtaatatgtgagattaatctatttgaataagtagacttatttctgctctctgaattttatattttctgatccatttactttgctgtgtgtgtgttttgtttttgtttttgtttttttttttttttggagcaaacttttgtgccccgggtgggagtggcacaatttggttcccttgaattttaaccctccaaggtaaagggaatggcctggggaaatttccccgggaggggggaacaacgggggggacccccatgggggggaaaaatttggatttttaaggagggagggggtttacccaggtgggaagggg

SEQ ID NO: 14411 - DNA, 472 bp, Homo sapiens
  misc_feature (1)...(472): n = A,T,C or G
gggaacaanatttgagacacttgagtacgtctgggaannccgtgctttttggttctgaacttgaagtccctaaactgcaaaatctaagagttgggtggttattaaaatgcttttaaagtcaactgtggcaccaattctaatgtaatccaacttgtgactgtttttttttgttttgttttgtttttgcgtgtgtgtgtgtggcactgggaaaagtggaaacaaacatgtattgaaatacatattggaaataaaaatggtttgagcgtcagtgatattctcccagaatgtacttatcttacctcggcatgtactgtagtcactcagtatttgtatatgttgctagaatttagattgtaaaatagtgaaattttaatgtgttcatttgtttttaatgtatatatgtcttgctcagattatttggtttaaataaaacaaccttgaggtgtgtagcttttccttatactaaaaaaan

SEQ ID NO: 14412 - DNA, 471 bp, Homo sapiens
  misc_feature (1)...(471): n = A,T,C or G
ggtcctcnnatcgagaccatcatcganggcngtaaacaggcggacaaacagtcccatgacctgggtgcagccccgagtgttggatttgcaacaggtgatgtgtttgaaacccattattcacctctgtggattttgaggggttgtgtctataccgtcttagtttcatttggatggaagccatttgggaagacagcattattagacaagaggttttggagaaggaaatactgctgttgggtttttctaagagcctaatttaatgcaagcctagggtttgaaccctgcatttaaaagcttatgatgacaatggcactggttgtgctgacggtgccttttaatcttaagataggagctctgatcagatacgttcctggttctgtgatttgagctcacgtcgctcttacatttgctggaaatgcgatcctgtggatttcctctgttcttgnctgctttctttcatgcaagtttttt

SEQ ID NO: 14413 - DNA, 442 bp, Homo sapiens
  misc_feature (1)...(442): n = A,T,C or G
nattgatgaccatatggacagncngttggaattcagaaactagggattattctggcaatgggtggaggaaggtggtcagaataacccagtcgccattggttttgagaaacggaactatcttatgcagagcccggagggcaagtctcaaacccatgggttgaagccatggagaaggaaatttggatccaatgtaatgaagctctttctaagtcagaatttccctgcaatggtgtggcctgattcaataaaaattaagaataataaatataatggaaaaaaatctccactgattgagtgtttacttggtgccaagcactatgctaagttgttcattattttatttaattgttacagcaattttgagtatgcatctttcactattttataagtggaaaagagaagtgcccccaaaaagttagagctcatacagcagcttattctg

SEQ ID NO: 14414 - DNA, 501 bp, Homo sapiens
  misc_feature (1)...(501): n = A,T,C or G
tgggtcnnnnnnnaagtacgactttcgtaggcagcngcgtggaattctgcagattgcgtggtctcgggaattcctcaaatattttggaactttttttggccttgcttccatctctttaacagctgggtatgtttgctatttaacattttcttcagtcatttacttctttttgtgttttccattaccattttattatgaagttggccagaataagactttggtccaaatagtgtatgtaaccaaagtaacctattaaccttagtccttgggggtaactctgtgaaagcaaggcagtaacagttaatttagtttcctaggttgcttctgtctttttctctactttattagttagagagagagagcaccaacttgacaccaagaagggctctatgtgtttatctccacaatcccttagtggtagataccaatccttactcattttaaaaacaaggaacctgagcttcagagtcaaataaagatgagcaagtcacagaccttgcc

SEQ ID NO: 14415 - DNA, 497 bp, Homo sapiens
  misc_feature (1)...(497): n = A,T,C or G
ncctcgaggaccactaggcagngnggnggaatatggtatcgccgtcccctctggccgcgctgtggctgtttcaccgctccccggctgggacttggagtcccttatctttccctggtttggtacatgacccggaagcctcggctggccgttgcgtcatccatggcgccggcgcagagcgagaaggaggtgggaacgccgtgaagcaagagcggtcggcagagcggggaggcgaactgcagcagagttcttgctttccggcaggtgatggcgccccccgcggcctagaggtccagcgcccgccgcgagcagcggacagtcctcctgttgtgtccgaccgagagtcctggtgactttgaacatgctggtgccgctagccaagctgtcctgcctggggacgattatcaagatgaacagagcctgagaagggagtcaaaattgaagctcagaagggatggtatcagatggaggaatgtctctagacaacgggagagataagg

SEQ ID NO: 14416 - DNA, 489 bp, Homo sapiens
  misc_feature (1)...(489): n = A,T,C or G
ggcagcacgcccggccnnnnnattattgattaccgttgccttcagcaangcggnggaantccctccggcatccgccccggcgggccgcccccgcccgcggcagccccccgagttgtggttcggcatcggcgccttcccggcgggcgagagtgggccatggagctacgtgtggggaacaagtaccgcctgggacggaagatcgggagcgggtccttcggagatatctacctgggtgccaacatcgcctctggtgaggaagtcgccatcaagctggagtgtgtgaagacaaagcacccccagctgcacatcgagagcatgttctacaaaatgatgcagggtggcgtggggatcccgtccatcaagtggtgcggagctgagggcgactacaacgtgatggtcatggagctgctggggcctatcctcgaggacctgttcaactttgtttccgaaattcaacctcaagacggtgctgctttttgccgaccagag

SEQ ID NO: 14417 - DNA, 310 bp, Homo sapiens
tcatcatcacatgagaccatgggatgaccaccgtgaagaagagacccaatgtcaacaagatcccttgtccaactacatcaagatcagggactgtgtcaagtttgatattgtgggctacggtgtctttgggatgcccctaaccaaattggggcaagaggaagccctttaccatgcactaagaatgtgcaccctgacctccacgtctacaagaaggagtttccagaagacttccatctcgctaacatgaccaagttctgcaatcatgatgatgccaattgtggtacagttcaatgggagaataatatgtgtt

SEQ ID NO: 14418 - DNA, 471 bp, Homo sapiens
  misc_feature (1)...(471): n = A,T,C or G
gaggcaggnncgngccccttttgaaaccaacttagagacatagcacangcggnggaattcggaaacctcccgttgcctagtaatcaccccatgtaggtgtacattgtgacaaagtgcatctgaccactaaggggcccccttggtgaccccagcacattcacagcagtgttaaaatggcctgcattttggagatgctggctggcctttcagtgcctcccaggaagacacatggcctttccctcttcagatgcctgaagggagtgctttgaggcaggtgatgtgctgggagtgtgggcggcctccctctggccccggggccctctgtggaccttggctccctccgtggacctgggcttcgtggtgagcactgcagcctccctgggcattccctccagcgccagcaccactgcaacatatagacctgagtgctattgtattttggcttggtgtgtatgctcttcattagagaan

SEQ ID NO: 14419 - DNA, 491 bp, Homo sapiens
  misc_feature (1)...(491): n = A,T,C or G
ngggatgggcgccngnaannnnnaaaatgagnactagcggcatngcggnggacnttagctggcacagtaccaggccaatgcaaaccagctgcaaaagctccaagccacctttgaattcactgccaacattgcacgtcaggaggaaaaagtgaggaaaaaggaaaaggagattttggagtccagagagaagcagcagagagaggcgctggagcgggccctggccaggctggagaggagacattctgcgctgcagaggcactccaccctgggcacggagattgaagagcagaggcagaaacttgccagtctgaacagtggcagcagagagcagtcagggctccaggctagcctggaggctgagcaggaagccctggagaaggaccaggagaggttagaatatgaaatccagcagctgaaacagaagatttatgaggtcgatggtgttcaaaaagatcatcatgggaccctggaagggaaggtggcttcttccn

SEQ ID NO: 14420 - DNA, 476 bp, Homo sapiens
  misc_feature (1)...(476): n = A,T,C or G
agggnnaggnnnccgggnnngnnnnnnaactgatgnacacattgacgccccttggacagccnagagagaagcactgtgggtctctatccccttgtcacatagagagtttgtcatggggcctctggctgcgcccttcacataacagaatgacttgccatctgcctgcaccaaacccagggatgtggaagacatctccccacaactgccactgctcaccaggacaagctgcccttcctgtctccacctctcagtccccctagaatggatggctggggagaggtggaggctgacagctgagacgtagtgtcagatatgatctaggagggcggatcaccgggatccgggaccatacaagtaacatggtttccatggcaactgcttgctcctttgaattaagacagcagtcagttgtcattgccatgacaaggcctctatctccaggcacaatgtccctgctgtctcctaatccaatggac

SEQ ID NO: 14421 - DNA, 464 bp, Homo sapiens
  misc_feature (1)...(464): n = A,T,C or G
nnnnaaattcgangactagtcgnacccctagtccagagtggtggaattcctcaagtaggacaagggtcctacccaaggctaggaccgccctgcggaaacagaaacatagactgagaacaaacctcaagactatcagtgtgacctccccataacaagagaaccccatatatagtttgagactttcccttgagaaacttatactaaaactattactcatcagtcattcactgatcagcagctaaagtccatgagaccaaatggttttatatggaaccaacaaagtgggagctaaaactgcacagtggtcattctttggcctctccttggctttatgacttaaaccaactacaacttccctatagcttctaagcagtttcatcagcattacttgggaaaacgtgttgcaagtcaaccagtcactaggatatttctacccatgcaacggaagaaaaacccattactcn

SEQ ID NO: 14422 - DNA, 464 bp, Homo sapiens
  misc_feature (1)...(464): n = A,T,C or G
ccggtttgggccngaatgagnacccactgataaccctctgaaagcgcggaggaattcgatgggggtctcactatgttgcccaggctggtcttgaactcctgggctcaagtgatccacctgctgtagcttcccaaactgctgggattacaataggcatgagccactgggactggctgtgctgtaagaattttgagggtctgcttgataacctggcaccctgctctttggtttttgtcatctgcagaatccttttggcttgaaaacagtgtagaacttgctaggggaaacaaggaatatactcaaaatgtgggtaaaagattcaaagaccttggcctgaccgtagcagttaaacctgaattggggtgttatttgggcttgcccacttcttcctgatatttatgtattctgcagtctctttagacccttcatcatgtgtgtgtttttttttttttttccaaactgan

SEQ ID NO: 14423 - DNA, 421 bp, Homo sapiens
caggaggttgaggctgcagtgagctgtgatcgtgccactgcactccatccagcctgggatagaatactgtcagaaagaaagagagaaagaaaggaaagagagagagagagaaagaaagaaagagagaaattatacctgggtttggaccctgtgctcaccacaaaggagctgtgaccttgggcaatttatttcctagagtccaagtttcccaactggtacagaggagaaaaataataataacagtaatacctgacaggttgggagagattgtgctggtgtcacagagtctgtgacggcacttgtaagggagtgctgcataaatgagagtggctgctgttgttgcattattgttttacatggttataaaacttccctcaagccccgtttgaaaagagaaatcagtagttggcaaacaaattcg

SEQ ID NO: 14424 - DNA, 492 bp, Homo sapiens
  misc_feature (1)...(492): n = A,T,C or G
gggaggacgcgcgggccnnnnnaaattgagaacttgagagctatagcacagngcggtggaattcgattaaggtaaccttgtccagaaagatttcattcatttagaaaaaatttattgaaggcctactatcatgcaccaagcactactctaggtgctgggggaaaaggacaaataaatcatgttcctttccctcaaggagctcacaatctagtagcaggggacagatatgtaaacagttagttgcataaagcatcacagtgctgtagtagatgtctgagctagagataagaactttggaatggtcaacatatagtaaaggcagagaatagatgggattggagactgttaagaaatggaatcttgaaggactgtaataattggaagaaatgctagaagaggagagtaagaaggaataattataacagtagttcggatatatgaatcatttactatgtcctagggactgtgctttacttagattatctcaatcct

SEQ ID NO: 14425 - DNA, 464 bp, Homo sapiens
tcgccattgaaaccctgatgaccatctagtccagactggtggaattccttcttaaaactgggcctcaagcttccagtattctttccactgtaccactttattgatgtgtatgatgtagtgttgattttagcctggcaggtaaatgttacttgtttgtagaataagatgtgaccattcatgccacttgaaggaaccgtaaggcttagattctttaaccatactttttattactttgtttaggcataggtttagtctctcttatcaagagatcagaagctgaatgtggaggcagaatgatagagcaaatgatagagcggagcagtgctgctaagcagctaggcatttttctaggcacttctctgctgaggctgttttaagtaggtggacaccctgtagttcatatatttgcatgtttatagtttgtaacatacagaacatgcttagtcaagtatagatattctttg

SEQ ID NO: 14426 - DNA, 452 bp, Homo sapiens
  misc_feature (1)...(452): n = A,T,C or G
attcgcgtaccactagcccagngcggnggaattccctccccctcccccaggccgagcgctgcgcactggagaaagagtgtgttgcaactcctaggcgaggccttctcttcagcaggccccacaaactcgcctttgcagtgggtggctcggtaacctctgtcggccccaagcccagagctccgtacgcactccctctctccagattttccttcttttggaaccttattccttgaccctttccctttaggagacgctgcttttgccaaagcacacatctcagagaggggttgaaggatcttgggcgtttagggcctaccccatacagaaaccacctaccctcggggaggcttaattacctggtaatgtcgcagctgcactgctacctgtgtattttctgttttaatactggtagctctcaccacataagcttaattactgggggcagagtgaca

SEQ ID NO: 14427 - DNA, 454 bp, Homo sapiens
  misc_feature (1)...(454): n = A,T,C or G
nttcgagaccatagaccacgtggtggaattcacctctcgaggcaccgtaagtttgaagtcctccaagttgtggtcggcgccatcatgacgccggcgactgtgttcaatagctcactgtgattgttgagaagtcaacacagggacaaggaaatctcagatggttgtctacagttacaagggggattgttggactgatttgtgatttttctgggaatgcaactcaagttagaagaggccattatctgaaagaagaagaagcaccagctgatgtgttggttattttagggcgacatttgcagttgcttgggcaatatcatgagcctcacctcatgcaggtctgggtcccagacccaaagactgctcctccatactcagagataccagcactaacagagcagctcctcttcttcagtacagatgcttctcaacttacaatgaggttatacccttataa

SEQ ID NO: 14428 - DNA, 472 bp, Homo sapiens
  misc_feature (1)...(472): n = A,T,C or G
nattgaagcccctactgacgaccctagaacagngcggnggaattcgatggattggttgccgtggtctttactgcttttctccctgatgtgtgaaacaagcgccttctatgtgcctggggtcgcgcctatcaacttccaccagaacgatcccgtagaaatcaaggctgtgaagctcaccagctctcgaacccagctaccttatgaatactattcactgcccttctgccagcccagcaagataacctacaaggcagagaatctgggagaggtgctgagaggggaccggattgtcaacacccctttccaggttctcatgaacagcgagaagaagtgtgaagttctgtgcagccagtccaacaagccagtgaccctgacagtggagcagagccgactcgtggccgagcggatcacagaagactactacgtccacctcattgctgacaacctgcctgtggccacccggctggagctc

SEQ ID NO: 14429 - DNA, 453 bp, Homo sapiens
  misc_feature (1)...(453): n = A,T,C or G
nnnaaatcgagaccatagnttgtgtggcggaattccttgcaagatggcgggtgaaaaagttgagaagccagatactaaagagaagaaacccgaagccaagaaggttgatgctggtggcaaggtgaaaaagggtaacctcaaagctaaaaagcccaagaaggggaagccccattgcagccgcaaccctgtccttgtcagaggaattggcaggtattcccgatctgccatgtattccagaaaggccatgtacaagaggaagtactcagccgctaaatccaaggttgaaaagaaaaagaaggagaaggttctcgcaactgttacaaaaccagttggtggtgacaagaacggcggtacccgggtggttaaacttcgcaaaatgcctagatattatcctactgaagatgtgcctcgaaagctgttgagccacggcaaaaaacccttcagtcagcacgt

SEQ ID NO: 14430 - DNA, 447 bp, Homo sapiens
  misc_feature (1)...(447): n = A,T,C or G
gttgaagcctttgatgccctcgaaaggcggggaannctccaaagaaaaatgacatcaaagacgaaggctgaaatggttttgctttgatggatgaggacgaggacagtaggaaacacttcaattacaacaagattgtggagcaccacaatttgagcaaaaagaagaaaaagcagctcatgaaaaagaaggaattaatagaggatgactttgaggtaaatgttaacgatgcacggtttcaggcaatgtacacttcccacttgttcaatttggacccctcagatcccaatttcaagaaaacaaaagctatggaaaaaatccttgaggagaaggcccggcaaagagaacgaaaagaacaagactttactcaggcaataaagaaaaaagagagtgagattgaaaaggaatcacaaaggaagtccattgatcctgctttgcaacggttgatag

SEQ ID NO: 14431 - DNA, 472 bp, Homo sapiens
  misc_feature (1)...(472): n = A,T,C or G
gctgggctnnntttgatagcatacgtcagngcggngcaanncgaaacagacagatgtttactcttccttgtaatgagtaggtttggatttaagagccgattataggctacttcctgtaaacaagtacaggaaaatgaaactagacgggtgggggacactagaatgaaaaccagtgttagggtaaagacaaaacagactatgtacataatctgtatatgggaaaagaaagagcgaaattaccttacttaaggataataggacaagacaaattacagattgtctcagagaaaacaaatgagttactctctcggacaagctgtaggtcctacctaaatgtccagcaggacattagacagtcgtacagggtacagaataattcttcgttgtgtggcactaacccacacactgcaggacatcgttctccctggctgcatccactcagtgctgggagtagtccccagttattatgaan

SEQ ID NO: 14432 - DNA, 440 bp, Homo sapiens
cttgttcacctttggactggacagggagccacctcgcagtccgcagagctcacatctcccaagcagctccccagagcacctgggtctggagccgggggaaaaggtagaggacatgccaaagcccccacttccccaggagcaggccacagacccccttgtggacagcctgggcagtggcattgtctactcagcccttacctgccacctgtgcggccacctgaaacagtgtcatggccaggaggatggtggccagacccctgtcatggccagtccttgctgtggctgctgctgtggagacaggtcctcgccccctacaacccccctgagggccccagacccctctccaggtggggttccactggaggccagtctgtgtccggcctccctggcacccttcggcatctcaaagaagaagaaatcctcatcatccttccatcctg

SEQ ID NO: 14433 - DNA, 486 bp, Homo sapiens
  misc_feature (1)...(486): n = A,T,C or G
nggagtnagccgggcannnnaaaactgagactgaaggcatngcggnggacnncggagggaatgagggtaacacttttcatttagttcttaattttcttctgttctactctacaataaagttctgatggtatattggagctattatggtcatgctatcacaagagggtctaggatctaacagccagaaagattaagatgcaaatgcaaaaggaaccatacagatttcaatttggagaagtagggagtctctgacgatatttgaatggaaagagacatgtcattatttttaccattgcttcttattttctctcaactattccatgtattttccgtagttcttacaccttttattcctttcttttcattgggataaacattgttcattgttaaacaaaatatatcacctataaacatctgacacttttgtatgcccatagactaccatttctttgataaagatgaagcatatcagaaacttgctaggaa

SEQ ID NO: 14434 - DNA, 470 bp, Homo sapiens
  misc_feature (1)...(470): n = A,T,C or G
gcggccgnnngnntttaaccctaggggcctccgnnncatgcnngcnagtanaancnnnnnnaantanaaaggggngnatttaattccatcaggttcagtacagcattaggagtcataatactttataaccaattaaagggatagaaccactgagacaataatgtatttttttaaagcggcaaatgtggctttcttttttcagcctttgcgctttttcagtattttgaccatagggagataatttttttataatacaaaagtaaccacttggaattttaaagataatgttatgtgtgtatgtgaaatatatatacatatatatatatatttcctaaaagaagaaaagatacctttctgttcaacttgtatcaactcctcttttctaattgctgtgaaatggcaactgttgataaattattgtgattgttttaaaatctaaagggaagaaaaatatattttgaatttacccg

SEQ ID NO: 14435 - DNA, 449 bp, Homo sapiens
  misc_feature (1)...(449): n = A,T,C or G
natcgagttcactacnccgnngcggggaattcctaggatttaatgacaaatgtatgataagctttggagaacaatttctctctccagtccttatttttggtaaaaacaaattattataggactgtgtgtgttgttcatagaataaactttagtcttatacttggcctgattatttgcataaagtgcagcaagaatggttatttctgcataggacttttggattggctttgatgaaacactattccacaaggaatttcagataagacctttaaagccaagcccagccatgggattgtatcctcaaatatctgtaagttgggtgatcctcttctccttgaggtcccaagataaacttggagctcctggcctattagaaagtgacattcttaggctggcacggtggctcatgcctgtggtcccaacactttgggaggccgaggtgggcagat

SEQ ID NO: 14436 - DNA, 469 bp, Homo sapiens
  misc_feature (1)...(469): n = A,T,C or G
gcgggntnnnaaggatagcatacgtcagngcggngcaattcgngtttaatgtgaggcatcagctgctagacagtgtctgcctttccaggacattcttcttggtattccttacctgaagcctggttcccacagctcttccgtgtcatcttcatccccttcctttaatcaaaggctgaaatctctgcctgacctggcagcctggctccctctgggtcatatggtgcagactgtgaccagcaccaggcaggcagtcctgtctgcgtgtggaggagcagccgtgactgcccgtggctctgctgccgcccactccctgccttgtgagtggcctgctgcctcacctcccgcaggccgccacacttattgcaggtcagtgatcctttggagtttgaatttcacaaagctttttttatcttcagttcctaaaatataatctgataattaatggtttgtggaatccattatgaagtgc

SEQ ID NO: 14437 - DNA, 458 bp, Homo sapiens
  misc_feature (1)...(458): n = A,T,C or G
ctttgagaccattgatagccattgggaagngcggcactcgacatttggtgagagaagtacaaaggttgcagtgctgagctgtgggcggtttctggtgatgtcccagggtggaactccacatgctggtgcatatacgcccttgagctacttcaaatgtgggtgtttcagtaaccacgttccatgcctgaggatttagcagagaggaacactgcgtctttaaatgagaaagtatacaattctttttccttctacagcatgtcagcatctcaagttcatttttcaacctacagtataacaatttgtaataaagcctccaggagctcatgacgtgaagcactgttctgtcctcaagtactcaaatatttctgatactgctgagtcagactgtcagaaaaagctagcactaactcgtgtttggagctctatccatattttactgatctctttaagtatttgtg

SEQ ID NO: 14438 - DNA, 451 bp, Homo sapiens
attgaagacccttagtcactgcggtggaattcgctatattaacctatctgggaaacattttctaccctacatgacattgaagcatgtcagaaattctgaattatagcacaaaattttatactttatagctctggtttgttttattacttttaaaaaactataatacccacggacaaaagtgcctatctcatacatgtgtccctcaatatatttttcacaaagtgaatacacccatcacaaactgatcagcatccaaatcaaggaaaaacacagtaccagctccctcagaagcttcactttaacccctttcagtcatttcccactctcagccccaccccccagcccccatcccagcattctccttaaagcatgcgatgtaattgtgttcttaagtaaacagaaacctcagtaggaacctttgctctcttgttctgttccttaagaaatatga

SEQ ID NO: 14439 - DNA, 492 bp, Homo sapiens
  misc_feature (1)...(492): n = A,T,C or G
ngaagggatgcgcgnctnnnnnnaaaatcgtagatcgtagtctatngcggnggacttcgttaaatacctagaagaatttcaacattgttttaaatgttgtgcatctgtaacttcaggaggatcacttgagctttaaaacctgtgccttctcgaaacaagaatttgtgcctgaggtgaaaaaagtttgtaagttattgaattatggtgttcattagaacagctactagctgattcccctattttaacaaactgacaagagcacatccataaaatgaaaacctgttacaactatgtacagaagggtttgacgttttattgggcttttgtcttttaaagaatatgtctactatgggtattttttttttaaatgttaaaatgggctaggtaaaagggggctgcttttctgttaagcatcgataggtaagttgatggataaaagttactatgtaagcctatttttttgagtccttatttgaatattgaaaacattct

SEQ ID NO: 14440 - DNA, 471 bp, Homo sapiens
  misc_feature (1)...(471): n = A,T,C or G
aggccaccccccnattgtagaccaatagaggacccctaggcagngcggaggaattcgcattaataaaagcagccaaatagggccaaagagaaaaataacatgtctctgtactggacctaactttatcattaattaggtaatatgtgcctcatttctttactgctgccattttcctcaccagtattccagagatggtcatagctcattactctaccaccaagaacctaaaaggaattagaatacagcagaattggcctcagtgaagagcttaaaattgttctcctcgtagaactggattattgatcattaccacgtgacgttggctctattactttctgttcccaatgtccttctagtggtttgaaaatgttaaaacatccctaaaatctaaatcatataatcagaattctatagtgtcccactctatctgtaaagatcatttggaagactttagactctattaattttaaa

SEQ ID NO: 14441 - DNA, 449 bp, Homo sapiens
atcgaattcgagacactagtccgtgcggtggaattcgtgtcacaattgtcattcagttcgaagaaatttttaatttccatattgatattattgttgacccaatgatcactcagaaacagtttacttaatttgcatgtatttgcatggttttgaaggttccttttggagttgatttccagttttattccactgtggtctgagagagtgcttgatataatttcaattttcttaaatttattgaggcttgttctgtggcctctcatatggactatcttggagaaagtttcatgcactgaggaatagaatgaatattctgcagttgttggatagaatgttctgtaaatatctgttaagtccatttgctccagggtatagattaaatccattgtttctttgttgactttctgtcgtgataacctgtctagtgctgtcagtggagtattgaagtc

SEQ ID NO: 14442 - DNA, 476 bp, Homo sapiens
  misc_feature (1)...(476): n = A,T,C or G
tggggggtnnnnatcgatagctttccgtcagngcggngcaattcgnccctggagcaggtgagcactgcgagggaactgagatgcaagatcctcctgcctgaactcacaccccgcgtgctgctcccccaactcgcctcttggatctcagaccagaagcttcctttcctcaaaatccttctatgttctccaacgtctttgggacagagctccttggcagggtttacaaagcttaggtggccctacccacttctccagcctcatctgctgcctcacccctataccacagctctgcacctttgctgaaactggtactcggcgcttggggtgtcctcatctttcccctacctatggcagcctgcccgaagagtgcctgctccttcaggctccgctctcggcttagcccctttttggaacgtncccgcacctcaccccagccccttgccaggggcagaccctggcaggcttccctcggcctt

SEQ ID NO: 14443 - DNA, 450 bp, Homo sapiens
  misc_feature (1)...(450): n = A,T,C or G
atcgagttccactacccgngcggnggaattccaatcagcaggacatgggcggggacaaataagggaatacaagctggccaccccagccagcagcagcaacccgctcaggtggccttccatgctgtggaagctttgttcttttgctcttcacaataaatcttgctgttgctcactcttcgggtctgtgccacctttaagagctgtaacactcactgtgaagattcgcggcttcattcttgaagtcagtgaaaccacgaacccaccggaaggaacaaactctggacacactagaattgatggtagaggtgataaggcatgagacagaaataataggaaagactttggatccaaatttctgatcaggcaatttacaccaaaactcctcctctccacttagaaaaggcctgtgctctgtgggactattggctctgggagactcangaacttgtn

SEQ ID NO: 14444 - DNA, 451 bp, Homo sapiens
  misc_feature (1)...(451): n = A,T,C or G
gccttctaaacccagggtccgtcgtatagnccggnggaattntatnngcaagaacttctttaaagaagaaataagatctgacaactggctggcttcctaccttggactgcctcccgattccttgctttcttatcctgcaaattactcagatgattccaaaatctggcgccctgtggagatctttagactggtcagcaaatatcaaaacgagatctcagacaggaaaatctgtgcctctgcatcagccccaaagacctgcagcattgagcgtgtcctgcggaaaacagagaggttccagaaatggctgcaggccaagcgcctcacgccggacctggtgcaggactgtcaccagggccagagagaactaaagttcctgtgtatgctgagataacaccagtgaaaaagcctggcatggagcccagcactgagaacttccagaaagtgttagcct

SEQ ID NO: 14445 - DNA, 483 bp, Homo sapiens
  misc_feature (1)...(483): n = A,T,C or G
tggttntagcccagggannnnnnnnattgtagatcatagaccagcgcggaggaattcgagacagcaaagccgaccctatccagtccttgggactgttatgaacagaaaatgatgcaatgtatgaaaaactgctttgaggagaaaaacaacacagtgtgtttttggaagatgtgattgatttgtaaaccgcattaaatgctctgaaataaaatgaaagtaaaaataacaaaaaaaaaaaaaaaaaaaaaaaaaaaaaaaaaaaaaggcggcccctttaatttaaaaggcccctttaaaccccgttgaaaacccccgaggggcctttttagtgcccccccttttttttttggccccccccccggtctttttttggcctgggggggggcccccccccttgtttttttttaaaaaaaggagaaaattccctccctttgtcggagagggggctttttttttggggggcnnnaccccnacaaaccgaaa

SEQ ID NO: 14446 - DNA, 456 bp, Homo sapiens
  misc_feature (1)...(456): n = A,T,C or G
nttggagaccatagaccaccgcggnggaattctagaaaaacttggaatacataggcagcagagtttgaaaaaaataatagaacaaaagaaacaccaagaaaaacagagaagaaagttttaaaaaatgaagacaagattatataaaagtcatggaaaaagcaacaagactaaaaaatgtattatggaagtaagcagaaatacttgcctaaatggaaaaccaaactgggaagtcaaataatttgtctctaagacttgcctaaacttgctttggtaaaacttacagtcctatggccaaagctaagtcagatctgccctagagcctttgaaggtaaaaataagatactggttaccactgaaatcgtcaaatttattaggactaaccacattctaacaataaacttaaatgagagttcaaggtatttaaactctcattaatttagaagttaatcaaattaa

SEQ ID NO: 14447 - DNA, 469 bp, Homo sapiens
  misc_feature (1)...(469): n = A,T,C or G
gtgggatnnnatcgatagcgtacactagaccgngcggnggaattcagcgggacgccggagcctggctgctgtgccccgcgcgggcgcccccgccgtaggttccccggtggcatatatatctccagccttgggcaggctctgctcagtccctggatgaacaagcctggaggttcctgagatatatcaacaccacccagattgcatgcaatcacatgaatacagacagcctggctactgactctagtcctacacacaagccctggtcagtgtgtcttgacgacaggttcaatttagctcatcaaatccgcaacaagcagtgccgcctctactccttacgattgacgttctcaaggcagatctggaaagtgcagaatggaaagttttggaaaatcttattctggaagatgttcttgaacagataggacagctcatctttgagatccatctccactggcctgggtttgaggct

SEQ ID NO: 14448 - DNA, 460 bp, Homo sapiens
  misc_feature (1)...(460): n = A,T,C or G
ngggaatcgatagcgtancntgngncgnggcantcccccgttgttggaagcatacagcggagtcttcagatacactgcgtcctcgatgcgcatatgttgtcagaggaaaatagtattaacagctcactcgagcacgaaccctcctgactgtactggctagaagtttgcatggattatttaccctatacgaaagaaagccaagatttaggtaatgagtggatgagtaaatggcggaggatgggagtcaaaatcagaattatagaagacgtatttcctgtacctatacaaagacttatgtatatatacatgcctaaatatatatgtgtgcgtgtatctgtggatggatatatgtatatctcttgctatatatatccatagtggacttattcagaacatagatgtgtattcagcttggcttcaaatacggtcaagcagaaaacgttttatattttataaatct

SEQ ID NO: 14449 - DNA, 456 bp, Homo sapiens
  misc_feature (1)...(456): n = A,T,C or G
attgacnacccatgatngacatctgnacancnggnggaattcgccatggtgtgctactgaaaccaatttttatccaccatctagtccttattaaatgtaacctcacggatcctttgttccgcttatattccatgcataccacataaaagcacacagtgcgaaaactcttgctgatacgcgatattgattctcattgttagaatatggagagtgtttcagcctcgtctgtccggctggagcttcgggatggaaagtgctatgtgtccctgcatataagaatcaccaggccagtgtttctgggtttgcttgtctatatgattgtctatattttttgcctatacatttttcccacgtttccaacagcacttctcacctattcaataactgaaaaagacattaccatagtgctttacatttttaaagtaatgttacaagggtctggaatccatttggagg

SEQ ID NO: 14450 - DNA, 487 bp, Homo sapiens
  misc_feature (1)...(487): n = A,T,C or G
catggagaccctaggatgagggctgtatcgacctgtccttgacaagcagatgtaactccttgattgaggctagtaggtttttaagacctgaataattgagtttgcagaaacctactgtgtgccttcaggtaaatggagagtggggtttggtctagcaacgaagcatctagaaggtctctttggccttaccggctctgttttaggtaagtccacgtctgagtaccagtgactgcagctcttccagttgtgctgtcatgcttatatgttagaaatgatcatcaaaggactcaaaagttttgccactaattgtattaccggggactgtcacaaccaagatttctcttaatttattcaccttacttatctcctggaagggcatattgaagtgctcttggagttctctaaaagggtttttgttggttgtgtatattcacttgggtgccagcgattgattccaaataagtaaatctttnttcccaaaaggatg

SEQ ID NO: 14451 - DNA, 448 bp, Homo sapiens
  misc_feature (1)...(448): n = A,T,C or G
atggttttcacccacnangacctagcgangcnangaangcggnggaancagtaaggacagggactctggaatccagcagttgtgagtttgaattctgcctcatctcctgactagctttgtgaccttggccaagtcgcttaagcctgtaaatggggataatacttatatctaccttataagttgaagagtaactaagaatgaacagcgtaaagcatttagtacagtatcgtcaccatctgttttgagctgtgaggcatttgttcatacaaactctgatttacctgattgggttcccctgttgggttgggagcatccacatgcttcatgcctctaggccacagtgtttcccacacgtattcattctttgaaatcacccgggggtcctgttaaacatagctttccaggcctctgcaccaaaaagtctaatttattagagccaaagcaagaa

SEQ ID NO: 14452 - DNA, 426 bp, Homo sapiens
gaagaacccatgcctttagatctgtagtttcccacagtctggatcttgctgattgcacactcattgtacagcactacacactcctttgtcctctaaattgtctgcagattgtcagatgcttgatcagacttaggttcaatccttttggcaagacaataggtggtggtgtgatctttcatcgggagtgtatgtctgcttgtctcactttttgtgatgttaggagctattgatgattactgcctagacccattaatttctagggagggtcaaatggtgatattctaatttcatcattactttctcatttattcattggaattcatgctcattattacctgggtccactcatttctaatgggggggagcaaaatggtgatagtctaattctattcactgcaatgaaataacagctaaaactgtatttgt

SEQ ID NO: 14453 - DNA, 449 bp, Homo sapiens
  misc_feature (1)...(449): n = A,T,C or G
gtggtntccccctaggaccccatagagaggcnagcacangcggnggaantaaatatcacaaaaccgtgacatgtttatgtctaagcagctctggacagaggttactctctggctcactggacaggaaggtgaaagtatacagcacaacttcctacaaagtagtccacagttttgattatgcagcttcaattttgagtcttgcccttgcacatgaagatgagacaatagttgtaggaatgaccaatggaatactgagtgttaaacatcggaaatctgaagcaaagaaggaatcacttcccagaagaagaaggcctgcatatcgaacctttattaaaggaaaaaattacatgaagcaacgggatgacattttgattaacaggccagcaaagaagcacctagaattgtatgacagggatctgaaacattttcggatctctaaggcactcgat

SEQ ID NO: 14454 - DNA, 452 bp, Homo sapiens
  misc_feature (1)...(452): n = A,T,C or G
atcgagaccatagaacacgcggnggaattcatgaaagcgagtaaaaataagaagcatttcaacccatagttattttcagtgcagcagcaaattgaatcatggttgtacctcattcctttctgctctttagcttcagagggggagtaatcagtgaagaaagcaggaatcatctgagtttaagtattacaatttatgacatgatttatatcgtaagataacaacagtcaaatcttgtccatagtttgtaaacttgagaagccaaattttaaaatttaataaatatatggaaactttactctctaaatgtaattatatatatatatttttgcttactgcagaggttctttacacatttctcttcttttgagcagagagagcaagattctcctcttacgtaaggaggcatatttgcaaaatttcctctgtaaaaaagagaaacattgattagccan

SEQ ID NO: 14455 - DNA, 473 bp, Homo sapiens
  misc_feature (1)...(473): n = A,T,C or G
tgctgggatnnnattgatagcattcntcagngcggnggaattcaaatcatcgctataagggctcctaccataccaatgagcccaaggctgcccacgagtaccatcctggcagcaaacctcccctacccacttcaggccctgcccaggtccccacccctacagcagctcccaaccaagctccagcctcagccccagccccagccccaactccagccccagcccctggcccccgggatcagaacctaccccagatcctggaggagtccaggtctgaatgagtcagaagggcttctgggaccaattccagctcctgacattcccccagtcctgcctctcccccatcctatcagggacatttggctcctcttagctggctctgctcatccagaggatattcccccatcccccccccatcaagtttggtgggcagagctacagatgggacccaagggagtggccgagcctcactgccn

SEQ ID NO: 14456 - DNA, 478 bp, Homo sapiens
  misc_feature (1)...(478): n = A,T,C or G
tggcaccanaanaagaaagcctggagaccttcgaaaaactgagtccantcgnacagngcggnggaantccaatgagcaacgaaaacgacattattacccacttctctatgcagggctcccctcctctctttctttgtcttctctggaaaatgctcttggaaacagatcatattaatcagattggctatagagtattagagagaattggagccagggccttggtagcccatgtgaggacatttgcagatttcctggtatatgagttttctacatcagcagggggtcagcaactcaataaatgcattgaaattcttaatgacatggtatggaagtataacattgttacactggacagattaattctctgcctggccatgcgtagtcacgaaggaaatgaagcccaggtttgttatttcataattcagttgctgttactcaaaccaaacgattttagaaatcgagtaagtgactttgtgan

SEQ ID NO: 14457 - DNA, 477 bp, Homo sapiens
  misc_feature (1)...(477): n = A,T,C or G
tgtggggctnnnnttttgatcgcagatcattagtccagtgcggtggaattccggggacggggtgttttggggtgatgttttggggtgatgggaatgctctggtgccagatggacggtgctgctggttgcaacaactctgtgaacgtaccaaatgccactgtaccgttcaggttaaaataggcagggcatggtggcgcgtgcctgtagtcccagctactcgggaggccaaggcaggaggatcactcgagcccaggaggtcgggagctgcagtgagctgtgatcacactgcactccagcctgggcgacagagtgagatgtcatctctaaaattaaaaaataaaaccaaataagtaaaataaaatggttaaaatgacccanaaaaaaaaaaaaaaaaaaaaaaaaaaagcgccctttaaatttaaagggcccttttaaaccccgttaaaaaccctgaattgtccttttaaatgcccacct

SEQ ID NO: 14458 - DNA, 483 bp, Homo sapiens
  misc_feature (1)...(483): n = A,T,C or G
cgggtcnnnnaggacggggccnngnnagattatccagtaccttgcagcnagctncgannnnccannggagggaaggctgctggcgtaggcctggctggtcgngcggctgagcggggctagaaagaaaagcgatcctccaagagtgagaacgggagatctgccgaggataacaacctcccttgtggccgaagggcgggggatccccacacgagggctccgcttcgagagacggcgacaaaggaaagttcgtagcgcgttccggaggcccggccacctctgagaagggagacgacgctgctgggtccgctgagcggggcgacccgaggttagtggagacggatgctgtcttttgaaggccttagtccctgccctggtgaagccgactgcgaggttccacagggcgtgcaggcagtccggggatcgttgcgaaggggggtgcgggctaacttagctgctgccgtttctagatgtgcagctgtggag

SEQ ID NO: 14459 - DNA, 465 bp, Homo sapiens
  misc_feature (1)...(465): n = A,T,C or G
agcaccccntttgagccctttgtagaccactaggcagngcggtggaattcggagattctgtaataaatatgcttcagagccattcaccttgaagctgaggaggcatggaagcaggccacctgtgttctgtacagcatcaccaggctggaaatctgccatggctttccttcacgccatcacaagaggatacagatgaggctgcagaggcatcttgatttgagaaaagcatttgactggatctcattaaattttaatcattaactgaattcaaaataaattgaaaactggttgacagagcaccaacaaagggtgatgataaatggtgatgcatctagaggggagctatcttccaggggacaactctaaggcaaggacggatgggatttaatgaaggtgttatgtccccagaagaagacaaatagcacagcaaggaacagaggaaggacaggagtgagcagcctgagt

SEQ ID NO: 14460 - DNA, 570 bp, Homo sapiens
  misc_feature (1)...(570): n = A,T,C or G
nattgatncccctccgnannnncattggaatccctatccgagtggngcaattcgttntgtctatgaaataagcctctttagtgggttgttttagtctctccaacaaaagaacagattcctaaagtcaggtgcagcactgtgaaaagtttctttcaatatggcaccaagactctaccatttatgtctctctcagcttacaaacatcagcgttttgtccttgtcatagtggaagaaagacacttactttaagctttggggacaaaggtgacaaaccccaggcttttatcttaaaagtgtctttggcacttcttttggcactgaaatggtatttgggaagcattatttgaatgtacagttgtttggttttggatgtgcttatctttatctgagctttcacttgtagacatggccttttgttgtgaagttgctcatcatttaggagtgtttaattctaaaaagccttcagcctaagaaagcttcatctgtggggaccggagacttgttgctcanggaagtagtgatgggacttgggcatctgatcttgaggtggacaagttagttcaactgaag

SEQ ID NO: 14461 - DNA, 513 bp, Homo sapiens
  misc_feature (1)...(513): n = A,T,C or G
gggaggcgggnnnnncnnnnttactgagacgataggcagtgtggaggaactccttcagcatcaaatcctctcccctgccatacctctcccaaaaaggagaccagtaaagtgaagttttaagccagaggcagccagacaagctcccaaggaattagaatagcttccaggcaccaagatgtcactactcaaagatgacccgatacagcagggataggcgagacacattaacttcagaggatgtggcaggagtgaagaccacctgcccagtcacctgccacacgcaacagcccaggccccggcagggtgaccctctgcagagctgccccaccaagacccctggatactcctccacgctcctaagtcacttacctcaccaaagtgcttctcgatgatgttcaaagccgactggccaatttgacggttctcatgcagctgtaaagcctcaattctatcgatcccaccaagttcttctatcagaagacacaggttttccttctcagaccagttctctgc

SEQ ID NO: 14462 - DNA, 455 bp, Homo sapiens
  misc_feature (1)...(455): n = A,T,C or G
aaggcggccnnttttncccagggatagnagcaagtgcggnggcaattcggncaaacaggagaagaagaagaagatgacaggtcgggctaagcggcggatgcagtacaaccggcgctttgtcaacgttgtgcccacctttgggaaaaagaagggccccaatgccaactcttaagtcttttgtaattctggctttctctaataaaaaagccacttagttcagtcacacaaaaaaaaataaatagggagacaaatcctactgacaactaaaaaaaaaaaaaaagattgtaatttcctagaaggaggattattaattggaggatctgtctgccgcctggtttatagacattatgcaacgttatattctgtcttctgcgtggattcttcaaaaagtgaacgtgggagtgtagatccaactcaagtttttgttgaaacataagacaaatgttttgattatg

SEQ ID NO: 14463 - DNA, 487 bp, Homo sapiens
  misc_feature (1)...(487): n = A,T,C or G
ggggnanattgagncctcgatgactntagcccangcggnggaattcgtcatgggtctgtgtgattggttattgagggtctgagtctcaggacactggaaggggtgggagcctgccaggactaggccccacggtgttctcagcatggacgataggctcggcaagtagcggccgagtgaaagcctagttaaacgaggaaaacaggctgggtgtggtggctcacgcctgtaatcccaacactttgggaggcggaggcaggtggatcacctgtggtcaggagtttgaggccagcctggccaacatggcaaaacctcatctctaccaaaaatacaaaaattagccaggcgtggtggtgggcgcctgtaatcccagctactcaggaggctgaggcaggagaatcacttgaacctgggaggcggaggttacagtgagcgagatcatgccattgctctccagcctgggcaacaagagggaaagtccgcctcaacc

SEQ ID NO: 14464 - DNA, 512 bp, Homo sapiens
  misc_feature (1)...(512): n = A,T,C or G
gggagccccgnnnngtnnnnncctcgaagatcgtaatcactagtgcagtgacgcggacgagaccagcctgggcaacataacaagacccccatctctatttttaagatatttaaataaataaataaaagcattagggttgtgccttccacatttagctctttaattctcacctgaaattgatttctggggtagttttagataggaatccagtttcatttgtccccatacatattcctaattccccagcactgtttattgaaaagtccatccttgccacattgatttgcagttccactcggttgtatatcaagtctgtagtcctgaataaatctgtttctgagccttctgttctttttctttggttatttatctatctttgggccaacaccttaccttactgcctctgttacagaggcattaaaatgaagtgttgatatcaggtagggcaagtctttctgtcttgttcttgggtctggactcatcttgggtagtttttgcttttgcaattccat

SEQ ID NO: 14465 - DNA, 441 bp, Homo sapiens
ctgctcgttctcagctcactggtgtccagcccatcaataacctcatcaataacctaactttggtcaattaggttggagtccgaaggtgactgatttgcggcaaggttttctctcttcctctgtaaagtggagtccttcatcattcatcgcaagtagacaactcgcttcctaatgcctctgcattaaggagccaggcgctgcagctctttggtacgtgacctcaaatagattcatgcgtccttctgctgacacggtggcagaggagagggaagggtcgcgcctggtgggggcctgagagccaccgggctgcggtgcgcgagtgtggacaccgccccgccttctgcgtctacagccctgggttctgggacctttggaaaccgctttggacgaagctgagcatctctttccccacgctgacctcccccatagactccggatggg

SEQ ID NO: 14466 - DNA, 476 bp, Homo sapiens
  misc_feature (1)...(476): n = A,T,C or G
tgggtnccnnnaactgagnaacccctgagatcataggacangcggnggaattcatctgtcttcatttctcatttttcctctaagatgttctgcacatatttgtcaatttctgtggtctgactcacagcacaggaagtgtggaggagcttgaccggagaaagaggctgagaactgcttctcttaccaaggaccttccccaagccaggcatctccggagatggtatggagcctggggtagctcggccaggcctttgatcaccagcgatgccattgctcttccccatttcgcgtctgctgtggcttgctgctgaggctgctttcagacctctggaatcagaaaaggaggtgactatatcaggatgaatgccttgatggtctagacgtgtgacacttgctgcatttatgagactggaggtggggccccacccaagttctgcttccagaggaggaggcaagaccaagacaccaaaacaagg

SEQ ID NO: 14467 - DNA, 510 bp, Homo sapiens
  misc_feature (1)...(510): n = A,T,C or G
gggagccgggggnnnnnnnaactgagatcgatgtcactaggcagtgtggtggaattcgaactttatgcatgttgatctatattgattttcactgcagttgaatgaacaaattatttcagtgtgacagccatgactcaagttccaattagtctgaaaagggtactttggaattgtcccatattaatcagagatggcaaaagaaaaagttctcatattaccaggttgattttgtgtctcatttcaaattttaatttaaaattatggttttcatttttgtttaccttaaagtgatgcttaaaagtggcatgtaattaggacacttaggtttgttgaaagcattttcgacatttgtataaaagaatttgtgataaatatatccaggtgctcaccaaagaaacatgtattaacaacttaaattagatttttctaactgatagttttcactcatttataatcagtaggagagactgtctagatgttggggcagctctatgatttaagtctgtaaca

SEQ ID NO: 14468 - DNA, 467 bp, Homo sapiens
  misc_feature (1)...(467): n = A,T,C or G
aactgagaccatattgcagngcggtggaattcgaagcttcgagtagtactgtttgctctatgctgcaatacagaacaggcagctgaacacttccgaaatccccagcgacgtattcgccgttggcttcgacgtttccaggcctcccagggggagaatctagagggcaaatatctgagctttgaggcagaagagaaactggctgagtgggtgctaacccagcgcgaacaacagctacctgtaaatgaggagaccttgttccagaaggccaccaaaataggacgttctttggaaggggggtttaagatctcctatgagtgggctgtgcgtttcatgctgcggcaccacctgactccccatgcccggcgagctgtggcccacaccctacctaaggatgtagcagagaatgcaggactcttcattgattttgtacaacggcagattcacaaccaggacttacccttgtctat

SEQ ID NO: 14469 - DNA, 507 bp, Homo sapiens
  misc_feature (1)...(507): n = A,T,C or G
nggagccggggnnnnnnnncctgtagatcgatatcatgtcgaggaattcgtttcgtagaaacctaatgactgatccacctactcccccttgtggtgaatatttagttttagccaaaatacttttattggtagctgttaactcttgatgttactttactataatgagaacagagatttggatagtctaaaacagattttaaaaaataattcagatggggctttatcataattaggaggggtggctagtactgctcagccccagttgcatgttaggattatctgcagaccctgggtcacgccctgagagattccattttatctgtttgtggtaggacccaggcatttacagtttaaatcaaattaaatttaatctacttttaaaaattaaaaattcccaggttattctagtaggcagtcagggttgagaaccccttatgtagggtataattatgcttctataactatttctgtatatggggggagagcacatcataattttttaacaac

SEQ ID NO: 14470 - DNA, 490 bp, Homo sapiens
  misc_feature (1)...(490): n = A,T,C or G
cgggtgnnnattgagcctacgtagacactagnacagngcggtggaattcggagactggattggtcttggggcccaggacccagacgcaggacagagtggactctgcctgtgatggggtggccttcctgctgcccccctccaccagtgccttttgcagagagatattttgtgtacacagaagccattccgagtctgggacctgcccctgtgcggatcctgaccccagccaacagctgagctgccgggcctcctcgaggcccctaagccacccccagaggtcccatctgaagctggagtaccctggggtcagcagcaagagaaagaagaggagattttctgtctgtttttcccctcagccctgccaccgtggggagtctggtttttctcttcatcctgtctctctcctccttactcttggataaataaacagcctgtgagcacacaggcagcccgaaaaaaaaaaaaaaaaaaagcggccgctcgagtttgg

SEQ ID NO: 14471 - DNA, 495 bp, Homo sapiens
  misc_feature (1)...(495): n = A,T,C or G
gggannnnnagnnnnnnnccnaggggnnanaattcatgnaccccgntcgttaggcancgnannnncncnnaanantntanagaaaattttatgtgatgtacataaaagcattatcttaatttttaagtctgtaaatatattttaaagttatataataatggctttataacagatgactgtcaagtgaatgagctgttgatatcctgtcagtttagtcaaaatatattgtatcttaaaaatgtatttagactaacgtctacatgtatttttacggaattcctgtccagatctgtttattcttttacagtattaaatgattttcactaatatattttttactgctatcatctaaatcagtgggccatggaagaaacctcatatatcattcagttcaatcccattgcttcagaatcagatcatagcatatctattctaagtagaggaatgcttttttccttttcttgaaagtttctctttcaaatagatttcaggcct

SEQ ID NO: 14472 - DNA, 490 bp, Homo sapiens
  misc_feature (1)...(490): n = A,T,C or G
ggggagtacggggccngnnnaggattaatactgaaacctctgtcagtncngctacgaagnggcnggaattcgtcctctgtgaacttgctcaggacaaggaagctgcagaagctattgaagctgagggagccacagctcctctgacagagttacttcactctaggaatgaaggtgtgggtaagtaaaaaggaaccaaagcctttagcagatgtgtacattgaagtctcagtttttcctcaagggcctttttctccttgtctcttagcgacatatgcagctgctgttttgttccgaatgtctgaggacaagccacaagattacaagaaacggctttcagttgagctgaccagctctctcttcagaacagagccaatggcttggaatgaggtagggaaatgtgagcagttatttatctggtagtttcctagagcaggtatggcagcttgttctttcctctcaaaacacttagtacacattcatttgcattgag

SEQ ID NO: 14473 - DNA, 489 bp, Homo sapiens
  misc_feature (1)...(489): n = A,T,C or G
ggaagtgtgccaggnngnnnnnaactgagacctncttgaagngcggtggaantctgagctaccaacttctacctccctaccacagcctgatccgatcggcacgtgctgctagtggtcagcgttctgctagcctaccagctttgcaccccctgggtggaaggagaatagcggagggatgacccaggtgcaggaggaggcagcccgggctcagaggtgtctgaagaccttggtcagacagcgaggcactggcactgtgttcaagcaccctgtgccctgacttccagcatctctgacgtgtgcacctctcaccagagaggcctttctgtgccacaaacctagacagcccttgttccctgctgtgtccgtgttataaaatagaccaggcaagagagggtcttctggaaggtcagagctgtggccgtcttgcttaaagctgagaaagcaggaagcagatgaggaacgcagaaaccttctgaacctggaggcggg

SEQ ID NO: 14474 - DNA, 466 bp, Homo sapiens
  misc_feature (1)...(466): n = A,T,C or G
natcgtagtccctagtccagtgtggtggcattcattgcagcaaacatgcggaaatactggcaaagacagctgtagatgaaacagccaagggagagccaacaattatggttggtgttaagttggatgaattgaaataagagacaaatacttcatagaattgtattaaggcatatgcatgaaaaaggagggaagcaattatttttgctttatctggcactgggcaggcttcagttggaacaaactatatttaattttacatgtcatactatataaagagaaaaaacttggagactgttcagagaacagcaactgatgaaaggtttgtgaaattagacctatgagaaattgtgaaaagaactgggcatgttcagtcaaatgcaggacatccaggtgtgatgaatggtgaacaattaactgtaagtatgtgaagagatggttaccaagtctcaggtataggggaaacagn

SEQ ID NO: 14475 - DNA, 485 bp, Homo sapiens
  misc_feature (1)...(485): n = A,T,C or G
gcgccntttttagacactganaaccgtggcggaanncganngaaagatgtgatcactgagacagccacttggtttttggctctttcagagaggtctcaggttctttccatgcagactcctcagatctgaacacagggtagtgctttacatgctgtgctctttgaagagatttcaacaagaatattgtatgttaaagcatcagagatggtaatctacagctcacctctgaaggcaaatataagctgggaaaaaagttttgatgaaattcttgaagttcatggtgatcagtgcaattgaccttctccctcacccctgccagttgaatactgtagctgatgaaactcctgattttgtagttaatttattaagtctgggatgtagaacttcaagaagtaagagctaagttctaagttcatgtgtgtaaattaatacttcatttggtgctggtctattttgattttgggggggaatcagcattattcttc

SEQ ID NO: 14476 - DNA, 473 bp, Homo sapiens
  misc_feature (1)...(473): n = A,T,C or G
ctccgaccccttnnnattgatgacccttagtccangnggnggaattccccatgcagaagccaggatgctgaagcctcattcctcttgtgtggggttctctatgtggtctacagtactgggggccagggccctcatcgcatcacctgcatctatgatccactgggcactatcagtgaggaggacttgcccaacttgttcttccccaagagaccaagaagtcactccatgatccattacaaccccagagataagcagctctatgcctggaatgaaggaaaccagatcatttacaaactccagacaaagagaaagctgcctctgaagtaatgcattacagctgtgagaaagagcactgtggctttggcagctgttctacaggacagtgaggctatagccccttcacaatatagtatccctctaatcacacacaggaagagtgtgtagaagtggaaatacgtatgcctcctttccca

SEQ ID NO: 14477 - DNA, 419 bp, Homo sapiens
caactgcacttgttagactggaggcttatgagaaaaacatctcaccttgtagaaaacatgcatcttactatctctgataacttgtttttcaggatgatgaagtaataaggagtccagcttcagtgctacagagcattttaaaggaagcagtgttgggagggagggatatggaactaatggaaatgaggctagtttatgatggtctcagttatcacagtagatacagagctgagtttacccacaagatcttaatttaggaacactttgaaaccctgtaaccctgctgggtgctctctcctctcactccaccaaggcagcgcacagaaacatacatggggctgtggtaggatgaataatggtcccccaagatgtccacctcctttagcaaaaggggctttgcaaatgagattgaggatctt

SEQ ID NO: 14478 - DNA, 476 bp, Homo sapiens
  misc_feature (1)...(476): n = A,T,C or G
cgcagccccatgagacctttgcnagngcgttgaagtccatagatcgagcggcgaaggtgtaaccatcactagtatgtgaggcttaaacacaacctctcatcattgactgaacgacattcagttactctgatccaggagcacctcctaggtagtcaggctttaaaataaaatcacactcatccctgacagtctggcagaatatgtgcatgcccaaggttataccctctctggactgagtgcagtatgaagatccaactattagtccctggctgaatgggaagccaaaatataaactccttcagctttgatagcaatctgcaagtcacataacatttccggtggccattagggtgagctttaagatctaactggccaagggggcttaagtacaatctttgatcagtaagtggcttatgcctacccagagacagcccctcagtagccaggctgtgaaagattaaagaagtanaacggtc

SEQ ID NO: 14479 - DNA, 474 bp, Homo sapiens
  misc_feature (1)...(474): n = A,T,C or G
ccccccattgtagnaccactagtctagtgtggcggaattccacaaaataacggggaccaatatttttaactttgcctatttgtttttgggtgagtttcccccctccttattctgtcctgagaccacgggcaaagctcttcattttgagagagaagaaaaactgtttggaaccacaccaatgatatttttctttgtaatacttgaaatttatttttttattattttgatagcagatgtgctatttatttatttaatatgtataaggagcctaaacaatagaaagctgtagagattgggtttcattgttaattggtttgggagcctcctatgtgtgacttatgacttctctgtgttctgtgtatttgtctgaattaatgacctgggatataaagctatgctagctttcaaacaggagatgcctttcagaaatttgtatattttgcagttgccagaccaataaaatacctggttgaa

SEQ ID NO: 14480 - DNA, 494 bp, Homo sapiens
  misc_feature (1)...(494): n = A,T,C or G
ggagatgccnaggtnnngnttcctataccctgtcctangagcgtcgnanagnccggnggaattcnggnctttgtggaagagaaagcccctgcccaacaaaacagctttgactgtgggatttacgtgatatgtaacactgaggccttgtgtcagaacttctttaggcaacagacagaatcactgctgcagctactcacccctgcatacatcacaaagaagaggggagaatggaaagatctcattgccacacttgctaaaaagtagctattgaagtatatttgcgacttttgaaggctcctctttctgcccttccccatttgttggatggctgcaatctcagtgcctgagggaagatgcctagtagaggaaagcttaatactctttttcctgaaagaatatcatcctctgcattatccccatggaacgtttcactctaaccctgactggggagcaatatgttctgtgaaaatatcttgaaattgtacaccaaaacc

SEQ ID NO: 14481 - DNA, 497 bp, Homo sapiens
  misc_feature (1)...(497): n = A,T,C or G
gttagttacnnaagggtnnnnnnnaactgagacatctgatagagcgccgtaattcggactgactcctccaattccttgggaacatgcaccgcgtccccatttcccccttgtcccagcttcgtggccttatggtttgcatcaaaacttcatgcatcagggaaatgcccgattccagcccaacaaacctttctatactcaagacagatgtgccacccgtcggtgtagagagcgttgtccccacccaccaagaggaaacgtgtcggagtaatgcgagtccattttctttcagctggtctaccgatgcacagcaaccagccaatcctgctgtctcaagggtatccgtacctcaatgtcagttacattcagcagaaaaagtgacatttaatggaaagcaaaacaaatcaggtcctgatttaaaattttaacacgtttagatagcttatttaaattctaagactgtttttacagactgtattatttgtatataaatatgaact

SEQ ID NO: 14482 - DNA, 484 bp, Homo sapiens
  misc_feature (1)...(484): n = A,T,C or G
ccagcccattgagccgtggannnncnatgaagaccatatganagngcggnggaattcccctcgngtatctaccccacagggcgcttttgaagaccaaatgctgtaactactatgaaagtgctttgtaaattgctgtggaaagtgtgagctactcaagcacccgaggctgtccctccttgctcacatgtccagcccaattctcccttagtgagaacagcactcagtaggtgctgtgtgtgtttgtgttcaattaagaaattccagaataaataaaaatgaattaattcaacaaacattttctggggcaccgacaatctgcccagtgcaccaggctaggtatctgatacaaagataatgaaaacagtctcttggaacctaattggggtcctcatttgaccaggaatttctttcgtcccgttttaagccaaccagttttgtccggacaagacaaaaacaacttgggctgctttagagaagcccagcn

SEQ ID NO: 14483 - DNA, 491 bp, Homo sapiens
  misc_feature (1)...(491): n = A,T,C or G
ngggaggtcgggccgggnnnaggtttaattcagtnaccctctgttcatncngctancgnagagccngnaannngagctgnttncattggcaggggattttctaatttcagttcaaggaatatcctaaaatttagccttgttcagaatttactgcacataaaaaagggtatttcatccagaatagatcagttattgaagcagtgctgctaacatccattccctttcataccaccattttcaccctgtttcttcccctcctccagttctttggaaatttgtgatcgggggatcttagttgcttatttgttttgactcttgtgtgctgtgggcactggagtagagatttctggagaaaaaaaaacagtttatttcatcttgccttttgtgtttgagttatttttaatattttcctgtaaatattttgtaatattttacttgtaatgaaatggatcacaatgtcatttcctaatacaaggcaggatatgtgggaa

SEQ ID NO: 14484 - DNA, 497 bp, Homo sapiens
  misc_feature (1)...(497): n = A,T,C or G
tgtnaggtnnccnagggnnnnnnnaactgagacatctgttagagcgccgtaattcctctcgtcgccgctgccgccgccgcagctgccaaaatgtctacaggtccaactgctgccactggcagtaatcgaagacttcagcagacacaaaatcaagtagatgaggtggtggacataatgcgagttaacgtggacaaggttctggaaagagaccagaagctctctgagttagacgaccgtgcagacgcactgcaggcaggcgcttctcaatttgaaacgagcgcagccaagttgaagaggaaatattggtggaagaattgcaagatgtgggcaatcgggattactgttctggttatcttcatcatcatcatcatcgaaccagcggaactcaaaactgctgttcaagaaacctcttcaagacttttgacttagaacctgctatattatcaagcttacctactgttatctctaanattttttttgtgttaatgtaaagttga

SEQ ID NO: 14485 - DNA, 476 bp, Homo sapiens
  misc_feature (1)...(476): n = A,T,C or G
gcagccccatgagcccgtgaangcgatgaagacatcggaagncctcctcacactacngtagnggagccgctatgtttattgaccccttatccaagtcaacccaactgtctctagaacggtccaattacctggccagtgctcacttagataacatcggactctttcagaaaagattaaacaaatcctctatttgttgacagaggttttgctgaactggccctggggatccgaattgatcatggccatcaacacaggcagcaaagacccttcagaagtgttttattcactagccacctccatcccccaaccctccatcgtctaaagtgtctcctgactcagttctgtccccctgcttgtcctcttctcctattagctctgggtacccagtccagatcatagccccaagctctgtcatcattttgcagcctccagcctcccccacccaacttagcagagccctggagaagaaagccctg

SEQ ID NO: 14486 - DNA, 498 bp, Homo sapiens
  misc_feature (1)...(498): n = A,T,C or G
cgaccggggaggnccgcgccgngaattgatncccactgatgaccctaggccanngcgnggaattcaaagaaggccagccaccaacagattgtgtgcccaatgagaataagtattccttgtttgcagtgattaatcaccatggaactttggaaagtggccactataccagcttcatccggcaacaaaaggaccagtggttcagctgtgatgatgccatcatcaccaaggctaccattgaggacttactctacagtgaagggtatttactgttctatcacaaacagggtctagagaaagactagtcttaccagaccacttactgaaaaaaaagtaaatgattaggcaaggattttgaagtgacacacagacctacttggaatggacaatgacagtaacacctatgtgacagctagtatcttgatataaagaacctattttagcatggcccatgggtctgtcggaagaaaaaaatgaatactaaccagtgaccattcaacc

SEQ ID NO: 14487 - DNA, 484 bp, Homo sapiens
  misc_feature (1)...(484): n = A,T,C or G
gaagcccncttatgagnccctnnnnnnatggagaccattagaaagngcggnggaattcttcagctacagtctgactctggacagggtgtttctgttgcaaaaatacaaaacattagcgataaaataaaagcgattttcatttggtgggcggagagtgaattaccaacagggaattgggccttgggcctatgccatttctgttgtagtttggggcagtgcaggggacctgtgtggggtgtgaaccaaggcactactgccacctgccacagtaaagcatctgcacttgactcaatgctgcccgagccctcccttccccctatccaacctgggtaggtgggtaggggccacagttgctggatgtttatatagagagtaggttgatttattttacatgcttttgagttaatgttggaaaactaatcacaagcagtttctaaaccaaaaaatgacatgttgtaaaaggacaataaacgttgggtcaaaa

SEQ ID NO: 14488 - DNA, 503 bp, Homo sapiens
  misc_feature (1)...(503): n = A,T,C or G
ngaggcngcccaatgagaacttgagacctacgcagnngcgnggaattcaatttgactgtgtagatgaagtgctaacaatcgcagccatggtaacagctccaaattgcttttcacatgtgccacatggagctgaagaggctgccttgacttgttggaagacatttttacatcccgaaggagatcactttaccctcatcagcatttacaaggcttaccaagacacaactctgaattctagcagtgagtactgtgtggaaaagtggtgtcgtgattacttcctcaactgttcagcactcagaatggcagatgttattcgagctgaactcttagaaattatcaagcgaatcgagcttccctatgcagaacctgcttttggctccaaggaaaacactctaaacataaagaaagctcttctgtccggctactttatgcagattgctcgggatgttgatggatcacgtaactacttaatgctgacacataagcaggttgctcagctgcat

SEQ ID NO: 14489 - DNA, 490 bp, Homo sapiens
  misc_feature (1)...(490): n = A,T,C or G
nggtggagtttatcccggtacncctctcatgatggcgtcgaacnngcggnggaangtggacatttctacccagttttacagaggaggaaaaccgcctctcttgtcatatgaatttattgactcaaggcaaaaacagctaattaatggtactgtcaggatttggattcaggttcttatgttactcaagaaatagcggttttaaagagagagagagaaacctctccattgtgtaatacacactctaatgggactattattctgagcaaaagagagaaaaacatttttacaaatcttctggtcaatgtgtaggcaaactatagactatctgtttagttaaatttaagtgttcagaaaaattggatttgacacacatagatactaccatttttaagcttttttctaaggaggaccatgattaacccattcctaaagtgtggagaaaaaatgtttctcattaaaacaaggtttatgaagagactgaccattctgg

SEQ ID NO: 14490 - DNA, 400 bp, Homo sapiens
agaaaccccgtctctatctaaaaatacaaaaaattagccaggcgtggtggggggcgcctgtagtcccagctacttgggaggcagaggcaggagaatggcatgaacccaggaggcagagcttgcagtgagccgagatcgcgccactgcactccagcttgggcaacagagcgagactccgtctccaaaaaaaaaaaaaaaggtttaaaaaaaggggttcctggcaaattaacttttttttttgcccggaaagttaactgtaaaatggccaaccccaccaccccttttttttttaaccctaagttcaagccaaaatttttttggattggaaaataataaggaaggtttttatcctagttttttaacccctatgttttatcacagagggaagtattttgggctg

SEQ ID NO: 14491 - DNA, 450 bp, Homo sapiens
  misc_feature (1)...(450): n = A,T,C or G
gtgggaccgaaaatgagaaccttganangccagcacangcggnggaattcgtagatggtcacttgggcctaggatgtcgagggggtagtgagctgtgattgcactactgcactccagagggacatcttgcctcaacaaaccgcatagcaatggaagtagagaccaaatattgtgaaaaggttaaactaaaaagctttgaagaaactgatggagttataatttagaattctgtatatactattattgaaacaattgaattcaattttatacttaattaattagaaataacttagaagaaaaagtttttgatggattgcattttttttttgagacagagtttcgctctttgacccaggctggagagcagtggcatgatcttggcttgctgcaacctctgcctcctgggttctagcgattctcctgcctcagcctcccaagtagctggggtta

SEQ ID NO: 14492 - DNA, 471 bp, Homo sapiens
  misc_feature (1)...(471): n = A,T,C or G
ngagggcgccnntctcnnccccggaaatccanganaggcggncaattncntgtaacctgcatgtagttgtctgttggtcttgcagccccgtcctgcccgggacaccagccgcccacccctgaggctgcctgtgggcctctggcttttcctgtcctgcagggggatgggaaagatctggggccacgacttcctctgaggccccgcccagcggcaatgctggcattgttgtgaagtccaccctgtgtgcacacagcatccctgccctgggcccgctggttgccagtagtaaccccagttgtgacaacgaaaaatgtgtccagaccttgcctgatgtcccctggggggcagtcaccctgggggacggctgctggtgagcgctcacagatgtgtgtccatagcagctgactctcctttgcatctcctccccgaggacgcagtggcaggcaggccacgcccctccgtgtgtaagan

SEQ ID NO: 14493 - DNA, 445 bp, Homo sapiens
attgagacatagtgagggacgtggaccacacagcagagttcaagactcaaacaatagaacatgatacacactatgcagtctgtccccctccgcttctcccctgaccctcccatagtaatcactttatgtttatttatttagagacagagtctcactctgtcatctaggctggagagcagtgggtacagtcatggctcaatgcagctttgacttcaagcaattctcccacctcagcctccgagtagctggaatcacaggcgctcactgccatgcccagcgaattttttttttttttgtaaaggcagggttttgccttgttgccaaggctgatctcaaactccttagcgtaagggatcctccagccttggcctcccaagggcgtggattataggggggaggcaccttgcccgggcacgaaagaactttcactaggtttttatgctcg

SEQ ID NO: 14494 - DNA, 462 bp, Homo sapiens
  misc_feature (1)...(462): n = A,T,C or G
gcgcggtnaanccaactggacctacgctagcagctacagaagncggnnaggtcaggngnggagagcggacggaaggaaacaaaaagggtaacttgaccaacatccaacacctagatcaccccttctgtgtcattctctgaggaaaacaagttcttctcacggaggaaagtctgaacttgtcaaacagtcccttaagaagccgaagttaccagaaggtcgttttgatgcaccagaggattcccatttagagaaagaaccactggaaaaatttccagatgatgttaatccagtgaccaaagaaaaaggtggacccaggggcccagaacctacccgatatggagattgggaacgaaaaggacgctttattgatttttaagtcgcatattctttaacttcaatattgttttctgaatatgtacatctgaattaacttatttctgaatattttctttctttatatcc

SEQ ID NO: 14495 - DNA, 477 bp, Homo sapiens
  misc_feature (1)...(477): n = A,T,C or G
tgtggacctncaatgagaccataggaattcgattcgattcctttgccaaactgagnataaaatggatgatcaaaattagaaagagataccttataagaagaggtcaggcaactagccacataagctgaagtcacctcgcgttgtttagagaactgtccacatcaatgggagctgccatcacttccactttgtaaacggagctatcaacaatcctgtactcacttgaagcaatggggccttgctgggaggaacagcatgtaaaactggaacttctaaccccgtcccaaaagaggcggtgtagagcctaatagaagagactaatggataaacctacaagttatttaaatatttaaattattaataaactttttaaagagctggccaatgacttttgaataggggttgtagaagatgcctttcttcctgtttgggtcattgtattgtattagggtaaactctactaaggtaatgaaagct

SEQ ID NO: 14496 - DNA, 504 bp, Homo sapiens
  misc_feature (1)...(504): n = A,T,C or G
agaggtccncccaatgagacctgaggcactgtcgnggaattccagcagccgagatcccgaggtgtgcttggacctacgtccgggtaccaactacaatgtcagtctccgggctctgtcttcggaacttcctgtggtcatctccctgacaacccagataacagagcctcccctcccggaagtagaattttttacggtgcacagaggacctctaccacgcctcatactgaggaaagccaaggagaaaaatggaccaatcaggtgagaagacactcctgtgcagtttgggctcaggtgaaagattcgtcactcatgctgctgcagatggcgggtgttggactgggttccctggctgttgtgatcattctcacattcctctccttctcagcggtgtgatggcagatggacactgagtggggaggatgcactgctgctgggcaggtgttctggcagcttctcaggtgcccgcacagaggctccgtgtgacttccgtccagggagcatgtg

SEQ ID NO: 14497 - DNA, 457 bp, Homo sapiens
gcataagcgatttattggtgcatcagcctttgtttgctttttaaggttcctttatgttttaaagggatttgaacaaaagacatcaggagcttacaaaggaaaaatagcttcattttggttatgagataccagagtcagaaatgacattagattgtatagaaaagacttctaattgtgtgcttacttcccacatgattataataaactatatattaacaaccttgggatcgtactcaggttgtcaattacacggatgcatctttcacttttttctttcccaagagtgagagaaagagtgaggttgtgcttaaggcagtgtggaattctacagaagctcttcttggaaaaggggttcaggcacttgtgttgtagactgcagtctgattctgttcttacttcctctcagcataagggagctttgaaaagaaaactcagacttgtatccgacttgaccaga

SEQ ID NO: 14498 - DNA, 414 bp, Homo sapiens
gaggagcacctggagcgcatgaagcggcgcagcagcgccagcgtcagcgacagcagcggcttcagcgactcggagagtgcagattcactttataggaacagcttcagcttcagtgatgaaaaactgaattctccaacagactctaccccagctcttctctctgccactgtcactcctcagaaagctaaattaggagacacaaaagagctagaagccttcattgctgatcttgacaaaactttagcaagtatgtgaaacaagaagttctgggtcctttcatcataagggagaagcttcagaaagttccgaggacctgctaaaatcagctactagaatctgctgccagaggggacaaagacgtgcactcaaccttctaccaggccactctcaggctcaccttaaaatcagcccttg

SEQ ID NO: 14499 - DNA, 478 bp, Homo sapiens
  misc_feature (1)...(478): n = A,T,C or G
gggcnaggggcgangcgngnnnnttttnnattgtagactctagtccgtgtggtggaattcgtgagctatgattgcgccactgtacttcaggttgggcaacagagcaagaccatgtctattaaaaaaaaagcctttgcttcccttgctctgtcttctcccctcttctctcgtctgccttggtcttggaggaggcagtagaaggagtaggggctggaggaagtatggagggccatgccactgctcatctgtctgcagaggtcctcgacccacacgtggggcctagactggggaggggcaggaagccgagaactggacatgaatggaagtgttcacaggaggctgtgccacactttgtaaatcctaaaattgagttgcaggttcctaacttattttcctcttataactgaaagtgagtggagggctaagggattgtcatctggctgagaagggagagctgtgatagcatggctgagggggt

SEQ ID NO: 14500 - DNA, 493 bp, Homo sapiens
  misc_feature (1)...(493): n = A,T,C or G
ggnnnagannccaggnnngnnnnaactgagaccatcactgagagccgtgggaannancagnctcccccttgagccccctcgcttcccgacgttccgttcccccctgcccgtcttctcccgccaccgccgccgccgccttccgcaggccgtttccaccgaggaaaaggaatcgtatcgtatgtccgctatccagaacctccactctttcgacccctttgctgatgcaagtaagggtgatgacctgcttcctgctggcactgaggattatatccatataagaattcaacagagaaacggcaggaagacccttactactgtccaagggatcgctgatgattacgataaaaagaaactagtgaaggcgtttaagaaaaagtttgcctgcaatggtactgtaattgagcatccggaatatggagaagtaattcagctacagggtgaccaacgcaagaacatatgccagttcctcgtagagattggactggctaaggac

SEQ ID NO: 14501 - DNA, 457 bp, Homo sapiens
  misc_feature (1)...(457): n = A,T,C or G
actagaccnaccctngttgtaggacccttagaccangcggtggaattcgcttttctgataaagtgacatttgaggagaaacatgaacaagaagcaagccatgataaagacagtaacaacaacaacaaaaaagagtggtagggaaagcagtttaccttaaaggatattaaattactaaattattttaaaaactactatttgatctatagggatcatcttccattcaaatgaagtcattatcaacagcaaaacagcaggaaatggacatattccctagtaaactgggtgaatattctttatatttttgttttaatccactgaatttgggaaacagcaataactaaacaatgattctaaagctaccctgacagtaattttaaaaactactataggccaggcacggtggctgatggctgtaatcccagcactgtgggaggccaaggcagacggatcacctg

SEQ ID NO: 14502 - DNA, 470 bp, Homo sapiens
  misc_feature (1)...(470): n = A,T,C or G
ggagcgccgggtgnnactgactgcgtncnctcgacgngncgnggaattctcaatgtttgacaaatttttgtacaaaatatattgtaaaaaacaagtgaaagggtaagtgtcaacaaatattttatagaatttgaaagacaggtgcatagaattgcggtaggtgtattaagtccgtgtagaatttaaaatgccttttgacgtttataatccttttaagattcaatctggaaaattgcattggaacaatgaaaacctgaaatcaaatcataaaacagacttcttaaatacaaccaatattatgttttatctagatccaatatttatgtttgcttgcttggggagtttttttcctaatatcagattcttctacttaaattttaaaagtgattaatttttagtaaaaaattaatgtaaataattttatgtggtaaaaatgtaacagtttgagaaaatgcagcaaaaggcttcct

SEQ ID NO: 14503 - DNA, 483 bp, Homo sapiens
  misc_feature (1)...(483): n = A,T,C or G
aggttgtgtnnatcatatacccctgcatatgagcatagnanagngcggnggaattcccaagtcaagcaagagactagttgaagggagttctggggccatgctcactggaccattgtcacaaccctctgtttctctttgactaagtgccctggctacaggaattacacagttctctttctccaaagggcaagatctcatttcaatttctttattagagggccttattgatgtgttctaagtctttccagaaaaaaactatccagtgatttatatcctgatttcaaccagtcacttagctgataatcacagtaagaagacttctggtattatctctctatcagataagattttgttaatgtactattttactcttcaataaataaaagtttattatctcncctcaaaaaaaaaaaaaaaaaaaaaataaaaaaaaaaaaaaaaaataaanntttntnttcttcggggggggcggggggtgcgggt

SEQ ID NO: 14504 - DNA, 212 bp, Homo sapiens
  misc_feature (1)...(212): n = A,T,C or G
aggttgtttaaactgagacatactagaggcgttgaaannccgcagaccacattttgagagccactggtttatattaagtactttctagcgcagggggtccaatcttttggcagccctgggccacattaggagaattgtcgagggctacacataaaatagacttaataccaaccatagctgatgagctaaaaaaaaaaaaaaaaaaaaaaggg

SEQ ID NO: 14505 - DNA, 486 bp, Homo sapiens
  misc_feature (1)...(486): n = A,T,C or G
ggggtgagcnaattgagacattagnccgngcggtagaagacccttagtccagtgctggggaattctttatacattaccagacggtgcttcactgtacaagttatatttttaatagttttcataaagtagacgcatattcagagaatatacatctgcaatgagctgctctctagtttgctttacatgttctcataaagaactaaccattctgatgaaaatatggaagcattattaattatcgttaagtttcttctctccataggaaattgacgggaaggctctgctcctactcacgagtgacgtgttgctgaagcacttgggggtgaagctgggaacggctgtgaagctatgctactacattgaccgacttaaacaaggaaaatgctttgaaaattgaaaaaatccttgtgcaaatttagattgggccaacttctagaggcaccaatgccttcttagtgtggaatcatttttctgccctttagtcgt

SEQ ID NO: 14506 - DNA, 505 bp, Homo sapiens
  misc_feature (1)...(505): n = A,T,C or G
ngaggtncnnncactgagaatatagtcactgtggnggaattcatccaatggcgtgtacccatgtattgcacaaggagtgtatcaaattctgggcccagaccaacacaaatgacacttgtcccttttgtccaactcttaaatgacggacctgactggggaggaagaagaagagaaactgatgtgaacaggaagcgcgggttcaagatttctaaaactctatatttatacagtgacatatactcatgccatgtacatttttattatataggtaatgtgtgtatagaaagtctgtattccaatgttcgtaaatgaaactatgtatattatgcagaaacagtctgttccccctcatcttgcaattcctttgggggatgcagattgtagggaagatgatgtttagtttggccttgaaattatgatatccctgcccagggctgttttcaaatacaatataaaaaccacctaggaacctgcaaaannnanaannnnatnnnaattgaacaaa

SEQ ID NO: 14507 - DNA, 502 bp, Homo sapiens
  misc_feature (1)...(502): n = A,T,C or G
agagggctnncaatgaacctgaggacgtgtcgnggaattcaatctctctgcctgcagtaagtagagtgagtggctggtgaggaggtttgttgatgacactgacaatatctggtgactccctccagatgtgcactcagcagtgagctgggcagaggcgtgggaaggacgttggctgggagcagacggcctctgcaaatgaatctctagtttcctgcaacctgggagtgtccccatgagttttactttcctactttatgaagtgaacctgctttctttgggatttcatgtactcctaatgctttttctctccaggtatttctttcctgctacatattaggactcccaaggcaagagtgcacctttatttacacctgggagtaaagggaaagagttgcctgtctttcgtgtgttttcagctttggctctgtgggatcagttatgcctcattcctgaaaagggcctttttatccccccagaatgcttttgctttgccaataccacc

SEQ ID NO: 14508 - DNA, 470 bp, Homo sapiens
  misc_feature (1)...(470): n = A,T,C or G
gggcgccgngnngnntatggatagagtccatangacggngcnggaattcccctggtcccctcactcaggcctctatgggtacagacggacctctcctgcaggactgttttgacaagtgaccagttctgggccatccaggcagcatgcccagcctgagcggaggctgatggtccccacagttctcatctagagccagaacgagctccccaaccaattcagaattggagccagcaccatacatggagctagacccagcgccaagttcagaggaagagcccgtggcatcactgggtctcgcatcagctccagaggtagagtccgatccatcagcagctcccgcaccagctgcagagctacagatggccccagcactagcttcagagctacaagcagctccagaaacagctctagcaccatcagcggaggtagatctagctccagtacgaacttgaacatcacatacggagttt

SEQ ID NO: 14509 - DNA, 508 bp, Homo sapiens
  misc_feature (1)...(508): n = A,T,C or G
gagccccnntttganccctcgtagaccactaggccagagtcgtggaattcgtaggttgcgtctttgtatccaagtccattgttactaggttagatgctggatattctaaatggcttccagaccatctctctgattctctttgggagacggggtctgaaagacaatatcagtagttttgggaaattctagaaagtgtgcttggaaacgtgggaagagctcttgcctagtgcctaaatgctccatttgcagctctagccaagtagatacttggtaggtatagagccgggtttgcgtttatatcagcaaaatctatgtcagagttgaagaagtagtcaggaaaaagcgtcttggtcgcaggccggggaacatcttaaaagcaaacttctagcctgctgacttttggcaatgagtgttggatcctggctaaagtgccttgaatgcagcctgaggccaatccatgaatccaacttctcatggagaaatgttaatattttttcagtttgaatcn

SEQ ID NO: 14510 - DNA, 446 bp, Homo sapiens
  misc_feature (1)...(446): n = A,T,C or G
atcgcngaccctagtcattgcggtcgaattcgtgggaaagccttctcttggatttcacggcttaatatacatcacagaattcacactggagagaaaccatataattgtaaggaatgtggaaaagccttcagttcccactcaggcgttaatactcatcgaaaaattcatactggagaaaaaccttataaatgtaatgactgtgagaaagccttcaaccaaagctcagctctaattcagcaccagagaattcatactggagagaaaccatataattgtaaagtgtgtgggaaagccttcagacagagttcatcccttatgacacacatgagaattcatacaggggaaaaaccttataaatgtaaagaatgtgggaaggcttttagtcagagctcatctcttactaatcatcaaaggactcataattgagaaaaactgtataaatgcat

SEQ ID NO: 14511 - DNA, 556 bp, Homo sapiens
  misc_feature (1)...(556): n = A,T,C or G
nggctcgagaccgctcaggggatcgatcgccagtagacaagctgaccctgtcagggagtgacagcgtcatccttggtgatacaactaccagtggtgccagtgatgaagaagatggacagcctcggcgggctgtggacaacgagaaagagggagtgcagtatagctactccttattccacctcatgctctgcttggcttccttgtacatcatgatgaccctgaccagctggtacagccctgatgcaaagtttcagagcatgaccagcaagtggccagctgtgtgggtcaagatcagctccagctgggtctgcctcctgctttacgtctggacccttgtggctccacttgtcctcaccagtcgggacttcagctgaacctctgagtgccaaggacaccactggaactcacaaaggtctccttcaccgaaaacccatataccttgtaagtttggttcaactaaaatattaagtgaatgctttgcagattgactgtatgcagtttatatcagaagtgagaatgaataatgctgatgctaantcgaacttctcattatctg

SEQ ID NO: 14512 - DNA, 569 bp, Homo sapiens
  misc_feature (1)...(569): n = A,T,C or G
agatcgatnacantnnnnnnaatcgaactacagtccgtgtggtgcaattccgggctgacaggctctcaggaccgagctgctgtggccacattcctgcagtctgtgcaggtccccgaattcacccccaagtctggcgtcaagatccatgtttctgaccaggagctgcagagcgccaatgcctctgttgatgacagtcgtctagaggagctcaaagccactctgcccagcccagacaagctccctggattcaagatgtaccccattgactttgagaaggatgatgacagcaactttcatatggatttcatcgtggctgcatccaacctccgggcagaaaactatgacattccttctgcagaccggcacaagagcaagctgattgcagggaagatcatcccagccattgccacgaccacagcagccgtggttggccttgtgtgtctggagctgtacaaggttgtgcaggggcaccgacagcttgactcctacaagaatggtttcctcaacttggccctgcctttctttggtttctctgaaccccttgccgcaccacgtcaccagtactatan

SEQ ID NO: 14513 - DNA, 474 bp, Homo sapiens
  misc_feature (1)...(474): n = A,T,C or G
gaacgtggggggggttttnaactgatagcgtgcgttngncgnggaattcctccatctcccaacactaagttcacttcatgtctctcacaacagggaggaaacttagcgttccttggagacctgaaaggatgcagttagcttaagaattttcaagagcttatcaatcagtcagcccttgttcatccccgagcagatgtgtggtggtattgtggtggacctttactgggcactctgccaaataactggagtggcacttgtactttagtccaattggctatccctttcaccctggcatttcatcaaccagaaggaaaaaaagaaagacattgtaaagcgagagaagccccttatgggtctttcgactctcatgtctatttagatgcaattggagtcccacgaagaataccagatcaatttaaagcttgaaatcaaatagctgcaggatttaagtcaatattttagtgggtgacagtt

SEQ ID NO: 14514 - DNA, 475 bp, Homo sapiens
  misc_feature (1)...(475): n = A,T,C or G
aggaacgcgcgcgggnnnnnaattgattgantncntaggccgngncgtggaattaatacttttacacactgaactggtcctggaaactgagatgtcttctttgtaagtgaagaatatacaacataatcttgaagaacggcacagtggtatgggccacaagcatactttatgtgtgtaacggactgaaagacaaattaatcttggtgaaaggatttttcatctcttatttctatttgccagtgttagtcagtgttctgctggcttagattattacctttttctggttccttactgtgttttattctgatgggtcctagaaatccctctcctgaccacttgtcagaatcagaaagtgaggaagaagaaaatattagttacctaaatgagagttctggggaagagtgggattcctctgaagaagaggactctatggtgcccaacttatcgcctcttgagagtcttgcctggcaggttn

SEQ ID NO: 14515 - DNA, 479 bp, Homo sapiens
  misc_feature (1)...(479): n = A,T,C or G
ccccccccccccccccccccccaatagtagaccatattgagtgcggtggaattccagcttaacagaaaaggaatgtgtgaaggagaaattgaatctcttgcacgaatttctgcaaacagaaataaagaatcagttatgtgacttggaaaccaaattacgtaaagaagaattatccgaggagggctacctggctaaagtcaaatcccttttaaataaagatttgtccttggagaacggtgctcatgcttacaaccgggaagtgaatggacgtctagaaaacgggaaccaagcaagaagtgaagcccgtagagtgggaatggcagatgccaacagcccccccaaacccctttccaaacctcgcacgcccaggaggagcaagtccgatggagaggctaagcctgaaccttcacctagccccaggattacaaggaaaagcaccaggcaaaccaccatcacatctcatttgcagaggcccctgn

SEQ ID NO: 14516 - DNA, 439 bp, Homo sapiens
attgaggaccattagtctagtgcggcggaattcttttttttctgtggtagacatctgatgcaaccctgtttatgcgatgcccaaaattttgcactgttgacactgttgatagaattgatggtttaatggtacttgtaatcaataaactattttttatataaagagatgaggccaaagactacaattcccttgtcaaccttgatagtgttttagtatagatgttctttcattagatactgtaaatacaagggattttaggtagttagtgaatgtacatgtgaactaaaatgctctctgtgtattttctgttgtgtaagtacttgttctaatccagcgttattgcattatgtaattgctctccctgggaaaaacagaatggcatgcatttttcacaatacgtaagtgaccaaaaacgagcctttttgcaataaattggcag

SEQ ID NO: 14517 - DNA, 460 bp, Homo sapiens
  misc_feature (1)...(460): n = A,T,C or G
ttgggaattcganacccctattnagattggtggacttctgcgttcctcccagctataggacaaagaggtgtcaactcaactgtgtcttcttagaagagcccattatttataggtgagtcattagtccctgtacaactaaggacaaggccaactgataactcagtaaataatcgagtccattttgtgcttgcgagttaggggcttaatttggggtggtttgcagattaagtactttcactgcatataataaacgtacaccagcaaaccactcatggaattcttaaaaaaacttctgagctagtttaccagtttcaaagactaattcagagagcatgttttacctattctaggctggactggaactcctggactcaagcgatctttccatttatcagggactactgacgcgtgtctcccaataaatacctgagtataaacaaaaaaaaaaaaaaaaaaaaaa

SEQ ID NO: 14518 - DNA, 558 bp, Homo sapiens
  misc_feature (1)...(558): n = A,T,C or G
gattcgatcactgtccagggggtagtacgcctcgtagaaacctaatgactgatccacctactcccccttgtggtgaatatttagttttagccaaaatacttttattggtagctgttaactcttgatgttactttactataatgagaacagagatttggatagtctaaaacagattttaaaaaataattcagatggggctttatcataattaggaggggtggctagtactgctcagccccagttgcatgttaggattatctgcagaccctgggtcacgccctgagagattccattttatctgtttgtggtaggacccaggcatttacagtttaaatcaaattaaatttaatctacttttaaaaattaaaaattcccaggttattctagtaggcagtcagggttgagaaccccttatgtaggttataattatgcttctataactatttctgtatatggggggagagcacatcataattttttaacaacagtttgtcgattacattatagtgtgcaaattttacattaattaatgcttttcccaggactactnatatacag

SEQ ID NO: 14519 - DNA, 449 bp, Homo sapiens
  misc_feature (1)...(449): n = A,T,C or G
gttgactcccctttgatgacccttagnccatgtggtggaattccttagattcttaggaagattggctgaatgggagatagtaaggtaggctgtacttttatgttgcatagcaggctgttgaactttttgagagttatttcccctaacttcacaagcagactatatgtttgtagccatgagctattaacaatttgtatatcaaaataacctaccttacttttattttcaggctcctccattaccatccgcctcatcttgatattgttccatggacattaaatgagaccttttctgctattcaggaaataacccagttctgcaccactggtttttgtagctatctcgtaaggctgctggctgaaaactgtgtctatgcaaccttccaagtgcggagtgtcaaccaactggacgggagagagtactgctcctactccaggactctcacaaag

SEQ ID NO: 14520 - DNA, 459 bp, Homo sapiens
  misc_feature (1)...(459): n = A,T,C or G
cattgaagacccatattgcagngcggtggaattcgtggaataagcttggcatgccaccctgttttagagagtgacagttacagttgtaacaagcctacttcatattggccccctcagttagcctttttgaggcaatgccatttctagagttgaaaaagccctggacccaaactgcggcactgttgaataaagggcagtcctactcctgtccttttagagtggcttagtgtgacacacaggcatctcccaggccaagcacacacaggctgcgcccagttccgcaggagccgtcccacagcgtggctctctgggttctcccacttgtcctccttggaaggagctcttgctggccagtgtttggaggggaggatgagtgcctgtcactgaggcctcactatggttggcgtctgaagctgggcggtcgtcaggcctgtgctgagagccgcagcccctgtgccn

SEQ ID NO: 14521 - DNA, 567 bp, Homo sapiens
  misc_feature (1)...(567): n = A,T,C or G
ngactcgatcaccactccgngnggnctagtatcgactcttctatctttaccatggacgtaacaacagaggtttaataataagaggtttggaggttaagtgctaaaatgcatataaaatacctagcacaggacacagtaaaaagattgttaccgtatttcattgaatctggttttaagacacttcctgatttcaaagaaactaaaagctcatcttgaagtccaggaagtaggttttgggtcactcagaactcccaagggactgtatttggtagtaactagtgataaacaaactggagtttaaatgaggactttgtcaccagagatatttttattgcctgtatggagctcctgcacaaatttattccatttctcttgtagaaagagatccaacctggccgtaaatggggtgtggtggagtagaaagaagggtattaagtaaagctctgtgtcgatgcctttctgagcattttacggtgttggcatatgtgatcctgggtatcangagcctcaatttcttggggctgtaaaatggngagaacaacgctgatcccattggtctctgatggg

SEQ ID NO: 14522 - DNA, 471 bp, Homo sapiens
  misc_feature (1)...(471): n = A,T,C or G
cgggttnnnaaactgagacacttgataccntgnggaannnccagagcataagtacatccaggttgtctaccttcataacaacaatatctctgtagttggatcaagtgacttctgcccacctggacacaacaccaaaaaggcttcttattcgggtgtgagtcttttcagcaacccggtccagtactgggagatacagccatccaccttcagatgtgtctacgtgcgctctgccattcaactcggaaactataagtaattctcaagaaagccctcatttttataacctggcaaaatcttgttaatgtcattgctaaaaaataaataaaagctagatactggaaacctaactgcaatgtggatgttttacccacatgacttattatgcataaagccaaatttccagtttaagtaattgcctacaataaaaagaaattttgcctgccattttcagaatcatcttttgaagctttg

SEQ ID NO: 14523 - DNA, 561 bp, Homo sapiens
  misc_feature (1)...(561): n = A,T,C or G
natcgacacctatcaggggatcgatactcagctcgccgagagcaaggaggccagcgatgcgactggngcggctcctttctcctgcaccccanatgtgagggatgcaccctaaattttgctcttttcaaaataggggaccaggatctcaggggagagtagctgaggccttgctcggagtcccaggagatccacaggtccggcatgaacagtgagaggtcagaggtggaaggctcagcaggagaggagaggaggatcagcagaggtcatgagaaggccagaatccagggtcaggctgtctggaacaggaagtaaaatgggccgagatggagcgagcccccagtgtgcttccaaggccactcccacctccctgaaacaccctgctacgtactgatccaatgccctgcgctgtgtatgagagcaccttctcttctgaaacccctatacaagggaggggcccctgcggagaccgtgccctgccatccagtcctcaaggggattctaananactagtgacaaagtagggaagcagctgagcttganaaggagtctgaggacgatggn

SEQ ID NO: 14524 - DNA, 570 bp, Homo sapiens
  misc_feature (1)...(570): n = A,T,C or G
gatcgatccccctnnnnnnnncctcgaacaccagtccagtgtggtgcaattcggctgaggcagaagaatcgcttgaacccaggaggcggaggttgcagtgagccgagatactgccactacacttcagtctgggtgacagagcgagactccatctcaaaaaaacaaaacaaaataaaataataatgtgggctattcagaagaaaaagtcagtgacagagagaccagaacccattggatcaagagacctgcagggattataactctttactctgtgagcagcggtgtttcgtgccctgtctctgcctgtgtgtttttactaagaattccagaaatcctgtaatttgtaaatgggaaacagaggaaccagattgttttatagctgataagaaacagtctgttttagaaacatctgtttggaaagtattactcatgtattcacaaagtcatatttataacactagtcttctttgactgtattcaacaaaaggcagtttcaccattaatttcatagtaagcttttttaaaggattctagatctaaattgcctaagaatgttaaccacattcttgg

SEQ ID NO: 14525 - DNA, 477 bp, Homo sapiens
  misc_feature (1)...(477): n = A,T,C or G
agggttccnnnaactgaaaaacctgagnatcgtaggaagngcggnggaattcggatttgcgttgttcactgacgatccttctggcagagatttagagcattgtcttcaaggaaacatcaaggtgaaaccaagtcgttttcaggagccaagcccaacgaacagcaaagaagctactctttacaagaagagtaaactttgcaagaagtttaattcaggagttttccaaaactttaaccaatctaatctccacgataagaaaaaaaaaatgcaggactttgttaaacccatagaattcttaatacacaatctctacatatacacattccatattaaagagaggaaaggtgttagtaatggaaatgatactctaagtattaggataataagggtagatatgtagaagtgctaataaaatggctttccatttttttccatttattcagcaatacttactaagctattttattgtatcccagg

SEQ ID NO: 14526 - DNA, 473 bp, Homo sapiens
  misc_feature (1)...(473): n = A,T,C or G
aggcgcgggnnnnttttnaatcgagancctagtgcacgtgcgggaattctcagaacacagtggacagtgacaagctctctggtggatgtgagctgacagtggtcctccaggacttcagtgcgggccacagcagtgagctgaccatccaggtggggcagacggtagagctgctggagcggcccagcgagcggcctggttggtgtctggtccgtaccaccgaacggagccagcccttggagggtctggtccccagcagcgccctgtgcatctcacactcccgaagcagcgtggagatggactgcttcttccccttggtgaaaggtaggagaacagagcgggtgggaggcacagaccaaggaggccacgagcgctggcctgactctagctgaagaccaccatggaagtgacctgtctcacagacccatttttaccctgtggggtttctttgggacctgactgtgaagagaatgggt

SEQ ID NO: 14527 - DNA, 495 bp, Homo sapiens
  misc_feature (1)...(495): n = A,T,C or G
ctcgaacccccttngnnnnatcgtagaccatagtccatgtggtggaattcgattcgagcatcaggctaagaccctgtgtcctccaccatgcactcacccctagccctggttagctgacagtcagctgtggggaacacagctacaaccctaccctggcagggacctgagagcatctcaggaggggcagcgcatgtgtgcatgtgctgtgtgagtgagcacacccgtgtgcacactcatacacatgtgcacacacacgcactctccccgctcaggggcctggaggtctggctgagcccctggggaaaggtgagttctttcatctccctcctccaggtcggagtgcctggagtcaggtgtcgaggccacattgctggctgccccctctttgtagctcctataaagggcccacacctggtggatacctggttgagcgtgtggtctctgccccagcctgtccttgtcacgatcacaggccttgcttttgtaacaatgatg

SEQ ID NO: 14528 - DNA, 488 bp, Homo sapiens
  misc_feature (1)...(488): n = A,T,C or G
nttgagatcgctatccagtgcgaggaattcggatgacagngacataagattgtgggggagagggtagagaggcgaaaggatgaatcaagctaagatgctgcttcatcgttctgatcccagaaattagatgtgtggatgaccaattttcagctaattagcataaaacaaaatacatttcaggaaaattgtgctcgacacaatttaatctctgatggttcagaacagtctctgggtcatcatgagcatcagctctggaatcagaagcactggggagaaggattaatggggaactggtattcagggagctcaacatatatgctcacaatctccccattaacaaacaagaacttctttctattttatttcaatacagcttgtcctttgtttgcttcctgaataatttgaaaacatgtacaagttgaagtgtaatgcaatataagactttcagatattaaacattacatagtttaggtatacaattgattcat

SEQ ID NO: 14529 - DNA, 416 bp, Homo sapiens
  misc_feature (1)...(416): n = A,T,C or G
aaatggtggtctgggtctcacagcagcaatgactttaaaggccagggagaggtgggaaaaggtgagggctcccaggatgcaatgccggagacatggtgatgtccttaggtccaggactgctgggggcaatggcacctgagggaggtaggtgtggagcatgaaggagcacagggtgaagttcaaatcatggctgaggccagttcaagctgagggtaaaggtgcctgaggagggcacgagagtcaagccaggtttgggggacaggggagagtttctaagttgtatgggtctgctgagggatccagcatgactgggtccagtcagggagtttgggggattcagagtgaagggttggatcctggacatttgtgcaggccangagggaagaggaaggtggtggcagggagcatagagtcca

SEQ ID NO: 14530 - DNA, 471 bp, Homo sapiens
  misc_feature (1)...(471): n = A,T,C or G
ctttgaccccctngnnttttgagtccctagtcagtgtggtggaattccagaggagcaggaactggaaccctggccgagtccgaaaaaagccagatctggaaggtggctgcggaacggttttaagcggaatatggaggagccggaggaaccggcggacagtgggcagtcgctggtcccggtttatatctatagtcccgagtatgtcagtatgtgtgactccctggccaagatccccaaacgggccagtatggtgcattctttgattgaagcatatgcactgcataagcaaatgaggatagttaagcctaaagtggcctccatggaggagatggccaccttccacactgatgcttatctgcagcatctccagaaggtcagccaagagggcgatgatgatcatccggactccatagaatatgggctaggttatgactgcccagccactgaagggatatttgactatgcagcagc

SEQ ID NO: 14531 - DNA, 492 bp, Homo sapiens
  misc_feature (1)...(492): n = A,T,C or G
gggaaagtncgnnncccnaggnnnnntnnnnaatcgagaccctanttctgagagcctaatccgtgcggnggaattcacttgtttttgcgctcttctagtctacactctgtattccttgagttcagatccaccctagagggtggatctccagaaataactatcggctccgctatgggccagcgggtgctcagtgactgtgtgatgggtaaagtaaccctgttacctgagagtctagagactagaagaaactcacaggatacttttctgatggaacaaaagtctgcatgcaatatactgaatttctggttcattacgtgtgtaagttttttgcttattcattaattattttggtttaactatagaaataggtaggataacctcactaaaagagtaatcattaagttaataattacattttttaaaancattctttctatctctctcttttaaaggaatcctttgctgaacacctacgctattcaaatggggtcn

SEQ ID NO: 14532 - DNA, 457 bp, Homo sapiens
  misc_feature (1)...(457): n = A,T,C or G
atcgaaaacctgagatacntcaccagngnggtggaattctcagaacacagtggacagtgacaagctctctggtggatgtgagctgacagtggtcctcctggacttcagtgcgggccacagcagtgagctgaccatccaggtggggcagacggtagagctgctggagcggcccagcgagcggcctggttggtgtctggtccgtaccaccgaacggagccagcccttggagggtctggtccccagcagcgccctgtgcatctcacactcccgaagcagcgtggagatggactgcttcttccccttggtgaaaggtaggagaacagagcgggtgggaggcacagaccaaggaggccacgagcgctggcctgactctagctgaagaccaccatggaagtgacctgtctcacagacccatttttaccctgtggggtttctttgggacctgactgtgaagaga

SEQ ID NO: 14533 - DNA, 465 bp, Homo sapiens
atgagaccctagccagtggagggcattcgccagcggcatcctcgcagcagggacgtggcccagctgggggacgtggttcacggcgtggaaagcctagtggatcttctgggctggacagaagagatgcgggaccttgtgcagcgggaaactgggaagcttgatggaccagacaaataggatgatggctgcccccacacaataaatggtaacataggagacatccacatcccaattctgacaagacctcatgcctgaagacagcttgggcaggtgaaaccagaatatgtgaactgagtggacacccgaggctgccactggaatgtcttctcaggccatgagctgcagtgactggtagggctgtgtttacagtcagggccaccccgtcacatatacaaaggagctgcctgcctgtttgctgtgttgaactcttcactctgctgaagctcctaatggaaaaagctttct

SEQ ID NO: 14534 - DNA, 564 bp, Homo sapiens
  misc_feature (1)...(564): n = A,T,C or G
ggctcgatcactgttcagngnggngtagttccacatattggtagaattaagagtcaatatttaaattattgctaaagattaaaatccctcatcttatagtttgtaggggattccatgatggtaaggtatagattgaaattaaatttagtaactaggcatttctgaccataccatataaaaaataattgtaatatggtataaacactgattaaaagtaattatggattttcatgcctgaagaaccttctcagtattcttacagcactgtatcttctttattggttgagaatatcagtctagaaagactttcctagatgttaaatgtgctagtcagtgtcatgaatataaacccttacttgtaagtttgctatagactagttgtacaacactagaatgaaattatgtaatacttttaagaattgtagtgattgcanggtgtgttaaggtaacattttatgcatgtgtcagtgacagaaaggatcanggtantaaacttagcactanatagcatgctcctttagaagttntaaggtaagcagtaggaatattcatgtaattctgatg

SEQ ID NO: 14535 - DNA, 483 bp, Homo sapiens
  misc_feature (1)...(483): n = A,T,C or G
agggggctncnnattgtagtcattagagnacccctagtgcagtgtggaggaattccatgctgtgtctgtattctctggggggaaggggaggagttacagcccggccagttggagttgtagtaccacgagggacgccaactcccagaggagtcctgtccacccgagggccagtgagtcggggaagaggacttctcactcccagagcaagaggagtccccccaactgggtacagacctccaccgccacccccgacacaagagacttatggagaatatgactatgatgatggatatggcactgcttatgatgaacagagttatgattcctatgataacagctatagcaccccagcccaaagtggtgctgattactatgattacggacatggactcagtgaggagacttatgattcctacgggcaagaagagtggactaactcaagacacaaggcaccttcagcgaggacagcaaagggcgtctacn

SEQ ID NO: 14536 - DNA, 453 bp, Homo sapiens
  misc_feature (1)...(453): n = A,T,C or G
natggggaactgagcccatgcggccgngcggnggaattcgtcatattatacaggatatattttggagaagttcagctgagtggcttattagaatttttccagacagctcgtgttgggacagtgggcacccctgtgggcaccatcactctttcttgtgcttacagaattaacttggcattcatgtctaccaggcaatttgagaggaccccacctatcatggggattattattgatcactttgtggaccgtccctataccagctcctctaccatgcacccctgcaattacagaactgctggtgaggacactggagtaatatacccgtctgtagaagactctcaagaagtggggaccacctctttttccacctccccaccatcccagctgatggttcctgggaaggaaggtgggagaccccttgctcccaaccagcctgtccatggtactcaggct

SEQ ID NO: 14537 - DNA, 449 bp, Homo sapiens
  misc_feature (1)...(449): n = A,T,C or G
atagagattagagnccgtgcggnggaactccaaaaacaaatttgtactgcaagtataagtaatatctctttttctctctctttcctcactttcttctttccttcttttctctcccttttttcctttctccttgtctcccttttttagaaatttttctagataaacatgttactattatgctaatacaaaaataaaactactcagttggttattttataccattagtccctcataattttcctctccagattataatctcttttaaaatttttgtgtctcatttagtaagtttcttggaggaagaaccatactatatatgtttcgcagttttttgcttagcattcaagtagatcttagcaaatcctaccagtatcaaataattgcccttcttctatccccacacctttagagtttcaggtctctactatccgattccttgacttcccaac

SEQ ID NO: 14538 - DNA, 453 bp, Homo sapiens
  misc_feature (1)...(453): n = A,T,C or G
nttgaggatagtagacattaggccgngcggtggaattcctggtgctccttgtcactcacgtaattttcacatcaggaaaactctggtctgggtgcagtggctcacacctgtaatcctagcactttgggaaaccaaggtgggtggattgcctagctcagtgacaccagcctgggccacatggcaaaaccccgtctgtaccaaaaatgcaaaaaattatctgggtgtggtgttgacgtttgcggtcccagctactctggaggctgaggtgggaggattgcttgagtctgggaggcagaagttgcagtaagccgagatcatgccactgcacaagctaggtgacagaatgagactctgtctcaaaaataattaaaaagcctctgccccaaactcgttaaaagattttataaccacaactgctgtttctgtgtagatgcatctgcatgcccaggagcn

SEQ ID NO: 14539 - DNA, 494 bp, Homo sapiens
  misc_feature (1)...(494): n = A,T,C or G
ggcacgtnccggccggccnnnnnanaattgagaactgagatcctagcccagngcggtggaattcgatttgattatcatctggattcagaaatcttttcattgtacagagatttcattgtcattgtcgttgttgttaactgatttttaatgatattgatttagaggcatttgtcggtagtttttaaattactatatagggttgaatgtctaatttctataatgtgtggatgcccatcagatatttagtgcattctatatttagcccaagtgtgatcacaatttattttataactttttatgtgttacttacatgactcaatatgcatcttacttaagaaattatgttgtgatctggagtgacacaaatggattgagataccacatccattaaaaatataagtgaatattttatatttaagttgtttaaatatttgcacattattgaaaacatagtactaggaaatgaaggcaccatttaacanacgtgttctgan

SEQ ID NO: 14540 - DNA, 581 bp, Homo sapiens
  misc_feature (1)...(581): n = A,T,C or G
naattcgaacaccccttannnnncctcgaatcactagtccgtgtggtggaattcgttagaacttcggtttacacaatgctctgctgatactgtgccagaagtttgggttctgaagtccacaatctttacaacgttcttcccacatatgccagaatgagctattataaatcgggcagtcatgtcattgggagtgtattctccctctctatttgacaggaaacttgagttgttgggtgtctgactcctccatataacatgtactgcgttgaggggtgtgttcctcctagtgccatgctttctccagtttctcagtcctttatcgaagggtggttaagaatgaactcatttttagctagacccatttcacacatagccaatggtaataagagctatcatttcccaggtgcttaacatacagctcttaagtaggtagcattatacctttntacagaataagaaaccgaggccgagaagttacagtttgctcaaggtcatgcagctagtaaaagtcaccttcaagtcacacatcccatactgcctcattcataatggctatgctggtgtcatcacggggctcaggg

SEQ ID NO: 14541 - DNA, 491 bp, Homo sapiens
  misc_feature (1)...(491): n = A,T,C or G
ngacaganagccggnnnnnnnnaaaactgagactacagtcatcgccgnggacttcgtacacagtagctttagatggcgtggacgtgaataaatgcaacttatgttttcttgttggttcctttttgagtgtcactgtgtttgtaaagagcattcacaatacggtggaatttcaaaagctggaagagctcgagatcatgcctcaggcaaaggcgtgggtccatcgttcttccgagagggtttgtgtggcgactacaccctcagcgtccctggcaaggtgcagttggctctcgcccattcttgttatggaaacctaagatgatcattgggaagatcagtgatcttgggtcattgatccctggctcagaggatagcggtttccatcataaaccaagatgatgagttcagcctttatccctcgtggttccactagatgtaacttaaaggagttaacatttgaggactntgttctacatcagattttactatttgaa

SEQ ID NO: 14542 - DNA, 449 bp, Homo sapiens
  misc_feature (1)...(449): n = A,T,C or G
gtggttcttaancctaggtngactgatgtctgnggaaanncnnnganangagacattctgtgggataaggaatagttttctattgaactgtggtggcttttgccactaatcaggatttagggctgtgcacctccatctgttaagtgaaatggaacttggcttcctaaacactatattagaccaacttgagtcaatacttttattaagtttaatcagggattctcaaaatatttaggattcaaattagcccaattagaaagcagtgcattaaatgttaccaaaatatctgaagatactttagaactattttacacaaagcttatgtctttcctatggaaagtatcatacataaaattttacattcttttaaaaaacagaatctaatgtcttcagatacctagagcttggaaattataatagagttgggctttgacccgaagtcagcagtt

SEQ ID NO: 14543 - DNA, 478 bp, Homo sapiens
  misc_feature (1)...(478): n = A,T,C or G
ggccccaatcgatgaccataggcaattgacgngccattcgnggaccaagatgntctatgtaattcagaagcagaactcttggctaaagggctagtgtggccttcagaaaccattcaattattttctccctacacctttgtcagtttgaaaccagtgaggaaaaaaggtatgttgataagaaacctatattgctaggtagaatttgtacttgttttcttggtagcagttttgaaatattctgtacagtacgttcctattgtttaataataaattcaaaaatatttctaaaaccttaaaaccaactatgccaagcattaagataaacaaatatgatgttctttgacgtaaatcaacgtgatgattctttcacatgtaaacacattttagtgtttctggtttgtcatttttgttgttggtggtgntggtgntatttactctataccctttagcaaaatacagttttaaatttttattgttt

SEQ ID NO: 14544 - DNA, 455 bp, Homo sapiens
  misc_feature (1)...(455): n = A,T,C or G
natcgagaccctagagcaccgtgctggaattcccaattcctgctccgcccttcgtagggaacgcagcgagggcagcctccggagtggaggggcgggacttccggcccttcctgttgtggaggggcgggacttcctgtcttccctgttgcggagctctgaagcggctccctgagggcgctggttttgaactggtcttgtgcggtttgcgctttctcttagtggttacagttggcgctgtctccgctttcctgtttcgtggcgggcatcttggccaaaacactctccctgccaccttattcctctagggttgtgatttttttctttcaccaagaaatatcactcgctggtaatttgtcaaactgaagaaacccctgaagaagcagtggtgggcaggcgccgacgctgcggcttccagagcattttggcaaatcaaagccagggaccgttgctgggcn

SEQ ID NO: 14545 - DNA, 452 bp, Homo sapiens
  misc_feature (1)...(452): n = A,T,C or G
ntttgtagtaccctagcccagtgtggtggaattcaatttttaaaagaaaaatgcatgtaaatgtataggaaacttctggaaagatacacaaagccaagagctgtatgggaagaaggtaaaagaaccatagggaagagttaccttttacttttcacataactttctttccctttttaaaataataagcatgttttatttttataatttaatgaacagatgtgttgatttgaaaaacacactgatcctgaaagttaaaattccaattcagagaaaattgatttctatgaaaagtatcaatcccccaacaatgtcatcaaaatgaagtgtagctatacaacacagacagtggttgaggttgtcatcactcactcgactttcacatatagaatttaaaacacccgaccgggcgcagtggctcatgcctgtaatcccagcacttttggaggccaagg

SEQ ID NO: 14546 - DNA, 580 bp, Homo sapiens
  misc_feature (1)...(580): n = A,T,C or G
nggctcgatcacanctcnnnnnnattcgaacnacctagtcagtgtggtgcaattcgcctaaataaacgcanaatttgcttatactccatcacattcagatgtcttggttgtgacttattaccagtgtggcagagaacccaagttacattttagatcaaaatattctttatgtaggtattgttaaaaggctagagcctacaagttgctcttccatgcgttggtcagggggccctgaaaacactggtaatattaagagtctttctcagggtaacttaatgttttcttaatgaacagtgtttccagctacaaattcttccaataaattgtcttcctttttgaaaagtactctcatagaagaaatttagcaatttctcgttgactgactcagtctattttaagtattcagaaaagattttgatccccattgagttaatgctctgccttgaaaattatttttctgatccttggtagtgataacattntttttctactgaaggtcagaggataggaaacaagtatttctcttctggtatacatgtaatggattctggtaaaaaagattcatattgggcaatttagg

SEQ ID NO: 14547 - DNA, 481 bp, Homo sapiens
  misc_feature (1)...(481): n = A,T,C or G
cccggcccccncgcatcgtagacattagtgcactgtggtggaattcgaagaagttttggaaatggtagtggttgcacaatattgtaaatataattaataatgtcacttaattgtacatttataaatggtagattctatgttacatatattttacataaaaaaagtattagatctaaaactattgaattgtacactctaaaagatgaattatttgatatgtgaattctgtcttaataaaactatttaagaaaacaaaaacaaaaccagctatccgtgtttggacaacactgtcacaaaacaaagttgttgattttagccaggaagcatataaggtagatgtaatcagtgagactagattcagattagatttagtaatattaatccgtatgcagtccctcaaaactaatgtctttcaggaatatatcaagtgtttatgtactataatgattttgttaagttttccccattatagggaaattta

SEQ ID NO: 14548 - DNA, 413 bp, Homo sapiens
aaccacatgcggctgtttaaagttaagccaattaaaatcacataagattaaaaattccttcctcagttgcactaaccacgtttctagaggcgtcactgtatgtagttcatggctactgtactgacagcgagagcatgtccatctgttggacagcactattctagagaactaaactggcttaacgagtcacagcctcagctgtgctgggacgacccttgtctccctgggtaggaggggggggaatgggggagggctgatcacgccccaacggcatcctgatgaatggtacctctacctcactgacaggggatgacggtgggatcactcactccactttcacatatacaactgaccacacccgaccgggcgcaggggctcatgctctgttgccgcacacttttgcatgccatggc

SEQ ID NO: 14549 - DNA, 453 bp, Homo sapiens
ataagttacttccacagtgcatcagtgagatcaatatacacgaatatccccgggcaagttggaccgagccctttgaagaatactcagaagtttattttgtgaatgagtagactggaaaatgtttgtgtccagctgaggatgcacagttggaaagcaggaggaatgctgactggttgatgaaaactagcttaagagcattcattcgctccatgagatcaagggaacaagagtgtttgcaagaagccattatgagtcatggaaaaaaagatgatgaaacccatggaaacagcaagagaattcccactctctctcttcttaaaaaaaatctatcattatacagcacagagtggagccaagtttttaattttgaggaaccaaaaacaggatcaaatatgaaaaccctttcttttattgggccacattgtagatgctgatttgataattggttcctat

SEQ ID NO: 14550 - DNA, 481 bp, Homo sapiens
  misc_feature (1)...(481): n = A,T,C or G
gggcgcgattgagnccntnnnaactgatgatcctagtccanngcgnggaattcgcacaacataatttttatttttggcaaagccagaaaaagatctttcattttgcacctgcagccaagcaaatgcctgccaaattttagatttaccttgttagaagaggtggccccatattaacaaattgcatttgtgggaaacttaaccacctacaaggagataagaaagcaggtgcaacactcaagtctattgaataatgtagttttgtgatgcattttatagaatgtgtcacactgtggcctgatcagcaggagccaatatcccttactttaaccctttctgggatgcaatactaggaagtaaagtgaagaatttatctctttagttagtgattatatttcacccatctctcaggaatcatctcctttgcagaatgatgcaggttcaggtcccctttcagagatataataagcccaacaagttgaag

SEQ ID NO: 14551 - DNA, 481 bp, Homo sapiens
  misc_feature (1)...(481): n = A,T,C or G
aggccgggattgannccctnnnaatgagagtctagtccagngcggnggaannncgaaaccactatttttcaccttctttattaatagaagctcaggtttgctcaggtatctcgtgtccctgcactctggattatttttagctccaagaagtaaataaagatgggttaaaagaatcagatcaagaacattctccttgatagtgttggcttggtcttgtcacacagttccggtaaataggctgaaaagagacatctgctgggaaccatctggataaagtccattaaggagacccatagaaggaaagactgcatttatgcctctctacattttacagtcatcttgggtccataaaaggcaaagcaattcactgaggatgacaggtcataaagatagaaaacacttaggtcactgatgatgtcaatatgccactgaattatctaactctcaaacctttcaaactttagacttcctaatatgtgaa

SEQ ID NO: 14552 - DNA, 481 bp, Homo sapiens
cggcgcgctccgaatcgagatcattgaggcaccgtcggggaatgcccaggactgctaataaagttaaattcaccattagctggagaatgtacaactgggatttggtcactgtgtctccctggagatatattggtgggcttttggtctgggaattccaggaaatgccatcgtcatttggttcacggggttcaagtggaagaagacagtcaccactctgtggttcctcaatctagccattgcggatttcatttttcttatatttctgcccctgtacatctcctatgtggccatgaatttccactggccctttggcatctggctgtgcaaagccaattccttcactgcccagttgaacatgtttgccagtgtttttttcctgacagtgatcagcctggaccactatatccacttgatccatcctgtcttatctcatcggcatcgaaccctcaagaactctctgattgtcattatattcatctgg

SEQ ID NO: 14553 - DNA, 477 bp, Homo sapiens
ggggcccctccaatcgagatcatagtcagtgtggtggaattcccaaactggaaataaagttaaattcaccattagctggtgaatagataaacaaatgaggtgtatccatttaatggaatactactcagcaataaaaaggaatgaagtattgatcaatgctacaacaacatggataaaccttaataccattaagctaagtaaaagaagccagacattaaaaagcaatacattgtaagagtccctatatatgagatttctgtaaaggcagaaccacagagacagaaaacagaagcagagattgactgcaaaggggcatgaggaaactttttggggagtgttctaaaactggattgtggtggtagttgtgcaactctataaatttactaaaataatctaactatacatttaaaatgggtgaattttatggaatgtaagctatgcctcaataaagctgcttcttaaataaaagaatgtatt

SEQ ID NO: 14554 - DNA, 492 bp, Homo sapiens
  misc_feature (1)...(492): n = A,T,C or G
caatgacacctnntgganttatggtcgtaggacccncccacggattccctctcccccgacggcggcagcatcgagctggagttctacctggcgcccgagccgttctccatgcccagcctgttgggagctccaccctactctggcctgggcggtgtaggggatccctatgcgcccctcatggtgctgatgtgccgggtgtgcctggaagacaagcccatcaagcccctgccttgctgcaagaaggccgtgtgcgaggagtgcctcaaagtctacctgagcgcccagatccagtgccctacctgccaattcgtctggtgttttaagtgccactctccttggcatgaaggtgttaactgcaaggagtacaaaaaaggagacaaattgttgcgtcactgggccagcgaaattgagcatgggcagaggaatgcccagaagtgtccaaagtgcaagatccacatccagcgaactgaaggatgtgaccatatgacctgn

SEQ ID NO: 14555 - DNA, 572 bp, Homo sapiens
  misc_feature (1)...(572): n = A,T,C or G
gatcgacaccctcnggnnatcggatnactagtccgtgtggtgcaattcgtagacattgtctttttcctaagaagactgagtttgttaactaagtttattaattctgttcatatcaattttaaatttatcaaaaagtagctactgggtcaaagtcttgatattgaaaaactggattatgatctgttttccaagttgattttaactaagcgatttgactaactcttgtctccatcttcacagcaaaacagagcgtgacactcccaatcatctgcatgctggaaatgaggaaatggttattgaatgatacaagtgcttttcgatcatttagaaagttctgtttcccaagatctttttttttttttttttttaaaagggggttttgttttgtcccccaggtgggagggagggggcgcaatttgggttaaccaaaccctccccttctgggttaaaggaaattttcctccctaaccccccgggggggtggaaacaacggcgagtgccccccttcgccggttatttttgtttttttataaaaagaagggtttctcttttgtggcgcgggctgcccaacg

SEQ ID NO: 14556 - DNA, 566 bp, Homo sapiens
  misc_feature (1)...(566): n = A,T,C or G
ggatcgatcacantcanggaatcgaatcactatccacgtggcgcaattcgaanaagcttgtgcttttgccatgcacacagatgatgaaatagatcattttactgtgaacagatcacattcatctatgacttgcacaggagttgtgtagcgaaataacggcatactctaagctgcccaatacccaataaagtgccaggtgctccacctgccattctttggtcacttacatgtgctttcacttggcttttgtgcactcatcataatcaatgagtggatgtagaattcgatttcataaaacctactgaggtatggcttggagtctctgaaaccatgtatgtagtctgctatactatcattttagtaatgacgagttgtccatgttttgttctttgagccgtgactgttaattgttctatagtattttctcctcattttttatttttaagtttattggtgagaggattatcgaagggtaaaagcagtaagggtaaagggtaaaagcataaaagaaccagagatttttttaaaataccttttgaaagatgtgattttttacttttattttt

SEQ ID NO: 14557 - DNA, 528 bp, Homo sapiens
  misc_feature (1)...(528): n = A,T,C or G
cagatgccgatcgtaccctcatctgatactgcctcacgtcaatggtgagctgatggacacaagatcaaataaggctatgcttattttgtgctgccagaaactgtagcaacctctgtgttcttagaggcacactgtttttgcaggccctcctgcctgggtttcattctggctatccctctaaggcgcaaggtgaagaagcttctgggccaggaaggaaaaaaaaatgcccacctgcagctctggtgaagcttgggcctgctctcctttccatcctctaaggagccaacttggcttttacctgtcaaatagtcataaagtcccctatcctttaccccaccttatacacacgaggctttctcaggaagtggctctgccaggcaggactatgtgggaaagggtttttccttagcacacgaaaaagccccttcccctggattcatgtttcttattttggagggagaagggaattgcacttcacactgccatcanggtttaggtgacctcataatggtgcccactttctcgatn

SEQ ID NO: 14558 - DNA, 537 bp, Homo sapiens
  misc_feature (1)...(537): n = A,T,C or G
nacgatgacattaggccagngcggnggaattcaacattttgacataagccataatataaataatataaaaaataaaaaccatagtataaattgtcagcctttgagttggctacaaattcaatttaatgacagaagagaagggatgctggaggtaaattcttagggtttctatctcatagagtttgctcttctggttctctagactgccaaagaacataaagatgtgcgaggggacctagctgtagtaaaagcaatcctataacaagaaaaactctaaaacagtgccccttacgattttctactgaaatttctctaatagtagaggtgtaaaataagaagttagagaataatgcaaagggggcccaccacagacggaacatttcttttctcttaagactcatgtgatttttgcatcttactccataatatatttgtggttgcgttaatatgacaatgtctgcaattaaacaccagtaagcaaaattgatacatcagaatgacttgcagggcttatcatngcagttggnttacatccct

SEQ ID NO: 14559 - DNA, 525 bp, Homo sapiens
  misc_feature (1)...(525): n = A,T,C or G
cagataaccctcgannaacncancttttgattagtttccaccttcttagtactattttccttcttttaagattccataaggctttggggatatgactgcgtgcactcttaagttactctgtattttatgtgttgtaatttttctcttgtttcttcttgtagggaaatggggttttgctttccgaagatgatactatctatgaaggagaattttcagatgactggactcttagtggaaaggttggaaactagctttctttttttttctccctaataaattcttttactaatttttttttactttaaaaatagctgatttacatgccataaaattcacccctttcaagtgcacatttcagtgatttttggtcaacatggctgtacaaaccaccaccacaatccagtttcagaacatttccatcgcccaagaaaatcccttctgctcattcagtgacttccatttccacctaaagtcccagccaaccactaatcacccttaatcactctatagatttgcttttttggg

SEQ ID NO: 14560 - DNA, 535 bp, Homo sapiens
  misc_feature (1)...(535): n = A,T,C or G
nacgatgacattaggacagngcggnggaattctagcttttcagttttcacagtttttaaaaaaatcatatcaaattactttattggacaattcagtgatatacttactagcagtaaagtttgtcagtatttgaatcaagtaatgaccctagtgagctggagtaactttgtcagccactggggtgttgtacatttttacatgatttttttagcagtaggaggagaggcttttatcgttatgtcagaacttttccccagtggttttcctcttttgagtggaatgaaattgatgggggtggccaaaatgaagaggaacacttgtacctctacctcacactctttaggtcttagaatgtgctttatgttttcattttaggactcttgagaatttctatataccagtgtgtgacaattttgactgtttgtaaatattgttacatcctatcttgatggattgtttctggaaatgggctcccaccggaaacaaaaataatcttttattttgcttttgcagagtgatggtgatgattntaatt

SEQ ID NO: 14561 - DNA, 473 bp, Homo sapiens
  misc_feature (1)...(473): n = A,T,C or G
cgagtaaaancaagtttganaccctatttggagtgccgtaattccctcagaccgcctggcaaagcggaggaagattacctagacgcatgctttccagacagggcgttttggctgcatcacagccactggctggtcctattcatttccatttttatgtatgttttgaaaagaaaaggtccggggatggtggctcacacctgaaatcccagcactttgggaggccgaggcaggaagatcattgagctcaggagtttgaaaccagtctggacaacatagggagaccccatctctaccggaggaaaaaaaaaagagtcaggcctggtggtgtgcgcctgtaatcccagctactcgggaggctgaggcaggacgattacttgagcttgggaaatcaaggttgcagtgagctatgattgtgtggccacactccatcctgggtcacagagtgagaccttgtctcaaaaaagtaacataag

SEQ ID NO: 14562 - DNA, 582 bp, Homo sapiens
  misc_feature (1)...(582): n = A,T,C or G
ntttagaacnccccntttggaacacctatccagaggggcaattcgccacactttgagggatgcagctcccanaatgtataaggaagaaggcctaaaagcattctacaagggggttgctcctctctggatgagacagataccatacaccatgatgaagttcgcctgctttgaacgtactgttgaagcactgtacaagtttgtggttcctaagccccgcagtgaatgttcaaagccagagcagctggttgtaacatttgtagcaggttacatagctggagtcttttgtgcaattgtttctcaccctgctgattctgtggtatctgtgttgaataaagaaaaaggtagcagtgcttctctggtcctcaagagacttggatttaaaggtgtatggaagggactgtttgcccgtatcatcatgattggtaccctgactgcactacagtggtttatctatgactccgtgaaggtctacttcagacttcctcgccctcctccacccgagatgccagagtctctgaagaagaagcttgggttaactcagtagttagatcanagcanatgtggactgaatctgcttgttgt

SEQ ID NO: 14563 - DNA, 508 bp, Homo sapiens
  misc_feature (1)...(508): n = A,T,C or G
naagggcgcgtntnncttttnccccggaacttttagcacagncnnnnncnantnnnantganngnggcgcacacttcctgagaacccagtnagctcccattctgcagagcagcggttgtctgtctctctcnncccgccccaagggcaaggccacgcgtcatgttnntctttccccttggtactcgtagccctccagaaggtgaagtccccagtgggaaagcctatggctactcttacantgcccagcggggccctatgtctatcccnccgcncagtcgccaatgggaatgtancccctgccctcctggctacccctatccaccgcccccacctgagttctatccaggaccccccatgatggacggggccatgggatacgtgcagcccccaccaccgccctaccctgggcccatggaacctccggtcagcggccccgatgtcccctccactcctgcaggtgagggcccttgggtgctggcagcccttcgggaccagccctctcctcccc

SEQ ID NO: 14564 - DNA, 467 bp, Homo sapiens
  misc_feature (1)...(467): n = A,T,C or G
aaacaagtagatntccctcatcgatanccntccgcangngccggaattcctgaagtaggtcttttagataaccctgaacttcgtgtggtccttgtctttggttataattgctgtaaggtgggagccagtaattatctgcagcaagtagtcagcactttcagtgatatgaatatcatcttggctggaggccaggtggacaacctgtcatcactgacttctgaaaagaaccctctggatattgatgcctcgggtgtggttggactgtcatttagtggacaccgaatccagagtgccactgtgctcctcaacgaggacgtcagtgatgagaagactgctgaggctgcgatgcagcgcctcaaagcggccaacattccagagcataacaccattggcttcatgtttgcatgcgttggcaggggctttcagtattacagagccaaggggaatgttgaggctgatgcatttag

SEQ ID NO: 14565 - DNA, 416 bp, Homo sapiens
ctgcaattgagtgccattattcttagacccagatggtcacttcctctctatcctttcttcccttcctccaaataacaatgatctctctgatttgggcaggtttttttttattattattgttacccgtaatttttgttttttctgactgtggttaagagaaagtatttggatccagtcagacttgacgttgaatactaaaccgtcccctaaataatggtgtgatttggcagattttatcttctctgagcctcagtttcatcatctgtaaaattaggaataataataactgtgtttcaagatacttgtgagaattttttaaaacgatcagagtacatgcatagaatataattatatggatggcttagcatagttcctagagttattcagggaaggtgtatgccttcctatattttctg

SEQ ID NO: 14566 - DNA, 476 bp, Homo sapiens
  misc_feature (1)...(476): n = A,T,C or G
atgggttnnnnnaactgatgaccactgatcagcgttgtggaattcgcagattttcgtgaaaacccttacggggaagaccatcaccctcgaggttgaaccctcggatacgatagaaaatgtaaaggccaagatccaggataaggaaggaattcctcctgatcagcagagactgatctttgctggcaagcagctggaagatggacgtactttgtctgactacaatattcaaaaggagtctactcttcatcttgtgttgagacttcgtggtggtgctaagaaaaggaagaagaagtcttacaccactcccaagaagaataagcacaagagaaagaaggttaagctggctgtcctgaaatattataaggtggatgagaatggcaaaattagtcgccttcgtcgagagtgcccttctgatgaatgtggtgctggggtgtttatggcaagtcactttgacagacattattgtggcaaatgtn

SEQ ID NO: 14567 - DNA, 479 bp, Homo sapiens
  misc_feature (1)...(479): n = A,T,C or G
ntttgagacgctatnccgngcggtgatttccctcgggaagacggagaactacgagctgatccactctagtcgcgtcaagtttacctaccccagtgaggaggagattggggacctgacgttcactgtggcccaaaagatggctgagccagagaaggccccagccctcagcatcctgctgtacgtgcaggccttccaggtgggcatgccaccccctgggtgctgcaggggccccctgcgccccaagacactcctgctcaccagctccgagatcttcctcctggatgaggactgtgtccactacccactgcccgagtttgccaaagagccgccgcagagagacaggtaccggctggacgatggccgccgcgtccgggacctggaccgagcgctcatgggctaccagacctacccgcaggccctcaccctcgtcttcgatgacgtgcaaggtcatgacctcatgggcagtgtcaccctggacn

SEQ ID NO: 14568 - DNA, 474 bp, Homo sapiens
  misc_feature (1)...(474): n = A,T,C or G
ggaggcgattaggtttganntccttttcgagaccctagtcagtgtggtggaattcaactagccaggggtacgatactcactagctgggtgtaatacacccatgtaacacacctgcatgtgaacccccatatctaaaataagagctgaaactttcaaagaggagcagttactttgactgacttttattagtagttgtaactcttttcttttcctggaaacctgagtcctaaattggaaggtagtagccacagggtaccgtagttcagacagtttttgaagataagcaattaaaatagatcagggaatggctccttttcaaacttgtgagctaagaatccagaaagcaggttgttccaagacgatgctgtgaaagaaaaaattggcctttcactggggacagggttctttccaaccttatgtctggctcttgtactttctctttcatctcctttgtgaccccatggactctcaaat

SEQ ID NO: 14569 - DNA, 596 bp, Homo sapiens
  misc_feature (1)...(596): n = A,T,C or G
aggaccccnnntttgannnccccntttcgatcactatcccgagnggngcaattcggcatggctagctcgtgtgccgtgcaggtgaagctggagctggggcaccgcgcccaggtgaggaaaaaactcaccgtggagggcttcacccacgactggatggtgttcgtacgcggtccggagcacagtaacatacagcactttgtggagaaagtcgtcttccacttgcacgaaagctttcctaggccaaaaagagtgtgcaaagatccaccttacaaagtagaagaatctgggtatgctggtttcattttgccaattgaagtttattttaaaaacaaggaagaacctaggaaagtccgctttgattatgacttattcctgcatcttgaaggccatccaccagtgaatcacctccgctgtgaaaagctaactttcaacaaccccacagaggactttaggagaaagttgctgaaggcaggaggggaccctaataggagtattcataccagcagcagcagcagcagcagcagtagcagcagcagcagcagcagcagcagcagcagtagcagcagcagcagcagcagcagcagcagcagtagcag

SEQ ID NO: 14570 - DNA, 599 bp, Homo sapiens
  misc_feature (1)...(599): n = A,T,C or G
agtgccnnnaggggnannntttcgaacaccacttagagtggccgcaattcctttatcttagacattaacactatagcccanagcatagttactttgctaaatcagaaagcaactgagttctttgttttctcctcaaatagaatggggaacgttcacaacattctcttaagttctaacaggaataccattgtggttatagaactcagggctgctaaagcaactactctagacccatagttctttttagttagatgtattgaaacagacaaaaatattaacatcagaaaaagctcttgccaattagaggatcttcttaatcctcagcaattaagtttggggtttgaggggggcaggtcattgttacaacagaagtaaatttggcatctatagaaatcaattatgatttttgaaagatttatctaaatatatcaatatagcatctctttaatgttagtcatttattagaaagatcctttatcctgatttgcttanacctttcaataaattgcactttaaaggattataaataatccatttaaaaattcaagtacacaccattagggtggttactatgcagagaatgtcattgtgatagntta

SEQ ID NO: 14571 - DNA, 466 bp, Homo sapiens
  misc_feature (1)...(466): n = A,T,C or G
ntttgactgcgtccataggccanngcgnggaattcgtggtctgaagcagacagggaatgggagaggaggatgggaagtagacagtggctggtatggctctgaggctccctggggcctgctcaagctcctcctgctccttgctgttttctgatgatttgggggcttgggagtccctttgtcctcatctgagactgaaatgtggggatccaggatggccttccttcctcttacccttcctccctcagcctgcaacctctatcctggaacctgtcctccctttctccccaactatgcatctgttgtctgctcctctgcaaaggccagccagcttgggagcagcagagaaataaacagcatttctgatgaanaaaaaaaaaaaaaaaaaaaaaataaaaaaaaaaannnnnnnacctaattataaaaggggnggtattnttttgtaaatgctccacgtcccttcttttcc

SEQ ID NO: 14572 - DNA, 485 bp, Homo sapiens
  misc_feature (1)...(485): n = A,T,C or G
cgggttgccccaatcgagnccctatcgtagactctagnccatgtggtggaattctctggtttgttttgttttattttttaatgaaataaacctatattcctgattattagtctatttgcatatgtaatatatccaacagaatagtctcttaattttaacttttttgcactggggtagtattctttgttgtttggtcttattttagaaaataacaattaaatttcttagttccttttttcacatccaaccaaagaatatatagtatctgaagtttcctaggttcttgctgacctcataggactacaaaaatatcatggccattattttcataaataactgttcagcttcttttagaatactttctaagtgaaaatagcaacatcaaaataatgtttgtaataaactttttgaaaatatgatcaggagtttctgggaaagatggcggatcaggcacattatttcagtccttaaaaccaacattgtaa

SEQ ID NO: 14573 - DNA, 473 bp, Homo sapiens
  misc_feature (1)...(473): n = A,T,C or G
catcgattagcgctacgctagngacgcgcaattctggcgggctgtcgtcacgacgacgtgcggacgcagcggcgggggcctttcagcttatgtggagaagtcgctgtgaagccacctataaatccatttactgaatttatggagaaggctgtaaatgatggaagtcattcagaagaactcttttgccatcttaaaactatatcagagaaagaagatttaccacggtgtaccagtgaaagtcatctcagctggtattctcatcagtatcaggggaaatctaaatttccgattctaggatttcctgttttgtctataatataaattatttgaatcaaatacagcattcttttaagagtatcttttccaaatctagtatttatttattaaaatatatttaatctgattacaagtgtactcatctagcagaattcaactagttgttttgaatcttaatgaaagcaattaanaaatga

SEQ ID NO: 14574 - DNA, 450 bp, Homo sapiens
  misc_feature (1)...(450): n = A,T,C or G
nttttattgatacctntgtgcagattgangaccnttccagccagccctgggtgttccccaccttgggcatcatgcaccacaacaaacaggccactgagaatgcaaaggaggaagtgaggcgaattctggggctgctggatgcttacttgaagacgaggacttttctggtgggcgaacgagtgacattggctgacatcacagttgtctgcaccctgttgtggctctataagcaggttctagagccttctttccgccaggcctttcccaataccaaccgctggttcctcacctgcattaaccagccccagttccgggctgtcttgggcgaagtgaaactgtgtgagaagatggcccagtttgatgctaaaaagtttgcagagacccaacctaaaaaggacacaccacggaaagagaagggttcacgggaagagaagcagaagccccaggctg

SEQ ID NO: 14575 - DNA, 445 bp, Homo sapiens
  misc_feature (1)...(445): n = A,T,C or G
attgagnaccttttgatgactattagacagngcggtggaattctatgaactttgagaattgaactatttaccaaaatggtatatggttaatattaaatggctctgaagagccacaaaaacacattgatgataaatattccattatgttacatacggcaatatgcttttcattacaaataatatgtagctcctgcagtgtgtaaaatgtttgtttaagcatactttgttgaataattttgggttttttcaccaatacattatttcaattcattacgttaggagatttgttaaattatataaagaaaagataatatcaattctataataaataatagcaagctaatcacttcaaacttactgcatagtcctttgtcacagtcatcagggcaaccggcacaaggtgttccttgttggtacggggtattctttctattcatattattaa

SEQ ID NO: 14576 - DNA, 444 bp, Homo sapiens
  misc_feature (1)...(444): n = A,T,C or G
attgtagaccatantgaagaccgttggaaagcccggcggcagagtacctgcgactacaggtgaacttctcacgtaaagacgttcatcctacccaaactccgaataattaagaagaaaattctgtgaaatctgacaagctgagtgttgcatacagacctgcaaaaggcccatttgccaggacagacacctgaaggaaaaagaggagagtgaggtccaccagataccaagacagaatgatgatggtgcagtgggaggaagacagacaacggtcccagagtggggagcccatcctcagaccccgacagacacaggacccttacgtggtaccagatacagaggtggaggctcaggaccctggagaaagaatgcagtatccccagatgggacaggatacttaatgggaaagaataaaactggacccctgcacaacacacagacacattt

SEQ ID NO: 14577 - DNA, 461 bp, Homo sapiens
  misc_feature (1)...(461): n = A,T,C or G
gcgcgcggcnnctcccatagatagcatgcnagnggcgngaattcttcgcttcctgtatggagatatcatatgtaacatttactcctgtttctgctgattgtttttttaatgtttcggtttgtttttgacatcagctgtaatcattcctgtgctgtgttttttattacccttggtaggtattagacttgcacttttttaaaaaaaggtttctgcatctgggaagcatttgacccagagtggaacgcgtggcctatgcaggaggattccttcaggcctttcctttggttatttgagcatctttgctttcattcgtctcccgtctttggttcttcagttcaaattattgcacagtaaaggatctttgagtaagttcggtctgaaaggtgtggtctttatatttgatccacacacgttggtcttttaaccgtgctgagcagataacaaaacaggttatgaagagg

SEQ ID NO: 14578 - DNA, 439 bp, Homo sapiens
  misc_feature (1)...(439): n = A,T,C or G
tttgagaccttttgacgccgtgggaanncgcctttttaaacttaaggtctcttttttcataacatgtacatataaattttaaaatataacttaaaaatacagtagctgcttctaaatgcagatattgtaacttagctattattttcagaattccacaaggcatatgcccagttggtcgatcttggcactcactaacaccagtttcttcagatcatctttttctctttggaggatttaccactgataaacagccactaagtaagtccttgaaaaatatgataatgaaatcatcatatatcatccatatctaatagctgaaaatgagtctattagagactgatgagactgcttatagggttgggtggaaggattgaaattaattttgatcctgtaacatagctgtaattgtactatatggcatacttctgttcaataaagg

SEQ ID NO: 14579 - DNA, 468 bp, Homo sapiens
  misc_feature (1)...(468): n = A,T,C or G
natcgatagacctacgtagngcgggcattcttagatagggtcccactcccagaagaagctgctggggtgggggtgggaggctgcctaagcctgtctgtgcttcagaggcccctccagtccctggctgtggggtaactgggggtatgagctgtggccacaggtgagcaaggcagggaactgcaatccagccctggccgcgggaggggccatctctggccaatgctgctgtgccttcaaggactgacaagttacgtaggggcagaggtcgccagctagccagtgtctcctccatctggggggcgtctgtccacttgtcaccttaggttttcactcatttgtcaccttggggttttgctctgtgtgtttcatatccaacggcaatacttgcagggggacagagtcctctaaatactccaatcctgcggttnttacaaacataaagggggagaccccaagtggaggaccctg

SEQ ID NO: 14580 - DNA, 444 bp, Homo sapiens
  misc_feature (1)...(444): n = A,T,C or G
nttgaaacccttttganngaccttagacagtgcggtggaattcctggcatggtggagcggctgtgccaggcttttggacctcggctcatccagcttgatgatgtcacctaccatggcttccccagcctgcaggccctggctggtgagtagggccagaggtggaggctcatctcaggaagctgggcctgggctatcgtgcccgttacgtgagtgccagtgcccgagccatcctggaagaacagggcgggctagcctggctgcagcagctacgagagtcctcatatgaggaggcccacaaggccctctgcatcctgcctggagtgggcaccaaggtggctgactgcatctgcctgatggccctagacaagccccaggctgtgcccgtggatgtccatatgtggcacattgcccaacgtgactacagctggcaccctaccacgtccc

SEQ ID NO: 14581 - DNA, 442 bp, Homo sapiens
  misc_feature (1)...(442): n = A,T,C or G
nattgangaccccttggacgtctgtgggaattcgcctgggaaaggtggaagagagagaggtcctgagggccccagggctgcgggctggcgaaggaaatggtcacaccccccgcccaccccaggcgaggatcctggtgacatgctcctctccctggctccggggagaagggcttggggtgacctgaagggaaccatcctggtgccccacatcctctcctccgggacagtcaccgaaaacacaggttccaaagtctacctggtgcctgagagcccagggcccttcctccgttttaagggggaagcaacatttggaggggatggatgggctggtcagctggtctccttttcctactcatactataccttcctgtacctgggtggatggagcgggaggatggaggagacgggacatctttcacctcaggctcctggtagagaagac

SEQ ID NO: 14582 - DNA, 330 bp, Homo sapiens
ggttcaggataagagtcttacgtttaagttttgaagctacaagaaatatttgtgtgggtatagttaaagctttttttaaaccttctgaaaattggctcttctggtttggtgagcttaggaaggaaaaaagatgcaaacttttggcctcatttttgtcttctctgatcatggaaagcaacacagccagtcagaaaaagctcttgggctaggaggaaggaggacctgatttctcggactcaaaatcccttatggcagaaaaacattgctcagtgacttacaaagtgtgtcatttgtaagactgcacacctctgtcattcactaacattaggg

SEQ ID NO: 14583 - DNA, 490 bp, Homo sapiens
  misc_feature (1)...(490): n = A,T,C or G
cgcggccatcganactttgagacattagtccagngcggtggaattcctggaggagaaactaaagccttattgagaaaacatgttatagatccttttgttgctgagagagtggaacataggtcctagacagggtgaagagttctggcacattttagctgctactttgagacctcggtgatgttacctggtgtggtcatcccatcttgtcctgttttaaggatatgggtggtgaaagatgaaagaggcagagtttatcccaatgacttctctgtttgagttgggaagcctcaccttcagacccagtaactgtccgcagctgtctgctagtggttgtcttaacatcgtagtcctagtttgcattttttaaatcccctctgtttaaaaggtttgtaaaacaaaaacaaaaaactaagtctgctcagtgaaatgctgtacaaccctaaataagtggtagaagagtgtcactgaattttgtctctgaattcagtan

SEQ ID NO: 14584 - DNA, 487 bp, Homo sapiens
  misc_feature (1)...(487): n = A,T,C or G
aggcggtttgagacatgatcaccgtggnggaanncctggntttctacagagggcagatggatcagcctgctaacatgccagactccatattgctagaggcaaaggagagtggctacagtgatgacgagatcatggagctgtggtcaactcgagtgtggcagaagcacacagcttgccagcgcagcaaaggcatgcttgtgatggactgtcatcgcactcacttgtcagaagaggtactggctatgcttagtgcctctagcactttgcctgcagtggtcccagcaggctgtagctccaaaattcagccattagatgtatgcatcaaaagaactgtcaagaacttcctgcataaaaaatggaaggaacaggctcgggaaatggcagatactgcatgtgattctgatgtcctgcttcagctggtgcttgtctggctgggtgaagtgctaggtgtcattggggactgtccaaagctagttcagcgcttctt

SEQ ID NO: 14585 - DNA, 485 bp, Homo sapiens
  misc_feature (1)...(485): n = A,T,C or G
ntttgagacatagcagnggcgggattgaatgctttaagatgcctgagccagccaagtctgctcccgccccgaagaagggctccaagaaggcagtgaccaaagcgcagaataaagatggcaagaagcgcaagcgcagccgcaaggagagttactctgtgtacgtgtacaaggtgctgaaacaggtccatcccgacactggcatctcttccaaggccatgggcatcatgaattctttcgttaacgacatatttgagcgcatcgcgggcgaggcttcccgcctggcgcattacaacaagcgctcgaccatcacctccagggagatccagacggccgtgcgcctgctgcttcccggagagctggccaagcacgccgtgtcggagggcaccaaggccgtcaccaagtacaccagctccaagtaaacattccaaggggagacaacagcttttagacatatcttttccaacagtcgtcactgctggacactg

SEQ ID NO: 14586 - DNA, 469 bp, Homo sapiens
attctagatccctagtccagtgcgatgtcattaccagaggctcacatcagcctttcagagcccagatctttgaaaatgacagataatcctggaatctctagtttttggcctgctgcttttctaccatgcgtgtttcctggggaatgaaccagcagcatagtggctttgagtttcagaagtttttccctctagcgtcttgtgcctgagctaatgaacggaaggaatggttataaaattggccaggtcaaggggaggaggagataaattcaaggggacaaatcctagtccccataacagcagcctgtgttatgacagcacaccacagccccaattccctctttcctgctgctgctgcaccaccagcctctcaaggtggcttactctagacttacacagtgggccatctttctttttttttttctttccccatagcagaatgagacttgtttccttttttatttatttattt

SEQ ID NO: 14587 - DNA, 473 bp, Homo sapiens
  misc_feature (1)...(473): n = A,T,C or G
nattgatagacgtncgtaggaccnngcgnggaanttcaatgtgttttttactagcacttgggaaagttattaagtattttctttttccctgggcatcatgttctattattattttagaaaaaagtcataattggtactgaatatatggtatatataatattaaaatggtaattttgcaacagctcaaaattaaaaggttaatgttatacactttactatatgagctgtgattactaccattagccacagataccagtgcctcaactttttatgtacctattgtgatttaatgtaaataaaggtttgtatagtacttttgtagttcttaagtatgaagaaaatgggtaaactttttattttgttagaaactgttatattttgagtgtaatatttatggtttatagcaaaatgaatgtgcttattgttgaatgcatgtatttagaagcctttactcagcccctgtgttctgtgcg

SEQ ID NO: 14588 - DNA, 450 bp, Homo sapiens
  misc_feature (1)...(450): n = A,T,C or G
nttttaatcgataccctgtccaattgatggacttcngaaattatatctatacattaccttgtagcagcagtacctggaagccccagcccgtcacagaagtgtggaggggggctcctgactagacaatttccctagcccttgtgatttgaagcatgaaagttctggcaggttatgagcagcactagggataaagtatggttttattttggtgtaatttaggtttttcaacaaagcccttgtctaaaataaaaggcattattggaaatatttgaaaactagaaaatgatggataaaagggctgataagaaaatttctgactgtcagtagaagtgagataagatcctcagaggaaacagtaagaagggataatcattaagatagtaaaacaggcaaagcagaatcacatgtgcacacacacatacacatgtaaacattggaatgcataagttt

SEQ ID NO: 14589 - DNA, 493 bp, Homo sapiens
  misc_feature (1)...(493): n = A,T,C or G
gagcggaatcganccactgagnaccattagnccagngcggnggaattcctcaaacttcaggtgaacccacaattccggaatagcgggaccggcacccgggcccttctcacgtggcagcaccggcaaggggctgggggaagagcccacgccagcctacgtcacgcaggaagggagccagtggccaccccaaacacacctctcctcctcacacctggcctacgtccaactctccacggctctgcccagaaggctgcacgtacaacacacacagaggcgggcatttccctgacgactcgtgtgtgccgtgggggagcggtagatggcccagccccaagtgttccgatcttcctgcccaaacatattctgtgacggaaagcctatgttgacctcgtccggcactcaaggcgtgggcagcggcctaacgtctgctgcgggaacacagtcgcgttgaatgctattctcaagacagacaaaacagtgggaagacactacg

SEQ ID NO: 14590 - DNA, 453 bp, Homo sapiens
  misc_feature (1)...(453): n = A,T,C or G
tcgttatggggccctacganatgganacgtcacgaagngnccnggaanncattctgggaaaactgagagaaaaatctgaggccatccagaaggttctagaacagaccattctaaaaacaatcagtgcggttggtgagcaggtcctgcccacagtcgagcacctccagctggagctggatcagctaaagtcagagctgtccagctggcgacacgtgaagaccggctgtgagacagtggatgccgtacaagaaagagtggacgtgcaagtcagagaaatggtgaaactcctgttttccgaagatcagcaagtcggttctctggaacagctgctgcagaggttctcatcacagtttgtgagcaaaggcgacttgcagacgatgctgcgagacctgcagctgcagatcctgcggaacgtcacccaccacgtttccgtgaccaagcagcttccaacct

SEQ ID NO: 14591 - DNA, 463 bp, Homo sapiens
  misc_feature (1)...(463): n = A,T,C or G
ttcggtcccgnggcgaatcccaattgtaccctacgcagattgagaccatctgaagncacctgcagaacaatggggctgattcttctgctttttctctggaaaatcttttattgcttttggtggtaatttacctagaggttacaaccacaggatggagcttggtctcttatttgcctttttgggaaaccaattaagattaatacaggataaaggaaaaaagcaatctattcattatataacacagttgtttgtattacttgttccctgcaaaggaaatctgttgaatgcttgcattttgaattcttttctaatagaacaaccaaaaaaggcttcttatggtgcagcaggaaaaaagatcatttttatagctttgcattcttaacatagcatttaaagagcggcatgaattagaggaaagacatggaacacacaggtagtcggtttgagatcatcggcttaaaag

SEQ ID NO: 14592 - DNA, 488 bp, Homo sapiens
  misc_feature (1)...(488): n = A,T,C or G
tggaagaaccnaattgagnccctatcgagnactctagtccagngcggtggaattcgacggagcatcccgagcctcccaaagcagaattgcagctgccgccgccgccacctccaggccactatggcgcctgggctgcccaggagcttcaggccaagttggcagagatcggagctccgatccagggtaatcgcgaggagctggtggagcggctgcagagctacacccgccagactggcatcgtgctgaatcggccggttttgagaggggaagatggggacaaagccgctccacctcccatgtcggcacagctccctggaattcccatgccaccaccacctttgggactcccccctctgcagcctcctccgccacccccaccacctccaccaggccttggccttggctttcctatggcccacccaccaaatttggggcccccgcctcctctccgtgtgggtgagccagtggcactgtcagaggaggagcgg

SEQ ID NO: 14593 - DNA, 473 bp, Homo sapiens
  misc_feature (1)...(473): n = A,T,C or G
gagaagcccccagtgnnccactgagaccctaactgatggcctgaaanccgcaaggaggcgaaatcctttctgaagggcctgagtgacaagcagcgggaggaacattacttctgcaaggactttgtcaggctgaagaagatcccgacatggaaggagatggcgaaaggggtggctgtgaaggtggaggagcccaggtataaaaaggacaagcagctcaatgagaaaatctccctgctccgcagcgacatcaccaagctggaggtggacgccatcgtcaacgccgccaacagctccctgctcggaggcggtggcgtggacggctgcattcatcgggccgccggccccctgcttaccgacgagtgccggaccctgcagagctgtaagactggcaaggccaagatcaccggcggctatcggctcccggccaagtacgtcatccacacagtggggcccatcgcctacggggagcccan

SEQ ID NO: 14594 - DNA, 482 bp, Homo sapiens
  misc_feature (1)...(482): n = A,T,C or G
tgagggccncnnnagtgggggccattgatnnccntcaaatgagagcataggacangcggnggaattcgcaccttcgtgtacaatagcatgggaaccatcaaccagcaggccatggaccaacttcactatgtgacagagctgacagatcgaatcaaggcaaactcctcacctggtaacaattctgtagacgactcagctgactttgtgagcttttttccagcatttgtgtggactctcagagatttcaccctggaactggaagtagatggagaacccatcactgctgatgactacttggagctttcgctaaagctaagaaaaggtactgataagaaaagtaaaagctttaatgatcctcggttgtgcatccgaaagttcttccccaagaggaagtgcttcgtcttcgattggcccgctcctaagaagtaccttgctcacctagagcagctaaaggaggaagagctgaaccctgatttcataga

SEQ ID NO: 14595 - DNA, 483 bp, Homo sapiens
  misc_feature (1)...(483): n = A,T,C or G
gggggtncccnnnagggggggccattgatnnccnttaactgatgatctaggacangcggnggaattcccgccttcctgcagaagctacgaagtagagtgcagatcggtgtggtgggcggctctgactactgtaagatcgctgagcagctgggtgacggggatgaagtcattgagaagtttgattatgtgtttgccgagaacgggacggtgcagtataagcacggacgactgctctccaagcagaccatccagaaccacctgggggaggagctgctgcaggacttgatcaacttctgcctcagctacatggccctgctcaggctgcccaagaagcgtggaaccgtcatcgagttccggaatggcatgctgaacatctcgcccatcggccggagctgcaccctggaggagaggatcgagttctccgaactggacaagaaagagaagatccgggagaagttcgtggaagccctgaaaacagagttn

SEQ ID NO: 14596 - DNA, 446 bp, Homo sapiens
  misc_feature (1)...(446): n = A,T,C or G
gtggttttanaccagggaccctgatntctggnaaaannccnanaaaaacatgcaaacaaaggaaaagcgtgtgtgctctaggccacttagctatatcgacaactgacaataataggcatagagtgacggaaagacctgacgagatgccacttggcttcctttttcaagtaactctgtagggttttcccacataacagatacagaaagaatttattgttggaaaacggggcggcaagatggacaacattctctgggaccaacgggatgtgcagcctcctgggctcaggcctcaccagctcctgcacagtggtgggggtgaggactgagggacacatcacatctcctgggagcagaagacgatgtctgcgaacccagctcaatatgcatggccttgtccccaggcaggggcggcctcagctggccaggtgtccccgtcactgcagagg

SEQ ID NO: 14597 - DNA, 463 bp, Homo sapiens
  misc_feature (1)...(463): n = A,T,C or G
cccctccccatagacccccctnnnnatagangacccttagtccatgtggtggaattcgcatcctgagcaaccccaatccaagcgactatgtgcttttggaagaggtggtgaaagacactaccaacaagaagactaccacaccaaagtcctctcagcgggtccttctggatcaggagtgtgtgtttcaagcccaaagcaagtggaaaggtgcaggaaaattcatccttaagctaaaggagcaggtgcaggcatctcgagaagataaaaagaaaggcatttctttcgcaagtgaactcaagaagctcaccaagtcaactaaacagccccgaggacttacatcaccttctcagctcttgacctcagaaagtatccaaaccaaggaggagaaacctgtgggtggcttgtcctccagtgacacaatggattaccgacagtgactaagggcagcatgtttaacccaggt

SEQ ID NO: 14598 - DNA, 507 bp, Homo sapiens
  misc_feature (1)...(507): n = A,T,C or G
ggcggggggccccntttgatgagatcattagtccagngcggtggaattccccgcctcggggagggcaccaggtcactgcagccagaggggtccagaagagagaggaggcactgcctccactacagcaactgcacccacgatgcagagcatcaagtgcgtggtggtgggtgatggggctgtgggcaagacgtgcctgctcatctgctacacaactaacgctttccccaaagagtacatccccaccgtgttcgacaattacagcgcgcagagcgcagttgacgggcgcacagtgaacctgaacctgtgggacactgcgggccaggaggagtatgaccgcctccgtacactctcctaccctcagaccaacgttttcgtcatctgtttctccattgccagtccgccgtcctatgagaacgtgcggcacaagtggcatccagaggtgtgccaccactgccctgatgtgcccatcctgctggtgggcaccaagaaggacctgagagcccagcc

SEQ ID NO: 14599 - DNA, 509 bp, Homo sapiens
  misc_feature (1)...(509): n = A,T,C or G
aggcgccgnggnnnnnncctgatagcactcgttcgtgcggnggaattctgatcccgtacatcattcacactgtgctttacgtcctgaacacaacccgagcaacttctcgagaagagaagaacctccaaggctttctggaacagcccaaggagaagtgggtggagagtgcctttgaagtggacgggccctactatttcacagtcttggcccttcacatcctgccccctgagcagtggagagccacacgtgtggaaatcttgcggaggctgttggtgacctcgcaggctcgggcagtggctccaggtggagccaccaggctgacagataaggcagtgaaggactattccgcttaccgttcttcccttctcttttgggccctcgtcgatctcatttacaacatgtttaagaaggtgcctaccagtaacacagagggaggctggtcctgctctctcgctgagtacatccgccacaacgacatgcccatctacgaagctgccgacaaagccctg

SEQ ID NO: 14600 - DNA, 515 bp, Homo sapiens
  misc_feature (1)...(515): n = A,T,C or G
ccgcccccgccgnnnnnnnnattggattgcgntacactagtccagngcggtggaattcggtactgtcactgccactggggctttgatttggaggaatggggcaggggactatctgaagcgcttccatcctaaagccataatgaaaatatcttcctctcttccccattctatacaaaatactaagtggttttcttgctcccactccctaccccttagttaaatagggtttattttccactcatgcccttatgcctttttttcttatagttttttaacttattgactgtgcatgacccagtggtttgaattgtttttagttcaagtcattggtaaaaactacgtttaaggagatgagctactgtttaaagtgagctggcctgcctaattaattccttgtgaaaactaaatgattttttcagtttggggatcattctcacaacataactatgcatgtagaggacaagatttattttctttcctccctttgcccagtagccacatcctgtttactcagg

SEQ ID NO: 14601 - DNA, 460 bp, Homo sapiens
  misc_feature (1)...(460): n = A,T,C or G
cccccatcgagaccatctgnatagtagaccactatccgtgtggtggaattccctgctttcctttttacatttattaaaagtggattttgtaaaagcatttcattgacacgcgacctatcacagacaatggaattcgtcagtggtggtaagactgaaatcctgatgcttttcacacttcttgtctcttgctatgtatttctgcctctagccttgccatgttttgcctttttttttctttttggccaattcctttttatatgtgcccacaacagaggtggggacatataaaaaggaattggccnnaaaaaaaaaaaaaaaaaaaaaaannnnnnaaaaaaaaaaagccgcccctcaaattaaaagggccctttaaaccccctggaaaaccccggggggggccttttaaggcccccccttttggggtgggcccccccccgggcctttttttaacctgggaagg

SEQ ID NO: 14602 - DNA, 456 bp, Homo sapiens
  misc_feature (1)...(456): n = A,T,C or G
nttttattgtagactctagtccgtgcggtggaattccgctcgcagagcaggtgcagaaggtgccgtggctcacacttgtaatcccagcactttgggaggccaaggctgatgaattcatccgagcaaatgccaccaacaagctgacagtcatagctgagcaaatccaacatttgcaagaacaagccaggaaggtactggaagatgctcacagagatgccaacctgcaccatgtagcttgtaatatagtgaaaaaacctggcaacatttactatctctataaacgggagagtggtcagcagtatttttccatcatttctccaaaggaatgggggacaagttgtccacatgacttccttggtgcctacaaactacagcatgacttgtcctggactccgtatgaggacattgagaagcaagatgctaaaatcagcatgatggacacgttgctaagccagt

SEQ ID NO: 14603 - DNA, 450 bp, Homo sapiens
  misc_feature (1)...(450): n = A,T,C or G
gtcgttttaaagacgattagtctactaccgnanaancnnnnnaaatnnnnnnaaanctacgcgaagggttgataagttcagttaatcattttatttcacgtttacccatgtaacaaaactgcatgtggggcacatgtatcctgtaacttaaaataaaatttaaaaaaataaaataaaataaaaagaaaacagaagagtactgaaaattggctcacacttccacagcctgtacagcaagcatgatgttgacatctgctcagcttctggggaggcctcaggaaacataacaatcatggtggaaggtaaagcaagagcaggaggaagagagagagggggaaggtcctacacactttatcaacaagatctcatgagaactccatcacaagagcagcgctagggggatgatgcttaaccattagaaactgcttacatggacaaaccacctcccag

SEQ ID NO: 14604 - DNA, 476 bp, Homo sapiens
  misc_feature (1)...(476): n = A,T,C or G
ccccccattgtagnaccactagtctagtgtggcggaattccttttactttgaaaaaaatagactgtaaatatttttacaagattagatattaacagctaggatccacaaagcacataaagtttatacttttacacctaagttacaattaaaaatatataaacttacattttaaatttatatttatgcatgtttacatccctctactcaagcatgcagtgaatatgggtaacataaaatatgaaaagagaaaaatagaaaaacgcattctctaaagcctatctctttagatcagaaacagaaactcaaagttttgagatgagaggctttctggactctgcgataagcaggcaatggcatctaagtgtttggcccctgtgtgctaatagaggcaaaaaaaaaaaaattattaaaaattaaaaaaaccccacctatatcacaataaagggagacctaaagtctggctaattagttaaaa

SEQ ID NO: 14605 - DNA, 487 bp, Homo sapiens
  misc_feature (1)...(487): n = A,T,C or G
tgagttngccnnnnagtngnnnccaattgatnnccntcgacttgagaccatctagaccangcggtggaattcgtagaaaggaagccttgctcattcttgaggagcattaaggtatttcgaaactgccaagggtgctggtgcggatggacactaatgcagccacgattggagaatactttgcttcatagtattggagcacatgttactgcttcattttggagcttgtggagttgatgactttctgttttctgtttgtaaattatttgctaagcatattttctctaggcttttttccttttggggttctacagtcgtaaaagagataataagattagttggacagtttaaagcttttattcgtcctttgacaaaagtaaatgggagggcattccatcccttcctgaagggggacactccatgagtgtctgtgagaggcagctatctgcactctaaactgcaaacagaaatcaggtgttttaagactgan

SEQ ID NO: 14606 - DNA, 480 bp, Homo sapiens
  misc_feature (1)...(480): n = A,T,C or G
gggagggacgnncccgnggcgggctcgccaatcgtagaccactagtatagagcggcggaattcaacagatatgtatggcatgctgggatgtgccaggtgcctgcgttgtgccagttgctggagaggtagtgtgagcagagcacctgaaatcttgccatcaagcaaccctcattctcatgcctgtaggtttccattgctctgtcccaggacacttgcgtgccagagacgccacaacttcatgtccctgtctcttgcaagctccccgtgctgccagtacttcatgccttggatgtggtcccaccagcccagcggccggggtcagcttaggctctgcttcccagtggacgggtgtgctaagggtttattttatgtcaacaaacaaagaaaaaaaaaaaaaggcgcccgttcaagtttaaaggccccgttaaaccccgttgatccctcaaccctgtgcttctaaaccccgacccatgctagggg

SEQ ID NO: 14607 - DNA, 495 bp, Homo sapiens
  misc_feature (1)...(495): n = A,T,C or G
cattgactgacgtcactagtccagngcggtggaattcctgaattagcatttgggagtggcgaaaaacaatgtaaaactgtgatgtcactcaccattctgataatgttcagggtgcctttctcctaccaggagagtactgtggcttagaggaaagaaatggtctatcaactgaacatgaaatggagcaggccaagaccttaggacattgggatttttgtgggaggagagtaataggtaattagacactgattgtgtggtagaaatactgcaggggaaaaggtcgccctcttatgcatcaaagagcaatacctgttgtttagcaaagagtgatgaaaaattgatcttgttttgaaattgaagagagaggccaggcgcggtggctcacacctgtaatcccagcactttgggaggctgaggcaggtggatcacctgaggtcgggagttcgagaccagcctgaccaacatggagaanaccccattgtactaaaaatacaa

SEQ ID NO: 14608 - DNA, 492 bp, Homo sapiens
  misc_feature (1)...(492): n = A,T,C or G
ctttgatgcgctcacttgcgccgngcaangcatcttatacgctggattcgtagaagtacctgaggaatcacctaagcaaccctctgaagtcaatgttaacccactctatgtctctcctgcatgtaaaaaaccactaatccacatgtatgaaaaggagttcacttctgagatctgctgtggttctttgtggggagtcaatttgctgttgggaacccgatctaatctatatctgatggacagaagtggaaaggctgacattactaaacttataaggcgaagaccattccgccagattcaagtcttagagccactcaatttgctgattaccatctcaggtcataagaacagacttcgggtgtatcatctgacctgcgtgaggaacaagattttgaataatgatccagaaagtaaaagaaggcaagatgacatgctgaagacagaggaagccctgcaagctattgataagttaacaggctgtgaacacttcagtgt

SEQ ID NO: 14609 - DNA, 466 bp, Homo sapiens
  misc_feature (1)...(466): n = A,T,C or G
caattgagnactgacngccgtgcggaggaacnccnnnacatatagagctattctagctttatatagaccatcaaaattatgttgagcactaaaaaggagaaaaaatcctggacggtaacaaggctgaagaccttcaaatttcctggcttactggtttagtcacatcatttttcctgttcaggtatctgcagatatccctgttcaggatagatcttttttcacgatggcacacttttgacatagattaaagacattttttccccattttttgaaatagagaatattttattatttttgtgaaaatagagttgtggtaatcactttcttcctcaaaataagtccttctgttaatttgtaaaagcacattaatgctttacctgtgaaattacacgcccgcctgcacacacacccactttagtacagtttctgtcaattggcaacatggagagggggacctggctgctgt

SEQ ID NO: 14610 - DNA, 487 bp, Homo sapiens
  misc_feature (1)...(487): n = A,T,C or G
ggaggtgcccccnagtngnnnncaattgatnaccntcgactgatgaccatctggccangcggnggaattcgcaacacctaacactcctggggatgagtctccctgtggtattattattcctcatgaaaactcaccagatcaacagcaacctgaggagcataggccaaaaataggactaagtcttaaactgggtgcttccaatagtcctggtcagcctaattctgtgaagagaaagaaactacctgtagatagtgtctttaacaaatttgaggatgaagacagtgatgacgtaccccgaaaaaggaaactggttcccttggattatggtgaagatgataaaaatgcaaccaaaggcactgtaaacactgaagaaaagcgtaaacacattaagagtctcattgagaaaatccctacagccaaacctgagctcttcgcttatcccctggattggtctattgcggattctatactgatggaacgtcgaatt

SEQ ID NO: 14611 - DNA, 509 bp, Homo sapiens
  misc_feature (1)...(509): n = A,T,C or G
aggagtccaatgagaccgtaggcgtgtgcgggaattcggcgcctgtaatcccagctgctcgggaggctgaggcaggagagtcgcttgagcccgggaggtggaggttgcggtgagccaggactgtgccactgcactccagtcggggcgacagagggagactccatctcaaaaaagaatgcacaacccagccccaaaggcacagaaatgtcactgtcacttcacaaagctccttgcatccctgcgcagtcaaggtaagagatgatgcagtgagatttaagaggctgaaggcgcgagtgcccgggaagccggggggggggggggggggtttttttttnaacccttttattttacaaaaaaaggtataatttccaaaaaanctttcttaattgttttcctatggaaaaggccgcacaaaaatttttgtggaaaactcttatttttttttttttgtgggccaaaaaaaaaaaaaattttctccccccctctgtttaagggggttttttttgaag

SEQ ID NO: 14612 - DNA, 459 bp, Homo sapiens
  misc_feature (1)...(459): n = A,T,C or G
nttttnattcgagcaccactagtatagagcggcggaattctggatggcttcactgctgaattctaccaaactttgtaagaactaataccaattattatcaagctatcccaaaaaatcgaaagggaacttttccaaactcattctacaagactagtataacactgataccaaaaccagataaagatgcaacaacaacaacaacaaatctactacaggtcaatatccctgatgcaaaaatcctcagcaaaatactagcaaacagaaccccagagtacatcccagatatctactataattaagtagtatttaatccagagatgcaaggatggttcaaaatatgcaaatcaataatgtcatcacatcaacagagagaacaaaacatatgatcacctcaatagttgtggaaaaagtatttgataaaattcaacatcctttcatgataaaaactctcaaaaatta

SEQ ID NO: 14613 - DNA, 475 bp, Homo sapiens
  misc_feature (1)...(475): n = A,T,C or G
gtggccggnngggatttcaattgaaacctacgnacttgacagctccatgaaangcggnggaattcagcgcatgcggagcagggtgccctgcgactggaagaaggagtttggagccgactgcaagtacaagtttgagaactggggtgcgtgtgatgggggcacaggcaccaaagtccgccaaggcaccctgaagaaggcgcgctacaatgctcagtgccaggagaccatccgcgtcaccaagccctgcacccccaagaccaaagcaaaggccaaacccaagaaagggaagggaaaggactagacgccaagcctggatgccaaggagcccctggtgtcacatggggcctggcccacgccctccctctcccaggcccgagatgtgacccaccagtgccttctgtctgctcgttagctttaatcaatcatgccctgccttgtccctctcactccccagccccacccctaagtgcccaaa

SEQ ID NO: 14614 - DNA, 447 bp, Homo sapiens
  misc_feature (1)...(447): n = A,T,C or G
nttgaagaccacttggacagcgggtggaattcggtagacaccatcggaaaggcaggaaggtggacaccatcggaaaggcaggaaggtggacaccatcatgtgcgctcaggcaaccaagggtaggtgtgaggcgatagggtaaggggaggagggctgtgcaggtgacaaggctgcggatccgtgagcagctttcagtagctttgaaagctcccctaagctttttctgtgactgttagcgaagggtccctctgccccaggggcaacaccccagggaccatatggggacccaccttcccttgctttgactcatcaaaacagactcttctctttcttttttgttttctgctgggcctttcttctctttgtgcaccttgaccgctctctctgcctgcttgagccacccatgtctttaaactggacatatccccatactccaactcgcctgag

SEQ ID NO: 14615 - DNA, 501 bp, Homo sapiens
  misc_feature (1)...(501): n = A,T,C or G
aaggtnnnnnaactaagacntacgtaggacngcaannctgnttatagcatgcggcactggccttttttcatcctactcattacaggcaaaactcatgtcttatttatgaggattttatagatcattttctgtaacaggtgacaaaagcagaaaagaatgaagaggctgaagtatgaactacccttggagcccatatacatgatataggcaatttcttttgtatgttaattcagtcaaaaatactacccacttgatgttttctaatctgatgtgagctcatgttacacagacttttagtaagtaacccgtgactagaaaataaactggatgcttaggagagagtgtcagatgtataagatgctaataaaacctgcttaatattattgttagctgtaagtttttgggaaatactgaacaaattagtccacaatcaagtgtctacttttcccttcactgtagggcctctccctgcacagagcagtctgtttagctgtgaacacc

SEQ ID NO: 14616 - DNA, 447 bp, Homo sapiens
  misc_feature (1)...(447): n = A,T,C or G
attgaggacatctgnattggcggaccactatccatgcggaggaattcattcaggagactgaggtggaaggattgtctgagcctgggaggccaaggttgtagtgagccatgatcgcgccactgcactccagcctgggtgacaaagcaagactctgtctccaaaaaaacccataaaaaaacaaagaaaccccaacaaaattgtgcattaaacatatggatctgcttttctggtttgtgttcacttccctgcctggcttgtgcttctgtcctgtgctaccccctccacggccttcctgcctggatcttgcccctcacctctgcctgcacctcttcagaatggatttgccatcatccggcccccaggacaccacgccgaggaatccacagccatccatcaccgcaaaactcctacagcagaagttgaacgtgggcaaggtcctcatcgtgg

SEQ ID NO: 14617 - DNA, 481 bp, Homo sapiens
  misc_feature (1)...(481): n = A,T,C or G
gagagggaaagaattttgagaccttaggactgatgacccttagtaagngcggnggaattcgaacatgccagcaggttggctaatgctatgggggtttttaccactgttgccattgtggaagaaattatttggtacattaataaaaaaagttggtaaaacatggttttatacctcagtgtataagatgtgcaagacaaatatgcttatttccttttctagaatataagtgatattatttgcttatgacactaacactattaatgacaggagtcaatcagcctttacagctatcaaaatataatgagatcccaatgatgattcttttttactttgaatgttaattagtttgggactttgattggctggcaaacattttatcattgtcagaatttaatttagatttcaaaaatagcttacaggattttaaacatggtgtggtattctaaagccttttttttaaaaaaagagatctttttgagag

SEQ ID NO: 14618 - DNA, 474 bp, Homo sapiens
  misc_feature (1)...(474): n = A,T,C or G
aatggagaccgtggccangctttgaatccatcacgntaggaatctctccactatcttgaaagctattcatttccgagaacatgccacttgtttcgcaactaaaaatggtatcaaagtaacagtgcaaaatgcaaagtgtgtgcaagcaaatgcttttattcagggactttaactgcacttcgaatgtgttaccaaggttatggttaccctttgatgctgttcctggaagaaggaggagtggtgacagtctgcaaaatcaatacacaggaacctgaggagaccctggactttgatttctgcagcaccaatgttattaataaaattattctgcagtcagaggggctccgtgaagcattttctgaattggatatgacgagtgaagtcctacaaattaccatgtctcctgacaagccttatttcaggttatctacttttggaaatgcaggaagttcccaccttgactatcccaaagag

SEQ ID NO: 14619 - DNA, 408 bp, Homo sapiens
gaaaaacctaatgcatagaaagataagtagaccagtcaaggtctacagctagtaaaatgctcagattgaaacctaaatcttttctcactcacttttaggttctatatgctattctccttacgtaacgttaaatagatcctttagtttgataggttcattagttttgcttaatcgttgcttccaatatgattcttattgtagtatttatattacaaagttggcatacagggtcaatatctaatttactgttgtgtttttcttaatatgttcaatgtatggtcatactttttaaatttgattttttaaatattataagtggtcatgaaattttaatgttaagtttgtacctaatagaaatatgtctatcacaaatctttattggcattattttatatactttttcagctg

SEQ ID NO: 14620 - DNA, 431 bp, Homo sapiens
gttttattttatatattatgagcagaatatatagtggaagaggatgaattttcattttcatattatgttagttcaaaggtttatttaaagagtcttgctttctattttagaagcaaaacggacaagtcggtttttaagtggcattatcaactttattcacttcagagaagcatgccgtgaaacgtatatggaatttctttggcaatatgtaagatttaaatatgttttggggttacatgccagatcagtaacattatttatgaacttataatctgttttgaaatgattgtcatagacagcaaattgctgtattgcctttagaattgaactcatttttatatttatattaacttgcagattttagttactggatagcatatctcagaatcagattttctttgaaatttggtaacactatggagaggctgagt

SEQ ID NO: 14621 - DNA, 470 bp, Homo sapiens
  misc_feature (1)...(470): n = A,T,C or G
ataganncccctnnnnnnnncnatagtagaccttagtccatgtggtggaattccccggctcgagcggcccctttgaccttccccaaaggatggtcacacaccagcactttatacacttctggctcacaggaaagtgtctgcagtaggggacccagagtcccaggcccctggagttgttttcggcaggggccttgtctctcactgcatttggtcaggggggcatgaataaaggctacaggctccaaaaaaaaaaaaaaaaaaaaaaaagggggccccttcaatttaaagggcccctttaaaccccgggaaaaaccctggaggggccttttaattgcccacccttttgtggttgccccccccccgggcctttttttgacctgggaggggccccccccccttgtcttttcttaaaaaaaggagaaaatggcttccctttgttggagagggggtttttttattttggggnnncn

SEQ ID NO: 14622 - DNA, 401 bp, Homo sapiens
ctcaccagtaacaggagactgcagcagacccaggcccaggtggatgaggtggtggacatcatgagggtgaacgaggaccaggacctggagcgagaccagaagctgtctgagctggacgaccgtgcagatgcactccaggcgggggcctcccagtttgaaacaagcgcagccaagctcaagcgcaaatactggtggaaaaacctcaagatgatgatcatcttgggagtgatttgcgccatcatcctcatcatcatcatagtttacttcagcacttaaatccccgaggagtctgccctgcctagagaagggcctctcccccaaccctcagacgttcctccacctctcaggcatatctttcagccccccctcccctggatccgagtgtgtgtgtgtccgtgtgt

SEQ ID NO: 14623 - DNA, 450 bp, Homo sapiens
  misc_feature (1)...(450): n = A,T,C or G
nattgangaccactagaccaccgcggtggaattcggagaacagaatggaataggtgaactctgggcatgaagtgaaggtagtccccttcacaggaataaatgctaataatggggcttcaggtgagaatgaggaaggaagcctttgctggtggaggagttaagggagttctttctgggtttccctaagtcacactagaagaaaagggttacagggaggcctttctggaattcctcaagtcaatatgacagcctcttagatccagcattacaactgcagcaaattttatagctgcaaacaaagaaactgtctccagagagacagattatgttgtttacttgaggcaaaatggtgggggttctatataaatgatatgtctgcatccgaatcatctgtacctttttgggctttagaaccaaacctaatagtaataatagcaaccaattcttaac

SEQ ID NO: 14624 - DNA, 482 bp, Homo sapiens
  misc_feature (1)...(482): n = A,T,C or G
ngggaggacggggccggnnaggaataaccctggangctcgncttganacgtacgnannnacacnganggcaaaactgacctatgngatattttaataattttcacattctatcttattcttatttcccaaatggtttatatatatgtatatatatgacttatgtttgaaagttcttatagaatgctaacagccattaaaaatatatgtcaggaggaatcagaggcaaaatatatttttggtaaaaatatgccatatttacatctgtctaaaagaaaatatgtaggttgcttaccaaaatactggatttaacatcttacataaaacattgggcattcagtgactgacactgtcatgaagtgtcaaggagttaagtaaagggaggacccgttgtcaattatgactataggaaggtcataattttatttaaagaaaagagggagcagagctgtagaaggtcgatatcagagtgttcactgagagg

SEQ ID NO: 14625 - DNA, 436 bp, Homo sapiens
ggagctcagtgactgagagtcttgtgtatcacatgtctctgagtgctcagcacccctctgctatcattgagagaaacactgtgaccctcaggagtcaagcaaacattcaggctgaggagtaccatctatatcgggaaaacaaatcaccatcctgggatacacggatactacatcctgcgaagaatggccagttgcccatcccatccattacctgggaacacgcatggcggcatcactgtcattactacagccacaatcactcatcatagtacagtgaccccctggagctggtggtgacaggagcctacagcaaacccaccctctcagctctgcccagccctgtggtgaccttaggagggaacgtgaccctccagtgtgtctcacaggaggcatttgacggcttcattctgtgtaaggaaggagaagatgatcaccc

SEQ ID NO: 14626 - DNA, 498 bp, Homo sapiens
  misc_feature (1)...(498): n = A,T,C or G
tggggaggcccagggnnngnnnnnaattgtagaccatattgaagagcggtggaattcgctcaacctcaaatttctatcacccagttgcccttttcatgaactaaacaattatctgtgtgattggtatgtttcaccaggtcactgctcatgtataacagtactctttatttgtagataccttttttgtatatatttattattgtaaatcatgtgctgccaccagcagtctgtaagtctaaactattaaatgacacatttatatttggaattttaatttttaactaagcgatcaagttttttaaattgttcttttattgttttaaattaagaactttttgaactaaaaccagaaactctgccatagttcattgatttttacatgaaacatttatttacaagatgatatcaagattacttttcacaaaataggcacattatatcaacactttgctctgctttgtaaatttgccatccaggattttggggtggtattcatgt

SEQ ID NO: 14627 - DNA, 478 bp, Homo sapiens
catcgacgaccactagtgcagtgccgtggaattcgtacgttgtagtcattctcagcctaggtgatacatggcttgtctggacaggctgttaccagcaggcagactctgagatccagccttcataggggctactgttaccttactcacttattttaattctgtaatgtctatccaactggacagagtcactagtaataatgtccttcagtggatcactgctgtccattcccaacttttgcataaaacgaagacccaaaggagaagaaagtggtcagagagagtctgattagggtcgctgctttccttgtccttccttttctgcactcctgtggaacttggccccctggttttctgcagtggagaagatgaggctgcagatgaaaacccagagtctcaagagatgctggaggagcaactggtgaggatgttaacccgagaagtcatggacctaatcacggtttgctgtgtttcaaagaag

SEQ ID NO: 14628 - DNA, 455 bp, Homo sapiens
  misc_feature (1)...(455): n = A,T,C or G
ntttgangatccctagtccattcggtggcattccgagagggccctctgcctgctgcccgacctgctggtgccactctggaaagggccatgactctctccccagggaagaatggggtcgtcaaagacgtttttgcctttgggggtgccgtggagaaccccgagtacttgacaccccagggaggagctgcccctcagccccaccctcctcctgccttcagcccagccttcgacaacctctattactgggaccaggacccaccagagcggggggctccacccagcaccttcaaagggacacctacggcagagaacccagagtacctgggtctggacgtgccagtgtgaaccagaaggccaagtccgcagaagccctgatgtgtcctcagggagcagggaaggcctgacttctgctggcatcaagaggtgggagggccctccgaccacttccaggggaa

SEQ ID NO: 14629 - DNA, 451 bp, Homo sapiens
  misc_feature (1)...(451): n = A,T,C or G
nactgagttcattagcccagngcggnggaattctgcatacccaatagaaggtacactgcatacattattccatttaatcctcatgatggagaagatagctattattatccccattgtaacgtatggaaaagaggtacagagtttagtagcttactcacagttgtaaaggggcttagtggcagattccagagcccattcacaatgctttcaagggtcaccatttgattacttgctttaaagccatcttttgcttcccaaagcaaggcccaacgcaaacatctctgatataactttaaggagagactgtcaggcacgtattttgcacccaaggaagaatgtctttcgctaatgagggtttttttagctcacagactcatgttgtgtttctagacgtggtcccatctggatgaggaccagcaggagctcagcagacagctggaggtggtggaaa

SEQ ID NO: 14630 - DNA, 459 bp, Homo sapiens
  misc_feature (1)...(459): n = A,T,C or G
gattgatgaccctagtccagctcgatggccttcctagctttctgcagataacaaacaagaaagctattccaagactcagatgatgccagctgtctcccacgtgtgtattatggttcaccagggggaactggcaaaagtgtgtgtggggaggggaagggtgtgtgagtggttctgagcaaataactacagggtgcccattaccactcaagaagacacttcacgtattcttgtatcaaattcaataatcttaaacaatttgtgtagaagtccacagacatctttcaaccaccttttaggctgcatatggattgccaagtcagcatatgaggaattaaagacattgttttttaaaaaaaaaaatcatttagatgcacttttttgtgtgttctttaaataaatccaaaaaaaatgtgaaaaaaannannnnannnnnnnnnnnannnaagggggcccggttag

SEQ ID NO: 14631 - DNA, 511 bp, Homo sapiens
  misc_feature (1)...(511): n = A,T,C or G
aggggccannnnnnnngnnnaactgaataacctcgnannnnccttganttcctcgtagngcgngnaannnaagagnanctntagaggcagcccctaggagcacgcacgttctgtcagtattaccctacctgtcctatcaggtgggccacaccctgcttgcccacaccaaggtctgtcctggtcctcaagccacgcacccgctatgcctgcactgcagcccagccccggacagctccaggatccgtgcagtggctgcgccgccaggccccaacaatggggaccctggggtggctcctggccaagtgttctctgttttcctcgcacctccttacactgtgtgacctgcagggcatgaggtattgatgagttcgggtttcctttcccaagccagcagatgcaggtgttccaaggtgcgttgctctgtgggatttgtggacacttaagaaacggactgagtgggaaccctgcagccaggggatggggagcctctgctccccccatgctcccaccc

SEQ ID NO: 14632 - DNA, 455 bp, Homo sapiens
  misc_feature (1)...(455): n = A,T,C or G
ggggnttttttttcgtcgacactagttcgtgtgccgtaattcttgataccgaaatcaatgacatagtaagaaaactatagactaacatgctcatgaatacagatgcaaaaacctcaacaaaatatcagcaaactgaatccagcaatagacaaaaatgattacacaattgctcaagtaggatttatcccaggaatgcaaggatggtttcatatctgatcaattagcataatacatcctatcaatataaggaagggacaaaaacaagatctcaacaggtgcagaaaatcatttgacaaaatccaatgctcttcatgataaaaaaaaagaacctcaacaaactaggaatagaagtaaattttgttaacttaacaaacagcttctgtgaaaaacctacagttaacatcatattccatgataaaagcatgagagttttgcccccagtatcaggaacaagg

SEQ ID NO: 14633 - DNA, 455 bp, Homo sapiens
  misc_feature (1)...(455): n = A,T,C or G
ntcgagaccttancaggcggggaattangttgatgacctcctcgtgtgagctgagctcagggaatgtcgggatcaaacctggtgccctagaaaagtcatcttttatgtgctgagccagtccccagggcgttgcctttacttgttccatggccatggaattaagaaaaacatgcaaaaataattcttcagtccttgaagagcatccagcacagaaggtacaaaccccccttaaggctccctcctcaaatgggtgtggccattttgatgtgcacccccccaggcctttatacccttcagatgccaaatctaagaaccagctcccggaaaccacaccccctgttccaacccccagcctggcttgagcatggggtgtgtgtgggagcccaggtgggcaccccaggggtctggtgtcttctacaggcagctctcaggctcccttggttctctctgcagtn

SEQ ID NO: 14634 - DNA, 454 bp, Homo sapiens
  misc_feature (1)...(454): n = A,T,C or G
nttgangacccctagtccagttcggtggcattcggactcagaggcgaagcttgaggggctcaggaaggacgaagaaccacccttgagagaagaggcagcagcagtggcggcagcagcagcggcagcgaccccaccactgccacatttgccaggaaacaatgctgctagcgacattcaagctgtgcgctgggagctcctacagacacatgcgcaacatgaaggggctgaggcaacaggctgtgatggccatcagccaggagctgaaccggagggccctggggggccccacccctagcacgtggattaaccaggttcggcggcggagctctctactcggttctcggctggaagagactctctacagtgaccaggagctggcctatctccagcagggggaggaggccatgcagaaggccttgggcatccttagcaaccaagagggctggaagaagga

SEQ ID NO: 14635 - DNA, 476 bp, Homo sapiens
  misc_feature (1)...(476): n = A,T,C or G
tgggttccnnnntttgaaacccctgatgatcatagtcagngcggtggaattcccagcgcaggggcccgtgcatcatctataatgaggataatggtatcatcaaggccttcagaaacatccctggaattactctgcttaatgtaagcaagctgaacattttgaagcttgctcctggtgggcatgtgggacgtttatgcatttggactgaaagtgctttccggaagttagatgaattgtacggcacttggcgtaaagccgcttccctcaagagtaactacaatcttcccatgcacaagatgattaatacagatcttagcataatcttgaaaagcccagagatccaaagagcccttcgagcaccacgcatgaagatccatcgcagagtcctaaagaagaacccactgaaaaacttgagaatcatgttgaagctaaacccatatgcaaagaccatgcgccggaacaccattctttagcag

SEQ ID NO: 14636 - DNA, 456 bp, Homo sapiens
  misc_feature (1)...(456): n = A,T,C or G
natcgagtacattagcccangcggggaattccaaaaacctgtactcttctggaacttggatttaaatggatattgatggtatctgaaggtatttcattacagggataataatcttcacattctccataggcacacacacacacacacacgtttgtacatagacacacacaaatatacatagggacactaatgaggtgaacaaatacccagtagaagacaatacagaaaacggtgataaaaatagaaagtaagtgaataaaatgctgacataaataggagtaaatggaataaagttgagaaaaataaccaaatagtttgcttaggggtattgtgtgaaccaacgaaatttgatttgaattaaatttagaatgataaataaattgtatatatgaacagagtggttaacatgtaaggctagcagtaagttagattaagtagaatacaattttattgaan

SEQ ID NO: 14637 - DNA, 445 bp, Homo sapiens
  misc_feature (1)...(445): n = A,T,C or G
attaatagtaaccatcgcagatnganancatccgaangaacggnnngaagatcacaggaagggccagttcccctctctatcagaagagtttttctcatccccttttttttattttttcctcatgtttccctcttaaacaggtctacttggagaaccgaagcccaggcaaatcagagtgagtaccaataaatctgcccctcccttcttacttgtctccccagccccagctctcagtctgccaagtgatcagagattttgacagaaaccaaagtgaaccattctagtctcaacccatactctgtgtatggggggttttttccctaattctactttttaacttttttctgattataaacattattatataggcatgttgttaaaaaacagaaatatccaaagcagaaagtgaagtacttaaaataatggtatttcaattgtgaaaaag

SEQ ID NO: 14638 - DNA, 478 bp, Homo sapiens
aggataaaaaaatttgagacccctgatagccgtgggaattccgacgagcggattcagagccgtgcttatataaagcttcaggaagcgccgttccgacgatgaggtcgacacgcgagaggcgacctcaagagcggcggcgccagggatctgtgcgccaagggaggacgggagggagcaggttcgccataattcctggctccaggctctgctttgttggaccgagccactgtattttagctcacacaggagaattctggccctgggaaaattggtctcagcatgctgccaagctttctcatggacgtcagcgaatcccaacacactgtcggtcaaagccgtgctggaagaaacaaaacagttctccctcggtagaactgagaggggattggtccagggcccccgccgataccaaaatccaggttgctcaagtctctcatagaaagtggcgtagtatttgcacataactatgcacatcctc

SEQ ID NO: 14639 - DNA, 542 bp, Homo sapiens
  misc_feature (1)...(542): n = A,T,C or G
atttgaattcgatcacctatccagcgaggtgcaattcgcaggggacaatttaacctcccgaaacttcatccataaggagaaagtaagaactcatattttgccactcatttgtaaaaattggtaattattgataataatcaaattggtaaagggaaatagttattacttttgtgtgtgtgtgtgtgtgtgtgagacagagtctcgctctgtcgcccaggctgaagtgcaatggcgcgatcttggctcacagcaacatctgcctcctgggttcaagagattctcctgtctcagcctcccgagaagctgggactacaggcacccaccaccacacccgactaatttttgtatttttagtggagacgggttttcaccatgttggtcaggctggtcttgaactcctgacctcaagtgagccacctgcctcggccttccaaattgctgggattgaggcatgaacaccgcacccaccagaatcttatactatgagcagcaggacatggtgacganaccgagtcaatccagtctgtactccacgatgtgtg

SEQ ID NO: 14640 - DNA, 460 bp, Homo sapiens
  misc_feature (1)...(460): n = A,T,C or G
nttttaattgaagacctctagtaccgtgcggtggaattccagaaatttaataggaaatttttgtgggaatttcctgtttaaaaaaaagtcaaattcatcagataacttatcacattagaaaatgtagattatagtttttttccatgttaatagtgatgaccctaaaatatacaatccctattcgactgagtttatcatcagccattcttttaacacatgatgagaatttaccaactggaagaaaggctctctcacatggaaaacatctagtctgtcatcaatggccaacctaattacatataattttataatgaattttacttgctatttgagacagaggtaaaaaaaatgagacatttgcagatgattgaaatgctcttataatttgaaaactatggtctgttctgttgggtttggagtacaattaatagtgtgttaaaggaaggccaggtgcagtggc

SEQ ID NO: 14641 - DNA, 452 bp, Homo sapiens
  misc_feature (1)...(452): n = A,T,C or G
agggtcctgaaaactgaaangcctgnntngccagcanaagcgnnggaaatngnaccacctgggggattatggacacgcctggaacaggtgttgtgtgctggacagggtggacacctgggctgtggtcatgttcattgattttggacagttggccaccatccctgtgcagtctctgcgcagcctagacagcgacgacttctggaccatcccacccctgactcagccattcatgctggagaaagacattttgagttcgtatgaggttgtccatcgaatcctcaaagggaaaatcactggtgctttgaactcggcggtaactgctcctgcatctaacttggctgttgtccctccactcctgcccttggggtgtctgcagcaggctgctgcctaggcctggacacagtatttacctggcattcttttagatcaaacgaactggttatctgaggggg

SEQ ID NO: 14642 - DNA, 468 bp, Homo sapiens
cgagaaaaaaattgagacctttgacagcgtgtggaattcgtagctggttcacaggcatgcatagcctcaacttatataagttatgccaacttgtgttctgaagtgggcatggcagcttatgctcccagcaggagtctatgagaattcttgttgtacatcctcaccaacatttgggattgtgagacctcatgttttatccatctattcagctggaagtgaaatctcagaggggtttttaagttgcttactagtgagcatgagcatcttttcatatgttgcttggcccttcctgtttccccatctgtgatttgaccattcaaggtgtttgcctacttttcaatgggtctattctttttgttattgatttgtagaaatcccatataaattatggaaacatttaggtctttaactggaattaattttatatgaatgctgggagatagaaataaatttttgcctgctctatct

SEQ ID NO: 14643 - DNA, 457 bp, Homo sapiens
  misc_feature (1)...(457): n = A,T,C or G
gcggggcnnnnnnntttaaactgtaacctggcagngctgagaaccattgggcacactagaaacaagagtgggaaagggttaattcacagacctggccagtcttctcctgtcttcaaggcgatgatttaccctgtgattctcagacttcacatgtaccagaaatctttggggcaacgtgctaacgtgcaggttctcagtccctttccccagcgattctgattcgtggaatttcagttgatcattcaggacacagtataaagttcttatgcagagagaagctgacttgaactatccctatatgactgaggtgcttttaccaggaaggggcttttatagtttcagtcatatatggatgaaaaaggtgctgtattctttttctatgaactactttgtgtattttataagcagtatatatgtactgatacttgtttatcagacattgtgcggtgcatggtgt

SEQ ID NO: 14644 - DNA, 457 bp, Homo sapiens
  misc_feature (1)...(457): n = A,T,C or G
attgttacttggacggctcggagtatggangccttcgcaagngacgaagangccatccaccaccctgtgaggcaccagggcattcgggccacagtttggtgctagctttatacagtcagcatgcttgccagagggagcagggcggaaccacagggccagagggagctggaacccgaggggccggggaagctgccagcccagaacacccctaatgagggtgtgagaagcgctcttctccttccccaggatggactcttttcggctcaggctctgctggtggaaagcgattcactgtataaacttttttttatgaaaaaaatggcatcaaccaccatggatttttacaagatccatttgcctttctgggagcagaaacagccattgcggccccaggaggggaactgagtcacgctggggctctttgagacattttagagcagctttgggatcccccctg

SEQ ID NO: 14645 - DNA, 439 bp, Homo sapiens
  misc_feature (1)...(439): n = A,T,C or G
ntggagccccnnattgtcgaccctagtccatgtggtggaattcgcagtaagtatctttggaagtatacctaaaaattggtaatagtgtttgactccagggaagaacagatgggtgccagagtgaaaaaaagatagcttttgctttttatgacttttggattctgtaccacgtaataattttgatgtaaattttgctgtgtgtgtttttacttgttcatgtagtgattttataaattactcttttaattttctatcaatgaatatcctgggataaacccctcatgatcataatgaataatgatgtgtggagagtggggagggtttacatatgaaaaatgtagaaaatacaaaaagtgtctatatatacaaaaatgtaagtgttaacatttttatatttgcttcaagctttttttttaaataaaagaaatgcaatattgca

SEQ ID NO: 14646 - DNA, 446 bp, Homo sapiens
  misc_feature (1)...(446): n = A,T,C or G
nttcgggaccccagttgtcngaccctagtccgtgtggnggaattcgtaggaagagctaccagggcttccaaacctgtggaacgaaaaggatggggaaaaggcagagggcactgagtgtccctttaaaaactaacacactgaatattccgtgtgatctagaacagtgtggcagctttcacagcacaggaccgttcatcgggggcctaaacgtttccctcagctctgtcaccaactcacttctctcggcttcgttgtctgtaaattggatgaaaagagctctaatgcctttcaggctcttagaagccgtagatttggacaagcccagccagatgggtgtccttccaggcctcttcccctttcctccatctctggcaacagttcttggggtttggcaattgtttggattatttttctttctgcagttgtgtgtatgtgtgattgtgaga

SEQ ID NO: 14647 - DNA, 481 bp, Homo sapiens
  misc_feature (1)...(481): n = A,T,C or G
ctttgagaccctaggatgagcgccgtaagncgcnnactngaaaggaagaggtcagtttgttcctggctctccatttctggcctcagttgtctacaggacagtggtcagggatgcctggaggcatatatccagctgccaccaaggggcactgtttgttcccacttatgtgagtgaccccatccatccatgaccagaggattattttcctgccttggcagaggaggaggagtcaagggagcagggcagctctaccgggcaaggtgtttccccagcataggcgcagacagttgggacgaaacttcagagcccaggcagtccctgaatgaccaggccagtgttgtcactgagtggtcccctgctggttgggagtgaagagaatccaggctggcagagctggagccagttggggagcacggttctgggagctctgcaaaatcagtagcaagtgctggaaaaggcacatgccgaagatactcaagag

SEQ ID NO: 14648 - DNA, 491 bp, Homo sapiens
  misc_feature (1)...(491): n = A,T,C or G
caatcgatagctatacggccagngcggnggaattctctaattcaggctgttggagtttgaaactgaagctcctctccattaatggaagaacccagatttgggagtttcccggaagaaccacctggggtgggaggagaattgactggagcaacactagcaatgcccacagtaacaaccccagcgacgctaatagcctggccgtgggagcagctgcttatgagcctggcccgcagccgggccctggttaaagaccttcatgtacttcattccacgctcccagcaacttcccacagccagcacgtcacgggtgcttgggaagtgttacttgcacatttgttgactcaatcactgaacaactctaggtggccgttaattttatcgcgttttgcagaggagagcactgagattcaaaggagccaatttgcctggtgactgccctgctcagcgctgaggaccagttctggtctgggatgacgtttccatcaggcagn

SEQ ID NO: 14649 - DNA, 414 bp, Homo sapiens
ccccgacagtgctgggggagaggcacctgccggaccagctggcctcagtgaccataatctcctcctccgacctctccctggggcacgtgacccgggctctgtgccgaggcattgttcagaacctgcactccatgcttccgattcagcagctccaggagtggggcgtggagagggtgatgggcagtgggagtgcgctgtccaggaatgacgtgctgaagcaggaggtgcagagggctttccctttgcccatgtcctttgggcaggatgtggatgcagctgtcggggcagctctggtcatgctccggagacacctcaaccagaaggaatcttagacagcaaactctttcgccaaacgactgctgtgaattttacctgattaacattcctgacaccatctgtggtcatcctttcccc

SEQ ID NO: 14650 - DNA, 486 bp, Homo sapiens
gcgtcactgagacctggaagtgcgctggaattcctcatagatatcgctcctttgaaagctgctatggaaccctgtgattaactctgaccgcatggactatgcagggcccgtgtgcttcaaaaacgctgacattggccgctgtgcccatgaaaagctccgcgaagactaagatggagcagctccaggtgaaataggtatccaacctgaggcagatgccaccccatactttgctacgcccaccccagttctgacacatggtccttgtgctgcagaatcagaaccagctcttttgatagggagcaagcagttcgggctttcaagaaacagtcacattgcaattgcatttgatgacaccaaagttaaaaaccgtctcacaattgagttggaagtaagaaccgaagctgaattccgcttgcttttttacatggctcgcatcaatcatgctgattttgcaacagttcagctgagaaatggattgccctactt

SEQ ID NO: 14651 - DNA, 458 bp, Homo sapiens
  misc_feature (1)...(458): n = A,T,C or G
ntttgacctgcagtacactaggccagngcggnggaattccctggttctccatgccacacctctctccggtgccctctgcctcttcaccccacaagaagccttatcctacgtccttctctccatctatcggaccccagtttccatcactatctccagagatgtagctattatgcgcccgtctacagggggtgcccgacgatgacggtgccttcgcagtcaaattactcttcgggtcccaaggtttggctttcacgcgctccattgccccggcgtggcaggccattccaagcccttccgggctggaactggtgtcggaggagcctcgggtgtatcgtacgccctggtgttggtgttgcctcactcctctgagctcttctttctgatcaagccctgcttaaagttaaataaaatagaatgaatgatnnnnnnnaaanaaaaaaaaaaaaaaaaaaaaaaaa

SEQ ID NO: 14652 - DNA, 485 bp, Homo sapiens
  misc_feature (1)...(485): n = A,T,C or G
agggtnncccnnnnnaggggnncctactgagnctctttatctgtagactcttagaccatgcggtggaattccttctgaggatctccagtgtcacaacaaacacatgccagccctgttttacagggagccctggaggagttgggatagaggccacattgactgagggtagttgccagggtcctgcagttatacacaaagtccttaggataagaccatggccttgagagcatgtggcttgatcatcttccgaagatgcctcattcccaaagtggacaacaatgcaattgagtttttactgctgcaggcatcagatggcattcatcactggactcctcccaaaggccatgtggaaccaggagaggatgacttggaaacagccctgagggagacccaagaggaagcaggcatagaagcaggccagctgaccattattgaggggttcaaaagggaactcaattatgtggccaggaacaagcctaaaacaa

SEQ ID NO: 14653 - DNA, 441 bp, Homo sapiens
attcgaagacccctagtctagtgtggcggaattcgacacttcttccagtttttgttttcgtttttactgtgctatagtgtaactctcagggtgggtagttttgtgaggtccatcacccagcttgtttcccggaagatccttggcctcattcagaccattcaagtgctcatggtttcttggctgtttgaggagctcttgatgtttctgggaacctagatgatttgccagcccagctctcaggagcccagcctagcagggcttccgtctccatccaccatcaaagaatgttcaagaatcttggcatcaagtggcaagaaaaaaagaaaactacccaggatttacatctatatgtatactaacgatttataaatcatgtggataaagttatggctaatcttttgaggatgatttctctcaactacagctttccctcaagagccc

SEQ ID NO: 14654 - DNA, 490 bp, Homo sapiens
  misc_feature (1)...(490): n = A,T,C or G
tgagcgaggnannaantttgatacccctngnnattgagcaccattagtccagngcggtggaattccatgtaaaaatcaaaatgattagaaagaaagcaaagctgtgaaccaggtaggaagttattaactaggtaactgaaagggtaaaagatgactcagggtatcatggagagagtcattgcaggaggcagctaccacctctagggttgacggaacaaagggaagaggttggaatgatcaccccatggagctgaaactcacctttgcgtggggggcagggactaggaagcagcctctgatggtgctggtgcccctaagggaacacagttctgcaagtgctggaaaaactgcaaactgggtttggcacctccgagaatgaatgctgctgctgaggtacagaggcattgctgggtggcacaagaacaggaaacaggcaggagccagttctatctttctccaccaccttctcagtctctctatggcaccccct

SEQ ID NO: 14655 - DNA, 420 bp, Homo sapiens
aggagctgaagttaactgattatcgtgggaaatacttggttttcttcttctacccacttgatttcacatttgtgtgtccaactgaaattatcgcttttggcgacagacttgaagaattcagatctataaatactgaagtggtagcatgctctgttgattcacagtttacccatttggcctggattaatacccctcgaagacaaggaggacttgggccaataaggattccacttctttcagatttgacccatcagatctcaaaggactatggtgtatacctagaggactcaggccacactcttagaggtctcttcattattgatgacaaaggaatcctaagacaaattactctgaatgatcttcctgtgggtagatcagtggatgagacactacgtttggttcaagcatttccagacactg

SEQ ID NO: 14656 - DNA, 460 bp, Homo sapiens
  misc_feature (1)...(460): n = A,T,C or G
nttttaattgaagacctctagtaccgtgcggnggaattcctggaaggtcgaggctgcggtgagctgtgatcgcaccactgcaccccatccctctgcaacagatcaggaccctgtctctacaaaaacaggactgtgtttgcaaagctgcagtcttatccttcaaagtgtggagttcaaaaccagtccatgtctgcgcctggccctggcccagttgcgagcactctgtggcagcaagtccacctttaggtgcacactctctgcttggtggctctcatttaacctgtcctgtaatatttgaactttctgtccagtaatatttgaagttcattttatattctaagagatgtatttaatgaaattgagcttatccatgtaagaatgaaggaatgagaccctgaagaaatcagtcaccgttatttcagaccattaatagaagaaataaaagtgacagtggagtgag

SEQ ID NO: 14657 - DNA, 473 bp, Homo sapiens
  misc_feature (1)...(473): n = A,T,C or G
ngaggccgcccccttttnccccngtttcgnganagacanncnnntnnnntnngnanacngntctcgccattcaatgaaaaacatccttcttgcactcttttatattctgagttctgcctggtccatttttacggcgttggatttggaagaccttcgcctcaacgactanagttcattgtttttgtatattcaacatttattatattatccaatgtgtaaaagatattaaatagtgttgacagattgaagggcctcttctagatggcactaactatggggaatttagaatggggtggaaggaggaaaaggaaaggttattaccagacccattctctccttttgctttgaaattcatggtactcgataattggttcacatccaaagagttaactgaactagatgaggtgctgtgtaacttctgcaggccagagggaagagaagagagtaagagctaacaagtattcaaaaaaaaa

SEQ ID NO: 14658 - DNA, 461 bp, Homo sapiens
  misc_feature (1)...(461): n = A,T,C or G
nattgaggcccctgaagacatctgaccangcggnggaattccttanatcaggcagaaagaaacattcacagcgtccccttgctgaatataaatgactttgtttggaggcacttaaaatgtatgcctgtgtgtggtgccgcaacattgaaattatctgtagaaggggaattttttttaaaaataccattttatcactagaaataaattccgatggcggaaacgaagaaaacccttaaattatatcacaaaagccattattttttgcatccaaagagttttttttttaaggaaaatcattctactttgagaactgtaattaaagccctaaataacagacactactttgttgagctattgagaaaaaaaaacaacacattcgccacggttatatggagcccctgatttccatcaaaaagggttctataagtgtattatttacatttttatacatgataactctt

SEQ ID NO: 14659 - DNA, 493 bp, Homo sapiens
  misc_feature (1)...(493): n = A,T,C or G
ccccccccgcccccccanaattgagnnccnaatcgatgaccntaggacagngcgnggaattcgccctggcccagccccggcctccaaggaccgcgccgaaggaggtgcccactggagggatgaggcgctcgactttctcaggatactgtccctctcccacagaggagctgaaggagtaggacagaagaactgtcaaattctggaatccttaaagccatgtccaaggatttggtgacatttggggatgtggctgtaaatttctctcaagaggaatgggaatggctgaaccctgctcagaggaatttgtacaggaaagtgatgttggagaactacaggagcttggtatcattgggtaaggacatgtccccttaattcagaatctgtacatgggactgagctccaatgtaatatttgggaaacctctgacgtgcttcactaaatttccttttcttgtgcttcccaaaataggttgaatttgtagaattggcagctt

SEQ ID NO: 14660 - DNA, 482 bp, Homo sapiens
  misc_feature (1)...(482): n = A,T,C or G
tgagccggaanannanattgtagaccctagngtagagggccgtaattcganaacctagtgaagacacaacaaaaaaggaaaattaccggtcactattcttggtgaaaattgaaacaaaaattcatgaagtactagcaagttgagttcataagcaaagcaaaaagttactttgccacaatcatgtaaacttcattgtatgaatgcaaagatgtttcatcatatacaagtaaataaatgtgattcaccatgtaaagataatttttaaaaaacaattatcacatgcagaaaaggcattcaagaaaatctaatattcatttataaaaacattctcaacaaactaagcactggagaaatatgcctgaaaataataagagccatccatgacaaatcctcagccaacatcatactgagcgggcaaaacctggataaggtctccatcagaataaaaataaggctgggtgcggttgctcacgcctgtaatn

SEQ ID NO: 14661 - DNA, 471 bp, Homo sapiens
  misc_feature (1)...(471): n = A,T,C or G
cgcgaacaaaaatttgagacctcctaggaccgtgtggaannccccggctcgagcggcctgggatgcttttctctaattgggagaacttcattcatctacacaaccccagagctggtcagttcagtctctgagcttaaactacttgggtacagaagttggagccctgggctctgccctggctacctggggccatggggtgagggtagcaggctctttgcagatcaggccccaatgtagagctgccttggctgagtcgagtggcagcttggggtagtggaaagatcaggaaacttggagacaggaagtttgtatcgagacccaggtctgctgctggctcacatgtgatttcttccttcttcctcagtctttccatctgagcagtaggtatgtgtgtatttgaggcagtaagggcagggtcagaggttggtctgtaaggacgctttaaacctcagccttctgggacactatgtg

SEQ ID NO: 14662 - DNA, 448 bp, Homo sapiens
  misc_feature (1)...(448): n = A,T,C or G
atagacttcgatacccttagcccagngcggnggaattcctttgtttgaggggagcattttccagtgattggctattttaagagtgccaatctattaacccctttaaaagcacttagagtaataggataaaattagacttttaaaatatcactttttttgttgttgggtaggggaatcacttgcaaggtccacacaagtccgcctatgtactctctggatcgaatatttgctggatttcgaacacaaagtcagatgctgttggatcacgtagaagaacgagatgaggtcctccactgccaattttctgataacagtgatgatgaagaatcagaaggccaagagaaatctggaactagatgtagaagtcgttcatggattcagaagccagactctgttcccttgttgaattgagtgatactcaggatgaaacacaaaagtcagattcggg

SEQ ID NO: 14663 - DNA, 477 bp, Homo sapiens
gagcggggaaaacctgagaccctaggatggatggccgtatgcgaactcctgacatcaagtgatctgcccgccttggcctcccaaagtgctgggattacattcgtgagccactgtttccggccaaacattgctaatgattagtgccatagcacacaaggtgccagctttctcagtgttgtgtaacctattcagttaaaattagacagcgtgagggttacacatgggctctaagttttttacgtaattcagggaactagtgaaaatggtctggcaccttgaggttataaaagggatagaacaacctccatgggtgtcctatttatcatgcaggagtactaactcaagtgatgctgtgttcttttgtcaattgaaagaattaagaaagaagaagaaaggcattccatctataagtggaaacgctactctcacggcattcatgtaccagctattgtctaaggtctgacagtttcagtgact

SEQ ID NO: 14664 - DNA, 433 bp, Homo sapiens
  misc_feature (1)...(433): n = A,T,C or G
agatggagnnnnnccatcgagaccttattgagaccactaggacagngcggnggaattccaagaaggctgctggagctggcaaggtcaccaagtctgcccagaaagctcagaaggctaaatgaatattatccctaatacctgccaccccactcttaatcagtggtggaagaacggtctcagaactgtttgtttcaattggccatttaagtttagtagtaaaagactggttaatgataacaatgtatcgtaaaaccttcagaaggaaaggagaatgttttgtggaccactttggttttcttttttgcgtgtggcagttttaagttattagtttttaaaatcagtactttttaatggaaacaacttgaccaaaaatttgtcacagaattttgagacccattaaaaaagttaaatgagaaaaaaaaaaaaaaaaaaa

SEQ ID NO: 14665 - DNA, 459 bp, Homo sapiens
  misc_feature (1)...(459): n = A,T,C or G
ntttgagnccatggcgaccatagaacangcggnggaattcccgcccattaccattttttcacccgagggtcggctctaccaagtagaatatgcttttaaggctattaaccagggtggccttacatcagtagctgtcagagggaaagactgtgcagtaattgtcacacagaagaaagtacctgacaaattattggattccagcacagtgactcacttattcaagataactgaaaacattggttgtgtgatgaccggaatgacagctgacagcagatcccaggtacagagggcacgctatgaggcagctaactggaaatacaagtatggctatgagattcctgtggacatgctgtgtaaaagaattgccgatatttctcaggtctacacacagaatgctgaaatgaggcctcttggctgttgtatgattttaattggtatagatgaagagcaaggccctca

SEQ ID NO: 14666 - DNA, 457 bp, Homo sapiens
  misc_feature (1)...(457): n = A,T,C or G
nttcgaagacatcgagaacngtggnggaanccgcagagagctgctgcttttatctagtaattttgatatgtgagtattaatgcatttttaaaagatgtctacattgaaacatgttcttcccagtgtcctgcttatgatgctttgttcagattttttgtaagagaccagttagtacactgggggtgtatattgtgtacatgtgtcattttagttaggcattgtaggccaaatgtgattataaatgaagttgatgaacattaattttgttattagggagttttttgaattgtaaatggatttccagcttaccttctgttgtctacagcttttttaattttaaggttggactaattgtatccatctcattgtacagcgttttagttgcaagcagaaagtagaatttggtataaagcaggttatttctatattgaaaggagcacagttgaaattgtagatt

SEQ ID NO: 14667 - DNA, 480 bp, Homo sapiens
  misc_feature (1)...(480): n = A,T,C or G
gagcgganagaattttgaaaccctttcctgatcacactagtacagngcggnggaattcaaaagcatctccctgatgtatggtggcagcaagagaaagagctcattcttctcatcaccaccttactttgaggactagccaagaacagacacaatggttcatgcccaaaaggaacagaagttccaactattgcctgggatcttgcgaaaagcgaggttccctgatccctgggagcctcacgtattttagaagccaagagaagccacatggagactcaaattcgcatcttctctatccacatcatgaccaaaggaacccctccctggtgtctgatcagggctgtggcatcacgaaacattggatcatgacatgtcgggcgatgcttggaagagcccagcatgtatgtatgcacacattgtgtgtgtgggaaggacaaagccactctcacaagaaagggcaccaggactgctctccaaggaact

SEQ ID NO: 14668 - DNA, 473 bp, Homo sapiens
  misc_feature (1)...(473): n = A,T,C or G
gagcgtgaaaaancctgagaccttaggattgatcgcgtatgacnngcnccaaggccagnggtacttaactgggtcaagttgcctgtggaccttcaggatttgaattgccatgttcctcactgcctgcaggaaaggctccattccaagcccagtgaagatgtgtgcctatccagccgcccaccaaggatgtcatctgtagaatgggtggagggcaggggtttatttggtgtatatttttacattaaaatgcacttaatatcactttgtaaagcccagatgagtgcaaatgtgcctgtaacttcctcctttaatctgtccaggtagtatttagtctttagtcttacattttctttctccctttatttcatgaaattccttgagaaaacttcaacagtaaagaaagaaatttcgttcatctcacaactcttccaaacgaggaaacttagtgaaatatttcagagcttctagatgtg

SEQ ID NO: 14669 - DNA, 405 bp, Homo sapiens
ccaggatgaaaccaaacttgaaaattatagtgaaacacagtagaataatttagaagcatatactttgatgtttttagaaagtaaggaaataaaactttaattgaacttggaataaactcagttctgagcattccattctactctgcagttgtcatttatagacagctgtggatcataatacctatagactagatatcgttatctacttatttatattaatgacaggatatccctgggcaaacagcatcaccactgtactgtgtattcttggttgtcatgggaacctttgctgtgaaccagcagtgagagcacttccattgaataaagctgcctctggatagccatgagttgcatgaagttattttactaattttatttgccttttacttgaaagcataagtttct

SEQ ID NO: 14670 - DNA, 482 bp, Homo sapiens
  misc_feature (1)...(482): n = A,T,C or G
ggggnataggagactnttacatctggcgaaanncanannnaaaagatgcttcaaagaagatgaaaaatgggctaatgtttgtaaaactggttaacccctgttcaggagaaggagccatttacttgttcaatatgtgtctacagcagctgtttgaagtaaaagttttcaaggaaaaacaccattcttggtttataaatcaatcagttcaatcaggaggtcttctccattttgccacacctgtggatcctctatttctgcttctccactacctcataaaggctgataaggaggggaagtttcagccccttgatcaagttgtggtggataacgtgtttccaaattgcatcttgttgctgaaacttcctggacttgagaagttacttcatcatgtgacagaggaaaaaggtaatccagaaatagacaacaagaaatattacaagtacagcatagagaagacattaaagtggctggaaaaaaaggtg

SEQ ID NO: 14671 - DNA, 481 bp, Homo sapiens
  misc_feature (1)...(481): n = A,T,C or G
gagaaggaagaattttgaaaccctttaactgatgacactagtcaagngcggnggaattcgacaatttgggtctctactctgagactgaagccactggacagttctgagtgaaggatgtgcagaatctggcttaaggtcctcaggatcctctgcctgctgcatggacaataaacgagattgaagggagacactaggaacgcaatgaggaggtcactgtagtggtccaggtggaagaagatggcgtctagtatgggctggggacaatgggaatggggagaagtggtcagattaggctatgtttgaaaggtcgaggctggacgcagtgggtcacgcctgtaatcccagcacttttgaaggctgaggtgggtagatcgcctgaggtcaggatgagaccagcctggtcaacatggtgaaacctctctctactaaaaatacaaaagttagctgggtggggggggcgngcctgtaatcccagctactn

SEQ ID NO: 14672 - DNA, 450 bp, Homo sapiens
  misc_feature (1)...(450): n = A,T,C or G
ngttgactccccattgatgacccttatacagtgtggtggaattccactttagcaccatgactaagcataagagtcacttatacctactggtcactgaccatggctttctacaggaggagcaagtcgtatgggagagcctgcacaatgtggatggagacagctgcttttgtgactctgactttcacctgagtcattccctgggcaaggggcctggagcagaaggtgggagtggctccccagaaaagcagctgcaggtagaccaggactacctgattgctctgtccctgcagcagcaacagccacgaggcccgctggggcttaccgacttggagctggcccagcagcttcagcaagaggagtatcaacagcagcaggcagcgcagccagtgcggatgcggacgcgggtcctgtcactgcaggggagaggagccacatctggacgcccagccg

SEQ ID NO: 14673 - DNA, 477 bp, Homo sapiens
  misc_feature (1)...(477): n = A,T,C or G
gtgcgganaaaacctggagaccataggttggatggccgtatgcccattcccctttagtagaaataagtggagtttgcagtgtgacctcgctccttgactcatgtagacatttaataactgaaccattcggctaaaacaaaaatggcttattttaaatgaaaagattctaagtttttcttaagtcgcactcgtgtgatatcttagcataccagaaatagagggaagaaaatattgagtgtttttctgattttaaatgaatcagtcatatttattttcatatcctcagtcgggttttaactggaagtaggctaatccggttagctgaaatgtgtagctggcttgcaagcagcagtgtacttagacatcactgaacttaaggcccgcactcccttccacatattttggaaggtaataaatcacaatttgggtttagaatcaggagaactgtcttcaaaacacaactcccaatacatctcg

SEQ ID NO: 14674 - DNA, 463 bp, Homo sapiens
  misc_feature (1)...(463): n = A,T,C or G
ntttgaaaccatcgatgaccattagaccangcggnggaattcccttagaaaacaagatctgggctggcactggggcatacatcaccactcagcatattcctagaggccaggcctgtcttcactcagccagccctctgaggcttctagaaacttctttctggaggaaaaaaactaaataacataaactcaggagaatgtctttacccaccttcataccactgctttctttttgctgaataaaacacagttctgataagtaagaactttagaattggaaaggaggctgacatgcaaatataatgcaaattaccctcaagtatcgccattcttccaccacctcttggtaccagtgagagcgagagattgccttttcttccccatccctccttccagctaagaccaccaaccagctgcaaattgagatgttcatttaaaaatttatatgtcaatatttaaatgttcn

SEQ ID NO: 14675 - DNA, 456 bp, Homo sapiens
  misc_feature (1)...(456): n = A,T,C or G
nttgagaccttgagcacctcggnggaatccctgactcctcccctcatttctactgcaaaataggagtacactggggcctcccagtggagctgttctctgctgttttaaattactttctactcctccctttctaacgtccactcctggactcatttgttagatcaatatatactgggactgttgtgttttctttgagtgtactagatctctttccagaagagcttcccttgatccagatctccctaattgggaatgatgatttcacagactagagtctccgatgctggtcatgatgtcaaaactaagttctgactcatttagggaactggatacttgggtctccagaagggccaatgggagggccataattctgtttattttcaaattgtcttggtttcaccttgttagaatgaactctggaagcccagccagggacaatgcaccttcacagagatn

SEQ ID NO: 14676 - DNA, 467 bp, Homo sapiens
  misc_feature (1)...(467): n = A,T,C or G
gtgagggcaaacctgataccatggctgatcgcgtatcacctgcnntgnttgtttttcctgagggctagatgcattttttttctcacactcttaatgacttttaacatttatactgagcatccatagatatattcctagaagtatgagaagaattattcttattgaccattaatgtcatgttcattttaatgtaatataattgagatgaaatgttctctggttggaacagatactctcttttttttcttgcaatctttaagaatacatagatctaaaattcattagcttgacccctcaaagtaacttttaagtaaagattaaagcttttcttctcagtgaatatatctgctagaaggaaatagctgggaagaatttaatgatcagggaaattcattatttctatatgtggaaactttttgcttcgaatattgtatctttttaaatctaaatgttcatatttttcctga

SEQ ID NO: 14677 - DNA, 482 bp, Homo sapiens
  misc_feature (1)...(482): n = A,T,C or G
aattgactgantgcctaggacgngncgnggaantctgagcccagaagaatggcccagctaagcccagcctaaatttctaaccagctcaaccctgagctagtatgtttcaggattgttatgcagttatagcttagtaatatatacacccattaaagacaggattccaggattccaggacagattgattacaaataacctgcaaatgcttggcaccctgtaagtattgatattgtgtttcctttatttaaagttaaatttgttgtaagatggtattgacttatatagaagtgaggcaagagaatagggtctggaaggcagggaacttaaggccaattcgtgctgaattcctaaagaagaaacaccaaggtctgggagcagggaacctaaggccaattaacgtgaacttcctacatctaaaccaaaaggaaaacctcatctacacctgagtagcaaaggatcaaaggtgactgttgctacaaccc

SEQ ID NO: 14678 - DNA, 485 bp, Homo sapiens
  misc_feature (1)...(485): n = A,T,C or G
tgagccggnnnngnnntttgaaacccctnnnnattgagcaccattagtccagtgcggtggaattcgaattccaccacaggcagaggccagccagagaagaagcctggcagacaggcgggcaaacagtgagcgcccacccagaccggctgctgcgccccctcctgccagggtggcgattccgctccacagtctcggacggatctgctcagaaaggaagaggcaggcgccagggggaacccccttcgtgttttgtgaccctcccttttaggtgaagcccctttttcttgctaaaaccggcaattctccggttagaaatgttacttggtgttttttggttttgtgaaacggccgtcccaaagctggctggattcctagaagagtctgtgttgaaggcatctttcaagccctcgctctggttctcagggcagcattttccaggcgggtttgttttgcatttcttggagcctctccgagcagcaaccaga

SEQ ID NO: 14679 - DNA, 467 bp, Homo sapiens
  misc_feature (1)...(467): n = A,T,C or G
nactgtagcatagaaagncctgagaacctctaataaaccttgctggaaggcaatataaagaatttacaagtaaatgtatctaatctctgaatagtattactcactgatccacaccaataaagatagacatgttcttaataaaaaatacctagttactaatccctaagtagttgcagtatgaacctaaaagtaattttaaagaaagacatactattttagaatcacagttatttaaaaaggagttgtttttattatattttgtagccattttcctggaatagtcttatgttgctcttcttgcttattgaacactggaaattactttaatagtgtaagtcatataatcgtcattgcttttctttttacagaagaagatagtggtgagctggcaaagccaaagattggttttccagagacaacagaagaggagctaggtaaatgctatggaattgacttttgtaagagtc

SEQ ID NO: 14680 - DNA, 480 bp, Homo sapiens
  misc_feature (1)...(480): n = A,T,C or G
nattgactcgtagcatacgacnggcannnggnncctgncagcggcattcacctgtgtggtaggagccatcggctgtgggaactctgtggaagtggctagccttgcacatcctctgatcatgttgacttcatcagggtgcgagaagcacttgagcttggcgtcggtgagttccctaagcctcttttgcgtgtgttgcagctcatgccagttactatgggagaatgaatgtgagagaggttctcagagaggatggccacctcagtgtaaatggggaagcgctgtgtaagtatggcttcgttttcctgtgggcgtcggtcgcggagttggacccacacgcctgtcatgttgggtactaacaccanagaatgaacggcccgtgtgacatggcggtcctcactgatgacgaccggctgttggagctgctgcttaagccctcatccacagaagctcatagccaccagatggcagttgctttgattg

SEQ ID NO: 14681 - DNA, 460 bp, Homo sapiens
  misc_feature (1)...(460): n = A,T,C or G
ctaacactgattcctttgagttttgagaacctctgcaattctctcgnggcagcaaaatggccacagaggtttgattccaggcctttcatgtgtttacaccttacagtccagcagaagaaagagctcctcttctgaaaaccttgaaagctcttgaatcttatgtctaatcccccaacaaatcactatgatggcatgccataccacactgagtctgggtctgtgctacttatccttgaaccaatcactttggtgaggggatcggtattatgataaatggttagtttatgtaaattaaggctgaagcctaaaattgaagcttgagattcattcccactcaagttaatgtgctattattcgaaggaacagagtaagtactataaatattggaaagaagttagcacatttctcactgctggataaccatacaattctatatcttcaaaagccaaatggatcaact

SEQ ID NO: 14682 - DNA, 461 bp, Homo sapiens
  misc_feature (1)...(461): n = A,T,C or G
gggccttnnngtcgagaccctanttcgaganccatatccatgtggtggaattccttcatttggtctttataatccactgtccacagcatcttcctttaaaccaatagtcccagaagagaccctctgaaattctaggactggatattaaaatgcctgaacctgttatctaaatcctttttaagaaacttaatgttccagctcttgaactacactgtggaacagtaatttgtgcccaatttagtggaagataatgaggctcactgtaaacactacattgtcctgcaaagtaattctgatgagagtttactaacttctagagccattctctttaaccgtctgcaggtctaaggattaactatatttgtgatttgtaataaaactgagttgtacaacactgcctgtgtttgtctggccaagacatttgcttcacttttaaaatgcacgttatctttggagaggtg

SEQ ID NO: 14683 - DNA, 474 bp, Homo sapiens
  misc_feature (1)...(474): n = A,T,C or G
tgagagggacgaccctggaaaccttanggttgatcgccgtatgcctcatcccaaggcagagctcatgtcacaggcacaggggctgcgcccaagcttgtccacttccttatgcagctgtggagtctggaagactgttgcaggactgctggcctagtcccagaatgtcagcctcattttcgatttactggctcttgttgctgtatgtcatgctgaccttattgttaaacacaggtttgtttgctttttttccactcatggagacatgggagaggcattatttttaagctggttgaaagctttaaccgataaagcatttttagagaaatgtgaatcaggcagctaagaaagcatactctgtccattacggtaaagaaaatgcacagattattaactctgcagtgtggcattagtgtcctggtcaatattcggatagatatgaataaaatatttaaatggtattgtaaatagttttcn

SEQ ID NO: 14684 - DNA, 440 bp, Homo sapiens
  misc_feature (1)...(440): n = A,T,C or G
nttagagttcgtatgcaatcgcggnggaattcattttccttagtctggaccaaaccttcccattattggacacagatggtcagctagtaatcaatcatctataattatgctttggaaaaacctcatgagcaaagaccctcgacttgtagtcaaagctacaatttatgtcaagcagctccattagatgtctcatttcccagccatcaggaggaggaaagagggaatgaagaacaagcttcttcctgtgggtgtgacccagaggttgttcgtgtcacttctattcacatttgcttgtgtagaacttacacaatcatacttaacttcaagaaagattgggcaacatagtttatagcggggaggatttatgccctgaaattgatggtgtcatcttttcatcttccctctctcaccattagcatgtaatctgtaactgaatttgg

SEQ ID NO: 14685 - DNA, 461 bp, Homo sapiens
  misc_feature (1)...(461): n = A,T,C or G
ggggctttgnnttcgagaccctagtatagagtggcggaattccttttatgttaaattatgatcttcatattaatcttaaaattttgtgacgtgtctttttcctttttttccacagttttaatatattattcttcaacgacattttttgtaactttacacttttttggttattttattttaaaaaaatgaaaaattaatttaaaaaaatgcaaaaaactgttggattatttattttagaaattcccccctttgtgttggactgcaaattgagtttctttctctttaggcctttcacaactaggactgagaatgtatgtaaaagttctgtgacagtacagaaggaaaacaactttttatgtatagcttctaaaaggggaaaaaaaaaaaaaaaaaaaaacccctttgacttccacgggccaatttaaaaactttccactaacaaattgaaggctggggatacc

SEQ ID NO: 14686 - DNA, 461 bp, Homo sapiens
  misc_feature (1)...(461): n = A,T,C or G
nnnnttttgagtgcatgcgctngngcnggaantcggagctgttcctattcggccatcttggctcctcccctccttcaataaatatttgttgagcatgagcaccagtgccaaatactgtgcctaatcacagtggttgctgtcaaggagtatatacactagctggcgagactagtgtgcaaaagacagggttaaagggccagcagagaggcgaaggttgcatatgtattggagtattgcgttggaagatgctttctttttaagcttgtaagtaaagacaggaataacttaagagtaccttattgcatgaccgtgtagcaaaatatttaaagtctggacttctacattgaaacagatttgtgtttaaattctagctccaggctgggcgcggtggctcatgcctgtaatcccagcactttgggaggccaagacgggcggatcacaaggtcaggaaattgagaccn

SEQ ID NO: 14687 - DNA, 512 bp, Homo sapiens
  misc_feature (1)...(512): n = A,T,C or G
cctcgaccnccntcngtagaacggcagtccagagaggaggaattccttgttagtgacagcgccgtaagcacagtgagtgtgatgcgtgaccctgaatgacacactacagaatgtgagcagtgtgagacttctctcactggccttgaaataagaaaatattgaacattttaatattaaaaatatttcagtgttaacaaatgtgcatgaagtttaattaggaaggaatgctttatgttatgaaggctttttttttttttttaaaaaggggttttttttttttttcccgggggggggggggggggggaaatttaatttttttgaaccctaccccccggggttaaaaaaattttttttccttaaccccccaaagaggtggaaataaagggttgggcccccccccccaagaaatttttgggggtttttttttaaaaaaaaaggggttttaacattgtgggcgggggggccctaaaatccggagttttgaaaccccccaccctacccctccaaagggt

SEQ ID NO: 14688 - DNA, 482 bp, Homo sapiens
  misc_feature (1)...(482): n = A,T,C or G
cattgactgcgtccctaggacgngncgnggaannccagaatttcttcacttgactccaggagttcagttggaagcaggaggagataatcttggtcaacagtacaatagcccacaagaagttattggtaaacgaggttccgatatcatcattgtaggtcgtggcataatctcagcagctgatcgtctggaagcagcagagatgtacagaaaagctgcttgggaagcgtatttgagtagacttggtgtttgagggcttcagatacatttttcagatacaatgtgaagacattgaagatatgtggtcctcctgaaagtcactggctggaaataatccaattattcctgcttggattcttccacagggcctgtgtaagaatgggttctggagttctcatggtctttaggaaatattgagtaatttgtaatcatcgcattgatactataataagttcattcttaagcttgctttttttgagactggn

SEQ ID NO: 14689 - DNA, 464 bp, Homo sapiens
  misc_feature (1)...(464): n = A,T,C or G
ntttgaaaacccttgangnaccattagtccagngcggnggaattctcacaacttcctttgttagcatttttttttttcaaaataattagcttggaataattcttaagccaaagggacatattttggggttgcatattctggtttcctaccattatattttgggggggcatattttggtcttatacactgggttccaccggcaatgaaaagagttcttgtttttcctccagcaatttgtcatttgttaaagagtttagcagttctaaaagatatagaccagctgggctatctttttgtggttttcagttctctagtatgttgagcatctttttgtaagtgtacttgccatctgtagatcttctttggtgaggcgtctgttcaaatctgtgtgcatttttaattgggctgtttaacttattgtttagttttaacaattttttatgtattttgaatacaaattctcg

SEQ ID NO: 14690 - DNA, 444 bp, Homo sapiens
acctcctcctctgtctcctaaagtgctgggattgcagccatgagccaccatgcccgtcttgaatttttgactgtgtgtctttaggatagatttctataagtgaagtttctggttcaaagggtaaatgcctatgtaaaattgctagatattgacacattcctcaagaaactaatttctattgcatctggcaaaattatttgctgtgctttatatagcacttaatccttagaataacagtcagagatgagtatgtctattttcttcattttcagatgaggaaacgaaatacacaggacataaggctaacaaatagagctgagatttggccaggtgcggtggctcatgcctgtaatcccagcactttgggaggccaagggggggcggatcacctgaggtcaggagttcgagaccagcctggccacatggcgaaaccctgtctctact

SEQ ID NO: 14691 - DNA, 482 bp, Homo sapiens
  misc_feature (1)...(482): n = A,T,C or G
nttttaacctcgatgaccattgtgcagtctggtggaattccgcagcccttcgctcgcccggcctccccctccctggttccgcgttctggttccgccatggaatccaacaaggatgaagctgagcgctgtatcagcatcgccctcaaggccatccagagcaaccagcccgaccgggcgctccgcttcctggagaaggcacagcggctgtatccgacgccgcgagttcgcgccctgattgagtccctcaaccagaaaccacagactgccggtgaccaacccccacccacagacacaacccatgccacccacaggaaagcaggtgggaccgatgccccctcggccaacggtgaagctggaggagagagcaccaaaggctacactgcagaacaggttgcagctgtgaaaagggtcaagcaatgtaaagattactatgagatcctgggggtgagcagaggggcctcggatgaggacctgaagaaggc

SEQ ID NO: 14692 - DNA, 497 bp, Homo sapiens
  misc_feature (1)...(497): n = A,T,C or G
ggggnnnnnnnnaggncggggcccnggnnnnatttattcttgatnacctagtacntgatggcctgcgaacggaccancacaaccacagcaagggtacgtggagagggggcctcaccttcctgaggttgtcagagcttttcatcttttcatgcatcttgaaggaaacagctggaagtctgaggtcttgtgggagcagggaagagggaaggaatttgcttcctgagatcatttggtccttggggatggtggaaatagggacctattcctttggttgcagttaacaaggctggggatttttccagagtcccacaccctgcaggtcatcctgggctgtgaaatgcaagaagacaacagtaccgagggctactggaagtacgggtatgatgggcaggaccaccttgaattctgccctgacacactggattggagagcagcagaacccagggcctggcccaccaagctggagtgggaaaggcacaagattcgggccaggcagn

SEQ ID NO: 14693 - DNA, 483 bp, Homo sapiens
  misc_feature (1)...(483): n = A,T,C or G
ngagagggccggnagaataatctggactacgtcagccagcttcgnagnggcnggaantcgttngccaagaagagaagcttgtctgtgggctgactaaacgcaccacctctgctgatgtcatccaggctttgcttgaggaacatgaggctacgtttggagagaaacgatttcttctggggaagcccagtgattactgcatcatagagaagtggagaggctccgaaagggttcttcctccactaactagaatcctgaagctttggaaagcgtggggagatgagcagcccaatatgcaatttgttttggttaaagcagatgcttttcttccagttcctttgtggcggacagctgaagccaaattagtgcaaaacacagaaaaattgtgggagctcagcccagcaaactacatgaagactttaccaccagataaacaaaaaagaatagtcaggaaaactttccggaaactggctaaaattaagcagg

SEQ ID NO: 14694 - DNA, 576 bp, Homo sapiens
  misc_feature (1)...(576): n = A,T,C or G
aggacgccgnnnaatcgaacactttcgaacaccagtccgngnggngcaattaaggaagccccttcccaggcccctgagggggacgtgatctcgatgcctcccctccacacatctgaggaggagctgggcttctcgaagtttgtctcagcgtagggcaggaggccctcctggccaggccagcagtgaagcagtatggctggctggatcagcaccgattcccgaaagctttccacctcagcctcagagtccagctgcccggactccagggctctccccaccctccccaggctctcctcttgcatgttccagcctgacctagaagcgtttgtcagccctggagcccagagcggtggccttgctcttccggctggagactgggacatccctgataggttcacatccctgggcagagtaccaggctgctgaccctcagcagggccagacaaggctcagtggatctggtctgagtttcaatctgccaggaactcctgggcctcatgcncagngtcggacccttgccttcttccacttcagaccccaactttgctttccttccctggcgtcctcagacttagg

SEQ ID NO: 14695 - DNA, 473 bp, Homo sapiens
  misc_feature (1)...(473): n = A,T,C or G
gtacggccgggangnaaatgtactgcntncntaggccgngncgtggaattcatgaaatgaaaatagtatatatacatataatatataaatagatgtatatgtttatctgtgcatatatacatatacatttttaatgtgtgcgggtgcatgtttgtgttactgaaaattttcccatgtaacccaatgcaaggattgatcccggatctgtagcctgggacagtgtttacagaatctgtggcttctagatgcttggcctctaaatctggtggttggacttaatcttttgctgcaagaagcagccttttttcttatggctggctgccacactagtctgcttacagaagtccatagccatgccacagggttgaaattgtacaacgagggtttcttcaagcatatctctaaccctgactgcttgagcctggtccctttcaacaaattcatctgttgccagctgcttacagatcccactt

SEQ ID NO: 14696 - DNA, 462 bp, Homo sapiens
  misc_feature (1)...(462): n = A,T,C or G
ggggcgttttnttcgcagtccctagtatagagtggcgtaattcgtgctggtttgccaactgacaaaaagaaaggtgggccatctccaggggatgtagaagcaatcaaggtaatcatgtgttaggattcttggactggaatgagctaagatgggttcagaacacaaagctggataataaacatgttccgaacattgcagatttcattttcccacaggtattagcatacagcaatatttctgtttaaggaaaaactagcataaagttattatttgatcagacttgaaattacacaagctaattaatgtggaggcagctttgtctttctcattttccaaggtgcatttatcacttcgaacagttacttaccttggtatgctgtctcagtgtttgccttaatttttactttcgaagatttgctgtctggcaaatccttttgactgatcagtagggaccctcgtttt

SEQ ID NO: 14697 - DNA, 444 bp, Homo sapiens
aataggtagacactagctcgaaggcgtaattcttctcatttccaaagacccagagtctcagagccaggttaagtggaagaaactttgagaggtttcttaatcaattccttctatctctcaaaccatgccagtaacttccttggtgaaaaaatctatactcctctcacagttcttcgggcatggaaattctatagcattctttggtataaccaacccactgaaccctccacaacatcttgaattccattcaactcgagctgaagtattctttttgagtttcagtatatcttttctagtgtcccacttttagaaaggtccaaagatgatatataataagtgaaaatacaattaatcagagctttatttgcatatccattaaatatctgaaggctattaccagttgtgcttcagcctcctttcccttgcaattctcccagggtggcg

SEQ ID NO: 14698 - DNA, 463 bp, Homo sapiens
  misc_feature (1)...(463): n = A,T,C or G
agggaaatcgagtagcgtancactngngcnggaantcgngaatagtgctgctatgaacattgtctacaagttttcgtttgaacacctgttttccattcttttgggtctatatccagtagtggaattggcaggtcctatggcaattccatgttttacttattgaggaactgcttttccacagtggtgatgccattttgtattcccacctgcagtgtgggaggattctaatttctccacatccctgccaacacttgttataggatgtatttttagccatatctacccagcaagggtattatattccattgctcacatgcaggaactgatgtatgttacaacaaacctgcagggaaggtattgtcatccccattttacagatgacaaaacaaagaggttcagagaggttaagtgacttgcccactagatctaccactagatttgaacccaggtctctctgcttccc

SEQ ID NO: 14699 - DNA, 488 bp, Homo sapiens
  misc_feature (1)...(488): n = A,T,C or G
cggggannnnnagggggggccnnngnnnatttatatgaaacctagactatgagcatncgaaannncnngagcccaggagagagnnggagaagggattaaatgaataggnggatgacagagccttgggaaatgtaaaaaaattagttaaataaaataaaacatgatccatctatatactgtctataaatacagactcactttagatacaaagacacaatgagattgaaaacaaaagaatgaagaaatgaattccatgcaaaaagtaaccaaatgaggccaggcttagtgactcatgcctgtaatcccagcactctgggaggctgaggcgggcagatcccttgaggtcgggagttcaagaccagcctgaccaacatggagaaaccctgtctgtactaaaaatacaaaattagccaggcgtggtggggcatgcctgtaatcccagctacacggtaggctgaagcaggagaatcgtttgacccaagaggcaa

SEQ ID NO: 14700 - DNA, 413 bp, Homo sapiens
  misc_feature (1)...(413): n = A,T,C or G
gtggcattcacaggctccactgagattggccgcgtaatccaggttgctgctgggagcagcaacctcaagagagtgaccttggagctgggggggaagagccccaacatcatcatgtcagatgccgatatggattgggccgtggaacaggcccacttcgccctgttcttcaaccagggccagtgctgctgtgccggctcccggaccttcgtgcaggaggacatctatgatgagtttgtggagcggagcgttgcccgggccaagtctcgggtggtcgggaacccctttgatagcaagaccgagcaggggccgcaggtggatgaaactcagtttaagaagatcctcggctacatcaacacggngaagcaagaggtggcgaagctgctgtgtggtggggcattgctgctgaccgtggt

SEQ ID NO: 14701 - DNA, 330 bp, Homo sapiens
cggccgtcaccgaaggctgcttctgctgccgctactgctgttcctgctgccggctggagctgtgcagggctgggagacagaggagaggccccggactcgcgaagaggagtgccacttctacgcgggtggacaagtgtacccgggagaggcatcccgggtatcggtcgccgaccactccctgcacctaagcaaagcgaagatttccaagccagcgccctactgggaaggaacagctgtgatcgatggagaatttaaggagctgaagttaactgattatcgtgggaaatacttggttttcttcttctacccacttgatttcacatttgtgtg

SEQ ID NO: 14702 - DNA, 239 bp, Homo sapiens
  misc_feature (1)...(239): n = A,T,C or G
ctttgcangcaggcagncctgtctgcgtgtggaggagcagccgngactgcccgtggctctgctgccgcccactccctgccttgtgagtggcctgctgcctcacctcccgcaggccgccacacttattgcaggtcagtgatcctttggagtttgaatttcacaaagctttttttatcttcaggtctaaaatataatctgataattaatgggttgtggaatccattatgaagtgcaaatag

SEQ ID NO: 14703 - DNA, 501 bp, Homo sapiens
  misc_feature (1)...(501): n = A,T,C or G
aatcgatnnccgntnngnnnnnnnccnnnntttgacgnaccattagtccagngcggtggaattcgcttgtgataacatttctacgtcgattcctcaggatttaactatatattcttgaaaacatctcaattttaaatgtttctttcaagatggtgaattaaacagagatagcccttcaacaggtggaactcagcatatgctgagtctgaaatggaaatgatgaagttagagaaccatacaacaatggtaatgatttcagaaacatggtgttgagcagaacaaagcagacacaaaagagtacctatggcatggcatgcatctgtatacgcgaaattccagaataagcaagctaacctatgataagaaagagactggctgggaagactgagagttcactttctggggtgacataatagtgtagatcttggctgggcacggtggttcacgcctgtaatcccagcgctttgggaggccgaggcgggcggatcacctgaggtcagg

SEQ ID NO: 14704 - DNA, 455 bp, Homo sapiens
  misc_feature (1)...(455): n = A,T,C or G
atcgattagcctaccnccngacgnggcancancanctctcttatgatgacccanataggaaaatgtaccatctctgcattgtgaatttggtgataggaactctttattgtgccaaaggaaactatgagtttggtatttctcgagttatcaaaagcttggagccttataataaaaagctgggaacagatacctggtattatgccaaaagatgcttcctgtccttgttagaaaacatgtcaaaacacatgatagtcattcatgacagtgttattcaagaatgtgtccagtttttaggacactgtgaactttatggcacaaacatacctgctgttattgaacaacccctcgaagaagaaagaatgcatgttgggaagaatacagtcacagatgagtccagacaattgaaagctttgatttatgagattataggatggaataagtagttatgactgatg

SEQ ID NO: 14705 - DNA, 463 bp, Homo sapiens
  misc_feature (1)...(463): n = A,T,C or G
ngaaaatcgactgagtatcntgcgncgnggacnncgacattttcactttttacacattgggcacaaagataagctttgattaaagtagtaagtttaaggctacctaggaaatacttcagtgaattctaagaaggaaggaaggaagaaaggaaggaaagaagggagggaaacagggagaaagggaaaaagaagaaaaagagaaagatgaaaataggaacaaataaagacaaacaacattaagggccatattgtaagatttccatgttaatgatctaatataatcactcagtgcaacattgagaatttttttttaatggctcaaaaatggaaactgaaagcaaggcatggggaatgaatactttgggcagtatcttcctcatgtcttcttagctaagaggaggaaaaaaaggctgaaaaaatagggaggaaattccttcatcagaacgacttcaggtggataaca

SEQ ID NO: 14706 - DNA, 465 bp, Homo sapiens
  misc_feature (1)...(465): n = A,T,C or G
nggnccgttgnnatcgcagaccctagtatagagtggcggaattaaaaaaggaaagaaagaaatctctgcttccgtactatcaaaacttctaccctagaataccccctggcaccttctaacccaacctaatacagagattttgtagggacccattaacaagctcctatataattataagcagctctcacagtagggttgaaagagaatataaggaaaattagaagtactgtatttttgctattggaaatgaaatattgtttcatgcacctttgaaaaaaataacaggattttacagccttctgatgattcattcaaagcatggggaatagttcatatgtttgttaaatgaaaatcttatgtagctatttgtgtgtccctcccacttcataactacaaaaacatatatatgaatttctaaacaaagtgatattttaaagatgaattgattcaatgtgtacttaccag

SEQ ID NO: 14707 - DNA, 497 bp, Homo sapiens
  misc_feature (1)...(497): n = A,T,C or G
gancggtnncacggggggctnnncatcgatgaccnattgaagngcgtcggaanncgcgttggccgcagatgcctctcggtccctccctgtacttactggtgaacagcattcacccagaatgccgatttcatctggaaatacaggaggaagaaacaaaatgtgcagagcttctgaggtctcaaacagaaaaacacaaagcctgcagtggcgtctgggacaacatcacgtgctggcggcctgccaatgtgggagagaccgtcacggtgccctgcccaaaagtcttcagcaatttttacagcaaagcaggaaacataagcaaaaactgtacgagtgacggatggtcagagacgttcccagatttcgtcgatgcctgtggctacagcgacccggaggatgagagcaagatcacgttttatattctggtgaaggccatttataccctgggctacagtgtctctctgatgtctcttgcaacaggaagcataattctgtgcctt

SEQ ID NO: 14708 - DNA, 445 bp, Homo sapiens
  misc_feature (1)...(445): n = A,T,C or G
atgggaggccccnnnnattgtagtaccctagtccgtgtggtggaattcgtagcaaaggccacacctgtgtgtgcgtgcgtgtgtcctcctgttctctgttaggggcagtccccacttgggtccaacagtcttcacagggccaccagagctgccaggttgtcaagagaagccagaaatctggattattaggtgaaatctcgaacacttttaaaaagaggtgaagtgcaagtcggacaaaatagcccatgagccccttgtttgtaactcttctttagatgttacaaagtatcaacttataaagagactttgtctcacagtttaaaaacaatcttctggccaggcgggcacagtggctcacgcttataatcccagcactttgggaggccgaggcaggtggatcacttgaggccaggagttccagaccagcctggccaacatggtgaaa

SEQ ID NO: 14709 - DNA, 481 bp, Homo sapiens
  misc_feature (1)...(481): n = A,T,C or G
ctttgagtcccatggaagngcggcggaattccttaagctgcctaaggaatttttttaacttaagggagaaaaaaagggatctggggatggggtgggcttaagggaactgggttcccatgctttgtaggtgtctcatagctatcctgggcatccttctttctagttcagctgccccacaggtgtgtttcccatcccactgctcccccaacacaaacccccactccagctccttcgcttaagccagcactcacaccactaacatgccctgttcagctactcccactcccggcctgtcattcagaaaaaaataaatgttctaataagctccaaannaaaaaaaaaaaaaaaaaaaaaaaataaaaaaattnaanaaaaaaaaaaaaaaanttaannnnnnnttaaaannnaannnaaaatannannannaaaaaaaccccccccctatataaaaaggggggggatacccccggatgttcctttg

SEQ ID NO: 14710 - DNA, 462 bp, Homo sapiens
  misc_feature (1)...(462): n = A,T,C or G
ggttgagacccttngnagtgcggtggaattcggctctttccgaggttttcctgctcttagccagaagatgtcaccctttaaacgccaactatccctacgcatcaatgagttgccttccactatgcagaggaagactgatttccccattaaaaatgcagtgccagaagtagaaggggaggcagagagcatcagctccctgtgctcacagatcaccaatgccttcagcacacctgaggaccccttctcatctgctccgatgaccaaaccagtgacagtggtggcaccacaatctcctaccttccaagggaccgagtggggtcaatcttctggtgctgcctctccaggtctcttccaggccggtcatagacgtactccctctgaggccgaccgatggttagaagaggtgtctaagagcgtncgggctcagcagccccaggcctcagctgcttctctgcagncagn

SEQ ID NO: 14711 - DNA, 476 bp, Homo sapiens
  misc_feature (1)...(476): n = A,T,C or G
catagaaatcgtcnngcntgngcaggaancntgncggcccaggatggatcagacctgtgaactacccagaagaaattgtctgctgcccttttccaattcagtgaatttagatgcccctgaagacaaggacagccctttcggatgatccagattccagtaccagtacattaggaaacatgctagaattacctggaacttcatcatcatctacttcacaggaattgccatttatggagtctcgctctgtcacgcaagctggaatgcaatggcacgatctcggctcactgcaacctccgcctcccgagctcaagcgattctcctgcctcagcctcctgtgtagctgggattacaggcacccgccacgacgcctggcttttttgtatttttgtagagacaggttttcactgtgttgtccgttctggtctcaaactcctgagttcagggaatccaccgccttggcctcccaaagtgctggg

SEQ ID NO: 14712 - DNA, 458 bp, Homo sapiens
  misc_feature (1)...(458): n = A,T,C or G
attggattgagtaacttaggccagngcgnggaattcggcgcgtctcccctccgccatggcatcagttttgaatgtcaaggaatccaaagctcctgaaagaacggttgtagttgctggtcttccagttgacctttttagtgatcaattattggccgcattagtgaagagccacttccaagacattaagaatgagggcggagatgttgaagatgtgatatatccgacaagaaccaagggagttgcatatgtaatattcaaagaaaaaaaagttgcagagaatgtcatcagacaaaagaaacactggctagcaaggaagactagacatgctgaactcacagtctctctcagagtctctcattttggtgacaagatcttcagctctgtaaatgccatccttgatctttctgtttttggaaaagaagttactctagaaactctggtaaaagacctgaaaaaaa

SEQ ID NO: 14713 - DNA, 463 bp, Homo sapiens
  misc_feature (1)...(463): n = A,T,C or G
nggtagctggaatcgagnacactagttggtgtgcctgaattctttgagattttgaaagttacttacacagttagcgtacaggtaacaaacagagctttagaatgcattggcttcaaataggatgatttgtgtggatgcagttatatattgcatccatttattccacaaagatttattaagcacctatactatatgccaagccctgtgctagatgctttcaataggaaataaagattccataagataagttagactattttaggagtttccacctttttaccaccaagctacccctttgatagttgttccctaggaggcatgtgttttgaaagatcctgtctattacatattatgcttgtgctaggctttctcagaatattgaaaatagcttttgaatctccactgtaattttcagggagtcctagaggtctagagatcttcataagaaaactgatcacttttt

SEQ ID NO: 14714 - DNA, 466 bp, Homo sapiens
  misc_feature (1)...(466): n = A,T,C or G
gatagaccccccctnatcgacgaccttagtccagtgcggtggaattccctccggggaaacccaagccctgcagcgcatggaacagaagaactggaaccgacgcttctggaaccaatgcttacggcgcaagggtatgtgagagtgggtcttcccgtacaggaagtagaagatcttttgtttgggggcctcgtcgtcctcctccatgtcattggccagatagctgaggacagaaatcaggttgctgctcaggggcaccaccaggagagacctccggctgaggtcatcttcccacagaggaaggtaagggaccgtccctaactcaagactggcacccaccctgcagacagccacgccttcctgaggagggctctgctggacagagacctgatctagggcatctcccactccttcaggatggagacaaaaacccaactggtgaccaatagtggtggcttacgcctggaat

SEQ ID NO: 14715 - DNA, 447 bp, Homo sapiens
  misc_feature (1)...(447): n = A,T,C or G
nttagtagatcattagtccagtgcggtggaattcgatgagcctccttttagcagagtgaacccctttttaaaggccactttaacaacaaccaccaatatattgtttagagacggtttctgtctagtgtaaaacttgagtggtctgactctaataaatggttttgaaatgtgtgactggtattataaaatttgtgaataaaacatataaaatatgaaaaaaaaaaaaaaaaaaaaaaaaaaaaaaaaaaaaaaaaaaaaaaaaaaaaaaaaaaaaaaaaaaaaaaaaaaaaaaaaannnggccccccttaaattaaaagggccctttaaaaccccgttaaaacccctgggtggtttttttttttcccccccttttttttttgccccccccccccctttttttttttcccgggggggggccccccccccttttttttttaaaaaaaaaa

SEQ ID NO: 14716 - DNA, 418 bp, Homo sapiens
  misc_feature (1)...(418): n = A,T,C or G
ctgatggcgtgatgtctcacagaaagttctccgctcccagacatgggtccctcggcttcctgcctcggaagcgcagcagcaggcatcgtgggaaggtgaagagcttccctaaggatgacccgtccaagccggtccacctcacagccttcctgggatacaaggctggcatgactcacatcgtgcgggaagtcgacaggccgggatccaaggtgaacaagaaggaggtggtggaggctgtgaccattgtagagacaccacccatggtggttgtgggcattgtgggctacgtggaaacccctcgaggcctccggaccttcaagactgtctttgctgagcacatcagtgatgaatgcaagaggcgtttctataagaattggcatanatctaagaagaaggcctttaccaagtactgcangaa

SEQ ID NO: 14717 - DNA, 416 bp, Homo sapiens
caccagccagcaacctgggccttgtactgtctgtgtttttaaaaccactaaagtgcacgaattacattgcactgtttctcgcactttgtattttctcttaggcttttgtttctatttcaaacatactttcttggttttctaatggagtatatagtttagtcattttacagactctggcctcctctactgaaatccttttggatggggaaagggaaggcggggagggtccgaggggaaggggaccccatcttccctgtgcccgctcaccccactccaccagtccccggtcgccagccggagtctcctctctaccgccactgtcacaccgtagcccacatggatagcacagctgtcagacaagattccttcagattccgagatgcctaccggcttgtttcagtgatggtgttgttgtt

SEQ ID NO: 14718 - DNA, 481 bp, Homo sapiens
  misc_feature (1)...(481): n = A,T,C or G
ctcatgattatcgttgngcaccttgcaagngnccngnaannctctcgnctctgggntttggggttggagtggggaggttttttttcttttttgcttgtccgtctacttctggggcccggactgaaaagctgagcatgaccaaccattaaactgtggaatagtctctccacgagaagaaagcccatcgtttgagaccattaaaactggattcttcatagccctggagcatgactgtagggatgacctctgagctggccagaatggacacattaatgaccaaataggcctttttccatccctgacgtttccttttggaattagagctcgaaaacgagaactggtgaagggagggccgcggaatcagatcatgtctggatctgatggctccgtgctgtgctcaagcgtgctgtgccttcacaccatggtttatattgaatgtgtcgcctgagatgtcaggcttgcttttccaaagagtcacttg

SEQ ID NO: 14719 - DNA, 433 bp, Homo sapiens
accaagggtcgctttgctgcacatcgtattacacctgaggaggccacgtacaagttgtgcatagcgagaacgatctttgtgggcacaaaaggaatccctcatctggagactcatgatgcccgcaccatccgctaccccgatcccctcatcaaggtgaatgataccattcagattgatttggagactggcaagattactgatttcatcaagttcgacactggtaacctgtgtatggagactggaggtgctaacctaggaagaattggtgtgatcaccaacagagagaggcaccctggatcttttgacgtggctcacgtgaaagatgccaatggcaacagctgtgccactcgactttccaacattgttggtattgtgcagggcaacaaaccatggatttctcttccccgaggaaaggcgatccgcctcaccattg

SEQ ID NO: 14720 - DNA, 459 bp, Homo sapiens
  misc_feature (1)...(459): n = A,T,C or G
ccccgtagagcgtagcacacngccgnggcantntngatccggngctgcagtgaggaggtggttcttgcccgtgttgtgtgtgtgtgtgagtgagagagcgagtgagtgagtgagtgagtgtgtgtgtgggggggactcggcttgttgttgtcggagacttccccctccccttcaccccttcccctccccgccgccgctgcagtggccgctccctgggccgtaggaaatgagcgataacgatgacatcgaggtggagagcgacgctgacaaacgggctcatcataatgcactggaacgaaaacgtagggaccacatcaaagacagctttcacagtttgcgggactcagtcccatcactccaaggagagaaggcatcccgggcccaaatcctagacaaagccacagaatatatccagtatatgcgaaggaaaaaccacacacaccagctagatattgtcgg

SEQ ID NO: 14721 - DNA, 456 bp, Homo sapiens
  misc_feature (1)...(456): n = A,T,C or G
agggtaattgagacatttnnaatttcgagacaattagaccatgcggtggaattcataataaacagttgtaaaataatgaaggtagaaattatatcactagggaaaaatttgtagcggatggcagtgttgaaggcaaatgtaaacataagggtaatggtctgtcatggcttttagaaaaagatgatagagttcatcattattttgccttcatctttgttaaggacagaaaattccctgacaggtgggcaagtatcaggttacctattttttattcctttggtacaaaagggttgaacgtcaggctaaaaaagcagccatgcatttattattaaacattttctaccgacaaggcactgtgctaggtactgtaatcctaccataagtaggtaggtatttcttccactgtaaatcataggggtttgctgttttatgtgagttagcctcttccccttgtct

SEQ ID NO: 14722 - DNA, 449 bp, Homo sapiens
  misc_feature (1)...(449): n = A,T,C or G
nggcggcncccaatgaatcccngctgcngancttagcacagngcggnggaantcgggggatggatgggtgggtagatgaatggatgcatagatgaatgtatcagtggatggatagttggctagatgggtgggttggtggatgaatggcagagcttgcacctgccagtccatctgacatcaaagccagtgtctctaatggtgacaccaccctcctctgcagcaggaggcagagctgtgggatgaatgaggttcgccaggtctcccttacctatcctgggtccccagctccttctcactctcttcccttgcagcctcgaagcggaggatccctgtgtcccagccgggcatggccgacccccaccagcttttcgatgacacaagttcagcccagagccggggctatggggcccagcgggcacctggtggcctgagttatcctgcagcctctc

SEQ ID NO: 14723 - DNA, 455 bp, Homo sapiens
  misc_feature (1)...(455): n = A,T,C or G
gcggtanattcgagacattagtccagtgcggtggcattccggcgcgcagggattcagccgccttatagcgcgccagacattatccccaggctgagtgttttccacagagattgctattaacaggatcccagcttttgcctctctgagagatggcatgaaggagcccacagcctcgttgcaccaggtggccctggcaaggtgcagctttgggctgtttctgccgaggcggaggccttctcgccctggttgaacggctcgcaggatgaggaatcaccgcacctgccgcgtaagagccgcttgcaagttaaatggggtgaacctttgaaggacctgctgcgttttggatccagagttggctgaacacaaactttggtgagccaaccgttcctgctgtggggtgcagcacgcatgtggaccacagactcacggacacacacacacacgctgggggagcg

SEQ ID NO: 14724 - DNA, 486 bp, Homo sapiens
  misc_feature (1)...(486): n = A,T,C or G
gggcgtncnnngattgatncccatcgagatcactagtccangtggtggaattcggaagaaggagtcctgcgttaactgcggccgggaggctatgagcgagtgcaccggctgccacaaggtcaactactgctccaccttctgccaacgcaaggactggaaggatcaccagcacatatgcggccagtcagcagctgtcaccgtccaggcagacgaagtccacgtggctgaaagcgtgatggagaaggtgaccgtgtgaggctccatcggccgccctgggagctggggcccctcgcactcctgtgaggcttttgcaggtcgaaggcccccctgaggactctggggggacgttgagaagaggggtgtgggaaggtaaagaaacttgctggacaagtcattaacacactttaagcgaatggtgccctgggaagcgcactccccctgcccgggccccctgcccgctcgcggacagattttttatccctggga

SEQ ID NO: 14725 - DNA, 414 bp, Homo sapiens
gttctggattcccgtcgtaacttaaagggaaattttcacaatgtccggagcccttgatgtcctgcaaatgaaggaggaggatgtccttaagttccttgcagcaggaacccacttaggtggcaccaatcttgacttccagatggaacagtacatctataaaaggaaaagtgatggcatctatatcataaatctcaagaggacctgggagaagcttctgctggcagctcgtgcaattgttgccattgaaaaccctgctgatgtcagtgttatatcctccaggaatactggccagagggctgtgctgaagtttgctgctgccactggagccactccaattgctggccgcttcactcctggaaccttcactaaccagatccaggcagccttccgggagccacggcttcttgtggtact

SEQ ID NO: 14726 - DNA, 407 bp, Homo sapiens
ctcatcctgacgcagtcggtggagaatgttggagtccggggtgacctggtttcattgaagaaatctttaggccggaatcgactccttcctcaaggactggctgtatatgcatcccctgaaaacaagaagctgtttgaagaggagaaattgctgagacaagaaggaaaattagagaagatccagaccaaggcaggtgaggcgacagtgaaatttctaaaaagctgtcgcctggaggtagggatgaagaacaatgtcaaatgggagctgaaccctgaaatagttgcccgccacttctttaagaatcttggtgttgtggttgccccacatacattaaagttaccagcagagcctatcacacggtggggcgagtattggtgtgaggtgacggtaaatgggcttgatactgt

SEQ ID NO: 14727 - DNA, 451 bp, Homo sapiens
  misc_feature (1)...(451): n = A,T,C or G
ntttgangaccctattgcagtgtcgtggaattcgttgagcccaggagttcaagatcagcatgggaaacatagtgagaagtcttctgtacaaaataatttttaaaaattagatgggcataatggtgctttcctgtagtccttactactcaggaggctgaggcagcagaaccacttgagcccaggagttcgacgtggcagtgaactatgattgactcactgcactccaacctgggagaacttgaccaggggacatttgagcagagacctgaatggtgtgaagagtgagccatgtacatcactggggagcaggttcatgtgggagtcatagcagggaccggtggcagagacaggatggagcagtgacaagaggatggatttagtaaaccagccagagtgcgagatacggagtctactttgcgaaggacacatcttggtctcctcctagtttgan

SEQ ID NO: 14728 - DNA, 468 bp, Homo sapiens
  misc_feature (1)...(468): n = A,T,C or G
catcgacaccctattgaagacatctagaacangcggnggaattcatcacatagaaatcctgcctgagtttctagcctgcctgccttttgtacttattagcccccacaatcctgtgagccaatttcttacaataactttccctgtctctcccaatatctctatctctgtccctctctacacacacacacacacacacacacacacacacacacacacacacacacacacacacacgtgagtgtggggagaagatctctcttcttttctggcccacacactgaagcgccaagatcccgcgtgtctgtatacacctgatagaacacaggagaccacacaaaaagagagcggtgagataaacagctcacactacacagaactgacagtttatacattttttacacatatatatagtgagcgcattgtgtgtgagacacaccatgcttaagaagcaccaaaaagtcatgtgag

SEQ ID NO: 14729 - DNA, 470 bp, Homo sapiens
  misc_feature (1)...(470): n = A,T,C or G
agaaaaaatttgatccccnttnantttgattccctattcagtgtgctggaattccacccacagcttgctcttctatctccacaacgtgagcctggaagaggagaaaatgtggctcctctggagcttggcagaccacttttcggtctttgcgtgatgttccttatcccaaagacggtgagacagggctgaaatcaggtggcttctgccaccctgagccctagacccatgggtggctaaatccactggactgtgaagactataatttatttccataatttatttggagattgaggaggctttggttgcacttctttggctggtgggtaatgccaggggtggggtgggcacaggccctcaagagccccttttgccttgtagtcctacaccttgccctgcctgggctttggtgcagactaggtgtggatttgagctctgtgatctatgtctgctgcctggctcctagatggctn

SEQ ID NO: 14730 - DNA, 498 bp, Homo sapiens
  misc_feature (1)...(498): n = A,T,C or G
gggcgtnnnagggcggccngggttttgatncccatcgagatctctgtccatgtggtggaattcgaactccagagacactcctgaaattgtcctaagtcaaaggagccaaacggtgtacgagctccctctctgccgtcccctctgagagcagccatggccctgagtgatgtcgatgtgaaaaagcagattaagcacatgatggctttcattgagcaggaagccaatgagaaagcagaggaaatcgatgccaaggctgaggaagagtttaacattgagaaaggacgcctcgtgcaaacccaacgactgaagattatggagtattatgagaaaaaggagaagcagatagagcagcagaagaaaatcctgatgtccaccatgaggaatcaggcgaggctgaaagtcctgagagcccgaaatgacctcatctcagatttgctcagtgaggcgaagctgagactcagcaggattgtggaggacccagaggtctaccaggggctg

SEQ ID NO: 14731 - DNA, 548 bp, Homo sapiens
  misc_feature (1)...(548): n = A,T,C or G
tcagtgccccccnnnnnnnnnnaattccctacctggagggcacgtgcgtggagtggctccgcagatacctggagaacgggaaggagacgctgcagcgcacggacccccccaagacgcatatgactcaccacgctgtctctgaccatgaggccaccctgaggtgctgggccctgagcttctaccctgcggagatcacactgacctggcagcgggatggggaggaccagacccaggacacggagctcgtggagaccaggcctgcaggggatggaaccttccagaagtgggcgtctgtggtggtgccttctggacaggagcagagatacacctgccatgtgcagcatgagggtctccccaagcccctcaccctgagatgggagccgtcttcccagcccaccatccccatcgtgggcatcattgctggcctagttctctttggagcttgttcgctggagctgggtcgctgctgtgagtggagggagaaactaaataganaggagggagtactctangctgcaagagtgcagtgccagggctctgattgctcc

SEQ ID NO: 14732 - DNA, 561 bp, Homo sapiens
  misc_feature (1)...(561): n = A,T,C or G
nttgancnccatcgtccactatccgtgtggngcaattcaatgtgatcatccagcgggaggtattcactatgaaatgtgcatagaatgtccacctactttcagtgacaagagagaacaaatatcagaaaatccaacagaagccacagatattggttttggtaatcgatgtggaaaacccaaaggaccaagagatccaccttcagaatggacatgattcagggagctagaagacactttaagttatactggaaaattcaggtgccactgaaagccagatttatagtattccatctttaatatgtgggactaacagcagtgtagattgttaccttaatattttttgctgggaccatctacctgccttatactacacttaggaaaaagtattacatatggtttattttgaaacttcaagtattattgccttaatgtctcttaaccctgttacacgctgcttgtagacatgttaatatagtaatacctttatgatatattgagtttaaggactactctttttctggtntatcatggatgcaataatnntgatatgtacagggcaag

SEQ ID NO: 14733 - DNA, 573 bp, Homo sapiens
  misc_feature (1)...(573): n = A,T,C or G
cgccatcccnnnaatcgaacaccaacgaacacctatccagngnggngcaattcgttctggcagcaccgcatcaaggactatcacagttacatgctacagattagtaagcaactctctgaagaatatgaaaggattgtcaatcctgagaaggccacagaggacgctaaacctgtgaagatcaaggaggaacctgtgagcgacatcacttttcctgtcagtgaggagctggaggctgaccttgcttctggagaccagtcactgcctatgggagtgcttggggctcagagcgaacgcttcccatctaacctggaggttgaagcttcaccacaggcttcaagtgcagaggtaaatgcttctcctctttggaatctggcccatgtgaaaatggagcctcaagaaagtgaagaaggcaatgtctctgggcatggtgtgctgggcagtgatgtcttcgaggagcctatgtcaggcatgagtgaagctgggattcctcagagccctgatgactcagatagcagctatggttcccactccactgacagactcatggggtcctcccttgtttcaccagcgctg

SEQ ID NO: 14734 - DNA, 461 bp, Homo sapiens
  misc_feature (1)...(461): n = A,T,C or G
gaaggggnccccctnnnataaanacccctgagacattcgacagagcggaggaattcacagaagatgcacaccttcttagtaaaaactgggagctctagtattaatttgaaaattaaatggaattgatttttgttctagcttagaaaaaacttaaattctaccactacagcctcacagtcctgcagtgctcttctagttttgtttgttttttgttttttttggacggagtctcgctctgtcacccaggctggagtgcagtggcacaatcttggctcactgcaacctccacctcctgggttcaagcaattctcctgcctcagcttcccaagtagttggaactgcaggtgtgggccaccatgcctggataatttttgaatttttaggggagacggggtttcaccacgttggctaggctggtctcgaacttctgacctcaggcgatctgtccacctctgcctccc

SEQ ID NO: 14735 - DNA, 557 bp, Homo sapiens
  misc_feature (1)...(557): n = A,T,C or G
ttggtaccccnnnnnnnnnnnaattcgcaggcctgtaatcccagctactcaggaagctggggcacgagaatcacttgaacccaggaggtggaggttgcagtgagctgagattgtgccactacactccagcctgggcgacagagcaagactctgtctccaaataaataaattaattaattaatacaataaaataacaatgaaaacaaagatgccatgaaacctcactgacattcattcccaattttcccagcatggcctggaatggtctttaacacattctaggtctgtagtgcaattacagctaccaccaacttcaatgggacttaaagtacctaggatcttgtgaaagaaatatttaattttgttcatttttactctgaactcactaaagtatgaggacagagttaaacactttagtaaggtgaaaggtttgaaacatgttgaaacaaaaagatttctttccctccatcagagnggtaagntaaccataaatttcattaacctgaacatcccacttaagtgtggantttggggggggggggtttgctttcgacctt

SEQ ID NO: 14736 - DNA, 407 bp, Homo sapiens
ggtcgatatttaagcaaaatacatctaagaacagctaacaaataactcttctcaaactcacatagagcattcagcaagatagaccacatgtgctgagccatcgttagtattttctgtcctttctctttgactcgtgtatagtgtgctcaaactcttaaaattatacactttaatgattatacactttcatgcatctcaattgcatgtaagttatatttcaatatatttgttaaaagtttataattaaaaaaactgtcctagcttgattcaagaaatcttttttatatttaagaaaatgtaatgttatgtattatcagggcaaaagagaaaaaccatatgattaccttgtcatacacagtaaaagcatttggcacaattgaaaacttttttcatgatttataaaaaca

SEQ ID NO: 14737 - DNA, 551 bp, Homo sapiens
  misc_feature (1)...(551): n = A,T,C or G
ttcccgtgccnancncnnnnnnccatctgtcgcggtgtgtatcttttgggggttcagcgccaccagcgacttgggcctcattcatcgcgcttacatttctccacctcatttgaagaacgagcttcgtagcccacggagctgaggtatatgagctccctgaaagcacaaagcagttatttccatcttcagatcattcagagattatgaaggcacaaaccctgccttcaatttgcttatagtcaagtggagcagacacaagtcaatgattgcagtatagccactgaagtaatctaaaagaggtggggaggccacagcttatgtgaatgactttctcaggagttataaagtgatacagacttatcagcaggttgcaggtgaacatggccttgaggtaaatctgtcccttgctgaatacagntcagtagattggttatagtagttcaggaatagagattntttacaaaaaatacaaggttntgggtggtctggtcctagagtttcttctaaataaaggagaaagatgttcaacaaggctcttatgctgaaatatg

SEQ ID NO: 14738 - DNA, 450 bp, Homo sapiens
  misc_feature (1)...(450): n = A,T,C or G
atcgatttcgatgacactagnccangcggtggaattcatcaaaaagtcaccactaaccctcccccagaagctcacaaaggaaaacggatagagcgagcgagagagatttccttggaaatttctcccaagggcgaaagtcattggaatttttaaatcataggggaaaagcagtcctgttctaaatcctcttattcttttggtttgtcacaaagaaggaactaagaagcaggacagaggcaacgtggagaggctgaaaacagtgcagagacgtttgacaatgagtcagtagcacaaaagagatgacatttacctagcactataaaccctggttgcctctgaagaaactgccttcattgtatatatgtgactatttacatgtaatcaacatgggaacttttaggggaacctaataagaaatcccaattttcaggagtggtggtgtcaataaac

SEQ ID NO: 14739 - DNA, 471 bp, Homo sapiens
  misc_feature (1)...(471): n = A,T,C or G
aggggcaggncgnnccnnaatagaaacccactgatgacnctagtacangcggcggaatttcggcatagctcccttcgtggcttcctcaaatcaggtcttcataaaatttcatgctgattatgcacggcgtccatccgcattccgattaacttgggacagctaagtgggtaacaactcgtgttcactcaacactttccctctgcagcacgctggacagcactctgccatcctgatacatgacccctgctgatgccacagagaataagctgaacttgtatggtttttcaccaaaccatggatagaatcaatatttgtaggccaggcgtggtggctcacccccctgtattctcagcactttgggaggccgaggcaggttgatcacctgaggtcaggagtttgagactagcctggccagcatggtgaaacctcatctctctaacaatataataattagccaggcgtggtggtggg

SEQ ID NO: 14740 - DNA, 446 bp, Homo sapiens
  misc_feature (1)...(446): n = A,T,C or G
ctacgagtcgattacnccagagcggnggaattcgacatacttgaaatccaaggagtctatgactgatgcaattctccagacagaccagactctcacagaaaaagaaaaggagattgaaggtgaggagtgagttaagagattagatggcctcaaaagctccaaaaattgaaataacttgactggataaacatgggaccctttaactagagcaagatccacaaaggtgtgtcttacttgccgaggtcatctctgagtagggcatatgcagtcagcaacaacgacaggtaagtgtataaggaacaatgaggcaacaagataaccccacacaaattttccttctttcttttcctccacagnggaacgtgtgaaagctgagtctgcacaggcttcagcaaaaatgttgcagcaaatgcaaagaaagaatgagcagatgatggaacagaagg

SEQ ID NO: 14741 - DNA, 445 bp, Homo sapiens
  misc_feature (1)...(445): n = A,T,C or G
cttgatttcgatacccttagcccagngcggnggaattcgttgcataattccgtctatggtactaaccattataatcttatccttaatgctgattaatgtgcagtaattcacagacacacagactggagttaaaccacccctcacagcactcatggtttagctcagagtggtccgagcaagcactagtgacagaaactgcactttctagcatggccattgctccagcgtggagacgcggaccaccttctgagtcgtggcaactgcttatcacaaatccgcgggcttcacccagtactacagaaggaaggaggatgtggacggggtcgctggcattggaagctggaggccgctgtggtctgagcactcaccgtggggcacacactgtttgtggtcctcaccaagcctgtagccctgagcacagctgcacgtgtaggattcctgtcct

SEQ ID NO: 14742 - DNA, 452 bp, Homo sapiens
  misc_feature (1)...(452): n = A,T,C or G
nttcgagaccctagtctgtagggcggaattccagaggtttaatttgaagtttatgttcacacactgaaaacttagtttttttgttggtagatccatgtgcatgctagaatttgggacaggcactatttgcataaagtattaaagtcaatttttaaactaagcaaaggtacacgttgtaacggtggggcatctgtgaaaaagatgtccctttcataatatatgcaatatattccagatgttttgagagattacagaagaggaggcctgcttcacttgcagataagtttattataattctccagaaatgtgcaggatgtgcattagcaaattgcactgtacttttcactccagcctgggtgacagagcaagactcccgtctcgggggcttaaaaaaaaaaaaaatgctgtatctaaatgaatctgtgtaattgggcccagatgtgggtttgctn

SEQ ID NO: 14743 - DNA, 522 bp, Homo sapiens
  misc_feature (1)...(522): n = A,T,C or G
tctcgcacaggccgcttttgaagaccaaatgctgtaactactatgaaagtgctttgtaaattgctgtggaaagtgtgagctactcaagcacccgaggctgtccctccttgctcacatgtccagcccaattctcccttagtgagaacagcactcagtaggtgctgtgtgtgtttgtgttcaattaagaaattccagaataaataaaaatgaattaattcaacaaacattttctggggcaccgacaatctgcccagtgcaccaggctaggtatctgatacaaagataatgaaaacagtctcttggaacctaattggggtcctcatttgaccaggaatttctttcgtcccgttttaagccaaccagttttgtccggacaagacaaaaacaacttgggctgctttagagaagcccagctcagtgtagacaatagctgcccagcctctgaaaggggctgattggattatgtggcanatggaggtgcagggatgacttggacggtgacaaatgaagtgggcgagacct

SEQ ID NO: 14744 - DNA, 468 bp, Homo sapiens
  misc_feature (1)...(468): n = A,T,C or G
ggggnannaatttgangccccnnnnaatcgagnatccctagtccgtgtggtggaattcggcaccactgtcccaacactcccatcatcctagtgggaactaaacttgatcttagggatgataaagacacgatcgagaaactgaaggagaagaagctgactcccatcacctatccgcagggtctagccatggctaaggagattggtgctgtaaaatacctggagtgctcggcgctcacacagcgaggcctcaagacagtgtttgacgaagcgatccgagcagtcctctgcccgcctcccgtgaagaagaggaagagaaaatgcctgctgttgtaaatgtctcagcccctcgttcttggtcctgtcccttggaacctttgtacgctttgctcannnnaaaaaaaaaaaaaaaaaaaaaaaaaaaaaaaaaaaaaaaaggccccctttaaattaaaggggccctttaaaccc

SEQ ID NO: 14745 - DNA, 469 bp, Homo sapiens
  misc_feature (1)...(469): n = A,T,C or G
attgaggcccctnnnnnnatcgcgnatccctagtccagtgcggtggaattccaaacaaaacaaaaatctgtgtaactgtaaaacattgaatgaaactattttacctgaactagattttatctgaaagtaggtagaatttttgctatgctgtaatttgttgtatattctggtatttgaggtgagatggctgctcttttattaatgagacatgaattgtgtctcaacagaaactaaatgaacatttcagaataaattattgctgtatgtaaactgttactgaaattggtatttgtttgaagggtcttgtttcacatttgtattaataattgtttaaaatgcctcttttaaaagcttatataaatttttttcttcagcttctatgcattaagagtaaaattcctcttactgtaataaaaacaattgaagaagactgttgccacttaaccattccatgcgttggcacttatcn

SEQ ID NO: 14746 - DNA, 456 bp, Homo sapiens
  misc_feature (1)...(456): n = A,T,C or G
ntttgangttcactagcccangnggnggaattcaccgcagctgcgccgcggagctgccgctggtgccgtgcaaccaggccaaggcgtcggacgtgcaggacctcctgaaggatctgaaggctcagtcgcaggtgttgggctggatcttgatagcagttgatatcatcattcttctgatttttacatctgtcacccgatgcctatctccagttagttttctgcagctgaaattctggaaaatctatttggaacaggagcagcagatccttaaaagtaaagccacagagcatgcaactgaattggcaaaagagaatattaaatgtttctttgagggctcgcatccaaaagaatataacactccaagcatgaaagagtggcagcaaatttcatcactgtatactttcaatccgaagggccagtactacagcatgttgcacaaatatgtcaacagaaaag

SEQ ID NO: 14747 - DNA, 475 bp, Homo sapiens
  misc_feature (1)...(475): n = A,T,C or G
gaggcacggngccnccncaactgaaaccccactgatgacnctagtacagnccggcggaatttccggttacctgactaccctcaatgaaaacacctgagaaaaagaaaatgtaaacttttgaagggctttcccacttaatccaacccagatttctattctacttaaaggatttaatcggcatttgtgagaaataatagtacctgcgtcactgagttgattgatttgggacatagacggttgactttcccagacagcagcttagcggaaagcaacatcccaaagacggtgtcgcatgtcctgagcctgcttgtcacctgggcctcacggtttctcgtcagccccgtcactgatgggaagcagcactgatgtgtgagggcaaaaaggacaccgctggagtcaagcgctcccctgcctgtgacccttttccaacaagctgatgctgagccagcggcctgctttagccctcatactcctn

SEQ ID NO: 14748 - DNA, 469 bp, Homo sapiens
  misc_feature (1)...(469): n = A,T,C or G
gcnccgtccatcgagactctattagaaggcctgtagncccggccactcctgaaaaacatcgagctagaaaaagacaggcatggctttgggaagaagacaagaatttgagatctggcgtgaggaaatatggagagggaaactggtctaaaatactgttgcattataaattcaacaaccggacaagtgtcatgttaaaagacagatggaggaccatgaagaaactaaaactgatttcctcagacagcgaagactgattgtgtttgtaaaagcttgatgaaaggacagttaagtattttgatcactgcattttgtttgaaacttgtgtcattgatgtaatttaaaacttttgtttaaagcattacagtatttttctgtgaccatcaattaatgagggtttgtgctaccagagttaaagcatatgctatcattgtattctttaagaaccttattttgataaaatgtaaatttg

SEQ ID NO: 14749 - DNA, 451 bp, Homo sapiens
  misc_feature (1)...(451): n = A,T,C or G
ntttgagaccatagaccagcgtggtggaattccagatccctgcatgtcactgagtccaccatgctttacagaagaagacagatttagtctggaagctcttcaaacaatacataaacaaatggatgatgacaaagatggtggaattgaagtagaggaaagtgatgaattcatcagagaagatatgaaatataaagatgctactaataaacacagccatctgcacagagaagataaacatataacgattgaggatttatggaaacgatggaaaacatcagaagttcataattggacccttgaagacactcttcagtggttgatagagtttgttgaactaccccaatatgagaagaattttagagacaacaatgtcaaaggaacgacacttcccaggatagcagtgcacgaaccttcatttatgatctcccagttgaaaatcagtgaccggagg

SEQ ID NO: 14750 - DNA, 563 bp, Homo sapiens
  misc_feature (1)...(563): n = A,T,C or G
aatcgagcactatcgcagngncgngcaattccaaaacaaaatttgttatttgaatgggtttttcttttttgaagaagtctaataaatctagaaggaattagaggattagaataatcaccattttctggaccttaatggaataatgggtccagaaaacatgatcttcaatgggtactacaactaataggtgaaatattttatagcgagatttttatggtggatctatcaaactggccacctctgaaccctttgatctgttttaaccttaataaaaatgggtctatcagacaacacacttcctgacgtaatgcaataggaagtccacaccaccatctacaaagccttattgctggaataatgaactgaaagcagacagggactagatgaacagtatatnggcatcccttggtatccatggggaattggttccaggatcctccactgatggtaaaatctgaggatgctcaagtcccttgtataaaatggcataggatgtatttgcatattacctactcacatctttctgtatactttanagtatctttagatcacttatacctacg

SEQ ID NO: 14751 - DNA, 541 bp, Homo sapiens
  misc_feature (1)...(541): n = A,T,C or G
ggaaacaaaattgannccccctcgannccctattcagggggcattccaacctcagcctcccggttcagttcccctgcctcagcctcccgaatagctgggactacaatagcccacctctacacccggctagatttttgtatttttagtagagatggggtttcaccatgttggccaggttggtcttgaaatcctgacctcaggtaatctgcccacctcagcacccagccaggtggtggtagttgttttacagcctgtgtgagacattcgggtgagccccaggaaatgaaagaatgtgcttatttgggggagggggaggccttttttcttagacaaaattgggcattcccaacttacacgcatttagtgcataagctgacatttcaatgagattgtgaaatgacaatgggaagggccctgaaaaaaacatcaagcataaaaggcctgggaggccgggcactgcggctcangcctgtgaaatcccagcactttgggaggatggngtttcgtctctactaaaaataccanaatgagttggttgtga

SEQ ID NO: 14752 - DNA, 472 bp, Homo sapiens
  misc_feature (1)...(472): n = A,T,C or G
tgggggcannnnagggggnnaatcgagnacattagnatagtatggcgttattccagagaatcatcaaggagagggagctggagctgcagaaggaacagcggcggcaggaggagaacgacaagctgcgccaggagtttgcccagcacgccaacgccttccaccagtggatccaagagaccaggacatacctcctcgatgggtcctgtatggtggaagagtcggggaccctcgaatcccagcttgaagctaccaaacgcaagcaccaggaaatccgagccatgagaagtcagctcaaaaagatcgaggacctgggggccgccatggaggaggccctcatcctggacaacaagtacacggagcacagcaccgtgggcctcgcccagcagtgggaccagctggaccagctgggcatgcgcatgcagcacaacctggagcagcagatccaggccaggaacacaacaggtgtgactga

SEQ ID NO: 14753 - DNA, 467 bp, Homo sapiens
  misc_feature (1)...(467): n = A,T,C or G
gagcccggncccnccccactgagaccactggatagccgttggaattccacaatccatttctacactttacaaaaaaatttttaaatgtacaattaaatttttatttaccacagtgttatttttatcgtcataataaaaattatatacgagtataaatgaaattcatttctaaattcttaataaatattttctcatgccaggtgtggtggctcacgtctgtaatcccagcactttgacaggctgagcgagggagtggatcttgaggtcagcagttcgagaccagcatggccaatatggagaaatcccgtctctactaaaaatacaaaaattagccaggcgtggtggcatgtgcctgtaatcccagctactcaggaggctgaggcaggagaatcgcttgaacctgggaggtggaggttgcaatgagccaagatcaccccactgcactccagcctgggcaacagagcgag

SEQ ID NO: 14754 - DNA, 474 bp, Homo sapiens
  misc_feature (1)...(474): n = A,T,C or G
cccccttagagatccctagtccagtgtgagggcattcccaaaacagattctcagaaaataaactaagaaaatattcctcaagtctctataaatacatattttatcacatgtgattgtactatatcaatctcattttgaatctcattttgagagatgcacttacactgtttggtatggcgttttgtattacaggaatgcttttcaggactagcagttgctaagggaaggaaatgcttaagcttgtctgtaaacattaacttcagcatatacacattaataatggcttccccacctgtaaccaacctacttacctggcaggttttatttcctaggctaaggatttttgagaactctatcataaaacagctgaattatgacctcctttggtttttacaatatgcaaatacagctaaatactcgttaatattctgcatttaaattcttcttcttaataaagacatgcactttattccn

SEQ ID NO: 14755 - DNA, 464 bp, Homo sapiens
  misc_feature (1)...(464): n = A,T,C or G
cggtgnattgattcgatactattagcccagngcggnggaagtcaaggcattgtgaaacaggtgtgtgtagtgcaaaagcaaaaagagatactttgtccttctctcagtgaacgtgatcttgaaggcctgtgcagaggccaggaagagcctggcgcttacctacttgtggttgactcttagggtgtctggaagggaacattgccggggggaagagagtgagcatatcatgaagggagctgtatgctgcagcgaggaattgtgggtattctctgcaaaggtcatagggagtgaacatgaaacagggcttattgaaggaataagccccaggtggcggagaaggaacagaggtctgtaagcatgagttttggagacaggtcaggagttcatttccaaactgttgagtttgagaggtctgggctgcctgtgtagagtggaccagtcggcagtttgtagagacgggcttt

SEQ ID NO: 14756 - DNA, 478 bp, Homo sapiens
  misc_feature (1)...(478): n = A,T,C or G
atcagtttctcttcganggcctacttaaacatggtaaaagcccacnnnaaaagaaaggattttgtctgcttaatttattactgtattcccagctcctaaaagagtgtccagcacttaggatctgttggtaagtacctggtgaattaattaaccagtggtgagactttggaaagcagctagtccatctgtaagattgttttctcatctgtgagatgagtcagtcagattagatgttttctaatcttattctacatttaaaatggtatatttctataagaaatgatcaatgaaaaatgtacattcctttttcatatccatcacccatctcacatcttacttcagtgcctatgtgatctgggtgagtataacccggtgtacaaatgtactaagtgatatgagatgacttcagtagtccagggactgtttcttcccccactctgtaaagagctatttgcttaatttaatgtacattatacag

SEQ ID NO: 14757 - DNA, 463 bp, Homo sapiens
  misc_feature (1)...(463): n = A,T,C or G
gcgtgnaatcgagtccattacntcagtgcggnggaattccctgaatcagtcatttctgtgattgtcaaatgattgtgtaattcttccttttacatttattaggagctttcccttctccctcagtaattaatccatagtacggatccttattgtatcaaatggatcattattaaataggttataatctgatgctcaaactctcctggatttgtccaggagaatccctctcatctgggtgctaattcaagctgtgatttagggcaagtcccctcctctctttgaaccttagtttcctcatgtgtaggagacagttaagtaccctggtttacaagggtgaatgaatgaaatgcacccaggttccgagatctcctgggctgggatggggtgatttcaggactggtgtagtcctgagaggtccaggattttacggtatttcttgctctcctctgcaggcatccagggc

SEQ ID NO: 14758 - DNA, 541 bp, Homo sapiens
  misc_feature (1)...(541): n = A,T,C or G
aactcgatcaccatnctgagtggngcaattccgnggattctgagtcgtatggaacctcaaagtctttgtgacaatggaaaccaaaaaattaattggtaaaccgcttcaaccagcaagacctgttcgtcatctgacttcttccccaggagcagtgttccctttcaactttcaaaacgaatatccatgcaacactcagtgcatacaaagtggagttagcagatgtaagacgaatggaatgcaagccttttctcaaggtcttaatgagcaacagcaacagcagtctccagttaagaaagagagaattaaatacagcagagatttcctggtgaagctctcaagtgtttccatctgcagaaaaaaaccagactttctgcctgatcatcccattgtactgcaaaaaccagaaaacaaccaaagttttaagtagcattctaagaacagatgaatttaagtttggacatctgcaaatgaggtggatctagcaacaataactgtaatggactgtgacaattcaatttattcttaattctgatgggtggcn

SEQ ID NO: 14759 - DNA, 478 bp, Homo sapiens
  misc_feature (1)...(478): n = A,T,C or G
caatgatngactagagncatcgncgagngngcnggaattcaaactggccagggatggaggcgcacacctgtcatcccggcttctcaggaggctgaggcatgagaatcgcttgaaccggggacgcaaatgttgcagtgagccaggattgtaccactgcgctccagcctggacaacagagtgagactccatctcanaaaaaaaaaaaaaaaaaaaaaaccccccccctttttttttaaccccccacttttgggggaagaaagttaaaaaaatttatctggtgggccaaaaaaaaagggccctttgccttttttccaaaaaaaattggttttcccttaaaacgaactggggggtgggttttcccggttggaaaaaaaagtttaaaatttgggggtgggggagggctaaaaaattgaaaagggaaggggggggtttttttttaatttaaaagccaaccccttacccctttttttaaggcccg

SEQ ID NO: 14760 - DNA, 553 bp, Homo sapiens
  misc_feature (1)...(553): n = A,T,C or G
aggaaaaaaaaaacttgattaccccncttgatgcaccgtctcgngnggngcaatncgaaggtctgcagcatgggactggttttttcttcccctggaatatcccagtgttttcagatatgtgtattttttagagaggaggactcttccctttcctaccacaccctggacttaggatgttgaagggaaccacttttgaatccccagaaacgagtcatattctgggttggccggagctctggggagacataaaaatgttctgctcagctgcggcctgggccacgcacgccccatagttgcttgcccttgtcccaagcctgctttcctctcctgacccttgcagttcctcacccacgctcagcagttactggggagccctggcctctcacaatgcatcccctctgctttccgtcagctggctcctggctgtgtaactcccagtcaggccccaaacaaaaaggccagaaatgtgttccagctgcagcccgtgcacatctgggaatgtgttcatggaggtggtatgtccgaggcatctgcaccctccagccaggctgcc

SEQ ID NO: 14761 - DNA, 488 bp, Homo sapiens
  misc_feature (1)...(488): n = A,T,C or G
agggatccggncttctgnatccgagngttgacagncntgngcacnnncntnaganngnnnaaccggacttgaatgtcacaatattatgcctttttcaaaactctaatggaaatttcaatttataaaatcatgtaggccattggtatatttgaaatttgtccttttaaagagagttttgctgttgctcctagtgaaagaaaaatctctgtacaaaggagaaaaagaaccccacttattcttagttaatactaaaatatatagcaataaattgctggttattttttctacatctattttgtgtacttgtacacagcgtacattcttttaaattatatcgtgtatatagctttagtattcggttacatgattcacagacccctgaattccaaaatattatggataaacattaccatttatatgctacaaattagtctgattccatctttgaaaatgtcttaaagtataaaataattaatttgctttttttt

SEQ ID NO: 14762 - DNA, 447 bp, Homo sapiens
  misc_feature (1)...(447): n = A,T,C or G
gggttttaacctacnagcatcgatatctggaagaanncnnaccccattatctatgacattcgggccagacctcgaaaaatctcctcccctacaggctccaatgacctacagatggtgaatatctccgtgcgagtgttggctcgacccaatgctcaggagcttcctagcatgtaccagcgcctagggctggactacgaggaacgagtgttgccgtccattgtcaacgaggtgctcaagagtgtggtggccaagttcaatgcctcacagctgatcacccagcgggcccaggtatccctgttgatccgccgggagctgacagagagggccaaggacttcagcctcatcctggatgatgtggccatcacagagctgagctttagccgagagtacacagctgctgtataagccaaacaagtggcccagcaggaggcccagcgggcccaattn

SEQ ID NO: 14763 - DNA, 451 bp, Homo sapiens
  misc_feature (1)...(451): n = A,T,C or G
aatttgagaaccctngnccttgtagtacattagtacagtgcggtggaattcgcagtgggtcaggactataatcctaagaatagggtggctaaggtgagaggctgaggtgggatgattgcttacacccaggagtttgaggctgtagtgagctatgattgtgccactgcacacaagcatgggctgcagagtgagaccctgtctgtaaaaaagaaaagttgaataaaatttatttccttatttcactgataattacattgcaaaagttttttcttcccctctagtgtgagctttgggtctttattaagaattgaagttaatcataatagtattttgtatgtgctttaaccgtgaatttatttttataggatttctataattggcctgatgaatcctttgatgaaatggacagtacactagctgttcaacaggtaataaaaatagtttcttttcn

SEQ ID NO: 14764 - DNA, 590 bp, Homo sapiens
  misc_feature (1)...(590): n = A,T,C or G
cgggccnnaggnnncnnntttgaacccccttcgaacactatccagaggggcaatcccgagacagcagcgcctggaggagctcgctactgagaaggaggcggaggagagccatctgcaagacagcgtgagcctgctcaccttcatcctgctgctcacgctcaccatcctcaccatctggctcttcaagcaccgccgggcgcgctttctgcacgagaccgggctggccatgatctatgggctcatcgttggggtgatcctgaggtatggtacccctgctaccagtggccgtgacaaatcactcagctgcactcaggaagacagggccttcagtaccttattagtgaatgtcagcggaaagttcttcgaatacactctgaaaggagaaatcagtcctggcaagatcaacagcgtagagcagaatgatatgctacggaaggtaacattcgatccagaagtatttttcaacattcttctgcctccaattatttttcatgctggatacagcttaaagaagagacactgtntcagaaatcttggatctatactggcctatgccttcttgggactgctgttcatgcttattattgaan

SEQ ID NO: 14765 - DNA, 434 bp, Homo sapiens
cctgattagtttttggtattgtgctccaataatgtcatagttttaagagataatttttatgagaattgactaagaaccagtatccttcaactacttcatcaatgtttggtataatataaaagcacactatcatctgaaaaagctattaaatacccctctttttccaaatatctacctgtgtgaagccaggttttacaacatgtattgcagcaagttgaatgcagaagcaggtatggtaattcagctgccttctatcaagctaaacattaaagagatttgtagaactataaaacaatgctactctccttaccaaattgttttagaaaatagctttataggctaacattattgttaattgtcatttaattgttttgtcatttaaaatattttaaattgttttctggtagtttcttttttggatattctatgggtat

SEQ ID NO: 14766 - DNA, 537 bp, Homo sapiens
  misc_feature (1)...(537): n = A,T,C or G
aactcgaacaccgnctgaagggccgacttncggagctgacttaaaatatgacacaaatgaggagataaacctattccttattgtccagagggttgaataaagtaataaaactatgtgggaatgagagcaagcatggctatggacaggaaggcagctcaaataacttgagctgttctacagtgtcttgggaggaataagctgcttctctcaccatatttgttcaactcgtccaagattctgtaaacatgttcctgaatgggatgagataatggattagatacctcttaggttccacctagttttaagactatgatataaagcacatcagagctcttcaaccaaacataaggtaataggagttatgttattttcagtctatggaatggatgtcaatctcatctcttttgattgtcaagctagttcccatttcttcatggttttgatcaaatctgtttaagctgtctttatgatctggactaggtgagcttaaagtgatcatacctggctgataaatactaattgcatttctaagtaggg

SEQ ID NO: 14767 - DNA, 466 bp, Homo sapiens
  misc_feature (1)...(466): n = A,T,C or G
gcgggnnatcgatttcattacnattagcccangcggtggaattcctctactaaaatacaaaaaattagccaggtgtggtggcgtgtgcctgtagttccttctactcggcaggctgaggcagggcaattgcttgaacccacgaggcagaggttgcagggagtcaagatcgtgccactgcactccagcctggtgacaaagtgagattccgtctcaaaaaaaaaaacaatataaaaaaaaaaaagggggccgttcgtgattagggggccgtttaaaccccgttgataaccctaaattggtcctttatatgcccacccttttgttgttggcccttccccggtgctttttttgaccttggagggggccattcccattgtctttttttaataaaaggaggaattgccttcgcattgcttaggtgggggttattctattggggnnctggcgccccttgtacactttaaaggct

SEQ ID NO: 14768 - DNA, 481 bp, Homo sapiens
  misc_feature (1)...(481): n = A,T,C or G
ccccccgccccnnnnnnntttggagaccttaggccgngcggtagaantccnttatagatagcttatccactgatgtggaatgggacaggacagaactcaaagtcatccttctgctcgcctgaggcaaatgtatatctgattgcttcctctgcactattgtttacgttatcttatgtaaaattgcagattcccttagccggacaagtgacagcatgaatgactatttcctctactcaccctcctatgaaaattgtatattcccccaatatccatcctttcccctttaaatattgaagccctcaaaattatctttggagaaaggcatagacctgtctccccagtgggtgtccttaactttggcaaataaaccccctaaaatgattacaacttgccttggtcattttcattgatttataccagaatgatgtaaataactgattttcaaagaatcatggtatgtgtcccaaagtggtctacaggg

SEQ ID NO: 14769 - DNA, 497 bp, Homo sapiens
  misc_feature (1)...(497): n = A,T,C or G
aggcaggcccattgaaaaccctnaactgagtatcatcaggaagngcggnggaattccaattttggaggtggtggaagctacaatgattttgggaattacaacaatcagtcttcaaattttggacccatgaagggaggaaattttggaggcagaagctctggcccctatggcggtggaggccaatactttgcaaaaccacgaaaccaaggtggctatggcggttccagcagcagcagtagctatggcagtggcagaagattttaattaggaaacaaagcttatcaggagaggagagccagagaagtgacagggaagctacaggttacaacagatttgtgaactcagccaagcacagtggtggcagggcctagctgctacaaagaagacatgttttagacaaatactcatgtgtatgggcaaaaaactcgaggactgtatttgtgactaattgtataacaggttattttagtttctgttctgtggaaagtgtaaagcat

SEQ ID NO: 14770 - DNA, 565 bp, Homo sapiens
  misc_feature (1)...(565): n = A,T,C or G
ganttttccanaaggnaaaaaattttgaaaccccctcgaaccacactccgtgtggtggaattcgtgatgtacccctcctcctgtgtgctttcttccccagcaagccacccgaggggactgcctggccttccagatgcgagctgggttgcttccctgagggcccccgctggccaaggcctgtggacgacgctggcggcccagcctgggcaggtttcagggtgccagtgggaagcctgatgggtgctggtggcctttcccccgtggattggtctctggcccagcccagtctcttctcaggggcagggggtggaggttggggtcaccggcctgcttggcacccccatctgaaagagcagcacttctcagctattaaaggccccctggatngaanaaaaaaaaaaaaaaaaaaaaaaaaaaaaaaaaaaaaaaaaaaaaaaaaaaaaaaaaaaaaaaaaaaaaaaaaaaaaaaaaaaannggggggggcccttttaatataaggggcccctaaaacccccggtgaaaccccctggggggttttttatggccccccatttttggtccccc

SEQ ID NO: 14771 - DNA, 439 bp, Homo sapiens
ttaaggggatgaccatagacttggacggcgtattcctggactgtaatgcttggctcttctgagacgtctgttggcttttcacacaaccacttcactcttgggttctctgtcacgtccagaatctcccccttccaaaataataataaaaagcatggtggaacttgttaagaaaatccgagcccaaatcctgtggcagttagggagggttgagtactagtcgcgaacgacttgtggaatgcagtatccctctgggcctgggatattgtggatgataactgtgccatctgcaggaaccacattatggatctttgcatagaatgtcaagctaaccaggcgtccgctacttcagaagagtgtactgtcgcatggggagtctgtaaccatgcttttcacttccactgcatctctcgctggctcaaaacacgacaggtgtgtccat

SEQ ID NO: 14772 - DNA, 440 bp, Homo sapiens
  misc_feature (1)...(440): n = A,T,C or G
gttgaggaccctngnntttgacgaccttagtccatgcggtggaattcgtttcattcttctgctatggctctggtgacttcctgataattctgtccgagcccctgtgtccagttccaggacctaagaatggaagagctctggaggctgaaggtggaagatggatccccctttcagggacagtgaaaggagggttaatctttcctgaagctgttagtctggtatctattatcacacatgagaattagaaaccttgcaactttagaaatagtatctgtgtagtaaatgctggctgtgtaccaatttgtatagcttttaatagaaatatcttatttttggatggaaaatgtgtgtaagcttgtgactaaaatagttctggatggaagaccattcagtatcttctgaaaaaaaaattgtcttctggaactaaaacatgaaaaaag

SEQ ID NO: 14773 - DNA, 467 bp, Homo sapiens
  misc_feature (1)...(467): n = A,T,C or G
attgagaccgttgacangcggtagatgacccttagaccgngcggaggaattcggcactaccagtcactgatctacccagatgaagctcgcttcttccctttcgcttatgctccacagccactccatcggcaagtcctataggttctatggtcaagcatgtgctgaagctgatcggcataccaccctcagccgagctgccctcacctctctcctgcaccctgcaggatcccccatgctattttccctgcccttctcttacctccctgttttgtattctccataagcagccagagtaacattttccagatgtaaaccaaacacactcctcacccatctcaaaaccttccagtgttttgtcttcatatttaaaataaaatccaagtccaggcacggtggctcatgcctgtaatcccagcactttgggaggccgaggcaggtggatcacttgaggtcaggagttcgagacc

SEQ ID NO: 14774 - DNA, 475 bp, Homo sapiens
  misc_feature (1)...(475): n = A,T,C or G
gctgganttnnnaatcgattgccatacttcagtgcggtgaattcatctttatgtgacataaaaacagtttctggcacggtggctcacgcctgtaatcctatcactttgggaggctgaggcaggtggatcacctgaggtcaggagtttgagaccagcctggccaatatggtgaaaccccatctctacaaaatttgcaaaaagtagatgggtgtggtagtgggcgcctgtaatcccagctactcaggaggttgaggcagagaatcgcttgaacccggggggtggaggttgcagtgagctgagatcgcaccactgcactccagcatgaaagagcgagactcaatctcaaaaaaaaaaaaaaaaaaaaaaaaaannggggccctttaaatttaaagggcccctttaaaccccgttgaaaaccctgaaggggccttttaagtgcccaccctttgtttgttgcccccccccccggcctttt

SEQ ID NO: 14775 - DNA, 470 bp, Homo sapiens
  misc_feature (1)...(470): n = A,T,C or G
tgtgggntnnnattgattgagttcataggacangcggnggaattctttctgttaggatgatgaagaagctctacatgtaaatattggtgatggttacacaatagtgtgactgtacttggtgccactgaattgtacacttaaaaacagttaaaggggtaaatttcatgctatgtatatttcattacaattacaaataaaagactggggggaaggagtaagggtgtgggagcagggattccagttagatcctatagcaggtagccagataagagatgagtatggcagtgaagatggaagtattcaaatttgagatacgttttagaggttgagcctgtaggtcctgtataagctatagaagagaataatcatgagggacccctgtttttgttctggactgccaggagagaagtggttatttcctgagacagggaaaactgggaaaggagtgggtttggggaaaagcatcactn

SEQ ID NO: 14776 - DNA, 546 bp, Homo sapiens
  misc_feature (1)...(546): n = A,T,C or G
ggtaagannccctgatcacanctggaggggcgacttcgnnctaaaggatgatattttagagatacttgatgatcggaagcaatggtggaaagttcgaaatgcaagtggagactctggatttgtgccaaataacattttggatattgtgagacctccagaatctggattggggcgtgctgatccaccttatactcatactatacagaaacaaaggatggagtatggcccaagaccagctgatactccccctgctccatcacctcctccaacaccagctcctgttcctgttccccttcccccttccactccagcacctgttcctgtgtcaaaggtcccagcaaatataacacgtcaaaacagcagctccagtgacagtggtggcagtatcgtgcgagacagccagagacacaaacaacttccggtggaccgaaggaaatctcagatggaggaagtgcaagatgaactcatccacagactgaccattggtcggagtgccgctcagaagaaattccatgtgccacggcagaacgtgccagttatcaatan

SEQ ID NO: 14777 - DNA, 462 bp, Homo sapiens
  misc_feature (1)...(462): n = A,T,C or G
atcgagaccttagtcagngcggttgtattcgcgcgcgtccaggtcagcaccttcctgtagggcactggggctagggtcacagcccctaactcataaagcaatcaaagaaccattagaaagggctcattaagccttttggacacaggaccccagagaggaaaaagtgacttgcccaaggtcgtaagcaagctactggcatggcaagagcccagcttcctgacggagcgcaacatttctccactgcactgtgctagcagctcagcagggcctctaacctgtgatgtcacactcaagaggccttggcagctcctagccatagagcttcctttccagaacccttccactgcccaatgtggagacaggggttagtggggctttctatggagccatctgctttggggacctagacctcangcggtctcttggtgttagtgatgctggagaagagaatattactggntt

SEQ ID NO: 14778 - DNA, 485 bp, Homo sapiens
  misc_feature (1)...(485): n = A,T,C or G
gagggannggccggnnaggataaccctggacctttgcctagncngctancgnagnnccngnaannnantgantagaagnntaacttaggactattcagtatttttgtaacaaatagttgtcaatcacagcagcctagcttcaatcaatcacaggtggcgatctgattagaccacattcaaataaggcaaagccgaggtgtaaccagtcaagctgtctctgtacctcacttcagttttgcccctaaatgttgcctgcccagaatgtggactggagctgtctgaacctcgtctggttctgagggctgcctgatggatgaattgttttttgctcagacttggctagatttaatttaacagcagagaccttctggcccacagtgcctaaaaatatttactctttggctgtttcctgaaacaaattgctgatccctgatttaaagcataaatgctaagtcagacctgagttctattcctggctctgacat

SEQ ID NO: 14779 - DNA, 480 bp, Homo sapiens
  misc_feature (1)...(480): n = A,T,C or G
attggagacactgtcgagngccgcggaattcttttgatcaagatgataataatggccttacttgggtttttatcgtttatcaaatcttacatacaaaagagtggaagtattcctttacaaaatttctaaggaaaatatttcttccaatctatcacaattatagaatggatatatgtttctgaaaagtttttgaaagaaagcaaaagttctagaactaaaagtaagctggtatttaatatcccgttgatatttagaaaagattgttaataagaaatggaggatgcatttagtactatttttatccactagttcactttcagtacagntatgtatacttgttttgattgagagtgtgacatacatgttaaatcagattagcttgtttcttttaaatatacatatacacaaatacatataattttttctcctttttgttgngcatatctctatgcatttttaaacttttagatttgtgaatgg

SEQ ID NO: 14780 - DNA, 447 bp, Homo sapiens
  misc_feature (1)...(447): n = A,T,C or G
aactgaagaccattagaccangcggnggaattcggggacggtgccgtggggaaaacctgcctgctgatgagctacgccaacgacgcctttccagaggaatacgtgcccactgtgtttgaccactatgcaggtaagaaaaagtgggaaactctctgcatccagacaaacgatgcagggggcgagaccctaagttcagaggggcctggctcatttctaatgtcagtattgggtgcgggcctggcagtaaccagggagcttagcgtagcatacaacccaggacttgactgttggtagaacaatttgtgcatcaatgtgtatggtaacacttttcccccgtaaaacgaatggcaacgccaggaaaatactctgacgtgccctctatatttgggggccagagcttttactcaacatttgcctcaacattcattaaagttttactgtgaacat

SEQ ID NO: 14781 - DNA, 489 bp, Homo sapiens
  misc_feature (1)...(489): n = A,T,C or G
ctccgaaaccctccgaangncataatgataacgttggcaagngncgnggaannccccggatcctgctaaggtgcagacataaacgagtatcatccattattctggaggttataagatatgcaccttgcgcaattacccctgcaatcacaccattattgtagattggcccttagagtatcttttcaggttttttggcatgtctgacactcatggctctacttggacccaccaaccctgctcctatggctccacccagaagccattcagcctagaggacagctctgaccccccctgtgatttcatacaatcagcaacaagtaactgttacctcaccatccccaccccttctgccagactgcctttgaaaaacctctaacctgtgagcacgagatgattccagaacaaactctgtctcccatgtggcatgaccagccttgggtctcttaaactctttctccactataatgccatggtctttatgcagcaggc

SEQ ID NO: 14782 - DNA, 474 bp, Homo sapiens
  misc_feature (1)...(474): n = A,T,C or G
cactgaagactggangcntgngccangngcnggaantcccggaaccagggctggggacaggcagtaagaagtgcagcccaggggtctgctttctctgtttccccacagaagctcacctttctgttgcttaatagagctgccgggatggggcaggactcccgttccccctccttcactctaccacccaagcggtccccaaggtgaatgccacattctttagtgagcttagccctgctgatgtgcggaggtgccttttctagggcccctgtgcctgtcagccaagtctaccctgactatgcagggaatggctttcttctcttgcccgttggcgttggcggcaggcaggggcctagatgttggcttcttcactttccctccctggctccacagatctcccccagttgcaggctctctggttccttgaacttccaaagataaataaatagtgattgcaaatggaggaagggagaaggg

SEQ ID NO: 14783 - DNA, 484 bp, Homo sapiens
  misc_feature (1)...(484): n = A,T,C or G
aactgagaccataactgaggccgctagaacagngcggcggaaagacatcccccacgcccagccttgcccacatgagtcccaaagtgcacaactggggctggcactgaatcatgtacagtcacggaggctgatatggctgacggagccgtgggtaattacctgcccaggttaatagcgcccacttcccgccacctttcatcaaggctcctggagctgccaggcagtaattaaccctcacagcacccttctgaagtcagcactggaggcagacgtgtgatgaaacacgtttattacaggaagcaccagttagcccagatgcttctcatctttggagttgagctgcaggctggagacctggaaggccctcgcagcgcctgctcccatcctctcacctcacgaaagcgcaggaatgtgggtttggagccaatgaaaagtactggaatctggctctgctctgtgaccctggctccatgagggcaggggn

SEQ ID NO: 14784 - DNA, 468 bp, Homo sapiens
  misc_feature (1)...(468): n = A,T,C or G
nactgatngacatctgtccangcggnggaanncactgatctcctttttcttaacccaagngataataaacactattcacaactttcttaaatttttaaattgaaaaccaaggttttttcaaatataaacctacatgattttggtcacaaattgttaacatttgtcgatcctttgtatatactttggatatatattaaaggcaaaactatctcttgactaactgatggattcatttactaaagcacagctgtatgtatttttgaatacatattatgatcttgagactttataaatcaatttttatgactttatgcagttgtatagggattatgccctttcagttctatagggattatgcccttttataatacataatataccacagagattacaaatgttgaggaatgaaagcacttctttgctttggcaatcattttcagaccactatgtgtttgaatcctctggtat

SEQ ID NO: 14785 - DNA, 589 bp, Homo sapiens
  misc_feature (1)...(589): n = A,T,C or G
ggacctccnnttttcgaacacacnctggatggactatgcgagagggcaannnccctgaaaaantgatatctatccttatatttntctacctttttcccgtgccactttttcttatattattttccagatagtattatcatatgtttgtacccgtcacagttttcatagtgctttcaaatacacctttttgatcattaaaataaaaaaataaatcttgctctgttgtataagatcacaataggtaaatattattatccccattttacagaaaggaaaactgagtctttgggaggtgaaataatgtatctaaaggtcaaatgttggatggaccctggacaaaattccatcttccacttgttccctatttcatgtcactttttccagggagaatggaaaagaagacatctgcacctttagaaatggttaggtagttttcagatgatatgaaaagggaaagagagcccctttgtttctaaattcccaggctacccctcatggcacccagtctcattacatatgtgtgtccaagaaaaccactgagaccttgacacaaccttctctaagaagccagtcttgctctttgctattn

SEQ ID NO: 14786 - DNA, 488 bp, Homo sapiens
  misc_feature (1)...(488): n = A,T,C or G
gcaggccccnattgagaccctttgaaggcgtcggaanncgcagcggagccgctgctgcttccccctccttaatcatgtccatctttccccgctctcaactggagcaaacttctattccagacttcagatttccattttcactaggtttttccctgagggcatcttattacccacctcttttttttttttttaagggaagtccccccccccctccaagcccgttttaaaattcaaaccctgaggccctggaggcccctggtattgggggaaaggcaaatggcccccccccggtttcctttccggacccaaaaaaaaaaccacctttgctaaaaattttataaggaccggaccccgcttttgggtggaaaaccttttggccgcttattggggaaagttcacccaggtttttgttttcaaaaaaaacggtgaaacccaaaccagggggggccagttttttaaggggggggggggagggcccctttttcaag

SEQ ID NO: 14787 - DNA, 485 bp, Homo sapiens
  misc_feature (1)...(485): n = A,T,C or G
aggagggccccgaggaggcccccaactgagactaactgagcacattagnccangcggtggaattcgagttaacctctttttaaaaattagaaaagcataattttttaaaatttcccaagggacagcagtatgctacacttataccttagcttgttacagatgatgctaacttgggagtatgtttgaactgtgaagtcaaaagcaattttcatttttcaataaataaggatactacagacacccttctcccaaatgaagttagcattacattagtgtgcaagtcagtcactggtagccagtgtcatgtccacaaagccagggtacagggtaaagaatctggaagtggagaccctttcttgcaagaaaaactcacttcgaccccctatgattccatctccaacctgaccaatcagcactccccacttcccaagcccctacctagcaaattatctttaaaaactctgatgcctgaatgctcagggaga

SEQ ID NO: 14788 - DNA, 506 bp, Homo sapiens
  misc_feature (1)...(506): n = A,T,C or G
agggtgccggnnnttgnntnnancctaggtncctttgnanngncntgantcccctcgaannccncnnnnnngntaattntttatttatactagagatgggggtgtcactatgttgtccaggctggtctcgaacccctgggctcaagtgatctgcccacctgggcctcccaaagtgctaggattacagtcatgggccactgcacccagccaccttttttgagaggtgggaggagggaagagtttggtgtgttttttaagcatcccacttcttttcggaggtgttttcacctgtttttgtttttttattttggtttgttttgttgcctgcatggccctcttcattaagactttatcttttaaagatccccatgggctaatatgagaagatatgtgaatctgctgagctaaactttttatatattttctcccacatgagaccctctcaataaggaattgtatgaattctttaatataccctttagtatttggtggcgggttatattatc

SEQ ID NO: 14789 - DNA, 494 bp, Homo sapiens
  misc_feature (1)...(494): n = A,T,C or G
tgcgcgtngcccaattgagaccctnatgaagacataggacangcggnggaantcgcggctggtggccgacaagctcattttccacaactcttgcttctgctgcaagcactgtcacaccaagctcagcctgggcagctacgccgcgctgcacggggagttctactgcaaaccccacttccagcagctgtttaagagcaaaggcaactacgacgaggggtttggccgcaagcagcacaaggagctctgggcccacaaggaggtggaccccggcaccaagacggcctgaggcctctgtaaccttccaccccctctgcggaaggcctggagccggcagggggaaggtgggaaggaggtcgagctggccttgcgtgggggccaggtgggaaggggatgaggcttgctcangcgtaggggaccagggcagggctctgctccaggactccttccttcttccttctcccgcagccggggagggtttggaaaccaagattggg

SEQ ID NO: 14790 - DNA, 436 bp, Homo sapiens
ctgatttctgccatatttaagttacagaaaccaggcatgcttagaatagtttctaaggtgacagagtgagactccatctcttaaaaaaaaaaaaaaaaacaaaatattttttaagggttttgggaaaaaaaaagccaaaaaaacctgggtttcctttcccattggaaaaaaattccccttttttcctctaaaaattttttcaaaataaaactcccggtaaatttttaatttccgggcatgaaaaaaagcccggacctttaaaagtttttccaaaaataaaaggactttttttaaaaaaaaaagaaaagccttttttttgatatttcaagttcccccttttgggcaaagggggttaaataaagggtggattccaaggtgatgggggaaatccggccccaaaaaagtaagggtgggcccaaccccaatttcccccaag

SEQ ID NO: 14791 - DNA, 503 bp, Homo sapiens
  misc_feature (1)...(503): n = A,T,C or G
aggcngnnnnnnnanataagacttcataggacacngcgnggaattcaaaagaagaaaaaagttctcttaatattagaattttttaggcattaatgaattttatttatgatgtataatgcttgactcaaaaattgactggcttttttggttggttttataatattaaattagtaatataaaaaacattcaactgggcgtggtggctcatgcctgtgatcccagcggtttgggaggctgaggtgggcagatcacctgacatcaggagcctgaggccagcctggccaacgtggcaagaccccgtctctactaaaaatacaaaaattagccgggtgtggtggcaggctcctgtggtcccagctatgtgggaggctgaggcagggagaattgcttgaacctaggaggcggaggttgcagtgagctcagattgcaccactacactccagcctgggcagcagagcgagaatccatctcaaaaacaaaacaaaaaaaaacactccataaat

SEQ ID NO: 14792 - DNA, 473 bp, Homo sapiens
  misc_feature (1)...(473): n = A,T,C or G
ccttatggcctctaaaagcccgggaaancctgatgacctctgtccangnggnggaattccggggccccctctccgtgcctgcccaacccgcggaggcttacctcactctctctttgggttgcattcgccataagagagccgggggagccctgatatcccgggaccgcctcccacgcataacgtgagacgaacaaaaggagaggcggaaacgcacaaacgcagaggtagccagtggatgaggcatgcgcagagcccacgctcaaagactggcgctgttggggcccaacctggaaactacctttaccgtgaggacgcgagagcagcccttcgggattggcagagaggtgccccgctaggcaacggacagatgcggtctgagttggtgtgggaactgcacgcagccctggctctcccggggcgacccagagggatgcactgcaggggaggtctgtgtgcaacaagagtgcagtgta

SEQ ID NO: 14793 - DNA, 476 bp, Homo sapiens
  misc_feature (1)...(476): n = A,T,C or G
gggagtngcccaggagggccccaatgagaccaatgacagcgtgcggaanncgggctcataatcccagcactgtggaaggccaaggcgggcagatcatgaggtcaagatatcgagaccacccaggccaacatggtgaaaccccgtctctactaaaaatacaaaaattagctgggcatggtacgtgcctgtagtccagctactggggaggctcaggcaggagaattgcttgaacccgggaggcagaggttgcagtgagctgagatcatgctactgcactccatcctggcgagagagcgagactgtctcaaaaaagaaagaaagtgttcatcttccttacagtgagccggtgtgattggaatgtcatagtcatagtcactgttgaacaatgttaatacttatactcaatgggtgagttttcttttctagtaaaataattctctgaatgctaagtaaaagtggataaattacaaatcaaa

SEQ ID NO: 14794 - DNA, 487 bp, Homo sapiens
  misc_feature (1)...(487): n = A,T,C or G
ctaagatcacccttggataatgagaccataggacagngcggnggaattcggcggctatagctgcatccgaggtgctggtggacagcgcggatgttgggtccctcgctgtggcggcggagctggccgctcagaagcgcgaacagagactgcgcaaattccgggagctgcacctgatgcggaatgaagctcgtaaattaaatcaccaggaagttgtggaagaagataaaagactaaaattacctgcaaattgggaagccaaaaaagctcgtttggagtgggaactaaaggaagaggaaaagaaaaaggaatgtgcggcaagaggagaagactatgagaaagtgaagttgctggagatcagtgcagaagatgcagaaagatgggagaggaaaaagaagaggaaaaaccctgatctgggattttcagattatgctgctgcccagttacgccagtatcatcggttgaccaagcagatcaaacctgacatggn

SEQ ID NO: 14795 - DNA, 474 bp, Homo sapiens
  misc_feature (1)...(474): n = A,T,C or G
nnaaaactgagatcctcgnaagncctgagaaccctgcaacnnncagctnaaggaaagagaataaatcttagattatagaacatggattcttaagtgactggaacaaattggctgacaccttactggtaacctgctattcttctggtgttatccttcaagattgttccactaaaatttatttttcaaaaaatttacttcacattattctatgtaagtgatgacttgtcagtgttccaggtgtatcttagctaaaactagagaatgccctaacttagatggtttttgaagcctatacaattggtattgtttgacccttaagcttttacatctcttagcatggaggacgaagaaagctgtacattgttgcttgagagtctgtacatttagtccagatttgtatttgcactgtctgtatggcaaatgagtgaaaaatgtttaatacactattggattttttatttcctttctttgatn

SEQ ID NO: 14796 - DNA, 476 bp, Homo sapiens
  misc_feature (1)...(476): n = A,T,C or G
tgatgcagagncnccctaagaaatctttcgatgancaccctaggcagngcggcggaattcacagtcctttccagcataaaaatcatctataactattcaatgttttgtgttatggacttgttgatctcacctttgctgtctaagtagctgaagaactaattaaacagtcaaccaactgatttatgttagtgagttccatgatagaattttagcttgagtatagaggatattcggaatcaggtcacttttggacatatttcaaactgcagcatgtagttatccacctgttctccaggttgaacctgctgagcaatgataaggacctatacatcaggttttattcattggagtctgaagacagtctgcttgggttgacatcctagctctgtcaaatagtaatcctgtgaccttgggtaagttatgtacctctctgtccttcagttccatcatcaataaaatcacattaaaaatagtat

SEQ ID NO: 14797 - DNA, 490 bp, Homo sapiens
  misc_feature (1)...(490): n = A,T,C or G
ggaggggccccccccttgagaccctttgaagccgtcggaanncgcagcgcgtcgccattgcccgcaccatcctcaaggctccgggcatcattctgctggatgaggtgcgccctgggtctcctcccctccttcctgccttgtgtatgctcaagccgttcctcctgggcactgtccccacctagaacagataccatgaattcaaatctcacaaaacacactttccagttctcaagcccaaacaaggctcttgtgtattcttgaggcctcagccagcagcctgcctccttccattgagggttttgagtggcaggagcagttttacctggaccctctctataggcaacgtcagcgctggatacatctaatgagagggccatccaggcttctctggccaaagtctgtgccaaccgcaccaccatcgtagtggcacacaggtacaggactacaggcctggggcggctggtgatgtggcccgctttgggtggagaan

SEQ ID NO: 14798 - DNA, 479 bp, Homo sapiens
  misc_feature (1)...(479): n = A,T,C or G
catcggcccactttgacagccgtcggaannctcaggacttgctctttgagctgaaagcagaaggtcgatggggcataaattagatttaagtcaggacaatagcacatgcagaggcccaggggttaaagaaagcaagggtgaggctgagtgcagtggctcatacctgtagtcccagcacttggggaggccaaggtgggcgaatctcttaagcccaggatgggtaatgggtaacgtggcaaaaacccatctctacaaaaaatacaaaggttagccgggcacagtggtgcacatctgtaatcccaactactccggaggctgaggcgggaggatcacttgagcccaggaggcagaggttgcagtgagctgagattgcaccactacaatccagcctgggctaccgagtgagaccgtgagaccctgtctcaaaaaaaaaaaaaaaaaaaaaaaccggccgttcaattttaaaggccccgttaaac

SEQ ID NO: 14799 - DNA, 481 bp, Homo sapiens
  misc_feature (1)...(481): n = A,T,C or G
atcgacccccatagtagaccactaggccagngcggnggaattccaccaatgtcctgagaaaaagataaaatgactagattaaaatgtccacattcaagcaaaaccaaaaagtttacaccaactatcgacatttggtttgttcttgtatttttcccatgaggaattcttactcaccttcaagctcatccccaattccttctgaaatacccttgacagctgcaacagcttgtcatttgacataccagcgtcgctcttactccaggaatcacgtttctttctttgctagccaacgacttgctcatttcaagcagtgggtttcaagtttacagaattccagcatggccagaagaatttacatagcacatctgagtcgatgacagacaaaatctggcctctaaaccaggctgattatagtctgactcccctcctgagagaatttcagccttccaaccagaaagctgctgggagcttggagtgattc

SEQ ID NO: 14800 - DNA, 495 bp, Homo sapiens
  misc_feature (1)...(495): n = A,T,C or G
aaaaattcgagacccttnccangtcgtagaacctagtccatgtggtggaattccagccctccttgtggccaccacgcctgaggatggtgcggaggtggacagctatgactcggatgatgccaccgccctaggcacgctggagtttgaccttctctacgaccgggcctcctgcactctgcactgtagcatcctcagggccaagggcctcaagcccatggatttcaatggcctcgccgacccctacgtcaagctgcacttgctgcctggagcctgtaaggccaataagctaaaaacgaagactcagaggaacacactgaatcccgtgtggaatgaggacctgacttacagcgggatcacagatgacgacatcacgcacaaggtgctcaggatcgccgtctgtgatgaggacaagctgagtcacaatgagtttattggggagatccgcgtgcccctccgccgcctcaagccttcgcagaagaagcattttaacatctg

SEQ ID NO: 14801 - DNA, 496 bp, Homo sapiens
  misc_feature (1)...(496): n = A,T,C or G
gccgcccccccccccttgaaaccccatggagaccttaggccagngcggnggaattcgtgcggctctcgtcctcaacaggaggctagcgaagcgtacctggtgggtctgttcgaagataccaacctgtgtgccatccacgctaagagagtcaccatcatgcccaaagacatccagttggctcgccggatacggggagagagagcttaagtgaaggcagtttttatggcgttttgtagtaaattctgtaaaatactttggtttaatttgtgactttttttggaagaaattgtttataatatgttgcatttgtacttaagtcattccatctttcactcaggatgaatgcgaaaagtgactgttcacagacctcagtgatgtgagcactgttgctcaggagtgacaagttgctaatatgcagaagggatgggtgatacttcttgcttctcatgatgcatgtttctgtatgttaatgacttgttgggtagctattaaggtg

SEQ ID NO: 14802 - DNA, 410 bp, Homo sapiens
ctcaattggaaaaggcaatttaagtcctagaagttggctgccaaggaaaccactacttggagaaagcctaacaaaatttttatgtgaactggcgtgataccttgcagtattttccactctttttctctttttttctttttttttgagacagggtctcactcagtcgctcaggctggagtgcagtgtcacaatcacagctcactgaagccttgacctcctgggctcgggtaatcaatcctcccatgtcggcctcctgggtggctgggactacaggcacgcaccaccacttccagctaactttttgtattttgtagaaatggggtttcaccatgttgcccaggctggtctttttctgtgaaaagggggagaaagtaagaggatagcaagaaacttagaaatgcatctcttgt

SEQ ID NO: 14803 - DNA, 496 bp, Homo sapiens
  misc_feature (1)...(496): n = A,T,C or G
ccccccccccccccccttgaggcccnatgatgacctctggcagngcggnggaattcacaggtgtgagccaccacatctggcctacagcatatatttaatgcaatacagcttaacttctaagagcaattttaacatatcttaaatataaaattagtgctatgaacttagtttctgcataatttatatacctccatcttacttatcattgtgtcttcaccacccagtacaaggcaggtagttgctgaacaagtgaataaatgaattattttgttatcgaagttttgggttttagtgggtattctcttattctcatttgtcagaagattaagctttggaagaaaaatacttgagggagcgttcaagatgggttaaaacttaaatgtcacatctgaaacagtaaaaatcctagaagaaatcctaggaaaaactcttctggacattggcctaggcaaagaatttatgatgaagacctcacaagcaaacataacaaaaccaa

SEQ ID NO: 14804 - DNA, 466 bp, Homo sapiens
  misc_feature (1)...(466): n = A,T,C or G
aaaatgaagaacttttacaagcggggaaaacttgaaagcctcggatnctcgcaacaaatgattagatcttttcttctgactcgtgtggctccctgctgcagaaagcacagtccttgcctggagcccatgaaccccatccttgcttcatctcagttcttcatgggcttcactcttcccactcacggaagggaggtagctcacggacctccactgtgggacccttgagacgcttccactctgattcagaaacacacttctacctctttactgttaactcttaacagatgcagtcagcagtttctgggcacttctctcagtaggtgcctcatgctgacttctccagtagggtttcaggacaaactaccaaggaattgcctcagcctcctaccagtcctccctcacccaccttctgtctaggttcacttggtttgtcatcacgaactgagcacgtccaggactcagcttn

SEQ ID NO: 14805 - DNA, 480 bp, Homo sapiens
  misc_feature (1)...(480): n = A,T,C or G
aggccnnccnntttccaaccgggaagtttcganagnancnnncnnnnnnnnnnngggggaggnncccttgcctaactgaagggctagctcagtggttctctgtactgtcaagttttgtacatccttatgcaaaagcagtagcccctttggtcctggcttagccctatcttgtgtataccatttccattttataatgctgctttcttgagtgtgccctatctggtgagtattggggaaactcatgacccacgtcataataggaatttcaggcctcataaagacctcatggttgaagcagaggtcctctgtttccagcaaaacccaataaaaagctaacaattgcttcttggaaggggtataagctttgccagcctatggcagtttctgggtccaaaaccccaaaggtaccctcttcccaccttggttctgcctaagactccaattagcatgttgatctaagacagctacttgcaggtctan

SEQ ID NO: 14806 - DNA, 485 bp, Homo sapiens
  misc_feature (1)...(485): n = A,T,C or G
aggaggnncccnaggagggccccaatagagncccaatgatgaccattagaccatgcggtggaattcctcactaccaagttcgtgtcgctgctgcaggaggccaaggacggcgttctggatctcaaagcggctgctgatactttggctgtgaggcaaaaaaggagaatttatgatatcaccaatgtcttagagggaattgacttgattgaaaaaaagtcaaaaaacagtatccagtggaaaggtgtaggtgctggctgtaatactaaagaagtcatagatagattaagatatcttaaagctgaaattgaagatctagaactgaaggaaagagaacttgatcagcagaagttgtggctacagcaaagcatcaaaaatgtgatggacgattccattaataatagattttcctatgtaactcatgaagacatctgtaattgctttaatggtgatacacttttggccattcaggcacctttctgtacaca

SEQ ID NO: 14807 - DNA, 477 bp, Homo sapiens
  misc_feature (1)...(477): n = A,T,C or G
ttatgaccctnattgaaggcgtcggaanncgcgacagcgatgtcatgcgggtatgtggctagcgcagctgtatagtaccattgactattgtgaagaatatttgaaggtgcgggttggaggatcagattatcagttctgttttggacatgtttggaatttgagatggagatattgattatagacagttggatatgttggcctggagctctagagaatggtctagaggaaagatattaatttgggaatcatcaggtaattaatggtgattgaagcaaaagggactggcttcagtgatttgaggaggagggccggggaggaggctcagtagtgcatgttgattgtccagggttggtactgctgtaatattattttgacatccctcccttctgctaatgcaaaggctttattgagactactcagtaaggatctccttgagccatttcttagcttttgttttaaacacttcatttgtacagg

SEQ ID NO: 14808 - DNA, 494 bp, Homo sapiens
  misc_feature (1)...(494): n = A,T,C or G
tgcggtaccnccaaatgagaccttantgagatcctcaggaagngcggnggaanncgccaccatgcctggccttgggttttttgttttgtacatgcaattttttaagagacagtgtctcaaaatgtcacccaggatggagtgcagtggtgcagtcatagctcactgtagcctcaaactcctgggctcaggtgattccccatcaatcccctgagtggctgggactacaggcatgtgccaccatgcctggctaatttttcttgtagagaccaagtcttgctatgttgcctaagccagtctcgaattcctggcctcaagtgatcctccttcctcagcttcccaaagtgctgggattacaggtgtgtaccactgtgctggccaaaattaccaacttctgatctagaattctgcacaggttaggaaaataacatcccaccatgctcttggagactgaaattactcaaagttattgtgtaggtcacatgacaatctaaact

SEQ ID NO: 14809 - DNA, 483 bp, Homo sapiens
  misc_feature (1)...(483): n = A,T,C or G
attttgatagccattagaanaaaggngnggaaaanactgacgacccttagtccagngnggnggaattccatagctacatcttcaaacgggagcccccagaaggctgtgagaaagtgcgtgtgtttgaagaagccacgtctccaggtcctgacctggccttcctgacttcctgtcctgacaagaacaaagtccatttcaacccgactggctcagccttctgccccgtcaacctgatgaagcccctcttccccggcatgggcttcatcttccgtaactgcccctcaaacccgggatctccccttcccccggccagccccaggccaccacctcggaaggatccggaagcctccaaggcctccccactgccattcgagccatggcagcgcaccccaccatcagaagagcctgtgcttttccagagctccctgatggtctgagggtcccacccctgccccactttaccatagagaccagtgccttggn

SEQ ID NO: 14810 - DNA, 454 bp, Homo sapiens
  misc_feature (1)...(454): n = A,T,C or G
tatggaagnccctatcgtatgatcctcgcannnncnggnggaanncatccgccccactacaggttatggatatgaatcatggcattactgatgagtaaacctttctggcacactgagcatggtcagggcattgggcatagggacagagcaaggaatgcatcctgagcccacagctttgaccactgtgatccagaagagaggtgcactacgtgggaagtgctgattccacagcatgcagcctggtaggggaaggaaaataaatgggtgcgaagaaggaatagttttataatctcggaagatgataccaagagcagaggcaacaaatagaggcctggcctccaggtgccggatccagacacctgacctagaatgcctgcccgctatccctgtggcaggaaatatcccctcatgtcccagggaattgcagatgggtcttctatacccttctacctgg

SEQ ID NO: 14811 - DNA, 487 bp, Homo sapiens
  misc_feature (1)...(487): n = A,T,C or G
gagagggccccccatgagaccatttgaaccgtgggaanncaccagactcaaagaacaggttctttgggcaacagacaaagaagaatcaagttctgtgctgtcccgtgagtgtgtctgagtaccattcactggagttgctgcttaagtctgggacgtgtgtgtgactcttaacaattgctgtctgaaaatgagagagaagacttcggaagcacattgtgttcataatgtactccacaatggccagtccaattgctatctatttttttatccagaggcttaattaaatgatgtggtaaaatgatgtttgagcattaagacaatgtaattctttatttctgggtggaaagatataccggattaaatttatctgtttaaaaaaatgacaaaagttatcaccaaaaccccctttcccatcttgcactgtttgttttggattgggtttgggggaaagagatgttcttcttagttggctactttgtttgaacac

SEQ ID NO: 14812 - DNA, 490 bp, Homo sapiens
  misc_feature (1)...(490): n = A,T,C or G
ccccccccccccccccttgagacccttgaagnccgtggaantcaatgtcaaaatcatgaatatttcaaaataaactggggagttataaaaatacaactagagatataaatctggtgtctgcctgtttttttattgacaggtaaggaagcatttgaaaacattgtattgtcctttttacatgatctgtgatgttaggtgtgcatattttatcttcaggataaggaagtaaaatgatgaaaataagcacattgctgccccatgtcatcatgtctagtttctgaaggaagtttgaggttctacagctggaactgtccttgcccagtaccatcctctggacatgttgcctctacgctgtgccctcctgtgcagtgatgcacagctgcctggccaggacatctgcactcctgacctcagtatcatgagggtcccaggcagtgccatggggaggagacacgtttgatccttgactccctagtatctggaggataag

SEQ ID NO: 14813 - DNA, 500 bp, Homo sapiens
  misc_feature (1)...(500): n = A,T,C or G
ggggtgagaccctttgcannggcttcgatgtccctagtcagtgtgctggaattccccagccctcaggaaaccagtctctctcagagctccacgtctgccaaaggcctgcaagattcctggtcagagacagagaggaccctttacattcagatgatctgaaatgaccaacatgagctgaattgagaggcccagttccatgggcataagggcagccactcctgctgtctgttcacttgtttatagtcatccattgagcatgtacagtactgggtggtgggatgagaaaatcacagaaggcggagtctggctgggcagcagagatgtaaacagagcgttacaacaggatgtgataaattccacgaacgagccaccaggtaagggctgtcggagctctgatccaggctgcgtagcctctctttggcccctcagttaaggtgaaatgttaaccaggcatgacctggaaatgaaggatgtcctcccacttccattctgatgaccag

SEQ ID NO: 14814 - DNA, 464 bp, Homo sapiens
  misc_feature (1)...(464): n = A,T,C or G
aggcgcggnnnttttcaattgatagcatgcatgngacgnggcannccctgtcctcaggaaattccagctgactagggaagagaatgccagtgtatagtttgcagtaggatgaactcaaaacatcagtgacagtgccccaaaatgcttcagtttccatgttctctttttcattttttaggtcctattttacttccttacctaatacttattatattggaggtatgatgtaaattggagtaatactgacagaccttctttgatagactaagcagtgttgctagaaacaaatcgttgcataactaaatcatgatccaccatgcacatagcccaccaaccaatggagaagaccagcagaacagatagtaggctatctcttccagcctcaagccccaatgctgtcattcctaagttgagacgttgaagtctctttgcctccctggtacagagtctgtttgccttgtctn

SEQ ID NO: 14815 - DNA, 497 bp, Homo sapiens
  misc_feature (1)...(497): n = A,T,C or G
ccccgcgcccgccccccataganncccnattgatgatcctaggccangcggtggaattccattgtcctactgtgtgctccatctccagaatgtcctgggaatcactctgtgtgtaggtttctacaacctgtgttattcgtgtctgtttgtgtgtttgttttcgcttctctgagggaggagccaagtctcatccgtgtagctccacgtgtaataaatgtgagtcgagtgaacgaatgaaagatttccccaagccttgtagtggacgtgcttggaccatggtggtccatcagtgtggcagtggagtccctgagcattgaggattgggagacgtgtgactagagaggtagaccacacaagccatgaagcatctaggggtgactgcaaactgagtgaggcaggtcttctggtcctgtgctgctccacacagaaggtttcagggatgacttggaagcaagaaacagggaaatgcagtgctgcgtgctaagcgttgcaacctc

SEQ ID NO: 14816 - DNA, 469 bp, Homo sapiens
  misc_feature (1)...(469): n = A,T,C or G
nagggcgccnnctttccccnaaggttccaganaggcgnngcnntntngtaagncaccaaacaagatgaagaagtcgtcaggggagattgtctactgtgttcatgtgtttgagaagtcccccctgcgggtgaggaacgttcgggatctggctgcgctatgactcccggagcggcacccacaacatgtaccgggaataccgggacctgaccaccgcaggcgctgtcacccagtgctaccgagacatgggtgcccggcaccgcgcccgagcccactccattcagatcatgaaggtggaggagatcgcggccagcaagtgccgccggccggctgtcaagcagttccacgactccaagatcaagttcccgctgccccaccgggtcctgcgccgtcagcacaagccacgcttcaccaccaagaggcccaacaccttcttctaggtgcagggccctcgtccgggtgtggccccaat

SEQ ID NO: 14817 - DNA, 493 bp, Homo sapiens
  misc_feature (1)...(493): n = A,T,C or G
aggggtgccncaatagagnccctaatgagaccctaggacagngcggnggaantcgagcttagagccaaggcatgaaaatagcctcttcctttttaagttttttcccctcaccattctgaaatcagaaagccattaattaataaaattcccttacaattttgacattacaaggaaatgatttgaatcataaagctattcccaagtaccattaactcactcttagtaacagttcttcttctagatcagcactgtccaagagaaacagaacgtgacacacatatataatttgaaatttcctaggctaggcacagtggctcatgcctgtgatttcagcactttggcaggccaaggcgggaagatcacttgagcccaaggagtttgagaccatcctgggcaacacagtgagacctcatctcttaaaaaaaatacaaataaattagctggtgtcacatgcctgtggtcccagctactcaggaggtggaaggtgggagga

SEQ ID NO: 14818 - DNA, 476 bp, Homo sapiens
  misc_feature (1)...(476): n = A,T,C or G
attgaccctnatagaaggcgtcggaanncccanngatgagtttgagctactgtgcatatctgaaagtaataaagcattcttacttacagttgaagctagaacttaggtcttttctgtattttgtcaaatactgctgttttattccatgcatgtcctttaagtacaagcaagtgtaaatgttatgggtatatcataaacaaggttttcctttgctctatgtacattaaatggtccttaataaaatacccaagccttgtatacagtaggaggagtgctaacgttggaagagtgaaaaagacaaggaaaaagtatggtccatttacatatttataaaagcaatgtaagagctttcccatcagtggtattcttggaatctatggtctttactaacttactatagctccagccactgctggggctcttccttatgggccatagctaagagtaaccccagcagttgcctagaaacataatcn

SEQ ID NO: 14819 - DNA, 495 bp, Homo sapiens
  misc_feature (1)...(495): n = A,T,C or G
ggagggngccccccccatggagaccacatagaagaccgtcggaanncgctggctgagatttttctaaattgaaaacacgcccccctccccacacctccaggaacttcactcccagtcttagagctgttaggacccgatggggaggcagcccccgcagtggacagcccccgcttggacacagtccgagtggaatgggaagggaatggtcaatccctgtcctggttgtccaagtcgggatctcagaggaaattgcagtgattccacggttaggcccccctgggggggctgccttcccctcagcctctccccacaccacccacccagctgctgtcattccgctcactgagctcttcttcattctcaccctgatccctgggggactcaaagccaaaactgcccaaagaggaaagattgaatcctaaaggggatccttgcccccatgggaggccccctactagaaggacgtgaaagcagcttttgggggaaactgaggca

SEQ ID NO: 14820 - DNA, 448 bp, Homo sapiens
  misc_feature (1)...(448): n = A,T,C or G
ntttgagacactagnncccgaggngcctttcaccaaacgtataaatacctcattttcactaccatacaagaaaaaaacacctattttgattgatcagttcttttgtatgaatatccacctcctttaaatactctatttttatatatatttttatatgaagataaacatgaatttatatttaactgtcttaaattatatttacataaatgcaaatatcacttgatataaacaatacaaatctgcatcttacagatgataatttttttagaagaatgatacagaattaactttaaaaataaaacttttctaatatacacttaaatgcaaacatcatttttaaattttcagtgatttttttaatgacataaaacgttaccaatgtgtgcagcctctccatcatgttttaacatactgtatactctatagcagtattacagtcagtatttcn

SEQ ID NO: 14821 - DNA, 481 bp, Homo sapiens
  misc_feature (1)...(481): n = A,T,C or G
ggaggtgccccaggagcnccccaactgagacanactgacagtcgtgaggaannccgactattcagcagagtccagagtgttcatcaccaacaactatgacaagacagccagaggtgtgtgtgttctgcagaactcctccccaacttcgacacgcctgcttcaacaaggcgattctttttttttctttttaagatggaagatcgctcttcttgcccaggctggagtgcaatggtgtaatctctgctcactgcaatttccacctcactgcaacctctgccttttgggttcaagaattctcctgcctcagcctcctgaggcattacgggcgcccaccaccacgcccagctaatgtttgtatttttagtagacacggggtttcaccatgttggccaggctggccttgaactcctggcctcaggtgatccacccacctcggcctcccaaagagctgggattacaggcgagaaccactgcgcctggn

SEQ ID NO: 14822 - DNA, 481 bp, Homo sapiens
  misc_feature (1)...(481): n = A,T,C or G
tacttgagaccctaggacagngcggagttgatcaccttaaggacatctgggcgcagtccctcgttagcctcttccaggccctgaggcacgacttgatgcgctcctcacagccgggagtacctccctgagagactggcccacaccaggacctcagagcagggaccagcacagtaatccagaaagtcttcattctctactccatttacagagaccagcaacaaaacacttaccgctgacacagagcagcagagatcaaacagtaaccccgatgctcttttctccttgtagtttcctggaagacacatctgattcatgccatcatgtgacctgggctggaagaaagggctggaatggtcattcaagacgcctccatgggcagaatggtttgcctatggcaggcagaattctgatatgcttcaacccagagcagtggccacacactcaagagtgagaacaggccgngcacagaggctcacgcctg

SEQ ID NO: 14823 - DNA, 456 bp, Homo sapiens
  misc_feature (1)...(456): n = A,T,C or G
attgagnttttgagaccattagacagagcggcggaattcgccgaattcgagaaactctcggatcaggtgaagatcagtgaagaaggtgggggcttatcgcccaagttctggcggaggctggggaggaaatgagggatgggttccccaggcgacagctccaggctgggcatacacccacgtgctctttctctatctctttggcacaactccaatctcggcagccctgagagcagatggctttggagacaatcctttctatcactgttgggtagcagagattcttccagcgcccgggaagctactgggtaagagcacctggcccttagaagtccacctctccagccggcctcagaggtctccccacaggctttcagaagccttactccccttttctctctctcagggccctgcgtggtgggctatgggatatactatttcatctacagcacatggaag

SEQ ID NO: 14824 - DNA, 491 bp, Homo sapiens
  misc_feature (1)...(491): n = A,T,C or G
gccccccccccccccttgagaccctttgaagacgttggaanncgcgccctccctctccccctcataaccccacctaacataaggacaagtcaatttgtcagtagcttcttctggcttgaaaccccctccctggattttatagcccacttaccatgcataacagacaagtcccatattttgtcagtagatgcctttttttttccggcttaagccttaagtgccaaatcacaagagaaaaagcagtaacagtttacagaagcaacttagtgccttgtaatctaactttgtcactgtgactacattacctcttcagcgccagagggcacccgtgggcctcccggagcctctgcccatggcggggtggagacccggaaccagcagccccctccactggcgacacaactgcaccttccctcatttcagtctcccgcacacttattcctcctcccctcttcccgggggcacctctccacctgtacccgcccccgccc

SEQ ID NO: 14825 - DNA, 462 bp, Homo sapiens
  misc_feature (1)...(462): n = A,T,C or G
ngggaattgaattgactccctaggccgngtcgnggaattaaggcattcggtgaaagaaatgaactgaagttcatcatgaatgcaaggcctcagtacttgacattcctccacggaagggaagacaagtatcaacaccactggcatcatttccaaactgatcttatgttgaataatttccaccacattgaagtacctttcgactctatccagtttttgggttttgttttttttaattcatcaagcctttcgttttcaaaccaccatttgtcagccttgaggtagagagacatatagatttgaaaatactttcttaagagatcatgtaactatataactctgaatttaaaaattgaggggggagggataatttcaacccactgcctcttaccagaaacatttttttaaatctgtaactgctttagtgttaacagggtgcaaggtggttttgtcccgtattgttct

SEQ ID NO: 14826 - DNA, 370 bp, Homo sapiens
gtcgtcctcctcatgtttgactctgagatttgggttttgattaataggttataactgtctccctgtgcagtacatttaagaaatcaaatacagcaggtataagggaagttaaagccactgaaggatttcgtatgcctttaaaatttccaaacaagtataagtctttatcttttgagaatacatattgaaatatggagtgataccatgtctgaaatttctttcagtgaggcactgcgggtagtggagagggtaaagatgaaagatgattgtatataagttggtaatttttaagctagaagatggatagatggggtttcattatacttgtctttatttcacatatactatttgaaatctttcataataaatg

SEQ ID NO: 14827 - DNA, 497 bp, Homo sapiens
  misc_feature (1)...(497): n = A,T,C or G
cccgcccccccccccatgaaaaccnnattgagancattaggccagngcggtggaattcgctcactgcaagctccgcctcccgggttcacgccattctcctgcctcagcctctcgggtagctgggactacaggcgcccgccaccacacctggctaattttttgtatttttagtagagacggggtttcaccgtgttagccaggatggtctcgatctcctgacctcgtgatccgcccgccttggcctcccaaagtgttgggattacaggcgtgagccaccacacccggccttaaacattcttagataaggtattcttctgtcttaacttgcctgttttataaagtctaacaatggcacatagtttgaagacaaattggcatttctggaccacttactagagaagttccaaattggcactacaggtttactgctattccgatcttaagtcataccaaggtgtaaaaattcagctccgactaattaaaatgaatattgaatt

SEQ ID NO: 14828 - DNA, 480 bp, Homo sapiens
  misc_feature (1)...(480): n = A,T,C or G
gagttgccnnnnagggggnncactgagaccttaattgatggcctgaanacgggctggatcctgtcacacctggagacctacaggaggccagagtgaaggggtccgttctgtccctcacactgtgacctgaccagccccaccggcccatcctggtcatgttactgcatttgtggccggcctcccctggatcatgtcattcaattccagtcacctcttctgcaatcatgacctcttgatgtctccatggtgacctccttgggggtcactgaccctgcttggtggggtcccccttgtaacaataaaatctatttaaactttaccaaaaaaaaaaaaaaaaaaaaaaaaaaaaaaaaaaaaacaaaaaaaaaaaaaaaaaacaaaaaaaaaaaaaaaaaaaaaaaaaacaaaacaaactaaaaaaaaaannnnttaaaaaaagggccctntaacaaaggggctccttaacaatgtttttctttc

SEQ ID NO: 14829 - DNA, 465 bp, Homo sapiens
  misc_feature (1)...(465): n = A,T,C or G
gggacattgaactgactccctantccgngnggnggaattcgaaaagaaggggaagaagatcaaaacccaccatgccccaggctcagcagggagctgctggatgagaaagggcctgaagtcttgcaggactcactggatagatgttattcaactccttcaggttgtcttgaactgactgactcatgccagccctacagaagtgccttttatgtattggagcaacagcgtgttggcttggctgttgacatggatgaaattgaaaagtacaaagaagtggaagaagaccaagacccatcatgccccaggctcagcagggagctgctggatgagaaagagcctgaagtcttgcaggactcactggatagatgttattcgactccttcaggttatcttgaactgcctgacttaggccagccctacagcagtgctgtttactcattggaggaacagtaccttggcttggct

SEQ ID NO: 14830 - DNA, 475 bp, Homo sapiens
  misc_feature (1)...(475): n = A,T,C or G
aggggnnccaattgannccccttaactgatgaccactagaacangcggtggaattcaacgaatttggctacagcaacagggtggtggacctcatggcccacatggcctccaaggagtaagacccctggaccaccagccccagcaagagcacaagaggaagagagagaccctcactgctggggagtccctgccacactaagtcccccaccacactgaatctcccctcctcacagtttccatgtagaccccttgaagaggggaggggcctagggagccgcaccttgtcatgtaccatcaataaagtaccctgtgctcaaccaaaaaaaaaaaaaaaaaaaaaaaaaaaaaaaaaagggcgccccttaaattaaaggggccctttaaaaccccggaaaaaccccggggggggccttttaaggcccccccttttgggggtgcccccccccccggggcttttttgaaccgggaggggccc

SEQ ID NO: 14831 - DNA, 464 bp, Homo sapiens
  misc_feature (1)...(464): n = A,T,C or G
gaaaataaaacctgagaccctattgagngccgttgaattcctcgtcccagtaccaagccaagcccaaaggctgtcctgaaaaccctgtggaagaagagtccaggccaggtcttcatcctgctgccaagtttgctgtttcttggcaccttcaggtctctggttttctcattcatgccaatgcttgtgggctggggttggcgttctgaccccacagggactggtggctggttccagggctcgtcccggcatttcatgtcttcccacggggttgagtcgggccataggggtgagcagctgcctggaagagttctgggaagtataaccctccattttttcttgttttataatctctttgtttaataataagtagaagaaataatttaaatgaactgcttagccctgctctgaataaccttttttggaattagattttagttgattttttaaagaatacagcccaacan

SEQ ID NO: 14832 - DNA, 496 bp, Homo sapiens
  misc_feature (1)...(496): n = A,T,C or G
ggagaggcccccccccattgagaccccatagagatcctcggacangcggnggaattatcattttattaaaaagcatcccacactgcaggacaaatggtccttatggagtgccgcgttctctgtactacgtggctcatggaaaaagtgacaacatggcttcctctaaatcatttcacctttcagtccccacccgcacccgtcccctagagccatagtactgtgttctgaaagccatttagaatttctttgtgagcatgtagtgctttgcacgccacagaagccgtctgccgtgtgtgaggagcatacaatggactttctaaagataaggcgtgggcttccacagtgtctgccagagtttagttctttataccttactgaaaaatgcctcgtggtcttcgcagaggggaaggcctgtctaaagtcaatcatccgagatgggttttccattccaaagaaaggcaatatggttccttccttccctcctaaaatatgactt

SEQ ID NO: 14833 - DNA, 477 bp, Homo sapiens
  misc_feature (1)...(477): n = A,T,C or G
gggttgcccccagtngnnccactgagaccatagactgatgngcctgagaaacgggcaacagcttcaaccgcaacgagggaaaggagaagcttcacaaatcccaacattgtggcttttgcaacattgttatgatgttggtgagtgatgaaaagcctggaataggtggagaaccacttctggggcaaaagatacagcctatatgtagcatatatcctaaaggagatggaagtgatgtaccatcatgggtagcctttgataaacagatattttgttggtcaacttctattaaatattcattgagctttaaatgagacactaagactgaaatatttacgtgctctgatgagactgtgaactacagactagatcctggttaataccccaagcaaattataaagcgctttctacattagcggctcaacaaaaacaagtcaacacttgctaatcatttcgcttaaaaatgagacattttcagtg

SEQ ID NO: 14834 - DNA, 492 bp, Homo sapiens
  misc_feature (1)...(492): n = A,T,C or G
aggagggggcccccccatggagactnattgaagacgtcggaannccctacacatgtaggacaataagcaggaccgtctgggccggtctgcataaatgctgtatacataccagatttgatgctgcatatagggtatggaattgcacatccatctcataggaattgtaaatggtttgaataagaggaaagtaatttttgttgcattataaaatgtctagtagcatcataagtttttttgagagaagcatctttttatttcccatattcctggttattttcatcattgctttgaattgaatttttatatctatttttatatgtaactctttttttacctcatgtttttgtttgttttgcacatttctcataccacaggtattgaagcccctgggtgataatttgatggaggaaaacataaggcagtctgtaacaaactctatcaaagcaagcctgactgaccaggtgtctcatcatgccagattaaagacagacg

SEQ ID NO: 14835 - DNA, 442 bp, Homo sapiens
attcgcggatccctagtctagtgtggcggaattcggagaataaaaccattgtttttgtggaaaccaaaagaagaagtgatgagcttaccagaaaaatgaggagagatgggtggcctgccatgggtatccatggtgaccagagtcaacacgagcgtgactgggttctaaatgaattcaaacatggaaaagctcctattctgattgctacagatgtggcctccagagggctagatgtggaagatgtgaaatttgtcatcaattatgactaccctaactcctcataggattatattcatcgaattggaagaactgctcgcagtaccaaaacaggcacagcatacactttctttacacctaataacatatagcaagtgagcgaccttatctctgtgcttcgagaagctaatcaagcaattaatcccaagttgcttcagttggacga

SEQ ID NO: 14836 - DNA, 490 bp, Homo sapiens
  misc_feature (1)...(490): n = A,T,C or G
ggttaaggggcgcgcgcgnnnnnnnaatcgaactgcgtaccatacgccagngncgnggaattcccagcatgcagacacgtcggtcaagccgcaagcgctcaagagccgcattgctctcaactccgccaagctgatacaggagcagcgggtcaccaacctgcatgtgaaggagatcgcacagcacctggaacagcagaacgacctactgcagatgatccgccgctcccaggaagtgcaggcctgtgcccaggagcgccaggcccaggccatggagggcacacaggctgccctgagcgttctcatccaggtcctccggcctatgatcaaagatttccgccgctacctgcagagcaacacagctaacccggcccccgcctctgaccctgggcaggtggcccagaatgggcagccagacagcatcatccagtgagggcaggggtcaagccagccttctgccatgatgggatgaaaactccatggacttgtaagn

SEQ ID NO: 14837 - DNA, 467 bp, Homo sapiens
  misc_feature (1)...(467): n = A,T,C or G
nggaacctcggattcagtgcnattgnggnggaattcggtgcggtggctcacacctgtaatcccagaactttgggaggccgaggcgggtggattgcctgaggtcaggagttcaagaccagcctggccaacatggtgaaaccccgtctctactaaaaatacaaaaattagccggtgtggtggcatgcacctgtagtcccagctactcgggaggctgagagaggagaattgcttgaacccagtaagcagaggttgcagtgagccgagatcatgccactgcactgtaacctaggtgacagagcgagactccatctcaaaagaaaaaaaaaaaatcagaagagttgggctccagtctcagctgtatcattttctaactgatttttacaataaaaatgagagtaaaaatcagttactctttctagacattaattagcacatttacgttaagactctaagtagtataaaatgtn

SEQ ID NO: 14838 - DNA, 473 bp, Homo sapiens
  misc_feature (1)...(473): n = A,T,C or G
aaaactaactttgattcccttnccgtggagtgccattcaagataacggtgtgggtatgtcgacatttgtagagaaaggaagggacaatctcatgattaggaaaattaatcaaatgtggaaagggaggaggagatggaaggatcatcgtctttcagagggcatttcttaatcctgtttattatgatatttattgcacccactgtaaaaaaaaaaaaatctagaggaattagtacatgggcatgaaagtgagttaaggaaagaacacaccccccactttaggccggaatacgcagaggggatacctggattaagcaacagagctggtttccagacacaaataagacacttcacacactctgatagagggaaagtaaaaaatgcacagctcttcgagatttttgttttatttccttaaggctgacttcagcagccaccaatggccttgtttgttgggacagagccaccccgtctgt

SEQ ID NO: 14839 - DNA, 467 bp, Homo sapiens
  misc_feature (1)...(467): n = A,T,C or G
ggggattcgaactgagtnctatggccangncgnggaattctataattaaataaaataaaaaatttagtttcttggtcatgctagccatacttcaagtgccaagaggcacatgaggctcatgtctaccatactggacaataaccatctaggacatttccattatcacaaaaagttctgttggagagcaccagtctacacagcaccagcaagtcagttccctttctttggaatgaaataagctaaataaaatttttaagagggatttttctctccgtgtgctccacagtaagcactgtcaactctatgtttaagatgcatcccaaatctacccacttctctttttttctactgttactctctgagcctgagccatttttatctcccatctggacaacttcaatagtctcctgactcacccctctatttccattctttcaatttatatatggtctccatggagcagctgn

SEQ ID NO: 14840 - DNA, 478 bp, Homo sapiens
  misc_feature (1)...(478): n = A,T,C or G
naatggagaccgntcggccatttgagagccattcgaagacccnnngctgggacaccccacggcagtcgggtgcgccaagagaacagatgctctactccggcacctgtaggactgtgggtataaggtgtccaagaaaaagagctcagatctgccaacagcaggaaccagagactgcggacggggccaggaaccaggaaccgttagggagataaggaaggtgttatagcccacattcatcctatacggccacaaggccggggggcccaggctgcctcctcacagcatcagctttttcttcggcttcatttccctctggaaagcgctttctcacagacgctgcaaagaccgaaggggcagcccctgccctgctaccctccagggagccaccgctctagagcccaggctcctctggacatcatgtgacttgggggacgacttgcctttcttctgaaacacggctacagactataactntaaa

SEQ ID NO: 14841 - DNA, 569 bp, Homo sapiens
  misc_feature (1)...(569): n = A,T,C or G
atagaaaactatgataccantccnnnnnnaattcctccccagcttcatcccctcccaaccgttcgccttcacgcccccttctttcccttttaccacctctgtaagctccatcccacctcaggccatcgcatgcacccttccctccgcccagaatgctcttccttaccttcttcacccacccaatccctgttcgtcaagacttagggtaaaatgctacttcctcaagggagcctgccctgatttcctaccctcaccaactgctgcagctatctgctctcttagctgcgttttctccttcccaggacttaaaattgcaatggattggttgtgaaatgccatgtgtaaagccatgccttcctgctacactgcatgcttcctgaaggaaggggctctgatggtcttcatcatcactgtaactgtctccagtgtccacttacaactcacctcctcagcgaacgcttggtgagtaaataaatggataaagaaatccccccnnnnnnnnnnnnnnnnnnnnnnnnnnnnnnnnnnnnnnnnnnnnnnnnnnnnnnngagagcgcggggcggcgctg

SEQ ID NO: 14842 - DNA, 469 bp, Homo sapiens
  misc_feature (1)...(469): n = A,T,C or G
nnnnaaactcgagttccntagcncagngnggnggaantctgaaatgaatgaaatatatgatgagaactcctactggagaaaccaaaaccctggcagcctcctgcagctgccccacacagaggccttgctggtgctgtgctattcgatcgtggagaatacctgcatcataacccccacagccaaggcctggaagtacatggaggaggagatccttggtttcgggaagtcggtctgtgacagccttgggcggcgacacatgtctacctgtgccctctgtgacttctgctccttgaagctggagcagtgccactcagaggccagcctgcagcggcaacaatgcgacacctcccacaagactccctttgtcagccccttgcttgcctcccagagcctgtccatcggcaaccaggtagggtccccagaatcaggccgcttttacgggctggatttgtacggtgggctccacatg

SEQ ID NO: 14843 - DNA, 484 bp, Homo sapiens
  misc_feature (1)...(484): n = A,T,C or G
gtnnnnnnagagtnnccnnnagggnncctatgagacctttatgatgccgctcagaacgcacagnaggcactgcaacaaagaattcttgaatgtactaaatatatagggaagcctatttaaattcaccagaggggcttagaggacaagcagcagaaagtttagaattcaattcaagccatgccagaaaatgaaaatgtacttaaaaaaggatttctgaaacaattgttcaaagaaatgtcaacttttaaggttctttctagaagaatgaaatttgtactctaatttatgtggtgactttttcaattagagaggaaaagtgattaacagaatctcaaaggaattgtatcttatgtttaaagaaaacgtgttttctttccataggatgttctctagtgagggccacctagtgcactgactaaaaacaaccaaatatatttatgggacaaacagataatgtattttttttttttttttaccaataaaa

SEQ ID NO: 14844 - DNA, 476 bp, Homo sapiens
  misc_feature (1)...(476): n = A,T,C or G
gaaaaataatttgattccctnnnnatcgagtccctattcagtgtggtggaattcgggcagtcccggggaggacggtttcgtcccgtcggcgctggggacccgcgagcattgggatgctgtctatgagagagaactgcaaactttccgagaatatggagatacaggtgaaatctggtttggagaagagagtatgaatcgactaataaggtggatgcagaaacacaagattccactggatgcttcagtgcttgatattggaactggaaatggtgttttcctggttgaacttgcaaaatttggtttctctaatattactggaattgattactctccttctgcaattcagctttctggaagtattatagaaaaagaaggtttatctaacattaagttaaagctgtctggatttcatatttgtattgacaaagggacttttgatgccataagccttaatcctgacaatgcaattgagaaga

SEQ ID NO: 14845 - DNA, 482 bp, Homo sapiens
  misc_feature (1)...(482): n = A,T,C or G
ggggnnnnaggggggccnnagggnnacatgagaccctaactgaggcctgtggaaacggacttctaaaaggaactatgtctggaaggctgtggtccaaggccatttttgctggctataagcggggtctccggaaccaaagggagcacacagctcttcttaaaattgaaggtgtttacgcccgagatgaaacagaattctatttgggcaagagatgcgcttatgtatataaagcaaagaacaacacagtcactcctggcggcaaaccaaacaaaaccagagtcatctggggaaaagtaactcgggcccatggaaacagtggcatggttcgtgccaaattccgaagcaatcttcctgctaaggccattggacacagaatccgagtgatgctgtacccctcaaggatttaaactaacgaaaaatcaataaataaatgtggatttgtgctcttgtatttttaagtggattaaaaaaacttactacct

SEQ ID NO: 14846 - DNA, 457 bp, Homo sapiens
  misc_feature (1)...(457): n = A,T,C or G
ggcgggcgnttttnaatgaatcatagctatggcgggacnacggaatagcatctgtgatgccatcccaggatgtgagtgggtctgaagatacattccttaatatacgacctatgctagaagataagactgtttttgacaatttttttatcaagaaagagcaaataaaaagcagtggtaatgatccaaagtatagtacaaccacagctcagaattccagcagttcatccagtcagagcaaaatggttaattgcccagtttgtcagaatgaagttctggagtctcagattaatgagcacttggactggtgccttgaaggtgacagcatcaaagtcaaaagcgaagaaagtctttgaaaaaggtttcaaagtctcaagtaccacctgtattatctcactaatgtgctatgtcagccagtcaggaagttctggttaatactaagatttgtaggttataatct

SEQ ID NO: 14847 - DNA, 418 bp, Homo sapiens
  misc_feature (1)...(418): n = A,T,C or G
aaaaagattatgctgcaaagctatgatataaactgctcttgcagtccaaagggatacctgattaaagaagtttcttatttaaacatctcagacgcaaaaattacattaaatttttgtatatttcaacaacattttaaatgtattttgttatgtttgtattatataggataaagcaaatgtcaagttaaaatgtattgtgttgtttgtaaagtaagaagttactggccaggagcggcggctcatgcctgtaatcccaggactttggtaggccaagacaagcagatcacttgaggtcaggagttcaacatcagcctggccaacatgatgaaaccttgtctttactaaaaatacaaaaattagctgggcatggtggcaggcgcctgtaatcccagctactcaggaggctgaggcaggagan

SEQ ID NO: 14848 - DNA, 480 bp, Homo sapiens
  misc_feature (1)...(480): n = A,T,C or G
gaaaaaaaaancttganacccttnnnccttgagtnccatatcagtgtggtggaattctactttttaacgtagctggcgccattcccgacccatctttatagtggccagaaagccaagaacgtaagtgttctacacatagggcgccttcaaattttttactttagcaacgtgatcttcctttaaggggaagtatgttccctcctagaaacactcccgccttggagaaggggttgagttcgcaactccacttacagactacggaggaaccccagggtcaaaccaaaccaaaccaattctggccagttgcttagcgcagttcaagttacttagtgcgctggaagcggcatttcaggcaatccaacttctggctcgaaccttctcggagtattccaaggatggaatactctcacttgagcgctgccgagggtgccgcttgaggaaaacgtgagtttgtgaagaatgtttgttgcagatacagtt

SEQ ID NO: 14849 - DNA, 473 bp, Homo sapiens
  misc_feature (1)...(473): n = A,T,C or G
ggcccggggngtgnncctgagaaactgagaacctactccangtggtggaattcgaaaaactctccttttagtgtgttattttcttggccttcccttttaaaggttaaagtttctaacctaagaattaagtacgcgttcaggaagctgttgtctaggccttccccttgtgaatctgggttcattccaatacggcaagtaagagttggaaactttgagaacacagactataaaggcagcagcccgaacactgtcagactctaattggcgaccctgggaaacagttgccctgctattctttaaagaaagacgtttattctgatgataaaaacagttagccagactgtttttaaagcacctggcgggaagcagaaggttggatccaagcccttgttcagatttggtgcctgataagacaggggtttctctttttgtgacctttattattattatttntgtaactgttgtaaccagtn

SEQ ID NO: 14850 - DNA, 456 bp, Homo sapiens
  misc_feature (1)...(456): n = A,T,C or G
nttgagccctttgagacccttagtccagngcggtggaattcctcacttaattctaacaggagctggagccctcaacaaagtcctcggtcgggaagtgtacacctccaataaccagctggggggcatccagattatgcacaacaatggggtgacccactgcactgtgtgtgatgactttgaaggggttttcactgtcctgcactggctgtcttacatgcccaagagcgtgcacagttcagttcctcttctgaactcaaaggatcctatagacagaatcatcgagtttgttcccacaaagaccccatacgatcctcgatggatgctagcaggccgtcctcacccaacccaaaaaggtcagtggttgagtggcttttttgactatggatctttctcagagattatgcagccctgggcacagactgtggtggttggtagagccaggctaggaggaatacn

SEQ ID NO: 14851 - DNA, 488 bp, Homo sapiens
  misc_feature (1)...(488): n = A,T,C or G
acatcgacngtccgnagngtcnatagtcaccatgaagnccccccnnaangngaatctgaaagctagcacagggatggataaagctacctttatacattgggctgtcaccatggagcattgtggagcaaaaaaggtaatttgggtattaagttggttttgtacctgggatcgcttgccaagaaatcagacactcttcttaggaactgaaatacttttctggattaatatgtttgctttaaaaaataaacagaaaagtccaagagtgctaccaggaggggcggtgaagataaatgtgctctttggtgactgtggtttattccttaaataacagagtctaattatcaactgaatggaacccttagctacccagtagtttgggttttgccaagtaaaacatgtcagtcctgaagcgagcaagttttcctttgaacagttgccatgccgtgggggcgggaaggggatgcttcatgtggatggcgtttttctgg

SEQ ID NO: 14852 - DNA, 495 bp, Homo sapiens
  misc_feature (1)...(495): n = A,T,C or G
ggagccgggnnnnnccnnnatagagaatcgtntncgtcggcagaatgcggaaggccagagctgcgaagggccaggtgtcgggcgctgtttctcggtttcatcatatagacaaaacagccctgctgcaaagatggtcaacgtacctaaaacccgaagaaccttctgtaataagggtggcaagcatcatcctcacaaagtgacacagtataagaagggcatggattctttgtatgcccagggaaggaggcgctatgatcggaagcagagtggctatggtgggcagacaaagccaattttccggaagaaggctaagaccacaaagaagattgtgctaaggctggaatgtgttgagcctaactgcagatccaagaggatgctggccattaagagatgcaagcattttgaactgggaggagataacaagagaaagggccaagtgatccagttctaaactttgggatattattcttcaattttgaagagaaaatggtgaag

SEQ ID NO: 14853 - DNA, 474 bp, Homo sapiens
  misc_feature (1)...(474): n = A,T,C or G
nggaggtgcctttctgangcccctttattgtagactcttagacagngcggtggaattcctggcttcctgatctcagactttcagcctccagaatgagatgggggtgtgaaaggaaatgaaatcttgggaccctaaactcattaagccaaagggaaaagctgggccgagaactggatgatgcaacctgcttccacctttttgcttcctaaataagatggctacaagatgaaaagctatacatctctgccatattttgcccacaaggaaattcctagtgagcttcaagatcttttaaggtgtttctgttaaaatttcacaatttcgccattgcaatgtaaatttatagcttatccttacaggtgcagtcatctccctgcccaccagacacaaaggcatatctgattgttctcctgccccattttgtctatgttatcttatgtaaaatacagataccctgcatttttcctctgcccc

SEQ ID NO: 14854 - DNA, 470 bp, Homo sapiens
  misc_feature (1)...(470): n = A,T,C or G
ggagagtcgcggntttnnnnnancctgagttgcatagcatcgngcggnggaattcccaattccctgccctcctggacctgcaggtgccccctctcagaaggaatgacaccatggacagccagcccagccttgtggccctggagagctgcgcctgagggctgcttcctgccacaggaaagaggaggcagccacccgccccaagtggggcgctcagcggcttccaccccacagtgggacttggagccaaaatcagacttccactttttctaacaaactgggcagaagccggactgcttggtgctgtcagaggcatgggcaccgggggcccctggtggggttggcagcaggcaatgctgatgagggtgacggtggtgtgttatgccgtgagctcccagctttggcgtcctcctgaaggttctcatttccttcctgtgatgaggatccaggcctcagtgaggcccggtcgcttn

SEQ ID NO: 14855 - DNA, 394 bp, Homo sapiens
gaaactgtatcactgtctgaagatgaaacattctcctggccttgtcccaaaacagttacgttgaaaagaacatctcatggctttggttttacattaagacattttattgattatcccccagagtctgcaattcaattttcatataacgatgaagaacacggaatcagaggaggaaaacagagaaaccgcttgcaaccaatggataccatatttgctaagcaagttaaagaaggaggacctgcttttgaagctggattatgtacaggtgaccgaattataaaagtcaatggagaaagtgttattggcaaaacctattcccaagtaattgctttaattcaaaacagtgatacaacattggaacttagtgttatgccaaaagatgaagacattctcc

SEQ ID NO: 14856 - DNA, 443 bp, Homo sapiens
  misc_feature (1)...(443): n = A,T,C or G
taaaattagtagnaccactagtcctgtgtggtcgaattcttagtccatattatggtgataatgatggctacttgctgatccttagtgaaataaattctgtgttggtattcttcagcaaaaacgtcacattctgaacatcctaactaataaatcattgaccaggcattaggagagcatcttaacactctacccagtacatttaggtactctggttaatcaaatattatatgtagagtgatggccacttatcaaggaattggagggcaaaaaaatctctatattcactagttccatgttcatgttttcaaatctttgtcgagtcatgtcaggctaatgatgttcttcagctttattataaagaacataaattatatggttcaaataaagacagactaataaagatttctgactctatgatatatgataaatagcctttactatat

SEQ ID NO: 14857 - DNA, 473 bp, Homo sapiens
  misc_feature (1)...(473): n = A,T,C or G
aaaaaactgatananctnggngctgattgccntccanagagnccacggacaaccagacaggcctcggtggtaacaacgaaagggaaaacttatattccagaattgctacttatgtattatctaaaatacaaagaagtatgacagtgtgacccatactgaggaagaacatcatcagtaaaaactgtctgagtgtccagatgttgaatttactaaaggattggaaacaacttgtggatggagcagtagaaattatccattctgaagaacagagagaaaaaaacaagaaaaatgcacagagcctcagaaacccgtggtacaacatctgctgtaccaaagcacgtcgaatgggggttccaggagagaggaaagatatttgttacaataatgggtaaaaactttccaaattttaattaaaaaatatgcacattcatgagcacaggaagtttgaactagaataaatgcaaagtcacatt

SEQ ID NO: 14858 - DNA, 442 bp, Homo sapiens
  misc_feature (1)...(442): n = A,T,C or G
nttgaggaccctaggntttgacgacccttagtccagtgcggtggaattcggcatgctctccagagtggccctcaggacaggggccctcagccaccaaatcctagacaggacttcctctgacagaggtgcaggctatgactacatggctccagggcatgccactcaccctgcagtccccgtggccttgggtggtggatatcacgcttctccatcagggggcggtaaagctctttccgaaagtgctgggattccaggcgtgagctatggtgaagctcttaaagaaggggtggcttggccaggcgtgctgactcatgcctgtaatcccagcactttgggaggctgaggtgggcggatcacgaggtcaggagatcgagaccatcctggctaacacagtgaaaccctatctctcctaaaatcacaaaaaattagctgggcatggtgg

SEQ ID NO: 14859 - DNA, 482 bp, Homo sapiens
  misc_feature (1)...(482): n = A,T,C or G
nggtcggagtagagnccccntnnnaatagtagaccctagtcagtgtggtggaattccaaatgtgacgaatgtgggaaagcctatacacagtcctcacacctcagtgaacacaggaggattcacaccggagagaaaccctaccaatgtgaagaatgtgggaaggtcttcagaacttgctcaagcctttctaaccataagagaactcattctgaagaaaaaccctacacgtgtgaagaatgtggcaacatctttaagcagttatcagacctcactaagcataagaaaacccatactggagagaagccctacaaatgtgacgaatgtggaaaaaactttacccagtcctccaaccttattgtacataagagaattcatactggagagaaaccctacaagtgtgaagaatgtggcagagtcttcatgtggttctcagacattaccaaacataagaaaacccatactggagagaaaccctacaaatg

SEQ ID NO: 14860 - DNA, 530 bp, Homo sapiens
  misc_feature (1)...(530): n = A,T,C or G
acagattaacactcgcngacaacaggnctagaggattctgcttctctagtaactagacaggtgatactcatttgcttgccacattaagggaaaatggtggcatttgttgcagaaaaacaatggatacattttcttctggcctaaatgaatatttatgtgcaaacataggcaactgttaaaggctggaattttcaaaagatccaaacagagacttcctgcatcttctgcctttccaacagaagcggtgatcgtctaagtatgagcctgtggcttcctttgtgcatttgagcatgctgtaattaagatgagatcagtttcttagaaaaagctttcctgaatccctctgacgttgcctgggatctttctgttgattcgtcttttctggagattgggacagagcatctgtggtccagggaagttagtcctctggcctcaattctgttgtggatgtgcaatgataagcgggcattgcgtgcctcgggggatgcctaattcgtggcttccttgctggtttgccctctgtggcctgg

SEQ ID NO: 14861 - DNA, 568 bp, Homo sapiens
  misc_feature (1)...(568): n = A,T,C or G
attaganacctttgaacactattccangnnnnaattcggcatagtacctttataaaaatggcccaagagagatccctcatccctcccaccatgtgaggacacagtgagaagccccatctatggaccaggaagcagccctccccagacactgctggggccttgatcttggactccacagcctccagaacaatgagaataaatttctgttgtttgtaagttgtgcagtctgtggtttttgtcatagcaatgccagaaggtggtggatgagtaagatggggatggagaggtagctatggtaggcaactggagtataacctccaggggaattttgggaaaaatgtaaaacatgcagagctaggaggaagagagctggggtatttatacaccaactccttccagcctgtggttgagaactctccgaggtgtcaatccccacctccagtcctgagcagaaccagagggaccttcccttcccaggatttagcctctaagtgatgagatgtcgctgctggtgggtgacaggcaggacagctgagggaagggcccaggaatctggcaccagcccagn

SEQ ID NO: 14862 - DNA, 495 bp, Homo sapiens
  misc_feature (1)...(495): n = A,T,C or G
tgtgtcnnnnnatagttgacgtcgtagagacngcaanntacagatagncatctgtggctgaaaagctcttatcaaaatgctcttacttttattgatttgttatagttgccatcctaacttctatccattgggtctggctctgcctcctggaggaacacagactatgttgattgtcttttccctgtgttagcaatgcagatggattgtaattttcctaaatctgctcttcaagaaaagatttcaagttttgaaaaccatatcatcatcctgtcctcggtgacacctgtttctctcctttgtcaacatcacctttcacaatgtgtcacctggatagcagatcgaacaacctggctataatagtggttctgatagcctcctttgatctcgtcattgtattctagaaatgaagcccaagattttatgtatttttaccgcggtcataccacgttgatttaaaagatcaatgattttcaagccaggctggacattaaaatc

SEQ ID NO: 14863 - DNA, 502 bp, Homo sapiens
  misc_feature (1)...(502): n = A,T,C or G
gggggnnnnnnnnnggtacgacttcctacgccangncgnggaattccttaaaagccttttcagaaactcaaagctttcagaaattaatagttatattaatatccttctaaacagcattaagttttcaattttaatatatctatataaaatatagtgtcaaagaaagtaacatcaatatagtgggtctgtaatggaaatctgtcaatgaacatgaactgagttcttcaactacaggttgaaggataattaaacttttcattaggagtgttcagctacatggattcatggaatggtggttcatagtaagtgatggtaatctttttattcatgggtgtaaaccctttataacttagtgcttaaaatattaatcttttgattatataatgtcccatgaattatagtttaccaatagttctaaaacatgctaacctgaccttttccttctaatttgtttttaacttcattcgagatagtacctctcactcacagatatttatttggn

SEQ ID NO: 14864 - DNA, 480 bp, Homo sapiens
  misc_feature (1)...(480): n = A,T,C or G
nctgagaccntagccaggcgggtattcacgcacttacataactgagatcatttctgcaaacacagcgcaggagcagcatctagcattataagcactcaataaatactagctattattgctgaggcaatgcatattggggctctttttctccatactcttgtgtagcctaagtttgcagctgggtctgacagccgcctcatactaatgaagcacactgggcttgggatcatttcagacctgcagatctcttttgcatgaaatgcaatggggccggggctccctcttctgcatttgtgcacctgcttttaagaacataatgaatgataggcatttgtctcttttcatttcatctaggctttgggccatcatcctaacctgtcggcttgattttgaattttggattttgttattgaatgcaacagatctccctccaagctttgcttcctataaatttgatacccatgactcataagtcatcat

SEQ ID NO: 14865 - DNA, 444 bp, Homo sapiens
  misc_feature (1)...(444): n = A,T,C or G
ttagatttcgtcgntccactagtcctgtgtggtcgaattccagaatttcccccagagctttaaagaagtgggactcagccatgttggcgcgtgattgacattacagcacagaaaactgttagtgactggtttcctgttagataagggttccagcagcctggggcagtatgtctcagctggaatggaaagaatgtgagatggaacctcaagtcactgtttttaccagggacacatctgttttggctcccaatcagcagtcttcaatcgatcaataattctgctctggaagagaaggaacagggagcagagagacccaactgggagccagagatggaacttcaggtcttaagtgcaaatcaaagcaaaaaacaaacaaaacttacatggaaaaactgtaagtgctgaaagcaagtttagccatgacaaaccaaagagtgcccaggt

SEQ ID NO: 14866 - DNA, 392 bp, Homo sapiens
cggggcgatggctgcagcctcgggagggtatcgccggatcgaactccgggaaagggaagcaaaggcatggaacctccgcacactggatgagaatccatcttccattcgagctgggaatagactttgtgaaagatattatgtaatggagtctcgggaaccctgatacctctccagcgaagctgaagcgaattaattaagtgctttaaacggtcttggtaaatattccgcgggagctggggaggaccgttgggatggctgtagcttgagttgaattttaactgtcctcattctgggttttgtcgctctgctttctgtgccaaggtgctgtgttacgggagagagtgactggaaagtaacaaagctgaatctttctccctggagtaaggccgaag

SEQ ID NO: 14867 - DNA, 464 bp, Homo sapiens
  misc_feature (1)...(464): n = A,T,C or G
gcgggaagnnncttgagnccnttnnntttcgtcgaccatagtccatgtggtggaattccccgttaagccagagtagcccaagccctgaagtcactgctcatccggaatggaaatcccgccgaccaactacccagcctccagggcggccttggtggcacagaactacatcaactaccagcaggggaccccgcacagggtgtttgaggtgcagaaggtcaaacaagccagcatggaggatattccaggaagaggacataagtatcaccttaaatttgctgttgaagaaattatacaaaaacaagttaaggtgaactgcacagctgaagtactttacccttcaacgggacaagaaactgcaccagaagtcaacttcacatttgaaggagaaactggaaagaatccagatgaagaagacaacacattttatcatagacttaagtccatgaaggaaccgctagaagcan

SEQ ID NO: 14868 - DNA, 419 bp, Homo sapiens
  misc_feature (1)...(419): n = A,T,C or G
ttcgaagataatgacttgtctaggaaggcagttgcccaagcacctggtagaagatactcaggaaaaagaaaatcagcctgcaccccagcatcagatcattgtgaaccacttttgccaactgtgtagcctgtcgattgttaacaggtccaaggaagaagtcacctcacacaaatatcagcacgaaaaattatttattcaagtgaaagggaagaaaagtcgtcatcaaaaagaggattccctttcttggagtaatagtgcttatttatccttggatgatgatgctttcacggctccatttcatagggatggaatgctgagtttaaagcaactactgtcttttctcagtatcacagactttcagttacctgatgaagactttggacctcttaagcttganaaagtgaagtcctgctcagaan

SEQ ID NO: 14869 - DNA, 501 bp, Homo sapiens
  misc_feature (1)...(501): n = A,T,C or G
tgcggnnnnnttttgagtacatactcatgaacngccgnggaattccttaaccaatcatgctgcaggtgctggcaggaagactcttcgcagctgcatggggtttttttggtttccacagctctatactggttaccttggactaggggtgttgccagggaaacctcactgctggaatgcaatgacccagaagccacaacttatcagtccccagggggaaagactctcgcaaggtaaacaagcttattttcaattgccatctgtcccatccaaaatgctctctctgccttttgaattcataagggtcaaaatactaacattttcagtcatttagttgatattcacctaggcatgccagtagactgcatataaagtctgcctgaaagaggctgggtgtagtggctcacgcctgtaatctaagcactttgggaggctgatgccaaggcaggtggatcacttgaattcaggagttaagaccagcctgggcatcatggtgaaaccccg

SEQ ID NO: 14870 - DNA, 468 bp, Homo sapiens
  misc_feature (1)...(468): n = A,T,C or G
ggcggcttttaattgaagacctctagtacagtgcggtggaattcggactacaggcgcacaccactccaccaggctaattttcgtattttttgtagagacagggtatcaccacgttggccaggctggtctcgaactcctgagctcaagcaatctgcctgcctaggctcccaaagtgctggaattacaggtgtcagccactgcacctgaccctggctaatattttttatttttgtagagatgggatctcattatgttgcccaggctggtcttgaacttctgagctcaagtgatcctccagccttggcctcccaaagtgctgggattactggcgtgagctctttgttttcaactacttagttcctactgtaggaccttcacttagtgtcagccatcttatgcttttccttttccctcgcccttctctccttgagtctaagaagccccccaagggtgtgctctcaacattgn

SEQ ID NO: 14871 - DNA, 452 bp, Homo sapiens
  misc_feature (1)...(452): n = A,T,C or G
cgcgaccccccgccacnncctgaaacctcngaccaactggcgagcaaancnnnnaaatngnaaagnnaagggagcacggggngctgggaggnaaactgtggcaacgactgttgctacagctgctagaactgccacctgaggagtcattgccgctgggaccgctgcttggcgacacggccgtgatccaaggggacacggccctaatcacgcggccctggagccccgctcgtaggccagaggtcgatggagtccgcaaagccctgcaagacctggggctccgaattgtggaaataggagacgagaacgcgacgctggatggcactgacgttctcttcaccggccgggagtttttcgtaggcctctccaaatggaccaatcaccgaggagctgagatcgtggcggacacgttccgggacttcgccgtctccactgtgccagtctcgggtccctcn

SEQ ID NO: 14872 - DNA, 505 bp, Homo sapiens
  misc_feature (1)...(505): n = A,T,C or G
cagtgtncnnnnnttcagattgacnttggtcagngacgngcaanncaagaactgatgacccatggggccaagtctccagatggcacgagagtccataatgcctttttgtttgtgaccactgtatgaccgaatgaatggaatgcatgcgactgattttaggaggatgctaccagtttcggtagagtatgattgcctcgttcaatgtggcgtttttatatatattttgtgactctttatagtttaaattttttgtaagcaaaaaatacctggtaatttttcatttgtttttcatatactggtaccttctttttggctgagatctttcttttacttgtgatatattcatattactcgtttataaaaaatcaaaaacaaaaggaaagaaaacaaaaaaaacttgcacaaaaatactgaggagccaattaatttcctacttcaatgtatctaatgtaagtgaaaatctggatttatttctctagtttacttattttctactttaataatn

SEQ ID NO: 14873 - DNA, 467 bp, Homo sapiens
ctccgagaccatctgatagtagacccttagtccagagtggtggaattccctctcacttcagccttcccagtagctgggattacaaatatttgccacagcaccagctactgtggatttctaatggtaatttcctctttccctgtttcttataagggagatttgcccatttaatcccattttaaaatttattcaatcatttgtgtatgttattataaactcacaaatatttattttattatttgggctataatccaatgctgtatatagagagggagacagggtcttgctccattgcctaggctggagtgcagtggtacagtcatggcttgctgcatccctaaccttctgggctcaagcgatcctctcaagtagctggtgtcatctgccttgctaattttttttttttttttttaaaaaaatggagtctcgttgtgttgcccaggctgggctaaacctcctgccctcaa

SEQ ID NO: 14874 - DNA, 505 bp, Homo sapiens
  misc_feature (1)...(505): n = A,T,C or G
cgggggnntnnnnnattgaagtanatcctatgaacngncgnggaattcattttgccgccccccttgccgatgaggaatttgtggtattctggcttggcgcggatgtttacagtgaaactcttggtttgctgcagaaaccaatcccactgtgttagcctgacaccacgtgcctggaccacagtgaggaagacaagagggtctgtaggacagcaagctcgggctccccttacattgtcaccagtgtcctgatgttgcaccaatacccccaaaatggggctagcacacctcactgaataaacagatgaatacccagactgcacacctacttctcttccacaacaaccagatgctggtgggatgaacacacaggcttagaaccctggtcctgccacttacaagcactgaccaaacttctccaagccatttttgatctgcacagggggaggtgggagcaacgcgccggacgatatgttggcggagtgcacgtcctggggagcgtggggtg

SEQ ID NO: 14875 - DNA, 466 bp, Homo sapiens
  misc_feature (1)...(466): n = A,T,C or G
aggtcaggnnnncccccctgagaccatggacancgtttggaattccncttaaggtataatctgagacccggattcttcaaagaattcttgctggtgagaaacctaacaaatgtaatgaatgtggcaaggtcttctggcacaattctcacattgtacaatattgcaaaaattcatgcttgagagaaacaaaaacactgagagtgggaaaccattatgacttcaaacattcatcaacatcagagaatccatactaaagagcatttataataattatatgtgatagagattttccgcaggccaaagtctcactaggcatcaaaaacttttttgatgaaaccatacaaatgtaacgtgcatgcttaagcttttacccaggcatcaaaaccggaacatcacagggtttatactggagagtaactacacaaagataatgtaataagcctttcagtgtaatattcatgatttt

SEQ ID NO: 14876 - DNA, 501 bp, Homo sapiens
  misc_feature (1)...(501): n = A,T,C or G
gcggtnntnnttacagatgaattggtagngccngcaannncttaaaggaaaagaaacataacttcttacccattaagtgtgggctgtgcatagtgacttttattgagtacagtgtggaaggaggtggagaaatgtaatttacaaaggagaaaactgacaaacacttgcatctagatgttcatgattaataatcagtagtgtttagtcatatcgatagtgacttgattttatatgatgaagatggcaatttctctctttactttccttccaaaaatccataaaccctgtctaaccgtgagaaaagcatcagacaaatcgaaagacattgtataaaatacctgaccactgcttcttaaaacctttgtggtcatcaaaaacaagtaaagtgtgaaaattagaaatggaagtagagactttaaagatgatgtcccagaaataataaacatcataagagactacaaggaacgactctacaccaataaattggataatctagaatan

SEQ ID NO: 14877 - DNA, 464 bp, Homo sapiens
  misc_feature (1)...(464): n = A,T,C or G
gcggggacgannttcganncccctnnntttgttgatccctagtccgtgtggtggaattcgtttagggacatttttctagagggaagtagctttcaggctgggcattgaaagacaggtaggaattcacagagagaatatgtgtggcaactaaaggcagagggtaggtataggaagaatggcatatggcacatttgaaaggcaatggatagctggctttcttagtataaggcgtggatgtaggtgctatggaggacactatcttcttctcaaggagcttatggtctaactggggagaagaatctacagaaatgattcctgagttggtaacaaggcaaaatagaaaatgtgatttgtagaacaagagtaggctgtgaggccaggaagctagttaggcagatcatagatcaccttgaacgctaggcttatacatttggactttatctcagattcagtggaggaatgtg

SEQ ID NO: 14878 - DNA, 452 bp, Homo sapiens
  misc_feature (1)...(452): n = A,T,C or G
gggtannactagacctgatacttgnganncnnggannaagcagggacagccctttcaaactaacggggagggtgcctccgtattgactaaaaaggggatggacttactttccactgtgagagttacttatagtgtctgtgatggtcctgtatgcttccaaggcgatcggcagtgccagtcttcatctgctaagccaagaagatctgggaaggagtcagacggccttgggccagagttccaggggctctggaagtggctgccatgtgagttgaacagtccaattttcagtggggtcctgtacagatgggacatggctcatgaggaatcctgggctgtgggcacttgtagcaagctcctgtgggaggaggttctggaggaacccctggcagctgcggatcaggcgtttggagttcttgtgtgctggagatgtggctgtggtttgtctcacagag

SEQ ID NO: 14879 - DNA, 462 bp, Homo sapiens
  misc_feature (1)...(462): n = A,T,C or G
ggcgacccgnnngggatcncaactgaaacctacgnnactgacanctacgnanangcggnggaattccaatttgctttttgataagattggaaaacatttatggagactttcccagttaaatctatgacagtgtccacttaaagagtgcaatttagtatattctcagataactgcaacacaaaattgaaatgtgccagtatgtcatctttctacctggaagatactgtatatttggaaagtttatgcttctctcaataaatacatgttattaaataagccatatcacagtttaagaaattgtatatactttatcatatgccctttcagaaaccaggtattttgcatatgattgattttagaaagattttgaagctggggtttgtccatgttaattaagatcaaagtatatatatatatatatatatgtgctgtatttgcaactttcacattgtaatttcctat

SEQ ID NO: 14880 - DNA, 455 bp, Homo sapiens
  misc_feature (1)...(455): n = A,T,C or G
ccgggcccgnngnnaattanccaggtagcttcgnatgacggcgtangcannnnccgaaggatgcacatgaagaaatggagcaggctgtggaagaatgtgacccttactctggcctcttgaatgatactgaggagaacaactctgacaaccacaatcatgaggatgatgtgttggggtttcccagcaatcaggacttgtattggtcagaggacgatcaagagctcataatcccatgccttgcgctggtgagagcatccaaagcctgcctgaagaaaattcggatgttagtggcagagaatgggaagaaggatcaggtggcacagctggatgacattgtggatatttctgatgaaatcagccctagtgtggatgatttggctctgagcatatatccacctatgtgtcacctgaccgtgcgaatcaattctgcgaaacttgtatctgttttaaagaaa

SEQ ID NO: 14881 - DNA, 463 bp, Homo sapiens
  misc_feature (1)...(463): n = A,T,C or G
agcggccccccncgggaggacactgagacctanagcccctccnggcttcgtacaagcggnggaantngggngagnggnacccaacgggccggggcgccgcgtccgcaggatgaggcgcggggtgcaggcttgtaaacatataacataaaaatggcttccaaaagagctctggtcatcctggctaaaggagcagaggaaatggagacggtcatccctgtagatgtcatgaggcgagctgggattaaggtcaccgttgcaggcctggctggaaaagacccagtacagtgtagccgtgatgtggtcatttgtcctgatgccagccttgaagatgcaaaaaaagagggaccatatgatgtggtggttctaccaggaggtaatctgggcgcacagaatttatctgagtctgctgctgtgaaggagatactgaaggagcaggaaaaccggaagggcctgatagccgccn

SEQ ID NO: 14882 - DNA, 457 bp, Homo sapiens
  misc_feature (1)...(457): n = A,T,C or G
ggtggcccgnngggatgncaactganancttcgnnactacggtcatcgaannngcaannnncgacngnnggaagaactcgaagaaggccagaaaggagtaggagatggcacagttagctggggtctagaagatgacgaagacatgacacttacaagatggacagggatgataattgggcctccaagaacaatttatgaaaaccgaatatacagccttaaaatagaatgtggacctaaatacccagaagcacccccctttgtaagatttgtaacaaaaattaatatgaatggagtaaatagttctaatggagtggtggacccaagagccatatcagtgctagcaaaatggcagaattcatatagcatcaaagttgtcctgcaagagcttcggcgcctaatgatgtctaaagaaaatatgaaactccctcagccgcccgaaggacagtgttacagcaat

SEQ ID NO: 14883 - DNA, 446 bp, Homo sapiens
  misc_feature (1)...(446): n = A,T,C or G
aatctgagtttcgagnacaactaggcagtgtggtggaattcgttttgtgaaaggagaataattatatgtctctctctctgctattttattctgcctgccatcagagtacaaaaatatacattcacatcatctgtttgttgtatcatattcttggatcatacagatttagttacaatacacacacaggtcagccagcgttaaaagactgaaaagaatgaaaactataaatgaggacagatgagctatgcattatgtaatgacaaaacaggtgtctcggaagataaacaatgttcagaagcaaagaagatttaaatacttttgaatctctaattactttattctggttattagacaaagcaaatagctttcaaatgaagtctaaactttctgtagtacaattgaagtacataatgttgaatagctctagcttccgttactttttttta

SEQ ID NO: 14884 - DNA, 453 bp, Homo sapiens
  misc_feature (1)...(453): n = A,T,C or G
cactgagacccttggacagccctgtggaantccaaaactggtagagtctacaatgctacccagcatgctgttggcattgttgtaaacaaacaagttaagggcaagattcttgccaagagaattaatgtgcgtattgagcacattaagcactctaagagccgagatagcttcctgaaacgtgtgaaggaaaatgatcagaaaaagaaagaagccaaagagaaaggtacctgggttcaactaaagcgccagcctgctccacccagagaagcacactttgtgagaaccaatgggaaggagcctgagctgctggaacctattccctatgaattcatggcataataggtgttaaaaaaaaaaaataaaggacctctgggcttcnnaaaaaaaaaaaaaaaaaaaaaaaaaaaaaatgaaaaaaaaaaaaaaaaananttaaattaaaaggggagagcg

SEQ ID NO: 14885 - DNA, 445 bp, Homo sapiens
  misc_feature (1)...(445): n = A,T,C or G
attgtagatcattagtccgcgtggtggaattcggtagatgaaagctttaatttagaaagaaagttcaagtaaaggaaattattttgattaaatatattttatttgatctgggtatttttggaccacattattaaattaattgttaagctgcagttgagttgttcaagtgagagttttgataagccacttatgggccgcgttgtgaatcacttgccagttgtactttatggagcttattttatgatttaaaatactgtactgtacataggaggtatgttaccttctccttatttgtatgtttaccatatactttgatatttgaaatgttatgtactggaaaggccacttatatttctagaacagattggattttatgcaaccttttttccttgaattaacagcaataaaaaaatgaaaaacagcttaaaaaaaaaaaaaaaaaaan

SEQ ID NO: 14886 - DNA, 415 bp, Homo sapiens
  misc_feature (1)...(415): n = A,T,C or G
ttcgtctcttgagaagtatataaaccctatcaaatccactactaggtaaatttttaaaccatgcagctttattactctcctcccccaaagaatgtagtttgaaattttctcatttccagagtagaggccctaactgccattgtattactaataatgcaacatgaaattgaaggtgcctaactgctcaaaaaacaaaatcagccatcatactgtaactctgagaggaatgagaggtggcacaggcacgagtgggctcagcccgtgtgagtgaggagaactgaggaatcctagggtgcgcatcctgcatcctggctgcacgtttgctgcagagtatgattttctttcttgcctcccttcagttttcttcagttgcgttcagtgtatcttctggaaccaatagtgccctgtgttctan

SEQ ID NO: 14887 - DNA, 416 bp, Homo sapiens
attgtcagcgaaacctgctccaccaaaacctgaacccaaaccaagaaaaacatctgctaagaaagaacctggagcaaagattagcagaggtgctaaagggaagaaggaggaaaagcaggaggctggaaaggaaggtactgcaccatctgaaaatggtgaaactaaagctgaagaggtactttccataaatacctcccactgattgaatcagtgtctttaaagaaatttctcaatccttcagccggtgatagcacgttcttaatgtctctttttattgcctgtaatgttattgcagatccacatctctcgctcaactgttaatgtctcaacctccagaggcaccccacccagcacactgtcagtaaaggggcagattgaaacagtgagagttaagggtacagtagaaaaatctgcat

SEQ ID NO: 14888 - DNA, 477 bp, Homo sapiens
  misc_feature (1)...(477): n = A,T,C or G
gcggtaannnnntttgtagacccctcgtagacgttgtggaagtgagtggatttaatgtcagtggtgtgccacagtgcaatggctagacaactgaaaggggctaccaaggctgggaaaaaaatgcaattgttgctgtgagtgactttgaaagactctggtgccttgtggtgcccttctgaaattcaaacagtaatgcaaaagtgtctgcattataatttacggtgtctaaaattcatgtttttaaaagagcttgcctacagatggtttccacacttgaaattgtgccctgcgagttgcatagctggaagttcaatgctcagtcctaccttggctcccattaaacatttggtgctctgcggattgagttgaacgtgttgaggctttgcaatttcacttgtgttaaaggctctggcatttttccatttctatgcaaatttctttgaagcagaattgcttgcatatttcttctctgccgcn

SEQ ID NO: 14889 - DNA, 454 bp, Homo sapiens
  misc_feature (1)...(454): n = A,T,C or G
gcgggcccccngggatggaccttgaaacctangnccctccggcatcgtaaggcggnggaatnggacgacacgctgcctcaggagcccgcgaccgcgccttctcctccgccggtcccatacgctgctgaaatgggttgcggattgaacaagttagagaaacgtgatgaaaaacggcctgggaatatttattcaactttgaagaggcctcaggtggaaaccaagatagatgtgtcctatgaataccgcttcctggagttcacgactctgagtgctgcggagctccctgggtcctcagcagtgaggctggcctccctgcgtgacctgcccgcccagctcctggagctgtaccagcagggcttctcgctggcggccctgcaccccttcgtgcagcccacccatgagcgggagaagacgcccctggagcacatctttagagccatcctgatcaagaaaa

SEQ ID NO: 14890 - DNA, 487 bp, Homo sapiens
  misc_feature (1)...(487): n = A,T,C or G
aggggnnaatgagaccatgataagcgtcgnggaanncgncttcgcttgctcatctataaaatgaagatactactatttgcctctcagagctgctgtaggttatagtcataaccatatccagatattagttattgcttgcaaagcacttactccgtgccaagcagtttacaggcattcttattttgctgttgtttttgagacagtctcgctcttgtcacccaggctgctggagtgcagtggtgccatctcaactcacctgcaacctcagcctctaggattcaagcgattcttgtgcctcatcctcccgagtagctggaattacaggcgtgcgccaccatgctcggctaatttttgtatttttagtagagatggggtttcaccatgttggccaggatggtctcaaactcctgacctcaagtgatccgccttcctcggccttctgaaatgctaggattacaggcatgagccaccgtgcctgctttgcacc

SEQ ID NO: 14891 - DNA, 495 bp, Homo sapiens
  misc_feature (1)...(495): n = A,T,C or G
gaggccnnnnnnngnnncctgatacctttgannnnactgcattctcganngcnngnnnnannatngnnanntagnnntncatgnnaagctgntgactncatcatcttttgtttccagattggagggttnaccttcctccaggaagacctccctgactttcaaggggaggttagatgtccctgccccatagtcccgcagccctgactgcagtatcatcatccactttctcgtctatagggtccagccctacggggtttggcgggtgttctccccatgtgcggagacagacatagtaagaaataaagacacaagacaaagagataaatagaaaacagctgggcctgggggaccactaccaccaaaacacgaagaccggtagtggccccgaatggctgggcgcgctgatatttattgtatacaagacaagggggacaggcagggtaaggaaggcgtgtccgccaagtgattggataagtcaagcaagtcacgtgatca

SEQ ID NO: 14892 - DNA, 424 bp, Homo sapiens
  misc_feature (1)...(424): n = A,T,C or G
gtcgtgtatctggagatttcccagtccagatgcaacttaccagtcagggtcatatttaccaaaagcaaagctgcatggcaataaatacagttgacacataccatcctatttagttgtcagggtaggaagagctaggtagttaacagaagtcatcaggggaaaaggttttgttaaccttttcattttcaactacttgggaagtacatgggggggggcgggacaaacaaacaaaaaaaacactggtaagctgctttccctggaagacaaacaactaaactgatctaacagatagaattgtgttgcttaactgatctaacagacagaattgtgttgggcctgtgagctattccctgggccatttactggtggtngggggtggggagcaccaaaatgaagtagcaatataaacctgtctctgagcctc

SEQ ID NO: 14893 - DNA, 455 bp, Homo sapiens
  misc_feature (1)...(455): n = A,T,C or G
catagacgnccccactgatgaccactaggacangcggaggaattcgcagggagcagctctctttgcttcaaaagccggagcagctggcaaagacttattgaatgagcttgagtcccccaaggaagaacccatggaagagggacagcttaataaatgccagggaatctgacctggaaggcagatgggagggggctggtctggctgtggacaccgtcacagtccaggatgaagaggagtacagggtcctgtgagctgtttgaccactgttctaagactatgtgtgcccaaaagcacataagcatctatgttgagagtaagtttgtatcctgcgttggtctcagaaagaacgggaatgcttaagattgtgaaagtacataatattttatactttgggagagagctttaagagtccctggaaatactttctaatttttttaacttaaaatgcaagagag

SEQ ID NO: 14894 - DNA, 417 bp, Homo sapiens
aaatttaagaatgactatttgggcgggctggctcttttgcagcttgtgatttcttccagcttgggaggggctgctggaagtggcatttcgttcagagctgactttcagtgcacccaaactggatgacgtgccaatgtccatttgccttatgctttgtggagctgattaggctgggatttgaggtgataatccagtaagtctttcctcgttcctacttgtggaggatcagtagctgttatgatgccagaccatttggagaagtatcagaggcctgaccggacacataatatgacaaccacatttttcctcatcatccatgaggaaatggatgatttctcttttccatatgtcactgggggaaaggctgcctgtacctctcaagctttgcattttactggaaactgaggcgtcaagatg

SEQ ID NO: 14895 - DNA, 438 bp, Homo sapiens
  misc_feature (1)...(438): n = A,T,C or G
ntttgacgaccattagtcttggtggccatttcctgacacataggttctttccaaaggggatcaagtggccctgggagacccggcatcaaaccaaaaagaatggctgttgctgtgtctgtttacaacttttccagatgctggcagtacctgtggacttaaaagtgttttttagaggatcgccatggttattgatcactactttatgaactacacagcattttccagaaaaagggggtttaacttgttacagaattggagaagtctttgcaaaggactgatttaagcccttctacccaacaccttcccctgtgtagatttgcatacagctaaatctaaaatattctgctaaagactattggatgtatggttgatgggatgaaacctttgattaaatttccttttggtggagacatcctgtggtaggtacagataatccan

SEQ ID NO: 14896 - DNA, 446 bp, Homo sapiens
  misc_feature (1)...(446): n = A,T,C or G
natgtagaccatagaccactgtggnggaattcaccctgcgagcggctgctgagccgggtggccgccctgttccccgcgctgcggcctggcggcttccaggcgcactaccgcgatgaggacggggacttggttgccttttccagtgacgaggaattgacaatggccatgtcctacgtgaaggatgacatcttccgaatctacattaaagagaaaaaagagtgccggcgggaccaccgcccaccgtgtgctcaggaggcgccccgcaacatggtgcaccccaatgtgatctgcgatggctgcaatgggcctgtggtaggaacccgctacaagtgcagcgtctgcccagactacgacttgtgtagcgtctgcgagggaaagggcttgcaccgggggcacaccaagctcgcattccccagccccttcgggcacctgtctgagggcttctn

SEQ ID NO: 14897 - DNA, 449 bp, Homo sapiens
  misc_feature (1)...(449): n = A,T,C or G
caactgagaccnactgaagccgtcggaannccgnnaaagctaagctacctctccactctcctgtccctgcccttatctaaaatagaaagccatctgaaagaaaagaacctagggaaaattcccatgtgagaaatgaaattgtccttgtgaagggttaggactctaggaactgtgtgcagaaaatcgttgaaagataatctttataggatgctgaaaattactggcagggatcaactctgaaggttaaattgtctctgccagtgcctctaacaggaaatacaagggagatttatttatttataatgtccaccttcattttgtatactgtgttgtaatacttagagaaataaaggtaatggaaaagaataggtaaagtacattcattttgttaaatcagaaattcaacaaacagtcttaacccattcagaagccttgcagctggtgtgctg

SEQ ID NO: 14898 - DNA, 463 bp, Homo sapiens
  misc_feature (1)...(463): n = A,T,C or G
cttgaagacccttagttagtgcgccggaattcgaaaattataaatcagctattttttaagagaaaaaaaccaacataatttccacattatttctcctaccgcctggttttcagggtttttaaaagacttgttgggaatgccatttaatgattatagtcaaaagcacattttctcctgcagctggttggagggtgtcttaattttagccactgttttgtttttaaccatgtagcgctgcctcgtcttggctttggtctttccgtttctaacctgtgagaaccagcgccgaagcttgcgttgtctttagaatccctgctccagtctatgttcccccaagacagtgttaatcgctctgggattctgaatagcacttaattcttatctctattatagcttgcctggcgttgcactacaattatttgtttacgtgtctgtctaccccactagacaacaccctttgagn

SEQ ID NO: 14899 - DNA, 462 bp, Homo sapiens
  misc_feature (1)...(462): n = A,T,C or G
gggaccccccncggaagnaccttgaaacctanngcccctccnggcttagtagaagcgnngnaaatnnnaagaagccatctcgaagatcaagtgggagtcggagcgggatattcggaggctgatggatgaaatcaaagccaaggacaggatcatgttttccctggaaaaggaactggagacccagacaggctatgtacagaaactccaacttcagaaggaggctttggacgaacaactctttctggtcaaggaggctgagtgcaacatgagcagcccaaaacgagaaattccaggaagggcaggtgatggttccgaacactgcagcagtcctgatttgcgaagaaatcaaaagagaatagctgaattgaatgccactataagaaaattagaagacaggaataccttgcttggagatgaacgaaatgaactgttaaaacgtgtgcgggaaaccgaaaagcaatg

SEQ ID NO: 14900 - DNA, 467 bp, Homo sapiens
  misc_feature (1)...(467): n = A,T,C or G
agagcagcggnnnnccccaatgagnacanctgatagacntgcggaannccggaccatgacgcagggatgaaggagaaatgaaagaaattactggaaagacaatctggagaattgggtgcaatgtcagtgaagggttccacatcaccatcttacacctgactacagtggtaccattgaagagggaaagtcatggtaagctgaagttctcagtggacctctgaacatgaagaatcccaaaccaatgagggaacaagacagtcatctcaaggaaaaccaactttcctccctttcgactgcctgttctgaagcacaaggcatagaatatcaagagccaactcctataacctcaccttaaaatcaaagcttttggtgattttgaagattgaaccaacaactggaaataatttcttcaatagtaatttatccttagaacatcaaaatggagaaggatcttatggaaccattta

SEQ ID NO: 14901 - DNA, 441 bp, Homo sapiens
  misc_feature (1)...(441): n = A,T,C or G
nttcgagaccagtagtccatgcggtggaattcacagctcaaaacaccaactgctgaggctgccttgggaagaggatgatcctaaacaaagctctgctgctgggggccctcgctctgaccaccgtgatgagcccctgtggaggtgaagacattgtggctgaccacgttgcctcttgtggtgtaaacttgtaccagttttacggtccctctggccagtacacccatgaatttgatggagatgagcagttctacgtggacctggagaggaaggagactgcctggcggtggcctgagttcagcaaatttggaggttttgacccgcagggtgcactgagaaacatggctgtggcaaaacacaacttgaacatcatgattaaacgctacaactctaccgctgctaccaatgaggttcctgaggtcacagtgttttccaagtctcccg

SEQ ID NO: 14902 - DNA, 404 bp, Homo sapiens
gcggggaagagtgtgtacgtggtgggggcttcctcggtggcgggcatggaggcttcgcgctgccggctcagtcccagcggcgacagtgtcttccatgaagaaatgatgaagatgcgacaggctaagctggattatcagaggctactacttgagaagaggcaaaggaaaaagcgccttgagccatttatggtgcagcccaatccagaagccaggctacgtcgggcaaagccaagggccagtgatgagcagactcccttggtgaactgtcatactccccacagcaatgtcatcttacatggtattgatggtccagctgctgtcctgaaaccagacgaagttcatgctccatcagtaagctcctctgttgtggaagaagatgctgaaaacaccgtggatactgcttc

SEQ ID NO: 14903 - DNA, 496 bp, Homo sapiens
  misc_feature (1)...(496): n = A,T,C or G
gaagccnggggnnccccccaatagataccctacgnagagngcnggaattcggngtctggggagcgcagcagccatggcaagccgtctcctgctcaacaacggcgccaagatgcccatcctggggttgggtacctggaagtcccctccagggcaggtgactgaggccgtgaaggtggccattgacgtcgggtaccgccacatcgactgtgcccatgtgtaccagaatgagaatgaggtgggggtggccattcaggagaagctcagggagcaggtggtgaagcgtgaggagctcttcatcgtcagcaagctgtggtgcacgtaccatgagaagggcctggtgaaaggagcctgccaaaagacactcagcgacctgaagctggactacctggacctctaccttattcactggccgactggctttaagcctgggaaggaatttttcccattggatgagtcgggcaatgtggttcccagagacaccaacattctagacacg

SEQ ID NO: 14904 - DNA, 454 bp, Homo sapiens
  misc_feature (1)...(454): n = A,T,C or G
attgacnacccatgatgaccccttgaacangcggnggaattcccacaccctgggcctggtagttaaaaatcaacccctgacctgattgttatgttatttatagattacagacattgtatagaaaagcactgtgacaatgcctttcctgttttgttccgatctagttactggtgcatgcagcccccagtcacgtaccccctgcttgctcaattgatcacgaccctctcacgtgcacccccttagagttgtgagcccttaaaagggacaggaattgctcactcggggagcttggctcttgagaccggagtcttgccgatgcccctggcctaataaaccccttccttctttaactcggtgtctgataagttttgtctgcagctcgatttcttggttccctgactgggaagcgaggtgaatggcggatggtcaaggcagctccttaggcggcttaaan

SEQ ID NO: 14905 - DNA, 464 bp, Homo sapiens
  misc_feature (1)...(464): n = A,T,C or G
ggccaggggggggcccaactgaaaccnactgagantctcgcacgngcgnggaattncttgggatgagccatataaacagtctgatgggctgaatgcaatttgtaggtctagtgaatgaaaatagtcttggttcagaatcgtagaattatgattttatggtcctcatttactttattttatttttactttattccagcaaacgttttatattttctactttttgccagcatttcattatgggtatatattaagcaccatatgactttttaaaatattgctgtagagtagtcaaagctcacatgagacgccacccaagcagctgtcatatgaatgcatatctgttgttcaaggaatgtatgcttcatgtaccggtgagcatgcattcagaggcttccaaagtgtttccattttaatgggtagtgggggatgctaaaggattattttaattgttatttttccaaatg

SEQ ID NO: 14906 - DNA, 420 bp, Homo sapiens
  misc_feature (1)...(420): n = A,T,C or G
caacaccctgacctctttctctcctccttgattgtatgaataaccctgagatcacctcttagaactggttttaacctttagctgcagcggctacgctgccacgtgtgtatatatatgacgttgtacattgcacatacccttggatccccacagtttggtcctcctcccagctacccctttatagtatgacgagttaacaagttggtgacctgcacaaagcgagacacagctatttaatctcttgccagatatcgcccctcttggtgcgatgctgtacaggtctctgtaaaaagtccttgctgtctcagcagccaatcaacttatagtttatttttttctgggnttttggtttggtttggtttctttctaatcgaggggtgaaaaagttctaggttcagttgaagttctgatgaagaaaca

SEQ ID NO: 14907 - DNA, 581 bp, Homo sapiens
  misc_feature (1)...(581): n = A,T,C or G
aatcgaacacagtttcgagaggcgcaattcaacaattcgaaactagaccttttggaagcgaactcctacaaactgtcatcaatgttagcagaacttgagcatagacctcaacccagccatccttgtagtaattccatcttcaggtggagggaaaaggagcatactcatagctatgtgaaaatatctcggccttttttaatgaagagattagagaatattgtgagcaaggcatcttctggtgggcagagcaatccaggttcttcaactccagcccctggtgcagcccagctcagcagcagactttgcaaggccttgtattcttttcaagccaggcaagatgatgagttgaatttggaaaagggtgacattgtgattatacacgagaaaaaagaagaaggatggtggcttggatctttgaatgggaaaaaaggccattttcctgccgcttatgtggaggagttaccttcaaatgctggcaacacagctacaaaggcataaaacaagactctgaacatactaccttcacactcggtaatctcaaatacaagggtggtcanataagaatanagtgtcttaccttt

SEQ ID NO: 14908 - DNA, 478 bp, Homo sapiens
  misc_feature (1)...(478): n = A,T,C or G
nggcgcgtcccgcgccggnnnttttnnattgtagactctagtccatgcggnggaattcaaatttcagaatgatatctttttgatgtctaaaaagcaaagcattttataatatctcattagccaggctttttaggaacagagaaggttttccttgaaatttgattgtttgtttatttgtggcagggtgaaaaatgtacaaactacccctatttatacttatatctctctctatatgtacgcattatggaaatataggaagagatatagcccaaagatagatggtaagtagacagtctgaaaatgttgctccatactaaagaacctttctggaaatttgcatttcgctacttttttccacttgagaggggtctcaatacagggaggtggccaaggaacaacacttctcagtggccaccagttcatatatcccctcaaaaggctctacttttctccaccaaaccattgggttgcccaactg

SEQ ID NO: 14909 - DNA, 465 bp, Homo sapiens
  misc_feature (1)...(465): n = A,T,C or G
nattgtagacattagatagtgcggcggaattccttcagttcactccctttcttatccctgctcaggcgccccaacatatggagctgcagtttagcagatgctacgtggcatacagatttccgggtaagagtttcccggctaagagaacagcgagggcaaaagccctcatgtgagcatgtctggtgtgttggaagaacagcaatgaggctgatatggctgaagcagagaaaatcagggaagagaataagtgatgagatctaagaggtgatggggagccacatcacgtagaaactaataagttacagtaaaactcacactccgagtaacatgggaagtcactgcagggtttcaagcaagggagtgacatgatctgccttgtctttttacagaaaattcttgctgctgtattgagaacagattgagaaaacaagggcagaagcagggagaccagtcaggagctgattg

SEQ ID NO: 14910 - DNA, 412 bp, Homo sapiens
gggggctaggtttttttaaaaggtttattgctaccatgactctgcttgttttattttattttatttgttgattgtttgtttgtttgtttgtacaggcgaggtctcactgtgttgtacaggctgatctcgaactcctgggctcaaatgatcctcttgccttggcctgccaaaatgcctgggattacaggtgtgagccaccacacctggcctctgcttgattttaaatgtctaaacatgtaatctatcaaattatcttgaaactgctttggaagatcgtatattactctcctgtcttcagaagtgatgagatttttaagttaccagttgctcgtattaaaaaaaaagaaatccccaaactagtggcttaaaacaaccaagtggttatttgctcacaattctataatctgagctg

SEQ ID NO: 14911 - DNA, 396 bp, Homo sapiens
gccaaccactaggtggcaagcttgccgctcaagagccccacgggagcctcaggaccaaatcccaagtcagggccacaggggatcccgtcaccttttccgattaggcagcgggctgtgagtcattcctgtattccatcaaccagacaatctgcttgcggttggatagcattgaagccaaattgcaagccctggaggctacttgtaaatccttagaagaaaagctggatctggtcacgaacaagcagcacagccccatccaggttcccatggttgccggctcccctctcaggacaacccagatgtgcaacaaagtgcgatggtgaacccgtgagcaactgtggtacctccacctgtcccacaacctacaactcatcagtaccaagggctggacgctgg

SEQ ID NO: 14912 - DNA, 453 bp, Homo sapiens
  misc_feature (1)...(453): n = A,T,C or G
nttcgagaccatagaccagcgtggtggaattctacaaaactaaaaatatcatgtatctgatgtgcaatggaaagtcttgtcatcattagatatgagttcttgattatattctgaatattgatgattagaaaaatcttatgttctgttgctcttaacaacagacccacacacaacaaaaagcatgctatttgagtaactcttacgacttacaaggctgagggctgtggtgtgcattattctttagggtcttccaccagcagtgcctcctattaacctgtgacaaacaagtctctcaatgttaaagaactggacatgtgttttttatgttttttgttaggaatcagaaagtataataatatgcttggtttctttttcctatagtaacattttacaaaagagctgctaggcaggtattttattctcaaagtgatctcaaactggatgtaaaatttn

SEQ ID NO: 14913 - DNA, 455 bp, Homo sapiens
  misc_feature (1)...(455): n = A,T,C or G
attgangccccattgaggacccttataccangcggtggaattcgctagcacagcccatggaactcagaagagcactttacttactgtcattggtttattgtgaaggataccactcaggaagagccaaatggaagagacacatgggcaaagcctggggaagggctcagagctttcccaccctccctgggtgcaccttcccagcacctcagtgtgctcaccaacctggaaactccctgagccccaagagctgtttaggtgtctttgtggaggttccattacatggttatgattgattaaatcattggtcattggtgatggggctcaacctcagacccctttccccttcctgaggtcagaggctggggctgagtgttcccgccctctactgacaggattggtctttctggtggctggccttatgctgggctctcaggtccccacctcagccactgcag

SEQ ID NO: 14914 - DNA, 445 bp, Homo sapiens
  misc_feature (1)...(445): n = A,T,C or G
taaaagttgangaccactagtcctgtgtggtcgaattcgcaagatagaagccagccttttgttaacctaatcctgaaagtgacatccatcatttttgtcatactcgtttcattagaactcactaagtccagcccacattcaaaggtttgaagaccagaaaatgggatcactggacatcttacaggtcaaacttaattttaatagtaatgttttacatgtaacaatgcagaatgaccatgaatagtatgcatttttagaaggctcatgcactaaaactctcatcttttggttaatgcctaaaattccagggagctttgacctttcagtttaaggatttaattagtaaaatatagattatttaaggtaaatttccttttgggcctgagtaatagtactggttaccgttaaaaaatgtgggggttggggcattgacccccctgcacag

SEQ ID NO: 14915 - DNA, 415 bp, Homo sapiens
tcattccaagaaactgatgttatttgatttatttaaaggctaaaatttgtttttttattctttgcacaattgtttcattgtttgacacttaatgcactcgtcatttgcatacgacagtagcattctgaccacacttgtacgctgtaacctcatctacttctgatgtttttaaaaaatgacttttaacaaggagagggaaaagaaacccactaaattttgctttgtttccttgaagaatgtggcaacactgttttgtgattttatttgtgcaggtcatgcacacagttttgataaagggcagtaacaagtattggggcctattttttttttttttccacaaggcattctttaaagctatgggaaattttttttgcacctttgaacaaaaaatacacctgcccctgtatatcttttt

SEQ ID NO: 14916 - DNA, 472 bp, Homo sapiens
  misc_feature (1)...(472): n = A,T,C or G
nactggatgaccactagtccagtgcggnggaancctgatttccttcttttcacaggcaaagtgggtgggtagaggggagctttaaaaatagaagtacaaaacaacatcctggaaacatatgaccccagatggaataatgtctcattccccagtgcagataatgggctgctgctggctctgtggtgtctgtctgcagaagatttgctcagtcaaggaaattcaagtggtgagacctttccaccatgggtggtaagagaaacctgccttcaccaaaatctctgaaggggaaagaagtggagagaaaggtttgcttcacttcggggactgcagtttgagaaataaaagggatacagagatatctgcactttgtagaaagggcaagattatttgcttatatctgaagggaggtgggtggttttgctggatgtttggtctgaaagagttacttttgataaagctaatctaattgtag

SEQ ID NO: 14917 - DNA, 414 bp, Homo sapiens
  misc_feature (1)...(414): n = A,T,C or G
ataaaagcaacgtggcaggtattttcgattttcccattccagatactgcctctatcagtcgacccttaccatttgtaacataatagattgaaacaacaggttaagtgctttggaattaagagttaaagggaaccgggggtggagaaaggaaaagaaggttgagacctccaaaacatagttttctgttctatgggaatttttgctctcattatctgggaagtgttcttaaaaataagaattaatagcaaagatgcagcaaagctctgaggatgcatttgcctgatatttttttctttgctcttgtgtttttgtatgtagttataaatactgtagattttttttttgtgattttttgccaaagttgttgttctatttatacattttaatgtcttaagacattttttcaatatcacn

SEQ ID NO: 14918 - DNA, 478 bp, Homo sapiens
  misc_feature (1)...(478): n = A,T,C or G
cattgagatcgatcgncnctnggcagagtgcattagnctganaacatcactttttgtggatttgtgtatccggtcaccaaacggtgaatattatataagaatgggggaagaaaggatagaatattaaaactgctttgcatgggttttctgggaaattacgataacttcactgagaagacattgaatggaaattattcacccattttaaattggtgacctaaggatcagagatttgtctttccaacagcttgtcattttttcatttctcttctcatttttcaggaaagttttgagtgttataaggtggaaggaaacatagtagcaatggatacttttttgaaaaattattgcattaccaagaaacagtagccaaagatatttgaagatcatgttcctcggctccattgtgggttattctagaaatccagtcttaaatctctccgctaaagtagacattccccataanaattagccagct

SEQ ID NO: 14919 - DNA, 480 bp, Homo sapiens
  misc_feature (1)...(480): n = A,T,C or G
aattgatgaccactgnanangccgngnaancctgtttgacccctantccaagcggnggaattccattctctgagagaattatttctggatcacaatgacttaaaatctataccacctgggatacaagaaatgaaagcactacattttctgaggctgaacaacaacaagatacggaacattcttccagaagaaatttgcaatgctgaagaggatgatgactcaaatctggaacatcttcatcttgaaaacaattatattaaaattagagaaataccatcttacacattttcatgcataagatcatactcaagtatcgttcttaaaccacaaaacatcaagtaattccaagttttcctttgctgtttataaactttactcatgtatttgtagtagctgcatttgtcattaataagagagacataatcctcctgttatactcagtatcattatatgctagtcaacctgattcactaacacaca

SEQ ID NO: 14920 - DNA, 433 bp, Homo sapiens
  misc_feature (1)...(433): n = A,T,C or G
tattgagcccctttttgagaccttatccaggggggaattgtagagtatcacaggctctactgagtcatgtatggcttcattactttgtattggcttttgaaacactcagaaggccactgggcagtttctgcctcagaattatgatttggagccaagaattgtgatgacagattagacagagacagttgtatgtttctaagtcctttccctaatcccagtataaccagaaacaaaatgctacagaaaacacaggcattccattcaatgagtcactactttatgtcacctactgtggtagataatggcgatgcgggatgtggggtgtggtagaaagtgtatataaagtccctatctatatgcagtttccagtctgggaatcacctttagtttatttacattggattttttaagctgagtgtttttccactctatn

SEQ ID NO: 14921 - DNA, 521 bp, Homo sapiens
gttatattttaattaagcatttattttagttgttttcatctattcaagcaaaatgaataagcagcatttttcattgcacttaaaaatgtaaaatacctgcatgccacttaatctgtaacattttaccagttcagatgcctgtaatgtgtgactttatgtgtgtctgtgttgttttgaagagaataaaggaaataatactttgcaaactgtttaaacaagtgtttaaacttctattggcaacatttattgggctaagcagttattgaaaactccgcatagttttattttccatttgaaacttcaatcaaatcaagactattatattcattagggaattaaagactaatttgccttttaaatgtgaagttgaacactgtgtggaaagtaaatgtgtgatgaagcaaaatgtataaagtatgaaatattatacttttaccctggataattattcaggaccccagttggcccaaataggtgcaatttttaatcctttgaattagccagccagacctaatgctaag

SEQ ID NO: 14922 - DNA, 454 bp, Homo sapiens
ttttattcgagactatagtccatgcggtggaattcgactgagtgagtgcctccttaaactttgtatcctgtgtgcctcccttgccttaccctagtcccagccctgcagctttaagtaattcagacatggattagccatttcccagttctgtctcatacagtccagcctctgccaccttccccaccccttcctttattccatcctaactagttcagccctagtcaagactggatagactgatactgctttgtttcccccaggaaccaaccacccaaccccagtattctggtaattttgacaatgatctatatgaaatttatttgattgacatttagactcatgagttaagcttctgctgaccatttatgttagggtacaatcagaggagcagaaccactaagataaagattatgtatatatgtattttaagggatttattatagggatctgaccg

SEQ ID NO: 14923 - DNA, 461 bp, Homo sapiens
  misc_feature (1)...(461): n = A,T,C or G
natcgagatcgtagtccatgcggnggaattcgatggtgggtgcctgtaatcccagctactcgggaggctgaggtgggagaatcacttgaacccaggaggcggaggttgcagtgagccaagatcgtgtcattgcactccagcctgggcaacagagtgagactccgcctcaaaaaaaaaaaattttttttttaatatgcaggtcaactatatttcaagtccttaagttaatgaaagagaaacatatcaacaggtgaccactaattcaaggtaatgatattatggaacgatacttaaaacttaaaccagatattttaccaaagggttctcatttgtgaattgaagttagttaaatcctatgatctcaaggataattctcttaacccttggtataccattagtatccacaggcataatttttcatgaatttcttgttttgagctattttatttgtaagaactgan

SEQ ID NO: 14924 - DNA, 569 bp, Homo sapiens
  misc_feature (1)...(569): n = A,T,C or G
actgagaaacctagaatnccncttccnnnnnncaattcgtaacttaaaattacaattatattttatgtaaatattttgcaaaggactatgcattctgaaatgcataggtgctttttcccaccaagcatttgcatatgtccacaaatagtattatgttactagtatctatattttgattttcctgagcaactgtatcaaatccaaatttagattagacaaaaaattattattttaattaaactgtggcatacatataatacatacctaattatagtagtgagaactatttcttttatctctttaggttcaaaatggtgaatttctttattatatgaatgctttgttgtgagataacatcacactgttacaatggattttagaggtttgtcttttttgggtggggtgggaagctgagagggttaattcaatacatggctganattaccaaatgtataaatacctcattttcactaccatacaagaaaaanacacctattttgattgatcagttcttttgtatgaatatccacctcctttaaatactctatttttatatatattnttatatg

SEQ ID NO: 14925 - DNA, 563 bp, Homo sapiens
  misc_feature (1)...(563): n = A,T,C or G
ntgagatncctgtccaagcggtggnnnnncattgttttctgtgacttcaacctagttattctgaagctaatatataataataatggttttcccccaatttataatagagaacagtacaaagtaacagcagaaatgtctgttagtgggtgaaagcacataatgcatagttcattagcttttttaaaaaatcacatgtaattgtgttacaaaaatatatgtatagtaatggcatttacttggtattacctggtttgtgtgatagaataaaatattagaattttatggtgtttgagttagttatctattgctctgtaacaaactgagcagcttaaaataacaaacattatctcagtttctgtgggtcaggattctgtccagtttaccttgggttcactggcttggcctctcaccaagcagtgaaggtgttggtggtggctgtgatcatcccaaggcaggatagggagagaatctgtctccaagatcaggttggcaggattcatctcagaggctgctggactgggcctccgtttctagatggccattggtcagaggccttttacaaa

SEQ ID NO: 14926 - DNA, 481 bp, Homo sapiens
  misc_feature (1)...(481): n = A,T,C or G
aactgacgaacactgtaanaagcgggggaaannttggaattcccttcctccacgcggaggaattcgtcaatgccaaggacatgttaaagatgacagctctccattgggccacagaacacaatcatcaagaggtgggggaacttttaatcaaatatggtgctgatgtacacacgcaaagtaaattttgtaaaactgcatttgatatttcaatagacaatggaaatgaagatttagcagagatattacagattgctatgcagaaccaaatcaacacaaacccagagagtcctgacactgtgacaatacatgctgcaacaccacagtttatcattggacctggaggggtggtgaacctaacagatgaaacgggtgtatctgctgttcagtttggaaactcttctacatcagtattagctacattagctgccttagctgaagcatctgctccattgtccaattcttcagaaactccagtagtggc

SEQ ID NO: 14927 - DNA, 490 bp, Homo sapiens
  misc_feature (1)...(490): n = A,T,C or G
ggggggccnnnnnnntggggnnnaattgagnaccntngaactgagcaccgctagtacagnccggtggaattcatccttttttttaaaagagagaattagaaaatattaaatcctgcatgtaatatatctgctgtcatcttagttggaccaacttcccatttatttatcttaaaactatacagttacatcttaattccatccaaagaagatacagtttgaagacagaagtgtactctctacaatgcaatttactgtacagttagaaagcaaagtgttaaatggagaagatacttgtttttattaaacattttgagatttagataaactacattttaactgaatgtctaaagtgattatcttttttccccccaagttagtcttaaatcttttgggtttgaatgaaggttttacataagaaattattaaaaacaaggggggtgggtaataaatgtatataacattaaataatgtaacgtaggtgtagattccn

SEQ ID NO: 14928 - DNA, 508 bp, Homo sapiens
  misc_feature (1)...(508): n = A,T,C or G
ggggaggcagggggnnnnnnattgtagatcgtggctagtgcggggaacncggcggcggaggaggaggaggtggactctgccgacaccggagagaggtcaggatggctaactggttggctccccacatggtgccctacgtctatatcacaccttaaagaagctgaagagaagatgttaaaatgtgtgccttgcacatacaaaaaagaacctgttcgtatatctaatggaaataaaatatggacactgaagttctctcataatatttcaaataagactccacttgtccttctccatggttttggaggaggtcttgggctctgggcactgaattttggagatctttgcaccaacagacctgtctatgcttttgacctattgggttttggacgaagtagtagacccaggtttgacagtgatgcanaagaagtggagaatcagtttgtggaatccattgaagagtggagatgtgccctatgattggacaaaatgatcttgcttgggcacaacc

SEQ ID NO: 14929 - DNA, 473 bp, Homo sapiens
  misc_feature (1)...(473): n = A,T,C or G
gatgcgagggccccatgataccttacgttggagcgcgattncgatcttagggatgataaagacacgatcgagaaactgaaggagaagaagctgactcccatcacctatccgcagggtctagccatggctaaagagattggtgctgtaaaatacctggagtgctcggcgctcacacagcgaggcctcaagacagtgtttgacgaagcgatccgagcagtcctctgcccgcctcccgtgaagaagaggaagagaaaatgcctgctgttgtaaatgtctcagcccctcgttcttggtcctgtcccttggaacctttgtacgctttgctcanaaaaaaaaaaaaaaaaaaaaaaaaaaaaaaaannngcgcccctttctatttaaagggccctttaaaacccggtaaaaccccctgggggggccttttaagtccccacctttttgtggtgcccccccccccgggttttttttgaacg

SEQ ID NO: 14930 - DNA, 491 bp, Homo sapiens
  misc_feature (1)...(491): n = A,T,C or G
nattgagaccctaggnanngccggnnctgtagaccatagtcagngcggtggaattccagaaactgaaattgaaagcaaatcatagagatgagaggttaatatactcctgctgtataaaataagaatcattgaaaataaaccacccaaagagaaaaaagagcaaataaccttgaacagaaaatgtacacattttttaaaaaaagtaaatggctaatatatataaaagaaaattttcaaagtttagttttatttatttacttttttgaggcagagtttcactctgttgctcaggctgaagtgcagtggcacagtcttggctcactgcaacctctgcctcctggattcaagtgattctcatgcctcagcctcctgagtagctgagactacaagcatgttgccaacacgcctgtctcattttggcattataatatttttagtggagatgaggtttcgccatgttggccaggctggtctcaaactcctggcctcaa

SEQ ID NO: 14931 - DNA, 500 bp, Homo sapiens
  misc_feature (1)...(500): n = A,T,C or G
tgggagatnnnnnnaggggnnnnnnnnaattggagaccactatcgagagtcggggaatacctccagcctgggcaacaagagcgaaactctgtctcaaaataaataaaaaataaaagacagaaagcaaggggtgcctaaatctagacttggggtccacaccgggcagcggggttgcaacccagcacctggtaggctccatttcttcccaagcccgagcagagggtcatgcgggccccacaggagaagcggccagggcccgcggggggcaccacctgtggacagccctcctgtccccaagctttcaggcaggcactgaaacgcaccgaacttccacgctctgctggtcagtggcggctgtcccctccccagcccagccgcccagccacatgtgtctgcctgacccgtacacaccaggggttccggggttgggagctgaaccatccccacctcagggntatatttccctctccccttccctccccgccaagagctctgccagg

SEQ ID NO: 14932 - DNA, 461 bp, Homo sapiens
  misc_feature (1)...(461): n = A,T,C or G
atcgagaccttttgacgacactagaaagngcggcggaattcgccctaaagaaccacggatctgctctggacatttcatatataaagaatcatatgatatctattttatacttgtactctgtggtaatgtttttgaggcacatgtatcagtttaagtagtttcttgttattgctgactagtattcaattcttttaaatgtattgatacttatttaatggcctagcatatgatccatattggagaatgttccatttttgcttgaaaagaatgtgtattctctgttggtgggagtgtaaattagttccgccattgtggaagacagtgtggtgattcctcaaaaatctagaactagaaataccatttggcccagcaatctcattactgggtatatacccaaaggattataaatcattctcctataaagacacatgaacacgtatgcttactgcggcactattcac

SEQ ID NO: 14933 - DNA, 477 bp, Homo sapiens
  misc_feature (1)...(477): n = A,T,C or G
gggtgcccccnnnnagggggnttctgagnacttctgactgtaggctgtagnccttcctagtcatttagaacatggttatcatccaagactactctaccctgcaacattgaactcccaagagcaaatccacattcctcttgagttctgcagcttctgtgtaaatagggcagctgtcgtctatgccgtagaatcacatgatctgaggaccattcatggaagctgctaaatagcctagtctggggagtcttccataaagttttgcatggagcaaacaaacaggattaaactaggtttggttccttcagccctctaaaagcatagggcttagcctgcaggcttccttgggctttctctgtgtgtgtagttttgtaaacactatagcatctgttaagatccagtgtccatggaaacattcccacatgccgtgactctggactatatcagtttttggaaagcagggttcctctgcctgctaac

SEQ ID NO: 14934 - DNA, 513 bp, Homo sapiens
  misc_feature (1)...(513): n = A,T,C or G
ggggnaggcnggntngnnnnnnaactgatgatcgatggccagtgcgaggaacncccaggcgtgacagcacacacctataatcccgactgctcagggggctgaggcaggagaatcgcttgaaccccggaggcggaggttgcagtgagccgagatcatgccactgcactccagcctgggtgacaggaaaaaaaaatcattagaaattaactattcacctgtttaatagtttctccaattaagagtacaagttgctgaagagaatagattgatcaaaataacttatttattgctaagaccaaacttgtctgaggtttgaaggaattttgttattcaataaattcctctgccaagattttaaaactagataattcaagttattaagttaaaggatctttaaacagggaagctcaaaaagactaaactgaaataggagatagagatgatggtcagaagccataatcagatatactattgtcagaagaaaaatagatgctctataagctgtaaacacta

SEQ ID NO: 14935 - DNA, 494 bp, Homo sapiens
  misc_feature (1)...(494): n = A,T,C or G
nattgaagactgagagcactagcacagngcggtggaattcagagtagagattttttttatttgaaatggggtctctctctgtcacccaggctgcagtgcagtggtgtgatctcggctcactgtagtctctacctctcaggctcaagcgctcctcctgcctcagcttctcaagtagctgggaccataggtgcacaccaccacgcctggttaatttttgtatttgtagagatggggcttcaccatgttgcccaggctggttttgaactcctgagctcaagtgatccacctccctcagcctcccaaagtgttgggattcaggcgtgagccaccatgcccagcctgagatctttttaaaattatttaattttttatttctaaagcaaagaaacttgacagcagagtcgtattgactgagttgtacattaagcctagccctagcccttttaaggtgcactgtgtggaacggcccaggctccccaaatctaaacttctca

SEQ ID NO: 14936 - DNA, 454 bp, Homo sapiens
  misc_feature (1)...(454): n = A,T,C or G
ttgagacactanccgttgtagaccactagtccatgcggtggaattcctgattccagctgtctggaatcacatagctccttatctgactcagaatttcccccaaataataaaggtgaaataaaaacagaaggacaagagctcataaccgtaataaaagcccccacctcctttggttatgataaaccacatgtgctagtggatctacttgtggatgatagcggtaaagagtccttgattggttatagaccaacagaagattccaaagaattttcatgagatcagctaagttgcaccaactttgaagtctgattttcctggacagttttctgctttaatttcatgaaaagattatgatctcagaaattgtatcttagttggtatcaaccaaatggagtgacttagtgtacatgaaagcgtaaagaggatgtgtggcattttcacttttggcttgtan

SEQ ID NO: 14937 - DNA, 475 bp, Homo sapiens
  misc_feature (1)...(475): n = A,T,C or G
gcaagcaggggcncccactgataaccccagtgagtgccgtcgcannccctagaagnagaattgtcaagttaaagggtaaatctatgtgtgatttttctagatccttaaatttccctcagtaaaagaggtgtcattttgacattcccatcatagttatgagaatgcctgtttccctcatttttgccaactatgctgtcaagcttttgggntttttttttgtttttggttttgttttttttttgagactgagtctcactctcttgcccaggggggagtgcaggggtgtgatcctggttcactgcaaccttggcttcctgagttcaagcgattctcctgcctcagcctccttaatagctgggattacaggcacatgcaaccacgcccagttaatttttgtatttttagtaaagacagcattttgccacgttggccaggctggtctcgaactcctgacctcaagagatccgcccgcctt

SEQ ID NO: 14938 - DNA, 490 bp, Homo sapiens
  misc_feature (1)...(490): n = A,T,C or G
naactgagaccctagtccagtgtcgtggaatgacaggcaatgaaagaacttgcatgttggtgaaggaagaagtggggtggaagaagtggggtgggacgacagtgaaatctagagtaaaaccaagctggcccaaggtgtcctgcaggctgtaatgcagtttaatcagagtgccatttttttttttgttcaaatgattttaattattggaatgcacaatttttttaatatgcaaataaaaagtttaaaaccttatcaaaaaaaaaaaaaaaaaaaaaaaaaaaaaaaaaaaaaaaaaaaaaaaaaaaaaggggggggttaatgtaaagtggggaaaaaaaaacaagaaaaaaaaataaaaaggcccttttttttaaaaacgccctgtgttgcccccccccccccccttttttttttttttttaggggcccccccccttttttcgtcttttttaaaaaatttaattttttgtggggggggccgccgccttttt

SEQ ID NO: 14939 - DNA, 477 bp, Homo sapiens
  misc_feature (1)...(477): n = A,T,C or G
tggggccnnnnnnagggggnaactgagacctttgtactgagcgtgtaagncgcacagnnntcaaaactactgtacctttgtattctaaaattgtgtctctcaccaagcatatacttagcagacatttgttaaatgaatcttagatacattatgatgaaactatccagcattagatatgaagatataatttttaaatctaatactcatttagattgcttactaagaaacagcaacaaggtgaaacaaaatttccaacaaacacagagctggataatttcttagaaggaatgctggcagaaaataattctccacctagaattatatatccaaataatgataatttcaaattattatttataattttgaaaatattaatgacactatttttgatggccaaataaaaaaaaagttgaacaaagtgcctaaggctaggagaacattattgaataaatttttttatttttattacctttcaga

SEQ ID NO: 14940 - DNA, 481 bp, Homo sapiens
  misc_feature (1)...(481): n = A,T,C or G
tgtggccnnnnnagggggaaatgagaccatagaactgaggctatcgnacagngcggnggaattccacaggccaagagagtggtatggcatatttaaagtgctgaaggaaagagacttttaccctagaataatatatccagcaaaaataatcttaagacatgaaggagaaatgaagacattcccagacaaacaaacactgagacattttattaacactagacctgtactacaagaaatgctaaagaaagtacatcaatcagaaataaaaggatgttagtgagcaactaataatcacctgaaggtaaaaaaaaaaaaaaactcacttggttggtaggtttaaataaaaccccggaatattataagactgtaactgagggggcaactactcattctaagtatgaaggggaaaggatgacccaatcaaaaggttaactatacactgcacactatattaaggtgttatcagataaaataatgggtt

SEQ ID NO: 14941 - DNA, 590 bp, Homo sapiens
  misc_feature (1)...(590): n = A,T,C or G
gggcgccccctttganncccccttcgatcacctatccgtgtggtgcgaattcattntattatattgaattagaanaaaatgttattgatgtatttgtcaaataatttgagtaaattggcctttctgttgatttataagagtcatataattgagtaggtcattaagctgggtcagagatgattttttgttgttgctgtttcttaaagaaataaattctactgggtgcggtggctcttacctacaatcccagcaccttgagaggccagaggaggatcgcttgaggccagaagtttgagatcgcctgggcaacaaagcacaacctcatctctgcaaaaaaatttaaaagttagccaggtgtggtggcacatgcctgtagtctcagctgcttgggaggctaaggtaggaggatcgcctgagccacgagctggaggctgtagtgagctgtgatcatgtcagtgtactctagccttggtgacagagtgacaccttgtctcaacaaccaanaaaaagaaattctataacaaatgggttttcttagcttttttcatacaataaagtttttaagttttcgcatatttacttacttcctn

SEQ ID NO: 14942 - DNA, 483 bp, Homo sapiens
  misc_feature (1)...(483): n = A,T,C or G
taagaataccctcgcaannncnttnttgagaccatagaaagngcggnggaattcctttaatgggtgaggcattgctcatagggaacccgcaggagcccacaccagttccatgagtattgcatgagcccagcaggggctagtgacttccagccaatggccgagcctgcttcgtaagcttttctgatggccccagcaaaaccagcactgtctcaggcctccaccatgccctgtgggtgtttgggccacagactggacaacaaggacttgtgcagaaggacatcggactctggagaggtctgaaacaaggggtggggagagacaggctggtcagagctgcctgcaacctcccgtattctcctggattggccttccaaaacccgggctgacaggctcttggtaagaaaacaggcccaacaaacaaaggtgttctcaagcccaaatcagtcactgcctctgtcccatgctcttagtctcatggctctc

SEQ ID NO: 14943 - DNA, 447 bp, Homo sapiens
  misc_feature (1)...(447): n = A,T,C or G
nactgcgaccattttgaagccgtcggaannccactggaagagcagccattattgacagagacggtcctggctaatagatctgcctagttttaggctgcttaggggaacaggggtcctggaataagaagccccaccccctcctatgaagagaggaaagctggagacaaaaagaggaagcaagagatgaattgcaaaaaactaatcagattgcaacctcaaggtaacattttgcataataagttctaacaatgttttcttgtttatatcagcctcctcctcttagcctggcttactaggctggtgtttaattccaatgcttctgggttaatttattcaactttattatccttactatagtagcctcccctagcgttctcccctacctctcaaaggtctcatctaagtgtgtataaagctgttaaatagaggagaggaatcaggatgacn

SEQ ID NO: 14944 - DNA, 456 bp, Homo sapiens
  misc_feature (1)...(456): n = A,T,C or G
ttttnattgtagacccttgtccagcgcggtggaattcgaacgggatacattacttgttgaacctgaggaggtagtagaaatgtcacacatgcctggagacttatttaatttatatcttcaccaaaactacatagatttcttcatggaaattgatgatattgtgagagccagtgaatttctgagttttgcagatatcctcagtggtgactggaatacacgctctttactcagggaatatagcacatctatagctacgagaggtgtgatgcattccaacaaagcccgaggatatgctcattgccaaggaggaggatcaagttttcgacccttgcacaaacctcagtggtttctaataaataaaaagtatcgggaaaattgcctggcagcaaaagcactttttcctgacttctgcctaccagctttatgccgccaaactcagctattgccataccttgc

SEQ ID NO: 14945 - DNA, 597 bp, Homo sapiens
  misc_feature (1)...(597): n = A,T,C or G
agtactcncagggnacacnnttttgaaaaccccttcgaacactatccagaggggcaatccacagaatcccattatatgacccatataccatctcattgtgaaaaaaatatgaggtgtggcttttgttttatttattctcagagatggccatctaggacatgtattcagccaacaatatttgctcagcttatacatcacagagttgtgttacaaagccatcattcctctgtcctttgatgaatcctcaaattactttgttctagaataaacttttttatattacaaaagaaatctcatgaatttaccttcaggttcacgatacatacaagaaattagcagatcgctaatagagaagttttggctgttgtgattgggttccaacattgtaactgtgacttttattcctgatgttgacaatgtggaatgagatgtattaacttataaatactgtgttgctcaagtgagactaanagcacaatccatgccacctgcaccatagcccactttcagcataaagaaactcgaatgtattcttcaagtagtacacatcctacattggaagaaatgtgtctaagattntataggtaactgttgctn

SEQ ID NO: 14946 - DNA, 465 bp, Homo sapiens
  misc_feature (1)...(465): n = A,T,C or G
nnnaaaatgagaccatagaatgagcgctatcagacagngcggcggaattcctgcaacctccagcctcctgcgttcaagcgatcattgtgcctcagcctcccggggagctggaattacaggcgcataccaccacacctggctaatttttgtattttttgtagagatgggtttcaccatgttgcccaggctggtctcgaactcctgaccttaggtgatccacccacctccatctcccaaagtgctgggattacaggcgtgagccaccaagcccggcccgattaagagactttagaattccaaggtgatagagtaaattttgaggaataatgttagtaataatactgaaactatattgaagatttttgtgccaagtcctgtgctaagcacatcctatggattaattcctttagtctcacgtcagtctgatgagataggtgctgtattatcttaattttaaaggcaagg

SEQ ID NO: 14947 - DNA, 488 bp, Homo sapiens
  misc_feature (1)...(488): n = A,T,C or G
ttttgaaacccttgcggaannnnccaattgatgacactagaccagngcggnggaattcgttatttcacttctgcagtaaaaactgggcaaaaaccattcactccatgatattaccgatttatttgtttcacaggtgttcggaaagggcagtgcttcacccaaaggaacgttcgattatgttcatctagtatgccaaagctagcctcgattagcttagctggttactttgttagatcttaaatacacaggccagtcagttagcaccgaaagcctatagtctaggaatcacactgatttgctttgtgtgttttagatatacatagccttttaactttcccttctgtgggagacaggaaaagccagagggtttgtcctctggaggctccctttactgtggggtgggttccatttcagcatgtaggcttgcaaatggaatatttgatgatgcaaacttacctggccagagatgaataggcatttctgaactg

SEQ ID NO: 14948 - DNA, 440 bp, Homo sapiens
  misc_feature (1)...(440): n = A,T,C or G
ccttgacgttcgattaccccagagcggnggaattcttttggcaaatacagtgagcacttatgtaaccagatgataatgaactcaaatgtcatgatagcttgcataaatggtgactctagtagatttgactcaagcacttctagaatcatgcactgaattcaaaagaaaaatcttgctgctttttgtccagggcttgttctattcaacttctaatttgaaagctgtacaaagtaatagaagttccatttaaatatgagttcaaaactgtatttactttttatgtggccctctctttaggggattctaattttacttacggtctctaagtgcagcataatgttcctgatgttaacagaagactgtatttttaaagttacaaatttgtatatggaattaagtaatggcgctatatacgctggtgtggggaggggggaagaaan

SEQ ID NO: 14949 - DNA, 434 bp, Homo sapiens
gtcgaagcgaggacgtggtgggtcctctggtgcgaaattccggatttccttgggtcttccggtaggagctgtaatcaattgtgctgacaacacaggagccaaaaacctgtatatcatctccgtgaaggggatcaagggacggctgaacagacttcccgctgctggtgtgggtgacatggtgatggccacagtcaagaaaggcaaaccagagctcagaaaaaaggtacatccagcagtggtcattcgacaacgaaagtcataccgtacaaaagatggcgtgtttctttattttgaagataatgcaggagtcatagtgaacaataaaggcgagatgaaaggttctgccattacaggaccagtagcaaaggagtgtgcagacttgtggccccggattgcatccaatgctggcagcattgcatgattctccagtatat

SEQ ID NO: 14950 - DNA, 491 bp, Homo sapiens
  misc_feature (1)...(491): n = A,T,C or G
ggacgggcncggggnnttttncctgagaccctatacagtctggtggaattctgcaaaaataatttagcatcatcagacaactaaatgctccaaataaaaatgattttcagatgacagaattctaccctttcaaatgccaaaactttccttttatagatattgactcgatatctttttaaactatatatacaaatcaccttaagcttttgtttagtgtaagatcatcattcaaacattcttgtgtgtgtgtgtgtgtgtgtgtgtgtgtgtgtgtgagatggagtctctctctgccatcctggctggagtgcagaggcactgtctcggctcgctgcagtgtctgcctcccgggttcaagcgattctcctgcttcaccctcccgagtgggtgggactataggcgcgcaccaccacacctgggtgatttttgtatttttagtagagacggtttttcgccgtgttggccaggctggtctcagacttctggcctag

SEQ ID NO: 14951 - DNA, 477 bp, Homo sapiens
  misc_feature (1)...(477): n = A,T,C or G
ggtaggtcccctgaggcccttgctgagancatcgnanagngcggnggaattcaagccaagaggaggaggaggaggctgaggccacccttctgcagttaggcctggaagggcacttctgagtgccaggaaaggcagctttagtgcagacctagatcacagctacttttcttgtccctgtggggtcttacagatgtgtctctgagtagtaaaggcttagccttgttctgttttgttgttttttggaggggaaggttagtcaggcctgagtattcatgtaacattctaaaattgtgccagcgagcaccgtgaacgactgcaatgcaagcgggtcttgctggctaaaatgccaggtaaagggttggttggacacagcgcttagtgcacgctgtcatcatggacatcataatcagttgtgaaaaacacgcgaacctatgacacttcttattccacactgaatgtgaaattgcatgttcagat

SEQ ID NO: 14952 - DNA, 473 bp, Homo sapiens
  misc_feature (1)...(473): n = A,T,C or G
agtagtttatccgatgctctaccttgcgctngaannnncgnggnacgccgntccggaatcacgggagaagaatgacctgggcattcagatttacagcagatgtgtatgtttataaaggagcagagtgacgtgtcgtgcacagaaacacatgactgatgagaccgttatttaagtctaacgggcatttgcgttgcacagtgagttggagataactcgggggatttacaagtccagttgcttgaaagagtcaaattgattgtggccttttctttcgctgctcataaactattaccacccagttagctttatttatttgtggtgttaagaatcttgatgtgaccgaagaagtctgtggcatggtgccaaggcaggcccaacactgggaaaggactaattttttttgtatattgagagaaaagtttcacatagactggccagagtttcgaagcacaactacagacagcgtcatgacg

SEQ ID NO: 14953 - DNA, 332 bp, Homo sapiens
caagagttgtagaagaaagtgtgtggggatccagaggtcactgtggatgctctgcgcaagctcacccggtttgaggacttcgagccatctgactcgtgggtgcagtatttctgggaggcactgaacaacttcaccaacgaggaccggagccgcttcctgcgctttgtcacgggccgcagtcgcctgccagcacggatctacatctacccagacaagctgggctacgagaccacagacgcgctgcccgagtcttccacttgctccagcaccctcttcctgccacactatgccagtgccaaggtatgcgaggagaagctccgctatgcggccta

SEQ ID NO: 14954 - DNA, 432 bp, Homo sapiens
  misc_feature (1)...(432): n = A,T,C or G
gaatgggcgtccctgcaatattgtcatggctgtcaaaagtgttattggagctgggaatgacggacgctggggctttgatgggcaccgggtgaaatgggcagagtggcgcttacccgggatggcggtgaagcgggaccgggaggtcatcgtgacaaagggtggcatgaggtacctggccttgacgccctccccggctagacggtccagattgggggtgtccacatcctgatcctagtcccagcggaagccctggaaggagatcagcagcagctaaactcctggagggcagagccatgcctgccattttcatcattgcattaccaccacccagcacagtgcctggtacaaaagagttgctcaataaataaatcaggatgaatggataaatacacggataggcactttgaactacagatgagcttanatactttg

SEQ ID NO: 14955 - DNA, 451 bp, Homo sapiens
  misc_feature (1)...(451): n = A,T,C or G
gggagtnnnnnnnntttcgagnaccactagtcctctatgatcccatatccaagtgctggaagtacaggcatcacccgctgagcctggcttcattttcagagcgagacatttgtactgtggctatgtaggagaacattcttgttcttatcaaacatactgaagtttttagatattaattaccacagcgtctgccactgaatttacactgactaagtggaaaaatataaaacatatgaatataaagaaagaaagacacaagtcatatgtagtttaatgacaacacttggtgactctaagtgactggtcgacagatgttcattgtactatcaatgtggctttgctgtgggcttgaaattttgcaaactaagagttgcgtggcggggagaaggatacaccaaaaaactaagtgattatctttggatgggacaatgcttgctaattgcattcttaa

SEQ ID NO: 14956 - DNA, 462 bp, Homo sapiens
  misc_feature (1)...(462): n = A,T,C or G
ccgcaattgaagaccatgatgaccctctcgagagncnggnggaattcgaaaagacagttaaagcaaagaagagaagtgacttttcctggcctcttccagcatgccctgggctgagatgagatggtgggttatggctccagagctgctgctcgcttcgtcagcacaccccgaatattgaagagggggccaaaaaacaaccacatggattttttataggaacaacaacctaatctcatcctgttttgatgcaagggttctcttctgtgtcttgtaaccatgaaacagcagaagaactaacataactaactccatttttatttaaggggcctttacctattgctgcacctaggctaggataactttagagcactgagataaaacgcagaaacaggaatcatgccgtttgcaaaactaactctgtgattaaaggggaagcatgtaaacagctaactggttttgctg

SEQ ID NO: 14957 - DNA, 507 bp, Homo sapiens
  misc_feature (1)...(507): n = A,T,C or G
cgggcggggncagggncgggcnnngngaattgatnncccaactgatgaccactagtcagngtggtggaattcgaagcaggacccgaagcctaaattccaggagggtgagcgagtgctgtgctttcatgggcctcttctttatgaagcaaagtgtgtaaaggttgccataaaggacaaacaagtgaaatacttcatacattacagtggttggaataaaaattgggatgaatgggttccggagagcagagtactcaaatacgtggacaccaatttgcagaaacagcgagaacttcaaaaagccaatcaggagcagtatgcagaggggaagatgagaggggctgccccaggaaagaagacatctggtctgcaacagaaaaatgttgaagtgaaaacgaaaaagaacaaacagaaaacacctggaaatggagatggtggcagtaccagtgagacccctcagcctcctcggaagagaagggcccgggtagatcctactgttgaaaatgaggn

SEQ ID NO: 14958 - DNA, 337 bp, Homo sapiens
tggcaaatgattctaatccacgggttttagaaaaacaagaattacagcagccaacctatgttgccctgcgttacataaatagattcatgacagatgctgcccgccgagagcaggagtccctaaagaagaagattcagccgaagctctcgctgactctgtccagctcattgtctcgagggaatgtgtccactcccccacgccacagcagtggaagccttactccccccgtgaccccacccatcaccccctcctcttcattccgcagcagcactccgacaggcagcgagtatgacgaggaggaggtggactatgaggagtctgacagcgatgagtcctg

SEQ ID NO: 14959 - DNA, 333 bp, Homo sapiens
acatgggcagaccaactcatagtggtgggggtggtggaggaggcggcggcggtggaggtggaggtggtggcagacgtcgagattcttactatgatagaggatatgatcgtgggtatgacagatatgaagactatgattaccgatacagaagacgatcaccttctccttattatagtcgatatagatcacgatcaagatctcgttcctacagcccaagacgctattgataacggaatggttgcaattaaggacattttttttcctctttttttttttttttttttaaattcggagattcccccaggctggggattcttcctactccttaagaaa

SEQ ID NO: 14960 - DNA, 582 bp, Homo sapiens
  misc_feature (1)...(582): n = A,T,C or G
attcggaacactatttagagaggccgaattcanatgcccaggaatgccttcacaggagcagcttaactggcagggacctgaggtggaccagtggtcccttatagatgaaaaggaggtctcaggcagctcaagcaggaagatcattttcccttctgctccttcagtccttgtggcagatgctgggcccaagaccgagtctttcatggtattcctagttcccccaccaccaccagcagaagaggaatgggttgtttatagagagcaggcatccccactacccgccttttccctgtaggtgttgctgccatcgcaggagccttcacggagcagattctgagggacatggcctccttccacgagcgccctatcatctttgccctgagcaaccccaccagcaaggccgagtgcacggctgagaagtgctaccgggtcaccgaggtcagcggggagtccttccttcccccggctgagaggacatagtaacaattacaatgagtaacctcatgagggtgaaaaatactcctacatcgctgatgagcaaactgagtttcagaaagatgaagtaacatgcccaaggtcaan

SEQ ID NO: 14961 - DNA, 508 bp, Homo sapiens
  misc_feature (1)...(508): n = A,T,C or G
gggagccggggngnnnnnncctgtagatcgatagcagtgcgnggaacttatcagaacaaaagctattttgaattcaaaatccagtccacaggaatctggggtattggtgttgcaactcagaaggttaacttgaatcagattcctcttggccgagatatgcacagtctggtgatgagaaatgatggagccctttaccacaacaatgaagagaaaaataggctgccagcaaacagtcttccgcaggaaggagatgtggtgggtattacttatgaccatgtcgaattaaatgtatacttgaatggaaaaaacatgcattgtccagcatcaggtatacgagggacagtgtatccagctgtttatgttgatgacagtgcaattttggattgccagttcagtgagttttatcatacgcctccacctggttttgaaaaaatattatttgaacagcaaatcttctgaatgtatttgtttttaaaacttgtatttctgcactgttaaaaaatgttca

SEQ ID NO: 14962 - DNA, 481 bp, Homo sapiens
  misc_feature (1)...(481): n = A,T,C or G
ggtagtgcccctgatanccnttgctgatgatcatagnanagngcggnggaattctgtacttgctgctagtctggtctctcaccttcatctacttaagctctgtgcattgatttttgggaccaccctatgttctgtcgtctggttggcataaaggctcgggaataaacagtttcagaaactggggcaggggaggtgacagctgtgtttttaagcatccaagtgtttctgagagaataaccatcagttgctgtcattcatcctgagagtatgaaattggaagctcgcttaccctggagtgtttcataacctttacctctgggaagtcaaggccgtgtcatcattaatctaccatcgcctgaaagcccccaggctctgcttttcatcctgccatcagtcacgtggcactgagattcaggctccctcttttcctttntgccatgctaccttacattcctttggaaatcagactggcctgagaact

SEQ ID NO: 14963 - DNA, 588 bp, Homo sapiens
  misc_feature (1)...(588): n = A,T,C or G
nttttgaaaccccccttccgaatcacctactccgagtggtgcgaattcgtgatggtaaaaacctcaccataaaaactgagagcactttgaaaacaacacagttttcttgtaccctgggagagaagtttgaagaaaccacagctgatggcagaaaaactcagactgtctgcaactttacagatggtgcattggttcagcatcaggagtgggatgggaaggaaagcacaataacaagaaaattgaaagatgggaaattagtggtggagtgtgtcatgaacaatgtcacctgtactcggatctatgaaaaagtagaataaaaattccatcatcactttggacaggagttaattaagagaatgaccaagctcagttcaatgagcaaatctccatactgtttctttcttttttttttcattactgggttcaattatctttatcataaacattttacatgcagctatttcaaagtgtgttggattaattaggatcatccctttggttaataaataaatgtgtttgtgctaaaaaaaanannnnnannnnanaaaananannnnaaaaaanaanaccaacaaaccccacgcctgc

SEQ ID NO: 14964 - DNA, 470 bp, Homo sapiens
  misc_feature (1)...(470): n = A,T,C or G
gtagttacctgagatctcactgatgccntggaannnnctgcngnnctggacagaggcgataattgtccagccttgcggtcgccgccaatgcctcctgcctaatcacttcctgtattgtctccctgcggctctttgcacagaccttgggctctgtcgcctctggattcttactgatctcttcctcttctcccaaccgccttggcatgtctctttgagctatgtcaggaggaacggaagggcactttcttactacttttgttagccaaacggacaaactgccccctcccctttggtgtaaccacacattcaaggcttccttcagtccagccccatctcccttttcgttgccttcctttcactactccaaatgagcttgccatactctaaacggggctcgtactttcttatcccttctctggaatgtcatttctactgaagaaaatcctactcttccctcaagacccttcttt

SEQ ID NO: 14965 - DNA, 334 bp, Homo sapiens
caggcctcttaggccagcccggcccccctggacaccctggccccccaggcgaacctggtacggatggtgcagctggcaaagagggaccccctggaaagcagggattctatggacctcctggtcccaagggtgatccaggagctgcaggacagaagggccaggcaggagagaaggggagagccggcatgcctggtggacctggcaagagtggttccatggggcctgttgggccaccgggccctgcaggagagagaggccaccctggagctccggggccttcggggagccctggcttgcctggtgtgcctggctccatgggagacatggtgaatta

SEQ ID NO: 14966 - DNA, 447 bp, Homo sapiens
  misc_feature (1)...(447): n = A,T,C or G
atggatctccccctaggggaccagtagnaggtccgnacangcgccggaattccgngaggattgccatcctgggcgtcgctttccctctactgacttctgataggattttacctatggctttctgcaacgggctactctgtgcctctccatcccatctttgcagcctcatagggagggatacagcacctttttttgcagatatccacactcacatttcagagtcctgactctcaaggaaccactggtttttgggatagaacttgggccagggctaggaacacaggctccacggtgacatgtcatttgattgtaaattaagtgctctgattagtaagaactaagcagggggccacatgctctcaatggagacaataaagtgttgtctttttcttatgcaaatganatcactgaaaaacacaaaatacattgcacaataatgatttctct

SEQ ID NO: 14967 - DNA, 459 bp, Homo sapiens
  misc_feature (1)...(459): n = A,T,C or G
aggggaattgagaccttannnagtgcgaggtcctctatcagtgtggtggaattcgccgcagctagaaatgctcaagaaccagctggaccaggaagtggagttcttgtccacgtccattgctcagctcaaagtggtacagaccaagtatgtggaagccaaggactgtctgaacgtgctgaacaagagcaacgaggggaaagaattactcgtcccactgacgagttctatgtatgtccctgggaagctgcatgatgtggaacacgtgctcatcgatgtgggaactgggtactatgtagagaagacagctgaggatgccaaggacttcttcaagaggaagatagattttctaaccaagcagatggagaaaatccaaccagctcttcaggagaagcacgccatgaaacaggccgtcatggaaatgatgagtcagaagattcagcagctcacagccctggnggc

SEQ ID NO: 14968 - DNA, 486 bp, Homo sapiens
  misc_feature (1)...(486): n = A,T,C or G
aggaaggtccaatagatnnccnttgatagatgaccatcagnacagngcggnggaattcggactcttggaagcaggccatcctggccagacaccctagcaggaaggggctcacctgtcacccttaggcagcctgagggctggtggggacttttgagtcttgaggggatagcggaaaaagctgagctcataggtgcccagccagcctcccagctaaaggtgctcagagccccactgccccctctctctgtgcaggtggccagtgcccctccctgctctgggagcattgctagccttctaccccatccctggatccacaggggctatcgaggagacccagtgagaatgtagcattttgttcatccccagggtagctgccctggggtctgggcactctgcctctgggagagaggaagaagaaaggggccccattttttaaaaaactgtacagagcctttggctttatgtgtttatgttcttcacatgcat

SEQ ID NO: 14969 - DNA, 459 bp, Homo sapiens
  misc_feature (1)...(459): n = A,T,C or G
gcgcaatgaggccattgatgacatccagacacccggnggaattcggccgccagacagacttcggcatgtacgactacttcacacgccagtttggggattagtccactctggccttccagcaggtagccagggtggccacaggccggggaaagtcgtgtgcgctccaccctaccccagccacccatacccagcctctacccacaccctgctctcctcagtcatcctttgttaagggttaaaaccagggcacctgggctgggcacggtggctcacgcctgtaatcctagcactttgggaggccgaggcgggcagatcacgaggtcaagagatcaaaaccatcctggccaaaatggtgaaccctgtctctactaaaaatacaaaaattagctgggcatagtggcacgcgcctgcagtcccagctactcaggaagctgaggcaggagaatcgcttgaacccag

SEQ ID NO: 14970 - DNA, 474 bp, Homo sapiens
  misc_feature (1)...(474): n = A,T,C or G
aggacgggccgngnnnnttttgaatgcctccctaggccgngncgtggaattctagaaataaaatccttttatttctgagtcctgaaaaattattaataaatatttgttatatagttgaatgtgtatatagtctttgaacatgtggtctctctgcctgaaaacatagttttagttttaattttcatagagtgaaatatacacatattactctgaagatgaaccttaggtgtaagaaaattatgaagtgagtaagtgtgtttgtgtcagtatgcatttgtacatattttcagaagaaaagaacaattattggaacaaaacaaatttaattaggtgagtaatagaaaactaaacaccttgaaaatgctgaaagcaaatttatactttctgctttgcactgaatttattaatgtaaaattttatggtttatgtttcaaattatttccataatctacctattanagcacaggcaacttt

SEQ ID NO: 14971 - DNA, 472 bp, Homo sapiens
  misc_feature (1)...(472): n = A,T,C or G
ggtagtgccaatgagactctcactatgctctcgaaannccagnnagaggnctttacattttataatattgaatgtaatcatatatgctgcatataattacactttttattttaacaaaacactttcgattataaaagaaacatattacaattataaaatcatgccattttgattttttgtcaaattcttatataaagactggcctttcagtggttaatatgttagatcttgtattttctgcacctagcttcacattgtcttgaatttaaattttgctgttagaaatgggatagactttgttttgctgtgacatgctcagttctttgttgtgaaattttgccaagccttgatactgcatatacagtacccatggcactctgattgctagtttgatttctgttgagggtgacctcttgtttatgttaacatttcctttgggatcccgttttattgtttaagtgaggtttcttcn

SEQ ID NO: 14972 - DNA, 465 bp, Homo sapiens
  misc_feature (1)...(465): n = A,T,C or G
gggggaatcgtagacattagnnattgacgaccattatccatgcggtggaattcgtgaatcagaaagatggggatggagttgatggccaataaatagtttgcacacatttgttcattaattcattttagtaattttcttctttcatactgcttgttttaataacctgcaagtaaataatccacaataatgtcaattcattggctgaaagcgtacaatgtaatttattaaaggcaaaatattgttaggaaatgaataattggagaaataggatggtatcaagaaagatatatgtgcttttctgaagcatctcatacatagtttataagaagaatgcaatatgaaaaattaaaatcagataaatctttaagcttttggaataatatgaaagttttatatggttatggcatggtagaattcacataactgattagttagaacaaagacaagactactttttcattatgg

SEQ ID NO: 14973 - DNA, 440 bp, Homo sapiens
  misc_feature (1)...(440): n = A,T,C or G
atcgantttgatgacccttagtccangcggtggaattcgctgctcattttctactgtctacaaatgataaaactataaaattatggaaaataagtgaacgggataaaagagcagaaggttataacctgaaagacgaagatggaagacttcgagacccatttaggatcacggcgctacgggtcccaatattgaagcccatggatcttatggtagaagcgagtccacggcgaatttttgcaaatgctcacacatatcatataaattccatttcagtaaatagtgatcatgaaacatatctttctgcagatgacctgagaattaatttatggcacttagaaatcacagatagaagctttaacatcgtggacatcaagcctgctaacatggaggagctgaccgaagtcatcactgcagccgagttccacccgcaccagtgcaac

SEQ ID NO: 14974 - DNA, 453 bp, Homo sapiens
  misc_feature (1)...(453): n = A,T,C or G
ntttgacgaccattagtccactgtggtggaattcgttagggacaatatcacaggggtagtgtacaccctctgggatgttgggactaatatctcacaggtgtctgagaattcctcctcctgggactctcagaggatccagaactgcagccggccctcgctttgctgtccctgtccctgtccatgtatctggtcacggtgctgaggaaccttttcagcatcctggctgtcagctctgactgccccctccacacccccatgtacttcttcctctccaacctgtgctggcctgacatcggtttcacctcggccatggttcccaagatgattgtggacacgcagtcgcatagcagagtcatctctcatgcgggctgcctgacacagatgtctttcctgctccttgttgcatgtatagaaggcatgctcctgactgtgatggcctatgactgctttgta

SEQ ID NO: 14975 - DNA, 449 bp, Homo sapiens
  misc_feature (1)...(449): n = A,T,C or G
ggggcctgaaactgaaanccagtttgacccgaaagcnnngnaantnggactccaaagcgctgggattacagttgtgagccactgtgcccggcctagcatgatcactttttaagtatccagaaaagctctttcgtatgctgaattatgtccagaggcataactagactgaaggtttagactccattcattctcctatgtttttgttcttaactgcattctgcagtcaaatcaggagctttagaaaatactgatgcctggctctcaaccagagagaactgaattgaattggtctggtgaattcattaaaagagctaacaacaatgaagttaatgtacgcatctcacctctcaagagtattaacaggccaggagtgttggctcatacctgtaatcccagcactttgggaggccaaggcgggcggatcacccaaggatctcaacttgtgaact

SEQ ID NO: 14976 - DNA, 335 bp, Homo sapiens
tggacaccctggccatgctgactgcccaccgtgcaggcaagaaacatctgtccagcttgcagcttttctatggcaagaagcagccgggaaaggaaagaaagcagaatccaaaacatcagaatgaattgagaagggaagaaaccaaagctgaggtaatcagagagtggagagtgtgttctaggcaagaccctgctgcacacaccaggctggaagggcggagggctgaaggctctgactctgtctcccatctccttaccaggctcctctgctaactcagacacgacttatcacccagagtgctctgcacagagctccccactataacagttgctgcc

SEQ ID NO: 14977 - DNA, 464 bp, Homo sapiens
  misc_feature (1)...(464): n = A,T,C or G
catcgagaccacattgaagngcggtggaattcatcagaagcaaagctgtctggatggatttcatgagaagggcctgtcagtgcacgaacttggcctgtcagtgcataaaaccaaaagttcagccacaagacatagcagcagaggtgcacagcgctcagcagtgacctcgcatgcaccgaggctggaccccggaaccaaatctccctggctccacctttgacaagctgcgcgaaggggacaagtcctgccacctataagcctccgtttccatgtctatacactggggttcctagctcacgggactgtcggggtaattgagtgagttaacgtctagggagcacctgtgacatgccaacacagtgctgtcatttctgctgttgtccatttttctgcatctttatttgtaaggatttgaaagaatgtacagttggaaacctgatgatctcaagcagaaaatatctttn

SEQ ID NO: 14978 - DNA, 442 bp, Homo sapiens
  misc_feature (1)...(442): n = A,T,C or G
nattgangaccatatggaagtcngtgggaattccaagagtataataccttcatgacagtacagctgactcaatccggaccacgtgtcaaggtgtaatctcgaccttgaaagctcattatctgagaaggacttttcagcacatcctaaaagcagcggatggtgaggacacagctatgatcagggaattttggagaaactacagcatcatggatgctgtggacatggccatcgcatgggaggagctcaaaccagcactaatgaacagcatgtggaagaagatttggcctgagtgtgttcaggcccagcgtttttcccaggcagataacattgcacagcttcaaaaaaacattgtgacccttgccagaaatgtggcctttgaagaggttgctgaggctgctgtggaccagttgctgcagtcccatgaagaagatctctcaaatgg

SEQ ID NO: 14979 - DNA, 444 bp, Homo sapiens
  misc_feature (1)...(444): n = A,T,C or G
gattganncccctattgatgactcttagtccgtgtggtggaattctgactgtgtgcccaccgagctcctgagtgttctcattcctttacccacttctgcatagtagcccttgtgctgagactcagattctgcacctgagttcatctctactgagaccatctcttcctttctttccccttcttttacttagaatgtctttgtattcatttgctagggcttccatagcaaagcatcatagattgctgatttaaactgtaattgtattgccgtactgtgggctggaaatcccaaatctagattccagcagagttggttctttctgaggtctgcaaggaagggctctgttccatgcctctctccttggcttgtagaaggcatcttgtccctatgactcttcacattgtctttatgtacatctctgtgcccaagttttccctttttatt

SEQ ID NO: 14980 - DNA, 458 bp, Homo sapiens
  misc_feature (1)...(458): n = A,T,C or G
catcgacccccattgatgaccctctagaccangcggnggaattcctacgaccacgtgacgggcagtgacagcgaggacgaggacgaggttgtcggcgagccgagggtcaccggtgacttcgaagacgacttcgatgcgcccttcaacccgcacctgaatctcaaagacttcgacgccctcatcctggatctggagagagagctctccaagcaaatcaacgtgtgcctctgagccagatgacggggtgggaccccggttagtaaggaccgggcgcccagtggctaaggcggtgccctggtgaccaaggagagccagacctgttgctcaggccgagctcctggttgccagcgagttaccacgggaccagtcgcgtgtatggctgagactcattcccagtttccagggcccggtatttggacactagttgccaagtctggggcctggggattttagggacc

SEQ ID NO: 14981 - DNA, 456 bp, Homo sapiens
  misc_feature (1)...(456): n = A,T,C or G
ntttgannacccttgatgacccttataccatgcggtggaattcgcaaccgttcgctaactgaaatgatggcgactggaacgccagagtctcaagcgcggttcggtcagtccgtgaaggggcttctcacggagaaggtgaccacctgtggtactgacgtaatcgcgctcaccaagcaggtgctgaaaggctcccggagctccgagctgctaggtcaggcagctcgaaacatggtactccaggaagatgccatcttgcactcagaagatagtttaaggaagatggcaataataacaacacatcttcaataccagcaagaagctattcagaagaatgttgaacagtcatcggatctacaggaccagttgaatcatctgttgaaatagaatgacatgtaagagtgctgtaggactcctttgcctaatgctgaggagtaaataccttacacagctgtcctc

SEQ ID NO: 14982 - DNA, 554 bp, Homo sapiens
  misc_feature (1)...(554): n = A,T,C or G
aatgagatnccccntnnnnnnnnnnnttttgtaatcactattccgtgtggtggaattcgcgggctggagaagcgggtcctacgcacgctttgttgtcgcgctttgcctccgtccttccccctactcccgccttacctgacttccttttcggaggaagatccttgagcagccgacgttgggacaaaggatttggagaaacccagggctaaagtcacgtttttcctcctttaagacttacctcaacacttcactccatggcagttcccgagacccgccctaaccacactatttatatcaacaacctcaatgagaagatcaagaaggatgagctaaaaaagtccctgtacgccatcttctcccagtttggccagatcctggatatcctggtatcacggagcctgaagatgaggggccaggcctttgtcatcttcaaggaggtcagcagcgccaccaacgccctgcgctccatgcagggtttccctttctatgacanaccttatgcgtatccagtatgccaagaccgactcagatatcattggccagatgaaaggccn

SEQ ID NO: 14983 - DNA, 544 bp, Homo sapiens
  misc_feature (1)...(544): n = A,T,C or G
nttttcgatncacagtccagangtggggaatgcggcggacagcgaggccaagatttcagctgcgggacggtcaggggagacctccaggcgcagggaaggacggccagggtgacacggaagcatgcgacggctgctgatccctctggccctgtggctgggtgcggtgggcgtgggcgtcgccgagctcacggaagcccagcgccggggcctgcaggtggccctggaggaatttcacaagcacccgcccgtgcagtgggccttccaggagaccagtgtggagagcgccgtggacacgcccttcccagctggaatatttgtgaggctggaatttaagctgcagcagacaagctgccggaagagggactggaagaaacccgagtgcaaagtcaggcccaatgggaggaaacggaaatgcctggcctgcatcanactgggctctgaggacaaagtctgggccggttgtccactgccccatagagaccaagttctgcgggaggctgaggagcaccangagaaccagtgcctcagggtgcagcgggctggt

SEQ ID NO: 14984 - DNA, 443 bp, Homo sapiens
  misc_feature (1)...(443): n = A,T,C or G
ntagagatcgaaggccatgcggaggaactcgagaaccaccttgtgctgtaggctttggcccttttcctcacatctgtgtagttatttttgggtcgcggagaattgtggcccgagaaggctctgctccttgagagtgtggggagagaagctgcagtcccggaagcggttttagggggccgcttccttggcctagaggagctccccaacccgagggggcaagggaaacgacccccaggaggcccctaaacagtggccggcgtggtttctcctccagctttacagagccttctcttcccctccagaaacagccaacctccgggtttctgcctgccacgcacggtttattcttatttccgcctgtttgtgcactgcgttatctccacttcagctctgttttcaaaatatttcacagcaagtgggctcttgtgaaaggcagtgacagg

SEQ ID NO: 14985 - DNA, 456 bp, Homo sapiens
gcctccccttgtaccttttccgattgatggacctcggaggagaaccaggagctgtcgggaagatcagaagccagtcatggatgaccagcgcgaccttatctccaacaatgagcaactgcccatgctgggccggcgccctggggccccggagagcaagtgcagccgcggagccctgtacacaggcttttccatcctggtgactctgctcctcgctggccaggccaccaccgcctacttcctgtaccagcagcagggccggctggacaaactgacagtcacctcccagaacctgcagctggagaacctgcgcatgaagcttcccaagcctcccaagcctgtgagcaagatgcgcatggccaccccgctgctgatgcaggcgctgcccatgggagccctgccccaggggcccatgcagaatgccaccaagtatggcaacatgacagaggaccatgtgat

SEQ ID NO: 14986 - DNA, 491 bp, Homo sapiens
ccacaacatgcaatatacttattcactgtctaagtctgtagtataacatgaactggagtctctatccttttctaaaatcgcattttgtgagaaaagaatgaaaaaaaaaaaaaagaattgttgtcccccaactcctgatttgaaaaaaacaccttgtattttttatatacatctcttatccactggaactttttttttaaccggggctctgggattccaaagtttaaaatgtaaaaaggaaaggcttacctttacctttttttgggggggggggaccctgccaaaaatgaatttacgtatgctcaagggctttattggaaggccctgggcacaccattggactgcggaccacagttaaacatttccaggaaaattgcggaatgggcccagctaattcataatcactgtttttttggaccctgataaagacaattattttgaagggggtcgggactggaatgggatcctttaaattataaaaacttttgggg

SEQ ID NO: 14987 - DNA, 546 bp, Homo sapiens
  misc_feature (1)...(546): n = A,T,C or G
nngctcagancaccagtccagtngtggggaattcgaggacagagcgagtggtacgaaagatagccaaacctataggacctgcttggaggaactagccaactagggaatcgcctcaaacagtgaaccgttgactagagtttggttatttggttcctgtgtgggatgagagcaagccctgttctgtgtctgtcttcttagaacatactgtcctggtcagtgctaactttaatcagttagatccttgctactcagtgtggtccattgtctagaagcaccaacatcacctggaagcttgctagaaatgtagattttcaggccccatcctagatttattggatctaactgttaataagatctctaagtgattcatgtgtctaatggtttagaagcacagagaccctgagagctgagagaaaattttcaaatgaaatatcaagctggtaggccaggcacggtggctcacacctgtaatcccatcactgtgggaggctgaggcgggtggatcatgangtccggagttcgagagcagcctgaccaatatggtgt

SEQ ID NO: 14988 - DNA, 496 bp, Homo sapiens
  misc_feature (1)...(496): n = A,T,C or G
aattgagacccctatnccagtttggaggacttcgcacatggcgatggattccactgtctctgcactactaaaagctttggctgacatcacccgttagagtgtagtgaccagcagtctgagagcatcttggctcacccagtgcagtggattcttatccttgaggagacagaacaaagttggggctcgatacaagtcctccagggttacagcacacagtccaggagttgggagctcagtgttggtcctctaaactcttccagaaatgaagccagttgactgaatccaccttataccacagtgaaaccctcaaggtcgtcaaataggataaaaggaaaaaaacccatccaaaggtcagcagcttcaaagattgaaggaaaataaccctgcaaagataaaaaagaaccagtgcaagaactctcacaactcaaaaaaccagagtgccttctttcctccaaacggctgcaccacctctccagcaaggggtttgaaccaggct

SEQ ID NO: 14989 - DNA, 457 bp, Homo sapiens
  misc_feature (1)...(457): n = A,T,C or G
naaggccgcgctgnnnnnnaaactttagaagncgnncacntnnntgacaaacngacttaatataatcctggtctctgaggtgaatggctatttttaagttatccccattaggttatacttgcggaggctgctgttgcctgctgcctattccattaaaaactaactttatcactaattttaacatgaaacagatccatttggagaaaaatccattatgaatgagacagagttggctgttgaataacattggtgtaggctcaagtctggaataaatgtgatatagatgggacgatattggacaaatgcaatttatttcattattcagcaacaaggtattccaaatgtctctgctaatgaatacatgaaaacagattacatataatgtgcacactgtgagtcgcatttgcagaattatttttgccacctctagcactatctgaaaccaacactgaatagc

SEQ ID NO: 14990 - DNA, 475 bp, Homo sapiens
  misc_feature (1)...(475): n = A,T,C or G
ggagacgagnntgnnnnnaatgatattcagtagcattagcccangcggtggaattcgtgaaatcgtgatactgtattggtagcaattaaaagtactttcaaatattatcagttcttgcagaaacacacaatagaatgtctaaatgaaaaaagcaatacataccaccacatgtgaaaattacaattactttcttcaaagtcagcatatattcctaatacatgcttccacgcataggaaaatgcctataaacccccaagtgttgatgattactcctgaggttattggtcattttcattttattctttgtatttttcattgtttcccagattttccactggggactatgtcccacctgtatgatcagagagaaagatacaagttttacttaagagttcacattaaatgtttcttacagaatcgtatctgtttgcagtgttggtttaattgccagttctatttctcacactagtaagtg

SEQ ID NO: 14991 - DNA, 476 bp, Homo sapiens
  misc_feature (1)...(476): n = A,T,C or G
gggacgggcccgggnnnnnccggaactgagtaccatcgngcggngcaannnngancgcgccgcgattcaccagcctggtcccttctgcggagagcgatgccgcttcccgacaccatgttctgcgctcagcagatccacattcccccggagctgccggacatcctgaagcaattcaccaaggctgccatccgcacccagccggccgacgtgctgcggtggtccgcgggctatttttcagctctgtcgagaggagatccacttcctgtaaaggacagaatggaaatgcccacggcaacccagaaaacagacacaggcctgactcaaggactcctgaaagttttgcacaagcagtgtcaccacaagcggtatgtggaattaacagatcttgagcagaagtggaagaacttgtgcctgccgaaggaaaaattcaaagcgctcttacaactggatccttgtgaaaacaaaatcaagtggan

SEQ ID NO: 14992 - DNA, 494 bp, Homo sapiens
  misc_feature (1)...(494): n = A,T,C or G
gagagtnnnnnnccatcgaagccntttgagaccataggacangcggaggaantcaaattacctattgggtacaatgtctggtatttaggtgataggtccactagaagcccatcccacaccattatgcatgtaatacccttgtaacaaacatgcacatgtacccccaaatctaaaaaaaaaatcaagtgaagcacaagcaaggaacagctgcaaggaaatcaaagttccttatgtgcaagccacacttttattgggtgctcccactttgcctctgtgagtccctagagaggtccagtgttcctcttgggggattcacccaattaaccatgtgcgtgtagacaagggaatttccctggaggcagggaagtccaggttgctacttgtctaatagctaaaatgtattgaatttttattatgagccaggtatgattttgactattttatatgcaataactaatttcgttctcatgccaacactgggaggtggatgcttn

SEQ ID NO: 14993 - DNA, 499 bp, Homo sapiens
  misc_feature (1)...(499): n = A,T,C or G
catagaganccnttgccagatagtagaccctaggcagngnggnggaattcccaatccacactgccttttattgtaatatcatctaaatagatgcagaaaaatggaattttctctattaaagtattttacatttgacataaaaaagaaccagatacagttttctattcagatatgtttattttaacattgtttggttaaaaaaggtgaagttccagtcaaccactttttacccctgaaatttcaagataatgctatattaacttttccagatctaacactagcttattcttccctgttataaaatggtttgaacttactgaggagatattcctatcattaacaaaaataaactatttaaataatctgttgttaaaaggctaatgtcattttaaaattaatttttgttcataatgtagctcccctttagcctttgaatacacctggcagcagtatgcttaaaaataagaagttagttgcctggcgcagtagctcacacctg

SEQ ID NO: 14994 - DNA, 454 bp, Homo sapiens
  misc_feature (1)...(454): n = A,T,C or G
ngcggccttaanncagggtgactggagnaccggnanaaacnnangcctgnggncccagctactcaggaggctgaggcgggagaatctcttgaacctgggaggcggaggttgcagtgagccgagatcttgccattgcactccagccggggcaacaagagcaggactccatctaaaaaaaaaaaaatagtcctacccctcaggaaactgacatggtatgtaggtttggaccaaacctaaataaaatagcttcagttaactattaaattataatttaggaaccagaaggaacttatttataacaaaaactttgaattgccaaaatttttacagattttagcagagcagagtaaattaataacatctgattgcatgtttccttttcattttccataaagaaaagccttaaatcaagccatttttttttccagagggtaatgtactagggctacaaaan

SEQ ID NO: 14995 - DNA, 501 bp, Homo sapiens
  misc_feature (1)...(501): n = A,T,C or G
ccccccatcgagatccntagtccagatagaaggacttccatgaggncaggagttcaagaccaatctggccaacatggtgaaaccccatctctactaaagatacaaaaattagctgggcgtggtggcagatgcctgcaatcccagcttctagggaggctgaggcagagaatcacttgaacccgggaggcggaggttgcagtgaactgagatcgtgccgctgcactccagcctgggcgacagagtgagactccgtctccaaaaaaaaaaaaaaaaaagggggggaggggggggggccctttttttttttatttgggccgtcttcctagagggaatggccggaaataaaccgccgggttatatttttccttttaaaaacaacaaaattggagggtttttctcttttttggaatttttaaaaaaccaaccttttaaagttatttttaaaaattttatttttcattaccttttttcctttaaactccttttggaagggcaccctgn

SEQ ID NO: 14996 - DNA, 476 bp, Homo sapiens
  misc_feature (1)...(476): n = A,T,C or G
naaggccggccgnctgnnnnnnnaagccttttagnancgtacggnccaattngnttnttaagnactagaactatacttagtgttatatgttctgtgattataagtaatactgcctttgctatatagtatgcatagaataggttgaagttattactagaagctgacacattgttgttttctattacaaacaataaaattagtttccatttattgagggcctgtttcatgttaactgctttacaaatattccttatctcatttaattctcccaacaatcctacaagaaagctaatattatcccattttatagatgaggaaattgaggcttacagagggcaagtaacttgcccaaagtcactcagtaccagcaaacggacttttccccctctccctgcccccaaataccagccccccactgcaaaaaaaaaaaaaaaaaaaaaaaaannncccccccggggggggaaaaaaaaaaaaaa

SEQ ID NO: 14997 - DNA, 461 bp, Homo sapiens
  misc_feature (1)...(461): n = A,T,C or G
gggttccnaattgaaacccctttccagattgatggacctctttatccagcagntgaaggtcggatcaagttttccacaggaagtcactgccatggaagcttttctttaatatttctttcactttgggcagtgatctttgttttataccaatagccaaaaattctccttgcctttaatgtgtgaaactgcattttttcaagtgagattcaaatctgccttttaggacctggctttgtgacagcaaaaaccatctttacaggctcctagaagctgaaggttagagcattataaaatgaagagacagacatgattactcagggtcagcaacctagtgagttagaaaaaaaattaacatagggccctataaggagaaagccaactatgttaagtttacgtgtccaaattttaatgaaattttactaacaattttaaaccatatttttcttcttcatatccatttg

SEQ ID NO: 14998 - DNA, 453 bp, Homo sapiens
  misc_feature (1)...(453): n = A,T,C or G
natcgagattgtagnccgtgcggnggaatctagaaaagtgactgcaaagaaatactaaactccaacagtttttttgtagagatatgctgtaatgcttctgtaactatttaaatgtctaaaagggttgagcaaatgagtagataggttttgttaagagccagcattctgttgaaaaagacacaaatgtgaagtgtgggaaagtgagaaaaaaaccctgtggggatggcttggagttggggatttaagtgtgaactcataattttctaaaatacatgtgtgtatatatatgtcacatacatgtgtgtatactttgtccagtggaaaggcccagaagcaaagagatacccacatagcaataagtacattgaatacctagatctttatttcttatatcattccccactaaaagataccaaggctgttaggagaaatgtttggttccagggctgggan

SEQ ID NO: 14999 - DNA, 456 bp, Homo sapiens
  misc_feature (1)...(456): n = A,T,C or G
cttgagaccatttgagacgtctaggacangcggnggaattcgatcgttcaccatccgtgggcaccaggtctgtgccaagcacaggttctccaggggtagctgccattcgttccagngatgtatttggggccttctcaggtgaggaagccaaggaggtcaaagccctcggtcacctgccctgatagggcttacctgtgggtgggggagggagaccacacatgtcaaaggtagtgaaggccgctccaaatagtgactggggccaggcatgcggcaaagagaacagaacagaatccagaagtgttcagacagaactagggacagcagaggggcctccatggtggcatgggtcaacagagcatggaacaggcagaggaagcctatctgtggggctgggtacatttctctgagactcacggaatgtaagtgctgacgcatcttgcaagagggcgcatgccn

SEQ ID NO: 15000 - DNA, 494 bp, Homo sapiens
  misc_feature (1)...(494): n = A,T,C or G
catggacccccttgcagatagagaccataggcagngtggnggaattccacagaactataatatacattgccttttctcagcagcatttgaattcaacttatttatttcctctatttgtagctttttgttctagagtcagaacaggtggactttgctttgaatattttagatgggacaaaaattgttcatcttcggaatttatttaaagaaagatctactggtacagggtgtaaaaatacttacaagaatatgatttttttgtttgttcatgcaaacagatcctttacccaatatatattctggaggtaggtatactggtgcaacccatttgccagctgtgtgactttgagtaagttcttaatttctcagagtttcagtgttctcatctataaaattatgtctccaattgtgagtacctagcactgtacctgatacatagtaaactcacaataaatatttcttaaacatacattttgttaggaatacaggcttga

SEQ ID NO: 15001 - DNA, 247 bp, Homo sapiens
  misc_feature (1)...(247): n = A,T,C or G
catgcagcacaccgtttgagaagccgctattacattgtgcagcagcagccccagagtcctaagcaacaacagtgacgccaacttggagctcatcaacacctgggtggccaagaacaccaacaacaagatcagccggctgctagacagtctgccctccgatacccgccttgtcctcctcaatgctatctacctgagtgccaagtggaagacaacatttgatcccaagaaaaccagaatggaacccttn

SEQ ID NO: 15002 - DNA, 468 bp, Homo sapiens
  misc_feature (1)...(468): n = A,T,C or G
naaggcgcgccgcttttnnnnnaaactttangaagncgtngcnntnnnttaaannaacgagacnccattgctggccatggtcactaaatttgaagttcctttccttcctttggagtggacatttaaaatctgggccgttccttgcttcagttcccttccaccacccagggctggctttcctataagccacctccagggtccaggggctttctctctctctccgaagcccctggacctgtttccttgtcatttgaccctcgcctgtgcccgcggagacctcctctgaccaaggggcactagtatgccttgcgctatcatgactgactggcccagcatgattctgtagtcgctgatctcccggaggaggaggctgttgacctgaaaacagaggcgtggctcccctgtgcccagatatagccatgggtgaggcctgcacagatgttgaatgaacatctgtttggggcattg

SEQ ID NO: 15003 - DNA, 455 bp, Homo sapiens
  misc_feature (1)...(455): n = A,T,C or G
attgangacccttgatgaccctctagtcagtgtggtggaattccctgaatgcgaatcaactaaatgagactctccagagattaggaatctcttaatattcactaattctaagccaggtgtagtggtgtgcacctgtaatctagttacttgggaggctgaggtgggagactggcttgatcccaggagttcgaggccagcctggacaacctggtaaggccccatctctaaatttagtattaaaatttgttttaaattcactataattctaatgcacagccaaatatggggcagatctggatcactgccttacatctggccttctacctcaaagagaaaataagaattgaactcaaacccaactgtaaatactagtggccatcttggagaacactggcccacctccattccaaagctaaatccttcctgtgcttttattttttttggcagacagtgtc

SEQ ID NO: 15004 - DNA, 494 bp, Homo sapiens
  misc_feature (1)...(494): n = A,T,C or G
atggctcccgcaaagaagggtggcgagaagaaaaagggccgttctgccatcaacgaagtggtaacccgagaatacaccatcaacattcacaagcgcatccatggagtgggcttcaagaagcgtgcacctcgggcactcaaagagattcggaaatttgccatgaaggagatgggaactccagatgtgcgcattgacaccaggctcaacaaagctgtctgggccaaaggaataaggaatgtgccataccgaatccgtgtgcggctgtccagaaaacgtaatgaggatgaagattcaccaaataagctatatactttggttacctatgtacctgttaccactttcaaaaatctacagacagtcaatgtggatgagaactaatcgctgatcgtcagatcaaataaagttataaaattggcaaaaaannnnnnnntnnnnnnnnnnnnnnnnaataaaaaaaaaatnncccccccnttttttttttgggcgcctttctc

SEQ ID NO: 15005 - DNA, 453 bp, Homo sapiens
  misc_feature (1)...(453): n = A,T,C or G
cggggntttgagtcgactacccgtgcggtggaattcgttacaagtaattgccttagtttttttccccttaagtctacagaataagttttttctgatctatttgataggtttttgtttcaggtgttcaggagagatttaattctgtttaaagaacaaatatatggtgggaatttcttggtttttgagttatatataatatctcttccctctgactaatcttatttgaaaatttagaactgtgggccaccagatgacttcagatgtcccaatccgacaaagcagatctggacagtgaatgaagctctaattcagaaatggctgagctatccttctggaaggtttcctgtggagatagccaagtaagaaaagcattttgggccaggcacagtggctcatgcctgtaatcccagcaccaggcagattgcctgagcccaggaattggagaccagcctg

SEQ ID NO: 15006 - DNA, 517 bp, Homo sapiens
  misc_feature (1)...(517): n = A,T,C or G
tctaccacctggaaataatgttggacttcaacttgttactggcacattttaatagtagatgaaacatgtttttcttggttatgtgaataaatgtatgttgtgctcttcatacttgttggattgtatagagattaaatagtgatatgtatattttgttgtttgctttggtatgcaactcatgtaattttagtgctttgactagcttaaaacttcaaacaagtaattttataataaagttggactaatgtttttcaagagtgattatttttagaaggaccatataaaacttgaaacgcttgaacctaaactcccgttttatctgctactggatgagaagaatttcaacttaatttccattattaccttttgctctcccaccctgcccaatcttctgtgatatcttctctcttttacctgtgtctcaacttacctaggcaagtcataatttagatagaaatctgatttcccanacctccaggtttagatatatcattcagaanagccctaatgtgtctgt

SEQ ID NO: 15007 - DNA, 453 bp, Homo sapiens
tttaaattgtagaccatagtccacgccggggaattccttttaaaagtataatttatgatagaaattactcagtgaagtatatacaccacttcttaaaaaagacttctgtgagtgcagtgtaacctctcaggtgattctgggtcagcattttgagattaaaagtgggaatcaccttcaggctgacccatgaactgtgccggagttttgggctcaaaatcaaaatactcgatgatgcagtttattttatgtgcgctcttttgttttgatttcttttttttgccagtaacatgcctgctgtcaactataatacccctcccaggtcaatgatggtgttatatggattagatacattaggagccgggaggattctgaggttaagaaagggtctgtaactaacccaaggttaagcacgtgataagtatcaaagcccagattaggcaaccagtaagtaag

SEQ ID NO: 15008 - DNA, 440 bp, Homo sapiens
  misc_feature (1)...(440): n = A,T,C or G
atagatttcgatacccttagaccangcggnggaattcgngatctcttcccctgttttacaatggaggactccggaaagactttcttctccgtggaggaagaagctaactattggaaagatctggcgatgacctacaaactgagggcagaaaatacgcaagaggaactccgagaattccaggagggaagccgagaatatgaagctgaattggagacgcagctgcaacaaattgaaaccaggaacagagacctcctgtccgaaaataaccgccttcgcatggagctggaaaccatcaaggagaagtttgaagtgcagcactctgaaggctaccggcagatctcagccttggaggatgacctcgcgcagaccaaagccattaaagaccaattgcagaaatacatcagagagctggagcaagcaaatgacgacctggaaagagg

SEQ ID NO: 15009 - DNA, 478 bp, Homo sapiens
  misc_feature (1)...(478): n = A,T,C or G
cgagccccaaaannagnnnaagctgagnaccntcgganaaactgagaccctcgaacangcggnggaattctgtccaccatggacaagtttaatgtcaccaaacccatccatgcgctgaataacccgatcatcagccagttcttccccaccctcctgctctggtccttctcggccctgctcccctccattgtctactactctacactgctggagtctcactggaccaagtcgggggaaaaccagatcatgatgaccaaagtctacatattcttgatcttcatggtgctgatcctgccctccctgggtctcaccagtctagattttttcttccggtggctctttgacaaaacttcctcggaggcctccatcaggttggagtgcgtcttcctgcctgaccagggtgccttctttgtgaactatgtcatcgcctcggccttcatcggcaatggcatggagctgctgcggctgccaggtctca

SEQ ID NO: 15010 - DNA, 447 bp, Homo sapiens
tttgagacatagtccacgtggtggaattcgtggagtaggagtgaagagtaatttttaatgaggagcactttgaatactgaagagaagaatctaaaaagagtaagagtcagaaatgggctgtgctcttgagaaggtggggaggatccagaacatgggtagatgggccgatctgagaagggagttgatacatgagacagaagaacatggtgtggatgccagcagctgctttgcaggtgggaagatgactgtgtttctgtccgatagctttagtgagtgtgagctgtttgagagtgaggagcctggtagaagaggtaagaatctgaggtttgaggagagaggcagaagctctgatactaagcagtaagatgacatgcaaattagagaaagggagacctccctcaaattatttccctgccatattttagaaaattatttatgacatagaag

SEQ ID NO: 15011 - DNA, 541 bp, Homo sapiens
  misc_feature (1)...(541): n = A,T,C or G
ntttacgaccacagtcagtgtggtggaatcgaagaacaggccagatacccacccaccttcccccanatcttaagcacctgcgccagtacagtcaagaagaggaaagtgtgtgaagacccaggtctggctctgccacttgcctggccatgtcaccttgaagctgtgacctgactccctatattgtttcctcagttgtagaccaaaggcaatggtgtctgccctcctaccttagaagacaaatgcaagggcatttcaccacagagaggacctttgtgctcactttggcccaggaggcagtgatgctcatggttgcatgactttatgagtcgctgggccagggtgaggacctgggcctcctgactcctggcccagagttcttgtcaatcagttcatactggcaatttatgtgaaagcattnatgactgcctacccaatggagaagtaatgtagattgaatggctagagtcttaaagcttggaaganaaaatntttagtccccatttgggaacatgtgccagaatngcctagtgttaataaacag

SEQ ID NO: 15012 - DNA, 441 bp, Homo sapiens
  misc_feature (1)...(441): n = A,T,C or G
attgaagatcattagcccagtgnggnggaattcgaggtgctatgggcataaacaacagaggtgccatgccccctgctcctgtgccagctggtaccccagctcctccaggacctgccactatgatgccggatggaactttgggattgaccccaccaacaactgaacgctttggtcaggctgctacaatggaaggaattggggcaattggtggaactcctcctgcattcaaccgtgcagctcctggagctgaatttgccccaaacaaacgtcgccgatactaataagttgcagtgtctagtttctcaaaacccttaaaagaaggaccctttttggactagccagaattctaccctggaaaagtgttagggattccttccaatagttagatctaccctgcctgtactactctagggagtatgctggaggcagagggcaagggag

SEQ ID NO: 15013 - DNA, 492 bp, Homo sapiens
  misc_feature (1)...(492): n = A,T,C or G
cgatggtcnccccttagagacccatagaaggcgtcggaannccctgnncaagcctgagtggcagccgctcttgctcacctgttgaggaagggctggcttactgtccaccgtggcggcatctttaactggcctccactcaatgggaaactgactcgcctgtgaaagacacagtgggagagctgaaaatgaatcagaagctttatgtatatgatttttaaattaaactttactttttcagactgcccctcccctttttgtaaaaagtccatttactgtaaaatcgttttttccanaaaaaaaaaataaaaaaaaaaaaaaaaaaaaaaaaaaaaaaaaaaaataaattntaatttttnttgggctttttttaaagggggcgccgggtattaaaaaagggcgctcaaaaacccttggggaaacgtttagttgggtgtttttatccccccactttgtgtggtccccccccccccgcttttttataaaataaaaaan

SEQ ID NO: 15014 - DNA, 456 bp, Homo sapiens
  misc_feature (1)...(456): n = A,T,C or G
ttgaaatgaacctattgcatatgagaccatctggagngncgnggaantccggaggcacaacagagacgctccactctcctcgccccgccaccgtaacggagagcgcccgtcgctgcatttccggcgacacctcgcagtcattcctgcggcttgcgcgcccttgtagacagccggggccttcgtgagaccggtgcaggcctggggtagtctcctgtctggacagagaagagaaaaatgcaggacactggctcagtagtgcctttgcattggtttggctttggctacgcagcactggttgcttctggtgggatcattggctatgtaaaagcaggcagcgtgccgtccctggctgcagggctgctctttggcagactagccggcctgggtgcttaccagctgtctcaggatccaaggaacgtttgggttttcctagctacatctggtaccttggctggg

SEQ ID NO: 15015 - DNA, 456 bp, Homo sapiens
  misc_feature (1)...(456): n = A,T,C or G
nattgaagnactgatgaccatncggccgngcggnggaattcaggctttaagacagatattaaagttctccgacagaaactgaaagacttttagcatttgttgtataaggcaacagttaatgcccgggcaaaccaggatcttgcccttctgtgtgaggtccgtgacagcaatagacgggcacataagatacaaggagaactgaagaatcttaagtcgaaagtgtttggtctggagaatgaacttagactctgttaatgtctacttttggaaatggcccccatttagaagaggtgtgcttcttgaaacctgaggacaaggtcatctgctgccagaaaatgtaaacctgagttgactagagtggtggtattcattattgtaaagacagcttgaagaatcggggaccactaggaaagcttttcttgcatactcagcttgctttatcatttttgctggcct

SEQ ID NO: 15016 - DNA, 546 bp, Homo sapiens
  misc_feature (1)...(546): n = A,T,C or G
ccctcctttgtgccgctcacggatggatactggaactctttcgtgctcgcctgatggtcgtaatcttctccccncaagggccnngnnnngnnnnttagaagatataggactatgcggggaacnccgccgccgccgagaccctccggccaacagggacccgcggaggccccggcccccctttttgagtatggcagcatttccttctcccactgctgctgagatggcagaaattagtcgaattcagtacgaaatggaatatactgaaggcattagtcagcgaatgagggtcccagaaaagttaaaagtagcaccgccaaacgctgacctggaacaaggattccaagaaggagttccaaatgctagtgtgataatgcaagttccggagaggattgttgtagcaggaaataatgaagatgtttcattttcaagaccagcagatcttgaccttattcagtcaactccctttaaacccctggcactgaaaacaccacctcgtgtacttacgctgagtgaaagaccactagattttctggatttagaaagacc

SEQ ID NO: 15017 - DNA, 448 bp, Homo sapiens
  misc_feature (1)...(448): n = A,T,C or G
atcgaggcccttggntttcgccgaccctantccgtgtggtggaattcatttgttgagctcctacttttggtcaggtgtggagagaaaaagcccacagtccctgcccttgaggaacacataatccaaaaaaaaatgcatgggtggctccaggtgttgtagggtcttaggcaagtataattttggacatgcattttaagaaaaagaatacaaaattacaaatgcagaattactaataaaagtgaatatttattgtatagagaaaattaatcacaacaaattacaagttttagcattctcacaaatgccagaaataccacaaaatctcagaaaaaaacctatattttgtattaattagctgactgatcacatgtataattctacgtgttctacttttggttgcatattgttgaccacatgagaaaaatttctttatttacttattcagatg

SEQ ID NO: 15018 - DNA, 462 bp, Homo sapiens
  misc_feature (1)...(462): n = A,T,C or G
tgatggccagggggcaaaacgatgctacacgaacgtcngnanaanctaaannanangangaacagngngtggatggcaaaatttccaagcactggactgtaattttgagagaggcatttacagacgctgataactgtggaatccagttccctttagaccttgatgttaaaatgaaagctgtaatgattggtgcctgtttcctcattgacttcatgttttttgaaagcactggcagccaggaacaaaaatcaggagtgtggtagtggattagtgaaagtctcctcaggaaatctgaagtctgtatattgattgagactatctaaactcatacctgtatgaattaagctgtaaggcctgtagctctggttgtatacttttgcttttcaaattatagtttatcttctgtataactgatttataaaggtttttgtacattttttaatactcattgtcaatttgaga

SEQ ID NO: 15019 - DNA, 403 bp, Homo sapiens
gttcgaaaggggtaatataaaaatgtgctcgtgtgtttagcctacgtttttctcatgcctccattaccagttgcaattgtgtatctaagacctccaagcttgtttttaaaacaaaacaaaaaacctttctctattatctcagaaatataaatactgttatttttaatattaagaaattcaatataacttttaacacacactgtggaacattaaaccgtataaaaatgtagttataactatttttaattccaaggtgttgtttgcttttttcttttaaatattttcttaatattttgtcagattaactagatgaataaataaatctagtattaaccgcattatgaattaaataattttgatttaatgaaagggataatatgatttccagtgtttactgtagtgt

SEQ ID NO: 15020 - DNA, 455 bp, Homo sapiens
  misc_feature (1)...(455): n = A,T,C or G
nattgagttactatgactatncgnccgngcggnggaattctaagattgtcattcagaaataccatactgtgaatggccacaactgtgattttagattagccctgtcaaagcaagagatggctagtgcttcatccagccaaagaggtcgaagtggttctggaaactttggtggaggtcgtggaggtggtttcggtgggaatgacaacttcggtcgtggaggaaacttcagtggtcgtggtggctttggtggcagccgtggtggtggtggatatggtggcagtggggatggctataatggatttggtaatgatggaagcacttttggaggtggtggaagctacaatgattttgggaattacaacaatcagtcttcaaattttggacccatgaagggaggaaattttggaggcagaagctctggcccctatggcggtggaggccaatactttgcaaan

SEQ ID NO: 15021 - DNA, 440 bp, Homo sapiens
  misc_feature (1)...(440): n = A,T,C or G
nattgaagatcgattgcccttgcggnggaattccaaaggagtatttttggcctacagaaatttaaaaaaaattatgtagccaaatctttcaatttttcagccttcccaattttgagttgtagttagcaaaccctttcctacatcaagggtagagaattcaccttttttcccccttctagtggaagtatggcttcattgctttatttagatccctgattcgtttggagtttatttcggtttatggcatgaggctttccaaatgaggttttccagcggctagccaattattttaacattgtattaatccattttcatgctgctatgaagacatccccttgactgggtaatttataaagaaaagttgtttaattgactcacagttcagcatggctggggaggcctcaggaaacttaacagtcatggcagaagaggaagcaaat

SEQ ID NO: 15022 - DNA, 451 bp, Homo sapiens
  misc_feature (1)...(451): n = A,T,C or G
attgagattgtagnccgtgcggnggaactcgaagaggatgggaggcgcagtcccccatgggaaccctgaccaggtccctcttttctgtcaaggactttctgggaataatactgggggttttgtttttgtttttgaactgtctcaaatgttctcccaaagatgctaaaaacacagcctctccttttagcaagttaaaaggctgggtaggactgcgggagactgcctgcctttcaccattttctccccacttccagtgactgctcttattttgtgtaccataagccaacaaccgctgactccaggattgcataagccccctgtgaaatcggtgctgtactgcataccctgccagctgtgacttgttatcctactatattttctaaggagtgaataatattgtccgagtaactaacttatttaaaagacatttccttctgtgggcattgactgt

SEQ ID NO: 15023 - DNA, 406 bp, Homo sapiens
  misc_feature (1)...(406): n = A,T,C or G
ctcccagctgcagcccatcctcccggctccctcctagtctgtcctgcgtcctctgtccccgggtttcagagacaacttcccaaagcacaaagcagtttttccccctaggggtgggaggaagcaaaagactctgtacctattttgtatgtgtataataatttgagatgtttttaattattttgattgctggaataaagcatgtggaaatgacccanaaaaaaaaaaaaaaaaaaaaaaaaaaaaaaaaaaaaaaaaaaaaaaaaaaaaaaaaaaaaaaaaannnnnnnggggcccgcggaataaaagggggggcgtaaaaacccccgaggaaccccggggtggttttttttttacccccccctttgtgggtgcccccccccccccctttttttttttaagaaaggaa

SEQ ID NO: 15024 - DNA, 447 bp, Homo sapiens
  misc_feature (1)...(447): n = A,T,C or G
ttcgagccccttnnnnattgtaagacattagtacagtgcggnggaattcggttttaaaaatgttgcccgtaatgttgaacgtgtctgttaaaaaataaaagaaataatagttgcttcaaactatttttatgagaagttgtaagcattttttagatataaagcagtataaagtacttgttattttactctgaagttgtttaaaattcaccatgactttgaccgctgaagattctttaagcgggttaatttatgttttgaggtggaatacaatttacacttttttcttaaaaacatgaatgtgggtttctatattaagcatattttgtgactactattaacagattgatttgtttagatattaaatgctttaagctattttaccttttcaagaagttgtgttttttttctccaagtcagaaccaattcctgcaaataggcttcccatga

SEQ ID NO: 15025 - DNA, 473 bp, Homo sapiens
  misc_feature (1)...(473): n = A,T,C or G
gaggattnntttgatcgcgtcgttagtccgngcggggaattccacaggatccatgttcagcactgggggatcttgctcccctgacatttaacacgcaagacacatcacttaaagcaaagattccacttctagtcagaacacagtcactggtcctggatctgccctctggccatatatgacaaaactagacaaaatacatatggcaactgtcttcaggcgctggacagtaagtgtagattctgatgctgaaaagataggacacgggcgaggtgagcccctaggccgcccagactttctgcctgggggcaccttctaaacagtgaggggaagggaggctaagcagagcctccctcagtctcagtgagctgaggaggcaaagactggagttcatgactgccagaggggctggaatttggggtcagggtactagaaaggagacagctgaacagagggaaatacccaaaattttactg

SEQ ID NO: 15026 - DNA, 478 bp, Homo sapiens
  misc_feature (1)...(478): n = A,T,C or G
tgcgggctnnnnatcgatagcatncgttagngcggngcaattcanagtttgcagtgagctgaaatcgtgccattgcactccagcctgggcgacagagtgtgactctgtctcaaaaacaaaacaaaacaaaacaaaggagaactctggggagtatattctttcagcatacatttatgcatttaaaaaaagaaaaaagcttaatacttcagaaatggtaaatcatttgacaaatgagaaaaccaatttctgggggcaccactgattatagagcctataccttctggattcaagtctaggttgtactacatattagctggatgaccttgggcaagttacttaaatttttgtgctatggctgcctcacctgtcgagaggacgtaataatacacctaatttaggattgttatgaatttatatatatgtgtagaatttagaacagtttctggcatagactattgcctattaagaggtgcaggtg

SEQ ID NO: 15027 - DNA, 474 bp, Homo sapiens
  misc_feature (1)...(474): n = A,T,C or G
tgggccttttattgatcgcgtccattagtccangcggtggaattanggaatccccaggggaatctcgtgaccagccaggtgtgaaatctgctaactggaagatctcaaagcttccttcactttttgtgattttgtggtcatgtaacgttactgtattattctacgtaaatgtgggtacttggatgtttatcatactgtttctctgtgtttacatactaatttgtgtaagaaatgcattttagtctgtgtacctcaacctgctgtttgtttcctagaggtgttagtagtctttaaatacaagtaagacttaagaggatatttgatgttatttacctggatattttcttccccttttatttatttagaggaaattgagattctaggagccaaaaaaatgaaaacaaaattctaaggcaaagttaaagaaaaaaattacattatttcttaccatttgctactttataatgaaaattt

SEQ ID NO: 15028 - DNA, 445 bp, Homo sapiens
  misc_feature (1)...(445): n = A,T,C or G
nattcgtcgatcgactagcccagtgtggnggaattcgcccctgaaagaataaacccagagctcaaccagaagggatacagtgtgaagtctgacatttggagtctgggcatcacgatgattgagttggccatccttcgatttccctatgattcatggggaactccatttcagcagctcaaacaggtggtagaggagccatcgccacaactcccagcagacaagttctctgcagagtttgttgactttacctcacagtgcttaaagaagaattccaaagaacggcctacatacccagagctaatgcaacatccatttttcaccctacatgaatccaaaggaacagatgtggcatcttttgtaaaactgattcttggagactaaaaagcagtggacttaatcggttgaccctactgtggattggtgggtttcggggtgaagcaagttc

SEQ ID NO: 15029 - DNA, 475 bp, Homo sapiens
  misc_feature (1)...(475): n = A,T,C or G
tggggcttttttcgtagcatacgatcgngcggngcaantcanataaacacatgcatacacatataaacacatgtacgcatgcgcaagtcccgagatctccacttctagagtctttgggctcttcaccatctagatgcccacctggggctccccatagagctctgacccatctcggaggagctgcctcttctctttttttttttttttttggaaagggagtttttttttgccccccgggttgaatggcggggccccaatttttgtttgttgacccctccgcccccggggaaaaagcatttttttgccccctccctccgaggtgggggggattacgggcacttgccccatgggccagttatttttggcactttaagaaaagcggggttttccccttgtggcccgggggggtcttgacctccggcctttgggaccaccccccctggccccccgaaggggttgttttacacgcctgcgg

SEQ ID NO: 15030 - DNA, 477 bp, Homo sapiens
  misc_feature (1)...(477): n = A,T,C or G
gaggggttnnnattgatcgcgtncgttagnccangcggnggaattcggtaaatcttaaaaacaaacctcccgtatctgcatttaattgtatgtaaaagcttccctccacctaccaaggcagtcttcttccttggttgccatactgcttctttaactattttagcctttaaatgctaaattaggtttttctagttcactatagttcgcacatttaaatatttccattcttcacaagaattatgtgcattttaagcatggttgaaatttgctgccacaaccataacattaaaatttggagatcattgtagattcatgcggctgtaagaaataatatagagatcttgcataccttccacccagtctcccaaatgataacgtgtgtgtaactacagtatactggacattcctcccccttttttttcggagaagttacagattgcctcataatcctgtggggatactatgtggctatgatgg

SEQ ID NO: 15031 - DNA, 403 bp, Homo sapiens
gccccctaacctaatggttgcttacagtaagaagcacatttcttttcttgatgctttgaagacagtttaggtaatgaatgggtcaggagtgcttactgtggattttctcctctaggaaagaattagtactgcataagatgattaaaaataatgcttttgtagtttcatttcggaatagtgaatgtactatgattgttgtgcgctcaaatcattaactgcagggttttttttttctcccccccacaggggtttggtgcaaaaagaaagatccgtcaagctggtgtcattgactaaccacatccacaaagcacaccattaatccactatgatcaagttggggggaatctggggaagggttctgaatatctccctcttcatccctcccgaaatctggaatacttat

SEQ ID NO: 15032 - DNA, 479 bp, Homo sapiens
  misc_feature (1)...(479): n = A,T,C or G
tgagagcccnnnnaggggggcctttgatncccttgactgagaccatagaacangcggnggaattccaaccttccagcctgcgacctgcggagaaaaaaaattacttattttcttgccccatacataccttgaggcgagcaaaaaaattaaattttaaccatgagggaaatcgtgcacatccaggctggtcagtgtggcaaccagatcggtgccaagttctgggaggtgatcagtgatgaacatggcatcgaccccaccggcacctaccacggggacagcgacctgcagctggaccgcatctctgtgtactacaatgaagccacaggtggcaaatatgttcctcgtgccatcctggtggatctagaacctgggaccatggactctgttcgctcaggtccttttggccagatctttagaccagacaactttgtatttggtcagtctggggcaggtaacaactgggccaaaggccactacan

SEQ ID NO: 15033 - DNA, 477 bp, Homo sapiens
  misc_feature (1)...(477): n = A,T,C or G
tggcggctnnnnattgatcgacgtctctgtccangcggntggaattcgtcttggattttggaatctgaaactttatatggaaaggtcttttgtttgtctttgtcttgttatatgtatttatgtttgtggaggggatccctgaagaaattactagtggaagaaattactaactcagggaactcttcttgtttggtcagtcacattcagttagtcctgaaggagttgctagtggaatctcagcaagcctaactcagggtaatcatctgctcttcaatctttcccaggctttaccctctgaacttctgatcgaaggtcatccctctccagcttgagtggatcaaagatgacaagggccaatggaaccaagtttgagtcttgccaggtcaatacttgggtcctgagtatggtgactagtatctgttttggtatgtgtgtattattccagccagaatgggaaatgctaattcagctcctccg

SEQ ID NO: 15034 - DNA, 467 bp, Homo sapiens
  misc_feature (1)...(467): n = A,T,C or G
aacaagtagaaatcctcctcganaaacntggccangngcnggaattcttcttattcagattgcttctgagaagcaaaactctttaaatacattatgtgtagataatgatgatacttcattctcttgtgatatcagtgtatgcgtacctgtgtcgctttatttgcagtgtgttgagggactggtgtatccactggaatagttggtactcttggatgtgttttctcaccaagatgagcaaagaaaggtttgcacagaggagtgtgaatgtgtgtttgttgctggctgaatggcaatagatgtctaaggtggattcagtgtctggcacactgagacacctccaagaaggagattgatgcatcaggttcagtttaacctggaatatctgactacccctgaatccacccagaaagggggcccaacacccttgtccatttatgggtattttttttcgaagttattaagcatat

SEQ ID NO: 15035 - DNA, 447 bp, Homo sapiens
  misc_feature (1)...(447): n = A,T,C or G
attgaggaccctagaacaccgcggnggaattcaggaaaatatggtacaggagttagttagaaaggtcttattgattttacttctacttttcactacagttacaggtagaatactgtaggaagtcagtgcaaggtgcatgcttgattgatagatattgattgattgtttttcagtctctggggtcagttttgtggtttctgctttcttgcctaaatcaaagactatttcaagtcaacaacactgaaaactgcttttcgcctccactcttacagctgtgcctaataataattaattaataaacgcacagccctatgtgaacagacaggaatttcttgtgcaatgtggagcaaatggaatggtctccttccgcaagtctttttaatcctcatatctggagtacaagggtagacctctggcttaccacatacactatgctaaagtcatcag

SEQ ID NO: 15036 - DNA, 463 bp, Homo sapiens
  misc_feature (1)...(463): n = A,T,C or G
cgaagggcccggttgnnnaaactatgctccccaaacgttcgggaaanccnanannanngnnngnactttctggntttcctgtgggaatatcaggaaaaagctcatatattgtggagtttattttctaaattgattttatctaggagtaggttcactgtaaaagaaaaggtgagacagaaacctggaattttatttatttatttatttatttttgagatggagtcttgctctgttgcccaggctggagtgcagtggcgcgatcttggctctctgtccccgcaaaaaaaaaaagattccaccaaagcaaagcaattacctttgttgagggaataaatagcaaaaggggtggatggactggcccacattttcttgctctttaaagatgatattcctaataataatggcctagagttattttgggtgggggatttgaaagtcaagtttagtgtcttataagtgtttt

SEQ ID NO: 15037 - DNA, 489 bp, Homo sapiens
  misc_feature (1)...(489): n = A,T,C or G
nattgtagatcgctaggccagtgcgnggaattctttntaataatagacttttttaaaaatagtattgggtctgtcaaagaagtcatagtttcacatgaattgctgaaatgcactgcttcagtattgtgcccctgttcttagtaataatttgatttacagctactgccataccagtacttataaagggagtctgattgggtttttgttttttggtttgttttttttttagttgattgtaccttgaatatgcaggttttccaagtttttcaccaggtcagataacttcttcctttcttaagggaaatcagtcagcttggtttacagtcgtggcttccaacatcctccctgtgcatatcacctccttggacagggcagacgctctgtatcagaagcatgcaggtcatacgttactccaggtaaggcaacatgccttgattgcatggttatggttagtatacactgggatggtcccatagctctgttaagaan

SEQ ID NO: 15038 - DNA, 455 bp, Homo sapiens
  misc_feature (1)...(455): n = A,T,C or G
aattcgaggaccattagtggacccctagtccagtgcggtggaattcgcaaggaaagggtcttagtcactgcctcccgaagttgcttgaaagcactcggagaattgtgcaggtgtcatttatctatgaccaataggaagagcaaccagttactatgagtgaaagggagccagaagactgattggagggccctatcttgtgagtggggcatctgttggactttccacctggtcatatactctgcagctgttagaatgtgcaagcacttggggacagcatgagcttgctgttgtacacagggtatttctagaagcagaaatagactgggaagatgcacaaccaaggggttacaggcatcgcccatgctcctcacctgtattttgtaatcagaaataaattgcttttaaaannnnnnnnnnnnnnnnnnnnnnnnnnnnnnnnnnnnnnnnnnnnnncn

SEQ ID NO: 15039 - DNA, 460 bp, Homo sapiens
  misc_feature (1)...(460): n = A,T,C or G
ngttgagntccccactgatanccctgtgcannggcnggaanncgtttaatccttctgtgccatatttatcataaatgtcccgtttctcatcatttgataatacctcgtatgcctcagctacttctttgaattttctctctgcttcttctttattttctggatttttatcagggtgccatttaagtgccactttatgataagcttttttaatgtcctcaggtgaagcatatctttgcagtcctagaacttcatagtaatccaccatgttttaacagatagttggaagtgggtgtgctgggtattgagaaccgtggtttcctcagctcaggctctgctggtggtggtgatagaggtagtgactgcaaataggtacacttttatgttaaagacaatgttattaccatgtgctaagagatgaggatactgattatgtggcaagcagagttacaaatatgtcaga

SEQ ID NO: 15040 - DNA, 556 bp, Homo sapiens
  misc_feature (1)...(556): n = A,T,C or G
aagttgatnnccccntnnnnnnnnntttcgatccacagtcagtgtggtggaattcgccacgcccaaaggcagcagctcctggcagacaagtcggccgccagcccagggcgcctcatggccccctcaggccaagccgccccccaaagcctgcacacagccaaggcctaactatgcctcgaacttcagtgtgatcggggcgcgggaggagcggggggtccgcgcacccagctttgctcaaaagccaaaagtctccgagaacgactttgaagatctgttgtccaatcaaggcttctcctccaggtctgacaagaaagggccaaagaccattgcagagatgaggaagcaggacctggctaaagacacggacccactcaagctgaagctcctggactggattgagggcaaggagcggaacatccgggccctgctgtccacgctgcacacagtgctgtgggacggngagagccgctggacgcccgtgggcatggccgacctggtggctccggagcaagtgaagaagcactatcgcccgggcgtgctggctgtgcaccccgan

SEQ ID NO: 15041 - DNA, 592 bp, Homo sapiens
  misc_feature (1)...(592): n = A,T,C or G
aggaaccnnttttgaaaccccactgatcactagtccgagtggtgcaattcgactctacccaccactcaacaccatccgagacgtgtctttgagaattgccatgaaagttgtcgactacgcttacaaacacaacctggcttcctactacccagagcctaaggacaaggaggcttttgtaagatccctggtctacactccagactatgactcctttacactggacagctacacttggcccaaggaagccatgaatgttcagacggtctgaggcagtctcagaggctagtatggggctagatgaagcccagagtaacacccacaatataaatgggttccaaaatggcccacgtgaaaaaaaaaaaaaaaaaaagccgcccgttcgagttaaaagggccggttaaaccccgctgtgcaccccagaggggcctttgtatttcgcacccctttgggggttggcccttcccccgggctttctttgcccttggagggggccacccccaggtccttttgttacaaaaagggggaatttgtttctgattgccggaagcgtggccgtcttttctttgggggnanaagacgataggtgcccttg

SEQ ID NO: 15042 - DNA, 477 bp, Homo sapiens
  misc_feature (1)...(477): n = A,T,C or G
nnnccgcgcgccgggctgnnnngnnaagttttnangancggcggngcaattngngagaatgagctgtacacatcttgggacaatctgctagtatctattttacaaaatgcagagccaggtccctcagcccagactcaggcggacgtgttcactaatgactcaagtgagccttcggtactcctggtgcccgcccggccagaccgtcagcttgataattactaaagcaaaggcctgggtgggagaacaggtttctagtttttacccaagtcaagctgcacatctattatttaaaaattcaaagtcttagaaccaagaatttggtcatgaaccattaaagaatttagagagaacttagctctttttagactctttttaggagtcagggatctgggataaagccacactgtcttgctgtatggagaaattcttcaaggggagtcagggtccctcaggcttcccttgtgtctccctggaccn

SEQ ID NO: 15043 - DNA, 452 bp, Homo sapiens
  misc_feature (1)...(452): n = A,T,C or G
nttgtagtgcactagcccagngcggnggaattccacagaaataatttcatttgttcataaagtttaatatgagatttgacggttgtcttcctaagaaacctggccatggagcagaaatagtgaccattataatttggcctctagaagaaggtaacaaccaagaccagatttttaatgatgcttctgtaaacaatgcatatataagtatgaaagagagagagagatggggaaggagggagagagagacagaaagaaagtgtggataaatcacagttcccttggagtgttgtttcgatttcccatatttagagtttttaattcaaagagagcttttcagttgccgcttttaagttgggtgaaacagatgagcagttaacccttccaaggtagtgagacttttgtacagtgcatcatgtagatgcaggtgatatacactgaagataaatggttca

SEQ ID NO: 15044 - DNA, 451 bp, Homo sapiens
attgagttcgcgtaccctagtcagtgtggtggaattccgggaggagcctcatctagtcagtcacgcagaagtttctctttcgctcttcgcgctacacacccagattggcttccagcgcgcagggcacaagcctgctggagaacagagccaacacagagaaaatggatccaggagatgaagatggagaaactgggtgctgaagacctttgagctgtttttggagctagactgatcactggactttcaaatcatatgagtaaatttgttctcttttaggtgaagttagcttggattgaattttctgtcatttgaaatagaatcctaattgatacacttgtctccaatacctgttcaaagccttagtgaggcatagctcaagagatcctccagcctcggcctccagtccaagtagctgtagctccaggtgtgtaccactgcatttgacttacac

SEQ ID NO: 15045 - DNA, 476 bp, Homo sapiens
  misc_feature (1)...(476): n = A,T,C or G
aggaaggaccccggnttggccnaaaattgatangcattcganntgctagcagananctnnnnaannncncnnggaagcagcagatagctaaggaaaaccagcaggtgagggcccgagagtgtgtaatgtcctggaagggcggtagcggggacgcagagatccaggtaagcatcctgactctgatccccttaggtagcaaaggacgtgacacttcatcaggccttgctgaggctgccccagtaccagactgatctcttgcttaccttcaatcagcccccgtaaggaggaaggaacgggcgggtatctcatgactgggttcccaggagaatcgggctgggagggacagaacagggagactcactggtgggatcctccaaggaagcaggagtgggccagaggtttggggtaactgatacccaggtcctctggggaacaggaattggcaatttccaaacctcaggcctggatgatggtct

SEQ ID NO: 15046 - DNA, 605 bp, Homo sapiens
  misc_feature (1)...(605): n = A,T,C or G
tgggacncnagaaanacnnnttttgaaaaccccnttcgaatnactattccgagnggncgaattcaggnggcagaggctgcagataatcagagggaagaggctgcagataatcagagggcagggtccccagctgatgagggggcagaggctgcagataaccagagggaagaggctgcagataatcagagggcagaggccccagctgaccagaggtcacagggcacagataactacagggaagaggctgcagataatcagagggcggaggccccagctgaccaggggtcagaggttacagataatcaaagggaagaggccgtacatgaccagagggaaagggccccagctgtccagggtgcagataatcagagggcacaggcccgggctggccagagggcagaggctgcacataatcagagggcaggggccccaggtatccaggaagctgaagtctcagctgcccaagggaccacaggaacagctccaggagccagggcccggaaacaggtcaagacagtgaggttccagacccctggacgcttttcgtggttttgcaagcgccggagagccttctgcacactccccggttgcaaccctgccaagag

SEQ ID NO: 15047 - DNA, 407 bp, Homo sapiens
gggcaggttaatcttctttaaaagagtctgctctttctacccaattggcgaagcaaatccccaggattcaccgaacaaatggattaagcacccactgagtgcctagcatgtgcctggacaccaggccaccgggaagatgctccccctttgacttgtctatgacatgctatgtctctcaccagatcccttcctggaggtcgggcttctgtaacatggctctgcccccaaaataaaattttcaccgcgagtcagggatcggcaaacattttctgtaaagagccagaaagtagatattttaagtcataaggtccctgttaacaactacttgactctgccattgtagcacaaaggcagccacagacaaaacaagcaagtagtcatgtctgtgttccaataagactttattt

SEQ ID NO: 15048 - DNA, 452 bp, Homo sapiens
  misc_feature (1)...(452): n = A,T,C or G
attcgacgtcgattacccctaggcggngnagnggaaancgagcatatattatttaaaatctttcccagacaagcaactgctaaaagaatttgttatcaccagactggccctacaagagagggtggagagttctatacatggaaacgaatgaatggcgacacctgctaccactttattacacataatctcatagcccacagtccctgtaatgctactacacaatccaaactacagagcaaccagctaatgactccatgttaggaataaagcctcatgtctcaatattaaccttgaatgtaaacaacctaaacaccccacctaaaagacttggagtggctgattggattaaaaacaagacccagccttctgctgtcttcaagagacctctctcacatgtaacaggactcataggttcaaagtaaagggatagggaaaaaaatctatcacacaag

SEQ ID NO: 15049 - DNA, 561 bp, Homo sapiens
  misc_feature (1)...(561): n = A,T,C or G
gtangaanactatacagaccggnggnnnnnnactatactttcttanaatcaagggacactgtgtgactgaaataagtagaataaagccctgattataagtgactagatattccaggataaaatccacagttctaatttagtttgtaaaagttttgactatttcagttagctttgtgctttttagctttaaatcaaatcttagtgtgccgagtggcattctgatggctaagaggtgaagattagtgagcagttcacctttgctgctttcaactttcaagtaattactgggttgtcaaccagaattcagaactaagaactaaaaatagtattaattctccaaaatgtctgccacttttttactggttgatggatagatcacgttcttagatgaaagattaagattttttttcctttgctgtaaggaaaaatgaccaattataccccctagtggtaaaaacaatgtttaaatgaattagtttaacaacttttntaataaaaggaanattactcagncatacttccctttcttggtagtattttagaagcattntatagtgtgtn

SEQ ID NO: 15050 - DNA, 420 bp, Homo sapiens
ctcgggaggctgaggcaggagaatcgcttgaacctgggaggtggaggttgcagtgagccatgatcgcaccactgcactccagcctgggcaacagagcgagactctgtctgaaaaaaaaaaaaaaaaaaaaaaaaaaaaaaaaaaaaaaatttcccccccgattttttaaaattttccaaaaagtgttgggaaccacaaccccccgggttgtttttaaaaaaaggggttttttccccccctttttccggaaaaaaaggggtttgcccctccaggggaaaaaaaaaaacttttttccttaaacccttttggggtttgggcccccctttggggggcctttaagccgggaaaaaacccttctttaaaggaaaaacccccgggggggggggaattaagggccccaaaaaaaaaaaaaaacctttt

SEQ ID NO: 15051 - DNA, 475 bp, Homo sapiens
  misc_feature (1)...(475): n = A,T,C or G
agattgcccggnattnnngnaaactgagactctagaacgactgagtgccattcgcagaagcgtggtgtgctcccaggactggcatgacaggtgtctcctcctcaccacaggctgtgcccatgagtccctgtgcagaccagtgggcaaggcagctgggccagatctcaggccagccgtttgtgctcctagcagggttgctgtgctggccacacggagaggccctagagagcctcatggattgtaactaaagaagaaacggttcctttttgtttttttaaaaatgatttttaaataccgttttttacaccgttctctcggtactttttttaagctaagtcagcattgtcttccagtgttaaaggcatccctcacctctgcattgaacttacgtatccatgccaaggaatggaatttccatcctgagccagttcagttaggtgtcaattgatactattttaattttttatgcaatctg

SEQ ID NO: 15052 - DNA, 464 bp, Homo sapiens
  misc_feature (1)...(464): n = A,T,C or G
ggaacatcgaaaccactngaaanattganangctacgtacagnccggnggaantcgtaagcgtttacaagattttactgaaagttttggaatgtaagaaggaaaatgctacactgaatataattacaactattcaggcacagacgcatcccagagtctcctaccaagttgactctcctgtctgtcttccttttctgccttcacttggcttcagacagctcaccttccaaccactggaagtgattatagcatctccacatctgaccacaaggtggagatcaaggccaaatttttcaccagctccagatactgaaaggagaactttttcttcattcatagtcaaggtaaggcctgcctcctaggtcttcatttcctgttcatacattgaatctgacagtggcaacatattccctttggaggaaattctgtctaggcctaaagcagtgtggtctagctttatggatg

SEQ ID NO: 15053 - DNA, 585 bp, Homo sapiens
  misc_feature (1)...(585): n = A,T,C or G
ntttcgaacactagcttagagaggcgcatattcagattatcgacagtggttttaatagcaaggggacccacatgtggctcccaccacagtacccagtgggagatgctcaggagggatcggtgcctccccctgccgtgggaagaggctctgcgcatcactggagcttctggtgccggtgctgtgaggtctcccagcaatgccagggcaggcctgaaatgggagtaaaattacttggtttgcccaactgaaacaggacctcatttttgtcaccaaaatatgacattgagactgcattctggaatatttcctactgtttctgtttgtgagctctaaaaggacaagtgaaagttgctgtctggggttttccttgttatatgttcattttaaacagccaataaccaaaaaaaagtcattatgtggaagttcctattagagtatgtagcacataggaatagttcatgattgttaaataaatcattaataatgccactctacaacctatttttctttttttttctggtttttggttggttggttggttagctctaaaacanatccagaagtccataattaccaggtangaan

SEQ ID NO: 15054 - DNA, 505 bp, Homo sapiens
  misc_feature (1)...(505): n = A,T,C or G
gggaaggccnnnnnntttgaaaactgagacactagtccatgtcgtggaattcaacaaggagaggctgaagaacatggcactctccattgccgaacggtatagggctcaaggaataagcgcaaataaatttgtggactccacgttctatcttcttttggacttgatcaccttttttgacgagtatcatagtggtcatattgatagagcttttgatatcattgagcgcttgaagctggtgcccctgaatcaggaaagtgtggaagagagagtggctgctttcagaaatttcagtgatgaaatcaggcacaacctctcagaagtgcttcttgccaccatgaacatcttgttcacacagtttaagaggctcaaggggacaagtccatcctcgtcatccaggccccagcgagtcatcgaggaccgcgactctcaactccgaagtcaagcccgcactctgattacctttgctggaatgataccatanccgacgtctggggacaccaatgcg

SEQ ID NO: 15055 - DNA, 490 bp, Homo sapiens
  misc_feature (1)...(490): n = A,T,C or G
nctgaagatcatagccattcgcgaggaactcctgggacccacgcggccactccagggatcattgttgtccttttgtgaggggctgaggcgactgtcccatggaggcatccaatgctttctgtgccaagaatcccaagtgactggggctggggaccacttctccaggcctctctccccgaccatgagagcccctggccctggcccctgcacaccagtaggcccagaataaccgccacccttgccatcctgcaacagctggactcaagtttccaggaagtggagatgtgtttctagaagtttcctgtggaacctggaggctcctgatgcctttgactccaggctgggcgattccgatgctgacccgtcctcctgggctccccacccccgctccccaagtgtcacacaggcactttgtacacatcctggttttctaagaagggaacttgctatcaagattcctgtaccangcccacggccgtctcgggcagag

SEQ ID NO: 15056 - DNA, 492 bp, Homo sapiens
  misc_feature (1)...(492): n = A,T,C or G
nttcgacatcgatnaacactagtccagggtggtggaattccagttgcttttacatgtgtatataactttacctttttctcatttactgtcttacttgatctcttaaccttgcctattttggggggcatgagaccagatctcacagtcttacacagtccacttcgccaggctactttgagaccagttgtcactactgcctgcagaatctccttcccttccttttgggggtaatccaggtcttaaaccagtgtaagctctttttcctattgctctggagtgatagtttctaggatctttcaagaagtttggaagaggccaggcatggtggctcatgcttgtaatcccagcactttgggaggctgaggtgggtggatcactcacccacctggtcaggagttcaagaccagcctggccaacatggtgaaaccccatctctactaaaaatacaaagttagccgggtgtggtggcaggctactcaggaggctgaggca

SEQ ID NO: 15057 - DNA, 469 bp, Homo sapiens
  misc_feature (1)...(469): n = A,T,C or G
gtgtccaaatgagnccacngtcagnnanctncgnanangcggnggaatntaaagtagnatatggctatgccagaatcacagtagtcttaatcatgaattaattgttctttgctgaggctggaatagtaattggaatcaagacaacccaatttaggaatgggagagggattgagaaactctattctgtgttccctttagatttttctatagttcagagagatgaggaagaacctaggctggggcctttcagcatttctaaccaaatattatagttcgaacttgccctcatcactgaaccatctgctgctgtgaggtaggcaatgttttccaaagaaataatttagaataatactacaagcattagttacctttctatatagtaccagaaaccagaaactggctagtatgaagaaactgaaatagaaactacttgtaatttttattaacttactgttttagtttacttttn

SEQ ID NO: 15058 - DNA, 462 bp, Homo sapiens
  misc_feature (1)...(462): n = A,T,C or G
gcgtgtcaaaatgagccactangatggctgcgnanancaaacaaaatattgccttactttcttaagactgaagcttttcaatcctctggcaccctgcatagagtgaacaagacttgctttgacaggtacaggtgctacctgggtgacagagcaggaccctctccaaaacccataaaaaaacaccaccaccacaagtacagttctgtgacccaggcatagcccctcccatgctccattgccatggcacactggcagagtcctgaggaaagatgtagggtcgccctgatgagaaatggatggagtcagcatttctcatgcaaaactaaaaagatccttgggccaggtgtggtggctcatgcctgtaatcccaacactttgagaggcagaggcaggaagatcacttgaggccaggagttcaagaccagcctggtcaacatattgagacctctgtctctactaaan

SEQ ID NO: 15059 - DNA, 463 bp, Homo sapiens
  misc_feature (1)...(463): n = A,T,C or G
cgggaactgagnccatcgnaaaactganatcatcgcacagngcggtggaattcggggaaagtgcagtgttgcccttctgaatgagacagaatcagtattgtcatatcttgataaggaggataccttcttctactcattgggctatgacccctcattgaaaacactattagctgacaaaggtgaaatcagagtgggacctagatatcaagcagacattccagaaatgctgttagaaggagaatcagatgagagggaacaatcaaaattggaagttaaagtttgggatccaaatagcccacttacggatcgacagattgaccagtttttagttgtagcacgtgctgttgggacattcgccagagccctggattgcagcagttctgtgaggcagcctagtttgcatatgagtgctgctgcagcttcccgagacatcaccttgtttcacgctatggatacattgtat

SEQ ID NO: 15060 - DNA, 495 bp, Homo sapiens
  misc_feature (1)...(495): n = A,T,C or G
ntttgacaatcgatgatcactagtccagngtggtggaattccccggcgactccccatcttcaatcgcatctctgtttctgagtgacaaagtgactgcccggtcagatcagctggatctcagcggggagccacgtctcttgcactgtggtctctgcatggaccccagggctgtggggacttgggggacagtaatcaagtaatccccttttccagaatgcattaacccactcccctgacctcacgctggggcaggtccccaagtgtgcaagctcagtattcatgatggtgggggatggagtgtcttccgaggttcttgggggaaaaaaaaattgtagcatatttaagggaggcaatgaaccctctcccccacctcttccctgcccaaatctgtctcctagaatcttatgtgctgtgaataataggccttcactgcccctccagtttttatagacctgaggttccagtgtctcctggtaactggaacctctcctgagg

SEQ ID NO: 15061 - DNA, 495 bp, Homo sapiens
  misc_feature (1)...(495): n = A,T,C or G
nttcgacactgatgaccactagtccangtggtggaattcggccaaagagagagggttgcttgtgcccaggagttcgagaccagcctggacaacatggtgaaaccccatttctacaaaatatacaaaaattagccaggtgtggtggcacacacctgtagttctaggtactcaggaggctgaggtgggaggatcacttgagcacaggagacagaggctgcagtgagccaagattgcaccactgcactcagcctgtgtaacagagcgagacccggcctcaaaataaacaaaagaaacacctttgtggcagaggtaaggttgctatacaacaaaatgctgggttacggttccgggtccattccatatgaagatcagaggcttccactggacccaaaggaatactactagtcacttgtgattgttcctttataggtttgaaagatgtctcangccaacttattggatgcagttttaatctaaaactctatacattgtacn

SEQ ID NO: 15062 - DNA, 466 bp, Homo sapiens
  misc_feature (1)...(466): n = A,T,C or G
cgaggggggnnnnnntttaacctgagaccctaggcagtgtggtggaattcgaatgacaaggtgttttttgcctcagtccgctctgggggcagcagccaagtttacttcatgactctgaaccgtaactgcatcatgaactggtgacggggccctgggctggggctgtcccacactggacccagctctccccctgcagccaggcttcccgggccgcccctctttcccctccctgggcttttgcttttactggattgatttcactggagcctgctgggaacgtgacctctgacccctgatgctttcgtgatcacgtgaccatcctcttgcccaacatgtcctcttaccaaaactgtgcctgtccccagcttctggggagggacacagcttccccttcccaggaattgagtgggcctagcccctccccccttttctccatttgagaggagagtgcttggggcttgaaccc

SEQ ID NO: 15063 - DNA, 563 bp, Homo sapiens
  misc_feature (1)...(563): n = A,T,C or G
ctagagnaccccnnnnnnnnnnnaaattcattgttgacaaaaattatctaggttttgtaagaagacaaatcgaaagtgccatttctctggccacttggttctattgtcgagtttgtattggggccaagtggtattacagaagaaaataagacatttaggttttaggtcaggtgttagttgaaggggttttaggtttttaagaacacaggctaagggggaagagggaggaatggatggcggaaggttgcccatagtggagaaggtaaatttaaggacgaaggtagagacatggagaaatggagatgggcagctaccaggcttccagtaggcgtccctgactgagtcttgggctgtaatgtgggtgagcagccaaagcaggcatgatcagccaaagcaggcatctccacagttgacctgccaccaagggaatgtgggtgaatgatcaaggcaggcgtccctgtggtgatcagacaccaagggaagatgtgtcttcccaagtcagtaaccgacgtcagagtttttaaatgcttcgataaagggggctcctttttgtctctacctgt

SEQ ID NO: 15064 - DNA, 578 bp, Homo sapiens
  misc_feature (1)...(578): n = A,T,C or G
atcgatcccctttcgaacccctatccgagtggtgcaattcgttgcttactagtgagcatgagcatcttttcatatgttgcttggcccttcctgtttccccatctgtgatttgaccattcaaggtgtttgcctacttttcaatgggtctattctttttgttattgatttgtagaaatcccatataaattatggaaacatttaggtctttaactggaattaattttatatgaatgctgggagatagaaataaatttttgcctgctttatcttcttacttgtttattttcatggtttcctggcattttatttttgttttattttttgcttttaaatataactatatagctggtattacactatgtagcaactgagtgcttttgtctttttaaaagcatttcgttatataaaaatggggtgggcacagtggctcacgcctgtaatcccagactttgagaggctgaggtgggtggatcacttgaggccaggagtttgagaccagcctggccaacatggcaaaatcccgtctctactanaaatacacaaattagccgagcctggngggcatgcctgaaataccn

SEQ ID NO: 15065 - DNA, 463 bp, Homo sapiens
  misc_feature (1)...(463): n = A,T,C or G
gaggggatnnntttgcagaccctagtttagtgggcggaattcgaagactgccctcatccacgatggcctagcacgtggaattcgcgaagctgccaaagccttagacaagcgccaagcccatctttgtgtgcttgcatccaactgtgatgagcctatgtatgtcaagttggtggaggccctttgtgctgaacaccaaatcaacctaattaaggttgatgacaacaagaaactaggagaatgggtaggcctttgtaaaattgacagagaggggaaaccccgtaaagtggttggttgcagttgtgtagtagttaaggactatggcaaggagtctcaggccaaggatgtcattgaagagtatttcaaatgcaagaaatgaagaaataaatctttggctcacaaaaaaaaaaaaaaaaaaaacggcccgtcgaatctaaagggcccgttaaaacccgttgatcagccc

SEQ ID NO: 15066 - DNA, 469 bp, Homo sapiens
  misc_feature (1)...(469): n = A,T,C or G
agagcggactnnnnctcgtagaccctagttcgtcgatccctagtcagtgtggtggaattcggcatctgagggattgttaccaaaatgatgaagaaataaggacaagggacatcaagacattcataagaaaaagcacctttgccttcccctgggaagattcacaggaatctgtccagctcttgttacatgatgagcaacatagacaagatacgaggcattgtaactgccctgtcgccacccgcctctcccaccactacccaaaggattcttagcatcccctcacatactctgcctgcctcaacgttcagtcagcccctcaccatttttgtttttgagagttttttttttaacccgaatagtttacgggctgtttaaaatgcatactcctacaaaatcagctcagcccatgatccatgatgaacaaacagnagttcttgctgatgtgtgattatgaatttaaaaggccagt

SEQ ID NO: 15067 - DNA, 506 bp, Homo sapiens
  misc_feature (1)...(506): n = A,T,C or G
cctcgaccccactcatagatggccatcagagagagcgcaccacatgtgatctttataggactgcagactgctatgcaaaaaacattctaaacataactaatgtgaattgtttttgaaacagtaatatacatcatcagagaagcagaggggaactagcacgggaaagaaggcaagattcaacataaaagaaatgattcagataaaatgagcaatttaactcaggtaatagtaagagaatctttttaaaaacaatttatccttttattttattttattttattttggtttattttttgagacggagtttcactcttgttgcccaggctggagtgcaatggtgcgatctcggctcactgcaacctccacctcccaggttcaagcgattctcctgcctcagcctcctgagtagctgggattacaggcatgcttcaccgcatccggctaattttgtatttttaatagagacggngtttctccatgttggtcaggctgctcttgaacttcca

SEQ ID NO: 15068 - DNA, 472 bp, Homo sapiens
  misc_feature (1)...(472): n = A,T,C or G
gagggcaggggggggccccaatagaaaaccaactgatgatcactagaccangcggtggaattcaaccctcctgcctcagcctcccaagtagctaagactacaggtacatgccaccatgcctggctaatatttaaatttttgtagataaggggtcttgctatgttgcccaggctagtctcaaactcctggcttcaagtgttcctactgtcatgacctgccaacatgctggggttacaggcatgagccaccatgccccaaacaggtttgaacacaaatctttcggatgaaaattagagaacctaattttagctttttgatagttacctagtttgcaaaagatttgggtgacttgtgagctgtttttaaatgctgattgttgaacatcacaacccaaaatacttagcatgattttatagagttttgatagctttattaaaaagagtgaaaataaaatgcatatgtaaataaagca

SEQ ID NO: 15069 - DNA, 477 bp, Homo sapiens
  misc_feature (1)...(477): n = A,T,C or G
ggatggccnngnnttnnnngnnaaatgagacctctcggacnaactgntggcatccgatgaagcctcttatctttggttacagggcagaaaaattgagtaaaacacaggatcttccacttactggatattgacaaaatattctttctgggccaaacacattggcattactagtgaacttgttagaaattcagaaactcagagtttatttcagatcttctgggaaaaaagaatctgcacaagatctccagtttattgttcacattaaaacttgagaggtgccttctaactcaacatatcttttgtctgaaaaatatacacaactcattctttgtgtggcaaatatagcactaaaaaatgtacatgtttgtgtttatgcctttagctttatactttactattaataaaagtatatatacagtggtggtgtagatcttataccattctcttctctcagagttagagaatacattagagaat

SEQ ID NO: 15070 - DNA, 561 bp, Homo sapiens
  misc_feature (1)...(561): n = A,T,C or G
naatcgatgaccacttgagngncgngcaannccattcctaaggcctagaaaatgtctgacacatagtggcaattattcattgaataaatggacccagggatagtacattagctatgctatatgcatacattaaagatgtagattatcgactttcaaaagataattaatgtaacttcttactgcttctgaacatgtttgtgagttatattgctgagggacctttatcttctcattctttcatcttaacccagtgttataaaattgaaatcaccaatattattccatatctaaaattaatatctaccttgtaaaaaatatcactctgctgcatttgagaatagactttntaggtaataatgatgcaatccatagggttttttgggggcacagagggattcatgctaacagaacattntatttgctattttcccagaagctgtaaacatgagattacggtattataaggcatatttttactctttttataantttttctaanaaaaaatagnggttggtccctatataacttttaactttataggaaatatttgttctttcacg

SEQ ID NO: 15071 - DNA, 451 bp, Homo sapiens
ctccgagaccattagatgacccttagtccatgcggtggaattcctttggacagtgggcaaacacccaccgcgatgacggttacacagagcaaggacaggaagccctgcagcatctgtgaccttggcccatctccaccctccaacctggactgcccgccaccagcgcctgcaaccgaactgcagcccaggggtcattgctgcctcaagcctctcggtgcagatgcaccctgaaaactgacccctcaaacagactgtctgatttgaggatggacattgaaaaactgacgccaaactctaaagaaatgtttatttatacccagggctatcactgtttctaatagatgactctgatcccgtaggatatatatttaataatcccacaaacggaggccagacttctgcgttaacttcagtaacacaagcttctttaagccaaatacatcacttgcca

SEQ ID NO: 15072 - DNA, 472 bp, Homo sapiens
  misc_feature (1)...(472): n = A,T,C or G
tgggcccanannaagcaaacctgagtacctaggacattcgatggccntcgagaaacacgagtccctgggtagtcaaggaagagggcacatgcgaccttcatggatcgtatcttactctgggcggggccaggtggctgggctggcttgatctcaggcagagctgggcgcttagcatcagtgaggaagttgttaaaaaacgcgacttcctttttcacttcctcaattttctctgcatgcttgttgaagatatgtttgcgcacaaactcaggaccctgggtggagagaggagaggggtcaggacagccacataagggttgcctcgctcccaggcccgagctggaaggattcccagctcccgcctgccagtgcagtaagcagttcccccacccctgcccagggggcttcctgtctcaaccccacctcccaccaccgtagcacggccattctccaacatcccacaccttgaatttct

SEQ ID NO: 15073 - DNA, 483 bp, Homo sapiens
  misc_feature (1)...(483): n = A,T,C or G
aggggttccnanananagcaaaacctgatgaccntctgaaanactcgagaccctcgtcaagngcggnggaattccaaccgagtccattttgacttctgcaaccatcattctgttgaaatggttcttgccaaggtcaccttggtgatcaccttcctatccttcaatccggtggttatttcccagtcctcactacctcacttctcagtagcatttggtataattttctagtttcttatcattgatactcttccattggcgtctgattctactttcatggttttactactacctctttgatctttgaccacagctgcttagcctcctttgcaggctcatcctcctcccagcctttaaatctgaaagtttctctcggttctgttcttctcactctaattttcctaggacagtttcatccccactctgaactttagttactgatgacttccagatctcctccaagctatttgacatctccacttaagg

SEQ ID NO: 15074 - DNA, 476 bp, Homo sapiens
  misc_feature (1)...(476): n = A,T,C or G
tggttccanacnaagcanacactgaggaccnctcggaagcgtganggccntcggcacgngcccccaagaagcatctgaagcgggtggcagctccaaagcattggatgctgtataaattgaccggtgtgtttgctcctcgtccatccaccggtccccacaagttgagagagtgtctccccctcatcattttcctgaggaacagacttaagtatgccctgacaggagatgaagtaaagaagatttgcatgcagcggttcattaaaatcgatggcaaggtccgaactgatataacctaccctgctggattcatggatgtcatcagcattgacaagacgggagagaatttccgtctgatctatgacaccaagggtcgctttgctgtacatcgtattacacctgaggaggccaagtacaagttgtgcaaagtgagaaagatctttgtgggcacaaaaggaatccctcatcttgtgactcan

SEQ ID NO: 15075 - DNA, 466 bp, Homo sapiens
  misc_feature (1)...(466): n = A,T,C or G
cgggaaaanttttgagaccatagtttcgtcgaccactagtccatgcggtggaattcaaggaaggcagaaagttaagacatgttgaagattgtctgtgaaagtcgtaagaaaggttataaacggaatttatgcaagaaatattggataatttaaaagtaattaggcctcctgaatgtaaaactattaaaaaaacagtttatgtgcaaagcgtgtaagaaaaataaaatatacttttaataaaaggattataaggaggcataggaatatggatttttacctacattaaaaggtttaaaaatttttgttttaaaggtttaagcaagttttaacatgttaattgtaaaggaaattctgtgtgtaaacattttggctaaaggtaaagggtttatcatccagttttgctgtgaactgcacattaaaataaaaccacaatagtttattcttaaagcactaacctgctctttaa

SEQ ID NO: 15076 - DNA, 466 bp, Homo sapiens
  misc_feature (1)...(466): n = A,T,C or G
gggacgttttngtcgagaccctanaatgtagaccctcatccagtgtgcgtggaattctgaaaaacccatgttttttcccagcagaattgctccttccatttaacagcaagcatttttctctgtttagcaaatgaaaaacctaattataaatattgtattagttacctctactttgttacacattctacaatgttaagatttacgttgatcacatctatttcattggcttaaggtttaatttaaatgcacaactaccttgtagaataaattacatacttaaactttgtgataatatttaatatttaggatattataaaattcttttttaatttttttttttgagatggagttttgctgttgtcgcccaggctggagtgcaatggtgcgatcagggctcactgcaacctctgcctccagggttcagttgagtcttttgcttcagcctcccgaatagctgggattacag

SEQ ID NO: 15077 - DNA, 472 bp, Homo sapiens
  misc_feature (1)...(472): n = A,T,C or G
catcgaccnccnttnnattcgtcgaccactatcagtgtggtggaattcatcggacagaattcacttctgtggattatataacaatcaactctaactgatggtataataagtaaagaaataagatgctcaaagatgaagctagggagtcaactcatgtagagtctcacaggctacaaaggacttttaaattttaacctaacggaaagccattaaaacatttttaagcagaagagtgccatgattagaattatgtttttataagatcactttggctacagtgtggacgacgccctgaaagacaacagagtggagtcagggagatgacttaagtagctattgtaatattttagacaaaatattttaagtaccaaattctggccagaattatggagtgagaaaagcagcggctcgaggaatttcaatactaaatttggataaagggaagccaccagaaaactaaaaagagattgtn

SEQ ID NO: 15078 - DNA, 587 bp, Homo sapiens
  misc_feature (1)...(587): n = A,T,C or G
agggaaccccctttgaannccccnttacgatcacctatccagagaggacgaattcgncgggagtctgaaaccggcctggccaatgtggtgaaaccccatctctactaaaaatgcaaaaattagccttgcgtggtggtgtgcgcctgtggtcccagctgcttgggaggctgaggcaggagaatcgcttgaacctgggaggcggaggttgcggtgggctgatatcgtgccactgcactccagcctgggcgacagagcgagactccatctcaaaaacaaaaacaaaaacaaaaaaaaacctgtttctttgcccaggaccagagaagctctcgcatcccgtgacctccagacaaggagccaccagattggatgggagcccccacactccctccttaaaacaccaccctctcatcactaatctcagcccttgcccttgaaataaaccttagctgccccacaaaaaannnnnnnnnnnnnnnnnnnnnnannnnnnnnnnnnnnnnnnnnnnnnnnnnnnnnnnnnnnnnnnnnnnnnnnnnnnnnnnnnnnnnnnnnnnnnnnnannaaagcgctccctccttcccctcccg

SEQ ID NO: 15079 - DNA, 471 bp, Homo sapiens
  misc_feature (1)...(471): n = A,T,C or G
gccagagcncccaatgagaccntgactgatggggtcggacaggccaccagggtgtatgactcagaatctgagggtgggcgtgcacctaaaccttagccagggattggaactgggagattgaagtcactcaggacgtacaggaccttctacctttctctgcttcttggcgtatgtctatttcactctgtggactgtcctgatacttggaccacttgatggaagatggtcatgtcacacagctccatcattcaagagaacagccccgacttagtcccatttgcaaaactccaagcaaaagactctgacacagtttggggcaatcagctgtgaccctgaattgggggaccattcaaattatacaaacatagcttctgccagcttatctttgtggattcggaggacagtttcctgatacacaggagatatttgcacatgtgctaggcagactccccaaattatgttcattttagt

SEQ ID NO: 15080 - DNA, 456 bp, Homo sapiens
  misc_feature (1)...(456): n = A,T,C or G
aattgagncccattnatagtaggtctattagaccagtgcggtggaattcgcagaagggtggtgtgctcccaggactggcatgacaggtgtctcctcctcaccacaggctgtgcccatgagtccctgtgcagaccagtgggcaaggcagctgggccagatctcaggccagccgtttgtgctcctagcagggttgctgtgctggccacacggagaggccctagagagcctcatggattgtaactaaagaagaaacggttcctttttgtttttttaaaaatgatttttaaataccgttttttacaccgttctctcggtactttttttaagctaagtcagcattgtcttccagtgttaaaggcatccctcacctctgcattgaacttacgtatccatgccaaggaatggaatttccatcctgagccagttcagttaggtgtcaattgatactattttaat

SEQ ID NO: 15081 - DNA, 408 bp, Homo sapiens
  misc_feature (1)...(408): n = A,T,C or G
gacctgattgcaacaattattggcagtaaatacacaccaaacaactttttttttccgtctaattctagaaataagtgggttaagatagccattcaaactggatttcaggagcaccacaatacaatctttccttaaacaaggaagaccactgcagagaactaccaagtcgtagacacctcactaccccagacatcagagaatgcttcgctgagagggtggtggctaagtgtgaggcatgattaccttaaagttaatattattttgtaaaacagttctatgtgaatagagaatctatgtcattaatatcaaggttgaacactaaaacaggtgaaataaaaaaaaaaatccacttgtttgaggttgtttctttgtcctgtttcaccccaaatgaaaatgaacactatctcn

SEQ ID NO: 15082 - DNA, 453 bp, Homo sapiens
  misc_feature (1)...(453): n = A,T,C or G
aggggcntttgagtcattagcccgngcggnggaattcggaggatggcggatatcatcgcaagactccgggaggacgggatccaaaaacgtgtgatacaggaaggccgaggagagctcccggactttcaagatgggaccaaggccacgttccactaccggacgctgcacagtgacgacgagggcaccgtgctggacgacagccgggctcgtggcaagcccatggagctcatcattggcaagaagttcaagctgcctgtgtgggagaccatcgtgtgcaccatgcgagaaggggagattgcccagttcctctgtgacatcaagcatgtggtcctgtacccgctggtggccaagagtctccgcaacatcgcggtgggcaaggaccccctggagggccagcggcactgctgcggtgttgcacagatgcgtgaacacagctccctgggccatgctgac

SEQ ID NO: 15083 - DNA, 479 bp, Homo sapiens
  misc_feature (1)...(479): n = A,T,C or G
tgaggtgccnnnagtngnnncaactgataccctagctagagcgcctgaanncgagggntctgccctccttcatccagacagcaggtctcatcctaggtccttagagaaaagtgcctggagggcttttaaggagtcacagtgccatcacatgctcaaacatctccacaatggtgcaaggatcacagtgcagatgccacctacaatcgagggccactgggtctccacaggctgtgaagtaaggtcaggcccagagttcatcacaaggtcctacagattctaccacaataacaccttcaaggcctaccaattttattatggcagcaaccggtgcacaaatcccacttatactctcatcatccggggcaagatccgcctccgccaggcctcctggatcatccgagggggcacggaagccgactaccagctgcacaacgtccaggtgatctgccacacagaggcggtggccgagaagctcggcc

SEQ ID NO: 15084 - DNA, 449 bp, Homo sapiens
  misc_feature (1)...(449): n = A,T,C or G
ngtggacnaccctttgangacccctagtccgtgtggtggaattcctaggcttgaaagggtgagatcatatttcacttccttcctctttggtcttaacctttctctgctaccccctcacacaatgcatatgcattattctcttattgtatatatttttcctctcttccttttcatgtttcctctgccattacttttaacctcgactgccatatggcctctaaacgcttccagaagggtagcctagtggaggttattccatcatggccttgagctcatgcgaccagatagtgaaggcatctgtgtaggtgtcattctaatgtgggtgatatttgtttcattgtaaattttgtagccctagaacaccaacaacagtgcacagtaattagtaggcaggcagtacaggattcattgaagtgaagtgataacttttatccaagtatgtatgcaga

SEQ ID NO: 15085 - DNA, 477 bp, Homo sapiens
  misc_feature (1)...(477): n = A,T,C or G
nggggggcagacncgagnnnnnntttgtagacctgagtaccgtgcggaggaactccccggatcgagcggctaccgactccaccttctccctggaccagcccggnggcactctggatctgaccctgatccgtgcccgcctccaggagaagttgtcacctccctacagctccccacaggagtttgcccaggatgtgggccgcatgttcaagcaattcaacaagttaactgaggacaaggcagacgtgcagtccatcatcggcctgcagcgcttcttcgagacgcgcatgaacgaggccttcggtgacaccaagttctctgctgtgctggtggagcccccgccgatgagcctgcctggtgctggcctgagttcccaggagctgtctggtggccctggtgatggcccctgaggctggagcccccatggccagcccagcctggctctgttctctgtcctgtcaccccatccccactcccctg

SEQ ID NO: 15086 - DNA, 464 bp, Homo sapiens
  misc_feature (1)...(464): n = A,T,C or G
ntttgatgaccattagccagngcggtggaantttgattgaccttcatctgggcaatcaagagataattcattatggctgagttgaagacttaaggtgtaatttcattacagtccattagtaaagtgtattattggtgccattttcaaaaaaattaatttattttaccagcagtattcatagctgtggttatgttattttttatttaaaaactttatattaaagtcatttgtaatgttattgtatagttattgtgtagcacatatggtttgcactgtatagtagcttttaaagaaaatagtcacaatacagaaaagcattttagaaatagcttcaaaagcacttgtgtatcttgattttttcttatatgctgntgcagatatatgtatatgctaaaatataacttgcaaagatgttctaaatacacatgctataagttcgccttaagatttcaattcttggatan

SEQ ID NO: 15087 - DNA, 422 bp, Homo sapiens
attccacgacacgctggcatttggactcagtgaaaagggcacctaatgaatataaggctgactgaatgttttccataattttcacacaataacagtccctttctatccagcttgccttccatttatctctagggttagcttttcaggcaacatccttggtcattgcccagaaagtacctgagctatcagtgattggaatggcacaggaaaccgaatcacatgggtgccctccccttggttttcaagtatcttggagttgtgcacaaaaattaggtcatgccttcagtgtcttgttctttaaacctaccctttgacaatcaggtgctaatgattgtatactattaaaaccagcacataagtattgtaaatgtgtgttcctcctaagatggagaaataggctttcttctatctgggcctggtaa

SEQ ID NO: 15088 - DNA, 508 bp, Homo sapiens
  misc_feature (1)...(508): n = A,T,C or G
gagtgcacattgagnactgagatcactagcgagagcgcngnaactgcctccgtttttttgatgctgcgagggggtctcctgccccaggcgggccggctgcctaccctccagactgtccgctatggctccaaggctgttacccgccaccgtcgtgtgatgcactttcagcggcagaagctgatggctgtgactgaatatatccccccgaaaccagccatccacccatcatgcctgccatctcctcccagccccccacaggaggagataggcctcatcaggcttctccgccgggagatagcagcagttttccaggacaaccgaatgatagccgtctgccagaatgtggctctgagtgcagaggacaagcttcttatgcgacaccagctgcggaaacacaagatcctgatgaaggtcttncccaaccaggtccttgagcccttcctggaggattccaagtaccaaaatcttgctgcccctttttgtggggcacaacatgcttgttgtcaan

SEQ ID NO: 15089 - DNA, 460 bp, Homo sapiens
atcgtcgtccctagtaagtgcgccggaattccgcgagggcaaaaggagggagggcagagggaaaatggagaaagcagccaccagggcagcagagctgtgattcctacctacctacatcttcagggatggctgccaaacccagggagctttgtgtgagtgccttcattgtaacatggtgcaaaacagagtagaatgaggaggtggaagtgtccctccagaagttacctcactcttgaaagggctttacacttccacagtccaggcaccgtgttgagagttcaaaccaagtttacccagatctttcagcaacaaacaggtctcatctgacttctgagttttatctccaagtcttttctctttccttcttgacctttccctcccctccaaagcttacttagtacagtgtctgacgtatagtagatgctctacaaatatctgtcatgctgaatcaatataaata

SEQ ID NO: 15090 - DNA, 482 bp, Homo sapiens
  misc_feature (1)...(482): n = A,T,C or G
aatcgagaccactaggccgngcggtttgatttctatttatcgactggggcatgacaaggaaacttacaaactgcaacgcagagaaactattaaaggtattcagaaacgtgaagccagcaattgtttcgcaattcggcattttgaaaacaaatttgccgtggaaactttaatttgttcttgaacagtcaagaaaaacattattgaggaaaattaatatcacagcataaccccaccctttacattttgtgcagggattattttttaaagtcttctttcatgtaagtagcaaacagggctttactatcttttcatctcattaattctattaaaaccattaccttaaaatttttttctttcgaagtgtggtgtcttttatatttgaattagtaactgtatgaagtcatagataatagtacatgtcaccttaggtagtacgaagaattacaatttctttaaatcatttatctggattcttatgtttt

SEQ ID NO: 15091 - DNA, 507 bp, Homo sapiens
  misc_feature (1)...(507): n = A,T,C or G
gagtgcncaattggaacagtagtgcagtgtggnggaatccaatcaaggaaaaattcaaattgaactccacaatgagataccccctactcactcaccagaatggctaagttaaaaaggtcaacaacatcaagtgtttgtgaggatgtggaagaacaggaaatctgataccctacatgtagtccatgtaggactataaattgatagcactttgaaaaactgtttagtaatatctaccaaagttgaagatactcatcccctaagacctagcaacaggttcaagactgttgatagtgcaattattcataatacctaaaaactggaaacaccaggaatatcaacagtagaacgtgtaaataaatagcaatatatctatgcaatgtaatactatacagcagtggaaaatagataaccagctgcattcagctacacagatgaaactcacatattatagcatctaaagaagactgatacaaagaatacatactgtatgagctcattacatacaga

SEQ ID NO: 15092 - DNA, 453 bp, Homo sapiens
  misc_feature (1)...(453): n = A,T,C or G
ggggnnaatcagttcattacactgtgcggnggaattcggttcttgcccagcctttttcagcttttgattctaaatcatccatccccattatactgccaatcactgggggggcaaattagcaccattattatcattattttcaattagttgaactgaaaggtaaggtaatttgggctgagaagtacagtaattaataatcttttgcttgggtcagactcctgcctgttaaggtttcagtttgcaaacactgtgaagcagtactacaaagaggttaggagctcaggctctggtgttaggctccctagggaggtttaatctcagctctaccacccacctatccactgtgcaacctggtggctagtgactttagccaagcctcaatttccccctttgtaaaatggaatgaagaatataaccaacttanaaatgttgttacgaagattaaatgagagg

SEQ ID NO: 15093 - DNA, 479 bp, Homo sapiens
  misc_feature (1)...(479): n = A,T,C or G
gcgcgacnnnnnnnatcgagatcatagtcattgtggtgcaattcctaggatatttgtttggcagcaatagagcggcaacacccttctcagactcgtggtactacccgtcctatcctccctcctaccctggcacgtggaatagggcttactcaccccttcatggaggctcgggcagctattcggtatgttcaaactcagacacgaaaaccagaactgcatcaggatatggtggtaccaggagacgataaagtagaaagttggagtcaaacactggatgcagaaattttggatttttcatcactttctctttagaaaaaaagtactacctgttaacaattgggaaaaggggatattcaaaagttctgtggtgttatgtccagggtagctttttgtattctattatttgaggctaaaagttgatgtgtgacaaaatacttatgtgttgtatgtcagtgtaacatgcagatgtatattgcagt

SEQ ID NO: 15094 - DNA, 461 bp, Homo sapiens
catcgagatccctagttcgtgcgctggaattcgggagatgatgatgctgctggccagttcttcccggaggcagcgcaggtggcctatcagatgtgggaacttagtgcagtggcccgagtagagctgaagggaactgtgcgcccagccaatgacttcaaccctgacgcagatgccaaagcgctgcggaaagccatgaagggactcgggactgacgaagacacaatcatcgatatcatcacgcaccgcagcaatgtccagcggcagcagatccggcagaccttcaagtctcactttggccgggacttaatgactgacctgaagtctgagatctctggagacctggcaaggctgattctggggctcatgatgccaccggcccattacgatgccaagcagttgaagaaggccatggagggagccggcacagatgagaaggctcttattgaaatcctggccactcg

SEQ ID NO: 15095 - DNA, 482 bp, Homo sapiens
  misc_feature (1)...(482): n = A,T,C or G
aggagttgccnnnaggtagnncctactgagacattgtcactatgtcgctagaacccacccccgaccttgccccgctgcggcccgcggctcccggccaaacccccctcaggaaagaggttttaaaatcaaagatgggaaaatcggagaaaattgcccttccccatggccagcttgttcatggtatacacttgtatgagcaaccaaagataaacagacagaaaagcaaatataacttgccactaaccaagatcacctctgcaaaaagaaatgaaaacaacttttggcaggattctgtttcatctgacagaattcagaagcaggaaaaaaagccttttaaaaataccgagaacattaaaaattcgcatttgaagaaatcagcatttctaactgaagtgagccaaaaggaaaattatgctggggcaaagattagtgatccaccttctcctagtgttcttccaaagcctcctagtcactggatggga

SEQ ID NO: 15096 - DNA, 490 bp, Homo sapiens
  misc_feature (1)...(490): n = A,T,C or G
ntttggagncccctnggncnnngccnttttgagacattagtccagngcggnggaattcgggaaatgaatattgggtcctcagccctgccaccctctgctgtcatcagctgatgcattgtttttagctcaggttttgataaggtgaaaagaatagtcaccagggttactcagacctgccagctctcggagtccttggtggttgaacttggagaaagaccgcatgaagatacttgtaagcacacatgatccctctgaattgttttactttcctgtaactgcttttgcttttaaaaattgaagaagttttaaacagggctttcatttggtcatccttgcaatccattggggtctagtttggaatctgacaactggaacaaaaagaaccttgaatccggtgcatgccttggttttggtgctgctgctgcttcccaagatcctcagcagggattaagaaggaacccggtgtgcacagcagatccccgaaattggg

SEQ ID NO: 15097 - DNA, 479 bp, Homo sapiens
  misc_feature (1)...(479): n = A,T,C or G
ggggccncccccaggtnnnnncaatgagaccatcgactgngatcntcggnacgggcaaaggaaagctacctctccactctcctgtccctgcccttatctaaaatagtttgtcatctgaatgaaaagaacctagggaaaattcccatgtgagaaatgaaattgtccttgtgaagggttaggactctaagaactgtgtgcagaaaatcgctgaaagataatctttataggatgctgaaaattactggcagggatcaactctgaaggttaaattgtctgtgccagtgcctctaacaggaaatacaagggagatttatttatttataatgtccaccttcattttgaatactgcgccgcaatacttagagaaataaaggtaatggaaaagaagtaggaaagtacattcattttgttaaatcacaaattcaacagtcagtcttaacccattcagaagccttgcagctggtgtgctgaagcggcct

SEQ ID NO: 15098 - DNA, 460 bp, Homo sapiens
tcccaattgtagaccattagtccacgtggtggaattccttacagagttcccccttatcttcgggagatacattccaaggcccccagtgaactcctgaaacctcaaacagtaccaaacctttatacactgttttttccatatatatatacctatgataaagtataatgtataaattaagcatagcaagagattaataataatgtaatagaacaatgataacatactataataaaagttatgtgaatgtggttggtctctcttgctttcaaaatatcttcttgtacagtactcacctattttagaatgtggttgactacaggtaaccaaaaccacagaaagggaaactttggatgaggggggcactactgtacttaggaatacaactatatacatatgattttatttttaagaccatattatatttgggtatctactaatattttgtataaagcaatttttt

SEQ ID NO: 15099 - DNA, 421 bp, Homo sapiens
taagactcaaagtcactggtatattggattaagttttttcctgttaatgcaattatagaaatacatcggagacacaacaaatgtggccattacaggtttcataaaattacactgacttggctgttacttgatcttaggaaacagcacagtttaagatattgtgaattctgacttatactttattaaatgctataaatctaaatagatcctgttggatgtgatgggtctagtccagtttatttaagttcatgtttcactgtttgcactttgcattgaacaatgggtttattcgctgatgtaaacggatcgagtgaagaattaatgcagtaagtatgacaacacatacacacttgcctctacccatctccagaagaggggagcagagaccgagcttatctaaatatgaatgtggccacaaagc

SEQ ID NO: 15100 - DNA, 477 bp, Homo sapiens
  misc_feature (1)...(477): n = A,T,C or G
attgagaccctgncagngcgtttgataccntttcaacgctcaaattgagaatgaagactatagttatacaaaagatggaataggactagatttggaaaattcttttagtaacattctgttatttgttcctgagtacttagacttcatgcagaatggtaactactttctgatttttgtgaagtcatggagcttgaacacctctggtctgcggattaccaccttgagctccaatttgtacaaaagagatataacatctgcaaaagtcatgaatgccactgctgcactggagttcctcaaagacatgaaaaagactagagggagattgtatttaagaccagaattgctggcaaagaggccctgtgttgatatacaagaagaaaataacatgaaggccttggccggtgttttttttgatagaacagaacttgatcggaaagaaaattgacctttactgaatccacacatgttgaaattaan

SEQ ID NO: 15101 - DNA, 445 bp, Homo sapiens
  misc_feature (1)...(445): n = A,T,C or G
ntttgtagacatctgtccttgagggcatattagagacttacccagacaggaggaaaagctgtcaagcatgagagaacacagaaaatgtttaaaggttccagcggggagagagagaagtgactttcagcatgacagaggtaggttggtgggttcaatcctaaaactggggtaccggccaggcacggcagctcatgcctgtaatcctagcactttttgggaggccgaggtgggtggatcacctgacgtcaggagttcgagaccagcctggccaacatggtgaaaccccatctctactaaaaatacaaaaattagccaggcatggtggcacacgcctgtaatcccagctactcgggaggctgaggcagaagaatcactggaacctgggagatggaggctgcagtgagccggagattgcaccactgcacaccagcctgggtgacagagt

SEQ ID NO: 15102 - DNA, 494 bp, Homo sapiens
  misc_feature (1)...(494): n = A,T,C or G
agcatgccccccccnatagaaaactganancntangcagagncgnggaattccgcgctgtaagaagcaacaacctctcctcttcgtctgcgccatcagctcggcagtcgcgaagcagcagccatgcgtgagtgcatctccatccacggtggccaggctggtgtccagattggcaatgcctgctgggagctctactgcctggaacacggcatccagcccgatggccagatgccacgtgacaagaccattgggggaggagatgattccttcaacaccttcttcagggagacgggggctggcaagcatgtgccccgggcagtgttggtagacttggaacccacagtcattgatgaagatcgcactggcacctaccgccagctcttccaccctgagcaacttatcacaggcaaagaagatgctgccaataactatgcccgagggcactacaccattggcaaggagatcattgacctcgtgttggaccgaattcgcaag

SEQ ID NO: 15103 - DNA, 454 bp, Homo sapiens
  misc_feature (1)...(454): n = A,T,C or G
caatagacaccccatagatagncngtcggaannccaagcagtcactaatttgtttgtttgtatttaaactccattgtttttggcattattccaacatgctttgttttaagaagccttgaagggaatgtcagattcatttttcttgatgtaatttatcaccataaaaaaaaaacccatgcaaacctgagtgagcacaggatttgcttctaggcccattatttttattaaaactgaaaaaatttaaactgaattttttgaccttggaaaatatttttcttactttaccaaggtgaagtttccttaattagactaattattttatccccatcccagggtataaacaggaattgttttgatagtggtggagttattcactgcaacaaagcaacaatgttgtccatgattcaaaatctaagcagtttcgattttgcctgtgaatatggtgtctgtcatt

SEQ ID NO: 15104 - DNA, 442 bp, Homo sapiens
  misc_feature (1)...(442): n = A,T,C or G
nctggagacatctgancttgcgggcatttactccacagncagcgcaaccatgacccatgcattagcagacgcctggagcataattattctctgcagccctcatgtgcacacgagcccttttgaaggggctcaccctgtcgcccactgttttattctctgtctttatatatttgatccccacctttttatttatttatttttgtgagacaggttcttgctctcttgcccaggctggagtgcagtggtatgatcacggctcactgcagcctcaacctcctgggctcaagcaatcctcccgccttagcttcccaggtagttgggaccacgggggcacaccaccacacttatctggtcgtagtaacactttagtacataaggagtgttgctatgctatccaggctgggagaaaaactcctgatctgaagtgatcctcccaccttga

SEQ ID NO: 15105 - DNA, 466 bp, Homo sapiens
  misc_feature (1)...(466): n = A,T,C or G
atagaagcccgtngncnngcnnatgangacctttgaacangcggnggaattcgagacgtactgaaatgaggcaaccaaggaaatcctttatattgggaccaagagccaagatctcaacttgggatatgttaccccgagagttgttaccccgatactataataccatgaataataaccccaagggtcctgttgtctctttttcctcatgtcacttcctttggtactaactgacaccatgctaacatctgcaaactttgaaaattctgatttattctgcaatatttggaaatttcactgctagtaattgtatttcctggcatggttctgatataattttctgtgtacacagtagcttttccttttagagctgaatcacactgaaatccttgtttaacctaagttatagttgcaagggagctatcaagacaaataattacagtgatggtgaagtgaatacaagtcaaac

SEQ ID NO: 15106 - DNA, 464 bp, Homo sapiens
  misc_feature (1)...(464): n = A,T,C or G
natagaagaccattagtccagngcggtggaattcctgttcaagcagctacggccactgctggccacatacggggtcactgcctacctgtgcggccacgatcacaatctgcagtacctgcaagatgagaatggcgtgggctacgtgctgagtggggctgggaatttcatggacccctcaaagcggcaccagcgcaaggtccccaacggctatctgcgcttccactatgggactgaagactcactgggtggctttgcctatgtggagatcagctccaaagagatgactgtcacttacatcgaggcctcgggcaagtccctctttaagaccaggctgccgaggcgagccaggccctgaactcccatgactgcccagctctgaggcccgatctccactgttgggtgggtgggccctgccgggaccctgctcacaggcaggcttttcctcccacctgtggcgctgcagc

SEQ ID NO: 15107 - DNA, 455 bp, Homo sapiens
  misc_feature (1)...(455): n = A,T,C or G
actagatnaccnntnnnntttgtagnaccattagtacagtgcggtggaattcaaagtatatcaaccaagaactttccctgaaaattttgctgaaggatttactgcagctaacagagaacctgaattaaaataagaatagggaggcaattgtatgaaagaactgatggtatgcattaaaactagttaaggagcattaagtttaaattgttatgtatagggcattaaaactaaatacaaaaatagaaacataagctgggtgtaaaatttcagtttacgtttaaactggaagggcataccacatgttcaatatattggacaaatactgttttatttttagcatgtagtattgtagatacaaatacgcatgttcttaagctaaacctaagtaaaagggctttgtcactgtagatttgacaaataacattctaaatgtcaaatctgacaattggaaaaca

SEQ ID NO: 15108 - DNA, 530 bp, Homo sapiens
  misc_feature (1)...(530): n = A,T,C or G
cactgacgttcatcctctccatcaaccactacctattaataaatgaaccacaacggctaataaaaatttgatnccttagaaagnccannaaattgagacatctggacangcggggaaatcaagaagcggctgcagaagatgtcaatgtttctttcgaagatcaacaaaagataaacaaatttgcgcggaatacaagtagaatcacagagctgaaggaagaaatagaagtaaaaaagaaacaactccaaaacctagaagatgcttgtgatgacatcatgcttgcagatgatgattgcttaatgataccttatcaaattggggatgtcttcattagccattctcaagaagaaacgcaagaaatgttagaagaagcaaagaaaaatttgcaagaagaaattgacgccttataatccagagtggaatcaattcagcgagtgttagcagatttgaaagttcagttgtatgcaaaattcgggagcaacataaaccttgaagctgatgaaagctaaacattttataatacttttttt

SEQ ID NO: 15109 - DNA, 507 bp, Homo sapiens
  misc_feature (1)...(507): n = A,T,C or G
agaggcacaatgagactgaagtgcagttgcgggaattctccatctcacgctgtctctcatcctctgtccctctctgtctccccaagactctccccctccacccagtcataattctgttctctcttccccccaagcaggacctgctaaaccccgaccctgccccctactgccagctggtgccaacttcctgatgggtcctgggccaggccagccagggagaagacaaggccccagccctcctctgggagcctcacacctgagaccagcaggacaaggccattgggggctgtggggccgatgaggtggactcagccaaagactcagcagcacatggggcaggtgtcctggcagggggacaggagactgtaacaggcccaggtccttgtgcagcccctgaatgcacgcccgccttcggtctgttccttcaagcaagctggcctgggccatgtgcctgtgaaaggcaagctctggcccctttccatgccaaagtcccccaagatctggatn

SEQ ID NO: 15110 - DNA, 465 bp, Homo sapiens
  misc_feature (1)...(465): n = A,T,C or G
natcgtagatccctagtccagtgtcgaggaattcggagctcagagactgagagtcttgtgtatcacatgtcttgagtgtcctggagccaacggctgtcactgggaaaaacaccaggccccaaagatcgaatcagagacgtggctgcgtgtttgcgattgtagccaggcccttcagtgtcatcaaaggagcactggggcctccttaagcacagacggcagcccctgcccaggaggcttcttcaccacgtcctgccctgcagcctcccagacctttagatgcgcccctgcccaaggccctcctggtgacaggtgccagattgagtggtgggttgctgccaggcaggccacgctgtgttgacgctgcactcagcacgtgggtgttggctctgccggttttgtggtgtggggaccctacaggaggctgcggccctgagagcctgggatcagcgaggtgtccgacatccc

SEQ ID NO: 15111 - DNA, 476 bp, Homo sapiens
  misc_feature (1)...(476): n = A,T,C or G
tatgggctnnnnattgatcgcggtcattagtccangcggtggaattccgcggcccgggccggacatggcggcgctctacgcctgcaccaagtgccaccagcgcttccccttcgaggcgctgtctcaggggcagcagctgtgcaaggaatgtcggattgcacaccctgttgtgaagtgcacctactgcaggactgagtaccagcaggagagtaaaaccaatacaatatgcaagaaatgtgctcagaacgtgcagttgtatggaacgcccaaaccttgtcagtattgcaacataattgcagcatttattgggaataaatgccagcgctgcacaaattcagaaaagaagtatggaccaccctattcttgtgaacagtgcaagcagcagtgtgcatttgacaggaaagatgatagaaagaaggtagatgggaaattgctgtgctggctgtgcacactttcatacaaacgggtccttcaag

SEQ ID NO: 15112 - DNA, 476 bp, Homo sapiens
  misc_feature (1)...(476): n = A,T,C or G
nttagaagncccgtnngnnnntnncnnatagatgntctcttagtccagngcggtggaattcgatgccacagtggttggctttgcaaagacagcaagctttgctcacattgctctccggggctggaacctgggcaggcatgaggccccctagtcagtgttggcctcaaggtcctagtacaggtaaccaatccctgtctcacggaaggggagaattgctgacccatgctgtgggagtctgcatctgaaaaggtcactggggcctgagagggcagctcccagaacagtgtgaagtgtccaggaggccagagacacctataggagaacctccagatattgcatctatttcgtctacatcctggttgtgtcgtgccccagggatgccagcctcacaccgtggctcttccggaaggtgtggggccaggcctgctgcacttactgctttgggctaatgattcagagagtgaagggtgctttcn

SEQ ID NO: 15113 - DNA, 442 bp, Homo sapiens
  misc_feature (1)...(442): n = A,T,C or G
actgagaccctgncttgtgggcatttcggcaccaactgcaacagaagagaaagccttagtgagacccgtgaaaagagcagagtaatgaagatggtgcagtgtgacggttataaaatccccctgggaaatgaggcagtcaattaaaaagaaagaaaatgaggacagacaaagaaaaagtccatctccatagagtagaaagtgacaggttagcaaagctgtctcatgagatgtgtgcactaacagtccctggggaccttacctgaattccatggcgggagtgacagctctgccagcttgctctctgatgggccactggaagatttctggggctagctggccaaagctctggagagaaagagtgagtggacaccagcttcaaagaaagtcactccagggccctggggtaaagtagcatagaatagagatttgaagtgagtgcagc

SEQ ID NO: 15114 - DNA, 456 bp, Homo sapiens
atgagacattgtcaggcggttgattccatatataaaacttagctgggcatggtgatgcacgcctgtgatcccagctactggggaggctgaggcgggagaatcgcttggacccggggggcggaggttgcagtgagctgagatcgcaccattgcactccagcctgggtgacagagtgagacttcatctcaaaaaaataaaaaataaaaaagttttagagcaggaatgaaaggaagcaaagtacacttggaagagggtcaagtgggcaacataagagatccaagtgccctgttcagccttgggcttggggttttatacattggcatggttccggggtttgtgtttttcttcccttaattttccccttggggcaggctgtctgcatgcacagtgacctgccagcacttgggaggggccgcatgtgcagtgcgtttactgaaagtgtgtgtacgctcgttg

SEQ ID NO: 15115 - DNA, 451 bp, Homo sapiens
  misc_feature (1)...(451): n = A,T,C or G
aatagatgacactngnnctcgacgacactagtccatgcggtggaattcgggagctccattccctaaggcactgtgatgatgatggtaggactgaaaatggagcactagctccaaagcaggagcttccttcagcattagaatcccatgaagttcctggcactctcaatatgggtgttcctcaaatttttaaatatggagaaacctgtttccccaagggcaggtttgaaagaaagagaaatccctctcgaaagaaacaacatatatgtgatgaatgtggaaaacacttcagtcagggctcagcccttattcttcatcaaagaattcacagtggggagaaaccttatggatgtgttgagtgtgggaaagcattcagccgaagttccattcttgtgcaacaccagagagtccacactggagaaaaaccttacaaatgtcttgaatgtgggaaagc

SEQ ID NO: 15116 - DNA, 482 bp, Homo sapiens
  misc_feature (1)...(482): n = A,T,C or G
nttttgagaccctagtcagnngcggttagattacttttctttcagctgaatacgaatgaacacagtggtggaatttctgaagggaagtgatgaaattatatttatttcagtgggcacttttccattttaccactgtaccattatttggttcctggagttatacactaattttcagtatattactgttaaattaccaacacaaggcaatttatttgaaagattccgtttatcctgccattgctttgaaaagcagcaggaaacgaaatcctttgacttgtatcagcttctgcagagcatctttgttttcctttgtcctttgtttcctaccttttgaatcagattccgttttagtcaggaagacttcttgggaccattcttagtaacctgaaatttcctttttaattgcatgaagtggattgatcatgagcaaatgatgttcttatttctccctcactgttgaatatctttgaacttgctgtttt

SEQ ID NO: 15117 - DNA, 457 bp, Homo sapiens
  misc_feature (1)...(457): n = A,T,C or G
ntggggatacgangaccactagtatagagtggcggaattcttattatcccctttttgtaaatgaggaaacagatttccatacttgacattaacctgcccaaggtcacccagtttggaagtggcagggccaggatttgaagccgaatatgttcattgtaaagcccatatacccttaaaagtcactgcacgtccacgtatggtaatgtggtcacaatcagtattgtttctctttagtaattcagatttattcaagtaactccaaggttcaaattttcaaaaacaggttccaacacaggttatattaaaaactttgcctgaagtttactctaggtgcagaaataaagacaacttagtcaagtgaaggaaagggtaacagacttagaaatggctatctacactgatggaataagtatactaattagagcaggtaacaagtccccacgatgtataacatatt

SEQ ID NO: 15118 - DNA, 443 bp, Homo sapiens
  misc_feature (1)...(443): n = A,T,C or G
ngggttttaacctagggtattgatctgcgngaaanccnnnaaangngaaaaacagatttcaatgactttggcatttacttcctagctgagagaggagatactcaagaaacctagtgatgaggaagatgaatgcagaaaaactagcctagtaagctgaagggcagggggcattagcagggatttctgtggagcaagcaggcagactgttttaagggagggtctgccactttcagaatctatctgtactcctgtgggtttgtggattgccttttctttttttaagttctatttaaaatgatttatgctagtcagacactcaatagacaggctttttcatctcatgccactttatggatttataactaggtttatactttccagtgactgggatgttagtttggtaaccaaaaacaccctcctccgggcatcaggccatcagagcn

SEQ ID NO: 15119 - DNA, 450 bp, Homo sapiens
  misc_feature (1)...(450): n = A,T,C or G
cttagaaaatagtagaccattaggccagagcggtggaattcataccgtgctcaaaaattaattcaaaatcattctagacataaatgtaaaagttgaaactgcaatgactctagaagaaaatatagagaaaatatctctctgaccttggaggaagcaaaaatttcttgtagttgacaaagacatatataataatcatataatccattaattataagaaaaataaactagacttcatcaaaatttaaaacttctgctcatcaaaagatactaataagattaaaagtagccaggttcagtggctcatgcccataatcccagcactttgggaggctgaagcagggggatcacttgaggccaggagtttgagaccagcctaggcaacatagcaggatctcatttctacaaaaaatgtttttaaaattaactgggtatgatggcgcatgtgtagcn

SEQ ID NO: 15120 - DNA, 485 bp, Homo sapiens
  misc_feature (1)...(485): n = A,T,C or G
gccgcccccccccccccatcgagatccataattggagagcaggaatnccgcgaggcgttattggtcacgggcctctgggaacatccttcataggaaaatatgggtgtggagactactgggtgaaggcttttcttgaccgcccgagccagccaactcaagagacaaagaaaaactttgaagtaatggatctggtggatgtcaatacccctgatttaatggcacctgtgtctgctaaaaaagaaaagaaagatgcctgcatgttcattcctgatgggcgggtgtctgtctctgctcgaattgacagaaaaggattctgtgaaggtgatgagatttccatccatgctgactttgagaatacatgttgccgaattgtggtccccaaagctgccattgtggcccgccacacttaccttgccaatggccagaccaaggtgctgactcagaagttgtcatcagtcagaggcaatcatattatctcacggaca

SEQ ID NO: 15121 - DNA, 474 bp, Homo sapiens
  misc_feature (1)...(474): n = A,T,C or G
tctggcntnnnattgatagcattcntcagngcggnggaattcggcaaaactatgacatagttaagttccagttttcaaaacattaaagttaaggttgcagaatggtagcatgtgagccacttctaactttcaggcaagtttagtgtagtgctaagactagaacatattccattcaaatttaaaacacataggtagatagcagtagcttatggttatacataaaggatacacaagaaaacagtttggttaaataaggtaggataaatattttctcttgtatcctctcaaagctttgaatgtagtactaggtgcacatattaatatttaaaaagtaagtaaaataatgtgttaaaaatgagataagaatatgtacaatttttttttttctttttgagacggagtttcgctcttgttgcccaggctggagtgcaatggcacgatcttggctcactgtaacctctgcctcccgtgttc

SEQ ID NO: 15122 - DNA, 487 bp, Homo sapiens
  misc_feature (1)...(487): n = A,T,C or G
tttgtacccctngcangtttgagaaccctantcagtgtggtggaattcggcggtggcagtggcggcggtggcccatctgtagccccagtgctgctgacccccatgcaacaacgtatctgcaacctgctgggcgaggccaccatcatcagcctgcccagcaccacagagatccaccctgtggccctcggaccctcggccaccgcagccgcagccacggtcaccctgacacagatccccacagagaccacctatcacacgctggaggagggcgtggtggagtactgcacggctgaggcgcccccacctctgccaccagagacccctgtggacatgatggcccagcatgcagacacgtcggtcaagccgcaagcgctcaagagccgcattgctctcaactccgccaagctgatacaggagcagcgggtcaccaacctgcatgtgaaggagatcgcacagcacctggaacagcagaacgacctactgcagn

SEQ ID NO: 15123 - DNA, 449 bp, Homo sapiens
  misc_feature (1)...(449): n = A,T,C or G
atggtcctaaaacgtaacattcctactgtccgnaaaacnnngnaaatnanntcataaaagctttttggggtcttctattaattatcactgttaatggtccttataccaaataagaatgcttgtctggggctatttggcttaccaactctaagttaaatttcttcccttttcacatgccggcaaccatctgatagctgtggacacaactttctcatatgcctggaaacagaacaaaccagattcaggaatgtaccagtcattatagctagcagatgaatggaaatcaaaccaagaggaagctttggaaagcaaactttgtttattttaattaaaaactttgtttccagagctgatacataggttggtttctgtcctatcatttgatgttctacttacagtaatcaaacagtatattattttctagtagaactcctttgcaaataatagtn

SEQ ID NO: 15124 - DNA, 404 bp, Homo sapiens
atatcctttagtgtgcggtcaggtacttttttcttttctggtgttaaaatggtctttcttttacacaatgattctgatggtacgtggtgttttgttttttcctctaacttggtaaggtaagtttaaaaagttggcactgactttgttgaagccccagatttctctcatagttcagcagagtctagaagactgaaaagcactggagtgcagaatcgagatggctggtgggtgggagtggagaatcagccactgacagagagtcaggggagctgacgctgacgtacctttaactttggagtgcgtcatgtgattgatttctcctagtaatttgtgatttcagtttttttaggttaaaaataaaatgaatttgcaacagtttaacgttcaccaacagtgagaatgga

SEQ ID NO: 15125 - DNA, 448 bp, Homo sapiens
  misc_feature (1)...(448): n = A,T,C or G
ntggtttttaacccagtacccctgatatctgngaaaannccnnggacatactaaaaaatacctaaaaggaagcttagatgggctgtgacacaaaaaattcaattactgtcatctaatgccagctgttaaaagtgtggccactgagcatttgattttataggaaaaaaatagtatttttgagaataacatagctgtgctattgcacatctgttggaggacatcccagatttgcttatactcagtgcctgtgatattgagtttaaggatttgaggcaggggtaattattaaacatattgcttctattcttggaaaaatagaagtgtaaaatgttaataatacaaatgtcactgtgacctcctccactgagaggactggtttatgccagatcattttccggcacacacggagtggctttgacagattgataactttgtaagatgggagacn

SEQ ID NO: 15126 - DNA, 471 bp, Homo sapiens
  misc_feature (1)...(471): n = A,T,C or G
natagannccntncnnnntnncnnnatgatgtccattagacagngcggtggaattccttatgcccaatttctgcctccaaagaaagaaaaagtaaaaactaaaaggcagaaatgaaatccacaagcagacagctcggggccacaccctggacctggtagttaaagatggacccctgacctaattggttatgttatctatagattccagacattgtatagaaaagcactgtgaaaatccctatcctgttttgttacgacctaattaccggtgcatgcagcccccagtcacgtaccccctgcttgctcaatcgatcacgaccctctcacgcacacccccttagagttgtgagcccttaaaagggacagaaattgctcactcggggagctcggcttttgagacaggagtcttgccgatgcccccagccgaataaaccccttccttctttaactcggagtctgaggagttttgtc

SEQ ID NO: 15127 - DNA, 474 bp, Homo sapiens
  misc_feature (1)...(474): n = A,T,C or G
tatggactannnattgattgagttccataggacangcggnggaattcggagggacagacctaagacttgtccgcaggcccctctacaggttgtagctttgggggagaatgtttggagcggaagctcagttcccaaaaacttctaagtgatgcaacaaggccatgagcctagcttccgggtgtttgggctgtaatccttcactgtggcctgggttcttggcgccttacacacgctccttacccctcgcgactttgcttcctaggaataggggccagggccccctactgagcgtgacctcagccggaagcaccgggtcttgagaagtggagtagttagaacagttggggcagttgctccgtttttgtgctgctggctggcgtctgtttggttgggcgagcagcctgggatcacgagctgctgggctcccgacccagggattcctgccacgcggaagcggaggggaggaacagggct

SEQ ID NO: 15128 - DNA, 457 bp, Homo sapiens
  misc_feature (1)...(457): n = A,T,C or G
natggagccctagacaggcggatgagtccatccatagacctccatattgtaatagagatatataacacaggtagcttttcagtcccctcatctttctcatcatagattctcagaggtgttagaagataaattactactttcttttttttttgagagaagcctcgctcttgtaccccaggtttgagggcgggggctttatctcgactcactgcaaactccacctcccgggttcgggcggttctcctgcctctgcctcccaaggggctgggattaaggcactggccaccacagccagctggtttttgtattttttagcaaaggcggggtttcgccgggtgggccgggctggtctcgaactcctgacctcagatgatctgcccgcctcaccctcccagagtgctgaggcaggagaattgcttgaacccgggggagggggaggttgcagggaaccatcctg

SEQ ID NO: 15129 - DNA, 406 bp, Homo sapiens
gcacagaaaatttgtcttgtgggtcttactcacgccaggaagagaatatttttctaatgcctcaccaaaggatttcctcttacatcatattagccagaactgggacatattatcaccctttatctggggtagaggcccacatttccacatcaaagggaatttgctcaatgcctaaatcaaactggaattcagttaagcaaagaagaaacagaggaatggtttttgggtaggcagtaaacactgtcagctacatctccctgaaagccatcactcccttaaaatatctttgcgtaatgtcatcagttacttctgaactttttcatccaatggacagagtttattttctaacttacttgaactttttgtggggcttagccacaccctttttgaaagatatgtattcatc

SEQ ID NO: 15130 - DNA, 470 bp, Homo sapiens
  misc_feature (1)...(470): n = A,T,C or G
cggtaccngttttgaacccactgagatcctaggacagngcggnggaattcagagtagagattttttttatttgaaatggggtctctctctgtcacccaggctgcagtgcagtggtgtgatctcggctcactgtagtctctacctctcaggctcaagcgctcctcctgcctcagcttctcaagtagctgggaccataggtgcacaccaccacgcctggttaatttttgtatttgtagagatggggcttcaccatgttgcccaggctggttttgaactcctgagctcaagtgatccacctccctcagcctcccaaagtgttgggattcaggcgtgagccaccatgcccagcctgagatctttttaaaattatttaattttttatttctaaagcaaagaaacttgacagcagagtcgtattgactgagttgtacattaagcctagccctagcccttttaaggtgcactgtgtg

SEQ ID NO: 15131 - DNA, 471 bp, Homo sapiens
  misc_feature (1)...(471): n = A,T,C or G
tggggctnntattgatgattccataggacangcggnggaattccaaaatggcggcaggggtggccgggtggggggttgaggcagaggagttcgaagatgctcctgatgtggagccgctggagcctacacttagcaacatcatcgagcagcgcagcctgaagtggatcttcgtcgggggcaagggtggtgtgggcaagaccacctgcagctgcagcctggcagtccagctctccaaggggcgtgagagtgttctgatcatctccacagacccagcacacaacatctcagatgcttttgaccagaagttctcaaaggtgcctaccaaggtcaaaggctatgacaacctctttgctatggagattgaccccagcctgggcgtggcggagctgcctgacgagttcttcgaggaggacaacatgctgagcatgggcaagaagatgatgcaggaggccatgagcgcatttcccggcg

SEQ ID NO: 15132 - DNA, 479 bp, Homo sapiens
  misc_feature (1)...(479): n = A,T,C or G
nttgttacctttccanngttgatgaaccctcagnacctcccttncgacaattgcagttggaagcactatgggttatagttgttctctgctgcaatgtgaaaaatctagagggctcattctcaccactccttgagtatttacgaggactgtgaatggagttgattgacttgctcagcctctgctcaacctcctactgataggtttgcctgtctgcagggaccgtatccctcagcacatttcctggcttcccctgcagctgggattcctctccagtgaagtgcactgtgggagacttgagttcagaactgaatcactggggagagaggtggtatcccctttccttgagggaactagtagctgtgggatggctccaccatggcttcctgatccccacatcccatctgaagcgctttcttcttggtaccaccatgtgcaggggtggccttgtggtttccagatggtgacctctttttcttctg

SEQ ID NO: 15133 - DNA, 457 bp, Homo sapiens
  misc_feature (1)...(457): n = A,T,C or G
ntcgggatagaaagaccactagtatagagtggcggaattcctttttttcttaagctttcttatttattctcatagtttcacctaatgtgttacttacgatttgtatctctagaatccctcctgagctccaaaaacaaattgccagctgcctattatacattattgctggaatactgtaccagtagtacatcaaacacaccatgtcaaaaactaaattttcctttctcttttccccttcctttctgacataagagtttcttctgtcttgtttgcttaatataccattattctcaaccacataaactcaaaatcttggaatcatctttgattttatccttcacctttacttctcatatcccaagttctgttgcttatttttttaaccttctattctgtcccttcccattgctaattttctctgttactgatctttggtattactggcagagatagcctc

SEQ ID NO: 15134 - DNA, 451 bp, Homo sapiens
  misc_feature (1)...(451): n = A,T,C or G
ngggtcctnaatcccggatatccatngttcctgcanaaacnnnggaantnnaggagagagagatgtgggtaccgacttgtgctgaaacagataagtgccgacgatcagctgcactgtgccggcaaggccaggagaaggggcggtcacacgccccgagtgcgggagctgctgctggacgccctgagccccgagcagctagtgctcaccctcctggaggctgagccgtcccatgtgctgatcagccgacccagtgcgcccttcaccgaggcctccatgatgatgtccctgaccaagttggccgacaaggagtcggtacacatgatcagctgggccaagaagattcccggtgatgtaccctctgggcacagcgacccaggatgctgacagcagtcggaagctggctcacttgctgaacgccgcgaccgatgctttggtttgagtgatagccaaa

SEQ ID NO: 15135 - DNA, 406 bp, Homo sapiens
tggagaccagcctggccaacatgctgaaaccctgtctgtacaaaaatacaaagatagctgggcatggtggcgcatgcctgtagtcccagctactagagcgactgaggcaggagaattgcttgaacctgggaggcggaggttgcagggagccaagatggcgccaccgcactccagcctaggtgatagagtgagactccctctcaaaaacaaaacaaaacaaaaaaattagacaaatgctacattaatgtttgggtggtcagattctactttgaatctgaagtttgcagatatgcctatagatttttggaagttaccactttcttattctgtatcattaatgtaatattttaaattactatatatgttaccatttttctggaattagtaagaaatttgcagttttggt

SEQ ID NO: 15136 - DNA, 462 bp, Homo sapiens
  misc_feature (1)...(462): n = A,T,C or G
ntttgaactgcagatccntaggccanngcggggaattcgtggttaaaaacagaaagttctgtttcgggaatagtgaggagggggtgttgtaacaaaattggacaacttaaaagaatggtgtgtgctgggtgaaagacaaagactaaagaatgaggaaacaaacgtgatgcctggccagtgactgtcatataaacctttcttatttgagctaggcttgaacagacgtgacctataagaaactgaacataaagagaagggggtggggggctagttttcaagttggggaacctgatagtgaaaagtcacagatggagaaaattgctctcagaaaaactgtttggattgctttcctcttgttgcacatgtaccatgcatttctcagcttggggtactacattttgtggaaagttaatctatctatctttccacatctgaattaatcattctaggaaagaatacttn

SEQ ID NO: 15137 - DNA, 486 bp, Homo sapiens
  misc_feature (1)...(486): n = A,T,C or G
catcgagacctcnattgaagngcggtggaanncacaccgcangtggtcaccgagttattttccaaaagctgaggaacataaagcaaatttaggcttttgtccttctgcaatacatgcacttgaaaataaacagaaaagagatgtttaataacaagtttacttccggtctgctagcaccctcagcctgggagctactgccagaggctggcgtagtggggcagctgctgaccaaaccccacagaacagagggcaccaggcatcacacgacatctttccctcccatctctgccatctggctgtctggcaatggaaggagcttcagcaggaggtccttcccagaaggttgattcttggcctgggtggtagaggagatatcctgaccctaaagtcttacagccccgggtcatactctcctatactagggcctattgaccgtacaggccaggtgcggtggctcatacctgtaatcccagcagttggggaggg

SEQ ID NO: 15138 - DNA, 449 bp, Homo sapiens
  misc_feature (1)...(449): n = A,T,C or G
gtcgtccttaaatgactgactngactatctcntcnanaaacnnnnnaaaananncgaangaaggagaaagcctatatactctcttttagatattatttaacaatttagaagcagaggatctggcttcccgtttttatgggcagagaatgaaaaaaacgcaccttggagaaaaattttaacgtttgagcaagctgatgcaagaggattttttaactatattgaaaaactgaagtatgaacaccacctgaaagaatcattgaagcaaatgaatgttggtgaagatttataaaatgaagattttgacagtcgtagatacaaatttttggatgatgatggatacatttctcctattgaggagtcaacagcagaggatgaggatgcaacacatcttgaagataacgaatgtgatatcaaattggcaggggatagtttcatagtaagttctgaat

SEQ ID NO: 15139 - DNA, 462 bp, Homo sapiens
  misc_feature (1)...(462): n = A,T,C or G
nttcgacnnccntttttgagtccatactccangtggtggaattcgaagatagatcgccatcatgaacgacaccgtaactatccgcactagatagttcatgaccaaccgactacttcagaggaaacaaatggtcattgatgtccttcaccccgggaaggcgacagtgcctaagacagaaattcgggaaaaactagccaaaatgtacaagaccacaccggatgtcatctttgtatttggattcagaactcattttggtggtggcaagacaactggctttggcatgatttatgattccctggattatgcaaagaaaaatgaacccaaacatagacttgcaagacatggcctgtatgagaagaaaaagacctcaagaaagcaacgaaaggaacgcaagaacagaatgaagaaagtcagggggactgcaaaggccaatgttggtgctggcaaaaagtgagctggaga

SEQ ID NO: 15140 - DNA, 460 bp, Homo sapiens
  misc_feature (1)...(460): n = A,T,C or G
ntttggagttcgatgacccctangtccgtgcggtggaattcgagatctgtgtcagaacgtgcgtgtgagcggatacaaaacccgagagaggcgtgagcagcgctgtgtttgcgagcgggagcgaggggcgccggctggggtgtgtgctcctgagctcttcagaaaccaggctgctttcaggaacattgctgtggattcccagggcctattccgctagaagcaagatggctgaactcaatactcatgtgaatgtcaaggaaaagatctatgcagttagatcagttgttcccaacaaaagcaataatgaaatagtcctggtgctccaacagtttgattttaatgtggataaagccgtgcaagcctttgtggatggcagtgcaattcaagttctaaaagaatggaatatgacaggaaaaaagaagaacaaaaaaaaaaaaaaaaaggcggccgctcgagttta

SEQ ID NO: 15141 - DNA, 441 bp, Homo sapiens
  misc_feature (1)...(441): n = A,T,C or G
ccttgaagtaccactactccagggcggnggaattcggaatggctgcgggcttggagggaaagacccggttgggccctcacccggagactcccgacaggtccctcgaggtcagttccgccgaggcctggcccgcccacctccttcctgggcctttgaggatttaagtggacgctggacatgactctccagaccttcccgggtcctcactgaggctaacaccgattgggggcggtgggggaaatgaacctacggggtgttgatctgtggtcacgttacacgtagtgtttataattgaggcattgttgactaggtaatttgccagctagggacttgagctaattggatggttggtaggcaggcaaaggttattctgcaatatcttttatttttactcgctcctcttctaatccatcacgacataaagacaaatggtagggagag

SEQ ID NO: 15142 - DNA, 481 bp, Homo sapiens
  misc_feature (1)...(481): n = A,T,C or G
ntttgagaccctgctccagngcggagggattccccatatctgccatggccgaggtagcgatcgtctctgcggccacgaagactgttttaacttgtaccactttcccttccatttttcctggggtgcctctcaccctgcatctgcgcgttcagcaagctggatttcgggaatgctcagttcagaagagaaaaaattgccgggaatcaagtccttctttttgttagtcggtagtcgattgatgggaagtgttcaaaatcattcgatgtggtgacaaggcttcaccaggtactgccttctaacgagctggccatttccacatgtcagataggaccaacttgccttttaactacccgtgtgatacttaaacactgttgccggtatcacagcttttcttcaaaacaggatcttgctctgtcacccaggctggagtacagtagcaccatcactgctcactgtagcctcgacctgctgggctcaagtg

SEQ ID NO: 15143 - DNA, 485 bp, Homo sapiens
  misc_feature (1)...(485): n = A,T,C or G
attgatgncctaggannnnccnttttgagacattaggccgngcggnggaattcgtaataatgagcatggagaacaaatgtctgctttatgtgccttgagccaagaccacactgctttcaaaaagatcagttcatcacagtagtagacttggtaatttcctacatggtaatgcacttcccatgaaatgagcaaaagaatagttttaaacgtaccttgatttccatcattattttatgtaatccttcatggaaaatgaaagaattggaacaatgttatattgccctgaaattttgcagaaaatcacaaaactgacatatgtaaatgtatcttttaagcaatgttacgtccctgaaaaagagaatgaattaagtgtcatgaaggttaaaagatcgttatattcacaaatgtttccattaacgactaanaaccagattaattctacagtgttctgttttaaactgatatgaaaatgaaaagggactaag

SEQ ID NO: 15144 - DNA, 490 bp, Homo sapiens
  misc_feature (1)...(490): n = A,T,C or G
attcgagnaccctagnncagngcggttttgagacattaggccagngcggnggaattcaaaaaagatactatggggtcaagtgtaactccatggaaatgccacgtctgctcttcagtgaagaagctggtttagagtctcacagaaaacttttgactgtatttatttattgttgcaaaaaagacgcttttttattgctgccctcatttgtcagctaagtattttttcttataaaatccagccccggttacatataatcatctgtatcttatcatgattcctgtaggtaaaagtacaagacgacctctagatgtcttttctttctatgaaaggagctgctatgtacacatgtgcacacacacacaactgggaatcaacaatgagtttattgttcatggtagattaaaattaagcttgcataaaggttgggctaagtggtcctggactacagactctgttgccttgaatataacagtacaatttgtcaattact

SEQ ID NO: 15145 - DNA, 444 bp, Homo sapiens
  misc_feature (1)...(444): n = A,T,C or G
atcgtagaccctagtccttgtggnggaattcatcagcaaaaaggccagcagacaagcctgccactattcgtaatccttcttgcttctgctggcgaatccttccaaggcaggcaggcaggcagcagcagctggggtggagggactgctgtcctgatgaaggggagctgagtgctggctttgctgtgctctggaattattacctgtaaaatctactggtggagtcactccattattcttatctgtggagatctagatcttgatttgaaagtttctgagaaaatcttcagctcagacttgagggtcaactttaccagctgaaggatctgcatttactgctcaaccacatctaatttgatgtcctctgcagatttaaaatgtgtgccttcttttccgtcaccaagtcatccctgggttactactgaacatccttctcaattccccccg

SEQ ID NO: 15146 - DNA, 458 bp, Homo sapiens
  misc_feature (1)...(458): n = A,T,C or G
aattgagattgagtaccattagaccagngcggnggaattcgtgaatcttaagaagctctgccctaaactgataaccacatgctgagggaaggtctgaatggtgaaggctcagcctccctcacatgggtcctgggttacattaggtaccgggctgattgataggcatttggccatggttccttttcgtctacctttgggggccttctcaggcccagaacaaggctgttgttactatgtggaaaagctgaccagtgctgcacactaggggcacacacctttccatgagcagctcctgccctgtggcgacagccagcgtgcacccagacgctggtgccatggcgaagcaggcgttcaagaccatggagaagacaactcctcatctagaaaatgaggacacctcagtgacaaacacacctttttataccaatcagtatcctctgttcattaaaactggctat

SEQ ID NO: 15147 - DNA, 457 bp, Homo sapiens
  misc_feature (1)...(457): n = A,T,C or G
aattgaagttcgagtacattagcccagngcggtggaattccttccctttggctttggcaagcgcagctgtatggggagacgcctggcagagcttgaattgcaaatggctttggcccagatcctaacacattttgaggtgcagcctgagccaggtgcggccccagttagacccaagacccggactgtcctggtacctgaaaggagcatcaacctacagtttttggacagatagtcccatggaaagagactgtcatcatcaccctttcattcatcatagggataagattttttgtaggcacaagaccaaggtatacatcttcccctaatgcctatctgaccaaactggatagaaccaccatagtgaagtgtgaggcgcccctgaccaatgtgtgaagtatgcacttggcctgactcaggaagccaggtgagaaaaccatggtctctctgcttgcttggc

SEQ ID NO: 15148 - DNA, 442 bp, Homo sapiens
  misc_feature (1)...(442): n = A,T,C or G
aatgatgaccacattgacagccngttggaanncgcggaaataaatgtgaaaaataactatgatattttggtaaaatattcaccacttataatgcctcatcttaatagctaactcaggtttaatagtcttataaaaagtaatcagttaaatgattacttgcttataaatatctaaactagtccagttatgaaatcagtgtaatacattgatttttaaaactgctgctttttatgctttaaggaaaatgtatttcatatttgagtttaaaggaattgaaattacttcaggaaatgaatataaaataggttcacagttaaatgaataagcttttgtttatttgtgggtggagttattctccaattttttctgccatttttggctctagttcaggttttagcttgattagcaaaggtttttgacaaacagtttatgaaaaaataaa

SEQ ID NO: 15149 - DNA, 409 bp, Homo sapiens
tggagggacgcacttgcatgactcttttggatggcggaggcttaacagataatgattttgaatctcattctgcccctcccaagcttgttacacctacctacctgccgtcaggttcactggtctataagggtggtgtgtgacaaattgttactaggtgctatttgagacgtatggatggacgtagagaagtctaagcataacagctttctttcccagcacgagcctttatagctctctttagctcaaccactctgtccatccagccaatggatgtcccttcccctgtaccccaatttcaagcttattttaggaagccttgaactaccatgtatcctggctcctagctgagtttattagaggtatggagcagtgcaacttaaactcaagttgcacttacattttgaatttt

SEQ ID NO: 15150 - DNA, 466 bp, Homo sapiens
  misc_feature (1)...(466): n = A,T,C or G
tttgaaacccctgagaacctcggaagngcggggaattcgcacataatgcccctagttatcgagcttgtgtccagctgctcagcagtcttagtgggtatcagtacacacggagagcttggaaaaaagaagcttttgacctctttatggatcccagtttctttcagatggatgcctcttgtgttaatcattggagagcaattatggacaatctgatgacacatgataaaacaacatttagagatttgatgactcgcgtagcagtggctcaaagcagttcacttaatctctttgcaaaccgtgatgtggagctagaacagagagctatgcttcttaaaagattagcatttgctatttttagcagtgaaattgaccagtaccagaaatatcttccagatatacaagagagattggttgagagtcttcgtttgccacaggtgccaactctccattctcaagtgttcctgtt

SEQ ID NO: 15151 - DNA, 475 bp, Homo sapiens
  misc_feature (1)...(475): n = A,T,C or G
nattgtagagctatattgagtgcggtggaattctgtcattagatagtttgttggaagcagctaatacgtgaaagtgaagcatcttaatatgcatctcttttctttctgacaatgaactgtcaaaaaagctttgagtttatctaacaaacacagctgaggctgggattttaactccactattaatatattctaattttaaactactgtaactgaaagggcatacagcactaattcaatccagacatgtttgagtgcgtttgatagtctcatccttgtaatagctgctgaaaaagatgtggtagagatttcagactggaccactgacgtctgggaattgacactagcacacagactgggtcaggcaaggtacaacctggtgccgccagctgttttgcatggaagaccttatctgtaaaactcatagagagtcaaacaagatgtgtgcctctgaatgaatgggatccttggaaaggag

SEQ ID NO: 15152 - DNA, 493 bp, Homo sapiens
  misc_feature (1)...(493): n = A,T,C or G
attcgatanccctattccagtttggtgtacttcattgagtgagaactgaaccaaattacaggaccatctgctagtccatttacccatggcactcagccattttcctggctcaacaaaagacctcagaaaaacaagacctatttttccccttatgcaaaattagtgttatttcttctgctgtactacatcaattaatgagcataaatcacataagttgaatgagaaggccttataattcagagaaatttgctatgaagttgatttcagtttcaggtttaactggtttccctcctacttttccttttattttcaggttctcttggttacaaactccttcccttctggtgctgcaaaaatgagtgggaaatccctgctcttaaaggtcattctcttgggtgatggtggagtagggaaaagttcgcttatgaaccgttacgtaaccaacaaatttgactcccaggcttttcacaccataggggtagagttcttaaat

SEQ ID NO: 15153 - DNA, 467 bp, Homo sapiens
  misc_feature (1)...(467): n = A,T,C or G
cattgaattccatacgcattnccagngngcnggaattccagggtttcaccatattggtcaggctggtttcgaactcctgacctcgtgatctgcccgcctcggcctcccaaagtggtgggattacaggcgtgagccagcgcacccggcaacaataacatttaataggcattgtctcattctaatgatatataccttctacctagtgggcactttgtacatatttattttttattttatttattcattttttttgagacagagtctcactctgtcaccaagttggagtgcagtggcacaatctcagctcactgcaacctccgccttccaggttgaagtgattctccagcctcagcctcccgagtagctgggactccaggcacgtaccaccatacccagataatttttgcatttttagtagagacggngtttcaccatgttggctaggatggtctccatctcctgacctc

SEQ ID NO: 15154 - DNA, 475 bp, Homo sapiens
  misc_feature (1)...(475): n = A,T,C or G
cccctatagatagccntccgnnnnnactgatgntctattagtccagtctggtggaattcgaaggatcagatatatcacagggttaatgagtgtattcttaatataaaataaagattgggaaatgtctttgtattttgtctgaaaaccatcaagagtagagatcaagagcaaagttcaggaacatatggaaggtataagaaaggtttagagacttgaaagatggattacatgctcaatacatgatgggaccaatttttttttcctttcgaaatgactgattattgtttttttaaaaaaccaaattaaccagcctcttttacatcacttaggtagcaggcacttgtaaaatatagtgactatattttaccttctgagaaggtaaaaaatatcatttgtggcaaagataattttttaaagatagaccaaacaaatgcaaattgtggactaacagttttaaccaatataatctttttaa

SEQ ID NO: 15155 - DNA, 445 bp, Homo sapiens
  misc_feature (1)...(445): n = A,T,C or G
atggaagccccnnngattgaggacccttagtccagngcggnggaattccagccattaaaaattttcaaattatgaagtactggtatatatcagtgttatatgactagaacaatataggaccttgaattaaatcatctctttttccagacagtgccatgatgccacatgtgctgcccttgctagcacttttctttagagagctcagttccctttaaagatgatccatctttaaactcatccacaggattttgtagtacgaaaacaaccaactctgcagggcccccagaacactgcctcttaaggctggggctttaccccaggctctaatgtcccctaaccaggggagcatttcaaagagaatatgggacttgagatgccaaagagccccagatatggatgcatattcatttattcaacaaatcgtattgagtgcctactatgtggn

SEQ ID NO: 15156 - DNA, 477 bp, Homo sapiens
  misc_feature (1)...(477): n = A,T,C or G
catgaccccccatcgtagactctagaacagngcggnggaataccgccgcctgcctggcacctaggagcgcagcggagccccgacaccggcgtcgccgccatggagtccgagaccgaacccgagcccgtcacgctgctggtgaagagccccaaccagcgccaccgcgacttggagctgagtggcgaccgcggctggagtgtgggccacctcaaggcccacctgagccgcgtctaccccgagcgtccgcatccagaggaccagaggttaatttattctgggaagctgttgttggatcaccaatgtctcagggacttgcttccaaagcaggaaaaacggcatgttttgcatctggtgtgcaatgtgaagagtccttcaaaaatgccagaaatcaacgccaaggtggctgaatccacagaggagcctgctggttctaatcggggacagtatcctgaggattcctcaagtgatggtttaagg

SEQ ID NO: 15157 - DNA, 453 bp, Homo sapiens
  misc_feature (1)...(453): n = A,T,C or G
ntttgaatagaagaccatctgtacagtctggtggaattcctgcaattcagattttgctcatgaatgttagattaaattttctcttcctctatatgtatagggactgttttttcccaagtgactagttcagagcctagcacatggaagatattctataaatatttgttgaataaaatggatagaagatgaatagatagatgaatgaatataatttatttgagtgtatgaaatgagtgactcatctaacttaattttcttctaatagttaatcagttgccatggcatcattggaaaaacaaatctatgttttgttcactgactgaaataccaccttcatattatctttaattcttacatatactttatttctgtatttgctcttctattttactcctgtttatttctttgaactacactgcttaaaatattttctctatataaattaactttatt

SEQ ID NO: 15158 - DNA, 459 bp, Homo sapiens
  misc_feature (1)...(459): n = A,T,C or G
nttcgagacatcgaggnccntcggaggaatctcgaaggtttacaaagtaaaatgatatctatttgcacatttcatgacaggccttcctatgagtgatagaggaaattactggcaacgtgtgtgtgaagtagtttttataagtagaggaaatgcataggctataaaactatatggtagttttgcttaaagactgcttaaataaccatctcgttggtcaggaaggatgcttacctctaagaaaaccttactagcaactcatcctcttgtcagacttttttgaagcctctcagatctccacaaatgagaaacatctttgtgcatgttttctaaacagtagtataaccaggccatttaaatatcaagatactaataaaatcctgtgaacgtttaagagtggagctaatgtgatgctaatattttccctgagaatttcacaaaataaactcagtgtctttaaag

SEQ ID NO: 15159 - DNA, 464 bp, Homo sapiens
  misc_feature (1)...(464): n = A,T,C or G
taaacctgataccntggaaannaactgagaccntagttaagngcggnggaattcgcgcccagcaacaagacagagctggcctggagtccgcggctggccgcgtgagtaggtgattgtctgacaagcagaggcatgagctgggtccaggccaccctactggcccgaggcctctgtagggcctggggaggcacctgcggggccgccctcacaggaacctccatctctcaggtccctcgccggctccctcggggcctccactgcagcgcagctgcccatagctctgaacagtccctggttcccagcccaccggaaccccggcagaggcccaccaaggctctggtgccctttgaggacctgtttgggcaggcgcctggtggggaacgggacaaggcgagcttcctgcagacggtgcagaaatttgcggagcacagcgtgcgtaagcggggccacattgacttcatcta

SEQ ID NO: 15160 - DNA, 461 bp, Homo sapiens
  misc_feature (1)...(461): n = A,T,C or G
nttgancctttgacgaccactagtccagngctggggaattcgggactggagattggccattaggcctcctgagattccagctcccttccaccaagcccagtcttgctacgtggcacagggcaaacctgactccctttgggcctcagtttcccctccccttcatgaaatgaaaagaatactactttttcttgttggtctagcattgctggacacaaagtgtagtcattattgttgtattgggtgatgtgtgcaaaactgcagaagctcactgcctataagaggaaataagagagaaagtggaggagagggacaaaaggagtaattatttggtatagatccacccatcccaacctttctctcctcagtccctgctcctcatgtttctggtttggtgagtcctttgtgccaccacccataatgctttgcattgctgcatcctgggaagggggtatatggtctcn

SEQ ID NO: 15161 - DNA, 567 bp, Homo sapiens
  misc_feature (1)...(567): n = A,T,C or G
nggattcgatcaccgctccgngtggtgtaattcggctatttggagntggcacttccctcagctagaggagtctcagtgtgtctgagaaaatggcagtcagccattcaggattttaggagcaacgccactgctctgtgccacatcagaaatcaggcatggccccaacctgaaggaacttgtagcttaatggggaagcacaccaagaataaaagagcctccagaacatgtggtgcctgtggtcctgagacagcaggaaatggctctcaggccagagttgctggaagaacccatgtggcaggatcggtgggaggcagttacagagggaaacgcccatcccagcaactaggggaggccgccactcctctcgtggatggatgatattcttgcttggggatgttgagacagctgcactctgcatagttcctgatttgcctctctactgctgatgaaaaacctctctttctctatagctgctgcttatattggaaggcttttgttattcagcacactcacttctgagcttatttcagtgatattccttggntatttcgaaacatggatgcttgn

SEQ ID NO: 15162 - DNA, 451 bp, Homo sapiens
  misc_feature (1)...(451): n = A,T,C or G
tttgaagcccctccgtatgctcctcgnaannncngnngnaannnatgagaatgaatatttcactatattctgattcaattaccagtcttagtggcccatgatgagcttttggtgtggtcacatggccaacatttggataacaaatgaggaataatggtaccgcctcactagtgcctgagaacagcatgttctggaaaatgtctctggagttagagatgtgttagctttttcattacagatggagaaatacaatgtttacacaacagtccaggggtggggtcaaaagttggaaggtgtcattagacgcagccaaataaagtgaagacaacccaggtgactggcagccctgacttgtgcgtgggcgaagccttacagattcctgggcactctgtgcctgagcttacctgatgttcttgtgaggcgggtggcactatcctccatgtatgtcagt

SEQ ID NO: 15163 - DNA, 452 bp, Homo sapiens
  misc_feature (1)...(452): n = A,T,C or G
nnnaaattgtngaccccttgtccgcctggtggaattcccttgaggaagagtgagggttccaacttttctgcttatctgggaggtgttgggcgcggacagtcgagatgtcagagaaaaagcagccggtagacttaggtctgttagaggaagacgacgagtttgaagagttccctgccgaagactgggctggcttagatgaagatgaagatgcacatgtctgggaggataattgggatgatgacaatgtagaggatgacttctctaatcagttacgagctgaactagagaaacatggttataagatggagacttcatagcatccagaagaagtgttgaagtaacctaaacttgacctgcttaatacattctagggcagagaacccaggatgggacactaaaaaaatgtgtttatttcattatctgcttggatttatttgtgtttttgtaacacn

SEQ ID NO: 15164 - DNA, 467 bp, Homo sapiens
  misc_feature (1)...(467): n = A,T,C or G
catcgattttgataaccatccgcangngcgggaantcgtgaacccatgtcaattccagagccgctgctgcaaaatctctatagagttggatgcagccgctggcatgacttgggcctggaggccagactattattattaatattttgttttctgtgagagtagcccatgaagccctgtgtgtatccagagtgagaaatccagtaaacagggtacagttgcatggcacggcctccggactgggcagagagcccggtaccaccccgcagaatgacaaatgccaggctgcagaatgggccctgcctgagagttacccacgtggactctgagaggttgagaaatacaaatggatgttcttggaaaaggattgctgcctgtggctactcaagatttagactcaaagacaggctggtgcggaggctcatgccttgaatcccagcactctgggaggccaaggtaggcaggccacn

SEQ ID NO: 15165 - DNA, 444 bp, Homo sapiens
  misc_feature (1)...(444): n = A,T,C or G
atccgtgacacttggaagngtagaaactntgggagcgcangcaaacaacggaggctggatggaggatggacggagggggcttttgaagaaatgactcttttctacctggggtggcagagtggggctggggacagcattccatcatcaccaattgtataaagaagttgcttgagctgagttttgaaagatgagtatattttgactgatacaaaatcaatcaaaaaattgatgacttctttggattttctgatgggtttttgactccatatagatggaaaagaaaaggtccaagactgtattttcataatctctacccagtgtcttatagcccactaccctgactctccatatcagaccctgcctaccgtgctgctgtcaaatttgattttaactacatatctcaaagctctccattgccctatgaatcacaaccaaaaatatact

SEQ ID NO: 15166 - DNA, 490 bp, Homo sapiens
  misc_feature (1)...(490): n = A,T,C or G
gatcaggggaggnnnagnnnntttgtagacatattgtagacattagtccagtgcggtggaattcggcatgcgcctccacacccagcttatttttgtatttttagtagagaccgggtttcaccatgttggccaggctggtctggaattcctgacctcaggtgatccgccagccttagcctcccaaagtgctgtacaggtgtgaaccactgcattccgccctcttcctcaatttaaactgagaagacaggtcgagctaatgattcttagattttatgtatatataaatatatcaaatctatatattatttattatatctatatttatattattgtaaatatatgttagatctctcatatgtccaagtaatctgttggtttgcacgatgaatgtctacattacaaaagtcagctgaactgacaaacctcttataattggaacaatggttgaaatgttttcccattagacgttaggtgggttcacagctctgct

SEQ ID NO: 15167 - DNA, 480 bp, Homo sapiens
  misc_feature (1)...(480): n = A,T,C or G
aaaaaaatanagtaaaanacantnaggnaantttaggtagcacnactaggacagngcggnggaattcaagaaggggagaattgtgtgtttttgtgtggggatgtttttgatatgctgctacagtttcaaaacactggagctagagaaaataaagtactgatcttcataaaaaaaaaaaaaaaaaaaaaaaaaaaaaaaaaaaaaaaaaaaaaaaaaaaaaaaaaaaaaaaaaaaaaaaaaaaaaaaaaaaaaaaacaaaaaaaaaaaaaaaattggcggcccctctataaaaaatggagcccaataaaacccaaccaaaaaaggcgggggttctatataaaaaaaaaattttttttggccccccccccacaaccttttttaaaagaaagggagggcccccacccacccttttttttaaaaaaaaaagaaaaagcactattaaggggtgtgggtgggtatatttttttccgcatgtcccct

SEQ ID NO: 15168 - DNA, 490 bp, Homo sapiens
  misc_feature (1)...(490): n = A,T,C or G
cctcgacacccctcttttgagaacactatgccagngcggnggaattcgcttgaacccgggaggcagaggctgcagtgagctgagatagcaccactacattccagcctgggcaacagagtgagactctgtctcagaaaaagaaaaaagaaaagaaacttggaagccatttcagaaagactccaggaaggccagcagccactcctgcacaaccagggggaagggctacattttactgcaagcagctgttttctctgatccttctttgtaaggaagtgcagtgattttgtgttttgaaagaagacttgaagaagcagttgggtacgtattccaataggactgatggggaggaaatcacatactccatgagaaggatttcagacctggcacagtcagaatacattctgctttcacgatttttgagattgctgatggtcccaaggtttatacaaggacttggatctggctatagaaactcaagtagaaattacat

SEQ ID NO: 15169 - DNA, 467 bp, Homo sapiens
  misc_feature (1)...(467): n = A,T,C or G
catcgaaattcatacccctgcgcangnggcggaattcgtgaaactataatgatatttctcagttatcaatgtgatttgcaaaatgaacctagcattttgtagtaagtcattctgagaattcgttttttgtaatgctgattatcatatggaaagtaaaacacatctattacatatgaaacagtgggtagccacacctggaatgcagcacatagttctagttgtcacatctcaaagaaagtataaggggcctagaaaatattcagataaaaattattcatatcagggaagacaatattagaatttctagtcaggaaatatgagggccaagagaatttgtgagcaccacttatgatgtagggaagaatattatgttaatatagtcgttattgctggaataatagaattatgagtaaccctttcaaaatctcaaataacatagtttgagataagacatatgaaaagaactn

SEQ ID NO: 15170 - DNA, 464 bp, Homo sapiens
  misc_feature (1)...(464): n = A,T,C or G
aaaaacctgataccctaggaagtgctggataaccctgcgcggncacngccaagaagccagcaggagcggcgaagaagcccaagaaggcgacggtttgcggccacccccaagatgagcgccaagaagaccccaaagaaggcgaagaagccggctgcagctgctggagccaaaaaagcgaaaagcccgaaaaaggcgaaagcagccaagccaaaaaaggcgcccaagagcccagcgaaggccaaagcagttaaacccaaggcggctaaaccaaagaccgccaagcccaaggcagccaagccaaagaaggcggcagccaagaaaaagtagaaagttcctttggccaactgcttataagcccaacacaacccaaaggctcttttcagagccacccaccgctctcagtaaaagagctgttgcactattagggggcgtggctcgggaaaacgctgctaagcaggggcggg

SEQ ID NO: 15171 - DNA, 496 bp, Homo sapiens
  misc_feature (1)...(496): n = A,T,C or G
gtncggggaagggcggggnnnaattgatncccatcgagtcctctatccatgtggtggaattcctattgctggagtcatgacactaagtcaagttaaaggctttgttcgaaagaatggtgtcaatgaagccaaaatagatgagatcaagaatgacaatgtccaagacacagcagaacagaaagttcaactgcttcgtaattggcatcaacttcatggaaagaaagaagcgtatgacacattgattaaagatctcaaaaaagccaatctttgtactcttgcagagaaaattcagactatcatcctcaaggacattactagtgactcagaaaattcaaacttcagaaatgaaatccaaagcttggtctagagtgaaaaacaacaaattcagttctgagtatatgcaattagtgtttgaaaagattcttaatagctggctgtaaatactgcttggttttttactgggtacattntatcatttattagcgctgaagagcca

SEQ ID NO: 15172 - DNA, 485 bp, Homo sapiens
  misc_feature (1)...(485): n = A,T,C or G
cggggnnattgagcccatgagattctagcccangcggnggaattcataattaaggtccgttgcaaagctgttgttatatttgtataagataaatgctggtcagatgtaagtgtgttgtctgcaattcatcaggattaaattatgtagataacttaagggatatctctgcaaggagaaacacctttttagatcttttagatgctgcttcttcaatgcaaggaaaggaaataaccccagcgaggtactcttcagggacacaggtctagtacaagagaactcttgacggctactaagttcagccagtcttaaaaaactgtgctgtttctacaaaactttaactacagtagtttataaggatgccaacgaaagctgagggtgtagagcaaaatagttctaagcttcagttaaacttctttaggtaagatcttatttacttttcctttcttaattttcctccctaaaagataaactaatactcttaaatg

SEQ ID NO: 15173 - DNA, 475 bp, Homo sapiens
  misc_feature (1)...(475): n = A,T,C or G
cagggtnnnnnnnnntttgatgacctcgtagaccatctgtccagngcggnggaattctttaaatactggtccagtctaggagaacctggaagatgaccagaggtatttcagtttccctagggagagcttcgttatccatgtggatgataagtctgcttgatttattattaaatcattatagcagtgaagtggtgccattttctctctcttaagccccatttgaaaggctagagaaggggatatatatactatgttcaaggtttgtaaggttgttaatgtacataattgcagattgcaataaaagcttagatacattttgtaaacccaacccactaaatgagcaggttacaagacaaatgtcaccagcctcaagtattttatgaactatttactgagggtagttatgttaaatagattataatgtggtaaattatttcctgaatcctttatcacaggaaaaacacagaccctcata

SEQ ID NO: 15174 - DNA, 459 bp, Homo sapiens
  misc_feature (1)...(459): n = A,T,C or G
gcggtggggccgtctgaaacctacanngtcctacgcacanccgnnggaannnnntngnacatagtaagaaggtggctggctggttgcaagccacttaaaaagccctcaccagaaagtgactatcttgtatctgaagatggggtctttaggaggtaattaaagttaaatgaggccgggtgtggtggctgacacctgtaatcccagccctctgggagaccgaggtgggtggatcacctgaggtcaggagttcgagaccagcttggccaacatggtgaagccctgtctctactaaaaataaaaaaagtggctgggtgtggtggagtgtttctgttctcccttataattggtatgcggaagcctgaaatgaacgcgaaccctctcctcgaacatttttctgaatttgtatccctgccctctgactaaaatctggtttacactcttgttacttcctttcaattc

SEQ ID NO: 15175 - DNA, 500 bp, Homo sapiens
  misc_feature (1)...(500): n = A,T,C or G
cggcggatnnnnnnnaatgaagcctcgaggncngctgacttcgtcgaaactnccaaanatattttcaaaaagcatagtttcttgtacattttagaatattagtttttcttattttgggacacctacaccaatgttttaaatgtggataaagtttaatgtggaatttcttttaaaaataatcctcttcatagagcaatacaacaaaaatgtgttgtatcttggagatttacattataaatgtagtaacatttatgagcttaaatttaatgaaaccttttttttttttggaaaattttttccttgtgcccccagtttaaagggtgggaaaaaatttcacttcttgaaaacttggttcccccggattaagaaaattttggggcttaacctcctctagaacgggaattattgggtggcaccaccccccccgtgtaaaatttgtgttttttataaaaacggggggtttaacaatgggggccggtttgttcccaacccccgggctt

SEQ ID NO: 15176 - DNA, 457 bp, Homo sapiens
  misc_feature (1)...(457): n = A,T,C or G
ntttgaaactcgatgacattagacaagngcggtggaattccactagcctccaaagatgccaagaaacagctgctgtgtggggcagccattggcactcatgaggatgacaagtataggctggacttgctcgcccaggctggtgtggatgtagtggttttggactcttcccagggaaattccatcttccagatcaatatgatcaagtacatcaaagacaaataccctaatctccaagtcattggaggcaatgtggtcactgctgcccaggccaagaacctcattgatgcaggtgtggatgccctgcgggtgggcatgggaagtggcttcatctgcattacgcaagaagtggctcccaagatccctccagacataaagtcccacagccccaaatgcccttctactgtcacgggttgctatatgctggcctgtgggcggccccaagcaacagcagtgtaca

SEQ ID NO: 15177 - DNA, 464 bp, Homo sapiens
ctcgaccccctatagaggaccttagtccatgtggtggaattctgctttcagtggaggagaatggactggacccccaggctgccatcccggtcatcaagaagaagctggtgggatccgtgaaagccttgcaaaagcagtacgtgtccctggacatggtggtcactagtgaagacggagatgccaacaccatgtgcagcgccctggaggccgtatttatccatggcctgcacaccaagcacatccgagctgaggccggaggaaaaaggaagaaaagtgcccaccagaagcctctgccccagcctgtcttctggcccctcctgaaagctgtcacccccaaacacatcatctcagagttggagcacctgacgtttgtcaacatggatgtgggccgctgccgggcatggctgcggctggccctgaacaatggcctgatggagtgctacctgaagctgctgctgcaggag

SEQ ID NO: 15178 - DNA, 465 bp, Homo sapiens
  misc_feature (1)...(465): n = A,T,C or G
ggggcgttgnngtcgagaccctattttgagatccactatccangtggtggaattcgcatgaacccacatcatcaactgcaggttttgtgcttggcccatcacaccacccacacttcacaataaactacaaaatataaagcagatccctgcaagcaccatattttaaagggtgttgtgtatttggtctgctcactccaagcaccggatttttactttgtcagtgggtaatgtaattgcccaacagattcttcttgcccactgtccagatggaactgatttatccagatgggaattacagtagacaaagtttaatacatgtagagctggctaaattggagactggagttttattgttactcaaatcagcctccccaaaaagtcagaggctaggatttttgtaagacagtttggcgggtagggagctagggaatggtgaatggtgataaattgcgtcagggatggaat

SEQ ID NO: 15179 - DNA, 483 bp, Homo sapiens
  misc_feature (1)...(483): n = A,T,C or G
aggggnatnnncnnncnnnnnnnnncntnnnttttgagaccctagttcgagtggcggaattccgcagaagaaactcaagctggacatcgacaagagcgtaaggcacctatatatctgtgattttcacaaaaatttcatccagagtgtccgaaataaaaggaagaggaagacaagtgacgatggcggagattctcccgagcacgacactgacattcctgaggtaaaggtcaaagaaaccagttgcggaagctggaagaatggattctaatctgattctcacctctggcctggtctgctttttgtgttaagaagtaattttagtccttttgttttgctatggattatttgaaaagtgaattatagtaatatggaatctgagagctaaaagcttggacacccactggtcagactgccccatcattttacagacaggcacagagagccgaggtcatgtatatagtttggaggctctagtctagggcc

SEQ ID NO: 15180 - DNA, 431 bp, Homo sapiens
  misc_feature (1)...(431): n = A,T,C or G
caacttcctcatcaccaacgatgaggcatacgctgaggagtttggcaacgagacgtggggcgtaacaaaggcagcagagaaacaaatgaaggacaaacaggacgaggagcagaggcttaaggaggaggaagaagacaagaaacgcaaagaggaggaggaggcagaggacaaggaggatgatgaggacaaagatgaggatgaggaggatgaggaggacaaggaggaagatgaggaggaagatgtccccggccaggccaaggacgagctgtagagaggcctgcctccagggctggactgaggcctgagcgctcctgccgcagagcttgccgcgccaaataatgtctctgtgagactcgagaactttcatttttttccaggctggttcggatttggggtggaatttggggtgntcccctcctncactctccccc

SEQ ID NO: 15181 - DNA, 483 bp, Homo sapiens
  misc_feature (1)...(483): n = A,T,C or G
cattgagagacctcgttgaagagcgtcagccaaacacagngnnggattggctagntttaataattctgaccatctttgggctgtaaggtttatccctggtttcctggtacctggcctgggatggcttatggtagggtaaatattggcttggtgtgtaaaagttagataaggtggttggcactatagacttgggattggatggtttgcatataagaagtatgcctctggccaagccttttgttatctgtaagaattggctatccctacaaggggccatctctccccagcaagtgaggccacaggtgccagaacatcaggaatacagaaaataagaaaatagggttaatataattggccctgtgatgaatggatgccaacggacaaataaagaatctaagaaaacacagaatgtgccctcagctttttaaaacctgttttaaatcatgaagtataacatatatttatagaaaagtacgtataata

SEQ ID NO: 15182 - DNA, 459 bp, Homo sapiens
  misc_feature (1)...(459): n = A,T,C or G
agactaanactgagctgcatagcattngcggnggaattctgagaatgtgcctactgctcctgatcctccaagtcaacatttacgtgggcatgggacaggcttttgctttgattccagctttgatgttcacaagaagtgtcccctctgtgagttaatgtttcctcctaactatgatcagagcaaatttgaagaacatgttgaaagtcactggaaggtgtgcccgatgtgcagcgagcagttccctcctgactatgaccagcaggtgtttgaaaggcatgtgcagacccattttgatcagaatgttctaaattttgactagttactttttattatgagttaatataggttagcagtaaaaaaaaaaaaaaaaaaccccccctaaaatagaccactgaggaaaccttagagcggatgctttatgcaccctttactgcactttctgaccggagcttctttgag

SEQ ID NO: 15183 - DNA, 419 bp, Homo sapiens
ccaagatggcgggtgaaaaagttgagaagccagatactaaagagaagaaacccgaagccaagaaggttgatgctggtggcaaggtgaaaaagggtaacctcaaagctaaaaagcccaagaaggggaagccccattgcagccgcaaccctgtccttgtcagaggaattggcaggtattcccgatctgccatgtattccagaaaggccatgtacaagaggaagtactcagccgctaaatccaaggttgaaaagaaaaagaaggagaaggttctcgcaactgttacaaaaccagttggtggtgacaagaacggcggtacccgggtggttaaacttcgcaaaatgcctagatattatcctactgaagatgtgcctcgaaagctgttgagccacggcaaaaaacccttcagtcagcacgtgaga

SEQ ID NO: 15184 - DNA, 468 bp, Homo sapiens
  misc_feature (1)...(468): n = A,T,C or G
nnaagcgcgccgcttttnngggaacttgangaagtcgcnccattannntaaagggccgcagccccacacctggaagggatgctgtcactcagcacgctttgatcaaagaacggactgaacgcagcctcctgctagtcctgggcctccctggctcctgtgctgctgagggacctcccccagagttccagattcttccgcaccagtgattttaatccattttgatgtcagagacctgtgtgggactctggaaattcagaaggtaattgagtatgactcttttcccaataactgctgtgaaaaaacagaacagatgaattttagaagaatgtctgaaattcaagcatcctgtgaggtatctccactggtgagttacttacagctagtcagcaaatgaaaccagagtcgcccaccagtatcctggtgagtcatcgccagcctgaattattagaaagggatggctgtcccggg

SEQ ID NO: 15185 - DNA, 518 bp, Homo sapiens
  misc_feature (1)...(518): n = A,T,C or G
ggaacntcaacccagggnnccacccaccnttgagtaccctcngttgaagaacactcggacanngcggnggaanncgnggctggggcattgaggatgatggacaatcgtgtggccttggtgattagtgatggggttctcggtgtttgcagaggaagctgcctggacaggacatcgcacaaggatcctacattgccctgccattgacgctgctggttctgctggccggttacaaccatgacaagctcattcctttgctgctgcagntgacaagccggctacagggagtccgcgtgctcggccaggcagcctctgacaatagcggcccagaagatgcaaagagacaagccaagaaacagaagacaaggcggacttgaggaggaaggggacagttgcagtctcacttgggacaggccacagccaggggtccggccactacccgcccgtgggataaaagccaaaagcatgcgtcagctaacttcagcctgtgctgctgggcccgcaccccatgtcccttgtca

SEQ ID NO: 15186 - DNA, 458 bp, Homo sapiens
  misc_feature (1)...(458): n = A,T,C or G
atctgacagactcacactacgacangccgngnaannntaacttttctacttagcataaaatctacctttgttttgaacattacctagctatttattttttaataaatcacttaactactctagacgtgggttttaatctataaaatgaaggagctggactatataatttctcaagtttctgtctggccttaaaattatttaattcatccatagtactatgacattttccagttataccctcacattctatttaatctcttactctcttcaattgagtgctcttggttacctacctccaaaaggtctgaaggatttgggtcccttacaggctctactgagtggtccctccaagaaggaactgaaaaaaaagagagagaaaaagaaagggaggaggggtggaaccacccttaaatccaaagttgcacaactattcactatgataagaggtctctccccaa

SEQ ID NO: 15187 - DNA, 448 bp, Homo sapiens
  misc_feature (1)...(448): n = A,T,C or G
agatagaactgtaacctntnaaactgagtacctcttaagngncgnggaattcgataaagacaggagtggagtgatatcagacaccgagcttcagcaagctctctccaacggtgagtgggccagtgggaactgggtctccggaccaagaagccgtgagcctgccctgttcacagtggataactttctgaagttgtttttccaaggacaaaggaatcattaggacaaattgttaatactgcttcatggtggagatgcttctggtttattttgtggctaccgctgttactgcttggagtgcctcaccgagccaggatgaagccccacccgcccttcaggatgccagccttggcaacatcgtgagaccctgtttctacaaaaactaaacaagtgtagtggtgcacgcctgtattcccagctacttgggaggctgagatgggaagatcacttg

SEQ ID NO: 15188 - DNA, 443 bp, Homo sapiens
  misc_feature (1)...(443): n = A,T,C or G
ggttaaactggaccatatccanctggaggacctctgttgataacgggctttgttagcactttttaaaacaaacaaacaaacaaaacaaaaagcaaaccacatttgttatctcaaattttgatgatattctcaaatacaaatatacttttttatatttcacaatatatgcaatatcaagggaatatgctaaatgttaccaccagagggcacaagcatatcacttttagtaaggaaattactagcttgtgttgctatttacatatgaattactgattattttgaaaagacggtgttatgcttgggtgttagtgaggctgatatgtcatgtcaatcgataaaccctactttccaaattatctaaaagattaccatttggggcccttgttttcaagttatctaactgaaatattattaatttttttaagttaatctcattcagtctt

SEQ ID NO: 15189 - DNA, 440 bp, Homo sapiens
  misc_feature (1)...(440): n = A,T,C or G
ttgaaccccttnaaactgagtacatagtccangncgnggaattctgagatagggggctgccaacacttgcaccccagacacttggcatcaccttctaggagcaaanctttccctgcctttaaaacaattgggaaaggtgattcttactctagaaaactgggagcatgcaaaatgaaaagtaacttggagcangatttttttctttttcatgtagctagtccctctctaccaatggaacaaaagactttgtcagatcgtattcttgccacttgaagaatgtttttaagaaagtctctttgtgctatctgctacatcacactctctcctattcagctcacctttgttattggtcttaggacatccaaagggcatgttttgtgttttagatcatagaagcttccctttctgacagctgccgtggcatgggcgtccaggggatg

SEQ ID NO: 15190 - DNA, 509 bp, Homo sapiens
  misc_feature (1)...(509): n = A,T,C or G
ggggagccagcncnnnnnnntttgagaactgagatcactacccgnngcgtggaattccaaactcctggcctcaagtgatccgcttgccttggcctcccagagtgctgggattgcaggagtgagccactgcacccggcctctaattttgttaatttagagctctgctctccaataaggtggccattagctccttctgtgtatttattattatttaatgacagggtctctcgctctgtcatccagtctggagtgcagtggcacaatcacagctcatgtatagcctctacctcttgggctcaagcagtcctgcctcagcctcctgtgtagctgggaccacaggtgctcgctaccatgcccagctaggttttgtatgttttgtagagatggggtttcggcatgtcacccaaggtggccttgagctcctgggcttacaggtgtgagccactgtgcccggccacttgtgtgtatttaaatgtaaacttaaacgaactgaaattaaataaaatttt

SEQ ID NO: 15191 - DNA, 465 bp, Homo sapiens
  misc_feature (1)...(465): n = A,T,C or G
ccccatagtagactacttntnagtctggtggaattccactgcacccaactcctctttcgtctttctttaacacacactaggctctttgtgtattatgattcagtgctatttgtaactgtgtcccagtgaccaaattgcactcgactcgatcagctgttcatccatttcgtgttttttcctgtcaaacattaatccagcaaatatatgaggtatttaccaatttattttcttagtattacaaaataattcattagcataaagtacaatagtgaaatatttgagttgttcggaacctcaattaatcctgttttacatttcagacctaaagctggcaatcaggagaagaagcactttgttttaaatgtggagaagataacacttgattccatttcattgtcattagtgtattaaccagcaggagaggtgatgagccatttttcaaatgaaataccttttatttccata

SEQ ID NO: 15192 - DNA, 455 bp, Homo sapiens
tttggtttgtagaccacttgtacagcctggtggaattccagccggcacctgcatgggactgcctggagggccacggtccagggaaggacaggtgggaccctgaccatgacagatctttctaaaacaataaagtcccattgatgacaactgcagtgggatgaatgccattgcagcggtcatgctgggagctgccgagagcttacaacaaaagcagttcctctcaagacactgcttgcatcttccctccacgcctctcggtgcatttggaacttgtttatgcgctggtataactcgagtcagctgcttatttctgtgcccttgcactcacaggttccttcattaacattttaaataagtggctaaaaaaactcctctggaggttgtttttgaaagagacaggaaaaagaaacacacagtacctggattgttttgacttattttcaagcgactcagct

SEQ ID NO: 15193 - DNA, 484 bp, Homo sapiens
  misc_feature (1)...(484): n = A,T,C or G
gcgcggggnnnccccaatcgaagacatattgaagaccggtggaacnctcatcacacactggatgccatatggatccctctacaatgtactacatgaaggcaccaatttcgtcgtggaccagagccaggctgtgaagtttgctttggacatggcaaggggcatggccttcctacacacactagagcccctcatcccacgacatgcactcaatagccgtagtgtaatgattgatgaggacatgactgcccgaattagcatggctgatgtcaagttctctttccaatgtcctggtcgcatgtatgcacctgcctgggtagcccccgaagctctgcagaagaagcctgaagacacaaacagacgctcagcagacatgtggagttttgcagtgcttctgtgggaactggtgacacgggaggtaccctttgctgacctctccaatatggagattggaatgaaggtggcattggaaggccttcggcctacn

SEQ ID NO: 15194 - DNA, 465 bp, Homo sapiens
  misc_feature (1)...(465): n = A,T,C or G
atcgccnccctatagaggacccttagacagngcggaggaattcgtgtgtgtgtgtttgcgggcgcttttaagtgtgtggatagatgagtgtgcttgcacataatgtgctatttctgtgagttttaaagtaggcaagggataataaccaaagaagaaaatttcatgaagactagacatcataaagcataattttaatagtcactcaaccaagtattttttattttttatggatactctgaatggcaattaaatgtgaaacccagtttcttgggcaagtcaaattctggaatcacatccacctaaattaaaatgactagctcgtattttccccatcttcaagtttcacatcctggtcatcaaaagactcgacagcaagacttagaatgaaaaagggtacttgtttatattaatattttttacttgaacacgtgtagcttgcagcaggttcttgatgaatgtgctttg

SEQ ID NO: 15195 - DNA, 485 bp, Homo sapiens
  misc_feature (1)...(485): n = A,T,C or G
cggcggngnnncccaatcgagacctcttgaagacattagaaagcgcggaggaattcccagaaaggaacttacagatttcttacggaaattgaaggatgcttatggaaaatccttgtctgaactgacatttgatgaaattgtttgcaagatttcccagtttattgaccccaaaaagtctcagagtcaaggaaaatcagtgtcaaatgttaattgtgtttcacctagtcattctccatcacagcctgatgctgcccagcccccaaaaccagcctggaggccactcacttcacagggtcctgccacatgggaaggagccagtaatccagatgaggaagaggaagaagaagagccttgtgtgatctgtcatgagaatctgtctccagaaaatctttcagttttgccttgcgctcacaaattccatgctcagtgcattagaccatggttgatgcaacaggggacatgtccaacgtgcagactccacgttn

SEQ ID NO: 15196 - DNA, 475 bp, Homo sapiens
  misc_feature (1)...(475): n = A,T,C or G
cattgaccaccctcggaatgaatggcctaggccagacggacctagtgataaacctctaatttaaaacataatctgcaaggcttcaacacacacttcacaaaaaatacatatcaacagtcaagggaaggcatttttaagttaaattaaaagtgcaatgaaatatcattccatacaaactaacagagcatatttaaaaagactcatagtacaaagtactggtgatgatacagactaatcagaattaacattttgagttttggttatttgctaaattttccattacacattctacagggtcgagtaaggtgagagctgcagctaaaggacttcccgcattgactgcactgaaagggtttttcaccagtatgaattctattatgttgacaaagtgtggaggaagtattaaaggccttcccacaggcatggcatgtatagggtttctctccactgtgtgttctcttatgagtaacaaggn

SEQ ID NO: 15197 - DNA, 507 bp, Homo sapiens
  misc_feature (1)...(507): n = A,T,C or G
tggccgnnnnnnnttaggaaagtcatccgtangaacngncgnggattttataagntaggcggctgagagcagcagtagactggccaactgcagagcaagttgtttcttcagccgtgcggtgcagcctcatgcccccaacccagcttatccgctgtaagaagacgttcactgtacagacgaccaaacttgccgtggaagagacagttgtgagattcccttgcaaatttacatacgagaatggcttgtgaaatcatgcctctgcaaagttcacaggaagatgaaagacctctgtcacctttctatttgagtgctcatgtaccccaagtcagcaatgtgtctgcaaccggagaactcttagaaagaaccatccgatcagctgtagaacaacatctttttgatgttaataactctggaggtcaaagttcagaggactcagaatctggaacactatcagcatcttctgccacatctgccagacagcgccgccgccagtccaaggagcaggan

SEQ ID NO: 15198 - DNA, 462 bp, Homo sapiens
  misc_feature (1)...(462): n = A,T,C or G
nattgaagactactattcagtgcggtggaattcaggactggaattgatgggccaagctttgtgttttaaggaaaaaaaaatcatgttttagtttcgtgctggtaatttgaagtaagcagatgtctagatataagcttggaaactggccagttggagattgctcacggctgcaattgaagactccagcagcctcttctcctctttgcttccatttggagaggaaggcgtcataggctgtgtgacttccgtggacgcggggcttggcaccggcttgcagttgggatcaatcttcagtggcggtttggagtgggtcacggttcttcctgcttgccttccagtttagtccctgacgtctgctccccagggccctggctcttcccccacgccttcagcctgcacagtcccttctctcattctcaggctgcagaacctggaagtacagttgtccccccttacccgctg

SEQ ID NO: 15199 - DNA, 504 bp, Homo sapiens
  misc_feature (1)...(504): n = A,T,C or G
cggacacacaanaatcgagacctctatggaagngcggtggaattcaaatcaatgccatgatcatccatattgttgagtttgttgttggtgttccagaagtgtccccattttacaactttatgcacacacctggcaaatcattaacatgagcattcaacagtactgggatgggtggggtgggggtagggggctcaccaacagaactggccagttgacattgcctgaaaaggcaccacctttaagggccagttgtggggttggtaagcacagttatgaaaatttctatctagcctccgttttgaatggttttaagaaattttgtatatggaggatggaaatgcttatatatttattgaaaatccttttatttgaaattaaaattatttggtatataattgtttgatatttggggagggttttggaggggagataatgtcactgataaattaaaagcctgttgattntgcagaaaggtactgttagtgactgataaggatgcctttg

SEQ ID NO: 15200 - DNA, 415 bp, Homo sapiens
accctattctttgcccaaggagtagtagaaatgtagactagacagacaaacagggtctcctattttgcctcattagtgccacactctatacaactacagtcacgaaggggtcacatttggttataattactattagaataatatgggagtgtgatgtttgtggtggaaacttgcccatgacttatgtaaccatttctgctgacaaattttaggatctaaaaactttgtgggtttttttgttttgtttttgtttgtttgtttttgggacagtctcgctctgtcacccaggctggagtgcagtggcacctccgcctacagtgttcaaacgattctcccacctcagcctcccaagtagctgggaccacaggcacacgtcaccatgccctgctaatttttttgtatttttagcagagat

SEQ ID NO: 15201 - DNA, 446 bp, Homo sapiens
  misc_feature (1)...(446): n = A,T,C or G
nttgtaagtccctagtccttgtggtcgtattcgttaattgtagctagtttgtttcctatttcaatatccgctgccccccgccccccgccaccttttttttttccgggtttttctgctccatatattcaggtaaatgacctccgaaaagaattagaaagtcgagctcttagttccaaaggattaaaatcccagttaatagcccgattgacaaaacagcttaaggtggaggaacgaaaagaagaacagacggagttagagaaatctgaaaaagaaaaggatgaggatgatgataggaaatctgacgacgataaagaggaagaagaaaggaatcgtcaagaggaaatagaacgccagcgtcgagaaagaagatatattttgcctgatgaaccggccatcattgtacatccaaattgggctgcaaaaagtggcaagtttgattgtagcat

SEQ ID NO: 15202 - DNA, 479 bp, Homo sapiens
  misc_feature (1)...(479): n = A,T,C or G
natgagaccntggccaggccttgatnnccatctcaagcccgagaaatgtgtgtttggcttgagtcttgcaggaggaatcatgtaaagacatgtttattttaatctggggggaattttttttaattagaactttttatatgggaaaagaaaacctgagattgttatagatctatagcgtttttcttcagggatctataatttactaaaacattgttggcacttattacctacacagaaagatcaccttcaaaaatatatttactatcagtaaatggatatctgagatgcattatctaaatagagcatatttgaccaagtctaaaaactgggctttagcaacaaaacattataaaaatggatctggattttaaaagttttgcataaatgattagctttcaagcttgtgaaagttttttttttcattttaaatcatttgggactagtgaggccatctacaatgggaaattgttgcatgtatg

SEQ ID NO: 15203 - DNA, 436 bp, Homo sapiens
taacttcaagccagagaaatgtgtgtttggcttgagtcttgcaggaggaatcatgtaaagacatgtttattttaatctggggggaattttttttaattagaactttttatatgggaaaagaaaacctgagattgttatagatctatagcgtttttcttcagggatctataatttactaaaacattgttggcacttattacctacacagaaagatcaccttcaaaaatatatttactatcagtaaatggatatctgagatgcattatctaaatagagcatatttgaccaagtctaaaaactgggctttagcaacaaaacattataaaaatggatctggattttaaaagttttgcataaatgattagctttcaagcttgtgaaagttttttttttcattttaaatcatttgggactagtgaggccatctacaatggga

SEQ ID NO: 15204 - DNA, 397 bp, Homo sapiens
ctgagagcaagatgggtcaccagcagctgtactggagccacccgcgaaaattcggccagggttctcgctcttgtcgtgtctgttcaaaccggcacggtctgatccggaaatatggcctcaatatgtgccgccagtgtttccgtcagtacgcgaaggatatcggtttcattaagttggactaaatgctcttccttcagaggattatccggggcatctactcaatgaaaaaccatgataattctttgtatataaaataaacatttgaaaaagccactgaaaaaaaaagaaaaaaaaatgaaattaagagggggcccttttgttttaaggggcccctttaaaccccgtgaaaaaccctgggggggtcttttaatgccgcacccttttgtggttgcccccc

SEQ ID NO: 15205 - DNA, 465 bp, Homo sapiens
  misc_feature (1)...(465): n = A,T,C or G
ctttgagtgcctagcncangncgnggaattcggcgattcggcccgacgagctccgctttcgctacagcatggtggcctactggagacaggctggactcagctacatccgatactcccagatctgtgcaaaagcagtgagagatgcactgaagacagaattcaaagcaaatgctgagaagacttctggcagcaacgtaaaaattgtgaaagtaaagaaggaataatctaccctgactaaagcttgaaatgctacatttccaaggtgaagatgtgtgggcacatgttatggcagattgaaaaggatctcattccatgggaaaaaaaaaaatcctgtcttgttcataaattgacaatgtcaataaattgaaatatggttcactgtttnnaaaaaaaaactataataaaaattaaaaataaaaaaaaaaaagcggcccctttaaataagaggccccctataaccccttg

SEQ ID NO: 15206 - DNA, 419 bp, Homo sapiens
cgggaaggaggatggcggatatcatcgcaagactccgggaggacgggatccaaattcgtgtgatacaggaaggccgaggagagctcccggactttcaagatgggaccaaggccacgttccactaccggacgctgcacagtgacgacgagggcaccgtgctggacgacagccgggctcgtggcaagcccatggagctcatcattggcaagaagttcaagctgcctgtgtgggagaccatcgtgtgcaccatgcgagaaggggagattgcccagttcctctgtgacatcaagcatgtggtcctgtacccgctggtggccaagagtctccgcaacatcgcggtgggcaaggaccccctggagggccagcggcactgctgcggtgttgcacagatgcgtgaacacagctccctgggccatgct

SEQ ID NO: 15207 - DNA, 495 bp, Homo sapiens
  misc_feature (1)...(495): n = A,T,C or G
ggcgnnnnccggggggcttttaatcgagaccactggaagtgcggtggaattcgcagcatataatttataaaatactttctcttaaagccataaatagtaagcacttgctccgaaatgctgctttgtcaagaacgttaattgaagcagatgagcagagtcagtatagcttcccaggtccagcctgcattccctttctactgcagagttacgctgaggacagcatgctggcacctccacggctcttctgctgtcaacttttcttctcccaagtacctgaaagggcaggtgatcctcttaactttgtagacatgtgaaaaggagactagtttttgaatgctcaccaaaagccaagttgccaggatattgtttgcaaatacagaaagggtttttgtactaagtggtatttaaggcaaaatctttgccaaagaactctatccaaaagcttgaaatacacatagttggttaagggaatgcatttggagttaaacagaaata

SEQ ID NO: 15208 - DNA, 446 bp, Homo sapiens
  misc_feature (1)...(446): n = A,T,C or G
gtgaaatagaatgagtgctatggtgttgaaaactgcagtgtccgttatgagtgccaaaaatctgtcttgaaggcagctacactttgaagtggtctttgaatacttttaataaatttattttgataaataatattgaaaaaaaaaaaaaaaaaaaaaaaaaaaaaaaaaaaaaaaaaaaaaaaaaaaaaaaaaaaaaaaaaaaaaaaaaaaaaaaaaaaaaaaaaaaaaaaaaaaaaaaaaaaaaaaaaaaaaaaaaaaaaanngggaaacccccctttaaaaaaaaggggccccaaaaaacccccaaaaaaacccggggggtttttttaaaaaaaaaaaaattttggggcccccccccccccctttttttttttagggggggggggccctcctcccttttttttttaaaaaaaaaaaaaaaaatacccttttttgttgggaggggg

SEQ ID NO: 15209 - DNA, 507 bp, Homo sapiens
  misc_feature (1)...(507): n = A,T,C or G
tgggtctccccnnaatggagaccntatttgagaccctagnccagngcggnggaattctgccgtcccagcaggggcggcaggagagagaggctggcctacacaggtgcccgtcatggaagaggcggccatgctgtggccagccaggcaggaagagacctttcctctgacggaccactaagctggggacaggaaccaagtcctttgcgtgtggcccaacaaccatctacagaacagctgctggtgcttcagggaggcgccgtgccctccgctttcttttatagctgcttcagtgagaattccctcgtcgactccacagggacctttcagacaaaaatgcaagaagcagcggcctcccctgtcccctgcagcttccgtggtgcctttgctgccggcagcccttggggaccacaggcctgaccagggcctgcacaggttaaccgtcagacttccggngcattcaggtggggatgctggtggtttgacatggagagaaccttgactgtgttn

SEQ ID NO: 15210 - DNA, 481 bp, Homo sapiens
  misc_feature (1)...(481): n = A,T,C or G
ggctgagaccntagcagngggttgatgacgctaacaacatcgactttggaggcaggtctgggaagcaattagtaagttatgtaagctccctcagcccaggtttcctggtgtgtaagaggggaggataggaatagttccctcctcatagtaacacatggatgtctttccagtacctgactcaatatgtctgaaactttgttttctcccccctaaaatctgtaccttttcttctttctcttggtaaatggtgctctcatctttgacttcctgtctctcttaccccagcccagtatccagccactcaccagatgctatcaattcttcatcgtaagtatttctccgatacttctgttactctccatccctgccatctccaccaagccattacagattctcatctggactattaatcattcaacttgacttcccaaaattcactcttggccattcttcaaagacttttgctatccttagcattagg

SEQ ID NO: 15211 - DNA, 498 bp, Homo sapiens
  misc_feature (1)...(498): n = A,T,C or G
ggcgtnnccgggcgncncnngattgatncccatcgtagtccctagtcagtgcggtggaattcgttggaaatactagtgatgtccatatcccattcagcatgagtaggcatcttaacagatgggatgcagaaatttggtgactggtagattccagctgagaatggatatgagagatgtgatcaaatgacgaggatgtgggaaagttgggtggtagggaggataaggatgcaatgtctgactgtggggtgagggaagaggtaaatttgcatagtccggaaaactagaaatggtggaagagaggtcacagtgagaaacaatttgtcctgcacctgtgagtggtaaagagaaaggagattgttgttagacagcagaagctctgagagattttggagatggaacagttctaaggtacattgctttgtttatgtattcttatgttgaacaaaactatatgtccaacatatcctgcatatgacctgtactggcaagaaatgtacc

SEQ ID NO: 15212 - DNA, 444 bp, Homo sapiens
  misc_feature (1)...(444): n = A,T,C or G
gttgaagccctcctgatgacncttagacagnctggtggaattcgcaagattccatctcaaaaaaaatataaaattgtacacaaaattgtgtgtatgtatgcattttatttggagacaagggatatcactccctctccccaacactggctaaaaagttactgcaatctggctgggcgcagtggctcacgcctataatcccaacactttggaaggccaaggcgggcggatcacgaggtcaggagattgagaccatcctggctagcacggtgaaaccccgtctctactaaaaattcaaaaagattagctgggcatggtggcgggcacctgtagtcccagctaatcgggaggctgaggcaggagaatggcatgaacccgggaggcggagcttgcagtgagccaagatcacaccactgcactccagcctgggcgacagagcaagactcc

SEQ ID NO: 15213 - DNA, 452 bp, Homo sapiens
  misc_feature (1)...(452): n = A,T,C or G
attcgaggacccttagnnattgacgacccctagtccagtgcgggggaattcaattcagttgctttaaaaacgtttgaacatagtagaaaatgtaacagtgttgctcttagtgtttctcatatatagggaataaaagaagaggttttataatagcacttgtctcacaagatttatgagcgatttgaattttacagatctattcctaagcaaaagagccttaagtctttttttttttttttaaagaaaactagcaggtacctttccgtttctgtggaagtcggggcccttccaaacaatattggctgctgctcaaaggatgggtgggaatgaccctaaagaaactcgagtcttccatgctggattggggggggggctaggggaaaacaagtaagtctggaaaatctgaaaatggtaaggatatacttgatcccaaaaggttacttttcatttga

SEQ ID NO: 15214 - DNA, 557 bp, Homo sapiens
  misc_feature (1)...(557): n = A,T,C or G
tttgagcccagnnnnnnnnnnccgagagctggacagtattactccagaagtccttcctgggtggaaaggaatgagtgtttcagacttagctgacaagctctctactgatgatctgaactccctcattgctcatgcacatcgtcgtattgatcagctgaacagagagctggcagaacagaaggccaccgaaaagcagcacatcacgttagccttggagaaacaaaagctggaagaaaagcgggcatttgactctgcagtagcaaaagcattagaacatcacagaagtgaaatacaggctgaacaggacagaaagatagaagaagtcagagatgccatggaaaatgaaatgagaacccagcttcgccgacaggcagctgcccacactgatcacttgcgagatgtccttagggtacagaacaggaattgaagtctgaatttgagcagaacctgtctgagaaactctctgaacaagattacaatntcgtcgtctcagtcaagagcaagttgacaactttacttctgatataaatactggctatgccagactcagaggaatc

SEQ ID NO: 15215 - DNA, 552 bp, Homo sapiens
  misc_feature (1)...(552): n = A,T,C or G
tttcgttcccntccggnnnnnnaattcaagaaaattaattattgtaatgggctgtagccctcagaataaattgatatccagtagtctatacaacatatgtaattgcgtaaacatgtcagtggggggagggccaggtctgtcttattaattctaatatagaagaaattttgggaacaggaaactgctgttgcagaaaccacactggtgacaggtgcagattacaaccctcagcaggccgggcgccagtggctcacgcctataatcccaacactttgggaggccgaggcaggcagatcacttgaggccaggagttcaaggccagcctggccaacatggagaaaccctgtctctactaaaaatacaaaaattagccggggctggtggcatgtgtctgtaatccagctattcgggaggccgaggtgggagaattgcctaaaccangaggcagaggttgcagtgagcanggattgtgcaccacactccagcctgggcgacagaacgtctcnaaaaaaccctcanttgcataantgatggtgacgtgtgtgtgaacag

SEQ ID NO: 15216 - DNA, 478 bp, Homo sapiens
  misc_feature (1)...(478): n = A,T,C or G
ggagggngnnnnnaatcgagacctattgacggcgtctggaaacctcaattgctgctgatatgctggtgattcccaaatacatagctccaacccccaacttcccccagactttagatctgtattggtattacctactggacatctctatggacagttccgtatagactcaactcatctgcccaaccaagtatgttcctcctgaattcctctcctggttacttcatcacaatctacataggctcaccagctagaaacatttatgagcttacattccttcttcccatatcttatcagcatatcatatccatttcactccaacactctgtcttgaatttggccctccctctcccctctctactttaattcattggagcatgggatttggagttaggtggttttgggtttgaattccagctctactatttttggttgtgtgatagagttatttaacctctctgagcctcagttccctcgtatg

SEQ ID NO: 15217 - DNA, 484 bp, Homo sapiens
  misc_feature (1)...(484): n = A,T,C or G
gcgcgggggnnncggattgagaccctattgtagaccatctgaaagngcggtggaattccccacaggtgagcagggctcctgtccaccagcacactcagttctcttccctgcagtgttttcattttattttagccaaacattttgcctgttttctgtttcaaacatgatagttgatatgagactgaaacccctgggttgtggagggaaattggctcagagatggacaacctggcaactgtgagtccctgcttcccgacaccagcctcatggaatatgcaacaactcctgtaccccagtccacggtgttctggcagcagggacacctgggccaatgggccatctggaccaaaggtggggtgtggggccctggatggcagctctggcccagacatgaatacctcgtgttcctcctccctctattactgtttcaccagagctgtcttagctcanatctgttgtgtttctgagtctagggtctgtacan

SEQ ID NO: 15218 - DNA, 469 bp, Homo sapiens
  misc_feature (1)...(469): n = A,T,C or G
ggacgcgcgcgggtgnaaactgatagcgtncatagacagggcgggaantccttgaccgctacagtggtaagtaggctcttgtcacacagtttggaaatactttactttatagagattcagatcaagcaaacaactgcggctgctcattctcctcaactttgctgtacaaagttgggggctgggggagcacttctgtcgctattcaaatggcagcgttttgagagaatccatttttttatttctcctctattcctaaacattaggaactatgagagaaggacatctgtgcaggtgcccaactcgtaacctcattagttatttccagggggaagcgccagcaatagtttaccacactggaaatactgatggccaagcccagcacgcctcccagcaagccttgtttgtttttgagggcgagttttggcatagatggcactctactgtctacagcatacacctctgtggaatc

SEQ ID NO: 15219 - DNA, 481 bp, Homo sapiens
  misc_feature (1)...(481): n = A,T,C or G
gcgcggncgnnccnaatcgtagacatattgtagagctgtggaacacgctggaagacagagcctgacatcacatagttttgccaaagggagagagctaagctggaagatgtttttgatactttcggctctaaacattaatggatgtttgcgtagagtaagatagcgttcaaatttggttaatagtttatagatagacttgtggcctctgactgactaaatttcttaacagcacagaagtcgttgtttttctgtctttaaaatttattcattcagaaaattagtcattgctttttaagattattttagcatttgaagcaaattgaaaacagaaaagtgacttaaaatagtgtaggtgaattttttatctataatttaccaaataatacctgataataattcaaagaaaatatgttaccaaaatatattaaatatataggtagttcattcgtgggaagatgaatcttcttattaagcctgcccn

SEQ ID NO: 15220 - DNA, 503 bp, Homo sapiens
  misc_feature (1)...(503): n = A,T,C or G
tggcccnccccnaattgaagacccaattgaagngcggtggaattctcacactcagactttggctttatggttttccttcctccttgtctttgccctgaccttgatcaacaggggtgaaaagaaccaccctgaggtttccatgcctctcccattttagtggtagcattttgtgtctttactccacccttcaccctagttccaccaaggttcacacaccagatgtaactgtttttcagctgagttgtatggattaacttcagtccactgtaaatacacctgggatggggtggggttggggttgtttagggagaagcagccagacttgctttgtgaactgaatgtatttttatgcaattttgagtggcctttcaaccctaagatgaatggttttgttttactggttgttgttatatagctttgagtattctgtgtatgaaagtttgggaataataatattcacttctatatgatngcctgtaacacaacagtatttataaatgagt

SEQ ID NO: 15221 - DNA, 463 bp, Homo sapiens
  misc_feature (1)...(463): n = A,T,C or G
tggcgtgannttttncctgaatacatggccattgtgcaggaactcgcgccgacaggatgggcaagtgtcgtggacttcgtactgctaggaagctccgtagtcaccgacgagaccagaagtggcatgataaacagtataagaaagctcatttgggcacagccctaaaggccaacccttttggaggtgcttctcatgcaaaaggaatcgtgctggaaaaagtaggagttgaagccaaacagccaaattctgccattaggaagtgtgtaagggtccagctgatcaagaatggcaagaaaatcacagcctttgtacccaatgacggttgcttgaactttattgaggaaaatgatgaagttctggttgctggatttggtcgcaaaggtcatgctgttggtgatattcctggagtccgctttaaggttgtcaaagtagccaatgtttctcttttggccctatacaaagg

SEQ ID NO: 15222 - DNA, 556 bp, Homo sapiens
  misc_feature (1)...(556): n = A,T,C or G
ttgaatcccctctggggnnnnaacacctacccacagaacagcttanaagcttattctaagaaatagtaaatgctgaatgctagaaaggcaaaaagggataattgttggcatgttcacagagtggaaagaaaatacatctctctacaagtcacttgtgccattgtttgaatggtagagaggctagaagttggaagattcagactcagagatgacccagccaacgttttctgtaaaaagatgattgacttttcagaaacacatatttgaacttctgactcatgggaattgaaccaaaacctttcagccttagttaggccttaatgctttttgagatgaaaacttttttgacaatccatctttattcctaatatccatgctttatatagtattaatattgtgaatacacagatgtttgcatttagtttacgggaaatctttcctaaactcttatttgttatgatgtaaggaaaggttgattttttggtgtcgtactttaatttactggacacaattgaaagttgtttaaaatttggttanatgtcctttgaccanaaan

SEQ ID NO: 15223 - DNA, 480 bp, Homo sapiens
  misc_feature (1)...(480): n = A,T,C or G
cggcgggcgcncccaatcgagaccttttgaaggccgtggaaancgcttttctcagaaatcatccctcattatacatcagagagttcactctggggaaaaaccatatgaatgtagtgaatgtgagaaagccttctcccagaaatcacccctcattatacatcagagaatacatactggggaaaagccctatgaatgtagagtgtgggaaagccttttcccagagtcacagctgattatacatcacagagctcatactggagagaagccatgtaagtgtactgaatgtgggaaagcattctgttttatacattaaagaattcacactggtgagaaaccctacaaatgtgctcaatgtgaggaagccttcagcaggaagtcagaactcattatacatcagataattcatactggggagaaaccgtatgaatgtacagaatgtgggaaaacattctctcgcaagtcacaactcatcatacatca

SEQ ID NO: 15224 - DNA, 261 bp, Homo sapiens
  misc_feature (1)...(261): n = A,T,C or G
gctggcngccctancaaggcagnaaacccaggcctgccttctgtgaagcaagagccacctgacccagaggaggacaaggaggagaacaaggatgattctgcctccacattggacccagaggaagaggcaggaggggctggcacacccgtgatcacggagattatcaccctgggtggacccacgaaccggaaaactacattttggctgcgagggtgcacagaccttaaaacacctgtagctgaaagcatgccattgagtgtt

SEQ ID NO: 15225 - DNA, 473 bp, Homo sapiens
  misc_feature (1)...(473): n = A,T,C or G
agaggcagggngcnccnccactgannccccctgatgtacttaggacangcggnggaattcgagggaagcgctaaacggaaggaactaaagagagggcgaagcagtgcgaactgggcttgaggagaggcagtgaaaaccagctaatactgtgagttgtgaaggagaagggtgtggacagacacctgggagaggtgggggttgaagtcaggtggaggctgtttaccattttctagagtaaagctgtccaaatataatggaacctaagtggctccatgtaatgttaatttttctagcaacggcattcttaaaaagcagggaagcagataaaattaactttggtgatcttaatgagatattttcattcttttttctactacctcttcataccctgttgcgtttttcacactacatctcagtttggactagccacatttcgagtacagtagccacagtagccgtggctactgtcttct

SEQ ID NO: 15226 - DNA, 498 bp, Homo sapiens
  misc_feature (1)...(498): n = A,T,C or G
natagagaccccttggagatcgagaccactatccatgtggtggaattcggcaaagagaagcctgcggttggcatgaggatgcctgacaacaaaggctggagaagggccctgagttccagcctctccccaagggtccccgccccagtggctgcctctgtcttgacctgtgtaatgaattagtgtgctgtgtcactgtggcttgaagtcactgtggatcaagctcacagggggcacccatcctgttgtcaacagagtctgaagcagtcagggtgttggattcctctgttgttgtcatcaattcctgctgaggggtttctggggttttgtttttaataaatgactcctttgtaagaaaaaaaaaaaaaaaaaaaaaaaaaaaaaaaaaaaaaanagggcccccttttaatttaaagggccctttaaaaccccgtaaacacccccgggtggtccttttaatcgcccaccctttggggtttccccccccccccgccctttctg

SEQ ID NO: 15227 - DNA, 410 bp, Homo sapiens
  misc_feature (1)...(410): n = A,T,C or G
cccatcctctgtcaacaaaagggtcatttgcgaattcctcttctcagtgatcatgaatctctgggccttgattnttttttttttttttttttttttttagaaaagggaggcccccccttccccttgggggggagggaagggccaaaatttggttaaagggaagcccccccccggggggaaagggttttttttgggcccaaccccccccccgagggagggggaaaaaagggccccccctacccccccgggtaattttttgtttttttaaaaaaaaaccgggttccccctggggggcagggggggcttaattctccgaccctaataacccccccgttaacccccccaaaggggtgaaaaaaagggggggggcccccccccccccccccggttttttttttgaaaaaaaaaag

SEQ ID NO: 15228 - DNA, 460 bp, Homo sapiens
  misc_feature (1)...(460): n = A,T,C or G
gggcggggnngnccaatgagaccatcgactgagcccttccgacnggcggctacaggagatgatggcaacaatgtgccaggaacgtggagcccggctttttgctacagatgagagattctgtattgacaatggagcgatgatagcccaggctggctgggagatgtttcgggctggacacaggaccccactcagtgattctggggttacacagaggtatcggacagatgaagtagaggtgacctggagggactaataagatcaacagaatcagagtagatagttccttaatcggaacccaaaggaccccgtgcctcaatctctatcctgatgtcatgggagtcctagcaaagctatagactccaagcaaggcttggggtcctttatggaaccccaggatgactcagcaataaaatatttttggttttttggttttgtaaaaaaaaaaaaaaaaaaaaaaaaa

SEQ ID NO: 15229 - DNA, 472 bp, Homo sapiens
  misc_feature (1)...(472): n = A,T,C or G
gtgcggaggngtnccaatgagaccataggccagctaggcttcgnacagngcggnggaattcgatgggaactccagatgtgcgcattgacaccaggctcaacaaagctgtctgggccaaaggaataaggaatgtgccataccgaatccgtgtgcggctgtccagaaaacgtaatgaggatgaagattcaccaaataagctatatactttggttacctatgtacctgttaccactttcaaaaatctacagacagtcaatgtggatgagaactaatcgctgatcgtcagatcaaataaagttataaaattgcnnaaaaaaaaaaaaaaaaaaaaaaaaaaaaaaaaaaaaaaaaaaaaaaaaaaaaaaaaaaaaaaaaaaaaaaaaaaaaannaaaaaggccccccttaaaaaaagggggcccaaaaaaacccgggaaaaacccggggggggtttttttaaaccccccctttttt

SEQ ID NO: 15230 - DNA, 453 bp, Homo sapiens
  misc_feature (1)...(453): n = A,T,C or G
gcggtaattcgtagtcactagtccagttcgagggcattcggaaaacagaattattcttcataggctttatcatcatgggattcttcttttatatactgattacaagactgacacctatcaagtatgatgtgaatctgattctgacagctgtcactggaagcgtcggtggaatgttcttggtagctgtgtggtggcgatttggaatcctctcgatctgcatgctctgtgttggactagtgctggggttcctcatctcgtcagtgactttctttactccactgggaaacctaaagatttttcatgatgatggtgtattctgggtcactttctcttgcatagctatcctcattccagtagttttcatgggctgcctaagaatactgaacatactgacttgtggagtcattggctcctattcggtggttttagccattgacagttactggtccacan

SEQ ID NO: 15231 - DNA, 504 bp, Homo sapiens
  misc_feature (1)...(504): n = A,T,C or G
cccccccatcgaganccnttncnagatagtaggccctagnccgtgtcggggaattccacacaacttcctacaaggcctagaacatggctaaaggatatctcagatcctttggacagttctaacgttctattaatctgggacagtggctcactcctccctaaccctgtttcttttcccctcagagagagcctcccatcatcatcatgctgcttctcctcagactgacacttttaattggcgaacctattgagcagggtctacagtctgaattccttgttttctaaactgcctagcttatagctggggaatgctaggaaaatgccaagttagatatttacgtttcttgcctcaaaaggttcactggattctgggttcactgatggattataactgaaatccatcatctcttacagtgcgtctagtctccagatttgctgctgtgtctgctgataccctcgacgccccagcaccagcctatctggcttcctattctgccactggcta

SEQ ID NO: 15232 - DNA, 402 bp, Homo sapiens
ggatcttgctggctccgtcaccaagaattcagctcctgcaggttacataactgttcgttaggcattgaagagctcaagattccagcgtctgtgaataactgatataaatggaatcactttgtaaatggctgtcaggaactgcccctccattaaggagccacgtctagcccatcacagttgccaccatccctctctcacccatcaaatctgccgctaaatcctatttggtctacctctgaagtagccctcaaatgagtccctaactctcttcacccccacggctgctgcttcatccaggactttgtcacctttcagacacattcatatcatcgccctctagctgatctctgtgcacgtagcccctttaatccattcttcttattggcaacaggagcatctttg

SEQ ID NO: 15233 - DNA, 489 bp, Homo sapiens
  misc_feature (1)...(489): n = A,T,C or G
nctcgtagaccctagtccatgtggtggaattgatcaccgctccttaacacaagcccaatatattttggaacctcaataaatagtggttttgctgattgtctttttaacaatttctaaaatattgaatactggttattataattaaatgtattctaaacatctattctttctgtctcatgccttgatctaacctgttccttccacctagaatgccttttccttccttttctcacatagcaatctttgacatatccttgaagactgagctctcccatcagcctgggaggcctggcctgatctggaagacggttcagcacgtctttctctgttgccatagagcgggatttttgtctattttcagcaggtcgatccagactgcaagcctctggagggcagtgactcgatcccattcaactccatatccccactaccagcatggcatgcattgggggtgtgcatacatatacagaacggaaactttcanggttn

SEQ ID NO: 15234 - DNA, 471 bp, Homo sapiens
  misc_feature (1)...(471): n = A,T,C or G
gagccagggggggccnccctgaaaaccaatgatgatcataggacangcggnggaattcaaaataacttggcaaacttagttctggtgatttcttgatggtttggaagtctattgctgggaagaaattccatcatacatattcatgcttataataagctggggattttttgtttgtttttgcaaatgcttgcccctacttttcaacaattttctatgttagttgtgaagaactaaggtggggagcagtactacaagttgagtaatggtatgagtatataccagaattctgattggcagcaagttttattaatcagaataacacttggttatggaagtgactaatgctgaaaaaattgattatttttattagataatttctcacctatagacttaaactgtcaatttgctctagtgtcttattagttaaactttgtaaaatatatatatacttgtttttccattgtatgcaaa

SEQ ID NO: 15235 - DNA, 447 bp, Homo sapiens
gcggtaattcgagacactatccgtggaggcattcggagaccagggaaccgccaggaggaggctgtgtgcgtgggtctggccacctgctcagccagggaaccctggatgagcagtttatcctcagagcctctgtattctcacatgggacatgggcatgatcctagcatctgtttcatagtgtggaacatatggaaaggaacatacttctaatggggtgtagggctctcagagcattgccgaggccatcggagcagctcacctttggacacttcccatgacctacctctgatggtagggcaaaggcttaacaggtgctgagtccaggcactaaatacgtgctcaattagtggtatattttgtagaagacagtaattaatgatcagggcccccaaggccaccttcaggtttcttttttttttttgagacaaagccttcattttgttgccc

SEQ ID NO: 15236 - DNA, 458 bp, Homo sapiens
  misc_feature (1)...(458): n = A,T,C or G
gcgcgcgggggngcattgaaacctccgctagncgctccgnacangcaancctcagtggngggaactggaattctgtatcccaaaccaaaagcaactcctaatgtgctcttactttaatgaaaacctgactctgtcccgaagatgttgcttccttcaccccccttgatggagctggatctttgccttacccaccaggcctaggccaggagatgggattgggtcctcctagctcccagctgctcatgctctgttgagactctggatgtgccatcctttctgtctcctgtggaatgctgcctgagcttctggtgactgattatctaagtcttagccttcctctccacctagctcaggtcacccttcctgtggcttcagggcccacacactgaagtgtcacagtctactctggtctccagcaaactctcctgaaccttgcattccatgactgctgccaagat

SEQ ID NO: 15237 - DNA, 475 bp, Homo sapiens
cgggacgcttaacgttgaaacccttattgatagcctatacagtgaggaggaattctgctgagctttctgactttgaggaatgcgaggagacgggagagctctttgaggagcctgccccccaagccctggccacgagggccctcccctgccctgcacacgtggtatttcgctatcaggcagggcgtgaggatgagctgacaatcacggagggtgagtggctggaggtcatagaggagggagatgctgacgaatgggtcaaggctcggaaccagcacggcgaggtaggctttgtccctgagcgatatctcaacttcccggacctctccctcccagagagcagccaagacagtgacaatccctgcggggcagagcccacagcattcctggcacaggccctgtacagctacaccggacagagtgcagaggagctgagcttccctgagggggcactcatccgtctgctgccccgggccca

SEQ ID NO: 15238 - DNA, 453 bp, Homo sapiens
  misc_feature (1)...(453): n = A,T,C or G
ntttgaagttcattagccactagcccagngaggtggaattcactatttctacttggccaggtgtgggctcaagagccttactctttccatctcattttaggggcgcagccagctcctcttcccaatagggctctttctgctttacctctccttgggcctagatttgtaatccatgaaaaagcacaaggtcctggctccttgcggacacattctggttctctgtgttttgcggactctgctctcactgttcacccagcactagcagtaccagatggttctgtggagtcctggggaatggagagagcacagtctgactccctgccaagtagccaggagttgacttgcccatggtccgctggctttcccaccacttcctacaggatgggatctaagagactcaagagctgggtttctttcaacactctgtactgtcccaaatagcaaacaaatcag

SEQ ID NO: 15239 - DNA, 466 bp, Homo sapiens
  misc_feature (1)...(466): n = A,T,C or G
nttancattgattcccctattccagtgtggaggaactcaattgatacctttgatggaaggtcttggatagggggatttggctaggggtttgacatacagatgttcctccactgatgacagcattacatcctgatggattgatcagaaattcattcaacttacaatttacattgggttttaaagacataaccctgtcataagtcagggagtgtaatgatgctttcaccccattttaaggtcaaccatcataagttggggaccatccgcacaacccaaagtagacagagtagctttagaagacagctgaaggcctggcacagtggctcacacctgtaatcccagcactttgggaggccaaggtaggcggatcacctgaggtcggaagtttgagaccaacctggccaacctgacaaggccccgtctctactaaaaatacaaagagatggccggacatggtggcaggtac

SEQ ID NO: 15240 - DNA, 479 bp, Homo sapiens
  misc_feature (1)...(479): n = A,T,C or G
agatttgatacctttcagngtcgataaccctcctaatccatcgagagaaagaggcttacgaaaaactttgcctctgatgctcaaccccacccccaaatagcacacaagcttgttaaccccacctcttacaaaatgtttagattctgtaggtgttaaaagcctttctggaagtattgcattctgccgtgtttataggtgatcactttcctccagagctgattaactactgacatgacttggctttctcatccagaaattatggaaacagggtctgtcaatggcaggaggccgtgctgtgttttacttggatgacacaatgcaggttacttgcctcttcatacccatgcatgctgctcaccctagacaatgacatataagccgtatatagatcaatgtgcacatatatatacacacacacatatatatatataaagtgtaacaaggaacactaaaacagtgttgattcttgtctctgaaga

SEQ ID NO: 15241 - DNA, 449 bp, Homo sapiens
  misc_feature (1)...(449): n = A,T,C or G
nctcgagttcactagcccagggcggnggaattcccgcgcccagtcatgaccctgcgcccctcactcctcccgctccatctgctgctgctgctgctgctcagtgcggcggtgtgccgggctgaggctgggctcgaaaccgaaagtcccgtccggaccctccaagtggagaccctggtggagcccccagaaccatgtgccgagcccgctgcttttggagacacgcttcacatacactacacgggaagcttggtagatggacgtattattgacacctccctgaccagagaccctctggttatagaacttggccaaaagcaggtgattccaggtctggagcagagtcttctcgacatgtgtgtgggagagaagcgaagggcaatcattccttctcacttggcctatggaaaacggggatttccaccatctgtcccagggactaaagacaacct

SEQ ID NO: 15242 - DNA, 484 bp, Homo sapiens
  misc_feature (1)...(484): n = A,T,C or G
aatcgacgaccactagtccgnngcggtttgatccccatacactgcagggcctggtgatgctgtcctctgtaccggaaatggcaggcactgtcagatttccactcttctgcctttaggaaggctgggtgcttcttgctctgacagccagtctggggagatgactcttacgttgcttgagtcttggtggcaggctgctgtccacgggggagaagtctctgctctggactggacagaagagagacttttaccctggggcactcacacggccaagcttctgccaccacttcattagctgtattctccatagtatggtgaaatagcaggtgcgtcttctagtttattcctcctggggacatttcctcaaagcagttttgcgcccccgcaagggaatggtcagcctaagggtaatgtacagcccgtgcttggagaaccatggaagctacacccctacaggtgcatactgttctgctttttcaataaatan

SEQ ID NO: 15243 - DNA, 466 bp, Homo sapiens
  misc_feature (1)...(466): n = A,T,C or G
gcgcgcggnagtccccttggaccctangccagccangcancgnanagngcggnggaattcaaagcaattttgaaaatatagtaaatttgagtttttcttctccgatctgctgtctgaatggcacgagagaaaaatcaatcccgtggatagcaatgatcatcagttctttagagcaacccttgctttagtgtaatggagtcattcatcgtctggtttttggtccaaagtgttctcttctttatgttacagctaaagtcaggacctaaatggcaacacagctcagcagggcaaaacagattgcaaatcttattcttattgatttatgcttttgttggaaaggattatcatttgttaccttatacgaaagcctgctctgtgaccacaggttcagttggtaaaatacagggctgagaataaaattcacatacacctgtggggatccaaacacattttcatttttctgcaa

SEQ ID NO: 15244 - DNA, 450 bp, Homo sapiens
  misc_feature (1)...(450): n = A,T,C or G
aattgaacttcagtaccactagtccatgcggtggaattcgagatggtgagtgatggtcagacgtggcccttggctctcactgttgttatccctctcacgttcacataggggcacacgcagggccagcttcatgggtgtgcaacctgtgcagccactcagaagggccccatgctgggtttaatgcttggctgtcaccatcatgaaattaataatggttgaacaggggccctgcgtttccatcttgcaccaggctctggcgggtctggttgcctgcttgcctctccttattcttgtcttactcctcactcttactctgggcatctgtgtaggaccataggggcctcaattcaaagtcttgctttgctgcttgctagctgggtgacttgggggtgactcaccgaaatggtttccctgtttgttagggaataatgatggcccctgtttcagagn

SEQ ID NO: 15245 - DNA, 456 bp, Homo sapiens
  misc_feature (1)...(456): n = A,T,C or G
catcgagttcgatagcccangcggnggaattcctggtctcgaactcctgacctcaagtgatccacctgcctcagcctcccaaactgctgtgattacaggtgtgagccaacatgcctggccctaagacaatttaaatacagcaaactttctggtttggtcaatgtggtaatgcatgaatctagagatactgaatcttatctttactgctgattttatgctatttcccatagaatagcagaaaacaagtatcccttagtcaaaaataagaaaatccacaggctgtatgagaatcttataacatgtttatccaggaatgcttatatgttggttccaaagagtcattgaacaatttctcataaaatctttggataagagggagagatgagggttgcgtanggatttaatgaagtgggtgtctaacccttccaaagctgttttcaaaggttgctcattgan

SEQ ID NO: 15246 - DNA, 466 bp, Homo sapiens
  misc_feature (1)...(466): n = A,T,C or G
ngttgatncccctntnnnncctcgatanccntagtnagtgtgcnggaattcgtttaatccttctgtgccatatttatcataaatgtcccgtttctcatcatttgataatacctcgtatgcctcagctacttctttgaattttctctctgcttcttctttattttctggatttttatcagggtgccatttaagtgccactttatgataagcttttttaatgtcctcaggtgaagcatatctttgcagtcctagaacttcatagtaatccaccatgttttaacagatagttggaagtgggtgtgctgggtattgagaaccgtggtttcctcagctcaagctctgctggtggtggtgatagaggtagtgactgcaaataggtacacttttatgttaaagacaatgttattaccatgtgctaagagatgaggatactgattatgtggcaagcagagttacaaatatgtca

SEQ ID NO: 15247 - DNA, 454 bp, Homo sapiens
  misc_feature (1)...(454): n = A,T,C or G
gcggaaattgagacattgnanatttgcngaccactatccatgtggtggaattcgagccaaagccaaggaagcagaactgttgaagttttggcttaggaaccacttgacaaagatttgtttagaagccattacagatggttaaacagtacccctaatcagctgcattattttcttaagaaattaatctctaccgtctttataactatattcttttacttattatttttttgagatggagtttgctgtgtcactaaggctgcagcgcagtggtgtgatcttggctcactgcagctttgaactcgtgtgctcaagcagttctccccacctcagcctcccaagtagccaggactacaggcaagctaataaatgcctggctaatttatcttttctagagatggggcctcactgtgttgcccaggctggtcttgaactcgtggcctcacatgatcttccc

SEQ ID NO: 15248 - DNA, 456 bp, Homo sapiens
  misc_feature (1)...(456): n = A,T,C or G
cttgacattgatnacactagcccangcggnggaattccgacacttctgaaatgttttctcctttggcacatcggtttgaacatccccttatgtttatggtgtacctcaaaatctggtccttgcagtcggggtgatatgacacatctgttgtctaatgtacctactgtgtgctcacggacaaagtcaaataattaatctgggccgggattgttcatactttcacagttcggttcggcattgatctcttcttgcagaaggcctatattgggaccaaactgggaatgcaacagggcaaagttggtctaaaaatcctctgggaattttccatttggcaattaaattttctgtagattacatctctctatcaattaccagtgtggcttttataatgttataaaatctgagcatagccagttacatttcttttaccctgagtctctgggtctttatctgaaa

SEQ ID NO: 15249 - DNA, 455 bp, Homo sapiens
  misc_feature (1)...(455): n = A,T,C or G
catcgacgtcgatagcccangcggnggaattcgntggtgaaaattactgatggctctccttccaaagtaagtaagagtttctgtaggcttaatgtttattactgaaataataaccttgcttaactatttaataatttactattatcagttattgtataatataaattattgtaatatttaataaaatatatgactattaccagttcttggtttatcttatgagtaagtatacatttacctctttgggaagagccaaaatcttcaagcaaaagacacatagttatgtgtgtgtatatatatgtacacacacacacggattaaaacttcttatataaaatcactgtagtagacacaagagctctgataggtaacatgctattaaaaagaataacattgaggccgtgcacggtggcttacgcctataatcccagcactttgggaggccgaggtaggca

SEQ ID NO: 15250 - DNA, 484 bp, Homo sapiens
  misc_feature (1)...(484): n = A,T,C or G
ctcgaccccctnnatagtagatcactagtccagagcggtggaattcgctgacttcacgattctcacaggcccgctcaatgcggacagggtacgagatgctcacgctctcgaatgctgccgtttggtatggtctcttccaacatcctgtatcagcattataaaataaaatggatacttcaagctttgccttcacttatttctttgctttttaaaaactatttgtaatgtaattttaatgcattttttacaggcccagtaatggttaaatacgtcagcttactgaataattttaactatttattcttctaaggatacagcttgtctctggattttccagtcttaattttatattttattaatctattttaatgcttgcttttcccatttatagacgttgtagcagtaattgcaagaagttcttgagctgaattcctgttgtgacaacttcctataattacagtagataactttttcttttagtcgt

SEQ ID NO: 15251 - DNA, 492 bp, Homo sapiens
  misc_feature (1)...(492): n = A,T,C or G
ntttggagactcatgatcactagtcagtgaggtggaattccgaccggtggcagcatctcctggacctcattgcagccagatacaggggctaaggttgaggcttgtccatcatcacgcacacattgcgtggcacagcctgtgctcagactccaaagcgtgtgtcctggagtgctgtgccctcctgcctctcaagtttgtgacttccttttccctgttagagagaagacagttaaatggaagataagttctgtttttgatctcgacaatctaatttctcagttctttgtaaatgacttacaatgtgacagtgactgtgagagtcaagataaaatgacagaactgaaggagaacttctcctttgagaagttcaggatgggaatggagtaaaacaatgagataaataggagctctggaaaaggcactataaagagatggaaataatattttagcttaaactggtctcggagtttcaacaaatgtatattttaaaaa

SEQ ID NO: 15252 - DNA, 457 bp, Homo sapiens
  misc_feature (1)...(457): n = A,T,C or G
aatgagancctattgagtgccgtggaattcgngaaagatcagtttggcttcattaactatgaagtaggagatagcaagaagctctttttccatgtgaaagaagttcaggatggcattgagctacaggcaggagatgaggtggagttctcagtgattcttaatcagcgcactggcaagtgcagcgcctgtaatgtttggcgagtctgtgagggccccaaggctgttgcagctcctcgacctgatcggttggtcaatcgcttgaagaatatcactctggatgatgccagtgctcctcgcctaatggttcttcgtcagccaaggggaccagataactcaatggggtttggtgcagaaagaaagatccgtcaagctggtgtcattgactaaccacatccacaaagcacaccattaatccactatgatcaagttggggggaatctggtgaagggttctgaan

SEQ ID NO: 15253 - DNA, 468 bp, Homo sapiens
  misc_feature (1)...(468): n = A,T,C or G
ggggngcttcgtagacactagncattgtggtgcactaccacagcaggagcctgtctcacaaacaaaaaaaggtctctgtagatcttcaagttgacctacagagtcaacatgatccctctcagaatcccaggtggacttttcacagaaattgacaagctagtcctaaaatgtatatggaaactcaagggactcagaatagctaaaacagttttgaaaaagaagaacaaagttgtaagactcaaactttctgacttcaaaacttactatacagccacagtaatcaagactctgatgctggcataaggatagacatataaatcaatggaataaaattgggaatacagacataaatccttagatggtcaagtgattttcagcagggcaccaggaaggacagttacgtggagaaagaatagtcttcaataaatggtctataaacaaatggatattcacatgcaaaagaatgaa

SEQ ID NO: 15254 - DNA, 432 bp, Homo sapiens
  misc_feature (1)...(432): n = A,T,C or G
gagcgggagatggccgagatgcgggcaaggatgcagcagcagctggacgagtaccaggagcttctggacatcaagctggccctggacatggagatccacgcctaccgcaagctcttggagggcgaggaggagaggctacgcctgtcccccagccctacctcgcagcgcagccgtggccgtgcttcctctcactcatcccagacacagggtgggggcagcgtcaccaaaaagcgcaaactggagtccactgagagccgcagcagcttctcacagcacgcacgcactancgggcgcgtggccgtggaggaggtggatgaggagggcaagtttgtccggctgcgcaacaagtccaatgaggaccagtccatgggcaattggcagatcaagcgccagaatggagatgatcccttgctgacttaccggttcccacca

SEQ ID NO: 15255 - DNA, 454 bp, Homo sapiens
  misc_feature (1)...(454): n = A,T,C or G
cctgccttaattgcgctcgcacangcggnggaantcggaaaaagaagcttctttatgtttctcataactcaagttctcaggactccttttatttcatccactgactcattaccagaaagactaatacacattgtgtttttccctcctatggtttattttgcccaatcctctttgttagttatgatatccaaggaaatccttagatttcagtgtgggaactggttttcctaatatttaaatagaaaaacatggtttttgttaacatattgtttgattgtttttaattaataaattatatttctgtagatttgatttcattttcttgccactgtagacataattgaaaattatcgtttgcttttaaaagtacactgtgtgacactctactcaatatcacttaaaaaatcaattgtagttagctttctggaatggaaggcttaaggaaaaattaatt

SEQ ID NO: 15256 - DNA, 456 bp, Homo sapiens
  misc_feature (1)...(456): n = A,T,C or G
catagtagtacgattacccangcggnggaattcctgccaccacagctgctcctgctgctgctgcagccccagctaaagttgaagccaaggaagagtcggaggagtcggacgaggatatgggatttggtctctttgactaatcaccaaaaagcaaccaacttagccagttttatttgcaaaacaaggaaataaaggcttacttctttaaaaaaaaaaaaaaaaaaaaaaaaaaaaaaaaaangccgcccctttaattaaaagggccccttaaaaccccgttaaaaaccccggaggggcctttttattgcccacccttttgtggttcccccccccccgggcttttttttgaccggggaggggccccccccccttgttttttttaaaaaaaaaaaaaaaatgccccccctttgtcggagggggggtctttctttatggngcnnnnnnnnnnnnnnnncn

SEQ ID NO: 15257 - DNA, 479 bp, Homo sapiens
cggcactataccctgataccctggaagcggccgggcagaaagaagaagagtctggagaacctgaacaggctgcaggtgatgctccttcaccttacattagcatttctgcagagagcgcagcatattttgactacaaggatgagtctgggtttccaaagcccccatcttacaatgtagctacaacactgcccagttatgatgaagcggagaggaccaaggctgaagctactatccctttggctcctgggagagatgaagattttgtgggtcgggatgattttgatgatgctgaccagctgaggataggaaatgatgggattttcatgttaacttttttcatggcattcctctttaactggattgggtttttcctgtctttttgcctgaccacttcaactgcaggaaggtatggggccatttcaagatttgggctctctctaactaaatggatcctgattgtcaggttttccacctatttc

SEQ ID NO: 15258 - DNA, 444 bp, Homo sapiens
  misc_feature (1)...(444): n = A,T,C or G
gtgtgggntggnattgagnccctngnattgtagaccttagtcagtgcggtggaattcgacggcccaggccctggttctctgcccagcgaagcaggagtagctgccgggccccacgagcctccatccgttctggttcgggtttctccgagttttgctaccagccgaggctgtgcgggcaactgggtcagcctcccgtcaggagagaagccgcgtctgtgggacgaagaccgggcacccgccagagaggggaaggtaccaggttgcgtcctttcaggccccgcgttgttacaggacactcgctgggggccctgtgcccttgccggcggcaggttgcagccaccgcggcccaatgtcaccttcactcacagtctgagttcttgtccgcctgtcacgccctcaccaccctccccttccagccaccaccctttccgttccgctcgggcc

SEQ ID NO: 15259 - DNA, 473 bp, Homo sapiens
  misc_feature (1)...(473): n = A,T,C or G
aaaataagagtcgatncccctntnanaattgataaccctggccagngngcnggaattccaggaccagaaacaggacttactatttttggtcttggggtagagattcttttttctccccattcccaagggtagaaagactgcaattttttatgcttatgtttgtctaaactttctgttaagtcgctatcaacagctggactcacttgtgcacttggacacgactgagtttgtcctgagcaattgtggtagaattgacctcgaggtgcccaatctataatagttccaaattcattgttttgtaatatcaccgcactattggccacacattcttcccaaactaaaacttctgtattttttgattctttgggaatttccttggggcaaggtttccctttaggtctaaattttaatgatctttgataagaaaagtcttgtaaataatttacccgtggcctgagtgacatcccgcttac

SEQ ID NO: 15260 - DNA, 451 bp, Homo sapiens
  misc_feature (1)...(451): n = A,T,C or G
nactgangaacattagtccagngcggtggaattccatgcttgtaattccagcactttgggaggccaaggtgggtggatcatctgaggtcagaagttcaagaccagtctggccaacatgatgaaaccccgtctctactagaaatatgaaaaaaaaaaaaaaaattacccgggcgtgggagcacaagcctgtaatctcagctactagggaggctgaggcagggaaaattgcttgaccccaggaagcggaagttgcagggagccgaaatagggccactgcactccaccctgggggacaaagcgagactttttctctaaaaaaaaaaaaaaaaaaaaaaaattgggggggcccgggggggggggggtttttttagggggggaaattaaaccccccccttaagggcctccaaaagggggggggtttttacccaaaaatttttccgttttttggggg

SEQ ID NO: 15261 - DNA, 476 bp, Homo sapiens
  misc_feature (1)...(476): n = A,T,C or G
aggcnnnnnnttttaaccggaacgtgngcaangcanncnnnnnnntnnnnnnnnaantcacaagctgggaggccccagacccagtttgtacaaaatccataaccttctttcctgactggccccatcccagcctggacctcagggccctggagcctgagtaggctgggccagagtcctgtcctgcagaaagactctcaaatgaggaggtggcctgcgatcaccaagcctggtacacttgccacacactcctctgtcctcaacccactcgtggagaattggctctcaggagccagtgctcataagagttcctttcagctccagcagccttagctgccagcctgacatgggcatggggttaaaaatgcctcctggaattaggagtagagaatccgatgctgtgggcacccacatttaaattaaataagcaatcatctggccagagccctaggagcggctgtatgtgtcctcagtcatcn

SEQ ID NO: 15262 - DNA, 494 bp, Homo sapiens
  misc_feature (1)...(494): n = A,T,C or G
tggcgtctcngnnnagaanaanacattgagacccatcgattgtagcncactaggccangtcgnggaattcgcgcgtggatttcacctcaccctttgtaccagatgttgagtgaccagctctgtggccctgtgtcgtcagaggcttgtgattaactgtggcggcagacacagcttgtccacagcttgggccaggcttcccctgtcctcccaccggtcggctgcttggcaaggctgttcaggacgtgcacttccccaagtcggcactgagtggcccagcaccgcctagccctgccaccccactgccctcctgggccttctgctggatgggcacctggggggttctggtttttacttttttaatgtaagtctcagtctttgtaattaattattgaattgtgagaacatttttgaacaatttacctgtcaataaagcagaagacggcagttttaaagttannaaaaaaaaaaaaaaaaaaaaaaaaaaaaaaaaaaaa

SEQ ID NO: 15263 - DNA, 508 bp, Homo sapiens
  misc_feature (1)...(508): n = A,T,C or G
cgagtcgtcccaggggtnnnnnnnntatgaaaccatccgcangngcnattgatnatcntacgcaagancctgagacaggagaatcacttgaacccgggaggcagaggtgcagtgagccaagatcactccattgcactccagcctgggcaacaagagcaaaactctgtctcaaagaaacgaaacaaaacaagaaaacacatttgataccaactcataaccaagtctggattacttctgtagctcattatcactgataaccaagagttgattaatcaaagtagactacctgtcagtctatgtacagaactaaagataatccttattcttggttgtcgagtacagttttaggaaatggatcatcttaaaatagggtaatacggccttgtgcagtggctcacgcctataatcccagcactttgggaggccgaagcgggtggatcacctgaggtcaggagttcgagaccagcctgaccaacatggagaaaccccatctctactaaaaatacag

SEQ ID NO: 15264 - DNA, 459 bp, Homo sapiens
gactcacactgatacctttgaggttgagaacctctaaattccggtatgcgggaatctttaaaaaaagtgaaggacattgattatcctaatgtaaaagaatctcattggttgtccagtttggaggctactcattggatagaacatatcaagctcgttttgacaggagccattcaagtagcagacaaagtttcttcagggaagagatcattgcttgtgcattgcacagacggatgggacaggactgctcagctgacatccttggccatgctgatgttggatagcttctataggagcattgaagggttcgaaatactggtacaaaaagaatggataagctctggacataaatttgcatctcgaatagggcatggtgattaaaaccacaccgatgctgaccgttctcctatttttctccagattattgattgtgtgtggcaaatgtcaaaacagttccctacc

SEQ ID NO: 15265 - DNA, 429 bp, Homo sapiens
  misc_feature (1)...(429): n = A,T,C or G
atcgtagacatctgncttggcggtcgtattcgaattgagaagtaattagtatcttggaggaagtatttcatgaagtcatctttgaggtgctttttgactagtttaacaaagcttctgttaatgcctccaaatttaggaatctttttaaaacgagaataattgttacaagagtggaaactttcaagtaaatagtgtggaaaaaatataatgtacatcaattttacaagtcatgaatttaggagatgccaagaatgtgcttaatttaaatactttttcctagtaaagacatttctaatgtgttaaaataagaatttttccatatacttcaaagtgcttaaaccaaaagtaagggttatgtttatgtggcaactcatgaaatacatctttcaattaaggagtgaaatgttgcctgcgatcatcaattacatc

SEQ ID NO: 15266 - DNA, 504 bp, Homo sapiens
  misc_feature (1)...(504): n = A,T,C or G
aggcggnnnnnnnncctgagatcgatgcaatagtggaggaattacacactggttgnggctagctgttcccagagtccaatcctttatccccaaacccgctggataagaagataggcaaagagggaatcatatcgtggtgtgacaagaacggtagtgtgagtgggcacaggggactctaaggcgagggtggagagtggaaaggtggagtttgtgcggcatcagtataggttcttaaaggtttccctcccacacaaagccaccctcctgctgctggttgagagcacctggaggtgaaggctcangggaaagggaggcagggaaggaccatgatgagatgtctctgcctttcccagcgccatcctttacctaaatggggacttcgatggcggaaacttttatttcactgaactggatgccaagaccgtgacggtgagtgctcccttgtccttgtccctgggagataaaaagtctgttttctacagctgatgttcccaaagtgcagtg

SEQ ID NO: 15267 - DNA, 447 bp, Homo sapiens
  misc_feature (1)...(447): n = A,T,C or G
nctcgagtacattagcccagngcggnggaattcaacttcgcccgcgtctctgggcttttgctctgtcaggctggtggcgttttggtgtcttcgtttgttatggccgctgctgtcgctatggagacagatgatgctggaaatcgacttcggtttcagttggagttggaatttgtgcaatgtttagccaacccaaattaccttaattttcttgcccaaagaggttacttcaaagacaaagcttttgttaattatcttaaatacttgctttactggaaagacccagaatatgccaagtatctaaagtaagtttaatttttataatcctaagcatgtgtatactttattatataatagatttcttagtttcacattggcaaaaatgtatttggaatctctccacttctttttgttatcaccgtcttaatacaagacaccctcatctctaan

SEQ ID NO: 15268 - DNA, 482 bp, Homo sapiens
  misc_feature (1)...(482): n = A,T,C or G
ggtggcccccnnaggggnnaactgagaccatagaatgagcgctattagncagngcggnggaattctcctcagctctgtccacgcttcgataggcctgacgcagcccccatcccagggccgccctagcaacttcctgtacatatgactgtaaaatggtaaacgtgtgtattatatctggcctcgttatatagtgtatatatatgtatacatatacatatatataatatatatgaagactgtaaatgttaagacgactagtgttcttattagtatattgcttcacactgaagattgtgtgtatcgagctgtttctaaaagatgtttattttccttaagagtaaaaaacagtcattgcattcagaaaaaaaaaaaaaaaagtcaataaagatacaacgattgttttggaaaagaaaaaagcccaccccatggcctccctgagtatttaaaaaaaaaaaaaaantnacggtgcgcggtggctctca

SEQ ID NO: 15269 - DNA, 532 bp, Homo sapiens
  misc_feature (1)...(532): n = A,T,C or G
gcggtggaattcggcgcttcgggagccgcggcttatggtgcagacatggccaagtccaagaaccacaccacacacaaccagtcccgaaaatggcacagaaatggtatcaagaaaccccgatcacaaagatacgaatctcttaagggggtggaccccaagttcctgaggaacatgcgctttgccaagaagcacaacaaaaagggcctaaagaagatgcaggccaacaatgccaaggccatgagtgcacgtgccgaggctatcaaggccctcgtaaagcccaaggaggttaagcccaagatcccaaagggtgtcagccgcaagctcgatcgacttgcctacattgcccaccccaagcttgggaagcgtgctcgtgcccgtattgccaaggggctcaggctgtgccggccaaaggccaaggccaaggccaaggccaaggatcaaaccaaggcccaggctgcagccccagcttcagttccagctcaggctcccanacgtacccaggcccctacaaaggcttcagagtnagatatct

SEQ ID NO: 15270 - DNA, 569 bp, Homo sapiens
  misc_feature (1)...(569): n = A,T,C or G
ngaattgatncccctnnnnnnaatcgaacaccagtccatgtggtgcaattccccggctctcttttatttttgtcttttttaaactgtagaccatttccaatgtgttttctgctctttggaatgcctaacatttcccctagatctgccttatttgtcttccctgcttctcttgttgaccaagaaaaataaaaataaaactgtgtacaccccagtgacttgtcagtcttgtgacaatgagcccgtccaaactgcttcaagtcttagtttggaaagaaggacctcggtttccgacattgtcgtagaactggaatttgggggcattggaaatttaagaaacttaccaggtccccgtgcttataggtagcatcgcccgaggggagagagactgacactcctcccattgtctctccagcgatcgcaggagggtttactgttgtctccctgccctgctgtgctgtttggttttcgtcacaaagtgaattgccagatcaaatagaggctgtgggtttccaagcctcgaaagctttaaggaagatgaaatgcagggtgttgcaaccttcacacgcctg

SEQ ID NO: 15271 - DNA, 455 bp, Homo sapiens
gttgcaagtgccttaaattcatggcatcctattaaaaaaacaaatttggtgttatgctgcatgacaaagacaaacacacctcaaaatgttgtcctttcttagcttgctgcgttttacagttctttctgctaacaatttataagcctttattatataatattgatgaattacagaaatgatgaagttgttctcttatttctgttaaatgtaccagagctgtgtatctgttaatgagatacagcgtcatttctgtgaaatgtataaatgtatgtgcaggtcaaattaatatatgacattctatcagtctgtatacaggtattcctgttttgctaagctgtgcagattctgtaaaaataaattagtgcagtcaagttctaacatatctcattttatagactccattgacgatggtccaaccgaaaagaaaaattggaaatgactgctaaccagacctc

SEQ ID NO: 15272 - DNA, 431 bp, Homo sapiens
caaataatgagttcttttatttgaggtatgccattttgaagactgagacgttggagttttatcctagaggataaaggaaatctttgggaaagtcagtattttatatagcaaaaatatgaacctcaaactgaatcctctaaaggccccatacaatgaagtagacattggtggaaacatttacacccagtcagcttgaagagtttcaaatggaccctaccactgagaaatcaagatggcagtctactatggggaattgaggaaaaatggattaatacaagagtcctgtgataatatacaaccaagacagggttcttttaacatggattccatgcagtgaatgaagacataggtttcttacccaacacaaatggacagtggatttgactttctaaagactttttttgtggacattttgacatttggagaagaaa

SEQ ID NO: 15273 - DNA, 473 bp, Homo sapiens
  misc_feature (1)...(473): n = A,T,C or G
gtagaaaacatcttgagacactatgaagngcggtggaantccgcgagtgggagcaccaggatctcgggctcggaacgagactgcacggattgttttatgaaaatggcagacaaaccagacatgggggaaatcgccagcttcgataaggccaagctgaagaaaacggagacgcaggagaagaacaccctgccgaccaaagagaccattgagcaggagaagcggagtgaaatttcctaagatcctggaggatttcctacccccgtcctcttcgagaccccagtcgtgatgtggaggaagagccacctgcaagatggacacgagccacaagctgcactgtgaacctgggcactccgcgccgatgccaccggcctgtgggtctctgaagggacccccccccaatcggactgccaaattctccggtttgccccgggatattatagaaaattatttgtatgaataatgaaaataaaacg

SEQ ID NO: 15274 - DNA, 529 bp, Homo sapiens
  misc_feature (1)...(529): n = A,T,C or G
gcggtggaattcaagagagattgcttaatgggtataaacctgtagttaggtaaaaggaataaattcgactatgcgtggtggctcaggcctgtaatcccatcactttggcaggctgaggtgggtggatcatgaggttaagagatcgagaccattctggccaacaaggtgaaaccctgtctctactataaatacaaaaattagctgggtgtggtggcgcacgcctgtagtcccagctacttgggaggctgaggcaggagaattgcttgaacctgagaggcagaggttgcagtgagctgagatagtgccactgcactgcagcctagcaacagagcaagactctgtctcaaaaaaaaaaaaaaaaaggggaatagctttttgggttgagaaccccagtcggggggctttattaaacaactgtttgtggtatttttaaaaatagttaaaagacaacattggatgggctcccccacacccaagggggggggagagggaacactaaaatcccctgaggggacattgacacattttn

SEQ ID NO: 15275 - DNA, 451 bp, Homo sapiens
  misc_feature (1)...(451): n = A,T,C or G
gtgcggggnnnnnnaattggagaccattagnnattgtagaccattataccgtgcggtggaattcacagtctacccccaggaaatgtgttggctaggtgacaactttttgcccaagtagggaggaaagttagtctggtcaccaggcagcttctaatgtgaatcatctgcagttgaataagaaaaaacccctacagcatttatcatgggtaggtaatgatgaaacactgcatctttctctggtccacagtgccccaactgcaaccaggtttgtttctgcggttcagagaagaaacagcttgtgagtttttacctctgggctttgtggattaaggcggttgtcagagagggaagtaatgtattattttccatctctaaacactcctcaacttggggcaacaaaagtagaaaaatattaatcaaatgctctcccgaaagggtggaagggaggagg

SEQ ID NO: 15276 - DNA, 494 bp, Homo sapiens
  misc_feature (1)...(494): n = A,T,C or G
natcgagttcactagcncttgcggnggaattcgcacccacaaatgccacatatcctatgcctactgccaaagaacactatccagtatcatccccatcttccccatcaccaccagcccagccaggaggggtttctagaaacagccctttggattgtggatcagcatctccaaataaagtggcatcttcctccgaacaggaagcaggtagtccaccagtagtagaaacaacaaacactagacctccaaacagcagcagttcttctgggagttcatcagctcattctaatcagcaacaacctccgggatctgtttctcaggaaccaagaccacctcttcagcagtctcaggttcctcccccggaagttagaatgactgttcctcctttagcaacaagttctgctccagtggcggtgccttctactgccccagtgacttaccctatgcctcagacaccaatgggatgcccccagcctactcctaaaatggaaaccccc

SEQ ID NO: 15277 - DNA, 486 bp, Homo sapiens
  misc_feature (1)...(486): n = A,T,C or G
gaatgtccggggatggannanattgagaccctaggtagagnggcggaattcattagccttcgcggggcaaaatggagctcgaggccatgagcagatataccagcccagtgaacccagctgtcttcccccatctgaccgtggtgcttttggccattggcatgttcttcaccgactggttcttcgtttacgaggtcacctctaccaagtacactcgtgatatctataaagagctcctcatctccttagtggcctcactcttcatgggctttggagtcctcttcctgctgctctgggttggcatctacgtgtgagcacccaagggtaacaaccagatggcttcactgaaacctgcttttgtaaattacttttttttactgttgctggaagggtcccacctgctgctcataataaatgcagatgtatacgccccgggaacaagacagacttcctctcccttcggactcacagcctttgcagaagtcagct

SEQ ID NO: 15278 - DNA, 480 bp, Homo sapiens
  misc_feature (1)...(480): n = A,T,C or G
nnnttgaattaccctggaanannncgnnnnaanactgangaccattatnacangcggnggaattcggggcacacctgtggtcccagctctttgggaggctgaagtgggaggatcaagagcccaagaagcgcagattgcagtgagccaaggttgtgccactgcactccagcctggctgacagagtaagaccctgtctcaaaaacagaacaaaacaaaaattanctgggcgtggtggtgggtgcctatagtcccagccactcagaaggctgagatgggaggattgcttgagtccaccgaggtcaaggctacagtgagttgtgattcagcctggatgacagagtaagatctgtttcaaaaaaaaaaaaaaaagggggcttttttaaaaaaaaacccttaaagggcccgatttttattcaaaagtttttttttggggggccggctaaacccctggggaaataaaaccggccaaaaaatggcctg

SEQ ID NO: 15279 - DNA, 488 bp, Homo sapiens
  misc_feature (1)...(488): n = A,T,C or G
aggaggtncccnaggtgggccncaactgggcctnctttgagacattagaccangcggtggaattccccagtgctaccgagacatgggtgcccggcaccgcgcccgagcccactccattcagatcatgaaggtggaggagatcgcggccagcaagtgccgccggccggctgtcaagcagttccacgactccaagatcaagttcccgctgccccaccgggtcctgcgccgtcagcacaagccacgcttcaccaccaagaggcccaacaccttcttctaggtgcagggccctcgtccgggtgtgccccaaataaactcaggaacgccccggtgaaaaaaaaaaaaaaaaaaaaaaaaaaaaaaaaaaaaaaaaaaaaaaaaaaaaaaaaaaaaaaaaaaaaaaaaanaaaaaaaaaaaaaaaaannnnatatannnnnnnnnnncccattttttaaaaggggtttttaaaaaatttttttttttttttttt

SEQ ID NO: 15280 - DNA, 480 bp, Homo sapiens
  misc_feature (1)...(480): n = A,T,C or G
aggagtncncnaggagnnccncactgtagacatctgacagcgttgnggaantcggaattaaagagtatatgcaaaaaagtggaagacagtgaacaagcagtagataaactagtaaaggatgtaaacagattaaaacgagaaattgagaaaaggagaggagcacagattcaggcagcaacctaatgacagtgaagtggacatgtttggtgactatgatagctttactgaaaactcctttatagctcaagttgacgacctggaacaaaaatatatgcaactccctgaacataagaaacatgctacagactttgccactgaaaatctttgctcggaaagtatcaaaaacaaactcagcattactaccataggcaaccttactgaattacaaactgataagcacacagagaaccagagtggatatgaaggtgtcactattgaacctggagctgatcttttgtatgatgtaccttcctcacaggc

SEQ ID NO: 15281 - DNA, 477 bp, Homo sapiens
  misc_feature (1)...(477): n = A,T,C or G
ggagggcccaggagcccccactggnccctactgagacattagacagtgcggtggaattctgtgcatgtgacaattcttggtctctttctcttcaacacaaggactctgtctgtgttctccttgtgtgtcctccctatgtgatcgacattctcttttcagtctgtcaactggatgcatcttttgaaatgttttggctaggaagtcaatccctccctgagattgagctgaaaacaaattgcctattaatagcacttaacattttcaaaccaccccctttaagaagaacaacctggaggctttactgttaatcattttaagtcctcatatgttaactctcaacagttctgttatattggccaggcagggattatcttctttctctaggaaggaaactgggtttcagagctatagtgactttatccttagataggtaattcaacattatgacaaatgtttgtgtaggcactgaggaaatgn

SEQ ID NO: 15282 - DNA, 443 bp, Homo sapiens
  misc_feature (1)...(443): n = A,T,C or G
tggcggggnnnnnaattgtagacattagtcttggaggtcgaattcacaaattcgagcatcttaaaatgattcaacaggaggagataaggaagctcgaggaagagaaaaaacaactggaaggagaaatcatagatttttataaaatgaaagctgcctctgaagcactgcagactcagctgagcactgatacaaagaaagacaaacatcgtaagaagcaatagtttctcttactattctgagagccttatcattctacatcccatcttcctgtgagattgtctttgtagcatttaactctaattgcagttctctttttaaaaattggcttgcttattgtatattttccccaactaaagcgtgaactcctagcagggcgtggtggctcatgcctgtaatctcagcactgtgggaggccgaggtgggtcgactacctgaggtcaggn

SEQ ID NO: 15283 - DNA, 404 bp, Homo sapiens
  misc_feature (1)...(404): n = A,T,C or G
gggatgagtaatgtgtttttagttcgttgagtttatccattcttcaatcccctaaagccttcagctgttctttcatatgtggccaacattttaagtacagtgtttgcttttataagtcggtgttacttggatgtcctataaaatacccactttttataaagatgatatttataacctaggaactcatgcctgtcttggctgcagtccctgtacatctaatatatactgatttgtttgcccccagagaatttttaaggtatctgcctatatcgtgatcttttgaaatggtaaataaatctggtgcattaaaaattannaaaaaaaaaaaaaaaaaaaaaaaaaaaaaaaaaaaaaaaannngggggccccttttaattaaaagggcccctttaaacccctttaat

SEQ ID NO: 15284 - DNA, 480 bp, Homo sapiens
  misc_feature (1)...(480): n = A,T,C or G
nattgaacatcgatagccntacccagngngcnggaantctcacactgcagacacccctttccagccacaatccaccatcatcctgacgatcccacaactgggacagaggctacatctgccctagggaggtccttcagaatctgtggagcaagaaaggatttggggaagcttggggactgactccagagccccctcctaagaaccatcaccaccactcagccaatctgttctgggccctgattttgccacacctccatcctgtagcccattctctgaccccaaggagtggcagaagatcccttcactcagagaagcaaggctgatattagcttgttgaatgtaagagacacaaatgaagaagaacaaagagcctgagaaagcagcaagaggacatgatgaaaaatacgtggagttgatgagaaaggggagccaaggctttatacgtctaaagaaaatattcagtagctgaatccgcccagt

SEQ ID NO: 15285 - DNA, 441 bp, Homo sapiens
  misc_feature (1)...(441): n = A,T,C or G
ggcggnnnnnnaatcgtagaccctagtcttggaggtcgatattatgtaaaatagtaatgtagtataaaatagtaatgtaacattatataagtaatatagagatgatttagaatataggagagaatgggcacaagttatatgcaaatactatgccattttatatcagtgacttagagggagggagtcctggaaccaatcccccacggataccaagggacgaatgtaccgttatagcaaagtggagtgagacatatggagctaaggaaagaaatgtaatggatgccagggtataatggatcatttcatattcaacagaggaaagtccaaattccttagcctaggttcaattttcgtatctagtaatttccaaactctgacatacacattctatgttatggcaaagctaggttatttgctctttaactgagttgcctttctgtt

SEQ ID NO: 15286 - DNA, 462 bp, Homo sapiens
  misc_feature (1)...(462): n = A,T,C or G
aagtgaggacccttagaangcggggaanttgaatacctctcttccacattaaccatgacgaaaaaaaggaggaagacgaggatttaatttcatttatctggaaaattttgtatgagtgcttgaataaaacttgggaaccaaaatggtggtttatccttgtatctctgcagtgtggattgaacagaaaattggaaatcatagtcaaagggcttcccttggttcgccactcatttatttgtaacttgacttctttttttttctgcttaaaaatttcaattctcgtggtaataccagagtagaaggagagggtgactttaccgaactgacagccattggggaggcaaatgcgggtgtggaggtgtgggctgaaggtagtgactgtttgattttaaaaagtgtgactgtcagttgtatctgttgcttttctcaatgattcagggatacaaatgggcttctctcatt

SEQ ID NO: 15287 - DNA, 525 bp, Homo sapiens
gcggggaattaaactactggacagccaccgaacctctctggacctgtttcctgcctctagaaaaagagaggtagtgctctgcagggccacgggaggactcagtaacgacttgaaagcatcaaacacagtggagggctcatacggggtgctcagtagatgggcgcatcattttatagaatactgaggcccagagagggaaggtgtcttgtctgtggtcgcatgggggctcagtgggaaagctgggactaaaagctggccccaggctagctttgtgccaggccatcctgctcttacacaggggctgagaaccaggggcagcccaggagtcctggatggggcagcagtcatgttggatggggctggggtgttggctctccctttctgggctctcaggagtggtcagggctagccccagatctcccagaccaagaagaggagcagcctgtggggagacactcatgccctgacatgagtcagtgcatcaagagaggccatcagccagtgggattcagcaagcatgcctgg

SEQ ID NO: 15288 - DNA, 329 bp, Homo sapiens
  misc_feature (1)...(329): n = A,T,C or G
gttttgataataatttttctttggtgtttgtcttgagggacggcggtaaacatttcaattgcctttaagtatgcttgcatgctggaatgatggttctttgaatgcggcatcaaactggcattgggccacatggcagccagcatgagcctttatgccacatttataaaacatgaatgtcatgagcccactctcagggaccttacaatttggagggttatgtcagatccacaaatctcttgtatctcatcataaaggaaacctggcgtgtagcaggagatggcgtgataaccataacatattgcatgatcaatatttgtatcttcttagcn

SEQ ID NO: 15289 - DNA, 449 bp, Homo sapiens
  misc_feature (1)...(449): n = A,T,C or G
nattcgccgacccctagtctagtgtggcggaattcgctaaacccacggaacagactctctgggcaattagccatccccctctgactttggtcattgtgctggttctgatatatattttttttaatgaaaggcaactttagattttccctctatccttgctttttttcccttcacctcccacgtgtccctccatccctccccccacccctctgttttgggtatgtacaacagaagcacaaactactgaaacaaaacaaaacagcagaatgagcgttcttccgagagatggcatcgtgatgcgctatttattttccatagaaataggaagttagacggattgtctcttttctgaggggagggggtctttttgacaggagcagagttgatgtcctcaattttcatatttattggcaaaaggaagagaagaggaactttgggttggaaacaan

SEQ ID NO: 15290 - DNA, 474 bp, Homo sapiens
  misc_feature (1)...(474): n = A,T,C or G
aatcgagatccataggccagngccgnggaattcaagctgatggtgtgcccgtctacctgaaacgaggcctgcctgaccaaatgctttaccggaccaccatggcgctgactgtgggagggaccatctactgcctgatcgccctctacatggcttcgcagcccaaaaacaaatgagttaggctgcagaggactggtttgttttttggcataaaccctttgaagttcctttttcattgttaaattaaaatttttttttttacttggatggcttaacatttttgcaagaaaaataggaagatatgaagatgatgttttggtttgtttatgaaatgcatatggctttgcagagctcattcgacagttaaagccattgtttaaagaaacggngctttgctctgtgtttgngctcctgatttccctggaggttctggatgaaggctgaacacaggctttgtaatgtcagtctgtgctgagg

SEQ ID NO: 15291 - DNA, 492 bp, Homo sapiens
  misc_feature (1)...(492): n = A,T,C or G
gggctgcgccaattgaggnccntnatcgagnatcactagnccatgcggtggaattccctgtggtcccggctactcgggaggctgagtcaggagaattacttgaacctgggaggcggaggttgcagtgagccgaaatcgcaccactgcactccagcctgggcgacagagtgagactccgtctcaaaaaaaaaaaaaaaaaaaaaaaagggggcctccccctaaaaaaggaccaaaagggttggcccaagggccccaaaaaccgggaattttaccgggggggggggggaaaaaaaaaaagggtttgggccaaaaaaaacaacccccaatttaacccggttggggaaaaaaaggttttaaaaaaccccaacaaccggccccctttttcctttttcgggaaaaaccgaaaaaaaaaattttctggccggaaaaaaaaaaagggcggggggggggggaacaaaaaaaaaaaagggggggttaaggggggacccaaat

SEQ ID NO: 15292 - DNA, 331 bp, Homo sapiens
  misc_feature (1)...(331): n = A,T,C or G
tcccgcgcccaagaagggctcgaagaaagccgtgactaaggcgcagaagaaggacggcaagaagcgcaagcgcagccgcaaggagagctactccgtatacgtgtacaaggtgctgaagcaggtccaccccgacaccggcatctcctctaaggccatgggaatcatgaactccttcgtcaacgacatcttcgaacgcatcgcgggtgaggcttcccgcctggcgcattacaacaagcgctcgaccatcacctccagggagatccagacggccgtgcgcctgctgctgcccggggagttggccaagcacgccgtgtccgagggcaccaaggcn

SEQ ID NO: 15293 - DNA, 486 bp, Homo sapiens
  misc_feature (1)...(486): n = A,T,C or G
aggaggggccccagggggnnnccncttacttgagacatattgagagctatgaggaantcgtaattttaaatcaaataaactttgaaatattgtttataattttattttaataaatccaatttgaaattttaaaatcttccaggccatagcctatctagagacataactagagtaatactaagagccagaactcagctgattgtggtggcttacgcatgtaatcccaacactttgggaagccaaggcgggtggatcatttgaggtcaagagttcgagactagcctggccaatatggtaaaaccctgtctctactaaaaatataaaaattagctgggtgtggtggcacacatctgtagtcccagctactcaggaggctgaggcagaatcacttgaacccaggagatagaggttgcagtgagccaagatcatgccactgcactccagcctgggtgacagagggagactccatctaaaaaaaaaaaaaaa

SEQ ID NO: 15294 - DNA, 489 bp, Homo sapiens
  misc_feature (1)...(489): n = A,T,C or G
nttgagccctttccagggggtgattgcataccacgggctacactggagtcctgccgtagcatgattgcgctcatggatacagttggctctggaaagctcaatctgcaggagttccaccacctctggaacaagattaagggctggcagaaaattttcaaacactatgacacagaccagtccggcaccatcaacagctacgagatgcgaaatgcagtcaacgacgcaggattccacctcaacaaccagctctatgacatcattaccatgcggtacgcagacaaacacatgaacatcgactttgacagtttcatctgctgcttcgttaggctggagggcatgttcagagcttttcatgcatttgacaaggatggagatggtatcatcaagctcaacgttctggagtggctgcagctcaccatgtatgcctgaaccaggctggcctcatccaaagccatgcaggatcactcaggatttcagtttcaccctcta

SEQ ID NO: 15295 - DNA, 399 bp, Homo sapiens
tgctgcttcctgagatggggaagactgtagaggaaacaaaccaggaacgacaaatcagtaatttagctttgaatacattaggtttgagatggctagtctgtacccaaacagaccacactgtggcatctgggcagcaggatctgcagaatccagcaggatggatgctgatgccaagctgagtagacagttgggtctgtgagtctaaagctcagggaagacctcagggtctgggatacaaatctggagatcatcaccctgtccatgaaagccaagggaatgatggaagatactatgagaaaaagtgaagagaggaaagagaagaggtccatggaaggagacctgggagaatccaaccttcgattagatcaggaagaggagaagaatccagtaaaaaactcc

SEQ ID NO: 15296 - DNA, 463 bp, Homo sapiens
  misc_feature (1)...(463): n = A,T,C or G
catagagnccaatagatgaccattagtccatgcggtggaattcaattatgctaatttgtgagttctgatcacttttgagctctgaagctttgaatcattcagtggtggagatggccttctggtaactgaatattaccttctgtaggaaaaggtggaaaataagcatctagaaggttgttgtgaatgactctgtgctggcaaaaatgcttgaaacctctatatttctttcgttcataagaggtaaaggtcaaatttttcaacaaaagtcttttaataacaaaagcatgcagttctctgtgaaatctcaaatattgttgtaatagtctgtttcaatcttaaaaagaatcantnnnnnaaaaaaaaaaaaaaaaaaaaaaaaaaaagggcgcccgttcaatttaaaaggcccctttaaaccccgttgaaaaccctcaaggggcctttttagtggccacccttgtgt

SEQ ID NO: 15297 - DNA, 451 bp, Homo sapiens
ttttaattgtagaccactgtacagctggtggaattcggcagaacgagacacaacaatttgatatccacttgccagatgagccgggtgtcatcagtcgcctggctctatgcccaacctctttttgcataaacacttatggattcagccaagaggaaaagcactctgattatgaattgagcagaaggaaacaaagttctgcagataaacaccaatgaaacaaaaaaccacgaataagaaaaatgacagaaaaggagaaccttcccagaatcctcctgccagtgaacggtcaccagagcaagagcatggagtccctgggttttgaactgtgagataaggaagatgatgaaaacctccctagcagccagacttagatttttggctggactattggcttgggatagatgaaaatcattccttgtatcccctgatcttaaagtcaagactgaaccag

SEQ ID NO: 15298 - DNA, 332 bp, Homo sapiens
tagagcaccatcactttcacattcctgagtctgattttgttttgttttgtttgggttttctgaaacttaaaatgctgccccgaaaatactatatttttgagtttgtgttctgaaagcctccgtgctgctggatctttggggggaaatacaggatccttcagcactgaggtgtttaagatttgcaactagcaatgcaattttttctaaatatggggatatttacctttattaagaaattatactaaacattgatgtccttgatcattttatgttctcatattacttttgattctactatgattgtgtggtggtgaacaaagatcattacaaat

SEQ ID NO: 15299 - DNA, 411 bp, Homo sapiens
agcagtagatgaatgtgtatgtctaaacaaggactgctctgtgtcctcacagatgaatgaggtcatgctgggaattccctctgcagggaactggcctgactgacatgcagttccataaatgcagatgtttgtctcattacctttttgtatagtttattaaagtattaatatagttttaataagtaaatatttttaggttgcagaatggactcctcatctttatattcacgaaaaagcaatctgaagaaaacaaataaaagcctgtgtatttagcactgttagtgtcaccttttcaacttctgaaacactgttcattgttaactttttctcatttataaatcactgtatttattttagtagtatgcatagcatatctgtgctcttgaattaatttttatctttaacatattt

SEQ ID NO: 15300 - DNA, 330 bp, Homo sapiens
cttatactcattatataattgatccagttatatacataaaaccttttaaattgtatttttttgttattttctttttcttcttttaaaaacaaacaaacaagcaaacaaaaaaagagagaatgggaactcttgagttgcttggcatggcatggcatcttagccctgctatacaaaaggaccgtttacagtcacaaaatgtgtggcctttccagaatttcttccaagacaagggagtaattgacaaaattcctgtaaatcttttgctcactgtaatttatgaccatttatcttctttgatgtccatagctcccttatatcaagaatatcagg

SEQ ID NO: 15301 - DNA, 333 bp, Homo sapiens
tgaccattgctaacattgtggaggacattcacgctggcatttctgcatatagacatggcatttttggtagttgcctccttcatgtcacctgctgctctgatttcatagttttgttgagataagcaattaaacctgacttgttctaggataatattctgaatttgtactcctttgccaagcaggcaaaaaacagaagagatgtaattgctaccaatccataatccagtctataatgttgcgttaagaaacagcgaagctcttggattaccggccccttagcgccccaccccactctttgtttctggacaaagtgctatgggaagcagaaaaggg

SEQ ID NO: 15302 - DNA, 464 bp, Homo sapiens
  misc_feature (1)...(464): n = A,T,C or G
ggcccaattgagacttctagtccgttagatggccntcgaaagattatagcctaaaaacgagtccaattttatatcccatcctcctccctgtgccacttttcattattattattttttaaaaccattgcctgattgatgaacattttaggtcattactttttttcctgtctaatgatgcttagtcagtttttttgcacatatatatatttgtttacctgtgtgaattatgtctgcagtgaaattcttagaagtagaatcttggctggagtatttttctgggggtgcatttaatctgttattggaattcatattaatattagaattaataggctttttttttttttttcccttgaagccaccgaaaatttttggccatgggggattcccgggccaaacccccaagggtttaacccccgccttcgcgaagggtttttatataaaaaaggggtcgggtaagggggttt

SEQ ID NO: 15303 - DNA, 334 bp, Homo sapiens
  misc_feature (1)...(334): n = A,T,C or G
tcgatgcagcagatacctttacaccctggtcatcactgacaaagagaaggcagagaaactgaagcagtccctgccccccggtttggcagtgaaggaactgaaatgaaccagacacactgattggaactgtattatattaaaatactaaaaatcctaaaaaaaaaaaaaaaaaaaaaaaaaaaaaaaaaaaaaaaaaaaaaaaaaaaaaaaaaaaaaaaaaaaaaaaaaaananngnnnnaaaaaaaaaaaaaaaaaaaannnnaaacanaaaaaaaannnnnannnnnnnnnnnnncccccccccccaggagggcccacccacccaccccattg

SEQ ID NO: 15304 - DNA, 441 bp, Homo sapiens
  misc_feature (1)...(441): n = A,T,C or G
natgatgaccctttggacagcccggtggaattcagtctggacactgccatcagggttgcattggctgtcgctgtgctcaaaactgtcattttgggactgctgtgcctcctcctcctgtggtggaggagaaggaaaggtagcagggcgccaagcagtgacttctgaccaacagagtgtggggagaagggatgtgtattagccccggaggacgtgatgtgagacccgcttgtgagtcctccacactcgttccccattggcaagatacatggagagcaccctgaggacctttaaaaggcaaagccgcaaggcagaaggaggctgggtccctgaatcaccgactggaggagagttacctacaagagccttcatccaggagcatccacactgcaatgatataggaatgaggtctgaactccactgaattaaaccactggcatttgg

SEQ ID NO: 15305 - DNA, 475 bp, Homo sapiens
  misc_feature (1)...(475): n = A,T,C or G
ggcccgggggnnttttnaactgaganactgataacngtcgnggaattcgtaaaaactctccttttagtgtgttattttcttggccttcccttttaaaggttaaagtttctaacctaagaattaagtacgcgttcaggaagctgttgtctaggccttccccttgtgaatctgggttcattccaatacggcaagtaagagttggaaactttgagaacacagactataaaggcagcagcccgaacactgtcagactctaattggcgaccctgggaaacagttgccctgctattctttaaagaaagacgtttattctgatgataaaaacagttagccagactgtttttaaagcacctggcgggaagcagaaggttggatccaagcccttgttcagatttggtgcctgataagacaggggtttctctttttgtgacctttattattattattttgttaactgttggaaccagttagctgg

SEQ ID NO: 15306 - DNA, 331 bp, Homo sapiens
cttttactggagcgtgtccctgaaaaatggacaggagagctaatagacaaacaaaatccacatggaagtgtggtggctgcaaaacgaagttcacagaatttcaggcaaaaacatcatatatgtaatttaccaaacagtggaattagaagaataaaaaccacaagagttggtgaagttgaagaggaaactccatgtggagacacggcgccgtacttcagacctcccggtctactaatactgatggtgtggctggaacctggggtgtgtacagccctatccagaggatgctcctgtttcggctgattcctctacaccttgtgtggggaaggtg

SEQ ID NO: 15307 - DNA, 488 bp, Homo sapiens
  misc_feature (1)...(488): n = A,T,C or G
aggaggggcccgggnttnnnngnnnaaactgagaccattagnccagactgatggacntcctgtgaaggggactcagctgccacatgcaggacccttcccctttgccttcttcctgcctggaacatggatgtgatggctggtgctgggacagctgtcctgagagcgtgaggaaagggtcacaccctaaggacagtggagcagaacacaggaaggaccctgggcctttgctgacgcagaacgcgggaaggacgctgggcctttgctgacgcagaacgcgggaaggaccctgggcctttgctgacataccagccccagactacttaaattcagcttttttttaatgtgagaaaataaatgcacccctctctggtttaaaaaaaaaaaaaaaaaaaaaaaaaaaaaaaaaaaaaaaaaaaaaaaaaaaaaaaaaannnnnnnnnnnnnnnnnnnnnnnnnnnnnnnnnnngggcggctcggggggggggggg

SEQ ID NO: 15308 - DNA, 463 bp, Homo sapiens
  misc_feature (1)...(463): n = A,T,C or G
gggggtccaatcgtagacattaattgatggcgtgaatacgncactttgntcacctggatgtccccaagactctagcttcttctatcagtggttggtctgatagaagaggtaaaaattgctcttgaaaatgtcctacaatttatgcagtttctttgataatatttttctgtttaaatccctgcttctgtttttggtctgttacctaaatatagttcaagtttaattctgtaagagcaaagaaatgaatttgatgaggaaattaagcatccaatggaggattggtcttgaagaccttaaaggtgctttccaacctgcactgctccagtgaaatgtggtacttttttcttttaaaagcaaccaagagagctgggaatatctgtgtacgcaaagtaattgcattttgtcccttcattttgactttcttagattcataatttgatacagtgcttaaacttccaaggan

SEQ ID NO: 15309 - DNA, 532 bp, Homo sapiens
  misc_feature (1)...(532): n = A,T,C or G
ccgattcattccgnganaccgaagtaagcgatgatgaggctgaagaaaaggaagacaaagattacgaataagaaaaagaagagattgagtcggaagacaaacctgaaattgaagatgttggttctgatgaggaagaagaaaagaaggatggtgacatgaagaagaagaagaagattaaggaaaagtacatcgatcaagaagagctcaacaaaacaaagcccatctggaccagaaatcccgacgatattactaatgaggagtacggagaattctataagagcttgaccaatgactgggaagatcacttggcagcgaagcatttttcagttgaaggacagttggaattcacagcccttctatttgtcccacgacgggctccttttgatctgtttgaaaacagaaagaaaaagaacaatatcgaattgtatgtacgcagaggtttcatcatggataactgtgaggagctcattcctgaatatctgaacttcaatacgaggggtgggtgactcggaggatctccctctaaacattg

SEQ ID NO: 15310 - DNA, 468 bp, Homo sapiens
  misc_feature (1)...(468): n = A,T,C or G
agggccctcnnaatagagnactagagancattacggcagagcggnggaattctaacacagaaacaaaaccaaataccacatgttgtcctttataactggaagctaagcactgggtacacctgaacataaagatgagaacgtggacactggcaactactagagcacggagagaaggaggagggcaaaggagcaaacctacctacctatcaggtatcctgctcactacctgggtgactggatcataccccaaacctcggcatcacacaatatgccatataacaaacctgaacatgtaccccctgaatctaaaataaaagttgaaattttatttttaaaaagttggatactgcatatgaatagaaagaaaagattaatgtaactgaatagaatctctgatctctggggaaaggtggattattcagtaaatgttattggagaaaggtaaaattggaaccccattttataaca

SEQ ID NO: 15311 - DNA, 495 bp, Homo sapiens
  misc_feature (1)...(495): n = A,T,C or G
nggaannnnnaaggtgggccccnnnaggggnncncattgagncccttgatcgtagacatctgaccangcggnggaattccaccaaccagccagaaattgctgaggcacttctgggagctggctgtgatcctgagctccgagactttcgaggaaatacccccctacaccttgcctgtgagcagggctgcctggccagcgtgggagtcctgactcagtcctgcaccaccccgcacctccactccatcctgaaggctaccaactacaatggtatgtctgcctccctgccctgccccaccccctcggagggcaggtgacgtggagaaggggcaggtgggccaacttaaggagtccaggcaagagcttaaactcctaacatttggaaggttgagaaaatatgtgtgcaaagtgcctattggatgcctttataaagttctttcagaacccagactgtgggttcttaaaattcagaagataagactacttgttccataaaag

SEQ ID NO: 15312 - DNA, 491 bp, Homo sapiens
  misc_feature (1)...(491): n = A,T,C or G
cgccctcgacccctttgagaccctaggaagnngcgnggaattcctggctgagcccagggtggggagatcctgggaagggaggcactggatgaagacggcacctcttcccccatggcagggtgtgagggaggcaggtttggaatggtgcgagtatggcaatctaagcaggggtctggtctctttgactccaggctggcctttggccgactgtctgctcacccagagaccttggactccggactatccatggctccgaatctaagtgctgcccactcccatgctcacacccacagaaggtcttcccatcccctttagattcgtgcctcactccaccagtgaggaagatgcctctgtctttcccacgactgccaggagatagggaagcccagccaggactgaccctccttcctccagcctgccctgacccacctggcaaagcagggcacatggggaggaagagactggaacctttctttgacagccaggcctag

SEQ ID NO: 15313 - DNA, 448 bp, Homo sapiens
  misc_feature (1)...(448): n = A,T,C or G
atttgatgacctgtagaccgtgcggnggaattccaggaaggaagctaaaaggaacccaggaggtgggcaaacatttaacttgaaagccctctggggcgtggtggcgcatgcctggctgaggcaggtggattgcttgagcccaagagttctgggctgtagcgcgttatgccgatcgggtgtcttcaccaagttcagcatcaatatggtgacctcccaggagcgggggaccaccaggttgcctaagaaggggtgaaccggcccaggtcagaaacagagcaggtcaaaactcctgtgctgatcagaaagccctctggctcccagattaaggctacactctactgctgaatgaacagagcctaaattcctgcacctatttacagttcaatcaaccacaaggcctttggccatacgcatccttcctaagcttccttatggatctggctgtcat

SEQ ID NO: 15314 - DNA, 472 bp, Homo sapiens
  misc_feature (1)...(472): n = A,T,C or G
ggccgcggggnggggncctgagaaactgataaccgncgnggaatcccgtcaacatattatttgtaatccgctttttaattttatattgaatttcaaaagttatgcatactcataaaaattcaaacaatgctgaattgaaaaaggaaaagttagtggctctttatccactttatgtcccactgcccagagatcatcaccatgagcagtttggtgtatgacattccagatacgcacacatatcttcatacatacacacatacaaatatgtatacatataacaaaagactgtaaaatataataatatgatcatggacaacttgccatttggacttactccattctttttttttaattttattttcttggactcaggtcacaaatttattcttttaaaacactgcatagtactctacagaatgggagcactttgatttatttaaccaattccttattggattgtgtcaatgcttan

SEQ ID NO: 15315 - DNA, 563 bp, Homo sapiens
  misc_feature (1)...(563): n = A,T,C or G
attaagaccttctgaaccattnannnnnagccctgtaggatgagaacccataactaaacacccattggctatttggcaaagacttttcaacatgtgtgcaggtgttcttgagctcctggagccttattgcagatttccattacccacgcctacatctgggttcataggcagtataattatcattgcagcgagaccctattaagtcctacttcccaaccaggaaaagatggcaggtacttaataggacctgacacacacccagagacaaattagttgggcactgtgctgagagcaggcacctgtgtcttccacttgaggcccaggatgtctttaggttttactgcaggataatcatttggaagtagaactgggatgttatgcttcacctcctgcagttaatgattagctaagccacttaaccaggaagggcagtgaaagggaaccactttgaatcanaaggtgaggtctgagaggcatctgcagtgacccagatcccagaaatgaagcagagaagctgttccagcccactgcactattcttctcctttctgggntcccttctag

SEQ ID NO: 15316 - DNA, 483 bp, Homo sapiens
  misc_feature (1)...(483): n = A,T,C or G
ccgccgcccccnnncnnattgannccctattgtagacatctagaccangcggnggaattcgggttgccttttctacgagcatttggaaggagtgatcaaataccgaaattgaactttctaaaacctacacatagcatgcgtttaaattctattatataaagccccaagtgctttaccttctaaaacatgcttctctataggtgcaaagttataagatatgtagaagaaaacatccatcagaatcttctggagaatatggtcagagtcttaaacaggcccagtgctgagttctttgtccacttagtcacacatcttttgtgggaatgggaaaggaaggagacagccaaactctgacaaaggcttttccttatagaataacccaaagcctaggtgagggttgatatataatgtcccatgatttaatatatgtggtttgggggaaaggacaagaaaaaactataattccacatataagaaggtagn

SEQ ID NO: 15317 - DNA, 462 bp, Homo sapiens
  misc_feature (1)...(462): n = A,T,C or G
gtcgctccataccgagaccatctcaganggcctcgaancaccgcggaagncaaggagaaggtggagctctccgagagtgctctggtggagaatgtcgacaccgatctagagatccagaggctcaagagcagcctggaggaggagagccgcagcangcgcgagctggacgtcgaggtgagccggctggaagccaggctttcggagctggaattccataactccaagtcatccaaggaactagactttctgagggaagagaaccacaaattacagctggagagggaaaacctgcagctggagacccgaaggctccaatcggaaatcaacatggcagcgacggaaacacgagacctgcggaacatgaccgtggcggactctgggaccatccatgactccacagtgtgcgcactggagagggaactggatgacctcaagaggctctccaaggacaaagacctcgag

SEQ ID NO: 15318 - DNA, 487 bp, Homo sapiens
  misc_feature (1)...(487): n = A,T,C or G
catcgacccctntngnatttgagaccattaggccagngcggnggaattcaaaaacaataccaaaaagacatattttataaaatgacaaaaaatattttacataattactcatttttgttgagtaagcaaaattacaaagtgtttttaaaaaaacctgtacaaatatgtttatgtattaaatcaccatccaaaatatttaaggaatatataaaaagatttttatgatcatagaaacatctattttcaaaacaatataaattaagcttttccccttgattcctgttggatatccatgttcagcatgacagtcagcactcgtaaatgccaagaaaagaattacctgaaaaagatcatttctccctattcaaatgagaatattttccctcggtagaatccatatacaatatggattgaaaattaagtcacgaagaatacatttagcatctttgtgttgggttctatacctaaaaattttccctcccggccg

SEQ ID NO: 15319 - DNA, 479 bp, Homo sapiens
  misc_feature (1)...(479): n = A,T,C or G
cttcgagtttcaatagcccatngncgaggaattcaggaggtatacccctagaaacacttaaagaagaaagtcagtcaagacatgttctacctgttagttttgaagtcaacagtttgcagaaaagcaactgggggttcttacttactgggcttgtgggtggcaccctggtggctgtgtacgctgtagccacgccgtttgtaacgccagcccttcgaaaagtctgtttgccatttgtacctgcaactatgaagcagattgaaaatgttgtgaaaatgttgcgatgccgaagaggatcccttgtggacatcggtagtggggacggacgcattgtcatagcggctgcgaagaaagggttcacagcagttggttatgaattaaacccatggctagtttggtattccagataccgcgcttggcgagaaagtgtgcatggatctgccaaattttatatttcagatttgtggaaggtatgtaaggcg

SEQ ID NO: 15320 - DNA, 478 bp, Homo sapiens
  misc_feature (1)...(478): n = A,T,C or G
nattgagacccntggattgagcgccgtaggctgctgctctttgggctgaaaaataggaattctcttttattgttttgtttcaattttctgagacctatccgtacctagaacacaaacttgtttttctccgtgacattcttgttttagatataaagcatcaagtatctgagcagcaagaacatttttgtgtacttgcattttataatcgtggaattcaggaaaggtcttgcaggaggtggaatccgcaaaggaggaagacaaaaacaaaacattttggagaggctattatatgctgaggacagatactttcatttccattatctcatttaatcctgtcattagtgctttcaagtaagtataagtgtgtccattttataattgaaaaacctagtgattcttgcacactgattctgtatgctggaactttgctgaagttgtttaccaggtgaagagctttgggcctgagactatggcgttt

SEQ ID NO: 15321 - DNA, 491 bp, Homo sapiens
  misc_feature (1)...(491): n = A,T,C or G
aatcgatacccttgggcagngttcaagaaccctcttgctctcgcagcatggntttcttaagtacaattctagtagttagagagatattacttttcagtaccatgaggggaaattttcgtttgaacagaaatgttcatttcatcttccagcatccatttttacttttgagacgtctgctgtggtttaatcgccactcctttgtaggtcatctctcttttctctctggtacttttaaggttgctttgttctggcactctacagttttactactttgtgtctagatgtgaatatcttcttacttgccctgcttggtattatctgcgcttcttagatctgtggatttatgtctttaactagttgaagaaaatacccatgattgtgcaaaaagagtctctcctttattctttctgctgcttagaatttatttagacctatgttaggctttctcattttatcctaaattcaagatttcttttcaatttaattttgcn

SEQ ID NO: 15322 - DNA, 441 bp, Homo sapiens
  misc_feature (1)...(441): n = A,T,C or G
agaagactctccgtatacacccccttctgattcacaaagaatgatttatgcaactttattaaagagactaaaagaagagtcactgaaaggaattattggaccagattatgtgactggatcaaatcttccaagtcattctgatattcacatttcttgtcttacgggattaaaaatccagggccctgtgtttttccttgaagacgggaaatctgctatctccttgaatgatgctttgatgtgggcaaaggtgaatccattctcacctttagggactggaatacgactcaatccattctgatagaagatttttgtccatgcttgattttttttttaaagaaaaactttcatgggttagcattaccttaatctttgttgctcaagngccaaaggttgggagaaggattgcangttgggagaggtgggaaatagcagtgattttan

SEQ ID NO: 15323 - DNA, 449 bp, Homo sapiens
  misc_feature (1)...(449): n = A,T,C or G
atttgaaaactgatgatccttatacagngcggnggaattccccggctcgagcggctgaggcaggagaatcgcttgaacccaggaggtgtaggtttttgtgagccgagatcccaccactgcactccagcctgggctcgacagtgcgagactccatctcaaataataataataataataaaacaaatagaatgtttttgtgtcatgaaacactctagcctctcccccaagcaccctcatgtatagggtgagtccatctaagtgaggccaagccctttaaccaaaacaaacatctttaaataaaattttatttgcttcgtttttggtctacatgggaccaaatatctgaatctactacatttggataattttgccaatattaccccaaatatatgctggttatctgttcgtatcactaccttgtggttatggtacttgaaggacaatttcgt

SEQ ID NO: 15324 - DNA, 448 bp, Homo sapiens
  misc_feature (1)...(448): n = A,T,C or G
gtgggttcccactgaaaccccgctacngngccagcacangcggnggaantcttgccggcaaggtagcggtggtagcaggctatggtgatgtgggcaagggctgtgcccaggccctgcggggtttcggagcccgcgtcatcatcaccgagattgaccccatcaacgcactgcaggctgccatggagggctatgaggtgaccaccatggatgaggcctgtcaggagggcaacatctttgtcaccaccacaggctgtattgacatcatccttggccggcactttgagcagatgaaggatgatgccattgtgtgtaacattggacactttgacgtggagatcgatgtcaagtggctcaacgagaacgccgtggagaaggtgaacatcaagccgcaggtggaccggtatcggttgaagaatgggcgccgcatcatcctgctggccgagggtcg

SEQ ID NO: 15325 - DNA, 483 bp, Homo sapiens
  misc_feature (1)...(483): n = A,T,C or G
ggggcgagccgcggtnnngngnnaactgaganactgagaacatacgccgngncgnggaattcctggaagggactactgatgttctgtgatacatcaggtttcagcacacaacttacatttctttgcctccaaattgaggcatttattatgatgttcatactttccctcttgtttgaaagtttctaattattaaatggtgtcggaattgttgtattttccttaggaattcagtggaacttatcttcattaaatttagctggtaccaggttgatatgacttgtcaatattatggtcaactttaagtcttagttttcgtttgtgcctttgattaataagtataactcttatacaataaatactgctttcctctaaaaaaaaaaaaaaaaaaaaaaaaaaaaaaaaaaaaaaaaaaanaaaaaaaannaaannnnnnnnnnnnannaaaaaaaaaaannnntttaaaaaaagagcccgtcgcctcta

SEQ ID NO: 15326 - DNA, 485 bp, Homo sapiens
  misc_feature (1)...(485): n = A,T,C or G
cgggacggggnngnnncnacctcgtagacatnattgaagngcgttggaattccacagtccaaaagaaaagatggcaacaaagaggaagaaaagccaacactagacctttgaaaagaagaagaaaaagaggtccaagaattcccaaagatgaaaatattaattttaaacaatctgaacttcctgtgacctgtggtgaggtgaagggcactctatataaggagcgattcaaacaaggaacctcaaagaagtgtatacagagtgaggataaaaagtggttcactcccagggaatttgaaattgaaggagaccgcggagcatccaagaactggaagctaagtatacgctgcggtggatataccctgaaagtcctgatggagaacaaatttctgccagaaccaccaagcacaagaaaaaagagaatactggaatctcacaacaataccttagttgacccttgtccggaaaactcanatatatgtgaggtg

SEQ ID NO: 15327 - DNA, 466 bp, Homo sapiens
  misc_feature (1)...(466): n = A,T,C or G
gtggctccaatgagnccctcactgatgacactagaacangcggtggaattcgacattcagccggcggttcggggcgacggactctccattccagaaccatggcccaatttgtccgtaaccttgtggagaagaccccggcgctggtgaacgctgctgtgacttactcgaagcctcgattggccacattttggtactacgccaaggttgagctggttcctcccacccctgctgagatccctagagctattcagagcctgaaaaaaatagtcaatagtgctcagactggtagcttcaaacagctcacagttaaggaagctgtgctgaatggtttggtggccactgaggtgttgatgtggttttatgtcggagagattataggcaagcggggcatcattggctatgatgtttgaagaccaatctttaacatctgattatatttgatttattatttgagtgttgttggacc

SEQ ID NO: 15328 - DNA, 499 bp, Homo sapiens
  misc_feature (1)...(499): n = A,T,C or G
naccgaaacgcctcgnannnntaccgatgccatcagcacangccncgnaannnngngaaaaagttcaacccgatgttttaagagccagaaaaacattcccaccccttgacctggtaaccccactggtggggattttctcttagagggataagataccgggaaggggaggtgaaatgctcaccactgccaaaacacgggctgcaactgcaacatcggaggatgagagggagagtcggctgtggtgcagaatgctcagcagccctcccagcagggacaggaagactgggcaggaagaggggagaagcattcaagttaaggcaaaaggcccaacgcagagcagcacactgaggtcacacctgtgagatgtggaagagaattcctgagcgtggagcgatggggttaggtgccaagatgattgcccattttgcttctgtcaaactcttgactaaagatttctggtgcattttattacataacagccagggaggttatatcacgg

SEQ ID NO: 15329 - DNA, 449 bp, Homo sapiens
  misc_feature (1)...(449): n = A,T,C or G
atagannacttgatngaccttagncagtgcggtggaattccaccgcgactggtgctgaagtgtcggcgcgtgccgggcgctccgctgggacccgggttgctcgccctgagtctcagctttctcatctgtacggttgggacaagtacagtaaccctcgcccgtcaagacgggccagggctgtggcgagggtccacgccttagagcaggcacctatcttgtgcagggccctgagacggggtctgactcagttcctgcggggaacttcaccagtgacccagtcagtgcccttcagttaaagaccaccaggagcacacttatagagtctcactctgtcaccaggctggagtacaatggcactatctctactcactgcaacctccccctcctggttcaagcgattctcctgcctcagtctcctgagtaactgggactacaggcgtgtgccaccn

SEQ ID NO: 15330 - DNA, 464 bp, Homo sapiens
  misc_feature (1)...(464): n = A,T,C or G
attgggcccccnnaatcgcgatccctagtccgtgtggtggaattcctggggctggagacggctgggggcgtgatgactgccctgataaagcgcaactccaccatccccaccaagcagacacagattttcaccacctactctgacaaccaacccggggtgctgatccaggtgtatgagggcgagagggccatgacaaaggacaacaacctgctggggcggtttgacctgactggaatccctccagcacccaggggagttcctcagatcgaggtgacgtttgacattgatgccaatggtattctcaatgtcacagccatggacaagagcaccggcaaggtgaacaagatcaccatcaccaatgacaagggccgcctgagcaaggaggagattgagcgcatggttctggatgctgagaaatataaagctgaagatgaggtccagagggagaaaattgctgcaaagaa

SEQ ID NO: 15331 - DNA, 461 bp, Homo sapiens
  misc_feature (1)...(461): n = A,T,C or G
attgangacccattagatgcgtgcgcctgaaatcaaatttttcgtagatgtttttgaagttgacatgacttacgtgcatttaaatatatattgccatccttagtttgtaattaagatttggaatatggttgtggatttctgagcatgtgcagactggtctagctagttcaggaactggtgcatgtatttttcaaagataaagaaagtgtactgcgaaaatatgcaggaagattaattttgtggcagttttctaaaactgacaaccaggtgggaccaaagtttatgtgcctttagtcttaatttaccttgcattgtaatattcagttttaataaatcttcaaaatattttgtatttaggaatagatctgactttaataaaaacatggctcagaatctacaggtcaaattaatttgaacagttcttgtcaatccgaattgttgattctgtttaaatgaccaat

SEQ ID NO: 15332 - DNA, 477 bp, Homo sapiens
  misc_feature (1)...(477): n = A,T,C or G
gccccggggcngggggattgannaactgatgtccctcactccgngtcgtggaattcgggatttgcatgaactccactctgagctgaaatacagactgcggtgttaatatccttttcttctgattgttattaacaggtccttatgtcgtcagaagatcgagaagctcaggaggatgaattgctggccctggcaagtatttacgatggagatgaatttagaaaagcagagtctgtccaaggtggagaaaccaggatctatttggatttgccacagaatttcaagatatttgtgagcgagaaattaatggacttacgaaatgaatacctgcaagcggatgaggctaataaaagacttttggatcaaaggtatggtaagagagtgattcagaaggcactggaagagatggaaagtaaggagtggctagagaagaactcaaagagctgcccatgttgtggaactcccatagagaaattagaa

SEQ ID NO: 15333 - DNA, 488 bp, Homo sapiens
  misc_feature (1)...(488): n = A,T,C or G
aaaaaactgaaggcttgnagngnactgatacccctcgaanncccgaataaatttcagaggtaagtggtgaaaggccacaatatgaagtcactctcagatgggtctcttctcttgccacactccactgtagaaataaaagaggacggggaggccagagctgctcaaaaccttataacccacaattctcatagttactctcaacttagagagggctgctttctagacacaccccctccaggcccccagactgccaggctccaggaataagtagctctaagaaatacagtatttcagtgtgagccacaccccactattgcaaattggagaggagaaggacaaacttaaaaggtgaaaagatttaacagaacaacagggtgaaaccccatctctaaaaaaatacaaaacttagctgggcgtggtggcatgcacctgtagtcccagctactcaggaggctgaggcaggagaatcatttcaacccaggaggcag

SEQ ID NO: 15334 - DNA, 476 bp, Homo sapiens
ccccaatcgagatccctagtcagtgtgagggcattcaccagagattaggaaggggacatgaggtttgccactctgcttcgatgttctgcccctgccaggggcccagggtgcagatgagggagaggcaggaagtgtttgtggctgtgatcctgataggaatcttcaaagacccaggcgctgccctgtatcagcccaggcttctttctttactctcttctggtcaacctgtcttcctcggctccctaagccattctgagcccactggaactttttacacttgacttccacttgggttaagtacctgcttcctgatgtgcgaagtagccttttattcgttttggtgttaaacagacctctttcaagttagaatatgctccctacttacagtattctgggattttgagaatgattccgtgcagctactgtctgactttctttatcattctatagcctctcctagaattcgtcttcccaac

SEQ ID NO: 15335 - DNA, 476 bp, Homo sapiens
  misc_feature (1)...(476): n = A,T,C or G
gtnccggggncgggnnaattgannaactgagatccctctccangtggtggaattcctgaacgtggagaccttggtggtggtcgacaaaaagatgatgcaaaaccatggccatgaaaatatcaccacctacgtgctcacgatactcaacatggtatctgctttattcaaagatggaacaataggaggaaacatcaacattgcaattgtaggtctgattcttctagaagatgaacagccaggactggtgataagtcaccacgcagaccacaccttaagtagcttctgccagtggcagtctggattgatggggaaagatgggactcgtcatgaccacgccatcttactgactggtctggatatatgttcctggaagaatgagccctgtgacactttgggatttgcacccataagtggaatgtgtagtaaatatcgcagctgcacgattaatgaagatacaggtcttggactggccttcn

SEQ ID NO: 15336 - DNA, 483 bp, Homo sapiens
  misc_feature (1)...(483): n = A,T,C or G
tgacggtgccccnnagtnnnnnnaccattgagacctctagtagatgncgtggaanncccacaatgttgcagattacatgcgctacttaatggaagaagatgaagatgcttacaagaaacagttctctcaatacataaagaacagcgtaactccagacatgatggaggagatgtataagaaagctcatgctgctatacgagagaatccagtctatgaaaagaagcccaagaaagaagttaaaaagaagaggtggaaccgtcccaaaatgtcccttgctcagaagaaggatcgggtagctcaaaagaaggcaagcttcctcagagctcaggagcgggctgctgagagctaaacccagcaattttctatgattttctcagatatagataataaacttatgaacagcnnnnnnnaaannanaaaaaaaaaaaaaaaaaaannnggggggccccttaaatttaaggggccccttaaaaccccgttgta

SEQ ID NO: 15337 - DNA, 486 bp, Homo sapiens
  misc_feature (1)...(486): n = A,T,C or G
tggaggtncccccnnagtngcnnccaattgatgaccatcaactgagaccatcgganagngcggnggaattcttaagacaagaaaaatctgtataagaaacacataggatactattttgggtattttttaatattaataagtaaaagtcaatgtaacagaatatagaccaaaagaaaatgtaattgaactaggcatctcattgtatagaaaagaaatttgaaacccagcaaagctaatgacacagctgcttgatagtataattgaattttctagatttcttgttcagtgtgcctttgtattacactatactatcgatattaacaaagtatgcagattatgaaatattattaaaatataaaaggctggaacatttgctatcatgaccaaattttgtaagtgctattaacgtcttgaatgttgagtaaaaagtataatgtaatagacttcatgttaaagaaacttgagtttagtttttttgaaaactac

SEQ ID NO: 15338 - DNA, 474 bp, Homo sapiens
  misc_feature (1)...(474): n = A,T,C or G
gacgggcccccagtngnnccactgagaccctnactgatggcgctgcgaacgngcaatnggaggtaatgcagaagagaatgctgcagaatttttgaagcaacataattcaggtccaaattccaagcctgtagtgtccttcattgctggtttaactgctcctcctgggagaagaatgggtcatgccggggcaattattgctggaggaaaaggtggagctaaagagaagatctctgcccttcagagtgcaggagttgtggtcagtatgtctcctgcacagctgggaaccacgatctacaaggtgagctccaacagtggcccaggtgctctgaggttgcaggctttctctgtgtgtggccacactggatacctggaaatcatggcctttgcttctgggacttaattggttttctgatgtgcagcttaatagtttgtatcaactctattgatgtcctagtgccctaattaggcatgacn

SEQ ID NO: 15339 - DNA, 446 bp, Homo sapiens
  misc_feature (1)...(446): n = A,T,C or G
atagaagactttagaccatgcggaggaattcccacgactccaacgggattgtgagaatcaagtcaatctcatgggaagaatttttatatgggaaagcggataaaactttcattgtactggaatgtttggagaatgttaaattccaaatcagaaaccacaaactgccctctaataagacatcggctatctaagcgtgtgggtgccccctttctgccagcagttctggttcttacgaaaatcaccatatatcagacatgaaaattctggctttgtgcagataaaaaagtgtgtatcaagtatgacgttcccccaatgtggacacacttggttcctcagaaagccaagcccactgcagctgccacatccctggacacactcggttcctcacaaagccaagcccgctgcagctgtcacatccctggacacactcggttcctcacaaagcn

SEQ ID NO: 15340 - DNA, 484 bp, Homo sapiens
  misc_feature (1)...(484): n = A,T,C or G
caagacccccctnaaatggagactttagtccagngcggnggaattcccacagtgggcaagtttttacttcagaataacttttgaaataaatttccccggaacagctcgcccctctcaacaggactctgaggctccactacgttgctgttattcctgacagagtgatgaaaggaaatttaaacaagtggcattttgtaaaaccaccccagcctgtgtgactttcaatgcctgtccgatttggctgggaaaatattttagatccccagggctacatactgttttttataccctcctctttgtgtcagngatggaaaaggtgtcaatctgctctgaatctctctgaacacctcaggaaataggcttttggctcgcagagaggggatgagaaatagttttgaaccaccaagtctcttggagggtgtcagcagccccttgaagtaaaagtgtggctgcaaacccagctctctgcattagccaggtgaan

SEQ ID NO: 15341 - DNA, 477 bp, Homo sapiens
  misc_feature (1)...(477): n = A,T,C or G
catcgacccccntngcaatagagatccctagtcagtgtggtggaattcgcgctttttatacagattggaattcggatttgagaataaattttaaaaaatttctttttcacttatctgaaggagtcctagcagacctctcagagagggggataaaatttaaaagttttgtcataataaaattatgctgattgtttgcactctgtcttgatttttcagaaaagattttttttgagagtaagaaatgccagtaggtcgtggggtgataaaggtaggcgagaagatttttctactggagtgttcagaaggttgggaggcaagactataagtttctatgatattttccccaggattccattttttaatatcttttttaataggtccaaattaactgtgctacagatgacacacaacaagcttcttcaagaacataataatgcattgaaaacaattgaggaactaacaagaaaagagtcagaa

SEQ ID NO: 15342 - DNA, 465 bp, Homo sapiens
  misc_feature (1)...(465): n = A,T,C or G
nggccgtgcnaactgagatcacgttaaagggctagcagnggcnggaanngnaggcctactgacaagcagaggtcagagacactggtggggagctggcaatgaaaccctgtcctgggacatgggtttcatgttcttgtgcacttcccctctgggatcaggtgaggggtccagacagctgaccagacagcttgacagctggtcaagacggtcacgggagctctaggtgggcacaaccaacccctctcctgggaggcccctgccccactggggataggagcctgtgtccctggtgctaagcactctcttcacttgggccattgttggtgggggctcctttccggccagaccacaaggccagaagcaataatggcacctcagcagttccagtatggataggggttcctggtttactagcttttacatctttttatttaagaacaaaccacaccaaaaaaccatgtgccn

SEQ ID NO: 15343 - DNA, 514 bp, Homo sapiens
  misc_feature (1)...(514): n = A,T,C or G
gggcntnnnnnnnnagggcggggccncnnngnnnnatttattcttgaaangcacnacctgngagcgtncgnaanaancagagnnnaagaaacacagnatggggaagagacattagatttatacanttccagagatctctggctctcagatgtagctaagagattcggtacaggaagaacgttctatggnagaagcacaggngggcatnctaatggagattgtcanggcccttggacaagatccatattcttagaaaattaatgagttccatctcgttaggaattggttgatgaggtatggtacatctgcatttctttaaccatagctgtaatgtaccatattaaattgtagccttttgcatgcgggtattatataataatgaatgggtggctcctagtagcatgcaacccatgactgtttacttccctaaaagggttaggtctgtgtcctgcacagtgttcaaaaccattaaatgtgttctttgtagcaggatggtacacagccatcagcagaa

SEQ ID NO: 15344 - DNA, 478 bp, Homo sapiens
ctccaatagagatccctagtcagtgtgagggcattcataaattattaagacatttataagtgaataaaaacaaattgccgaagtgtatgctaggatgatctaatttatattataaactccaaatctaaattattatattattataaatactatatatgtgtacatttaaatagaaataaaaaggtctagacagaattgataactatgttttcttctgttaataggagaaagactgaggaatggtaaaagtttaccagtaagaagaattatgtctatgttgcttgaattatatacagttagattgtagtcatgtatgtattcatgcattatttgtgtagataaataaataaatataaaatttccaaggaatataggagtttgtgaaggggctatgatggaacaatgacgctgattgattagttttggaagcctaatacaacaagagtgagagcggtagacatccctgtactttttggcg

SEQ ID NO: 15345 - DNA, 474 bp, Homo sapiens
  misc_feature (1)...(474): n = A,T,C or G
atcgaccccctggnnattgagaccatagtcagtgtggtggaattcgcctgaatatatctctaaataatatttgaacggtctttactaccagaaagttcttccttatgttaagatttaatccattgccctaaaattttttcattagtactttctttaacccttggggttataaataacaaatttagcattatttttacccagaagaaccacaactattttttgtattacatggtttcaattgaattccactattctgtttgttccatttgtatgtctttctgggaaaatatgattccccagtacacaacaatgtattctatctctgatttactctctaagcataggactgaaaaatcccatctctcattctagattccagacatctattgatgaggccaaacatagtgatggttaatgctaagcttataagagactaaaatattttatataagacagtgcctggagctcagtttn

SEQ ID NO: 15346 - DNA, 449 bp, Homo sapiens
  misc_feature (1)...(449): n = A,T,C or G
atagaaaacctgatgaccctctagacagtgcggnggaattctcattcttcagtggtctacctgtggttattttattcttgttaccttctgctcttttatgaccactatctgttccacccttgaaaccgaagacagatgttactagaaagaggctgttccctcatgtcgggcatgtgggatacgatgaggtttctcttcaaatagcctgatcaatcttttattctttaattcatagtacccacacacacacccctttttttcctttttctcctttttcctttctgcctttgttagatgcccaggcacgccacagtaccaggcattatcagtaccagctcacatttcttcccttatttggaaagaggactaactttctagctcaatgcagacagcccttccccttcctctctgcattcttttgcatgcccaccttatctaaaaaaatcaaa

SEQ ID NO: 15347 - DNA, 445 bp, Homo sapiens
  misc_feature (1)...(445): n = A,T,C or G
nttgatgacctcagaccatgcggaggaattcgtcctgaagcctgaatagatcacacattgttacttctaattggttttgatgtttgttatgctcctcacaagtgcagataacttcacatttgcatcactaatcgacctctttcaaagcctctgctcctcctgcttcctgcctctgttagtcatcaggagacttagtgttggcgtgggtattttccccgcttgtgaaagtgcattgtcaattctagagcattaaatatatgtgagggattgttattaatctacaaggcagtacacacagtattccagcaacagtgactttttcaaaggttttatgagacattgtaagaaagacagtatctttccatggaaaaaagtgttgcctcagagtcaaacaggaagcatgggtcctagttcctattgaactgcttagctactcttaatttag

SEQ ID NO: 15348 - DNA, 485 bp, Homo sapiens
  misc_feature (1)...(485): n = A,T,C or G
catgaccccctngnatgatgaccctaggacagngcggnggaattcggagaatcccttgagcccagcgggccagaggttgcaatgagctgagatcacaccactgcactccagcctgggcgaaagagtgaaactccatctcaaaaaataataataataattctagatgatataaagttcagagttaaactagggccctgtggtaagaagtggctggaggggtggctgctgtagctaacagctggagaaagcacccttaagtagggaccacctgaggtgagatccaatgaggaggagttaggggaagaatcagctgaagacagcgcctgacaggaggagcagagagcgagcttgatgttccaggagtaaaaaggccagtgggactccagcacaggaagccagagggagaatcgtgggagaccaggcaagggccaggcctggcagacccttattggcagaggttggcagttgggattattttcctaagn

SEQ ID NO: 15349 - DNA, 485 bp, Homo sapiens
  misc_feature (1)...(485): n = A,T,C or G
naatggagacctctacgaatgtagcgcggtatnccttaacattgccctcatacttaataatatggtctgcatttaatatgaaaggtgttttattgataaatctattgtactatttggatacatttgtgtattccttgcagccaacctgtattcgtgggattggtgtagggttaaatcatcaacattatttcataaaataagaatttgttctgtgttatctaaagatgtatcagtatattgtcacagttgtgctgttaactaaaaatgctgagacccctttttatagaaaaacaaaaagacatcaagtcttcttaattcaacccataatcattaagtacttaacaaagaatattttacaagtgatagtatttcaacaatgtgtaattaatatttttgatacagtgatttcatattggaatcattatttgtgcaaagggacagacagatcacttagattgctatactagtggacataggctaaatgn

SEQ ID NO: 15350 - DNA, 467 bp, Homo sapiens
  misc_feature (1)...(467): n = A,T,C or G
gcccggggnnggnnactgagnactgagacccctcccgngngcgggaatttagaataactcttactgctagacccagttgtgttcaactttttacatattattgccaacacactttatctctctgtgcacagcgctaatctgatcttataaatctatatttttttctttaagcaaatttttggtttaaaatttgaagcccatcataaagataatatagcataagacattttcttttctaaaaacaatcagcatcattttaaaaggatgaactaatacaggtgtatgtaatagcagtgtttccaaactggcaatttatgctttaaatttaaaaataaggtcatttttctccatcaggggcaaatgtttacttgtaattttcttcctacagttcgcggtaaattactttttactattattatattggaaactccttgggatttggcaccatttaaaaattcatctttgtg

SEQ ID NO: 15351 - DNA, 496 bp, Homo sapiens
  misc_feature (1)...(496): n = A,T,C or G
ntcgannccccntnnnnnnnttctagatccctagtccatgtggtggaattctaggattgcaaagctgtacagattttttctgtatgtgaacaagacaaatgaaataacagtaacattaagattgttaggaaagttgttttttgtgtgtgttgtttttgttttttgtttttgtttttattgtttgtttgtttggttggtttttgtttttttttctgaaacggagtcttattctgttgcccaggctggagtgcagtggcacaatcttgggtcactgcaacctccacctcccgggctcaagcaattctcctgcctcagcctcctgggtagctgggactacaggcgcccgccaccacgcccggttaatttttgtatttttagtagagacagggtttcaccatgttggtcaggctggtcttgaactcctgccttcaggtgatccacccgcctcagcctcccaaagtgctgggattacagacatgagccaccatgcccggcc

SEQ ID NO: 15352 - DNA, 490 bp, Homo sapiens
  misc_feature (1)...(490): n = A,T,C or G
catcgacccccctngaatttgagatcataggacagngcggnggaattcagtaaatagtctgatgaccctcttaatagcattgcaattgtattgaatcacataatgattcataagtaactagggaaccaactgattttgctaagcagtcttccccttataacaccacaggcccttctgacacacaaaaaaatgaaagttaatcctgggtacagcatacagttttacatttaaacgcacagtcttacgtggacaaatgcaagcacaagcctaaagcaaggtcaagcagatggcaaaaccgaatttgcctgcaaagaaatctatttaactgaatcagcccataatatttgaggcacgaggttactgtgattgataggaaagataaaaatgatgtctgtttttgtagacgaataaccatcaacatgacaacaaaattcactggggtctaccagcgtgcattccatttcccactgaccatgcaggtgcacgtcgn

SEQ ID NO: 15353 - DNA, 463 bp, Homo sapiens
  misc_feature (1)...(463): n = A,T,C or G
ggcgtgcgnttttcaaccgattcgacactgcatngngcnggaacncgataaatcctagntaaattttatagttatcttaatattatgattttgataaaaacagattattgttcattttgtttggtttgaagcgaactgtgacttttttgaatattgcagggttcagtctagattgtcattaaattgaagagtctacattcagaacataaaagcactaggtatacaagtttgaaatatgatttaagcacagtatgatggtttaaatagttctctaatttttgaaaaatcgtgccaagcaataagatttatgtatatttgtttaataataacctatttcaagtctgagttttgaaaatttacatttcccaagtattgcattattgaggtatttaagaagattattttagagaaaaatatttctcatttgatataatttttctctggttcactgtgtgaaaaaaag

SEQ ID NO: 15354 - DNA, 508 bp, Homo sapiens
  misc_feature (1)...(508): n = A,T,C or G
agggcggtnncacgggcgnnnnnnnnnaatcgtaganccaatcgagacctctatccatgtggtggaattcaggaaaaacagttttcaatgtcatccattaagaaccagttgcttgttaataaaaagtttctaaaatatgactgtgaagaacctacgtatgtaaattaataagggtttgaggaaaagatggaatgatataattattttgtattttaggtttgtataatcctcttcccccaccaaacttactttaaatgatttaaacattgaaagataaaaataaataaaaaaatgaagaaagaaaagaagaacaaaagaaaaaacaaaaaattttcctaaaatcagttagttatacagtgaagtggaaagaacagtagttttgtattgggacctgggcaattagtgtctcctctcagtgttctttatctttaaaatgtggtgttaccacctacatggtagtgttgtgagggttaaatatgattagatatataaaatgcttagcatctgt

SEQ ID NO: 15355 - DNA, 470 bp, Homo sapiens
  misc_feature (1)...(470): n = A,T,C or G
ggcgcccatgagaccatagatgagcggtctaggccagagggttgangggacagaaataacccagagccctggaacaaactgggtcccaatgatcaatacaagttctactcagtgaatgtggattacagcaagctgaagaaggaacgtccagatttctaaatgaaatgtttcactataacgctgctttagaatgaaggtcttccagaagccacatccgcacaattttccacttaaccaggaaatatttctcctctaaatgcatgaaatcatgttggagatctctattgtaatctctattggagattacaatgattaaatcaataaataactgaaacttgaaaaaaaaaaaaaaaaaaagcggcgaacctgggggtaaagaaaaggcccaggagtccagaaataaaatttttgccccttttttggaacattctagctttgggaggccacgtacccttttgggggaagtccag

SEQ ID NO: 15356 - DNA, 477 bp, Homo sapiens
  misc_feature (1)...(477): n = A,T,C or G
cgcccgacaattgagnccntcgtttgtagactctagnccangnggtggaattcgatgtggtgagtgattttcttttgaaacctagacattttgggtatttggttatgagattctcagtcttatttaaacctgttttaactggcttctgacattcctatggcaggggaagaggggacactacctcatttctgcctgatgaggttagaaatccaggttccccttgcagcctccattggcacccgagagggagctccttactgctgcctgccagggaccagcgttacggcaccctgcgaggcctccactactgccttcatgactgggaaagatagaggtcccctttgcctcccatgcaacctccactaataacatggtcaggaaaggaatggcctttctacctctgagtggaggtggaattcctggctctccactaggcctcctctgacatgaccccattgaagagggggagggacctcn

SEQ ID NO: 15357 - DNA, 468 bp, Homo sapiens
  misc_feature (1)...(468): n = A,T,C or G
agaggccccgnnnncccccaatgagnacanatgatagacntgcggaannccctgcctgagggctcttcagattcaagaggtccagccgtggagaaacatccgggaccctcagacactgttgtttttcgggagaaaaaaccaaaggaggtgatgggaggcttttcaagacgctgctccaaactcatcaactcctcccagctgctttaccaggagtatagtgatgttgtcctgaataaggagatccagagccagcagcggctggagagcctgtccgagacacccgggcctagctctccgcggcagcctcggaaggccctggtctcctccgagtcgtacctgcagcggctctccatggcctccagcggctccctctggcaggaaatccccgtggtgcgcaacagcaccgtgctgctctccatgacccatgaagaccaaaagctgcaagaggtcaaatttgagctgattgtg

SEQ ID NO: 15358 - DNA, 447 bp, Homo sapiens
  misc_feature (1)...(447): n = A,T,C or G
agcggcccgnnagnataaccctgggggttcgnactgacggctatganancnnnnaanggngnnagggaacaacacagaactttaattaaacactattttacttttattcagtgagtaaaacttaaaagttgaacagtttcccgtgaggaagataaaatatctttggttctttgttgctggactaacaggtagtcagcaatatatgctttaatgttttacccgttctttaacccgcggtatttcagtgttggtttcatagctatgaataggcatacggactaatagataaggacatattttatactttgagtggggggtgcgtattggacttccttttcttattacataggtacataagattctttcctgatggccatgtgatgatgttgacaacccctgaagagcctcagttcattgttccaccgttaagaactatgaataccaggg

SEQ ID NO: 15359 - DNA, 504 bp, Homo sapiens
  misc_feature (1)...(504): n = A,T,C or G
gggggnnnnnaacaatagactttcgtccgacacngccgnggaanncaattggaagtttggattaggatttgttagctcaaaatggcttatagcggtttggtttgtttcatcccatcaccatcccgagaaagtatactttctgtttttctcttacctggaatgtgctcttcttccaagtccacctgtcactctcttattgtaggcttagggcccccctttcccaaaaccatgatgtggccagtgtactgggtttagcctcttgcagtctgtgctcacatggctcccagcacactgccttaaaatgcagcatttgtcttttcatcccaagtgcctagcaccatgcctggcctattggaagtgaagtgatctaacatggaactcagaaatattttacttcctgtgtgatgaacatcataagcatcatagtgccacatcaaggagcagtctaatctacctttttcactcacttcccaacaacttctttgtatagttagggagcttgcg

SEQ ID NO: 15360 - DNA, 482 bp, Homo sapiens
  misc_feature (1)...(482): n = A,T,C or G
ggggccactgtgctttgagacnctagncagngcggnggaattccagaagggaaggggagagtcgagatgtgtgttaggccctcatatttgctgctttgttgcaagttgatataactgcgtgtaattatgaattcattttatcctgaatgtttgcatttcatactctgaatttcagtaaaaatcaaaacttaaaattctaaccagtcatatacactggataatttggtaagaaaactgtattttttttccctgaaattggataatgtactttcttctcaagattcatgacttgatagaacaatactttcagttatgttgcaaaggctcttgggcattttaaacaaaatgaagtatatccattttgaaacctgtgtatttctttttcggggtttctgcatgcagtggcagtcttaagtgccaaaattcattataaccccaaaataaccccttgatgaaggcttgctgtcttttactgtgttacn

SEQ ID NO: 15361 - DNA, 464 bp, Homo sapiens
  misc_feature (1)...(464): n = A,T,C or G
agggggccggnnnccccccaactgagacatttgaagacgtcggaatcacctccggtgattgtgaggacttctgcttttattgagtgacacgaaaagtaattggggaaggttttgagcagaggggagacatcatcttacgtaagtgggaagggtgacatagctgcagtgagggaggttattcttctatcagtatctctagcaaatcaagtagtaatctggtggggaataacttcattcctagacatatgccctcacattcattaaatctgtggccttcaaaatatgttcaataacgaaatggatgactggaacactagtcaccatgtaaaactttttccacggaaaaataaataaattttgagattataatagtcaagctttcaaaatattaaatgttaatatattaaattaaaagttagtaagtctctggtttgtgtattccacaaaaatctttagtatactan

SEQ ID NO: 15362 - DNA, 448 bp, Homo sapiens
  misc_feature (1)...(448): n = A,T,C or G
attgatgnccatgtagacccttagnccagngcggnggaattctcctcgccagcagccgtccggagccagccaacgagcggaaaatggcagacaatttttcgctccatgatgcgttatctgggtctggaaacccaaaccctcaaggatggcctggcgcatgggggaaccagcctgctggggcagggggctacccaggggcttcctatcctggggcctaccccgggcaggcacccccaggggcttatcctggacaggcacctccaggcgcctaccctggagcacctggagcttatcccggagcacctgcacctggagtctacccagggccacccagcggccctggggcctacccatcttctggacagccaagtgccaccggagcctaccctgccactggcccctatggcgcccctgctgggccactgattgtgccttataacctgccttt

SEQ ID NO: 15363 - DNA, 454 bp, Homo sapiens
gcgattatgaagtgtagcaagttagtgataaataagcgtgataaaccatatatttgtattagaaataatatttgaattatcaactgaataaaaaggctgcaactgctgattcctttgggtgggcatgtgataaaaataaaatacagttaagtatacttggaataaaaaattgtgtatgcttcaatataatagaaaccttttaaattgaatgtgtttttgagtttatagcatttaaattactgggagaattaaaagatttgctttgctttctgacattaagcttttcaaattagaattttaaaaaacatttctaactcattcatcagtagaagactttggcttttatataagatactatagttctcccccatattttcagtgattttccaatggagtagcaataaaaaaactttaattacagtaaaacttgcatataaaatcatgcaagaaggag

SEQ ID NO: 15364 - DNA, 499 bp, Homo sapiens
  misc_feature (1)...(499): n = A,T,C or G
gaaacgcaccccaggcagnccnatttgaaaccctnatgtagacattagaccangcggnggaattccattgagtgagaccccccacatctccgggcggaatgtgagacaaagggagaagacggtgacgatgggcgtcttgtcttctcatttagaattactgcaccgccgtttaaacaaagcacatgcaaggccaattgtgttttacccactcccacttaaccactgagaaaataagctattttctctatcccataacattctccacttcgttttcccaaccacgaacaaaatttattcctgagacagcaactttgaggatttcgttgacctcatccatgtagaagtgacaaatggttacacaacaaaattgtttcactcaaagggggttgttgtgtacgtggttcacctcaataaaacacacatttaactgtttcagcaactgtttagccctggactgtcgcccgggttaatgtcgctgaatggggtggggggttgaaan

SEQ ID NO: 15365 - DNA, 488 bp, Homo sapiens
  misc_feature (1)...(488): n = A,T,C or G
agggtcnatctgagaccatagaccactgtggnggaannccggatggcagaaacggtggacacaagcgaaatggtcaacggcgctacagaacaaaggacgagctctaaagagtccagccccatcccctccccgacctctgatcgtaaagccaagactgccctcccagcccagagtgccgccaccttaccagccagaacccaggagacaccttcggcccagatggaaggcttcctcaatcggaaacacgagtgggaggcccacaataagaaagcctcaagcaggtcctggcacaatgtttattgtgtcataaataaccaagaaatgggtttctacaaagatgcaaagactgctgcttctggaattccctaccacagcgaggtccctgtgagtttgaaagaagctgtctgcgaagtggcccttgattacaaaaagaagaaacacgtattcaagctaagactaaatgatggcaatgagtacctcttccaagc

SEQ ID NO: 15366 - DNA, 467 bp, Homo sapiens
  misc_feature (1)...(467): n = A,T,C or G
tggggcncgngtnnnaattggctgcgtagcntaggccagngncgnggaattcgaatgtttagacaggtataacagataaaatctgaaataagcaaaataagccatttatattcaagagaaatctgccacaaacgtgtagcttgcttggatgaacattacaatgggtttttaagggagcatgcagaatgaaactttcagaaaatagaccttctcccttggtccacattgtcaatcactgacaaggcttaactctaggcagacaaaatgttctccacaggctggtcccctgcctgtcctgcatgtgcatctggggctgttgcatagtggtgccaggtggggcatgactgacaggcatgtgatctatgtcactccaccccagcccaatggccagactgaccgctgttgcgggaagtcagggaccccaaatggagggaccagctgaagccatgacagaagaacatggattg

SEQ ID NO: 15367 - DNA, 469 bp, Homo sapiens
  misc_feature (1)...(469): n = A,T,C or G
gagggcacggnnnnnnccccatagaagacccactgatagcccgttggaannccagcacttttcatatactaatttagttgtacatttaactttgtataatacagaaatctaaatatatttaatgaattcaagcaatatatcacttgaccaagaaattggaatttcaaaatgttcgtgcgggtatataccagatgagtacagtgagtagttttatgtatcaccagactgggttattgccaagttatatatcaccaaaagctgtatgactggatgttctggttacctggtttacaaaattatcagagtagtaaaactttgatatatatgaggatattaaaactacactaagtatcatttgattcgattcagaaagtactttgatatctctcagtgcttcagtgctatcattgtgagcaattgtcttttatatacggtactgtagccatactaggcctgtctgtggcattct

SEQ ID NO: 15368 - DNA, 471 bp, Homo sapiens
  misc_feature (1)...(471): n = A,T,C or G
agggggcaggnnggggccccaatagaaaccccctgatgaccatagtacangcggnggaattcgtacagtctgtcacagcttcccttggctaggaaagggaattccccaaccccttgtgcttcctgagtgaggtgattccctgccctgcttcggctcacactctgtgggctgcacccactgtccgacaagccccagtgagatgaacccagtacctcagttggaaatgcagaaatcaccagtcttctgcatcactcatgctgggagctgtagactggatctgttcctattcggccaccttggaacctatcactacacactttcaaacaaccagatcttgtgaggactcattatcacaagaacagcaagggggatatctgcctccatgatcaaatcacctcccaccaggtccttcccccaacattggggattacaattcaacatgagattggggtggggacagagagccaaacc

SEQ ID NO: 15369 - DNA, 465 bp, Homo sapiens
  misc_feature (1)...(465): n = A,T,C or G
cttcgcgaccttagattgtggaccactatccatgtggtggaattccaacgtctggctctgtcacccaggctggagcgcagtggcacaatctcggcccactgcagcctcgacctctggggctcgagggatcctcatgcctcagcctcatatgtagctggggccacagacatgcaccaccacacctggctcgaggccattttagttctgaggttgagcagctcaggagccggctccagcacggtgctgtgtttgtgaaacagagaaaggggacccccgaggaccccagacagggccttaggactctcatatcttcttgtcttctccatctggtggctcttgctctctggttttctctaccttttcatggccccagaatccatatgcagtaaaggaactctctggaataaaattaaagtcctcctatnnnnnnnnnnnnnnnnnnnnnnnnnnnnnnnnnnnnnnnnn

SEQ ID NO: 15370 - DNA, 494 bp, Homo sapiens
  misc_feature (1)...(494): n = A,T,C or G
cgggatggcnnnnnnagtnagnnncaattgatgaccntaggatcgtagcgcgctagnccgcgccccgaagcgggaaaaaggctgtgtgccgccgtcccccagctgcgcaaccctatgaactctcgggaacttggctgtgttgtcctgcctcagagacaaattcatctattgtaggcctagcccctgcctttgaaaacaaggaaagcaaaaaaaagagcatgaggaatttgaagactgagagatgagttgtgtagcaccaacattttctttctgcctgaccttcatacctgatgaattaaaagggcaataattaaggtggaatttgcctcacatgaagttttattattttagttattaaaatagtttccaacactactgagaagcaaaaagcaattctcgttgttttaagaacataggatgtttggaagagtgagataagggacacattgaaaacagagaggcaatctgaaggctaccttgacgcatctgcaaag

SEQ ID NO: 15371 - DNA, 461 bp, Homo sapiens
  misc_feature (1)...(461): n = A,T,C or G
gagggcacgnnnnnccccccctgatgaccctttgaaggcgtcggannaccgccactgttctaactcccatgtaactaacggtaacaggtgtcccctgcttattctagtattcataagcacatttacagacgtggagtggtggctatcttttgttctgttttacgaagaaaagcaaaggaaagatgagctagccgtggtggctcatgccggtaatcccagcttttcaggaggctgaggcaggaggattacttaaagccagacgtttaagaccagcctgggcaacatagcaagatcctgcctctaccaaaaaaaacttaaaaattggctgggcatggtggtacatcatgcctgtagtcctagctacttgggagggtgaggcaggaggatcacttgagcccaggaggtcaaggcattccactccagactagatgacagagcaagaccctatctcaaaaaaaaaa

SEQ ID NO: 15372 - DNA, 495 bp, Homo sapiens
  misc_feature (1)...(495): n = A,T,C or G
tgcctgttnnnnaggggnnnnnatttgagaccatgttgagngccgttgaaaacgaaactctgacgttgttgtgattacattgtattttttcatatctgttatgtgatatagcaaccaacatattagttataataataattaggtaatgagttcacacagttattggatggagtgctgtgtccatccctaggtgtttgttattgtagtgatacttataagaagtacagcttggtgtacctacattagcgcaaatttcactagtcaggaaaatgtggataaagtggtccctttgattcattagccctatacgaagtattttgaaaaaaatattttaacagatttgtatcctctttccatatctcatataaactgtaattatttttaaatcccccaaatgaatgaaagccatctttaccattcgattctttaaaaaaaaaataagaattagtatttatcgattacaggtcctgtgcactttacatactttctttaatt

SEQ ID NO: 15373 - DNA, 444 bp, Homo sapiens
  misc_feature (1)...(444): n = A,T,C or G
natgtagaccatagacaccgtggnggaattcaccctgcgagcggctgctgagccgggtggccgccctgttccccgcgctgcggcctggcggcttccaggcgcactaccgcgatgaggacggggacttggttgccttttccagtgacgaggaattgacaatggccatgtcctacgtgaaggatgacatcttccgaatctacattaaagagaaaaaagagtgccggcgggaccaccgcccaccgtgtgctcaggaggcgccccgcaacatggtgcaccccaatgtgatctgcgatggctgcaatgggcctgtggtaggaacccgctacaagtgcagcgtctgcccagactacgacttgtgtagcgtctgcgagggaaagggcttgcaccgggggcacaccaagctcgcattccccagccccttcgggcacctgtctgagggcttct

SEQ ID NO: 15374 - DNA, 460 bp, Homo sapiens
  misc_feature (1)...(460): n = A,T,C or G
ggcgggngttttccctgatttcatggcattgtgcnggaattctaataaccaggttttgatttgcctctgtttgctttttgcttaagattgcaacacctgctcggtataccgtgactttgggaggaacatctgtcactgtgaagtatctgcgcagtcatggctacatgtccacgccgccacccgtcaaggagtatctgcaggacaggatggaagagacaaaggagcttatcacagagaaaatggaagaaacaaaagatagactcactgaaaagttacaagaaaccaaagaaaaagtttcctttaagaaaaaagtggaataaggtgccttatatagcagtatagaaaattcctgcactttaaccctttggaaactatgggcaaagatacatgtgtctgattatttttttggttagttgccgaaatatactagttctctgagggttaaagaagtaaaatacct

SEQ ID NO: 15375 - DNA, 488 bp, Homo sapiens
  misc_feature (1)...(488): n = A,T,C or G
aggggacctaatgaaaccccttgnaatangatgagcantaggacagngcggnggaattccagagacgagctctttgcggtctacattcatttatttagaaaatattcgtgggcctgttatatcaaacatctgaggagcttatttttagggaagcatttacgtgtattaatatatcgtcatgtggacagttgagaggggagaaggcactacacaaatttaaaattgttagaaaccattggcaactgatattcacagcctaagttaaaagcaggatatgtctcaggagcaaatcttttgtgtaaatcctggtatttttactgcagacctttaaaatgacagacgcgggtgagtaaaaattacttctggaaatggatatgattaattaattcaattaattaattcaattaaatcaatataattcaattaattaattcaattaaatcaatataattcaattaattgccagccttggttcacactgatgagtg

SEQ ID NO: 15376 - DNA, 463 bp, Homo sapiens
cccccttgtgacactagttcgcggcggaattcaaggacagggggctgcagaagagaaaaatggtcaggaaatgtaagaaaaggtggccagccttgctgcagacccaagaaatgaatatggggacctggttttgttaatcagatttcaggagtcttaaagatttatattatctactattgatagagatttcgggaaatcatattttgttggtcagagtcagctggtaaaatatttcagcacagtttggtgtcatatcaaaattttaaatacacgctttttgacccactatatctactcttagaaattcaacctaaagaggtaattggacagacatgcacatgcccataaaaggatgtgtgtcccaacatcatttggagtggctgaaagttagaaacagcataaatgtccaataagaagcactgaggaaatctgttacgcatccatggacaacatacacctttaa

SEQ ID NO: 15377 - DNA, 460 bp, Homo sapiens
  misc_feature (1)...(460): n = A,T,C or G
gtgaccccccncggaagacactgagacctanngnngctgncngcttagtagaagcggnggaattnggnaaagnacctgtctggggaagactatttaatttcctgcatttatttagaatgttggctgatgttattatgaagggaaacagctctaacaactgagtgccccccacatagccacagctcatgagttcacggggcaaaggaaatgaacagcagcctcctaatagccagccttctttgtgatgtggaaataattatcagcatgtaaaagactatatatatattcaacaattctgatcccctgaaaaattcaaatctacaactgatttgcttcctgggctcctgaaaacaactttgtcaaaattgttcagaaatataatcagccaatcgttgccccttggggacgcaggataaagcaagtcagccatgaccaatgaggagtcggccgtgcacaatta

SEQ ID NO: 15378 - DNA, 456 bp, Homo sapiens
  misc_feature (1)...(456): n = A,T,C or G
agtggcccgnnnngnattaacctgggagcttcgnactgacggtcgtcgaaaaggcaccganaacgaggcagggaaagggatcgcagggacaccaagcgccacagtagaagccggagtcggagcacacctgtgcgggaccggggtgggcgccgctagctgggaaaacactagagctgcaggtaccagccactcggccccagggggttatggccacagagggataggcacagtctccaccaccctggagccaagggtctttcacatcacctatccctacatacataccaaatggaaaagtggccatccttttccccccaaacacacccccttaacctatctcttgggacttagcccgaccctccctctcatttcccattaagtctgagaggcaagagctaggttaggcaaggaggtggttggccagagatggggaacagccaggtgccccagtcctct

SEQ ID NO: 15379 - DNA, 462 bp, Homo sapiens
  misc_feature (1)...(462): n = A,T,C or G
gagactcnnnncggaaggaaattgagaccatttgnccctggcgngcttcgtanaagcganggaaatngnnnnatgngagagccaggaatacagaggtaatttctctctatggtcaaggaacttaatttggtggagccggtatacagataatttcagtatacttcaagtacagcaatagaggcatgtacaggaagagtacttaacagtttacctctattacataaaaaatagtgatctccaggaagaagcgtggtacaacagaaagtgtgcattccggagtgagatcagcctggatttgaatcctgtctaccacactcacccattatgcaactttgggggcagccaatctctcgtagccttagtttccccatttctaaaatggggtgtagtttctgacttctcactgttggaagtgcaactgtttgggtgccctgcgatgtacagtgctactaagaaaaaaag

SEQ ID NO: 15380 - DNA, 496 bp, Homo sapiens
  misc_feature (1)...(496): n = A,T,C or G
ggggtgacccnnaggggnnnnnnaactgagaccctgttgagngccgtggaattcgagtctctgtgtggtgctaacttgcctcgaagaccaaataattgctagtctccctttgtgaaaaggagagcaggtgtcaggctcattcatgtctcaggcacacaattgtatctagctagacttttcaaaatgtcctatagagctgcagcacatatgaatgaggtgtccagctggtcccaaacctgtaatcggcaccccagtgagcagactggacatccccacccccacagctgccctttctcccctccactcatgttccctctagggccaccacgatcccgacttgtatcaccacagatgagtttcacatgtttttgaattttacatcttatctgttttctgttcctatacaagtttgccttttttgaattccatataagtgggattctacaatgtgttatctcaatttgagtctgtttttttttgcctgctcagcatgatg

SEQ ID NO: 15381 - DNA, 504 bp, Homo sapiens
  misc_feature (1)...(504): n = A,T,C or G
ggggagtncccnnaggncccgcccggttgagnaccntaacttgagancactcgnacagngcggnggaattcgcagcattactggtataatttgtggccttctttcacacactagtttttcacacctccaagcaggttcagggcttacgtagctactgattcatacgtactgctggcaactgactagagaggtggaaaagggagtaccttgggggtttaggggctagaaaaggtcaccattgggttggaaccaggaaaaaacagagtgcacgcctatgatgagcactgtagtttaggtagaatttcaacaggctgaggctgtatttttgggccagattgagaggagattcagggggaggagcagcctggacaaaggggaggaattgagaagtacagtgtggttggattcgtgtgattggagttaaggctggagaattgggagccatgtccccatcatttctttttgagagtaaggagctatcgagtaggaaatgtgtgtgtgtaa

SEQ ID NO: 15382 - DNA, 498 bp, Homo sapiens
  misc_feature (1)...(498): n = A,T,C or G
ncttgagggccntnganannnccttganagtactagtaagnngcgcggaannnaaaacattatgtcatggtatacttgtcagtgtctcttctttctcagcaacacattaaggaatggtgctacttcttgccattggtattgtagccctgatgacatgcagatggttgatttcagctcaacatacgaaaggattttcaggccatttgtgttcaagataaaagggcctgacagctttaggatagacatgagccccatccctgaagacatttaatcacaatctagacaagctcttgttgtaaatgagctcaagtatcagatttggaagtgaatgatcttttacatttttgtcaagcttgaggttcgtgaacttggatccaacctcttattttttgcagataagaaaacaaggatcacaccagttgagagatttctccgaagtcagacatctcattagagctagagaggccagactagcatgtctccatgatccagtctgag

SEQ ID NO: 15383 - DNA, 444 bp, Homo sapiens
  misc_feature (1)...(444): n = A,T,C or G
aatggagaccatagaacacgctgcggaanncgcaaaactttcttttttaaaaattttcatttatttaatggaaacttgcccattttcacatgtctgtttatttattttatatttttaaaagaagacagtattcacctatgtattttgcataacgattatatcaagtctaggggcttcatgtcatgttattaaaatcagttaagcaatcttttatgtttctatattatttagaatatttgttgttgcaattttcacataagaaaatttaacagttgtgtcatgttgtttctgtctgattttaattgctgtctaatgacggggaaagcacgatgaaaagatgtacaatcctgcatccttgcttatttcacaactaaagctttgtcatagacttcaaaatatatatgtatatattttatttaaaacaaacagaacataaaaaaaaag

SEQ ID NO: 15384 - DNA, 489 bp, Homo sapiens
  misc_feature (1)...(489): n = A,T,C or G
aggatgaggganaanaanncttgatnaccntngnnatcgtagaccattagtccagngcggnggaattccaccatccagtatacctatgtaacaaacctgcacatatacccccagattctaaaataatagttaaaaaatattcaaataacccaaaagacaggaaaggggaaacagggattaatgagaaaacaaataataaaatggtagatttaagttcttacacatcagtaattacgttgaatttttaaatgctgtaaacaaatcaattaaaagtttgtcaagagtccatagaaaaaacccactttatgctgtctattggaaacttactttaaatatggtataggtgggttaaaagtgaaaagatggaaaaagatatagcatgcaaacactattggaaagaaaaccctagtggctatattaataacaaagcaaacttcagagctaagctaatacccaaataaagaggaacattacatattgataaaagaa

SEQ ID NO: 15385 - DNA, 493 bp, Homo sapiens
  misc_feature (1)...(493): n = A,T,C or G
tgggtggnccnnaggggnnnnnaactgagaccctactgatgccgtgaaactgccaggcaatgcagaccatcaacatcaatggtgtccaggtccagggcgtgcctgtcaccatcaccaacacaggcgggcagcagcagctgacagtgcagaatgtttctgggaacaacctgaccatcagtgggctgagccccacccagatccagctgcaaatggaacaagccctggccggagagacccagcccggggagaagcggcgccgcatggcctgcacgtgtcccaactgcaaggatggggagaagaggtctggagagcagggcaagaagaagcacgtttgccacatccccgactgtggcaagacgttccgtaagacgtccttgctgcgtgcccatgtgcgcctgcacactggcgagcggccctttgtctgcaactggttcttctgtgggaagaggttcacacggagtgacgagctccaacggcatgctcgcacccacan

SEQ ID NO: 15386 - DNA, 482 bp, Homo sapiens
  misc_feature (1)...(482): n = A,T,C or G
ntttggagaccactaatcgatgnaccattagtacagngcggtggaattcgcagggccaagtgcccatgagcacagccccagacagacacggtggggagcttggagccctccgctcacctagaggagccctgggacacgcactggaaagtattctaggggcttcctgccttatccttctgtttgttcatacacttagtgaaagcagatcctgtactaggatgtgaggatatctgtcacctgcgtggtccattccataaacaccagattccatttcagttgccacacattttggggctagacttccctaaacaacatgccattgtgaaataatgcatatatttgtatttttaaatttccctgaaaatttaatctattctgttccatatgaagtctgtttcactaccttaaaaaatagatactccactagaggctgtgcttaattcaaatccatgtgtgtgcctgcattacatgtgtgaacacgt

SEQ ID NO: 15387 - DNA, 468 bp, Homo sapiens
  misc_feature (1)...(468): n = A,T,C or G
gagggcagggngncnccccatagaaaccccactgagacnctagtaagccggcggaattttacgaaacatgtcggagctgtttgcctgggtggggctgggtaccgtacctggcaatgcctgggattttcataattagcacgtacataaagaagtacattctgttcaagtgataactgagcctcaatcaagcagaaactttttgcttgaaattaaaaaaaaatttctattagtgaaatttctttttttttttttttggaaagccccctgttattaaaaaaatttttgaaaaattttggaaaaattttgtttaacaaaattttattgaaaattgtttttggcaaaatggtaatatttcggaagaaaggttttttttatggaaataccaaaaaaaattttttttcggaaaaaaaaaaaaagaataaaaancaaaaaaaaaaaaaaaaaaaaaaaaaaaagggggggggcttg

SEQ ID NO: 15388 - DNA, 454 bp, Homo sapiens
  misc_feature (1)...(454): n = A,T,C or G
cgcggccccccngnnattcaactgaaaccttcgaactgcggtctcgncannccnacnnngntgngnntgngctaacctgggaactggccacctccattgttctttgcttctgcacaagatccatgaaaatccattgatcagaagaacttcacctgcagacctcttcaagtgacactatgtaggaatccttccaaggaatatctatgtacaatgtatatagctgaaatgctcagatgaacaacatattaaaattaaaaccactgcctattgtaactacactgggcatcagaataaaaggcctctagaaattgctgaacaatggttaattaagatattgctaacacaatcgagtgataatacagttttactgcaaaagaagcacttcaaacctattatgtccttagaacttccagagtagccactgctcccagttaaaggtgggtcagtagccttg

SEQ ID NO: 15389 - DNA, 576 bp, Homo sapiens
  misc_feature (1)...(576): n = A,T,C or G
cggaaggcnnnnnattgganncctttcgaacccctagtccgtgtggtggaattccactctcagagaacaacatggaagccaagttcctaggaaatgcaccctgtgggcactacacattcaagttcccccaggcaatgcggacagagagtaacctcggagccaaggtgttcttcttcaaagcactgctattaactggagacttttcccaggctgggaataagggccatcatgtgtgggtcactaaggatgagctgggtgactatttgaaaccaaaatacctggcccaagttaggaggtttgtttcagacctctgatgggccgagctgcctgtggacggtgctcagacaagtctgggattagagcctcaaggacattgtgtgattgcctcacatttgcaggtaatatcaagcagcaaactaaattctgagaaataaacgagtctattactgggnnnnnnnnnnnnnnnnnnnnnnnnnnnnnnnnnnnnnnnnnnnnnnnnnggggccctcttnttataaggggccctataaaccccgttgaaaccctcggggggctttttaatcccacccttttggg

SEQ ID NO: 15390 - DNA, 474 bp, Homo sapiens
  misc_feature (1)...(474): n = A,T,C or G
nactgagaccatattgagngcggtggaattctcacgactaagctctcacgattaaggcacgcctgcctcgattgtccagcctctgccagaagaaagcttagcagccagcgcctcaatagagacctaagggcgctgaatgagtgggaaagggaaatgccgaccaattgcgctgcggcgggctgtgccactacctacaacaagcacattaacatcagcttccacaggtttcctttggatcctaaaagaagaaaagaatgggttcgcctggttaggcgcaaaaattttgtgccaggaaaacacacttttctttgttcaaagcactttgaagcctcctgttttgacctaacaggacaaactcgacgacttaaaatggatgctgttccaaccatttttgatttttgtacccatataaagtctatgaaactcaagtcaaggaatcttttgaagaaaaacaacagttgttctccagctgga

SEQ ID NO: 15391 - DNA, 462 bp, Homo sapiens
  misc_feature (1)...(462): n = A,T,C or G
aggtncacggnnncccccaatgagaccaactgaagacgtcggaatccccctgcctcaggggggttgaaatccctctcccccaggagccctgctgctttgcttggtggtagggcaggagagcaaacaaacagtcatggtctaaaacccacatagcactttgctcttagttacatgtaaaattttagatttctaaaacaggtgggcaatcattttgaatactgttctgtgaccctgactgctagttctgaggacactggtggctgtgctatgtgtggccatcctccatgtcccgtccctgtagctgctctgtttagacagcggacagacgctcacgcccaggggatgtcctcacgctgtcgccgcgcggtttcccttcgcagatgtgtatactcatgataggtcagaaagtgtatccgctacaataaagttctggttctaattaaaaaaaaaaaaaaaaaaaan

SEQ ID NO: 15392 - DNA, 455 bp, Homo sapiens
  misc_feature (1)...(455): n = A,T,C or G
ccccaatagtagacccctagtttagagtgctgtaattccttgttgggcaagctggtctcaaactcctgacctcaggtgatctgcctgcctcaggctcccaaagtgctaggattacagccgtgagccaccgcacctggcgaactcattatttttaatgaccacataaaatctccttgattgatgtgtcataatgtatttcatcagccctcctgatagatactttgctgccacacatggtgctactgtgcatatccttgcatttacatctttgagcacatgtgtgagaatatctttagactaaatttttagaaatggagtaggttaaaaaatatttgcattttaaattttgatattgctaaaattttctccaaaacggttttgctaatttacatacctatcaaacatatatggaagtgcctgttcccccctaccctgcttgtcacagttatcttcan

SEQ ID NO: 15393 - DNA, 457 bp, Homo sapiens
  misc_feature (1)...(457): n = A,T,C or G
ctttgacccccactgatgaacataggacangcggnggaattcctcattgagaacctctgaaatgtctttctttgccccctttaaaaaaaaccatgattttccaggtgtttgtgtttatgtttttgctagggagatgaaagtagtttttgtttcttcattagcgtaggatgtgtacattgaaagccatgttcccttgtagaaagaaaaatgctgttgccttttgggttgattctattatctgatgttttattaatctctgtgaaataattgtgtaaattaatatagagactagttgagaaatggtggataacatgaagaagatacccatttttgcatagattagatgtgatcaacctcacactatcatatgaaagttggctgcattggagagacaggaattaatattaaaaatgttttcagttcagattgatatcttacatttccaaatattattttc

SEQ ID NO: 15394 - DNA, 466 bp, Homo sapiens
  misc_feature (1)...(466): n = A,T,C or G
aaataatctgatanacctcgngtagacgccatacacangngcgggaattccagctttgtatgttgggcacagcccgagaaagtgcctcagcttttttaaggaggaggtttctgctaaggactagttctgccctcccgtcaggcctgtttctggcaccaggaatccccaacatgcactgatgttgtgtttttaacatgtcaatctgtccgttcacatgtgtggtacatggtgtttgtggccttggctgacatgaagctgttgtgtgaggttcgcttatcaactaatgatttagtgatcaaattgtgcagtactttgtgcattctggattttaaaagttttttattatgcattatatcaaatctaccactgtatgagtggaaattaagactttatgtagtttttatatgttgtaatatttcttcaaataaatctctgctataaaccacaagaaaagaacataaaaaaa

SEQ ID NO: 15395 - DNA, 480 bp, Homo sapiens
  misc_feature (1)...(480): n = A,T,C or G
natagagncccctngnnaatagtagactataggacagngcggnggaattccaaagctactattaatcgacattgacctatttccagaaatacaattttagatatcatgcaaatttcatgaccagtaaaggctgctgctacgatgtcctaactgaaagatgatcatttgtagttgccttaaaataatgaatacatttccaaaatggtctctaacatttccttacagaactacttcttacttctttgccctgccctctcccaaaaaactacttcttttttcaaaagaaagtcagccatatctccattgtgcctaagtccagtgtttctttttttttttttttttgaaagggagtttatttttgccccccaggtggaatggaaaggccccaattttgtttcattgaaccctccgaatcgggggtaaaagcttttttcttgcttaaccctccaaagaaccgggaataacgggcttgtggccccg

SEQ ID NO: 15396 - DNA, 452 bp, Homo sapiens
  misc_feature (1)...(452): n = A,T,C or G
ctcgactttcgagacaattagnccangcggtggaattcaaggcacggaaggctatgtccaaactgggtcttcggcaggttacaggagttactatagtcactatccggaaatctaagaatatcctctttgtcatcacaaaaccagatgtctacaagagccctgcttcagatacttacatagtttttggggaagccaagatcgaagatttatcccagcaagcacaactagcagctgctgagaaattcaaagttcaaggtgaagctgtctcaaacattcaagaaaacacacagactccaactgtacaagaggagagtgaagaggaagaggtcgatgaaacaggtgtagaagttaaggacatagaattggtcatgtcacaagcaaatgtgtcgagagcaaaggcagtccgagccctgaagaacaacagtaatgatattgtaaatgcgattatggaa

SEQ ID NO: 15397 - DNA, 511 bp, Homo sapiens
  misc_feature (1)...(511): n = A,T,C or G
tggggagtaccccnaggggannnnnnnnattgggagaccctaattgtagnaccactagaacagtgcggnggaattcccgagcttcgttatgcagtttttaatattatttattattttaaaaagtaataagcacaaaactacatacattgtatgtcatttaaagtatttatgtcaaacagggtgcaagtgtgaacccaaggactggagcacaaattcctaactgcctggggcagggctaatgttagcattggtgtgcgtctgcctccaaaggaggttctagttgtcagcgagactcaacacagatgacattgaaattcgtttctctcctcatctatcacactggagcaaaactggctatttctgtgaatgatataaaacagggttctctgtaatggtattgtacatagtatatgtttactgttaagttcttgttatattataataaatatatttatagatctagancaggnaaacaaactaaaaaaccacctaaaggatacacaaagaggga

SEQ ID NO: 15398 - DNA, 451 bp, Homo sapiens
  misc_feature (1)...(451): n = A,T,C or G
nttcgagatcgttagcccgtgcggnggaattcaagttgctctcagaggcagcgtgcgggtgtgctctttgtgaaattccaccatggcgtaccgtggccagggtcagaaagtgcagaaggttatggtgcagcccatcaacctcatcttcagatacttacaaaatagatcgcggattcaggtgtggctctatgagcaagtgaatatgcggatagaaggctgtatcattggttttgatgagtatatgaaccttgtattagatgatgcagaagagattcattctaaaacaaagtcaagaaaacaactgggtcggatcatgctaaaaggagataatattactctgctacaaagtgtctccaactagaaatgatcaatgaagtgagaaattgttgagaaggatacagtttgtttttagatgtcctttgtccaatgtgaacatttattcatattggtt

SEQ ID NO: 15399 - DNA, 473 bp, Homo sapiens
  misc_feature (1)...(473): n = A,T,C or G
natagagaccactaggccattggagngcaattcggcatacttccgggatcttgtttacttttccccactcctgagatctttttgagaagctgatgatcagtctcaggtgttttctattgcgggggggggggcgggcgggggagctgcctgtccctggcaccacctgtgaccaattattactttacagaaacatttaacaaccgcctgaccatcacctgagggttgcccaacactcttggggggggtcgggggagccctctcctgccttgctcaaacctgaatgtacccattgtaacaaaccccttctttgtatactttgatatggggacatttcttgtcacttgcctcattgtgaatttttatagatgtggctaagtcatatgcttccttctgaaaaattatgtcaaatactagcagtttctcactgttttttgccctagaaacaacaaactaaccttgaagtgaaaggcctt

SEQ ID NO: 15400 - DNA, 471 bp, Homo sapiens
  misc_feature (1)...(471): n = A,T,C or G
ggggccaagnnaagnaacactgatactctaggaagtttgatggccttctgtagagacggtcttgccatgttgcccaggctgttcttgaacaccggcctcaagcgatcctcctgcccggacctcccaaactgctgggattataggcatggaccaccgtacttggcctcatttgtcctcttgaaatgaacacttagcattcttctacttccttactaccacaaaatgcatacatgcgtcttcatggtgctgtgtacaaatttctgtggcggtgtgtgtccaggaatggaattgctgtgtcttaaggtatatgggtacctttcattaaagcatacttttcattaaatactgccaaattagtgtctaaaatggtcatatcagtttatacatttatattggccagtatttgaaagtctacttctaatttttgccagtctggcaggtataatcttatctttgttaacatgttcactt

SEQ ID NO: 15401 - DNA, 473 bp, Homo sapiens
  misc_feature (1)...(473): n = A,T,C or G
tgagagacaccacctttgagaccatanggctgatggcgattgcttatgcgngaaattagaaattatcaactagataatagtatagataaatgaatttgtatctaattcttgctagttgttgcatccagagagctttgaataacatcattaatctactctttagccttgcatggtatgctatgaggctcctgttctgttcaagtattctaatcaatggctttgaaaagtttatcaaatttacatacagatcacaagcctaggagaaataactaattcacagatgacagaattaagattataaaagattttttttttgtaattttagtaaagacagggttgccattgtattccagccttggcgacagagcaggactctgcctcaaaaaaaaaaaaaaaaagggtttgggcaagcggaaccttttttggaaaagaataaaaaaaaaaaccgcgccgggacaagggaggattttttt

SEQ ID NO: 15402 - DNA, 453 bp, Homo sapiens
  misc_feature (1)...(453): n = A,T,C or G
tcgttaagatgaccacttgnanacngganaccctccgaagngngccggaantcctttgaacaggaccagctggtggctgggggccagctgggcgatttgcacaacgggacattttatcgtgaggtccgccagttctgctcgggctctggccaccaccttgtgcgcttctacttcctcactcgtgtttactccgagtaccttgaggatgttctggaagagctgacatatggacctgccccggacctggtgatcatcaactcctgcctctgggatctctccagatatggtcgctgctcaatggagagctaccgggagaacctggagcgggtgtttgtgcgcatggaccaagtattgccagactcctgcctgctggtgtggaacatggcgatgcccctcggggaacgtatcactgggggtttcctcctgccagagacccgtggattgaggactggg

SEQ ID NO: 15403 - DNA, 523 bp, Homo sapiens
  misc_feature (1)...(523): n = A,T,C or G
ccgaggaacacgattctccgaccgaagcgtcccagccgattgtggaagaggaggaaactaaaacatttaaagacctgggtgtgacagatgtgttgtgtgaagcttgtgaccagttgggatggacaaaacccaccaagattcagattgaagctattcctttggccttacaaggtcgtgatatcattgggcttgcagaaactggctctggaaagacaggcgcctttgctttgcccattctaaacgcactgctggagaccccgcagcgtttgtttgccctagttcttaccccgactcgggagctggcctttcagatctcagagcagtttgaagccctggggtcctctattggagtgcagagtgctgtgattgtaggtggaattgattcaatgtctcaatctttggcccttgcaaaaaaaccacatataataatagcaactcctggtcgactgattgaccacttggaanatacgaaaggtttcaacttgagagctctcanatacttggtcatggatgaagccgaccn

SEQ ID NO: 15404 - DNA, 451 bp, Homo sapiens
  misc_feature (1)...(451): n = A,T,C or G
nttgangattcgtagtccatgcggnggaactctaacaagttatctttcgtagcagaaaccattttgctgccacaaaattttcatcatcagaactaataaatcaagtgttccaaataccatgtgcactggaaagattggcattattttgctcatcagcagaatttataacagtgtgcggtatctagaaatacttatatatacaattccacactggaagacactcagcaattaatgaagttaattactgggccaacttgagaggaaaaaatggaaaagaaactaacatgttgggtgaattctaccaaagtcagcgcgggtggctgcactggcacagaatactaaactgagtgtgactattttcactgccacaaatgaaaaaacaaaatgtgcctgtataaagcactcagtagagggctgatgacactaattttttttcctttacgacatgccg

SEQ ID NO: 15405 - DNA, 454 bp, Homo sapiens
  misc_feature (1)...(454): n = A,T,C or G
ntttggagttcgatgacccttaggcagngcggtggaattcgtccatgtgaagatgcgctgaatggtataaaggacagagcagtaaagagtgctggctgaatgcctgggctggcaatcaggcatgttggagtttgagtcccagtctgccactccagctctgtgaccaagaggaagtgaagtcatgtaccctttctaagtctctagcccctcttctgaaagacgaagatgccaccaccaaccatgttagtggttgtgaatgccaagaaagtccatgtgaagcacatagcatagtgtctgccatgcgttaagtgttccaaaaatggaagctatgactatttcacagagtacacttcccatcacttttcagttcattttggccttctccctcaaaagcactgcagcgttctgatccagctgataaaacaccaaacattcacatagtgctttaaaagtg

SEQ ID NO: 15406 - DNA, 529 bp, Homo sapiens
  misc_feature (1)...(529): n = A,T,C or G
gcggtggcattctcattatgaggtgtaacaagaaaagggttgaatgggccatatgcaaggagtgcatctctgtgctgcaaactgacttgagtgctgcactattgctattccgtgcaaacaaaactcagcttttcctgactcagttccttgacttagtggcctttacaaaaaaagttgagtagtgtgtggcctgctgtcgcacagcccctagttagcttcatggtttctcagcttcagacccctccagcccacagaggagcccatggagggacccacttcccttggtccagacagctgggagtgggttaggcccactgctgttttgagcagggccacttgctccatttcactgaaggctttgctgggtgaaaacacttcagcatctcctcctcaggtcaacccataaagaccaggtccagcaccgtggtcttggcacatccctggcctcaggccctcacctaacagtgaggcagcagctgcccagccccgcaatgtgcctgctgcaggcagctcttgcctgaaacttacn

SEQ ID NO: 15407 - DNA, 451 bp, Homo sapiens
  misc_feature (1)...(451): n = A,T,C or G
ntttgaagatcgttagnccatgcggnggaattccaggcgctgaaggatggctggaccaggtttaaagtaaaggtgggtgctgatctccaggatgacatgcgaagatgccaaatcatccgagacatgattggaccggaaaagactttgatgatggatgccaaccagcgctgggatgtgcctgaggcggtggagtggatgtccaagctggccaagttcaagccattgtggattgaggagccaacctcccctgatgacattctggggcacgccaccatttccaaggcactggtcccattaggaattggcattgccacaggagaacagtgccacaatagagtgatatttaagcaactcctacaggcgaaggccctgcagttcctccagattgacagttgcagactgggcagtgtcaatgagaacctctcagtattgctgatggccaaaaagtttg

SEQ ID NO: 15408 - DNA, 497 bp, Homo sapiens
  misc_feature (1)...(497): n = A,T,C or G
agggaaggnccgcgcccccntttttggtaccgtgacacttcgcagnggccggaannccggagcagaccgcggcggcggctgcggcggtctggctcgggaggcgttcctggttccaatttcatggccccgcggctgcagctggagaaggcggcctggcgctgggcggagacggtgcggcccgaggaggtgtcgcacgagcatatcgagaccgcttaccgcatctggctggagccctgcattcgcggcgtgtgcagacgaaactgcaaaggaaatccgaattgcttggttggtattggtgagcatatttggttaggagaaatagatgaaaatagttttcataacatcgatgatcccaactgtgagaggagaaaaaagaactcatttgtgggcctgactaaccttggagccacttgttatgtcaacacatttcttcaagtgtgggttctcaacttggagcttcggcaggcactctacttatgtccaagcacttgtagtgg

SEQ ID NO: 15409 - DNA, 477 bp, Homo sapiens
  misc_feature (1)...(477): n = A,T,C or G
ccctagagnatcgatngccgtgngcaggaanccgngctgngacaggacagcatcctcaatcaatccaacagcatattcggttgcatcttctacacactacagctattgttaggttgcctgcggacacgctgggcctctgtcctgatgctgctgagctccctggtgtctctcgctggttctgtctacctggcctggatcctgttcttcgtgctctatgatttctgcattgtttgtatcaccacctatgctatcaacgtgagcctgatgtggctcagtttccggaaggtccaagaaccccagggcaaggctaagaggcactgagccctcaacccaagccaggctgacctcatctgctttgctttggcatgtgagccttgcctaagggggcatatctgggtccctagaaggccctagatgtggggcttctagattaccccctcctcctgccatacccgcacatgacaatggaccaaatgt

SEQ ID NO: 15410 - DNA, 487 bp, Homo sapiens
  misc_feature (1)...(487): n = A,T,C or G
ggatgccnnnnnnaaggggnnaatcgagnccactngaaatgagcattatcagtccagtgcggaggaattccaagaatgtgcccaaccttcatgtcatgaatgccatgcagtctctcaagtcccgaggctacgtgaaggaacagtttgcctggagacatttctactggtaccttatcaatgagggtatccagtatctccgtgattaccttcatctgcccccggagattgtgcctgccaccctacgccgtagccgtccagagactggcaggcctcggactaaaggtctggagggtgagcgacctgcgagactcacaagaggggaagctgacagagatacctacagacggagtgctgtgccacctggtgccgacaagaaagccgaggctggggctgggtcagcaaccgaattccagcttagaggcggctttggtcgcggacgtggtcatccacctcagttggagtggagaggattcttttgcatgtgatt

SEQ ID NO: 15411 - DNA, 488 bp, Homo sapiens
  misc_feature (1)...(488): n = A,T,C or G
catcgacnccctaattgagnaccctaggacagngcggnggaattcggctaacagcagaattaacacagctgttagccacaaggaaaagtctctcaaccataatgacagtggaagcattatttactgctgcactcctcaggtatccgggccgatatcctgctggtctccctgcactctgagtccttcgtaaggaggcacacagctggacagaatgggaccatccttcccatggcagggggaggcaagagctggagctcagtggtgcacgaagacctgtccccatccccaggagacagctctcttatgagggtggctttttgcgtaatattttggagtgaggtttatgctgaagagcttccatttctatttaaaatagcctcaagatctcaaggacagcactcacatatatgtgggaacctggagaaagaatgcagagtccttcagctgaattgattgataggaactatgtgagttcctcaaaagcagcg

SEQ ID NO: 15412 - DNA, 485 bp, Homo sapiens
  misc_feature (1)...(485): n = A,T,C or G
ccccccatcgaganccnctcgccaatggagagccataggcagtgtcgnggaactgctcagagctccagaatcagattctgcactttggcaagatcccatgggactcctattttcattaaactttgaaaagcggtggtctgcaagccctccttccagagcacagtctttggcgtacgccaccagcacatgggggtctgtcatctcctgacacagacgtcctcagagatatgaaggttatatcagattcagcagagaacaggcaaaggggaagcaaagtgtattctcaggagctcctggaaataattaccgctctcttaataataaatgaataggctgcagtcccagaacacattgagaacaaagcaaaacatgtcaatataaaatccagcaaataaaagaatcaatttaaaatagatttctctaaatggtttgcctgcttgggctaagtgccccgcctctgggctcacatagcatattgtgcttat

SEQ ID NO: 15413 - DNA, 465 bp, Homo sapiens
  misc_feature (1)...(465): n = A,T,C or G
nttagagattagtagtccatgcggnggaattcacagtagttgttaattattacttctgtactcataaaatacttgaagacttaactcatgtagatgaaagatatgtacagcctttgtctctaagagtaaatcacttggatggtaggggataagcacatcaatttagaatatttctgttgtttggtaaattcagtgaattcactaaacctcagtgaattgtcactaagttatttttcaccattccctttgatcaaataaggtcagttaacttctaaatttggcctattgaacaaagtacagcaatagcaactacaaaatatttacaaatgtataaaggttttggaatttatttgccaaaccaggtgcatgcaatttccacaataaggcaggctcaaaacaagccttaaaagcctttgatatgttttattaattagctcattctttttaaaatacatttataagagg

SEQ ID NO: 15414 - DNA, 457 bp, Homo sapiens
  misc_feature (1)...(457): n = A,T,C or G
attgagacatgagaaccctcgcaaaaacnggnggaatnnangagattcatgagcacatgggtattactgaacgcactgaaaacatttatcacctttttttctttatttatcgactgtgtcatgacaaggaaacttacaaactgcaacgcagagaaactattaaaggtattcagaaacgtgaagccagcaattgtttcgcaattcggcattttgaaaactaagttggcgtggaaactttaatttgttcttgaacagtcaagaaaaacattattgaggaaaattaatatcacagcataaccccaccctttacattttgtgcagggattattttttaaagtcttctttcatgtaagtagcaaacagggctttactatcttttcatctcattaattctattaaaaccattaccttagaattttttttttttcgaaggggcggagtcttttatattttgaaa

SEQ ID NO: 15415 - DNA, 467 bp, Homo sapiens
  misc_feature (1)...(467): n = A,T,C or G
natagagatcgtatgacactacgccagngcggaggaattcgcgatagcttctggtcaagaaggggatggctgtccacctaacgctcttgttgactactggcaggtggccgtgaggaatgtcccaatgacaggctctatcagtcatgtcctggtgcagctcccacatgtcttccagaggatggaagctgaaaacctagcttcagtgattgatgccaggtaacccactcctcccagcaggcccctggggaccacatagagagatttgacttgggcatacaaacctagaattggattccattttgcttttattgataactaccaaatcagttgagataattgaacttaattatgtcatttgtcagaggaggaaactgaagcacagagagaaatagtgactttggcctaggtctcataactagttagtagcagggttattactataaatcaggactctttcactcttgact

SEQ ID NO: 15416 - DNA, 456 bp, Homo sapiens
  misc_feature (1)...(456): n = A,T,C or G
tggcaatgtagacatgatgtccntcggaggaactccccggcgcccgggcttaatgtttgtttatataggttattaagaatcagtttgtgacaggctattagtattgttacttctctttgttactgtcgattttaacaacaatttatgtgtgtactgttacctttaaagtaaaacttatttttaaactaagaatgctttttgttcttaaagttctgggacatttaaataactttcatgtctttattaacttgttcccacaatcataaatattttataacgaaaagtgctcaacccccgaaatatataatccaacaaatttaacgtgtgtgtgtgtgtgacagagagagagagacggngtctcactctgtcgcccaggctggagtgcagnggtgcgattatggctggctcattgcagcctcgaactcctgggctcaagcaatcctcccgcttcagcct

SEQ ID NO: 15417 - DNA, 453 bp, Homo sapiens
  misc_feature (1)...(453): n = A,T,C or G
cagttgcttttacatgtgtatataactttacctttttctcatttactgtcttacttgatctcttaaccttgcctattttggggggcatgagaccagatctcacagtcttacacagtccacttcgccaggctactttgagaccagttgtcactactgcctgcagaatctccttcccttccttttgggggtaatccaggtcttaaaccagtgtaagctctttttcctattgctctggagtgatagtttctaggatctttcaagaagtttggaagaggccaggcatggtggctcatgcttgtaatcccagcactttgggaggctgaggtgggtggatcactcacccacctggtcaggagttcaagaccagcctggccaacatggtgaaaccccatctctactaaaaatacaaagttagccgggtgtggtggcaggctactcangaggctgaggcaa

SEQ ID NO: 15418 - DNA, 493 bp, Homo sapiens
  misc_feature (1)...(493): n = A,T,C or G
natcgagatcgctancnagtgnggnggaattcacaaatctgggccaggctccctttcttcccacgagtgctacagatcagcctccacaaaaccagccactccccaggctcaagctcaagctcagagggacacaagccaaccaaggctacagttagagaccggtcctcagaggcctcgtgtagtgcgacgcccttgtgtggcagtaagaaaacgagggtcctggaaaggccccggacactgcttgtggacaccagtgcttctggcagacccacgcaggggccccgagaagggcgctgctccacgggactcaggtccacacggggagctcttgcctttctccggacccaagatctggcccgcaagcaaaaataccaaagaaaaacatgctagcacaaaaatattaaataacaactttgctaccttttaagtgcaggtttcaccaaataccacctagagactctgctacttttcaaagacatccacaaatagcagn

SEQ ID NO: 15419 - DNA, 455 bp, Homo sapiens
  misc_feature (1)...(455): n = A,T,C or G
naatgagaccctagatagagcgctgtaagacgcancaccccatctctacaaaaaatacaaaaattagctgggtgtggtggtgtgcgcctgtgatcccaggtactcagggggctgaagcaggagaattacctgagaccagggaggttgaggctgcagtgagctatgatcgcaccactgcactccagcctaggtgacagagtgagaccttgtatccaaacaaacaaaaaaactttaagttagagaatagtttagtttaatatgtctgtgtaatactcagaatccacatacatgtatacatgtgttgtaaaatcatcagatatgggccaggcatagtggttcaaacctgtaatcccagcactttgggaggctgagatgggtggattgcttaagctcaggagttcgagaccagcctgggcaacatggtgagacccccatctctataanaaatatttaaa

SEQ ID NO: 15420 - DNA, 491 bp, Homo sapiens
  misc_feature (1)...(491): n = A,T,C or G
cggcccggtgnttttnaattgatgactctcgtacangcgttggaattcccttggatcccgtcagtggtgctgctcagcggcttgcacgtagacttgctaggaagaaatgcagagccagcctgtgctgcccactttcagagttgaactctttaagcccttgtgagtgggcttcaccagctactgcagaggcattttgcatttgtctgtgtcaagaagttcaccttctcaagccagtgaaatacagacttaattcgtcatgactgaacgaatttgtttatttcccattaggtttagtggagctacacattaatatgtatcgccttagagcaagagctgtgttccaggaaccagatcacgatttttagccatggaacaatatatcccatgggagaagacctttcagtgtgaactgttctatttttgtgttataatttaaacttcgatttcctcatagtcctttaagttgacatttctgcttactgctactggat

SEQ ID NO: 15421 - DNA, 456 bp, Homo sapiens
  misc_feature (1)...(456): n = A,T,C or G
attgaagccttggatgccatcagaacaacnggnggaattcctcattcactttcacatgcattaaatgttacccaaaattaatccctattttaatttaaaaggaatccaaaatggttttctaaaattatgcccaattgcatgtgatagacaacatatcatagatatcaatcttatctatctaagataagataaaggagatagacgttttcctgtcggaaaaggatctattatatttgccacaaactgacaaagatgaggatgtggcaactcatcaaaactcacagcagtacgtaaaggttaatgttaccaatttatactaatggggcttaggatttaattgaggtggacacacatgcagtcacactattggaaatgtttaaatttttcaactaaaagtagcatgctgcttttcatggaacgttctctgtttcttgcaggtgagcacattcgattgtg

SEQ ID NO: 15422 - DNA, 489 bp, Homo sapiens
  misc_feature (1)...(489): n = A,T,C or G
tggggaaatgccggnagnnccnccactgatgacctttttcgagaccttaggacangcggnggaattccttaagaaaagccattacatttcttcaaagcgctactcgattaacttgtggaaatgtgatcacagagaaagtgattacagacattgctggggtaataccagctgagaaaattgatggagtatttgctgcctgtcagagtggctcttttgacaaactataaactgtggtcaaggtaaagtcagcttactaactttggggaaaggaatattaagtcatcataccaaaagttttttttattataggatttaatagatgagggtcatgcagcaactcagctcgtcaatcaactccatgatgtggttgtagaaaataacttatctgataaacagaagtctattatcacagaaaaacttgccgaagttgacaaatgcctaacagatggtgctgatgaacatttgcaactcatcaacctttgtgcaact

SEQ ID NO: 15423 - DNA, 482 bp, Homo sapiens
  misc_feature (1)...(482): n = A,T,C or G
ggnnnaagaccngnatnntnnnaaatgatatcactagagagcctgnggaanncgctggagaggccaaggcacaatggggtggttccatggcccagaagcactctagctttagattagtttatttcaggactatattaaggttcccaacttctgtcatgatatagtccaaagagaacctggaccacgcagacatcaaacagaacatgacgctgacccattctatcagtgacgttgtgctgattgcacaggacagatgagaggctcgtatactagaagtcttgttatccacagaaggaatgatctgcaatgtacacatgccaggacagaaattctacagttgctgataaaatgtaaacctgtaagtactgaataagaattatgcccaataaaaagtcatggctagggagtaaaagatggagtgttgacagggaagtataacaataaatgggggaatcaggagaggctgattacctttgctgatg

SEQ ID NO: 15424 - DNA, 450 bp, Homo sapiens
  misc_feature (1)...(450): n = A,T,C or G
tccccatgaagaccattanatagagcggcgtaattctagncaaccaagtgttagagaagactgcataagggactcccactggaggccttgtatgattaaggataccaacatcaaaggtgtaatcagcctcattggaccactggtcagaaatgtctgcgttttgtcacgttatccattgtaaattttcattctgttttgcatgacagttagcattatgtaaacatttacaattaggttacattgctttaagaactacttctcatatttgatgcatgatccaaaatacttgattattgtgttttcagagcataaaccatgattaaaactgctactggcatcagaattgaaaatcatatgtttaagtaaatgttaggtacagattacaaaaatctgttaaagcaaaacattttggatgagtgaaatagtacaatgccaagtattgtggcagat

SEQ ID NO: 15425 - DNA, 498 bp, Homo sapiens
  misc_feature (1)...(498): n = A,T,C or G
atgcctgnnnnaacttggtacatcgtaanaacngcaannnangatgaacaagactggcacatgaaaagaggcagggcctatggcctaagggagggtttgtttactcccagccctccctcggntttcacctgccctgtgtgaatggacaagtaatgtcataatgtgtgagtaaattgaccctggaatgaaacacattttggatcattaaaagagagaagattgctctagatcaagaaagtcttaagtactaagagaagtgtctgtttataaaggacataggcaaaaatttaaacagttttaaggaaggaaataataccatggtggttggtctgtttataaaggacataggcaaaaatttaaacagttttgaggaaggaaataataccatggtggttggggccaacctttcgtttcctcttctgttgaggagtcgctagtcttacccagaagcctttcaaaactaaatggtggcaactggcctccacagaactttctttg

SEQ ID NO: 15426 - DNA, 491 bp, Homo sapiens
  misc_feature (1)...(491): n = A,T,C or G
natcgaaatcgatgaccactagtccangtggtggaattcgaggaagcggtgagtgaatgtgaatgtgaaggcctgggacactttataaacgctatacacttaggctacactaaaattattttaaaaattttaccttcagtaataaactaaccttagcttactgtaactttttttgctttaaaaactttttaatttttaaactttttgactcttatgtaataacacttagcttgaaacacaaacacattgtacagctgtacaaaaatattttctttctttatattcttattttataaacattttttgaaatttatttattttttttactttttagacttcattatttaaggggcctattgaagtctctgttattattaggttgtctatttctcctgtcaattctgccaggttttgtttcatgtattttgggggctctgttgtcatgtgcttgtacgtttattatatttccagacagatgagcccttttatcg

SEQ ID NO: 15427 - DNA, 471 bp, Homo sapiens
  misc_feature (1)...(471): n = A,T,C or G
tggtaccngttcggagnnacaacgttctgctaggaagngcggnggaantccaatactgcaggacaatactgaacgagaatacatgtaggagaatactgtacgagaatacatgtactgtatgagaatacatgggggagaatgctgtaggagaatactgtacaatacatgtaagacaatactgtagaatacatgtaagagaatactgttggtgaatacatgtaggagaatactgtaggagaatacatgtaggagaatactgtatgagaatacatgtgagagaatactgtacgagaatacatgtaggagaatactgtacgagaatacatgtactgtaggagaatacatgtaggagaatacatgtactgtacgagaatactgtacgagaatacaatgtgctgcttcaagccactatttatgtggtcattggtcacaacagcacgaagcactgctctacagggggtgaagagtggn

SEQ ID NO: 15428 - DNA, 457 bp, Homo sapiens
  misc_feature (1)...(457): n = A,T,C or G
gggttaaaatgtagacattatgattgctggcgaatncgcnngcagtgctgatgggagagggaagaaggaatcaggtggaaagggtgattcactctaaacgacctggctcagagcccctccccggcttctctcctgacttcgaggtcagatagtagttgttggcatttgccatgtgaattacatcaggcttcagtttgatgtctcatatctgactgtttaagcaaaaatataattcacactttctaagcattttaaatgttcagctaaagttagctgtgaaatgcagccttttcaggatttgattgatagctgataaactggcaagcagatgacttgttaatctcagactttctatctagggctattgtagtcagactttgtttagagtactggccagctggagtgtgacctgagggaggccaggatggtgactagcctgganaccacatcacaagag

SEQ ID NO: 15429 - DNA, 463 bp, Homo sapiens
  misc_feature (1)...(463): n = A,T,C or G
nnttcgatgaccttagtacagngctgnggnttgatatccatgaaacagacgangaaaataaccccttgtcaaataggaagaaccccctgtaaaaaactgttgatgtggcagcagagaagaaagtggtgaaaattacatctgaaataccacaggctgagagaatgcagaagagggccgaacaattcagtgtacctgtgagccttggagagtaagaaagctgctcaggcagctaggtttgggatttcttcagttccaacaaaagtctgtcatctgaacacacctatggttaacttggataagccgaaggaaagagctcaaagatttggtttgaatgtctcttcaatttccagaaagtctgaagatgataagaaactgaaaaagaggaaggagcgatttgggattgtcacaagttcagctggaactggaaccacagaggatacagaggcaaagaagaggaaaagag

SEQ ID NO: 15430 - DNA, 430 bp, Homo sapiens
  misc_feature (1)...(430): n = A,T,C or G
gcttcatacaagcaatgcaagaagggcactttagtgtttagcacactgtgtacttaatattcattatagtagtagcattggttttatttattcagcatacttatttacactttgaaatttgaaaactttattttttttttttggaaacggagttttgttttgtgacccaggttggagggcaggggcacaatttgggttaattgaaacctccgcctcccaggttaaggcaattttgtttaaccctccccagaagttggggattacgggcgcttgccacgacccccagttaattttggtattttaagaagagacggggttttaccatatcggccaggcgggtctcgaactcctgatttaaggggatctgcccgtttcagcctcccaaagggctgggataacaggcgtgagccactgcgccgggctgaaaatn

SEQ ID NO: 15431 - DNA, 521 bp, Homo sapiens
  misc_feature (1)...(521): n = A,T,C or G
tcgcaccatccaggtttaagtaattaaatataagaaaaaacgtatgaggaactccgcatttcagcttcctttcttggaaatcacatgtacctgtttctgatcggattaaaccatttgattgctagagcatgcgggctttaggatagtcgtacagagtatatgttcagtgcagcttcatttttcattgtggactggcatcctgttgtagtggaaagggacaaaatttggaatcagatttcctggtcagctagctctttgcttgcacattatttccctaagcctcagttttctgatctttaaaataggaaatgtttatttcctagatatgcacaatgagaatggtgctgagcaccctagcacagtgcctgccccatagctaatgttcagtaaatattgctctgccttcgtgtccccaccctccccaattgagcagcagtttttactttgatgatatctaacgacaagatttctgagttttagtagggttggngagctgatatgaagggcagcatcacttgctn

SEQ ID NO: 15432 - DNA, 468 bp, Homo sapiens
  misc_feature (1)...(468): n = A,T,C or G
cggcgggannnntnnataacgaacnatcaggtaggacctggaanancggaannnnnttctgcttggatgaccacaggtgaccctagtatcttctgtagtctgcccttgggcttttttatagtgagtagcatggtaatgttaatcggagcatggtacatctcagggtagttactctttaaattagacaactctattagttagctttaatgttttcgtgtataacttagcagaaatttttcagtgtttttcattctttctgtgtctaggaagctggaaaatcaattaaaggtctaattagttagaccaattaatctttgggggcagttagaagtaagaactgtgactctgcttaccctttttaaatttttaatgtgatgacttctttaagagggactacattctgctgtcagctgcagcaataagcaaaagtgaaaatactaatatttaaatgaaaggactttcagactg

SEQ ID NO: 15433 - DNA, 467 bp, Homo sapiens
  misc_feature (1)...(467): n = A,T,C or G
ggcgcgnnnnnnnacctgaaacgactccgagactctcngannnncgngagnnttagaatactggtccattcatgagatattcaagattcaagagtattctcacttctgggttatcagcataaactggaatgtagtgtcagaggatactgtggcttgttttgtttatgtttttttttcttattcaagaaaaaagaccaaggaataacattctgtagttcctaaaaatactgacctttttcactactatacataaagggaaagttttattcttttatggaacacttcagctgtactcatgtattaaaataggaatgtgaatgctatatactctttttatatcaaaagtctcaagcacttatttttattctatgcattgtttgtcttttacataaataaaatgtttattagattgaataaagcaaaatactcaggtgaaaaaaaaatttctttaaaattatattcttact

SEQ ID NO: 15434 - DNA, 488 bp, Homo sapiens
  misc_feature (1)...(488): n = A,T,C or G
naatcgaagaccactagtcagngcggnggattgactgacggtaaggcctgcgcttggagatggggtgcgcaggagtggctggctttgccttgttctattaggcgagtgattttcagagacaaaggtccaagttaggagacgtaattactcagtgctttgaagggacatccaaggtgctcactcttagccatagccgttggtttcctggatgctgactgtgaagattctaaagtgcttcctanggtgggcggtggtggcaggaggccttggacggagtccaggccagacccagcctcctgtttaataggctgagcccaagcgtccctcagatgcgaatccaacagccttggtgagttgtaagatttcatggaaactttccctgacttctgcctcccccttgctccccattacctgggaaaggcagctttgtgggccatgtgtcccggaagggcctgggctggctgtggcccantgctcaagaccagccc

SEQ ID NO: 15435 - DNA, 464 bp, Homo sapiens
  misc_feature (1)...(464): n = A,T,C or G
nttcgaagcccactgatgacccttagncagngcggnggaattcggaacatggcgttgctggtgcgagtccttaggaaccagactagcatttctcagtgtgttccagtatgcagccgattgatacctgtgtctcctacccaaggacagggggacagggctctgtctcgcacttcccagtggccccagatgagccagtcccgagcatgtggtggatcagaacagattcctggaatagacatacagctgaataggaagtatcacaccacacgtaagctttctactaccaaagattccccacagcctgttgaggagaaggttggtgctttcacaaagataatagaagccatgggattcacgggacctttgaaatacagtaaatggaagattaagattgcggccctgcgcatgtatactagctgtgtggagaaaactgacttcgaggaattctttctaaggtgtcagat

SEQ ID NO: 15436 - DNA, 483 bp, Homo sapiens
  misc_feature (1)...(483): n = A,T,C or G
gggtcccaaanaacataaacctgaatgccntngaannactgatgtcattagtccatgcggtggaattcgaaattacaggcatgagccactgctcttggcagccttgggtggtgaatttctaaggcaattagatgcaagctcatttaactcttgagtagtctgaatagtgaatatcaatagctatttcagaagagtcactttggagagcgttcctccaaattcagtatgttgtaatccaaaaatccagtacaaaatcattgttgcattcatcagaactttttttccaatctctctcctcactgtattgtttgccccatagaagaagcaggccatcaggacctgatcttacttggatttggccattttcaatttctttctctagtaaaacttttcaccattgttccttaaagatagcagttgtctgatttgcatgctgcttctattttttataagcactcanaataaaaaaaaaaaagcggccgn

SEQ ID NO: 15437 - DNA, 457 bp, Homo sapiens
  misc_feature (1)...(457): n = A,T,C or G
ggtagaaatgagaccatagnaactgatggcgatagcctcattcttcacttcctgtaaaccactccatagatttgtctttcttcaagaaattagttttctttcctttatttgattgatggtcattgactactgaaataaaatatgcattttaagataaaaaaaaaaaaaaaaaaaaaaaaaaaaaaaaaaaaaaaaaaaaaaaaaaaaaaaaanttggggcctttttaaaaaaaagggccctaaaaaaacccgtaaaaaaccttagaggggttttaaaataccaaaccaatttggggaccccccccccccggtttttttttgaaccgggaaggggccaccacaccgttttttttaaaaaaaaaaaaaaaaaattcctaccattttcaaaaaaggggtaaatattatgcgctnnnccaaccccttccttcaaaaaactgggccgaagaaaattccaaag

SEQ ID NO: 15438 - DNA, 492 bp, Homo sapiens
  misc_feature (1)...(492): n = A,T,C or G
aatcgancccctnngnnnnncnnnaactgtagacactagtccatgcggtggaattcttanaaagttcatttattgaaaatcatatgtataacctagcatacgaatgagcagatttaaacacataacttcaagccatttctgaaaacatacaccaggagctctgctcagctagagtcagactccagctccagcccgactgcgtgcggggacagcgcccgcgttgatgaggaccagccccactgcaggctgaggcggtgtcaccctgggaaggtcgtggtgcgttgtggcatattaagtctaaaccagatgaatgtaaatatctctttgtaaatcatttatttcactctgttccatccaggtcagcaatcagattgtggcatgctgggtaactggaaaaaataataaaaagtaagtttcaatagctcatgttcttcaatgttatttgtcttctcatttgctgggttagtcaccttttatgatgaaaactgttgg

SEQ ID NO: 15439 - DNA, 463 bp, Homo sapiens
  misc_feature (1)...(463): n = A,T,C or G
cccccatcgagaccatagtagacgtctnggaagtcccgagcccgggcacactatctttaactggaagctgctttcctatgtcactcctctaaacattaatttttataaaagagtgtaaaaccttcctaggagagatacaaataaattttaaaaattgtttctaaatgaaatgtcgatatcataatttgaacaaccacttaagctatggagttttctgaaatgaataaccattaactgtgtttggttttcaacccctgtctattaagtgcattcagtgttatcaggcctatcacaatcattattcctttttttaaaaaaaattgaacgctgcgcgtggtggctcacgcctgtaatccaagcactttgcacctgcgaggcacgtggatcacctgagggtaagagttagagaccagcctggccaacatggagaaacctcatctgtactacttaagtgagaattagg

SEQ ID NO: 15440 - DNA, 458 bp, Homo sapiens
  misc_feature (1)...(458): n = A,T,C or G
aactgagaccctaggaagttcgatggccntcctgagactctggcttattcagtgatgactggcttgagatgataagagaattctcgaactgcatgtattgtgccaatctgtcctgagtgttcatgctttgtaccaaatttaatgaacgcgtgttctgtaatcaaactgcaaatattgtcataaccaacatccaaaatgacggctgctatatataagtgtttgtcatatggaatttaatcgtaagccatgatcataatgttaactaaataactttatgtggcactgcctagtaagggaactatggaaaggtttggatttctccaaatctgggagaattttcaaaataagaaaataacctttatatgatatactatgactaggctgtgtatttcttttcagggattnttctaccttcagggttggatgtagtttagttactattaccatagccaacctgt

SEQ ID NO: 15441 - DNA, 461 bp, Homo sapiens
  misc_feature (1)...(461): n = A,T,C or G
nttgagacccattgacgacactagaaagcgcggagcaatatctcacaaatcaccactaaggaacttattcatgtaaccaaataccacctgttcccccaaaacctatggacataatttttttttaaaaaaagaccaatttggtttatatacttggcctgattatttgtataaagtgcagcaagaataattagttttcactagccttttaaaattggctttgatggaactttgttgcataaaaggagtctaaaaaaacaaccactgaacttgtagagggcacaagcaaacagaaaaatatctcacattcctggattgtaagaattaatattcttaaaatgagcatgctatccaaagaaatctacaaattcaatgcaatccttatcaaaataccaatggcattcttcacagaaacagaaaaaagaaactcctaaaatgtgtatgaaacaattaaccatgaatag

SEQ ID NO: 15442 - DNA, 464 bp, Homo sapiens
  misc_feature (1)...(464): n = A,T,C or G
actgatgacactgggaaaactgagtcactcgtacagngcggnggaattcataaaaaagaggaagtcattctaaggaactgaatgaggtgagaatgaggagagtttttgggtaatggtgaaatcagctaaagtagaatggagcttataaatgctggataataatgtagaacctgggagattaaatactgtgatgaaaggtaagcagaagtcatcacattagattcttttggggttgacctgtggtaactatgtagattggttatcttttgccttatgttaccccaaaacttagtggcttaaaaaaacaaggatctgttatatcatagtttctgtgagtcacaattctggatgcagcttacctgggggcctctggcttatggtctcttacaaggctgcaaccaaggtgacggcttggtagcagnnctctctctctctttttttttttttttttttaaaaaacaaag

SEQ ID NO: 15443 - DNA, 461 bp, Homo sapiens
  misc_feature (1)...(461): n = A,T,C or G
aatgggancctgaggacngtgcnggaattcgtaaattatgtaatgcaaaatttttttaatcttcgccttaatacttttttattttgttttattttgaatgatgagccttcgtgcccccccttcccccttttttgtcccccaacttgagatgtatgaaggcttttggtctccctgggagtgggtggaggcagccagggcttacctgtacactgacttgagaccagttgaataaaagtgcacaccttaaaaaaaaaaaaaaaaaaaaaaaaaaaaaaaaaaaaaaaaaaaaaaaaaaaaaaaaaaaaaaaaaaaaaaaaaaaaaaaaaaaaaaaaaaaaaataaaaaaaaaaaaaataaaaaaaaaaataaaaaattaaattaaatanntnnttttttttnttnntattaaataaaaataaaatatatatttaattaaataaaaattctttttttattatttt

SEQ ID NO: 15444 - DNA, 466 bp, Homo sapiens
ggccggaattgtagaccattagaaattgatgatcgatacagaccgtgcggtggaattccattcttgcgttgtcccaccaatgtgtttgctggagtgagtgcatcaaggatgctttcctgaaactgtaactgtggagtttctagaagaatctgattgcagaactaattctctttcagtatatatttgaaatcttaaagtaatgctttttctttttctttttctttatttttttttagaaacggaacttggccttgccccccggcttgtttggaagggccaaaatttgggttaattgaaccctccccttcttaatttaaggcatttttcttgtttaaccctccccaaaacttggaatggcggccttgcccccccaccccgggttaattttttggtttttaagaaaaaaaggggtttaacaatggcccccgggtgtgttctaaaatctggccctaaaaaaacccccccc

SEQ ID NO: 15445 - DNA, 456 bp, Homo sapiens
  misc_feature (1)...(456): n = A,T,C or G
catcgagacccctgngcancgcgtggaattcatgcagaccgctggctcttctgcctggttttccaatgcttgcctttgcccatttccactccaccatccctgcctctcctgcatgggagagctttccatctctccatttgttgaggtacttttcagcttcttttataacattcttcaaaaagagctgctgcattacttttgttaggattattcttacataccttattttttgttgctattgtaaatgggatcctttaaaaaattacattttctcattgttactggcgtatacaaatgtaacagactttgtatattaactttgtgtgtgtgtccagccaccttttaaattcttgctaattctgctaattctagtgagtagtgaagactcaggttttttaattagaataatactttaaaaaatcactgccttcctgctttcttgcctttctgcagacn

SEQ ID NO: 15446 - DNA, 433 bp, Homo sapiens
gccaagaccgtcacttagctgcacctctatttctgcatctgtaaaatggggtcataatcatcgcccacacccccaaactcagcactgctcattcgttcggccagagtggcttgggcatctgctctgtgctgggccctaggccctgcgggatacagggaacagttggacagagcctctgtctatggggtggagagaggggccacaccacaacccaagccaggaagtggtcagcgccttgagggaggtccagattttgtgctcgggaagtttgtttgcagcagggagcagcccttccagctggagaagtgaggcaagacttcgaggacatctgggctggctctgcaaggaagggtaggatttcaacacgtggagatgggaagaggctttccaggcagaacaaatggcaggacccaaggcctggcagcaggaagag

SEQ ID NO: 15447 - DNA, 453 bp, Homo sapiens
  misc_feature (1)...(453): n = A,T,C or G
ngtggtcctnaatccgaaaacccagtggtcctgtanaaacnnnggaantnnattcccgggctcgatgccggataaacaccttggtccgccggttgggtaggcacttgggcataggtaagcggaagggtagggccaatggccgaatgccagagaaggtcacatggatgaggagaatgaggattttgcgccggctgctcagaagataccgtgaatctaagaagatcgatcgccacatgtatcacagcctgtacctgaaggtgaaggggaatgtgttcaaaaacaagcggattctcatggaacacatccacaagctgaaggcagacaaggcccgcaagaagctcctggctgaccaggctgaggcccgcaggtctaagaccaaggaagcacgcaagcgccgtgaagagcgcctccaggccaagaaggaggagatcatcaagactttatccaaggagn

SEQ ID NO: 15448 - DNA, 453 bp, Homo sapiens
  misc_feature (1)...(453): n = A,T,C or G
ttcgtagaccttngnttttgaagacccctagtccagtgcggtggaattcttgagaccagcctgaccaacatggagaaaccccatctctactaaaaatacaaaattagccaggcgtagtggtacatgcctgtaatcccagctacttgggaggctgaggcaggagaatcgcttgaacctgggaggcagaggctgcggtgagccaagatcatgccgttgcactccagcctgggtaacaagagcaaaactctgtttcaaaaaaaaaaaaaacccctcccccggggaaagggggggggggaaaaaccctggggggttgggtaggccatttttggatccccctttggttttttttccacaaacaaaaaacggggggtggacttggggaccaaaaggaattaacctcttttccttgaaaaaatgggggctacccttgtttttttttaaaaggacggtggg

SEQ ID NO: 15449 - DNA, 446 bp, Homo sapiens
  misc_feature (1)...(446): n = A,T,C or G
nttgtagaccctagtctgtgtggcggaattccacgtatcctgaaaactggagggccttcaaggctctcatcgctgctcagtacagcggggctcatgtccgcgtgctctccgcaccaccccacttgcattttggccaaaccaaccgcacccctgaatttctccgcaaatttcctgccggcaaggtcccagcatttgagggtgatgatggattctgtgtgtttgagagcaacgccattgcctactatgtgagcaatgaggagctgcggggaagtactccagaggcagcagcccacgtggtgcagtgggtgagctttgctgattccgatatagtgcccccagccagtacctgggtgttccccaccttgggcatcatgcaccacaacaaacaggccactgagaatgcaaaggaggaagtgaggcgaattctggggctgctggatgcttaa

SEQ ID NO: 15450 - DNA, 447 bp, Homo sapiens
  misc_feature (1)...(447): n = A,T,C or G
nttcgtagaccactagncttgtgcggcggaattcgagctgcttccattgtcagggtattttctaatttcagttcaaggaatatcctaaaatttagccttgttcagaatttactgcacataaaaaagggtatttcatccagaatagatcagttattgaagcagtgctgctaacatccattccctttcataccaccattttcaccctgtttcttcccctcctccagttctttggaaatttgtgatcgggggatcttagttgcttatttgttttgactcttgtgtgctgtgggcactggagtagagatttctggagaaaaaaaaacagtttatttcatcttgccttttgtgtttgagttatttttaatattttcctgtaaatattttgtaatattttacttggaatgaaatggatcacaatgtcatttcctaatacaaggcaggatatgg

SEQ ID NO: 15451 - DNA, 438 bp, Homo sapiens
  misc_feature (1)...(438): n = A,T,C or G
cttgacgtccattacaccagngcggnggaattaaatattttgcggcattaaagccatatacaaggtctatatcagaaaaatatatttgtggggctgcagcacaggactgagggagcggtacatgcttaaaaggcaacagggcctggttttcagtggcgatgatgattctctatgacagtcagggaaacgtggtctctgagagtgatgggcacataaagccttggtgccagagtgcatcgcatggtgtccaggccgagtctctgtcagatggttagaggcctgggtctaccctgccaggagaggcgtgtttgggtaacaggcagatggagtttggaacacatgaatggctcatcacacgccaaccctgagtggggcaggaggcaggaagggtgggctgccgcctctggttggcattctcagagatgcgcagtccatcag

SEQ ID NO: 15452 - DNA, 584 bp, Homo sapiens
  misc_feature (1)...(584): n = A,T,C or G
ntttgaaccccccttcgaatccctatccgagngggcgaattcnaagttggatggaactgaagtcaatgggagaaaaatcagattagttgaagacaagccatgttccagacgttgccggtcctactccagaagccggagtcattcaaggtctcgctctcgaagcagacattcccgtaggagcagaagccgaagtggcagcagcaaaagcagtcattctaagagtagatctcggtccaggtcgggctcccgctcccggagcaagagccggagccggagccagagtcggagccggagcaagaaagagaaaagcaggagccccagcaaggacaagagccgcagccgcagccatagcgctggcaagagccgcagcaagagcaaagaccaagctgaagagaagatccaaaacaatgacaatgtcgggaaacccaagagccggagtcctagcaggcataaaagtaagagcaaaagtcggagcangagtcaggagaggagagtggaggaggagaagcgagggagtgtgagcaggggcaggagccatgagaagagcctccgccagagtcggagccggagcaggaaaataagcg

SEQ ID NO: 15453 - DNA, 468 bp, Homo sapiens
  misc_feature (1)...(468): n = A,T,C or G
cttcgaccccctattgtatgacatctagnacangcggnggaattctgcttttgaattccaaataattgacttgcaatgaaatttgggttccagactgcctataaagattacaggtgtaatcagtctcactgatttaatagtcttgccagattatatgttaggttttttccccctcccaagttagattgcagattgtataaagtcagactttgttctttcatgtctgccagcacattgcagagcatgtaggcactcagtataaatttgtcaatggctagattggttgaaaactcaagtatttgtttagcctcacacattttctctttttgactctttacttttttccttcttcttttcctgtaaaagggtgccatccaaatagcaatgcctggtgggttgaagcagtggaagtatttgagaacagtaaaagaccttgaagaggatgtatttttattttatttttaatcn

SEQ ID NO: 15454 - DNA, 511 bp, Homo sapiens
  misc_feature (1)...(511): n = A,T,C or G
ggggaggcgagccngnnnnnaattgagaactgagatcatagcccagngcggnggaattccagaaaagggcttcacccatttgtttttgacttctatgatagtcactgcatatgatccctttaagtgtctttaaaaaaaatgacttatgaatttgatagcatttggggaaaaaaagccttatatgattaacaatttgtaagttttcaagatcggatggaatttaattttgctcctagaatttttgtcttcagaatatctagttaagataaattaggcctttgactattataggtattcataaatgctactttagccatgtaagttaaaaagttaaaatacttaaactttagtgtatttatttatctcgttactttttttctaattttatatgaaatgtgaaaggtctttattttggtttggtttactttgggctgctaaccaccagtgttaggaattaatgtagggcaccctcttattgggaatgtcactgtaattgcctacattttctttg

SEQ ID NO: 15455 - DNA, 421 bp, Homo sapiens
  misc_feature (1)...(421): n = A,T,C or G
ggaggcaggtggtctaagtgctgactggctacgtagttcgggcaaatcctccaaaagggaaagggaggatttgcttagaaggatggcgctcccagtgactactttttgacttctgtttgtcttacgcttctctcagggaaaaacatgcagtcctctagtgtttcatgtacattctgtggggggtgaacaccttggttctggttaaacagctgtacttttgatagctgtgccaggaagggttaggaccaactacaaattaatgttggttgtcaaatgtagtgtgtttccctaactttctgtttttcctgagaaaaaaaaataaatcttttattcnnntnnnannaanaaannncaaaaaaaaaaacaaaaaaaaaaanaaaacaaaaannnannnnattttcctgctgcctatcgccgcgct

SEQ ID NO: 15456 - DNA, 429 bp, Homo sapiens
catgttgaccccaagccatggtggcagaggagctggtgtgaacgccccatcctgccacgtctgtgatgtgggcacctcacatgactgtcccctcccagctcttgggggggacctaggacattctgtgagcctgcaggaaagtttaccaaatgctgcagctttgtcctggtggtgatgggcaccccgttaacggcaaccttgcatttgctatgtggagtgaccgtcactttaccgtcggcatttgtgaaggaagcgtgtttatctgaaattctaagaagatgagagtcaaagacacccagcaaacggcggtttccgtgagcagggttggagcccaggaagcaaaccagcactgcactctagatttcagccagaggacgaaagccctgccctcagctttctcagaccagccctggagtaggtggcccggcg

SEQ ID NO: 15457 - DNA, 404 bp, Homo sapiens
cagtgcctttgcagatcttttgaaaagaaagatatatgaccaagggattcagaaaaaaaagttagaccatagcatgagggaagggaaagtaaaaatttacacaaatttccaaacagcacagtgcattaaaggtccaaggtattaatggaaaggacttaagagatgcttaaacagaaagagtgatctgtattctgactccaactgaacatacaatcaaaagggtaagttggccatcaatactgtttgaccatcattgttttattccatctataaacagccttgtttattcagtcatgagagttgcaagctcaaaggcaaatattacccatggtttttggcctggaatacctcctgtgagatatgcacttcccagttctctacattccccacggttcattctacat

SEQ ID NO: 15458 - DNA, 439 bp, Homo sapiens
  misc_feature (1)...(439): n = A,T,C or G
ctagacttcgatacccttagaccangcggtggaattccagggaggggcaaggcctgaaagccatgcttgctttcttagtggggaaacttattccctggggctaggtctgagtcctgcacaccagctgcctggagataaactgtgctgttagcagggcacagtgggagtgaaactggccttgccaactgtgtggtagctgggtgagccctgtggctacttactttcccccacttccctggtgacagaggcgccataatccacactggaacataaccccatttgcctgagaatcagccccctatcccccacagtggctgtggcaaaaagagtctgagctcagacctgcctaatcctgccccaacctgatggtatttccctacccatcccagtgcccagtcacaaaagacaaactcttgggagctttatggccctacttatn

SEQ ID NO: 15459 - DNA, 487 bp, Homo sapiens
  misc_feature (1)...(487): n = A,T,C or G
ccttgacaaccctcttttgagacactagtccagngcggnggaattcagcttgaggtgaaggggggcaaaaaaaagaagcaagttctgaagttcactcttgattgcacccaccctgtagaagatggaatcatggatgctgccaattttgagcagtttttgcaagaaaggatcaaagtgaacggaaaagctgggaaccttggtggaggggtggtgaccatcgaaaggagcaagagcaagatcaccgtgacatccgaggtgcctttctccaaaaggtatttgaaatatctcaccaaaaaatatttgaagaagaataatctacgtgactggttgcgcgtagttgctaacagcaaagagagttacgaattacgttacttccagattaaccaggacgaagaagaggaggaagacgaggattaaatttcatttatctggaaaattttgtatgagttcttgaataaaacttgggaaccaaaaaaaaaaaaaaaaa

SEQ ID NO: 15460 - DNA, 461 bp, Homo sapiens
atcgacccccctaattgaagactcctagtccgtgtggtggaattcgtgttagtatcggtgttcctttttattcaaactctccctattgagctcaagaatcaaagtcagataactttgtcgagaaatcccttcctttctacacccttgctactcactgtctcaagacccaaactcactgggacaaggcgctgcccctcctgattcaagcctggtgtctgcctctcactatgcaaatcaggagccagacagccgcggagagggcggcggtgagtgcacagagcacacgcatgcgtttggcttgcccccacgccgcccccattatctctgtgggtgtgaaggagagaatttttcacttttccagtgagttactgtactgctttgactctcacaagcgtgtcgacttgatggatttttgtaaatatagccgtcagcggatgcctcttgtccccatctcgggaacc

SEQ ID NO: 15461 - DNA, 471 bp, Homo sapiens
  misc_feature (1)...(471): n = A,T,C or G
nnaaatgagacctctgtgaangcggcggaantcgaagcgagcgtcttcgatgcctatgtgcttcccaagctgtatgtgaagctacattactgtgtgagttgtgcaattcacagcaaagtagtcaggaatcgatctcgtgaagcccgcaaggaccgaacacccccaccccgatttagacctgcgggtgctgccccacgtcccccaccaaagcccatgtaaggagctgagttcttaaagactgaagacaggctattctctggagaaaaataaaatggaaattgtacttttnaaaaaaaaaaaaaaaaaaaaaaaaaaaaaaaaaaaaaaaaaaaaaaaaaaaaaaaaaaaanaannaaanaannnnnanaanaannnnnnnnnccggcgccctttaaaaaagggggccccaaaaaaccccctgaaaacccttgtgggttttttttatacccccccattttgttgggccccccc

SEQ ID NO: 15462 - DNA, 454 bp, Homo sapiens
  misc_feature (1)...(454): n = A,T,C or G
nttgaagacccctagtccagtttggtggcattcgttagctcatgctgttaacaagcactgataggaaatttgtcaagggtcaggggcatccacgttcagaatcccttcgtggttaccaaaatgtgaaccccaaaaatttgagacaggtctcagttaatttagaaagtttatctggccaaagttgagcatgcgcgcccgtgactcagcctcaggaagtcctggaaacatgtgccgaagatggttggagcacagcttggttttatacattgtcgggaggcatgagacatcattcagtatatgtaagaagtacattggttccatccagaaaggtggaacaacttgaagcagagagaaggcttccaggtcacaggtaagtgagagacaaatggctgcagtcttttgagcttctttttttttttgagacacagccgcactctgccgccccaagctggag

SEQ ID NO: 15463 - DNA, 452 bp, Homo sapiens
catcgcgatccctagtgcatgtcgtggaattcaaacgtaccacctcctcgttttcttttctcatcagatgttattttactccgtgttctaggtcattgataaaaatggggatggtggtgggtcggggtggagggatagaattctatggcatgttttgttgaattgaattgaatttgctgtcttgaaactggcagttgctctcctgacttttttcaccagcttaatttcagttaatggcttatcttacattcccatgtattctgtgtggtacctgaagttacttgcttttcttctgttctggaagaaaaaataattcacagtaaaatttaacgtactttaaaactggtctcctggtctcaagcaatcgtcccgcctcagcctcccaaagtgctgggattacaggcgtgagccaccgtgcctggccgggttactggcttatttatttaggcgca

SEQ ID NO: 15464 - DNA, 480 bp, Homo sapiens
  misc_feature (1)...(480): n = A,T,C or G
gtggcggnnnnagaagaatgagaccttcggaagactgtgactntatgacagngcggnggaattcgaagaatctaatatacttaaagctgaattaaacaaagtaacatctttgcataaccaagcatttgaaatagaaaaaaacctaaaagaacaaataattgaactgcagagtaaattggattcagaattgagtgctcttgaaagacaaaaagatgaaaaaattacccaacaagaagagaaatacgaagctattatccagaaccttgagaaagacagacaaaaattggtcagcagccaggagcaagacagagaacagttaattcagaagcttaattgtgaaaaagatgaagctattcagactgccctaaaagaatttaaattggagagagaagttgttgagaaagagttattagaaaaagttaaacatcttgagaatcaaatagcaaaaagtcctgccattgactctaccagaggagattc

SEQ ID NO: 15465 - DNA, 446 bp, Homo sapiens
  misc_feature (1)...(446): n = A,T,C or G
nttcgaagaccctagtctgtgtggcggaattcctaataattcactgcagaaaattgattaagtggctgtccttttaattaagagtgtggagtcataaacttaagttcttcatatagtgacaagagtccttagagattgttattcaagttccttagaaattgttatttaggtataatatcatcttgtctttgactagagcttgaaaccttgttatctgattgtgtaccactccaaattccctgccttctgcaagttgaatgtcttgctgaatgtgtctaggggttcatcttcagtaatcgacattccactagtgccatagttaacttcatgacatgtagacattcaaaacttgagccttggatgttcctgtggacctgacagttaaaaatataaagaacctaggattcaattccaactttctctgtttgccttgggttgaataactt

SEQ ID NO: 15466 - DNA, 478 bp, Homo sapiens
  misc_feature (1)...(478): n = A,T,C or G
ggggcccaaatggagaccctnnnaactgatgtccattagnccgtgtggtggaattctattagaaaaaagttatttcttgagttacacctaagaggaagaagtaacatgatggaaagtggttggagatagcacccaattaacatcgacagccaagtcttctatttcagaatattgatttatttcgctttggcttttgatgccatcatgagatttaagtctgcagtttcaaaagctcatgctacttagaagagatgatttttgcagcttaaaaaattgcttgtgactgcagtatgtacacagttaaaaagctgttcactgcccctttcaaccttttcattttgagctttactaagagaatgtttttaggaacagaattcctaaagtgtaattttttatgtataaataaagttttatctatatctgngnaaaaaaaaaaaaaaaaaaaaaaaaaaaaaaaaaaaaaaaagatggggggggg

SEQ ID NO: 15467 - DNA, 413 bp, Homo sapiens
tgctgcttcctgagatggggaagactgtagaggaaacaaaccaggaacgacaaatcagtaatttagctttgaatacattaggtttgagatggctagtctgtacccaaacagaccacactgtggcatctgggcagcaggatctgcagaatccagcaggatggatgctgatgccaagctgagtagacagttgggtctgtgagtctaaagctcacggaagacctcagggtctgggatacaaatctggagatcatcaccctgtccatgaaagccaagggaatgatggaagatactatgacaaaaagtgaagagaggaaagagaagaggttcatggaaggagacctgggagaatccaaccttcgattagatcaggaagaggagaagaatgcagtaataaactctgagaagtctctggg

SEQ ID NO: 15468 - DNA, 452 bp, Homo sapiens
  misc_feature (1)...(452): n = A,T,C or G
ctcgaagaccnttngnncngtcngtccatagtccgtgtggtggaattcaggaaacagggaaagttactaggacagacagattctaaggcttctctgaaaggaaggaaggagttgtgatgtgctaccggggaggtccaagggagaagggcctgggcagtgtgcaccactggtgagggtgtgaaaaatgggctggtgactggccaccaaatggcttggggagaagtggctggagagagggtcacctgtgtggtgggagggatcggacaagtgtttttagatgttatgagaatgtctaagtttgacacaagacactcctaagtttgcaaagaaaggatatacagtcaccttccttcaatatcagaaacaacatgctggggattaaaaataaatacttggccaagaacctgaccatttaccaggtgcatccatacagtaaatatctgagtgtctct

SEQ ID NO: 15469 - DNA, 432 bp, Homo sapiens
  misc_feature (1)...(432): n = A,T,C or G
ctttgctgagggtcacattgagctgcaggttgaatccggggtgcctttaggattcagcaccatggcggaagacatggagaccaaaatcaagaactacaagactgccccttttgacagccgcttccccaaccagaaccagactagaaactgctggcagaactacctggacttccaccgctgtcagaaggcaatgaccgctaaaggaggcgatatctctgtgtgcgaatggtaccagcgtgtgtaccagtccctctgccccacatcctgggtcacagactgggatgagcaacgggctgaaggcacgtttcccgggaagatctgaactggctgcatctccctttcctctgtcctccatccttctcccaggatggngaagggggacctggtacccagtgatccccaccccaggatcctaaatcatgacttacctgc

SEQ ID NO: 15470 - DNA, 444 bp, Homo sapiens
  misc_feature (1)...(444): n = A,T,C or G
gtgggattaaaatgatanacttgatatctgngaaancnnnaggaatcatccaaagttttttttgtctgaataacaggaagaataaaattgtcttttactcagataaggaagactggggaagacgaaagtttggttttgaacagttgtatttgaagctgaagctagctggcttcacacacagtgtaaaattcacacacagtggggtatatgaatttgtagtttgggagaaaggcccaggttgaagatataaatatggagtcatttattatatagtattctaaacagaaaatttcctttatgtttcccttttttcttttctcatgtaattttcaaatatttacagaagtagggaaaatttatgatgaaaccccatgtactcatcatcaacttcagtaattcttaattcatgggtaatctggtttcattgatattacctcctctctt

SEQ ID NO: 15471 - DNA, 450 bp, Homo sapiens
  misc_feature (1)...(450): n = A,T,C or G
ctgaaattcttgccccttcgnncannnnnnaattcctctacattaagaacttggatgacactattgatgatgagaaattaaggaaagaattttctccttttggatcaattaccagtgctaaggtaatgctggaggatggaagaagcaaagggtttggcttcgtctgcttctcatctcctgaagaagcaaccaaagcagtcactgagatgaatggacgcattgtgggctccaagccactatatgttgccctggcccagaggaaggaagagagaaaggctcacctgaccaaccagtatatgcaacgagtggctggaatgagagcacttcctgccaatgccatcttaaatcagttccagcctgcagcgggtggctactttgtgccagcagtcccacaggctcagggaaggcctccatattatacacctaaccagttagcacagatgaggccta

SEQ ID NO: 15472 - DNA, 453 bp, Homo sapiens
  misc_feature (1)...(453): n = A,T,C or G
nttagatgtttgttagccnctncnggngnannnncgtccctcttcaagaagaaaactgtggatgatgtaataaaggaacagaatcgttagttacgaggtacacagagggctataatcagagatcgagcagctttagagaaacaagaaaaacagctggaattagaaattaagaaaatggccaagattggtaataaggaagcttgcaaagttttagccaaacaacttgtgcatctacggaaacagaagacgagaacttttgctgtaagttcaaaagttacttctatgtctacacaaacaaaagtgatgaattcccaaatgaagatggctggagcaatgtctaccacagcaaaaacaatgcaggcagttaacaagaagatggatccacaaaagacattacaaaccatgcagaatttccagaaggaaaacatgaaaatggaaatgactgaagaaatg

SEQ ID NO: 15473 - DNA, 453 bp, Homo sapiens
  misc_feature (1)...(453): n = A,T,C or G
nttcgagcccttngntttgtagacccttagtccagtgcggtggaattccgctaccctatggccgtgggcctcaacaagggccacaaagtgaccaagaacgtgagcaagcccaggcacagccgacgccgcgggcgtctgaccaaacacaccaagttcgtgcgggacatgattcgggaggtgtgtggctttgccccgtacgagcggcgcgccatggagttactgaaggtctccaaggacaaacgggccctcaaatttatcaagaaaagggtggggacgcacatccgcgccaagaggaagcgggaggagctgagcaacgtactggccgccatgaggaaagctgctgccaagaaagactgagcccctcccctgccctctccctgaaataaagaacagcttgacagaaaaataaaaaaaaaattaatttttttattttttttttaaaagagaaggtgg

SEQ ID NO: 15474 - DNA, 458 bp, Homo sapiens
  misc_feature (1)...(458): n = A,T,C or G
ntttgangaccccttgaggaccctctgtccagtctggtggaattcattgagatcatctgctccagaaccaaccaggagctgcaggaaattatcagagtcttcaaggaaatgtacaagactgatctggagaaggacattatttcggacacatctggtgacttccgcatgctgatggttgccctggcaaagggtataagagcacaggatggctctgtcattgattatgaactgattgaccaagatgctcgggatctctatgacgctggagtgaagaggaaaggaactgatgttcccaagtggatcagcatcatgaccgagcggagcgtgccccacctccagaaagtatttgataggtacaagagttacagcccttatgacatgttggaaagcatcaggaaagaggttaaaggagacctggaaaatgctttcctgaacctggttcagtgcattcagaacan

SEQ ID NO: 15475 - DNA, 438 bp, Homo sapiens
  misc_feature (1)...(438): n = A,T,C or G
attgaatttgcgntccatagtccgtgtggtggaattccttcaccaccttcactgtgacgaaatactgggtttaccgcttgctgtctgccctctttggcatcccgatggcactcatctggggcatttacttcgccattctctctttcctgcacatctgggcagctgtaccatgcattaagagcttcctgattgagattcagtgcatcagccgtgtctattccatctacgtccacaccgtctgtgacccactctttgaagctgttgggaaaatattcagcaatgtccgcatcaacttgcagaaagaaatataaatgacatttcaaggatagaagtatacctgattttttttccttttaattttcctggtgccaatttcaagttccaagttgctaatacagcaacaatttatgaattgattatcttggttgaaaataaaaa

SEQ ID NO: 15476 - DNA, 454 bp, Homo sapiens
  misc_feature (1)...(454): n = A,T,C or G
ggaagtgnacctgaaaccangtcaaaaggcangagancngnannnggaggagaggacattaccggactgctctggccacctgtggagacacagtggacaaacctttgccctttgggaggcagggcactgagtcctacacttgcctctgccacagtctgctgtgtgaccttgggtgtatcatttgacctctctgagttctcactttcttattataaagtgaacagatcaagtatgtatgcgtttaagcacttgtcatttctaaaaggatacatgaaagtatatttatctgtgtgctctggggagtgggaatggagggatacaatgaaggaaaggattttgtgtttttgtttttgttttactttttgcccttctgtaaagnttaagtttttattaatattatagttttattttaaaaagaaaccccaaataggatgtcatgtaaaagaaaagaaaa

SEQ ID NO: 15477 - DNA, 490 bp, Homo sapiens
  misc_feature (1)...(490): n = A,T,C or G
cgcccccccgnnnngnaattgaagaccaatcgagagctctaggaagngtcgaggaacagcactttcagaggccaaagcgggaggattgcttgaagccaggaatttgagcccagcctgggcaacatagcaagcaagatcccatctctacaaaaagttaaaaaaataaattacacctgccttttgttttgaagacttaaagaatctgctcaaatgatttattttctgagtctcttcacattaacttttatatgatttttaaaaaattattacctgcttatattttttgagcatctgtttcatataaagagatgctgcatgttcactgtgaagtattgctgaattaaattgaaaatgtcagaataaactgatacatgatgtagttatacaaatgctgttatgaagaaaaaaggaatgctttttttctcggaggccattgataaaaatatgaatgaatgactctcagagttggatgataaactaatcatcttct

SEQ ID NO: 15478 - DNA, 459 bp, Homo sapiens
  misc_feature (1)...(459): n = A,T,C or G
tgggaatagtagaccacttagtccacgtggtggaattcggaagaataccaacagtcccaggtgaagctacaggacttcttccagtgtggtacttatgtctgtccagatgccttgaatcttggtttaccagaatgggtattagtggctttagctaaaggccagctatctcctttcatcagtgatgctttggtcctaagacggaccattcttcccacacaggtggaaaacatgcagcaaccaaatgcccacagaatatctcagcccatcaggcaaatcatctatgggcttcttttaaatgcctcaccacatctggacaagacatcctggaatgcattgcctcctcagcctctagctttcagtgaagtggaaaggattaataaaaatatcagaacctcaatcattgatgcagtagaactggccaaggatcattctgacttaagcagattgactgagctctcn

SEQ ID NO: 15479 - DNA, 462 bp, Homo sapiens
  misc_feature (1)...(462): n = A,T,C or G
aattgaattgcataccctacgccangncgtggaattcgtgaccttagcgaagcaagcacatgtggatgtgaaatttcagttgccaatatgatctgaaaacccagtggatggctgaaggtgttaaatgtgctataatcattaaaaatactgcgttctgtgttattgttctttttctttttagtgtgtggagattgtaattgccatctaggcacacaaacatttaaaaggatttggactgcatttaattgtaccattcagaatggactgtttgtacgaagcatgtataatgcagttatcttctttctttcgtcgcagccagtcttttttgcttctcctacaaaacgtaacttgcaatttgccagtttattattgttggatacaaagttcttcattgataagagtcctataaataagataaatacgaagataaagctttattctttagtgttaaaatacagtatn

SEQ ID NO: 15480 - DNA, 424 bp, Homo sapiens
  misc_feature (1)...(424): n = A,T,C or G
caagcacgcagcaatgcagctcaaaacgcttagcctagccacacccccacgggaaacagcagtgattaacctttagcaataaacgaaagtttaactaagctatactaaccccagggttggtcaatttcgtgccagccaccgcggtcacacgattaacccangtcaaaaaaaaaaaaaaaaaaaaaaaaaaaaaaaaaaaaaaaaaaaaaaaaaaaaggggcccctttttaaaaaagggggcccaaaaaaccccgttaaaaaccccggggggtttttttttagcccccccctttggggggtgccccccccccgggtttttttttgggggggggggggccccccccctttttttttttaaaaaaaaaaggaaaaattttttttttttttttggggggggtttttttttttgggggnnnnnnnnncn

SEQ ID NO: 15481 - DNA, 447 bp, Homo sapiens
  misc_feature (1)...(447): n = A,T,C or G
gcatcgtactgaagcttccgagattgagancatcccagcngacangnacgacaacattctgaacaagcctctccagctgaaaccaaatattattaattccgcaagacatctcctggagggcctcctgcagaaggacaggacaaagcggctcggggccaaggatgacttcatggagattaagagtcatgtcttcttctccttaattaactgggatgatctcattaataagaagattactcccccttttaacccaaatgtgagtgggcccaacgacctacggcactttgaccccgagtttaccgaagagcctgtccccaactccattggcaagtcccctgacagcgtcctcgtcacagccagcgtcaaggaagctgccgaggctttcctaggcttttcctatgcgcctcccacggactctttcctctgaaccctgttagggcttggttn

SEQ ID NO: 15482 - DNA, 477 bp, Homo sapiens
  misc_feature (1)...(477): n = A,T,C or G
aggcgagnnnnaggaggctgagacctttcgaaaactgagnacactcgnacagngcggnggaattcgattttttatggcatttctaaaggattttctatacataagatgttgctcacaaagagggacaactttacttcttccttttcgatgtggatatttcttatttctttttcttgccacgttgctctggctaggacttctagtactttgttgaattgaagtggtgaaagtgggcatatttgccttgttcctgatcttagagaaaaagctttcagttttccactgatgaatatgatgttagctgttggcttttcatatatatactttattatgttgaggtacttcacttctcttccctttttaaaattttttaaaaatcccaaattgtagtagagagagtctgtgggttttttttttttaatcacagagggaggtggaatctcataaaatgcttttttggcatcaatagaaatgata

SEQ ID NO: 15483 - DNA, 472 bp, Homo sapiens
  misc_feature (1)...(472): n = A,T,C or G
ggcgagnnnnaggaacctgagaccctaggaagattgatggccctcgcgaggnccacgccgagtgacagagacgctcaggctgtgttctcaggatgaccgagtgggagacagcagcaccagcggtggcagagaccccagacatcaagctctttgggaagtggagcaccgatgatgtgcagatcaatgacatttccctgcaggattacattgcagtgaaggagaagtatgccaagtacctgcctcacagtgcagggcggtatgccgccaaacgcttccgcaaagctcagtgtcccattgtggagcgcctcactaactccatgatgatgcacggccgcaacaacggcaagaagctcatgactgtgcgcatcgtcaagcatgccttcgagatcatacacctgctcacaggcgagaaccctctgcaggtcctggtgaacgccatcatcaacagtggtccccgggaggactccacacg

SEQ ID NO: 15484 - DNA, 465 bp, Homo sapiens
  misc_feature (1)...(465): n = A,T,C or G
atggangcaccctagatcagtgngctggaattcgnttgtagctgctggattattgtctgtctttatagcaagttccagtaaaccacaagtatggcaaagcttatccaattttatgcttggagcagtcagtacataccagtttctgatgtttcaggcaggagtggggtaaataagtgtgaccacttaaagctgctcgttagcatggaagacttctccattctatctttgtaaaacagacaagatatgcacttgacatagtagcaaattggttctgaattatgcaactgtttgctatttagtaaactagcaaatgatgcatgtattttgtttttcatgtactgggcaatatgagtaaaatctgtccctttttccccctttgaatgaggtcttccatgtttgagggaaagtcttgcactattgcatatattttggggacacagattttcatagtttccattnttgggg

SEQ ID NO: 15485 - DNA, 466 bp, Homo sapiens
  misc_feature (1)...(466): n = A,T,C or G
ntttgaagccatagangcaccactagtccagagtggaggaattccaggctggtctcgatctcctgacctcaggtgatccgcctgcctcggcctcccaaagtgttggcattacaggcgtgagccaccgtacctggccttccctctttttttctgtttttaaaaacataccattaaataagtctttctggtaaaatcaagtataaatcatctgagcatctgtttctattatctgcgtttcctgttggtttttagttatctgaatgtgagacatcgtgaatacagtaagggtctggatgatgctatttttcagagaagaaatcactcttccttttgctaggcaggtagagtggggctgatcacctaatactgctagagactgagctgagggttgaggttgtgttgcaggttggataaggccgcattttgctctgatttgcccttactcctagcaggtacccacctaaga

SEQ ID NO: 15486 - DNA, 476 bp, Homo sapiens
cccccccccccgcccccaatgagaccctagatggaggctgtaatacaatacagttcatcatcttactatgttagctctattatatgacttcttcatagctctcctaccttatcccttctcaaatgcaatgttccatcaattacaaactacaaacagctctcaaatacactatgctgttttctgctgcaaggcctctacgcatgctgctccttctacctggaatggcttttgccacttttccagattcggcttttctttcaagccttttgtgagccactacccctgccacccagaagacaggaccattccattctttttatttttttttacgtggaccccctacttggctgtccaagcttgagtgcagtggtacaatcacagcacactgcagcctcaaactcctgggttcaaactgctggattgaagcattcctcccacctcagcctctggagtagctaggactacaagcgtgcact

SEQ ID NO: 15487 - DNA, 469 bp, Homo sapiens
  misc_feature (1)...(469): n = A,T,C or G
cggcgggnnnnntnaaactgagaccatttagagaccgtggaannncccaaaaaacatgcaaacaaaggaaaagcgtgtgtgctctaggccacttagctatatcgacaactgacaataataggcatagagtgacagaaagacctgacgagatgccacttggcttcctttttcaagtaactctgtagggttttcccacataacagatacagaaagaatttattgttggaaaacggggcggcaagatggacaacattctctgggaccaacgggatgtgcagcctcctgggctcaggcctcaccagctcctgcacagtggtgggggtgaggactgagggacacatcacatctcctgggagcagaagacgatgtctgcgaacccagctcaatatgcatggccttgtccccaggcaggggcggcctcagctggccaggtgtccccgtcactgcagagttctggtcttagactggg

SEQ ID NO: 15488 - DNA, 480 bp, Homo sapiens
  misc_feature (1)...(480): n = A,T,C or G
agtagttccagcccccnnnnnattgannnatgatgnaccattagtccagtgcggtggaattccttgagatgggacttggtcttagagctagttctaaaggttgtttacttttctagggaggagtctgctactagtcttatcagctcttaaaaacagaaactcatctgtccaagttcgtggcagaaaggaacgtccttgtgaagacctttatctgagccactgtacttcgttatcactgccatgcagtttacatgagctgttctgcagctcaaattccattttgtgaatgggttttttttttttaataaactgtatttaacttannaaaaaaaaaaaaaaaaaaaaaaaaaaaaaaaaatctgccataaaaaataaaggggggaagaaaaaccggggggaaaacccaaaattgatttttttaataccctcccttgtgttgttttgccccccccctttttttttttggcgggggggggcgcg

SEQ ID NO: 15489 - DNA, 462 bp, Homo sapiens
  misc_feature (1)...(462): n = A,T,C or G
ngggatagatgncccctagtatgacccttagtccagtgcggtggaattcaaaaacatatataggaattaaaatgaggaaaagaaatagtagaaagactgcagaggaaaatagtatgtgcaaaggcttgatgtttattgctttcaaggaattgaatggttataaatctactgaatatagtgagcctggttttcagagcaagttttgagcccacaacctttcactgttacgattttttaacgttgcttttaatgtatgtgacagtccctgactgcatgcctgcatgccattgatactttgtgaggtgaacatatcattggtcctatgaatatttgtgcattttaatcctataaaaggaaggaagttattgttccggaagtttgaagttgtatacaaaaaagtattttgcctatgtgatctacttatttactatgatgtgattaagcacaaaatagcctttaaga

SEQ ID NO: 15490 - DNA, 461 bp, Homo sapiens
  misc_feature (1)...(461): n = A,T,C or G
atcgagacctattgaagccgtgggaanncgcnacgctggtgctttcgcttggtttagacaaccaagacacttgagaattatgctgtcctcagaatgtctgatgaaaagaacagattcacttttttgacacaatgcccattagccatctttggcagtgtttctgatcaaaggttccccatgcctgctctaggaaagtaaacttttttcagaataaatcctcaaatggattactgagtagtctttgcaccattcccatcagcctaatcagactgaatggtcacgctcagtgcaaaaagcttgtttgctgttaagatgtttcagtgtttcttgtctttcctggaacagatcagttgtttaaatttagtaattcaatcctgaccagcggaaacccacttaattattgcagcctaaagaattcagctacttctactcttcataaatgtgcccaagtaaatatgtgt

SEQ ID NO: 15491 - DNA, 478 bp, Homo sapiens
  misc_feature (1)...(478): n = A,T,C or G
catcgacccccctggaaatgatgacactaggaagngcggnggaattctacgaagcttttccctttttgtcgaagcaaatttctacgtaagataggaagaatccagcaagaatatccaacagtcaaatcacttgcccaaagatgaacgggtcaaagaactatgccagcaggccaggtaccagacagcctgtgaacaaccggggcaggtgagtgacgcaggctttctttaccaccactcatgtgcttctccatctctaatttagaaaattgtccacatataaaagaatgtacatttgtgtataaataagcttttcctagtggccttgagggcaagctcactgagacacctctccgcggacagaattacgtaactggttcaggctgggcctccccattactacttgggctccctccagttaaaaaagatgatgatctcagagaaagttctatgccaaaagacactggtttcctctgaggag

SEQ ID NO: 15492 - DNA, 495 bp, Homo sapiens
  misc_feature (1)...(495): n = A,T,C or G
cgcccgcccccgncngnaatggagaccnatcgagnancactaggacagngcggnggaattcctttgagggaaattttgagtcactggaccttgcggaatttgctaagaagcagccatggtggcgtaagctgttcgggcaggaatctggaccttcagcagaaaagtatagcgtggcaacccagctgttcattggaggtgtcactggatggtgcacaggtttcatattccagaaggttggaaagttggctgcaacagctgtgggaggtggattttttctccttcagcttgcaaaccatactgggtacatcaaagttgactggcaacgagtggagaaggacatgaagaaagccaaagagcagctgaagatccgtaagagcaatcagatacctactgaggtcaggagcaaagctgaggaggtggtgtcatttgtgaagaagaatgttctagtaactgggggatttttcggaggctttctgcttggcatggcatcctaag

SEQ ID NO: 15493 - DNA, 459 bp, Homo sapiens
  misc_feature (1)...(459): n = A,T,C or G
cggatcgttaatgagaccattcgnantacttgagacctcctgcagngngcnggaattcatcccctcccccttgaacatgggctagatttgtcgactcaattttaatgagtagaatacttcagaagggatgggatatcacttacaagactgggttatgaaaagactatggtggccaggcacagtggcttatatctgtaatcccagcattttgggaggccaatggggaagtactgcttgaggcccggagtttgagaccagttgggtaatatagtgagaccccatctctacagaaaatccaaaaattatccagtcatggcggcacacacctgtagtcctagttacttggaaggctgaggtgggaggatcacttgagcccaggaggtcaaggctgcagtgagccatgatcacacactactgtactccagcctgggtgacagagcaagaccctgtctctaaaaa

SEQ ID NO: 15494 - DNA, 464 bp, Homo sapiens
  misc_feature (1)...(464): n = A,T,C or G
atcgagactttnattgangtcccttagtccgtgtggtggaattccctagagttccttgttcggaacaatgtacttctggagctattgcggtcaagtctcattctgcttcaggggagctggttctttcagattggatttgtcctgtatccccccagtggaggtcctgcatgggatctgatggatcatgaaaatattttgtttctcaccatatgcttttgttggcattatgcagtaaccattgtcatcgttggaatgaattatgctttcattacctggttggttaaatctagacttaagaggctctgctcctcagaagttggacttctgaaaaatgctgaacgagaacaagaatcagaagaagaaatgtgactttgatgagcttccagtttttctagataaaccttttcttttttacattgttcttgngtttgtttctcgatcttttgtttggagaacagctggct

SEQ ID NO: 15495 - DNA, 444 bp, Homo sapiens
  misc_feature (1)...(444): n = A,T,C or G
atcnaatggtagctttcgcagttgcagacatccagaactcccgggaattttctaccataaaatgtcactagcaggaaacttcacctggggaatatatatattttttggaaagcactattttgagaatgtcaaattgagaaaaagccactttaataatatttccactttcttcgtgccttatgtttagattagcttttgctgatttaataattcagtttactccactagatttaattgatttctttttaaaaggtgtttctttccctgtagctgtaagctgtaaataagggtgttaaccacaaagataaccaaaacttatatgcgctgtccaggttcttttctgtacccaacatacttggctataaaacaggaacaaacaaaacctaattgcatcattgctagaagatataggtgacaaggtggatctttagggagaactaaaga

SEQ ID NO: 15496 - DNA, 460 bp, Homo sapiens
  misc_feature (1)...(460): n = A,T,C or G
ggagtggnattgatttcgactacccctagcgcaggaggtggaattccagaagaacagtctatgcctacgggctgaggccggaagcagtttgctttcgcgcttgctgctgtctgctgggaccacactgtggagaagagaccaaggcgattcagccaaatactggggaccgccctgcacatgagctgaggagcttggctggatcctcctggcccccgggaacccccgtggcaaaggtttaagctctgcagagcggcataatcagctttgcattttggaaagctcctacagccccagtattgccacatatcttgcggcaagagcgcccgccagatgttgggctctgtgtgatagtgagggatcgctgcatatggcgggcggcgtgctgggatttgcacgaggcaaggagagggggatggggaggatggagtgcgattgaatcacgaatcacgatgcgagccgc

SEQ ID NO: 15497 - DNA, 495 bp, Homo sapiens
  misc_feature (1)...(495): n = A,T,C or G
gcggggcccctaatgagaccaattgagaccataggacagngcggnggaantcgcgagatgacgaagggaacgtcatcgtttggaaagcgtcgcaataagacgcacacgttgtgccgccgctgtggctctaaggcctaccaccttcagaagtcgacctgtggcaaatgtggctaccctgccaagcgcaagagaaagtataactggagtgccaaggctaaaagacgaaataccaccggaactggtcgaatgaggcacctaaaaattgtataccgcagattcaggcatggattccgtgaaggaacaacacctaaacccaagagggcagctgttgcagcatccagttcatcttaagaatgtcaacgattagtcatgcaataaatgttctggttttaaaaaaaaaaaaaaaaaaaaaaaaaaaacaaaaatattaatactaaaaaaaaaaataaaaaaacgggctctttaaattaaagggcccctgtaaacccccttgtg

SEQ ID NO: 15498 - DNA, 452 bp, Homo sapiens
  misc_feature (1)...(452): n = A,T,C or G
nttgaagaccattagtcactgtggtggaattctcctatattggcactgctaaaatagaatatagcatctttcatatggtaggaaccaacaaggaaactttcctttaactccctttttacactttatggtaagtagcagggggggaaatgcatttatagatcatttctaggcaaaattgtgaagctaatgaccaacctgtttctacctatatgcagtctctttattttactagaaatgggaatcatggcctcttgaagagaaaaaagtcaccattctgcatttagctgtattcatatattgcatttctgtattttttgtttgtattgtaaaaaattcacataataaacgatgttgtgatgtaaaaaaaaaacaagaaaaaaaaaaaatataaaaaagataaagaaaacaaaaaaccaaatcaaaaaatcgggaccctcctggccaacatggtg

SEQ ID NO: 15499 - DNA, 482 bp, Homo sapiens
  misc_feature (1)...(482): n = A,T,C or G
ggggcggccttagtagacactagnatagatggccgtttgcaaaatgataaaatatgctaagttctaggctggaaataagggcaaaatgctgtgaaagaagaggaaatgtttacttccaaattaggatgtgacagagaagggatagggaaatcctctctgctcattgggccttacatgatgggtgacacttggagtggcacaagttgggggaaagcgcacttgagacagaggtaatgatggggacgaagtgagaacagagacccagaaggagaatcaatggaccatatttgtaagagctttgaaagccagcctgagaattggaggatttattcataagaaagtgtagagaccctgtgtatttcagagctggatactgccattaccacagatgaaagttgcaatgatctagcagttgtgtgcaaaggcaaggcttgcttttcctgtctttcaaccctatcttgcttttcctgtctttcaacccn

SEQ ID NO: 15500 - DNA, 531 bp, Homo sapiens
  misc_feature (1)...(531): n = A,T,C or G
tcttctatttgtatacgttggtactggtgtaagcatatgtgctgcttgtaattcttacttggagggtatcctcctctctctacacaaccccaantttgatttcgttgcatcggcggaggaattcgctgggattagaggcatgagccatcgcgcctggcctagattatggaatttttgttttaccatgtatgctgccgcgtaatttttggtttgaaccttttttatttttcttttaattcctttgagacaggatcttgttctgttacccaggctcactgcaacaaggtgattttcccgcctcagcctccagagtagctggactacaggccggtgccaccacacccagataatattttatattttttgtagaaatggggttttgttttgttgcccaggctggtcttgagctcctgggctcaagcgatccaccctcctcagcctcccaaaatactgggattacaggcataagccactgcacccggccttgagcatttgttttttgaaggaaattttatatgattaccacataag

SEQ ID NO: 15501 - DNA, 460 bp, Homo sapiens
  misc_feature (1)...(460): n = A,T,C or G
natgagaccctagatgggngctgtaaaacgnccgncttgtggttgcctcagggtcttagttgtcagggaaccatagcagagggggtggtgagaggatgagaagcggctgagtggcacgagtcttcagcaaagctcactaccgcccacactggagggcctttttccagctgagacaccctaaacaaccaacgcttacccatttcaaggtgctaaatttggcaacaatctgctgttccagtttacaaggagggaaatgaaatcgttgaggcacatgccttctgctctaaaagagtgctgcttagcggacactcccaaccacacaccatgtccagccaggaagcaaaggcctagggattgatgtggacaacattcttcggatcacgacaaggacgtgaattactctcaactttccagtcttgctaggaccaacattcacactggcagcaatgaagccgctgtg

SEQ ID NO: 15502 - DNA, 447 bp, Homo sapiens
  misc_feature (1)...(447): n = A,T,C or G
ccccctactgaaaccatctataganaggctcacgnaccancancgagnggaggcagaggcaactgatgtccggacattctcggagggctacattattgccatcgatgtagcatcgggacaagctgctgaagcagctggaagacatacgggcccagaaggaaaattccctgcagctgcagaaggcccagctggaacagttactggcagacatgcggactggagtggagttcaccgagcacttgctgaccagcggctcagacttggagatcctcatcaccaagagggtggtggtagaacggctcaggaagctgaacaaagttcaatatagcacccgtcctggagtaaatgataagatacgcttctgtcctcaggagaaagcaggccagtgccgtggctatgaaatttatggtacgattaataccaaagaggttgatccagccaaatgtg

SEQ ID NO: 15503 - DNA, 482 bp, Homo sapiens
  misc_feature (1)...(482): n = A,T,C or G
agggccgggcattgtagacactagnattgatggccgtttgccaggatcctaggagcctctttgcacagcgatccttccatgtgtagagtgcttanaaaccccatcaactgatctagtgagtcagactgtggaatctcccttcccactagctggaggtggaggtgggttattacagaagtcatactgggagagggttcagtttggatgatgctagttagatcatttgcatctctccaccattttcttctgcactcccattttctctgcagcttattcttgccatgcttaggtgacagaagtttgttaagtaccatccttgtgccctgcctcttattctcaaatcgttctggaaagcctcacttccttttctgtggagaaggtgcaaagctgttaaatgagctcagagtttacctagctaaggccactgcttcctgctttgtgaagcctggaaagtatgtgtggccacagggctcangttcacn

SEQ ID NO: 15504 - DNA, 449 bp, Homo sapiens
  misc_feature (1)...(449): n = A,T,C or G
nattcgagatcactagtccacgtggtggaattcgcgccgagcgatgggcatctctcgggacaactggcacaagcgccgcaaaaccgggggcaagagaaagccctaccacaagaagcggaagtatgagttggggcgcccagctgccaacaccaagattggcccccgccgcatccacacagtccgtgtgcggggaggtaacaagaaataccgtgccctgaggttggacgtggggaatttctcctggggctcagagtgttgtactcgtaaaacaaggatcatcgatgttgtctacaatgcatctaataacgagctggttcgtaccaagaccctggtgaagaattgcatcgtgctcatcgacagcacaccgtaccgacagtggtacgagtcccactatgcgctgcccctgggccgcaagaagggagccaagctgactcctgaggaagaagaga

SEQ ID NO: 15505 - DNA, 477 bp, Homo sapiens
ttttaatcgagatcccttttcagtgtggtggaattccaaatagctaatgcatttttgccttaataccaggtgatgggttggtagatgcagcaaaccaccatggcacacattttcctatgtaacaaatttgcaaattgtgcacatgtacccagaacttaaagtgagacaaaaccaatgtccacgcctttgcagtttgattgaacgtataaaggagaaaaatcctgtaagtatgctgaacatgaaaggacctggaagcagtagtgtgtcttcagcctttaccaaattatccctacttgagagaaaacttggaaatgtaatcaatgtggcacaaatttcaaccagttttttaaacagactacacatctttgaaatcatactagggataaccaaatctgcttctccaagattggcctggaatattattacagaataactaccagacaacatttgttaaaactcaggacagtatgtatttta

SEQ ID NO: 15506 - DNA, 468 bp, Homo sapiens
  misc_feature (1)...(468): n = A,T,C or G
ncctcgtagacattagananngcgattgtaagtccttagtccgtgtggtggaattcccgaaaacgcccagttcctaatggtgcaacttacggcaagcctgtacatcatggtgttaaccagctaaagttggctcgaagccttcagtccgtcgcacacgagcgagctgtacgccactgtggggctctgagagttctgaattcttactgggttggggaagattccacatacaaattttgtgagggtatcctcattgatccattccataaagctatcagaagaaatcctgacacccagtggatcaccaaaccagtccacaagcacagggagatgcgtgggctgacatctgcaggccgaaagagccgtggccttggaaagggccacaagttccaccacactattggtggctctcgccgggcagcttggagaaggcgcaatactctccagctccaccgttaccgctaatataag

SEQ ID NO: 15507 - DNA, 469 bp, Homo sapiens
  misc_feature (1)...(469): n = A,T,C or G
atttgagacatttgaagcgcttggaattaagacttgtctcggtcacctgtgccctgtccagactcgaggcagtggtaacactgcacagtgctatgtggcttctctttgaggatttttgggttttgtaactaaattcttgctgccctcatactttttatgtattagaatcatattcgtattgcccttttaaaacattgggatcctccaaaggcctgccccatgtatttaacagtaatacaggaagcatggcaggcaccatgcaaaccaaggatggatggtgcagtccctgtgtcagtgggcggtggtttcctgctggcctggaatcactcatcacctgattgattggctctgtggtcctgggcaggtgcctcataggtgtgtggatatgatgacgtttctttaaaatgtatgtatttaacaaatacttaattgtattaaggtcatgtaccaaggatttgatatagattan

SEQ ID NO: 15508 - DNA, 561 bp, Homo sapiens
  misc_feature (1)...(561): n = A,T,C or G
cttgtctagccggtcaannnnnaactgatgccatgtatgttaagtagactcagcctgaattatacccctaatacgtggcaatagcttattcataccctttctggaggaatgcaccttcttcctacgcctcagagagtttccacaataatctttgaagggaaaggaacagatcagttgttaaaaataagcatataaggaaaccacatacatcaaaaacagacctccaaagacttcagaaactagaatttaaataagattagcttaataacacaggtgaagagagaattggagaactgaaggcatccagaatggagcttacagagccaattagatggaaaatatgatagggatatctgagacacaaattgatagtgtgaaaatgtgtctacttgaagttctagaagtagaggaactacatggggcggaagcacaatttgaagagagacatactgaaatttccagagtgattgaaggcttcaacagattcaagatgctcattgcatcccaagcagtaattntaanaattcacaactggacacatgacgatgaaactatagaaan

SEQ ID NO: 15509 - DNA, 477 bp, Homo sapiens
  misc_feature (1)...(477): n = A,T,C or G
acttgagnacacttcgagaccactagtacagtgcggtggaattcggcaacgaggtgatgatcaatagttgcaggagagctttttgtacatgcttttaggacagaatggagacttatacacccaaagtttatctgtgtttgtttgtaagtattatgatgctaaaaatttagatttattctaaatgtatttgatgtgaattaaaataaatattttttcatgtgaaatttattttggttcctaaaatggaagcctaccacattgcattgtaatacagtgtattatgttcagtgtctaaaaactgctaattaagtcataatttaagatgctatgtatctgttatttaaaacatggagaaatagggcctttattccattcatattcataagagcatatttatcctgcattgaaaatgcattacttttgcacattgatattaactgttgtccaacaaataagtatcggagtacgtgagaatat

SEQ ID NO: 15510 - DNA, 493 bp, Homo sapiens
  misc_feature (1)...(493): n = A,T,C or G
nattcgagatccctagtncagngtggngatagaacaccatgcacggctgtgcccctctgggtatgctcacatgcacatatatggacatacagtttcgtagcagaacgtggctgcccaggggctgcctatctgggcgagtagaccgcctggctcagcccacaggcctgcagcatcccatagcaccgccgcccttgccccatcaccctgtgggctacatgcaggacacggcatgggcctgctccccagaggcacctgtttggggtcttcttgaggcttgtgctttcacagctctctttgaagcagatgtcttggtgaactcggtagactcttttatacctgttgtcacaagaaagctttgtaaaaccagacagtgaagcaaaatgttgccaactgcttaacctatgctatgtgaacccacagtaaacctgaaggtgtttgagggaaaaactgctattttctgaatgagacgtgacctcctattgatgtattaaan

SEQ ID NO: 15511 - DNA, 464 bp, Homo sapiens
  misc_feature (1)...(464): n = A,T,C or G
ngttgaggatcactagtccagnggccttgaagtcccttagttaaangcggcgaccaagagctctttaagctgtggatacgattatttcatcgggggctttaaaaattgtgaggaggggcccttcagtgggtttccagagcaacaggataaagttcatggctcttagatggaaccttgagcccagcatcattctgccagccgcatctttgccatttcccccactgcactctccctcctttctcaaaacacactggtgcactctgatagctcccaggggttttgttttcatggacaagacacacaaaacttttgcagttagacacaaggttgccgtttttttattttgctaagtaagggcattaaaaaatgatctctaccatctactgtctttatctcattttaaaagatggcagtttaccctaaaaaaaaaaaaaaaaaagcggccgctcgagctagagggcccn

SEQ ID NO: 15512 - DNA, 460 bp, Homo sapiens
  misc_feature (1)...(460): n = A,T,C or G
nttcgtagatcactagnccagngcgnnggaattctttaacagtgctgataaatacctttcacttcattgggattttcatattttattttattttattttttttcaagacagggtctcactctgttgcccaggctggagttcggtggtgcgatctcggctcactgcaacctccgcttcccaggtttaagtgattctcctgccttagcctcccaagtagctgggattacaggtgcctgctaccacgcccagctaatttttgtatttttatggggttttgccctgttggccaggctggtctcaaactcctgacctcaagtgatctgcccatctgggcttcccaaagtgctgggattacaggtgtgagtcgtcgtgcccagccatttttacttcatttaaatgtccgctttttgtagtcaagtcccagaataaaatggctattttaggaatatgtttaactgaa

SEQ ID NO: 15513 - DNA, 495 bp, Homo sapiens
  misc_feature (1)...(495): n = A,T,C or G
gagaggnnnnnncattgagaccnattgaaagacctaggacagngcggnggaattccgataacttttaaagcaactactgctggaatccttgcaacactttcttattgtattgaactaatggttaaacgtgaggacagctggcagaagagactggataaggaaactgagaagaaaagaagaacagaggaagcatataaaaatgcaatgacagaacttaagaaaaaatcccactttggaggaccagattatgaagaaggccctaacagtctgattaatgaagaagagttctttgatgctgttgaagctgctcttgacagacaagataaaatagaagaacagtcacagagtgaaaaggtgagattacattggcctacatccttgccctctggagatgccttttcttctgtggggacacatagatttgtccaaaaggttgaagagatggtgcagaaccacatgacttactcattacaggatgtaggcggagatgccaat

SEQ ID NO: 15514 - DNA, 490 bp, Homo sapiens
  misc_feature (1)...(490): n = A,T,C or G
gagagggnnnncccatgagaccnatgaagccgtcggaanncgcgaactcacactggagaaaaaccatttaagtgtgatgagtgtgggaaagcttttatgtggatctctcgcctgagtcagcatcagctgattcacactggagagaagccttataaatgcaacaagtgtacaaaagcctttggttgtagttcacggcttattcgccatcagagaactcacactggagaaaaaccatttaaatgtgatgagtgtggcaaaggctttgttcagggctcacaccttattcagcatcagcgaatccacactggagagaaaccctatgtgtgtaatgactgtggaaaagccttcagtcagagttccagccttatttaccatcagagaatccataaaggagagaagccctacgaatgcctccaatgcggaaaagccttcagtatgagcacacagcttacaatacatcaaagggttcacactggagagaggccctatn

SEQ ID NO: 15515 - DNA, 474 bp, Homo sapiens
  misc_feature (1)...(474): n = A,T,C or G
ngttgaagatccctagtncagnngngattgtatgtccctctagtcagtgcggnggaattcagaccaaggtgaacatcattctagaatgtaatggaagctgccctttggcttttccaaaggcaaagggtttagatacagaatgtaaatcaccaggggctgggcatggtggctcatgcctgtaatccccaccactttgggaggccgaggcggacagatcagttggggtcaggagttctagaccagcctgaccaacatagagaaaccctgtctgtactaaagatacaaaattggccgggcctggtggagcatgcctgtaatcccagctgctcacgaggctgaggcaggagaatcgcttgaacccaggaggtggaggttgcagtgagccaagatcatgccattgcactccagcctgggcaacaagagcgaaactctgtctcaattaaaaaaaaaaaaaaagaatttaattccccaaaa

SEQ ID NO: 15516 - DNA, 454 bp, Homo sapiens
  misc_feature (1)...(454): n = A,T,C or G
atttgangttcagtacccctagtccatgcggtggaattcgaaagtacgggtcgcgagaggttgttcgcgccttgagagttaagcgaagtgtggtggcttccaaggaatacaaacataaaggccttcgaccgttgcaaatagactaaagtgaaaacaaatctgaatgaagatgaagttatttcagaccatttgcaggcagctcaggagttcaaagttttctgtggaatcagctgcccttgtggctttctctacttcctcttactcatgtggccggaagaaaaaagtgaacccatatgaagaagtggaccaagaaaaatactctaatttagttcagtctgtcttgtcatccagaggcgtcgcccagaccccgggatcggtggaggaagatgctttgctctgtggacccgtgagcaagcataagctgccaaaccaaggtgaggacagacgagtgcct

SEQ ID NO: 15517 - DNA, 440 bp, Homo sapiens
  misc_feature (1)...(440): n = A,T,C or G
cagattctttgattgtcaaaggatttaatgttgtctcagcttgggcacttcagttaggacctaaggatgccagccggcaggtttatatatgcagcaacaatattcaagcgcgacaacaggttattgaacttgcccgccagttgaatttcattcccattgacttgggatccttatcatcagccagagagattgaaaatttacccctacgactctttactctctggagagggccagnggtggtagctataagcttggccacattttttttcctttattcctttgtcagagatgtgattcatccatatgctagaaaccaacagagtgacttttacaaaattcctatagagattgtgaataaaaccttacctatagttgccattactttgctctccctagtatacctcgcaggtcttctggcagctgcttatcaactttattac

SEQ ID NO: 15518 - DNA, 475 bp, Homo sapiens
  misc_feature (1)...(475): n = A,T,C or G
ggattcgagacattagnnnnngntttgaggacctctatccatgcggtggaattcgccggctctggctgtccctgtgccggtccctcacaaacctctccccctttgaaactcaagcacagctgcgaggagggcagcgaggagggacccctctctcatggttgtctctttcccccgctatgtcataggtagtggaggaagcgaaggaagtgaacgctgaatgtgacgcatttctgaagagctcagctgtcaccgggcatagcctggaagccccaagtctgttctgactttgcctggctgtctccttgacccgcctcctagatcattgtccttgatgtccaggctgggtcatttaaaatagagatgcaatcaggaaggttgggggacttgggactgtggctgaattgagaccttgctgatgtattcatgtcagcacctgagtcacagcccaggtgcccggaagcagcctcttcgcata

SEQ ID NO: 15519 - DNA, 471 bp, Homo sapiens
  misc_feature (1)...(471): n = A,T,C or G
tttgagaccctgatagccgtnggaantncttatgcatcatctaaagcagctgctgaatgttttgtacagtcttactgggaacaatataagtttccagttgtcatcacaagaagcagtaatgtttatggaccacatcaatatccagaaaaggttattccaaaatttatatctttgctacagcacaacaggaaatgttgcattcatgggtcagggcttcaaacaagaaacttcctttatgctactgatgttgtagaagcatttctcactgtcctcaaaaaagggaaaccaggtgaaatttataacatcggaaccaattttgaaatgtcagttgtccagcttgccaaagaactaatacaactgatcaaagagaccaattcagagtctgaaatggaaaattgggttgattatgttaatgatagacccaccaatgacatgagatacccaatgaagtcagaataaatacatggcttg

SEQ ID NO: 15520 - DNA, 465 bp, Homo sapiens
  misc_feature (1)...(465): n = A,T,C or G
natcgatgaccactagtccagngcgattgatgttcccttagtcgagtgaggagatacagcggaaactcaattcttccttaaaaataatcgtaactcatttctttaagactaccatactaccactttcctcaacttggactaatgtccattgtcaaccaaaatgtctgtgatctcatggatccattatgatttgcaactccaggtccattttatgcaaataagacagccataatatatcattgtacaagtcatttactatctaattatatcattgctcaacatttgcaaattatttttacaaataacaataattggatgtaacaaaaagcagagtattttgagacgtatattaatgcaaaatattgttaatgtatcagtggattgttcctccaaagtaccagtgccttaacacaacatatctaanagaaacatctctggaacagtagtacttaatggcaacttgag

SEQ ID NO: 15521 - DNA, 472 bp, Homo sapiens
  misc_feature (1)...(472): n = A,T,C or G
nggattgtagacactagtcagngcgttggaattctcaacttctaactcatctcgccaggagaggcctccagtgaaacccttcattctcactcggaacatggctcaagccaaagtatttggagctggttatccaagtctgccaactatgacggtgagtgactggtatgagcaacatcggaaatatggagcattaccggatcagggaatagccaaggcagcaccaggtcatcagaatgaaggaaagtctgagaaagagttacatcctagaggagactaaagaaacagacaacaaaatgtactgtggtgacctggataggatcctggaacggaaaagggacattagaggaattcagaaaagcagctcagcaacaggaagaacaagaagaaaaggaggaagaggatgatgaacaaacactccacagagcccgggagtgggatgactggaaggacacccatcctaggggctatgggn

SEQ ID NO: 15522 - DNA, 404 bp, Homo sapiens
gggaaaatgaaatttctgttgtgccttgaaagaagttcctattcacaccttgactgtccttcagtgatcagtgctgttacctcctgtcactgctgctgcatctgctcattgagcatatggagacttctagttttgtttgtttttaatagatgaggtcttgctgtgttgcccaggctggtctcaaattcctggcctcaagtgatcctgcctccctcagcttcccaagtagctgggattataggtgcaagcaactgtgtgcagcaggctctgagacttctagttttgatatcattcctttccccacattctcaagtcactgttgaatctgctttaatatctgtccaatctaatccccataatccagatcttcaaccgctcttttggcaagcagtctcaacctcttg

SEQ ID NO: 15523 - DNA, 464 bp, Homo sapiens
  misc_feature (1)...(464): n = A,T,C or G
ntttcgaagaccattagnccagngcggnggaattcgatgcctcctgtctctgtgatactcttgcactagcgttggcttcagtgcactgtcattaaccacagtgccttacagtattttcttctattggtgagccttttctggacctttcgtgaaacagagcttctacttgaatctttaatttgtgcccttcataacagaactcacattaactcttctttgggttatcagcttctgacacccaagagtcatttgtcctaaactaatcactgaaatatgaatcattttccaaaaagaaatgctgtgccagagaagataattgccactcagtgatagagctcagaacggaattcacgttgtcagattcccaagcctgagtaccaaccaagatctggttggaaagagcaagtgctgtcgtctgagaacatccaccatattctgtactcttcagtagctgttctgtgttn

SEQ ID NO: 15524 - DNA, 465 bp, Homo sapiens
  misc_feature (1)...(465): n = A,T,C or G
nttgaaaacctcgagcaccctacggaagngccgnggaattcccatgccatcacatctgatggaccccagagagctgagccgtggtttaagatggggtcatgcgctggtcattcccacagtcttgagtatctccaaaatcccaaagtgatatttcactttcggaccctgaaagtttggagagctggtttcttgccttaatttaagctctctgagaatgtcccctgtagggagaagcctccaggaactcagaatagaactcgttcccactcattttccttgctccaccaatctgacgcctgacagatgtcaccactgcctgaaggatcctgtccccaggccagggcagaatgggcattgcctttgactctccccttcagactcccctcccaccggcctcctgtgtagtcagagaacccactgcccatcgcctcctgctgctgctttgaggttgaggtcctggcttga

SEQ ID NO: 15525 - DNA, 488 bp, Homo sapiens
  misc_feature (1)...(488): n = A,T,C or G
tatcgatcctctgtgagngcgctggaattcgagatcgagatggccaaggcacagagagattacgaactgaagaaggccgcctatgacattgaggtcaacacccgccgagcacaggctgacctggcctatcagcttcaggtggccaagactaagcagcagattgaggagcagcgggtgcaggtgcaggtggtggagcgggcccagcaggtggcagtgcaggagcaggagatcgcccggcgggagaaggagctggaggcccgggtgcggaagccagcggaagcggagcgctacaagctggagcgcctagccgaggcagagaagtcccaactaattatgcaggcggaggcagaagccgcgtctgtgcggatgcgtggggaagctgaggcctttgccataggggcccgagcccgagccgaggctgagcagatggccaagaaggcagaagccttccagctgtaccaagaggctgctcagctggacatgctgct

SEQ ID NO: 15526 - DNA, 490 bp, Homo sapiens
  misc_feature (1)...(490): n = A,T,C or G
cggtgatggcctactgagaccctaggacangncggggaattcgntcatgcaagatccaatggagatcttcgtggatgatgagacgaagtttacgctgcatgggttgcagcagtactacgtgaaactgaaggacaacgagaagaaccggaagctctttgaccttctggatgtccttgagttcaaccaggtggtgatctttgtgaagtctgtgcagcggtgcattgccttggcccagctactagtggagcagaacttcccagccattgccatccaccgtgggatgccccaggaggagaggctttctcggtatcagcagtttaaagattttcaacgacgaattcttgtggctaccaacctatttggccgaggcatggacatcgagcgggtgaacattgcttttaattatgacatgcctgaggattctgacacctacctgcatcgggtggccagagcaggccggnttggcaccaagggcttggctatcacattt

SEQ ID NO: 15527 - DNA, 477 bp, Homo sapiens
  misc_feature (1)...(477): n = A,T,C or G
aggattggagacattagnnnnnncattcgtagttattagtccatgcggtggaattcggcaaacacttggagtgggacactggccaatgttgctgcaatgtaatagaaaagggagaagtcataacacataagatagagaggtggcatgagtccaatcccatatggctttgtaaagcacccttaattgagtatgaagctattggaggtccttcaggagagaaatgaccttatctgttttatgttttaaaatactcactctgacctagtattagggttctcccccaaaacagaaacaatgggagctgtgtaggtaggtaaagagagagatttattgtggaaattggctcacaggattatagaggctgagaaatcccatgatatactatctgtaagctggtgccataatttagtctaagtccaaagacctgagaatcagggagctgatggtgtaactcctccttcaatgccaaagacctga

SEQ ID NO: 15528 - DNA, 490 bp, Homo sapiens
ggcgatgagaccatcgagagccggtggaaacctcaacttcagcagctgcagatccctggaccaacacaaatacccataaacaaccttcttgcaggtacacaggcacccccacttcacacagctaccaccaacccatttctcaccatccatggagataatgcaagtcagaaagtagcaagacttagtgataaaactgggcctgtagctcaagagaaaagttgacacctgagaaacatctagaaattgcctatcctgctgttctagcacttcatctggctgcctttgcagtccttttactacagctatgaagaaacgcaacaagaaactcaatgcacaacaaaggattaattgctgcaaggacattcttgtaaggctttgattagttttcttgttgctttgttgcactgaaatggaattcccatgcccctaccccttaccccagttttttgaacatggaaagaaaatttaataactttttaaagtgacataa

SEQ ID NO: 15529 - DNA, 492 bp, Homo sapiens
  misc_feature (1)...(492): n = A,T,C or G
agcnttgccaggccagnnnncctgatnactagagcntcgcagnggcnggaancaacaacaaaactctccgtttatggaacatgcgcatttgttctcagtaagtttttcgtttttaaagtgagcatgcgcatggtgagtaggttggtccgaagtttgaaccggacagaagcgctggtcggcgtctggcggttgtttttagaggtaatacacctagtttgtggctcagcatgtcaattgtaacagtgcaacttggtcagtgtggcaatcagattggttttgaagtttttgatgctttgcttagtgactcacacagttcccagggactctgctctatgagagagaatgaggcatatcaagcatcttgcaaagaaagattcttcagtgaggaggagaatggagttccaattgcccgggctgttcttgttgacatggaacccaaagttatcaatcaaatgctgtcaaaggctgcccagtctggccaatggaaatatg

SEQ ID NO: 15530 - DNA, 518 bp, Homo sapiens
  misc_feature (1)...(518): n = A,T,C or G
gatcacccagatgcaaatcatggagttcctggccagggtctttaagaaagacccccaggcctggccctcccgatacagagaagctctggaggaggccagagctctgcgggaggctaatcccactgcccactaccctcgcagcagtgtctctgaggactagcaaagtctggaggcagatgaatggtttctgaccctcaccagggctgtggaagggtgggggtgggtcattatagtattcaggatttacagtgcagtattcacgtgtaacttttaagttttcagtacagtgcttttatacctttaatgcaatgttgtattcatttgggtactattgtgtagtatttaggatgtatgcatgtttgtttatatgtaagcttggttggtgctttcgcttttgtgctacctttcttggatttttgtaccagagatgtgctaaactgatgaaatacattgagaaagttccatcttattctnttatatgggactgatgatgtgtgttggggagactgctctgcaaa

SEQ ID NO: 15531 - DNA, 463 bp, Homo sapiens
  misc_feature (1)...(463): n = A,T,C or G
ctacancctcgattnccntctcagnactgatgaancttgcaagccacgaggagaaccctcaccagaaacctcacagaaatcggccaacaccctcatctcgggcttccagcttttgaacaacgagaaaacaaatttctgttgtgtgctggttcccatttgtaattggcaccctaatgaaaccgttttctgtagccctggaaatggctgaaaatgaggggagggaaataaagtgctataattcagagcatggagcacaccttcctggttcacctgagctggattcggagaggtaaaatggccattacctcgtctaagctgccacttacagacacagtacaggatgaggcccagacccacagagacaacgatgatggccacagctaagatgatccagaaattattcctccaccagctcattgcagtggaatcctgagaagaatggagaaagaagaatgagagggcn

SEQ ID NO: 15532 - DNA, 531 bp, Homo sapiens
  misc_feature (1)...(531): n = A,T,C or G
tacagtgcggtggaattcggcatgcgaggtgcctttggaaagccccagggcactgtggccagggttcacattggccaagttatcatgtccatccgcaccaagctgcagaacaaggagcatgtgattgaggccctgcgcagggccaagttcaagtttcctggccgccagaagatccacatctcaaagaagtggggcttcaccaagttcaatgctgatgaatttgaagacatggtggctgaaaagcggctcatcccagatggctgtggggtcaagtacatccccagtcgtggccctctggacaagtggcgggccctgcactcatgagggcttccaatgtgctgcccccctcttaatactcaccaataaattctacttcctgtccnnnnnanannaaaaaaaaaaaaaaaaaaaaaaaaaaaaaaaaaaaaaaaaaanannnnnnccgggccttttaaaataaaaggggcccttaaaacccccggaagcacctctgtgggtgtttttagagcccaccttttgtgttgccccccc

SEQ ID NO: 15533 - DNA, 462 bp, Homo sapiens
  misc_feature (1)...(462): n = A,T,C or G
atcgaattcgattcccattcccagngngcnggaattcctttggaatgggatttatagcacagccctccattaggccagctcagctgtcctctgacctcagtaggactctcctcctagagtcaaatgctgacattggaattaaaaactgttattttcctagtgtcatacccaggcaaaactcatcccttccctactgtcccctttccctggcctcctttattgccttgtgtatttatgttcttcttgatctctcttagtagattgtagacataattctatagaactgagctgttcttgcacagactttggagccaggcagtcgtggctgactgggttctgccacttacattgtgtgtttaacagtaagccatttgaactctctgaatgggagtttttttcatctttaagagcagaatgtaaatatcttcctcacaagattatcaggatgattaaatgagatag

SEQ ID NO: 15534 - DNA, 495 bp, Homo sapiens
  misc_feature (1)...(495): n = A,T,C or G
nttgagatcactagtcagtgtggaggaattccccacctctctcgcaccccagtatgactgccgagcactgaggggtcgccccgagagaagagccagggtccttcaccacccagccgctggaggaagccttctctgccagcgatctcgcagcactgtgtttacaggggggaggggaggggttcgtacaggagcaataaaggagaaactgaggtaaaaaaaaaaaaaaaaaaaaaacaaagaaataaaaaaaaaaaaaaaaaaaaaaaaaaaaaataaaaataaaatacccantcccctttattaaaaaaggcccgttaaaaccccacaaaaatgcttatttacggtttctattncattccatatgtggatgggcccctcccactgcgccttttggaatactagtaggcacttctgattgtttttttataaaaaagaaagaagagttaggcccacttcttgcatgcagttttaatataaaaggggatacattgtacc

SEQ ID NO: 15535 - DNA, 479 bp, Homo sapiens
  misc_feature (1)...(479): n = A,T,C or G
ctcccaatagagacccctagtccagtgtggtggcattccactgtgctggtcctgtccaagatgacctgtacatcattccatgaatgacacgtgacaacagcttcccagtgtaataagcacatttaacccagcacttgtcagccccactgttctgttggaagtgttctatctcactgatcttgcctctcctaaagcaagggacaactcctggcactccgctgcagaggcccttgaagcctgttggaattttagtgaaatgagatgcctggcttaagccatgttgcctggcttctcaagtaccagcggacatattactagcaaggaagaaggctagcagcaagaatggttattgcatcctagaggcatttagtggaggagaaaactgccctggtaccgccatagccctaagtgctgcccagagttctgagctctcgatgagcacttggaacacgtctgcctgcagcctccctacacttttn

SEQ ID NO: 15536 - DNA, 465 bp, Homo sapiens
  misc_feature (1)...(465): n = A,T,C or G
aatgatgaccattagncatgtcggtgcgcttccggagccatggcgggggcagattcaagtcctgataaccccgcggtgttctttgatgtcagtattggcggtcaggaagttggccgcatgaagatcgagctctttgcagacgttgtgcctaagacggccgagaactttaggcagttctgcaccggagaattcaggaaagatggggttgcaataggatacaaaggaagcaccttgcacagggtcatataggatttcatgattcagggtggagattttgttaatggagatggtactggagtcgccagtatttaccgggggccatttgcagatgaaaattttaaacttaaacactcanctccaggcctgctttccatggcgaacagcgggccaagtacaaatggctgtcagttctttatcacctgctctaagtgcgattggctggatgggaagcatgtggtgtttggt

SEQ ID NO: 15537 - DNA, 462 bp, Homo sapiens
  misc_feature (1)...(462): n = A,T,C or G
natcgaaattcgtttgcagtgnggcggaattctgctttgggggcatcactcgataaattaagcttttgaagagttgaagatatttgtgccggaaactgtggagaagcaacagcctgacagtgcctatttctcctcggctgttatttcaaaatgcaagacgtaaaccacatcccaagttatttttttagtgcttaggtcctctgggggaggggagaatgccccaggcaattgatttgagacaatatattgcacacatttataattttgaatttggtgaggagtggaatataaatttggaactcaaattaatcgttaatgtagtttctgtttataatgtgccaatacatttgaagatatttgtgttgccattgcctaccataatgtactgcttaaaatctctttttacctcatcaagaacaagacaatgttttgtgcacattaattnttgcacagactacttta

SEQ ID NO: 15538 - DNA, 466 bp, Homo sapiens
  misc_feature (1)...(466): n = A,T,C or G
aggccnnnnnnnntttgaattgcgtaccattagnccangcggnggaattcctagaagcaggagggatggaggctggcaagagttgaaaagttacctgtcaggtactattgatagagacaggagacagccaagggtttctggtgaaactccaccttcaagcctaaaacagcctgaaggctgaaagaccagactgctggtcccagatgaaacccacgacctagagggagaactgcccctgtttgcccacacatttgtgactgattctttctgaataatgcccacatgcacactgggggaatggggtggagccactggaagtttgtgcgttgtgcaaggatgagcgtgggctcttcaacttggttattcaagctgaaggtggcctggtattcaatctgtgaggtgggagcccgttggcaggaatccctctagctttgctgagcgctgtttttttcgnttttggttttgg

SEQ ID NO: 15539 - DNA, 470 bp, Homo sapiens
  misc_feature (1)...(470): n = A,T,C or G
ntttgagacccttggaanttttgagaccatcagaacagngcggnggaattcgaccatctgctccgaccaggacaactactgcgtgactgtgtctgctagtgccggtattgggaatctcgtgacatttggccacagcctgagcaagacctgttccccggcctgccccatcccagaaggcgtcaatgttggtgtggcttccatgggcatcagctgctgccagagctttctgtgcaatttcagtgcggccgatggcgggctgcgggcaagcgtcaccctgctgggtgccgggctgctgctgagcctgctgccggccctgctgcggtttggcccctgaccgcccagaccctgtcccccgatcccccagctcaggaaggaaagcccagccctttctggatcccacagtgtatgggagcccctgactcctcacgtgcctgatctgtgcccttggtcccaggtcaggcccaccccct

SEQ ID NO: 15540 - DNA, 455 bp, Homo sapiens
  misc_feature (1)...(455): n = A,T,C or G
taatgcagtatctgctctggcacacctctgtccaggatagtcacgttatcttaaatttcaaatctgaactaacgtgctttacaaaaccccagattcctgtttactaggcagaatttagaagaatataattacttaacatttcaatctaatacaataggaatacatataacagaaccccagttgataccacttgtagcaaaagtgattttctttatttccaaattgctaatctctaggccagttctcctcaaagtctattctgaggactcggggttccatgaaaccctttcaggggggtctgatcctgaggtcaccccttttctaactacctagaatgccagattttcttcatatactttagtctctatgttaaagatggggcatataatggcaatgtcttgagatatttttggttgtcatggggctggggaggtgggaagagactggtactggcn

SEQ ID NO: 15541 - DNA, 447 bp, Homo sapiens
  misc_feature (1)...(447): n = A,T,C or G
ntttgaagtacattancccangcggnggaattcgttgggtcgggatccaggggaagcacagttagccttgggcagataattacggggaggatcaatgtgtgctcattacaatatcttcccatctacttttgaaatatctttgaaagtttttataatgaaaaattttttaaaaattactaattaatagtgggataacttgacattttgtgcccccttatgcaatgcattgaggagtacatgtcacctatgtagaatggtgacaaaaatacataacctgaatctaatcatgaggaaacactcagataagctcagaatacatgacattctacaaggcagttgtcatggtctatctaaaaagaaagtcagtgttgtgaaaaacaacaaaaaacagtgtcataaaaatcaaatagaacagttgcagatattaaaatatagagttacagtaaa

SEQ ID NO: 15542 - DNA, 404 bp, Homo sapiens
cccagacggaaccatggaagccccagcgcagcttctcttcctcctgctactctggctcccagataccactggagaaatagtgatgacacagtctccaggcaccctgtctgtgtctccaggggaaagcgccaccctctcctgcagggccaggcagagtgttagcagtcacttagcctgcgaccagcagaaacctggccaggctcccaggctcctcatctttgctgcatccaccagggccactggtatccctgccaggttcagtggcagtgggtcagggacagagatcactctcaccatcagcagcctgcagtcggaagattttgcagtatattactgtcagcaatattataactggcctgcgctcactttcggcggagggaccaaggtggagatcaaacgaactg

SEQ ID NO: 15543 - DNA, 466 bp, Homo sapiens
  misc_feature (1)...(466): n = A,T,C or G
ggannccgggtnngnnacctgagacctttgncaatgaggccatctgcaagagctgcctttgcctgcgtctcatgaatttataacagattcgttataaaaagaagccctgatgaatgagaatgaatcctatgcattagcccagaatgacattagccatatttctgaacaacttatttccatcctcatacccaaaaggggatgtttttgagtcccttatctccatgtctctgaatcatttgtccacatcttctgttgtgtaagaataaagagtacatgggctgggcgcagtggctcacgcctgtaatcccaacactttgggagcccaaggtgagcagatcacaaggtcgggagatcgagacaatcctgactaacacggtgaaaccccatctctactaaaaatataaaaaattagccgggtatggtggcatgcacctgtagttccagctactagggaggctgaggcagg

SEQ ID NO: 15544 - DNA, 468 bp, Homo sapiens
  misc_feature (1)...(468): n = A,T,C or G
nattgatgaccattagtccagtttgatggacttcggcggccgagcggggctccatgttttcccctggccaggaggaacactgcgcccccaataaggagccagtgaaatacggggagctggtggtgctcgggtacaatggtgctttacccaatggagatagaggacggaggaaaagtagatttgccctctacaagcggcccaaggcaaatggtgtcaaacccagcaccgtccatgtgatatccacgccccaggcatccaaggctatcagctgcaaaggtcaacacagtatatcctacactttgtcaaggaatcagactgtggtggtggagtacacacatgataaggatacggatatgtttcaggtgggcagatcaacagaaagccctatcgacttcgttgtcacagacacgatttctggcagccagaacacggacgaagcccagatcacacagagcaccatatccaggt

SEQ ID NO: 15545 - DNA, 456 bp, Homo sapiens
  misc_feature (1)...(456): n = A,T,C or G
cttggggccacaggggcaggctgcttccaggtgtggttcgtgttcccgaggagcgcagcgtcgcgaactcaatgtcatcctttcatccggggctacgggcagggcaggattctcctggcacccctgccactcctccaagtctacaggtgtggtctgtgctgtgggccctgcggtgcgagaagcgccggagccttcacgcagcgctgtcaactacagcagccaccaaccacgtgtggccatttagatgcgaattaaatacagttagaagttcanaanaaaaaaaaaaaaaaaaaaaaaaaaaaaaaaaaaaaaaaaaaaaaaaaggcccccctttaaaaaaaagggccccttaaaaccccgggaaaacccccgggggggtttttttattgcccacccttttggggttgcccccccccccggcttttttttgggggggggggggcccccccccctttc

SEQ ID NO: 15546 - DNA, 464 bp, Homo sapiens
  misc_feature (1)...(464): n = A,T,C or G
agatggtccaactggaccactangatggctncgaanngcgagaaatcagaaataagtacggaaaacaaaaacgtagaaaggatagaattttgcttcttgtattaaataaaaagcatttttgtgatttatgatcgagccctcaccaagtgaatgcctaagcaaccaggttttttttaggaaaaaaaaaaataatcaggaaaagcagttctagacatttaaaatgtatcctgtacttttgggtttcacagtgggcaagtttacccagaggcagggtgacagcctattagcaaaataaatagatcttccaaacttgtagtcctttgctcttttccctccacttttaagtaaattatcttttcagtgcgtctgggcttgggttgtggtaggatgcattaacttctccccacactgttctgattgcgcagcaaagcgtccattaccaataccatatccaaagtgacgtt

SEQ ID NO: 15547 - DNA, 462 bp, Homo sapiens
  misc_feature (1)...(462): n = A,T,C or G
ttaacattgattccctattgagngtggaggaacttctcttgtagcacgtggagaattctgggacatagttgcaataacagcggctgatgaaaaacaggaacttgcttacaaccaacagctgtcagaaaagctgaaaagaaaggagttaccccttggagttcaatatcacgtttttgtagatcctgctggagccaaaattggaaatggaggatcaacactttgtgcccttcaatgtttggaaaagctatatggagataaatggaattcttttaccatcttattaattcactctggtggctacagtcaacgacttccaaatgcaagtgctctgggaaaaattttcactgctttacctcttgatataccagaatgctctggcaaaacatcctgtatcattcaaagcatactggattcaagatgttctgtggcacctggctcagttgtggagtattccagattggg

SEQ ID NO: 15548 - DNA, 488 bp, Homo sapiens
  misc_feature (1)...(488): n = A,T,C or G
gggaataancnnggggnnnnnnnnnnaaaattgaggnccntnngnnaactgaggccctctgtcagagcggcgtaattccagcgtttatggcagttgaatttgcaatctaaaatgaaaatattcagcatattaatttatgtaaaagtcaagcagtatcagatatggatagactttctttaaatcactcacaaacagaatattattagtaatgatgatattaaaataataaccacctacaagtcactttagcacccctctgcacccccccatcattttcttcatttgtataatgaggctaataccatgtgtacaacaccgccgaaatgtactggcagctccatatttccttctcttatctcatattcatctttccacatctcccatgagagtttctcaagctgattaaattcctatccaacatatgtcagatacatactttcaattcctaagagtcaggacctaatgtatatgcaggagagagactgagn

SEQ ID NO: 15549 - DNA, 449 bp, Homo sapiens
  misc_feature (1)...(449): n = A,T,C or G
ntttgaagacattagnccangcggnggaattccgcggctgcctgcactgaccgttcacgtgactcagccaaaggacggtggcttctgcgaagtgtgcaagaagctggtgggttatttggatcgcaacctggagaaaaacagcaccaagcaggagatcctggctgctcttgagaaaggctgcagcttcctgccagacccttaccagaagcagtgtgatcagtttgtggcagagtacgagcccgtgctgatcgagatcctggtggaggtgatggatccttccttcgtgtgcttgaaaattggagcctgcccctcggcccataagcccttgttgggaactgagaagtgtatatggggcccaagctactggtgccagaacacagagacagcagcccagtgcaatgctgtcgagcattgcaaacgccatgtgtggaactaggaggaggaatatn

SEQ ID NO: 15550 - DNA, 463 bp, Homo sapiens
  misc_feature (1)...(463): n = A,T,C or G
atcgaattcgatagcatanccagngngcnggaattctgcatccctacaaaaaatacaaaaattaacctggtgtgggggagcaggcctgtagtcccagctgctctgggggactgaggcaggaggatcactcgagcctgggaccttgaggctgcagtgagccacgatcatgccactgcaccgcagcctggatgacagagccagacgctgtctcaaaaaaaagactccagcacataccttcagtaatatgaatgtgaaataacaggacccattccaaaagcaatacacacaaatttatcccattcttttatgtccccttcatttgcttgagtaatgtcctattttttatgtgcctctaggtgagttcatagccaatgatcacacatatatctactcctgaagatacaggaaccagattttctctcagaaaaaataattattaaaataccattacaggtaactcaat

SEQ ID NO: 15551 - DNA, 511 bp, Homo sapiens
  misc_feature (1)...(511): n = A,T,C or G
nggggaggcggggcngnnnnncctcgagatcgatagtcagtgtggaggaattcgtttgaattacatctgggcaatcaggagataattcattatggctgagttgaagacttaaggtgtaatttcattacagtccattagtaaagtgtattattggcgccattttcaaaaaaattaatttattttaccagcagtattcatagctgtggttatgttattttttatttaaaaactttatattaaagtcatttgtaatgttattgtatagttattgtgtagcacatatggtttgcactgtatagtagcttttaaagaaaatagtcacaatacagaaaagcattttagaaatagcttcaaaagcacttgtgtatcttgattttttcttatatgctgttgcagatatatgtatatgctaaaatataacttgcaaagatgttctaaatacacatgnctatagttcgccttaagatttcaattcttggataatcaggctctgtttgcactttatattttt

SEQ ID NO: 15552 - DNA, 451 bp, Homo sapiens
  misc_feature (1)...(451): n = A,T,C or G
ntttgaagatcgatggcaattgcggagggcggnggaattaccacttaattctattttactgtactgaattagtttcttggaggtagattcatttcttgagttctctgtttccttagccataatattttctaggatccgggaactccctgtattgtctatttccaacattatataattttaatttaatgtaatgtaaatctcatacttggtgatcagcacattcttatatcctgctctagcaatgagtacccatttgttacacttaccaaactctctataaacatatactgtgagtaagatttgaagccaggaataaaaggcagtctgaaagaaaacgtcctatacgatgcagttgtttggaaatggctgatttctgatatgaaacccaacttgatacactgtttggttctttgacttgngatctatctgaattgctttcactagtacacan

SEQ ID NO: 15553 - DNA, 449 bp, Homo sapiens
  misc_feature (1)...(449): n = A,T,C or G
ntttgaagatcgatgacccattgggaggagaggacgaagacctgtaaggaccttcctactcaatgcaccgacccctggacgaagatggaggcacaggagatgccgctcccatctcttcactctgggggcctgagagcacagcccactcaagaccccctactttgatgctggcgcctcatgcactgagcaggaaatgcctcgataccatgagctgcccaccttggaagaacggtcaggacccttgcaccctggagccacaagcctggggtcccccatcccggtgcctccagggccacctgctgtggaagacgtttccctggatctagaggatgaggagggggaggaggaggaagagtatctggacaagatcaaccccatctatgatgctctgtcctatagcagcccctctgattcctaccagggcaaaggctttgtcatgtcccgggccc

SEQ ID NO: 15554 - DNA, 448 bp, Homo sapiens
  misc_feature (1)...(448): n = A,T,C or G
ntcgagatcgatgaccattggcagggcggnggagatcgtttcgagtgtctgtagtcctcttgttcctccaagttcatgttttacttttcccacttacagcgtcctgtttccatttgaagtgggcaaagtgagagcttcccactgtgatcctggtgccattttcctggttctggatcaagtgggaccagactacttactaggttttcttttcactaaaatgcgtgagaaactagctcaaaaacattgagataagcaaagttatcctcctaggtggtgcttttgaggatgtgatggtgttgactacatcagctcttactgtaaagttgagcaacaggatcgatatttaatagagatccttttacctaaagtagtggcagcaatgtcaaaggtgccactcagcattgcctactgggtgtgtttattacaggcacttcattttcttcttgtn

SEQ ID NO: 15555 - DNA, 448 bp, Homo sapiens
  misc_feature (1)...(448): n = A,T,C or G
nttcgagatcgatagccattgcggnggaattcggggaaactataaactgcttaatttaattcagcttaaacgtttgtttccccattattatttctccattgatttttgtccaatggcttgcagtgcttccacaaaagaacttcataaatttggtttgattgataacttctataggcctcataggcaccagggctggaagataaataaacctcaacacagaatggaagctgtgtttcaaaggacagtggtggtggggaagaggagggagagattactttgaatggtattgccaagtttatttcaacagcttgaaaacagccgataaacactgtaaaaaaaaaaagaaattgaagtccttcgtttagtgagaactgcttgtccagatagggttgggtggctgccagctggtgaatcaaatgtcaattgggtttacaccataggagacaat

SEQ ID NO: 15556 - DNA, 462 bp, Homo sapiens
  misc_feature (1)...(462): n = A,T,C or G
ntagagattgtagnccgtgcggnggaattcccagccagggtgacagagtgagactctgtctcaaaaacaaaacaaaacaaaacaaaacaaaacaaacaaacccccaaatacctgaccagtattcttcaaaagtgttgaggtcatggataaggaaagactgaggaactgtcataaggaaggtaaggagacatgatgatttacctggattggatcctaggacagaaaaacaaacaaacacacccaaaaatgggacattagtggaaaaattggtaaaattggaatcaagtctgtagttcagctaatagtattgtgccaatgtgaatgtattggtttgataactgcactacggttatgtaagatgttaaccttacaggaagctgggtaagaggatatacgggaactctgtgctatttttgcaacgtttctgtaagtctaaaattatttcaaaataaaaagtgaaaa

SEQ ID NO: 15557 - DNA, 444 bp, Homo sapiens
  misc_feature (1)...(444): n = A,T,C or G
nttgagccctactgatgcccttgacagngcggggaatctgctgcgagccccacgcccctccacatggctgccctcctcctgcttccctggctcatgttgctcacagcaccttccagcctgaggaacagtgatttgcaggcaacgtgtacctcctaggctgtccctggatttgcagagccttaaagcccactctcatcttgcaagcctctgaagccaccagttttctgagatgttcctcccggccccggagaccacggatgtggctaccttctcagaatatagatgtttccattgcggcaggccgcggcaagccggaactcaacatcaaactggccagaaacctctaggaagacggggacgctgggaaggctcatctgcaaacaagaagcgcaaacactccaatttctctggagcccccgtccctccctgccctgtcagtaactn

SEQ ID NO: 15558 - DNA, 442 bp, Homo sapiens
  misc_feature (1)...(442): n = A,T,C or G
tactgtgactacttgacagncngtcggaannccgcaaancgngagaccccatctctacaaaaatacaaattaactgggcatcctgtcatgcgcctgttttcccagctacttgagaggctgaagcagaagaatctcttgagcccggaaggcagaggttgcagtgagctgagatcgtgccactgcactccagcctgagtgacaggagttaagccctgactcagaagaaaacatacaacccaaaccccataaggtgcttaaagtttcatttacttacctaggaaaaagacttggttctcaaaataatccattttaaaataaattgggtagaattatagttccacctttattggttgtggagcagggatttatttttagttattatattgaggaatagaaaatagaattaaataatttaacttgattaatcacccagaccattttg

SEQ ID NO: 15559 - DNA, 460 bp, Homo sapiens
  misc_feature (1)...(460): n = A,T,C or G
ntcctgagacctgantccgatgacngtcncgnanannncggnggaantttgactgtgctaacgagtcacatgggcgatgataaaacgcaagttctgatttcattgtatctgggatggggcccgaggggccatttattggtatattttttttgagacagagttttgctcttgtcgccccggctggagtgcagtggcacgatctaggctcactgcatcctctgcctctcaggttcaagcaattctgcctcaccctcccgagtagatgggattgcaggcacctgccaccatgcctggctaatttttgtatttttggaagagatggggtttcgccatgctggccaggctggtctcggactcctgaccttatgtgatccgcccacctcggccttccagactgctgatattacaggtgtgagctaccgtgcccggcttgaggtgcttttttactaatacattgagc

SEQ ID NO: 15560 - DNA, 483 bp, Homo sapiens
  misc_feature (1)...(483): n = A,T,C or G
nactgaaaccctcgaannnccatgagaacctaggacanngcgnggaantcagcggttccggagtctcaccactgcatttttcagagacgccatgggcttcttattaatgtttgacctcaccagtcaacagagcttcttaaatgtcagaaactggatgagccaactgcaagcaaatgcttattgtgaaaatccagatatagtattaattggcaacaaggcagacctaccagatcagagggaagtcaatgaacggcaagctcgggaactggctgacaaatatggcataccatattttgaaacaagtgcagcaactggacagaatgtggagaaagctgtagaaacccttttggacttaatcatgaagcgaatggaacagtgtgtggagaagacacaaatccctgatactgtcaatggtggaaattctggaaacttggatggggaaaagccaccagagaagaaatgtatctgctagactctacatag

SEQ ID NO: 15561 - DNA, 476 bp, Homo sapiens
  misc_feature (1)...(476): n = A,T,C or G
ngatgaaaccctcgcagngcatgattccctatcagatggcacaangacagtaacagccgcgtggtgctgccaggactgcccttgggcatatcagtgacagcccatatgtgggtggaggaaacctgtaatttccttcttaacatgtgtttgaaataccaagtgaataatactgttctggaaaaaaatgataaactagtggaaattaaagaaattaagggttttatataatagacaggccccacctctcaaaatatttttagaagtctttttgtaaactaatttcttttgatcactattttgcatcagtaaaatgatttttttaaaaccaataaatcatcaattattagaaaaaaaaaaaaaaaaaaaaaaaaaaaaaaaaaaaaaaaaataaaaaaaaaaagggcccccttaaaattaaagggccctttaaaaccccgtaaaaaccccggggggggtttttttgtgcgccctttttg

SEQ ID NO: 15562 - DNA, 421 bp, Homo sapiens
cattttttgagatgatcttggatcttcgctggacttatgttcttttctacagcccaagggaggttaaagtggtggccaaaggattttgtagtgccaatgggatcacagtctcagcagaccagaagtatgtctatgtagctgatgtagcagctaagaacattcacataatggaaaaacatgataactgggatttaactcaactgaaggtgatacagttgggcaccttagtggataacctgactgtcgatcctgccacaggagacattttggcaggatgccatcctaatcctatgaagctactgaactataaccctgaggaccctccaggatcagaagtacttcgcatccagaatgttttgtctgagaagcccagggtgagcaccgtgtatgccaacaatggctctgtgcttcagggcacctt

SEQ ID NO: 15563 - DNA, 427 bp, Homo sapiens
  misc_feature (1)...(427): n = A,T,C or G
gaagcacttccaactctcaggcacttggccagactttcctaggagcgcccacagcctctgtacagatctctggccacgttccatggacttctttgttttcggccacgcctcctagtgaccaccgtctgacgcgcatctagctctgggatgatgtctattcatctttgtattctcagtgccaaacagagggcccgtaattggaagctcaataaatggcagtgattgtctttatcattttgggggaagggggccgtgattgtttactgaattgaattccagtgtctcagaacaatgggggcagtttacttctctagagttggtatgttctggattttagaagcattggctgaccggtgacaatgaagttaacatttgtacagatctttacgtttacagccctctttcataaaagacattatctcatcan

SEQ ID NO: 15564 - DNA, 494 bp, Homo sapiens
  misc_feature (1)...(494): n = A,T,C or G
tgggtggccaggnnngnccncctgannccctatcgagaccatagtccatgtggtggaattcggcggaggtgcaggtcctggtgcttgatggtcgaggccatctcctgggccgcctggcggccatcgtggctaaacaggtactgctgggccggaaggtggtggtcgtacgctgtgaaggcatcaacatttctggcaatttctacagaaacaagttgaagtacctggctttcctccgcaagcggatgaacaccaacccttcccgaggcccctaccacttccgggcccccagccgcatcttctggcggaccgtgcgaggtatgctgccccacaaaaccaagcgaggccaggccgctctggaccgtctcaaggtgtttgacggcatcccaccgccctacgacaagaaaaagcggatggtggttcctgctgccctcaaggtcgtgcgtctgaagcctacaagaaagtttgcctatctggggcgcctggctcacgaggtt

SEQ ID NO: 15565 - DNA, 464 bp, Homo sapiens
  misc_feature (1)...(464): n = A,T,C or G
nnnnntttgtagacccattggtaagtccctaggacagcgtggcgtaattctagagattgaggctcaagatagtcttttataacgtgatcttaggcataacattagcaagcagatttgcaagacccacggccaccctgcagctgatgcacaccacgtgcaggaactcccatcacccatggccaccctgccaaaatgctttgtcagcaacccctattggagcgttgttgccagtggacccggaacaccttggccattccagcataggaggtgcttaaccttgaggggccaggaaaaaaaaaaaaaaaaaagccttgggccaggtcccaggtcccctgatttaaagcatgcatctcaggagggctgatttaagcctggcccccttgaaaatatccaaaaacaaaggcggttggctaagcccaagttataccactgcgaaaccttcatgggcttaagaaaatataaaa

SEQ ID NO: 15566 - DNA, 466 bp, Homo sapiens
  misc_feature (1)...(466): n = A,T,C or G
ctcgacccccccnnnattgtagntcccctagntccgtgtggtggaattcgaagcacttccaactctcaggcacttggccagactttcctaggagcgcccacagcctctgtacagatctctggccacgttccatggacttctttgttttcggccacgcctcctagtgaccaccgtctgacgcgcatctagctctgggatgatgtctattcatctttgtattctcagtgccaaacagagggcccgtaattggaagctcaataaatggcagtgattgtctttatcattttgggggaagggggccgtgattgtttactgaattgaattccagtgtctcagaacaatgggggcagtttacttctctagagttgttatgttctggattttagaagcattggctgaccggtgacaatgaagttaacatttgtacagatctttacgtttacagccctctttcataaaagacatt

SEQ ID NO: 15567 - DNA, 461 bp, Homo sapiens
  misc_feature (1)...(461): n = A,T,C or G
cattgacgaccattagtcagngcgctggaattcctttgctgagggtcacattgagctgcaggttgaatccggggtgcctttaggattcatcaccatggcgtaagacatggagaccaaaatcaagaactacaagactgccccttttgacagccgcttccccaaccagaaccagactagaaactgctggcagaactacctggacttccaccgctgtcagaaggcaatgaccgctaaaggaggcgatatctctgtgtgcgaatggtaccagcgtgtgtaccagtccctctgccccacatcctgggtcacagactgggatgagcaacgggctgaaggcacgtttcccgggaagatctgaactggctgcatctccctttcctctgtcctccatccttctcccaggatggngaagggggacctggtacccagtgatccccaccccaggatcctaaatcatgacttan

SEQ ID NO: 15568 - DNA, 453 bp, Homo sapiens
ttttaatcgagaccctcatctgtgtggcggaattcggagaaacgtcaccgggcgagagccgggcccgctgtgtgctcccccggaaggacagccagcttgtaggggggagtgccacctgaaaaaaaaatttccaggtccccaaagggtgaccgtcttccggaggacagcggatcgactaccatgcgggtgcccaccaaaattccacctctgagtcctcaactgctgaccccggggtcagttccagagagaaggactccctcctgcttggaagagacctcacaccgtcatcacgatgccaacggctctgaaggtggatggcattcctgcgtggattcatcactcccgcatcaaaaaggccaacggagcccaactagaaacatgggtccccagggctgggtcaggccccttaaaactgcacctaagttgggtgaagccattagattaattcttttt

SEQ ID NO: 15569 - DNA, 456 bp, Homo sapiens
ttttattgtagaccctagtccagcgtggtggaattcggtccttggcctcaagtcccaggtggatgcccagctgctgactgtgcagaagctggaggagaaggagcgagccttgcagggcagcctcgggggtgtggagaaggagctgacgctgcgcagccaagccctggagctcaacaagcggaaggctgtagaagccgcccagctggccgaggacctgaaggtgcagctggagcacgtgcagactcggctgcgggagatccagccctgcctggcagagagccgggctgctcgtgagaaagagagcttcaacctcaagagggctcaggaggacatctcacggctgcggcgcaagctggaaaagcagaggaaggtggaggtctacgcagatgccgacgaaatcctccaggaggagatcaaggagtacaaggcgcggttgacctgcccctgctgtaacac

SEQ ID NO: 15570 - DNA, 450 bp, Homo sapiens
  misc_feature (1)...(450): n = A,T,C or G
aacaataaaatttgaggaccttagtanagngcggnggaattcgggacaaagccccttctggtggcaaacggaaagagactttggtgtaaagaaggctctttgtgttaactgatgggagagactgtttgtgtataaatgtgtacagttttgttttctcgtaaggggagcatcatagggttactttataccagttgtaacattttcattgttttttggtgttcttttttctttttttaatggcagctaaagatatacagattactgttaaattgcagtccttttttttttaaagatattttcttgaattatttacaacatggtaagcctggtattttttaatcaaacaaaatatttatgaaatgggttttctcttaattctggattcatcatggctttctaataccaattgtaatatttacaatattcaccaaaacttaaaattttgcaaat

SEQ ID NO: 15571 - DNA, 462 bp, Homo sapiens
  misc_feature (1)...(462): n = A,T,C or G
nnnnnttttgaaagaccacttgtacatcgcgcgtggaattcgtggctgagtttcgcacttgattttcaatattttatagtaagaaatgacaaactgctttggttcatttcataaacaaactctgcatttagataactattaaaggttgttaagatgaagatttactgtttctttgttactcgttggtacagctgtttgttttacttgcacatttgtacatatacttaatgttttcacgtgccttaattgtttaaaatctctggcttcaaagtttcttggggaaaggtcggtttacctcacattttttgtttccattagtaatattctaggtacctcacaaaatgtattatggtgccatggctgttagtttttagtgagtgctgtacgattaattcgaaaataggcagaattccattcctcccaaggtggcaaaaattagctatactgatgtaattgtcattn

SEQ ID NO: 15572 - DNA, 451 bp, Homo sapiens
  misc_feature (1)...(451): n = A,T,C or G
nattgacgaccatctgtcgagtgccgtggaattcgacttgatggcgtgatgtctcacagaaagttctccgctcccagacatgggtccctcggcttcctgcctcggaagcgcagcagcaggcatcgtgggaaggtgaagagcttccctaaggatgacccgtccaagccggtccacctcacagccttcctgggatacaaggctggcatgactcacatcgtgcgggaagtcgacaggccgggatccaaggtgaacaagaaggaggtggtggaggctgtgaccattgtagagacaccacccatggtggttgcgggcattgtgggctacgtggaaacccctcgaggcctccggaccttcaagactgtctttgctgagcacatcagtgatgaatgcaagaggcgtttctataagaattggcataaatctaagacgaaggcctttaccaagtactgcg

SEQ ID NO: 15573 - DNA, 455 bp, Homo sapiens
  misc_feature (1)...(455): n = A,T,C or G
ctttgacgccccttngttgaggaccctctagtccgtgtggtggaattcgcgcggactatcgggcggctaggctctctgaggaggctgccacagtgaagcaaccgtgacaagtggtgcccgaccagggacctgaacgaggaaggtctgccagagcagagaaagtgaaactgatcagacgaactacgaacccctggacgggagagtctgccggcggagaatataaggagatggacaaaccgtgtgggtgccctccaggtgtgtgtgaccatggaacgggagaccggagggatccatggtattcaaccgtgggcctgttacctccagtacgagccatgagccagcggaatctgaatgcaaagacagaacaagggccgaccggagtcacaatgacatccaaccccataacatggggacagatcaagaaaacgacacaagaagctgagaaactactggag

SEQ ID NO: 15574 - DNA, 463 bp, Homo sapiens
  misc_feature (1)...(463): n = A,T,C or G
nagcgcgcgnctcccnccccaagttcccagaagtcggngcattncatgtaaaccttatgaggcgacaccgcaagtagctgctgaggacgtagcggatcctctccatctccatttggtggatgctgaccttcaggtcctcccttttggctctcctgagattttcttcctattaaatgagaaattaaggtttataaaaaacatgatgttcaaccatcatcaccggcaacgttgaggacccagactatgtttcagtccaaggaaaacaaaaatatcatgttttatgcttgaaatggctacatctggtttctggtcacacagtggcatgataatggctcactgcattcttgacctccaaggcttaagtgatcctcctgcctcagcctccagagtagctgggactaaaggtacataccacaaagcctggctaattnttaaattttttttaataaagatgggggtttaa

SEQ ID NO: 15575 - DNA, 494 bp, Homo sapiens
  misc_feature (1)...(494): n = A,T,C or G
tgggaggccaggnnngnnnnaactgagaccttttgagaaccctagtacatgcggtggaattccattgttgctcttagccaagttcctcatctcgctgtgccccaggagcgctcagaattcaccccacagcactgggagtcttgggagcctcagcttgagggtgttgggggtgtgctgatcccaacgaatgtctcctctactgccaggcaccagaggatcttttgtgcttaacctaatctgaagccaggaagaaaaacctattctaccactttagatccttatagaactcttttctatattttgtgatcaagacttttgaactgaaaagataagaattggatgtatttgttctctgacctgatttgacatctccctgaggaaatatggttgactacttttgtcttcagcaactagagaaagtaagttcacatggaacaaatcgacattagcccaagtgtccaattatattactagcaatgatgagttggaacgag

SEQ ID NO: 15576 - DNA, 468 bp, Homo sapiens
  misc_feature (1)...(468): n = A,T,C or G
nactgagaccntcatcgagagctctagncagngnggnggaattcctttgggaggccaaggcagtcgaatcacctggggcaaatcacctaaagtcgggagttcaagaccagcctgaccaacatggagaaaccccttctctactaaaaatacaaaaatatagccaggtgtggtgatgcatgcctgtggtcccactacttgggaggctgaggcaggagaatcacttggactggggaggcggaggttgtgatgagctgagatcgcaccattgcgctctggcctaggcaacaaaagtgaaactgcatcttaaaaaaagaaaaaaagaaaaaagaatattcttgatcacccagttagagcaggtagtcagatagtaatgagtggggtaaggtagagaccctgggaatgtgccccaggaatgtcaggtgattatcagatggtcagctcaggattgacaaatggtctcagctggta

SEQ ID NO: 15577 - DNA, 464 bp, Homo sapiens
  misc_feature (1)...(464): n = A,T,C or G
tgggggncggntnnncctggactgcatacactccgccgngncgnggaattccttaattagaaattaaattgtcaagcctcttattctgacttcaaagaattaatgtatcttccaacaataaaatcacttctgattttaatctaggaaaacctaaattgtggctatggatccaaagctgtttgtttctttgaatatcaatattttcaacaggatcttgtatttaaaattcccacctacattgttaaatatgttattttttcatatctcttttggttttgataatctgaagtgtttttttctcgttttggccttccaaactgcatttggttaggtgaattaagaaaaatattgccatcaagaattacttgtgttttcacagagatagactctttgctttatagagattgttgtgtatttaatatgaatatcccagctttagaaaagaagtaaactggatacaaaan

SEQ ID NO: 15578 - DNA, 462 bp, Homo sapiens
  misc_feature (1)...(462): n = A,T,C or G
nttttnattcgangatccctagtccagcgtggtggaattcgttcctcagtgtctacaaggcctttgttatggagaccttcgtccacctctgctcgctgggcagttgggcagctctactggcccgagcagtggtaacggggctgctggccctcagcactttggccctgtatgtcgccgttgtcaatgtgcactcctaggcttggtgtctcagacattgatgtaccttttccctgcctcactccaggttttagtgaagtaaacagtatttggaaaaaaaaaaaaaaaaaaaaaaaaaaaaaaaaaaaaaaaaaaaaaaaaaaaaaaaaaaaaaaaaaaaannnnggccccccttttaataaaagggcccctaaaaacccccgtaaaacccccggggggggttttttttgccccccccttttttggtggcccccccccccggtttttttttaacccggggaggcg

SEQ ID NO: 15579 - DNA, 464 bp, Homo sapiens
  misc_feature (1)...(464): n = A,T,C or G
gggtggtttaaactgagacatcgctgangcctctagnancnncgctcgnctccttcgctcactccattgtgtcggggatctgggcactgctgtgtgtatggcagactcctgacatgttagtggagattgagacggcgtggtcactttctggctatttgctcgtttgcttctctgcggggtatttcatccacgatacggtggacatcgtggctagcggacagacgcgagcctcttgggaataccttgtccatcacgtcatggccatgggtgccttcttctccggcatcttttggagcagctttgtcggtgggggtgtcttaacactactggtggaagtcagcaacatcttcctcaccattcgcatgatgatgaaaatcagtaatgcccaggatcatctcctctaccgggttaacaagtatgtgaacctggtcatgtactttctcttccgcctggcccctcangcn

SEQ ID NO: 15580 - DNA, 444 bp, Homo sapiens
  misc_feature (1)...(444): n = A,T,C or G
ctcgtcgtccctagtccattgtggtgcaattcagagaagccaatacctattaaaagaaaaaaccttcacagtagtttattgccattttatggcttgtatgacactaaataactcttcttaagaggatactttgcttttaagattattttgttcctgatactagcctctgattatgtttttctcatttttgtagaaaagagaaaatctaaagtatgaccactttaaatctattcagaagacaatagtttctcaaatttatttgatgcaagtatcatgtgaaagagaaattagcacttggactaatgaggggaaattatagagataattttggctaataaagtgctatggatagtattgctacataatgaatgaatcacttgaataactcagaggattcaaacaataccattttcttatcttcatagttcctgtggctcangaatt

SEQ ID NO: 15581 - DNA, 483 bp, Homo sapiens
  misc_feature (1)...(483): n = A,T,C or G
natcgtagaccctagtccangnggngggattcgcgtgatcaaggctgaaattgagaatgaagactatagttatacaaaagatggaataggactagatttggaaaattcttttagtaacattctgttatttgttcctgagtacttagacttcatgcagaatggtaactactttctgatttttgtgaagtcatggagcttgaacacctctggtctgcggattaccaccttgagctccaatttgtacaaaagagatataacatctgcaaaagtcatgaatgccactgctgcactggagttcctcaaagacatgaaaaagactagagggagattgtatttaagaccagaattgctggcaaagaggccctgtgttgatatacaagaagaaaataacatgaaggccttggccggngttttttttgatagaacagaacttgatcggaaagaaaaaatgacctttactgaatccacacatgttgaaaataa

SEQ ID NO: 15582 - DNA, 492 bp, Homo sapiens
  misc_feature (1)...(492): n = A,T,C or G
ntttggagnaccactggnnagngcggttttgacgtcattagtccagngcggnggaattccggcgttgttctggattcccgtcgtaacttaaagggaaattttcacaatgtccggagcccttgatgtcctgcaaatgaaggaggaggatgtccttaagttccttgcagcaggaacccacttaggtggcaccaatcttgacttccagatggaacagtacatctataaaaggaaaagtgatggcatctatatcataaatctcaagaggacctgggagaagcttctgctggcagctcgtgcaattgttgccattgaaaaccctgctgatgtcagtgttatatcctccaggaatactggccagagggctgtgctgaagtttgctgctgccactggagccactccaattgctggccgcttcactcctggaaccttcactaaccagatccaggcagccttccgggagccacggcttcttgtggttactgaccccagggc

SEQ ID NO: 15583 - DNA, 469 bp, Homo sapiens
  misc_feature (1)...(469): n = A,T,C or G
aggtggttttaactgagnccatcgataganggcaatcgnatnngccggaaagactttgaaagaaaaccgncagaaaaagaggccctgcagtctgattttctagaaatgattaatgctaatgaaaaaacaaggcttgaaaatcagaatcttttaattcaagttgaagaagtatctcaaacatgtagcaaaagtgaaatccataatgaaaaagaaaaatgttttataaaggaacatgaaaacctaaagccactactagaacaaaaagaattacgagataggagagcagagttgatactattaaaggattccttagcaaaatcaccttctgtaaaaaatgatcctctgtcttcagtaaaagagttggaagaaaaaataggaaaaaatcgactagaaaggggaaaattattgctgcagaagaaggagggagaattgttgctctgatgcttgagtaggtaatgagacgcangag

SEQ ID NO: 15584 - DNA, 509 bp, Homo sapiens
  misc_feature (1)...(509): n = A,T,C or G
aggggccgggnngnnnnnnnaatgaatagctatacntagtgcggnggaattccaaatggaatgtagcagaagcaatccagaaattgctttaatttagatctcacttaaaattctttatcaagttaaagaatttaagtatctgaatttacatgatactggaatgatagatgggagaaaaataaaagaatcacgatccgtgcaggctaagaggaacaacacttcctgattctgcctttttattctatgaacttttagccagctagtatttactgagcacttactgttccaggaactgttttgagtagttaggcacagagagtttaagtgacttgcccagggtcacacaggaagtgatggagcagagattggggccaggaggtctttgagtggagagcctttcactttggcacaacccagccctgccctgcatttgaggagccaagctctggaggtgaggccatgtgtccaactggtcagtgtagtaagtgatgtgttctcaaacctgtggg

SEQ ID NO: 15585 - DNA, 471 bp, Homo sapiens
  misc_feature (1)...(471): n = A,T,C or G
agatattaaaatttgaaaacctattgatntccctagtacagngcggtggaattcgattattgagccagtgtatttctatattggcattgtttttggattgtttggaatatatgttactgctttatttgttacaagttggcttatgagtggaacatggctagcaggaatgcttactgttgcgtggttcgttattaacagggcagcatgcaacttggcagctggtctcccttacagtgaatgatccaagagagtatgagagagtgtgccacaatggaagccaggtatctgttataacctcatcttagaaatgatataacatcactctgccatattttgtcagttgcacagacccctggtacagtgtgggaggtgacaacacaggatattaataccaggaggcaggaatcattgggaccgtcttggaggctggctaccacattcaattaactttgctattaatttcatgtaatn

SEQ ID NO: 15586 - DNA, 451 bp, Homo sapiens
  misc_feature (1)...(451): n = A,T,C or G
ntttgaagaccacttgtacagccttgcggaattccacaggatgggcaagtgtcgtggacttcgtactgctaggaagctccgtagtcaccgacgagaccataagtggcatgataaacagtataagaaagctcatttgggcacagccctaaaggccaacccttttggaggtgcttctcatgcaaaaggaatcgtgctggaaaaagtaggagttgaagccaaacagccaaattctgccattaggaagtgtgtaagggtccagctgatcaagaatggcaagaaaatcacagcctttgtacccaatgacggttgcttgaactttattgaggaaaatgatgaagttctggttgctggatttggtcgcaaaggtcatgctgttggtgatattcctggagtccgctttaaggttgtcaaagtagccaatgtttctcttttggccctatacaaaggcaag

SEQ ID NO: 15587 - DNA, 476 bp, Homo sapiens
  misc_feature (1)...(476): n = A,T,C or G
tggggattnnnattgatcgcgtacattagtccgngcggggaattccaaaaggagaatggcagaactaatcaagcaggagaaaaaaatatgtgtgaactctatttcaaaataatatggtcaaaggagaaaaaataatgaaaaggaatgaagaaagactacaggatttatgagacatcatcaaaagagctaacaaatgtattatagaaataaggatgagggtttttcaaaacctgatttgaaaaaaataatagctgaaagcctcccaaatctggggaaagatataaatacacactattatgaaaaggtcagaggtctccaataagattcaatctaaattatatgaagacatataatcaaacttcaagacaggattctgaaaacagcaagagcaaagaagcacattacattaagaacaatatcaataagactatctgcagatttcccaggacagaccttacaggccaggaaagggtggg

SEQ ID NO: 15588 - DNA, 481 bp, Homo sapiens
  misc_feature (1)...(481): n = A,T,C or G
nttcgtagaccctagtcagngtgggtgattccctttctacctccatagaccggccagaatttagcttcacttgagagagatctggaatggtcgccatgattgaaaccacgcaccattacatcatcattacattaattacatcaacataaattatttcttcccccttcccttttccagcactcaaccaaggagcaaagctcatcccaccccacacccctcccaggtctgctcactgccaggctcctctcccctttgttcagtggagctggcttttctcccagcccctttccatgcctttcactccatttggcaagctctgagggggagcctggggacgggtttgggtccccaggaggagagccttgggtataatctatttttctaggagcctcttgccttgtcacttgcagctttcgccctctgctttgatggctgaggtgaactcatgttctttgggaaaagggaaggcgtgctgtggaan

SEQ ID NO: 15589 - DNA, 453 bp, Homo sapiens
  misc_feature (1)...(453): n = A,T,C or G
ccccccatagacgaccattanatagagcgccgtaattcagctgggaccgtaggtgctgccaccatgcctggctaattttttaattctttatatagacggggtctcgctatgttgcacaggctggtctcggactcccggcctcaagcaatgctcctgctttggccttccaaagagctggaattactgcgtccaggctataatgaatctcttaatagctaaatctattagcagacggaaataattgatgctaccttattacataaaatagagcatttataggacggtgataaaattaaagcaagcatttcttagtgaaacaaaccattgttcctgattgttcatcagatggaatctcactctgtcacccaggctggagtgcagtggcgcaatctcggctcactgcaacctctgcctcccggatttaagcgattctcctgcttcagcctcccgagt

SEQ ID NO: 15590 - DNA, 480 bp, Homo sapiens
  misc_feature (1)...(480): n = A,T,C or G
nggaggccnccnnncttttnaaaangatttcgnngangnacanngcgcntnaantnnngnnaaggatcctatgtatatcaggtagggattgagtttgactacatttaacatagtggcctaaataaatgtgagtgtccgggttggtcagaaaatgaaaagtacagaggtaagcaacccagggctggcaggacatttcccagatgacattagggacccaggatcttctgttcttctgcccagccattctgagagtatgcttatggtcaaaagacaactccctaggctccagtcgagaaggagtaaaacgttacatgctaagactcccttaaaacgctttcctgtaaagcctgccctttgagttctgcttatatctcaatggggaaactatatcacatggccgtttcatctgtagcaaagccagaaaatatagattttttttttacccaattatgttggtacccaacaacattggatttctgg

SEQ ID NO: 15591 - DNA, 452 bp, Homo sapiens
  misc_feature (1)...(452): n = A,T,C or G
ngttgagtcccccttgaggacccttagaccgtgcggtggaattccactttagcaccatgactaagcataagagtcacttatacctactggtcactgaccagggctttctacaggaggagcaagtcgtatgggagagcctgcacaatgtggatggagacagctgcttttgtgactctgactttcacctgagtcattccctgggcaaggggcctggagcagaaggtgggagtggctccccagaaaagcagctgcaggtagaccaggactacctgattgctctgtccctgcagcagcaacagccacgaggcccgctggggcttaccgacttggagctggcccagcagcttcagcaagaggagtatcaacagcagcaggcagcgcanccagtgcggatgcggacgcgggtcctgtcactgcaggggagaggagccacatctggacgcccagccggg

SEQ ID NO: 15592 - DNA, 450 bp, Homo sapiens
atttgaagacccctagtcgcagtgtcgtggaattcgaggatcgagccattgaaagctcattaccagtaggacataatttttggctctccctattcacaaccagtgcacagtttgacacagaggcctcaggttcacagagcaccatgtcactgtgctatcctacgaaatcatttgtttctaaggtgtgtttattcctggagtgacatgccaccccgaatggctcactttcactgaggatgctgtcctctgatttagctgctgcctccagcctctggcttgagaacttactaaaggcacttacttcctgttaaacccctgttaactctccataaatttggtgagtctctgctaggcctaagattttgagttaacatctcttgaagccaaactccaccttctgtgctttttgcttgggatactggagtttttctttagaaacagtgccacgaa

SEQ ID NO: 15593 - DNA, 480 bp, Homo sapiens
  misc_feature (1)...(480): n = A,T,C or G
aatggagacactgggccgngcggngtgattcgcatttgttaccataaagtagatgttaaataatgctatggctgagtttttgaaaacaacagtaaacagtattagaaaggcaagagagttttcaaactctcaactcttgtcgtatttccttatttgtatattaatttaatctatattttcttaagcaagcctatagaatagcttttaaaaactggctggaggtttgccccggtgttcttttgttccacccacggtgctgttgtctagatgagtctaccttgggagaattacaagtagaaacccctctcggaaaggatctagtgagcccacgtagtgctttggaggatatggcattgtgtggctttgaggaattgcttagagaaaacaagagatgctaaaagaaaaaaggcaaagggccaacggctgtcacctgtcaggtctcaggtgagcggnttgtccggcagagttgtccaggcagag

SEQ ID NO: 15594 - DNA, 456 bp, Homo sapiens
  misc_feature (1)...(456): n = A,T,C or G
agcgggtcaaatgagccatcgctcgagacatcgntngcccaagaaatcngagancagcaaanactgnatttatgccatgcattcttattttaaattgttttaaaatatacataatatagagntggctttggtctgagatggagtttcgctcttggtgcccaggctggagtgcaatggcatgatctcagctcactgcaacctccacctcccgagttcaagcaattctcctgcctcagcctcctgagtagctgggattagaggcacctgccaccacacctggctaatttttgtatttttaatagagatgaggttttgccatgttggccaggctggtcttgaactcctgaccttaggtgatccacctgcctcggtggctcatgactgtaatcccaacatagagttttttatttacattgagtgtacaatttggtgacattgcatgcagccattaccacc

SEQ ID NO: 15595 - DNA, 464 bp, Homo sapiens
  misc_feature (1)...(464): n = A,T,C or G
agagccnctcccnttagaaaactgatgaccactagacagagcggnggaattcgtctgcggttctcgcctgggcagtcttgacgaggagcaaaccccgccttcagagggtagacaaagcaggtggcatgaattgatcagcgagaaaggtgtgagccgaggcagttcctgcgttctgctacaaaaggaatggaaagggaagggaatttccccccaccatgggctgtgggagagttgaccgtattctgggcaagactccatgacccctctgattctgcagtgtacagctgtttgagagcctcatcattttacttttgaaacaggaatgatttctccttaattgcttaaggccggggagcaaagtgtcttaacttctgtctttgactttcccagcgttgagtcatcaacactttgccaattagctcatggtcctggcaacctcagaaacccctgaagttttaaaaact

SEQ ID NO: 15596 - DNA, 456 bp, Homo sapiens
  misc_feature (1)...(456): n = A,T,C or G
ttttnaatagaaagaccactagtatagagcggcggaattcgttctttaccttgtgagattgatgcaaaggttacatgtgagacaacctagaaaatgcaggcacatagcagtgcacagcacatgttagttccactccactctgtatgggacaggccctcttccaggggacactaagccattcactgcctgtgggccagtcggatatcccctttccagagaatgggtgatgtgactgtttgcttcttagcacagttggagtgacacaggagacttgcgcataggatgggtgctctgtgtaccgtcggcatatgtaagcgaggcctcggcacaggtgattcggcaaagggattgatgcaggtgtgggttccctctgcttcgtacatccctagaaagaactcagggaagccggctttactgttggaaaatcactgccccacagcatcggactgtttctcn

SEQ ID NO: 15597 - DNA, 489 bp, Homo sapiens
  misc_feature (1)...(489): n = A,T,C or G
nttttgacgacactgnnccgnngcgttttgagacattagtccgngcggcggaattcatctactcatccattcatccactcatccacccacctatccacccattcacccacctggccaccatttcttccttcctttattttttcctttctttttttccttctctccttccttccacccatccacccacccactcattcacctgtctacctatccacccatccatccatccgtctacccacctgtccctctatccctgtccgtctattcttccatccatctacccactcctgagtacttcctcttccagcctgtggcccatggagatcacatggtagaatatcctctatgccaggggagcagagtccaatacctcgtctttggaagtcaccctcctccaagcccccatttccttgcccccatttcctcaccccatcagaaagggatacccagcccaccctgcccactcctagattgccatgagcacccatn

SEQ ID NO: 15598 - DNA, 490 bp, Homo sapiens
agaaaattcgagaccatagtccgtgtcgtagaccctatgcagagtggtggaattcctcgccgcggcgcggagtcccggctgcgggatagaccgagggccatggccgcctctcccggacccgccggcgttggcggcgccggagcagtctacggctccggctcttcgggcttcgccctcgactcgggactggagatcaaaactcgctcggtggagcagacgctactcccgctggtttctcagatcaccacgcttattaatcataaagataataccaaaaagtctgataaaactctgcaagcaattcagcgtgtaggacaagctgtcaacttggcagttggaagatttgttaaagtaggagaagctatagccaatgaaaactgggatttgaaagaagaaataaatattgcttgtattgaagctaaacaagcaggagaaacaattgcagcacttacagacataaccaacttgaaccatctggaatctgatgggc

SEQ ID NO: 15599 - DNA, 484 bp, Homo sapiens
  misc_feature (1)...(484): n = A,T,C or G
natttgacgaccactagtcagngnggngtgattcgcagaacttagggataccattattaagaataaaatacattcgactaaatgtaagaatgccatggatcgttaagatacatcctgacttcagagatgtgtgaacaaatatacaccaatgagcaagtatccatcaattttaaaatcaatgagctatggtacttataagtctagaggaggtagtctcagggcttgttgagcagctcatcaatgtcatcaagagctcagacccttttcatcctttccctctgctattctcagtgtcaaggattgggacttgttgcttcatagttacaagatggctgtgagagttccaggcataagagaagtactccatttgccgaacaattaaacaaaaaaaaaaaggtaggaggagaagaaggacccctctcttttaatgggagattgctatgactgccttaaactaattatgtctaatcccctagggtaggac

SEQ ID NO: 15600 - DNA, 484 bp, Homo sapiens
tcccaatgagacccctaggccaatggagagccctagtccatgtggtggaattgcaccatacttattttcatcatgatgtatcaggattcgagcagatgtttaaagaaatcaaaggactatgctcaaagcgacacagttaagcagctagagcgcagggttcacacccaggcctgatgctgtgcatgagcacttcaccaccgcactgtattcacactctctgggttctccttctccagttttcaatcaggcagaattagtcacaactcaaaaacatcgtcattccctaaatttattctattcttaaaaaccagcgcgggggtgaaaagatgagacaatagttggggtagctaaaaaaaagtccattacgcacgtatttactactgttttgaagagactgttttggccacacattgcgcgtaacctgaggggtccaggcagggcagcaactcagattctagtgagggacaatgcagcagtcactttt

SEQ ID NO: 15601 - DNA, 448 bp, Homo sapiens
  misc_feature (1)...(448): n = A,T,C or G
atggtcctnaacctgaaaancctgnngngccagcaaagcggnggaanttngatgaacacgactgcgagccgtcggaccctgatcaggagactcgaaccaacatgctgctggagctcgcaaggtcacttgtcaataggatggactttgaagacttggggttggtagtagattgggaccaccacctgcctccaccagctgccaagactgtggttgagaacctccccaggacagtcatcagaggctctcaggctgagctcaagtgccccgtgtgtcttttggaatttgaggaggaggagactgccattgagatgccttgccatcaccttttccattccagctgcattctgccctggctaagcaagacaaattcctgtcccttgtgccgccatgagctgcccactgatgacgacacttatgaggagcacagacgagataaggctcgaaaaca

SEQ ID NO: 15602 - DNA, 500 bp, Homo sapiens
  misc_feature (1)...(500): n = A,T,C or G
gcncgatagagaccctnnnnnctctaggggctacagcanagccncnaannnnnnnnactcacctgcttcttgccttcccatgtctctgctctttcttggatttaaacaatatagcctacaagctgcgctagtcaagccaagtatctgttcagcatgcggggaaggtagaggagctttaaagtggaggaaagtagaattcagtcatgtgaaatcaaaggtgaaatgataaaaagaatatggacagagcacaacccaccagatcaatgaaataatgtctgagaaagcacttcaaagagtgtccagcacaataaaaatagattgtcctggagaagcagtttctggagtaagaaaaatgtgacttttagatggatcttgaagaattaatggaacctggacctatggaattagagacgatgagtaagcaaagaagaaggaagttgagatggcagtaccagcaggagaaagattctgtgcaggaaagggttgggtgtgttcaagga

SEQ ID NO: 15603 - DNA, 411 bp, Homo sapiens
cccgactcgacataagaaaattcatactggagagaaaccatacaaacctaaaagatgtgacagtgcttttgacaacaccccaaacttttctagacataaaagaaatcatatgggtgagaaatcctagaaatgtgaagaatgtgacaaagcctttaagcggttgtcacacttgattgtatataagataattcatactggagaaaactcccagaagtgtgacaaatgtgacaaaacatttaattaattctcataccttattgcacaggaaagcatttatacttgagaaaaattgtataaagaatggaaaagtcattaatatctgctcatatcttaacatcagcgagttggtatttaataaaagcattatcaatgaaattactgtcaaaagatctttcagacaatataagcctg

SEQ ID NO: 15604 - DNA, 475 bp, Homo sapiens
  misc_feature (1)...(475): n = A,T,C or G
gtggcntnnnttttgttgacgtccatagtccangcggnggaattcgatctcttgaccttgtgatccacctgcctcggcctcccaaagtgctgggattacaggcatgagccaccgcacccagcctgtttttgttgtattctgtgttgtttcaaaaattggaataaatctccctgtaaataactcatgaaaaagacaatatatatattttaaatatatattttaataaaggttttataaatagatgatttatattcctcttggaactcaaaagatgtggtaagttttgcaaatcagggtaagctccccctgcgttctgtaatgttaatgggtggtggtatagtacagaaaatgtaactttcattgaaaaatcttttttagaaaagggtagagtgtgtgtttccctttcctttcttgagctcattcttcctgctttcaaggccattgtggtcttaagaaataatcaggtcctgaaacg

SEQ ID NO: 15605 - DNA, 482 bp, Homo sapiens
  misc_feature (1)...(482): n = A,T,C or G
tttcgaagtccctagtccagngttgtggaactcgaaacggngtaactaaacagtaagctcaagatgataaaaaataaaggtaatatttatcttttgttcaccctccctttcttcccatgacccaccagatctatagttttacaaagaagccacagaatattccaattctagagatagagcatcattctcataatttatgtcagcttgtacaggctgaccttgctctaactagttgatgtatgttcgcttcaagcataattgctgtttctttaatcataactctcaagaaatggtgtcataggctgatttacagataacttctcagaactcttgataattattcataagacttaagaactttcaggatcattgaaattgttcattggctcaatttgtgtgtgtgggcaaaactccacagcttgacaaggcaccaaaaggtaattttgagatagatagataacccccaccccatcccaccccac

SEQ ID NO: 15606 - DNA, 490 bp, Homo sapiens
  misc_feature (1)...(490): n = A,T,C or G
aaaaaaattcgaagacccctagtccagtgtggaggaactccatggagaggggtgagcggagggagacctgtgtccgtgccgtccggctccctgggtgggaacaggcaagggatcagatgcccctgacaccacgcctctggccacaccagatgcctctgcagtcctcgacagcctcttcagtgtccctcctgcggtgatgtccttactgtccccagccagggccggggaccggtgtttcactgaggacctgcattagaaacattttttaaattgttgtacaggaagagatgtgtctaaaacagcatcttaaagctgagtgtatttctttgcacaaggggtcatgctgatgaattcttctttcattctgatctttgttcagccaacaggagcgtccttttctaatgtcttccattcctaccccccacccaaaaacaaaagaaatatttgtagcttgctatctgtatttgaatttttagcaatgttatatttn

SEQ ID NO: 15607 - DNA, 480 bp, Homo sapiens
  misc_feature (1)...(480): n = A,T,C or G
catgagacctctttgaaggcgtggaaancgnctcgagtgtctgtagtcctcttgttcctccaagttcatgttttacttttcccacttacagcgtcctgtttccatttgaagtgggcaaagtgagagcttcccactgtgatcctggtgccattttcctggttctggatcaagtgggaccagactacttactaggttttcttttcactaaaatgcgtgagaaactagctcaaaaacattgagataagcaaagttatcctcctaggtggtgcttttgaggatgtgatggtgttgactacatcagctcttactgtaaagttgagcaacaggatcgatatttaatagagatccttttacctaaagtagtggcagcaatgtcaaaggtgccactcagcattgcctactgggtgtgtttattacaggcacttcattttcttcttgtaaaggaattcatattcattgcagaaattgtggaatgtatga

SEQ ID NO: 15608 - DNA, 474 bp, Homo sapiens
  misc_feature (1)...(474): n = A,T,C or G
actgggatnnnattgatagcatacgtcagngcggngcaattcgnctgatcagcaccttcctggaggacggcatccgtatgtggttccagtggagcgagcagtgcgactacatcgacaccacctggaactgcggctacctgctggcctcgtccttcgtcttcctcaacttgctgggacagctgactggctgcgtcctggtgttgagcaggaacttcgtgcagtacgcctgcttcgggctctttggaatcatagctctgcagacgattgcctacagcattttatgggacttgaagtttttgatgaggaacctggccctgggaggaggcctgttgctgctcctagcagaatcccgttctgaagggaagagcatgtttgcgggcgtccccaccatgcgtgagagctcccccaaacagtacatgcagctcggaggcagggtcttgctggttctgatgttcatgaccctccttcactttg

SEQ ID NO: 15609 - DNA, 442 bp, Homo sapiens
  misc_feature (1)...(442): n = A,T,C or G
gcgctttttatacagattggaattcggatttgagaataaattttaaaaaatttctttttcacttatctgaaggagtcctagcagacctctcagagagggggataaaatttaaaagttttgtcataataaaattatgctgattgtttgcactctgtcttgatttttcagaaaagattttttttgagagtaagaaatgccagtaggtcgtggggtgataaaggtaggcgagaagatttttctactggagtgttcagaaggttgggaggcaagactataagtttctatgatattttccccaggattccattttttaatatcttttttaataggtccaaattaactgtgctacagatgacacacaacaagcttcttcaagaacataataatgcattgaaaacaattgaggaactaacaagaaaagagtcagaaaaagtggacaggn

SEQ ID NO: 15610 - DNA, 490 bp, Homo sapiens
  misc_feature (1)...(490): n = A,T,C or G
catcgaccnccntaatgggagaccattaggccagngcggnggaattcgggttcatcatcaagagctactctgaggacgacatccaccgctccattaagtactccatctggtgtagcacagagcacggcaacaagcgcctggacagcgccttccgctgcatgagcagcaaggggcccgtctacctgctcttcagcgtcaatgggagtgggcatttttgtggggtggccgagatgaagtcccccgtggactacggcaccagtgccggggtctggtctcaggacaagtggaaggggaagtttgatgtccagtggatttttgttaaggatgtacccaataaccagctccggcacatcaggctggagaataacgacaacaaaccggtcacaaactcccgggacacccaggaggtgcccttagaaaaagccaagcaagtgctgaaaattatcagttcctacaagcacacaacctccatcttcgacgactttgctcg

SEQ ID NO: 15611 - DNA, 501 bp, Homo sapiens
  misc_feature (1)...(501): n = A,T,C or G
cgccggaatcgagacccctagtccagaactggntaatcctcgcgacgggcccaccactgccgcctgctgggccgctgcgtgggcttcggcaactaccggcccttcctgtgcctgctgcttcatgccgccggcgtcctgctccacgtctctgtgctgctgggccctgcactgtcggccctgctgcgagcccacacgcccctccacatggctgccctcctcctgcttccctggctcatgttgctcacagccttaaagcccactctcatcttgcaagcctctgaagccaccagttttctgagatgttcctcccggccccggagaccacggatgtggctaccttctcagaatatagatgtttccattgcggcaggccgcggcaagccggaactcaacatcaaactggccagaaacctctaggaagacggggacgctgggaaggctcatctgcaaacaagaagcgcanacactccaatttctctggagcccccgtccctccctgcc

SEQ ID NO: 15612 - DNA, 470 bp, Homo sapiens
  misc_feature (1)...(470): n = A,T,C or G
ngaggccgcctcttttnnggaacttttagancgtcgngcaattnntgagctattctaactactttaattgcaggttattttttgaagactgtttccattaagactgaggctgagctcctctttcctcagagcatgtatattctgttttcaaaagctttttctcagcctggtgcagtggctcacgcctgtaatcccagcactttgggaggccgaggcgggcggatcacctgaggtcgggagttcaagaccagcctgactaacatggagaaatgccgtctctgctaaaaatacaaaattagccgggtgtggtgatgcatgcctgtaatcccagctactcaggaggctgaggcaggagaatcacttgaacctgggaggtggaggttgcagcgagccgagatcacaccattgcactccagcctgggcaacaagagcgaaactccgtctcaaaaaaaaaggacttttctttgtat

SEQ ID NO: 15613 - DNA, 455 bp, Homo sapiens
  misc_feature (1)...(455): n = A,T,C or G
nattgaagtccactagcccagngcggnggaattcaatgagatgaaccaggtatctcagttggaaatgcagaaatcacccatcttctgcatcgatcatgctgggagctgcagaccggagctgttcctattcggccatcttggaacggaatctacccctcagcttcttaagtgactggagaaattcaagccagctgcagaaatttgcttgagtagcaaggagcccaatgttaatcctcaagaccatagggaaaatgtctccaggccatgtcagagaccttcatggcagcccctcccaccataggcccagaggcccaggaggaaaaagtggtttcatgggccaggtccagggtccttgtgctgtgtgcagccttaggacttggtgccctgtgtcccagccattccagccgtggctgaaggggccaatgtagagctcaagccatggcttcagagggtgg

SEQ ID NO: 15614 - DNA, 474 bp, Homo sapiens
  misc_feature (1)...(474): n = A,T,C or G
ctggcggcccttngattgtacgaccactatccatgtggtggaattccagaaagcagtcaacactgcccagggattgtttcagagatggacagagctcctccaggacccctccacagcaacaagggaagaaatcgactggaccaccaacgagctgagaaataacctccggagcatagagtgggatctagaggaccttgatgaaaccatcagcatagttgaagcaaatcctagaaaatttaaccttgatgcaactgaattgagtataagaaaagccttcattacaagtactcggcaagttgtcagggacatgaaagatcagatgtcaacttcatctgtgcaggcattagctgaaagaaaaaatagacaggcactgctgggagacagtggcagccagaactggagcactggaacaacagataaatatgggcgtctggaccgagagctccagagagccagttctcatttcattgacga

SEQ ID NO: 15615 - DNA, 556 bp, Homo sapiens
  misc_feature (1)...(556): n = A,T,C or G
natctgattccagtncgcgtgggcaattattctccaggatcatttaattcatagacccctgccaagagagtgcttggtggtgtggtggtagtagtgatatttacacctgtttgctgggagaagagccaaggtagtcagctgattttacagaaaggttctggaaagtcactgggtggtcacaagacatcaccttgggctgctgatacagtgggaattccatcttagaggtcatgctgccaccgtggcaggacacatggcatatggcacatgctttcctttagctcgtagactgttctatatcttatgggtatgtggtaactactgcccaaaggtagactgcagaccttttataatgagctagacataccagtgtccagaaaagcattttgaactatatggaagntttttggnttttggtttggtttggtttggtttggtttggtttggtttagaggactatgttagtttttaagctcctggaaggcaaaacaatctcctttaataataatagtgatgataataatagcaacaaccattataataatgactaacattn

SEQ ID NO: 15616 - DNA, 490 bp, Homo sapiens
  misc_feature (1)...(490): n = A,T,C or G
ccgcgcctttgggctttgatgacattagtccagngcggtggaattcgaaaacacttgatattttatccctgttgcatctggctgcacagagcctctcctcaaagatgctacaaaacttgaatataacacattttggaaggctgactaacctcgattctgtgttgtgatgtgcaatactgtttctaatgtttgtataaaaaaaaacagtgtaaacctttttaatgcaaatttatttttttcattgcatattttgcagattttatccacagtgtcattttttactgtcagaaaagataccccttttgtcattgcaactattttttaaatccagaaatctttgtactgatgtaaatgattgtagttattttggatagtgttttgctaacaaaaggagagacttttttcatgcatatttctattttgtttttttgggttttattttattttaatagtagtaaaatacttggaataatttttcatattcttgtcn

SEQ ID NO: 15617 - DNA, 407 bp, Homo sapiens
  misc_feature (1)...(407): n = A,T,C or G
gtggactggtttggaagactgaatgaagtcatttgttaggcataatggaaaaaataagagtaaaagaagaatagaatgggacagatatcaactgatggtataaagttcttatgcttgcaacagttcttcctgacaattcgacagtatctatggttggctcatgctgacgtggtgcagtattggttctcatgtcaagaaggcttggagttcatcacagacattccttagcatttggccaatgtgtaaacaaggccaggaagaagtaagagttggggcctgttactttgggtacatcagaccagcaccttaaaaccacagcaaatgagatgtgggactattagctgcaggcatagtcctctggatataaatgcttgaaaagtgggactgacaaaaaaaggctcattntt

SEQ ID NO: 15618 - DNA, 479 bp, Homo sapiens
  misc_feature (1)...(479): n = A,T,C or G
nggaggcggnnnnnnnnnaaactgagacctgagtaacngtcgnggaattcgccgacgcttgtgctgcagccatgtctctagtgatccctgaaaagctccaacatattttgcgagtactcaacaccaacatcgatgggcggcggaaaatagcctttgccatcactgccattaagggcgtgggccgaagatatgctcatgtggtgttgaggaaagcatacattgacctcaccaagagggcgggagaactcactgaagatgaggtggaacgtgtgatcaccattatgcacaatgcacgccagtacaagatcccagactggttcttgaacagacagaaggatgtataggatggaaaatacagccaggtcctagccaatgggctggacaacaagctccgtgaagacctggagcgactgaagaagattcggacccatagagggctgcgtcacttctggggccttcgtgtacgaggccagcacacc

SEQ ID NO: 15619 - DNA, 468 bp, Homo sapiens
ggatgtgaaatttgaaaccccttttgtagaccctagtcagtgcggtggaattcgccttgagaatgacctggaggaacttgctttgtaccagatccagctgctgaaggacctcagacatacagagaatgaagaggacaaagtcagctcctccagcttccgccagcgaatgttggggaacctgcttcggcctccatatgaaaggccagagctccccacatgtctctatgtaattgggctgactggcatcagtggctctgggaagagctcaatagctcagcgactgaagggcctgggggcgtttgtcattgacagtgaccacctgggtcatcgggcctatgccccaggtggccctgcctaccagcctgtggtggaggcctttggaacagatattctccataaagatggcatcatcaacaggaaggtcctaggcagccgggtgtttgggaataagaagcagctgaagatact

SEQ ID NO: 15620 - DNA, 476 bp, Homo sapiens
  misc_feature (1)...(476): n = A,T,C or G
nggggagggcgncccgnggnggctcgcaatcgagaccatagttagagcggcggaattcgccgctttcaaatcgccaatcaaattcttccttggcttcgagtctctcagccggccgcgctctccgatgcccagccctcctggaaccacctcgcctgtgacgtaggtggagcgcgcactgcctccgggcccgtctttctcaattgggaccggaaaacgttgtcgctcatcctatgacgcgaaagtaaccgagactatcaggatccggagacggaaatgtccgaaggccgcagtacttgaccctgtattttgggagtcgaacggagaatggaaactgaaagtggaaatcaggaaaaggtaatggaagaagaaagcactgaaaagaaaaaagaagttgaaaaaaagaaacggtcacgagttaaacaagtgcttgcagatattgctaagcaagtggacttctggtttggggatgcaaatct

SEQ ID NO: 15621 - DNA, 452 bp, Homo sapiens
  misc_feature (1)...(452): n = A,T,C or G
nattgaagtacactaccacangcggnggaattcctgaagagcaggggtaggtgtggctttgcctggggctgtggcagagaggagagacatgcagttatcaaaagagtcagctgcactgtccttttagctttgccctgtggacactggaactcagctatttggagtttccaacatctctcacatcaggtccaaggagaacctttcccttagtttcctcagctgcagaatgggctgctgacttctcagggactttgagggaataactttcatttcattcacccagcagtgccctcatgtttactgttttcaatgagtaacagttgtctccattagtttgtgtttgttgttttgtaattctgccttttttttttcctctctttctatccctactccaaacaggaaccctgttggcttgaatggctttcttagaaacacttggaggagtcactgca

SEQ ID NO: 15622 - DNA, 483 bp, Homo sapiens
  misc_feature (1)...(483): n = A,T,C or G
cattgagaccactangaagngccgtggaanncaggacacagtgcccatcacctggcctagcccccttccatggcgtctagggaatgactcatcgataaaacattgcctttcttcttcctcttcaaattagaagggccaaggtgattattgggtggttcctgtgatggtctcttggtagatcttcagggcaaagaggtggcagaaagctgtgtttgcagcccctaccattctgtcctcttggtcaaccaacccatcatcctagagtgggacccagcacaagttctgtacatggcgtgcctgggttccaattccaatctgttgcttacagcctcagttaagactatgtaaaatggggtgataattcctccccctcagagtcatggtgaggtctcactccaaatcagcacccaaggccatatctcaccctcatggggtgcagcaagcacttcataaatgaaagcacccagaaagagtggtccctgn

SEQ ID NO: 15623 - DNA, 483 bp, Homo sapiens
  misc_feature (1)...(483): n = A,T,C or G
aggcnaggacgggccgngnaggctcgccatagangcccctnngnatagatgactcttagtccatgcggtggaattcgtcattttttatatatgtaggcacaaacaataagtatgttctcttctgtttgggaaaataatttggaataaaatagaaattagataatgaaaccaaaaaccttctcaaatttaggccttatttaactcatgactggtttctatgcacaagaaaatactaaacccaaatatatggtaggactgttattctcttctgcatcttatccctattttgtttctgcctttatttgtaaaaattgtcttaattgatggtacatttgccaagacaaaggttcagaattactaattttagatattatgatattctgaaataactatttttatcctgtagttctatgattatatgatttgtaaataagaagcctaaccaatttaaaattcctgactttagtctcatatatcttgtca

SEQ ID NO: 15624 - DNA, 467 bp, Homo sapiens
  misc_feature (1)...(467): n = A,T,C or G
catcgagaccctaatcgtgactgtaaancgngcgccactacgcctggctaaatttttgtattttttgtagagacggggttttgccatgttgtccaagactgatctcacactcttcagatcatgctatctgactgccttgctctaataaaagccttctctcactagacatgtgaattaccttgctatgatgcacaaaaattctggtcacttacattgtttaagtagccagttcaagaagactcggggacaacttgagtaatgtgcgaatcgtgtgggcaatcacatattcctgatatccaaaataccagccttttcattttctttttctgaatggttctgcttgaaattacccatggtttaaaatatgcacggcacatggcattgaacgtgggaagtgttgttaagttatgaatgggatggttagaaaacggcgtttctggttgtgtaagagtctctcatctggatcg

SEQ ID NO: 15625 - DNA, 489 bp, Homo sapiens
  misc_feature (1)...(489): n = A,T,C or G
acgcgatcgagccnatcgagaccctaggcagngncgnggaattccttccgtgttttggcttctgggcatcataccacatcagctcaagccttacaccacccacctcatcaaggacctccactttttccttcgagtgctcatccaactgtaccaccgtatccctcacaagctacacatcataccactttgggaccgggaccccagcaccagccttctggaacagggccacattgtccattacctgtcacaggtcctcatctccagccccaaggaccaaacagtattccaacacctactgcttcagggttctgtcctcatcctggctctgtggccctgccacatggggttcaaggacctcagcaggcatctccagtgcctggacagattccaattcacagagcacaggtgccaccaacatttcaaaacaattaccatgggtcagggtggcattaaaatggactccaaaaacaattttttaaatgttctgta

SEQ ID NO: 15626 - DNA, 466 bp, Homo sapiens
  misc_feature (1)...(466): n = A,T,C or G
agcgcggcgnctcccatagatagcgtcncntgngncgnggcantcatcaaaaggggaagggaaatctctatataagaattctaactaataaatgaaactgacataaatagaaaatttccatgtaaaaccaacatggtaatattcaattcggtaaagaatcatcactaggtactcaaaccataatgtgaaagaatgttagggaataggaatattcacacaatcgcttaaggatcacacaatgaattatttattaattacaaggaaaaattgtgcctttgtaaaggataaaggttttctgtgaaaaccaccttgcttaagtgataaaacagtataactgaagagggaacaaactgacttcagaatataccccctgatgtgatgcacagaggaagacacaactttgtccttgcaattctcctgcctaacgtgtctaatctgaatataatcacaaagaaagagtcagaaa

SEQ ID NO: 15627 - DNA, 470 bp, Homo sapiens
  misc_feature (1)...(470): n = A,T,C or G
agggcgcgcgngnngnnaatggatagcctccctaggccgngncgnggaattcgaaatatattaaattaggataatattatgtgggagaagtagaatgaaggacttttcattaatttttgtaaatggatgatgatgggtatgaaattgctgtggtttttagctttctttggatgcatttaaaagagatggaattattttaaaatatcagctttacagttgcagcaaaagcaagaattgacaaatggatctaattaaactaaaagattctgcacagcaaaagaaactatcaacagagtaaacagacaacctacagaataagagaaaatatttacaaattatgcatccaacaaaggtctaatccagaatgtatagggaacttaaacaactcaacaagcaaaaaatatccccattaagtgggcaaaagtcatgaacatttcttaaaagaagaaattttttttttaagtggccaa

SEQ ID NO: 15628 - DNA, 503 bp, Homo sapiens
  misc_feature (1)...(503): n = A,T,C or G
aggggcatcgaaacccctcgcanatagcagantcctacgccagngncgnggaannccaaaaaaagaaaacaaaagaatcaccgtccttcacttttgtccaatgtctgcatagagttaccttttatctttttctattttaaagtttgttggaggagggcaaatttgatacccattaatccatcgtgggcatcacccatgagagtttttttaatgatttttctaatttttattgttggataggattccacagtttgttgtccatttacttaccacatggatgcatgtgtctttaatttcttccaatggttacttacatctatgtaactacaatgcagaaaacaggaatttggcaaggatacaatgcatgtgtatagttctatttcatcatatgtgtgaatttgtgtaactactgcaatcaacatagaactgtttcatcatcactaatttgttcttcatctctgtaatattgtcacttatatattgttgtagcaatggaataatat

SEQ ID NO: 15629 - DNA, 459 bp, Homo sapiens
  misc_feature (1)...(459): n = A,T,C or G
cctgatcaccnacatgagagcgtcggacangcggcggaattcgcggccatcgccgaaacggcagcgggcaaaatgaaggttaatccctttgtgacttccgaccgaagcaagaatcgcaaaaggcatttcaatgcaccttcccacattggaaggaagattatgtcttcccctctttccaaagagctgagacagaagtacaacgtgcgatccatgcccatccgaaaggatgatgaaggtcaggttgtacgtggacactataaaggtcagcaaattggcaaagtaatccaggtttacaggaagaaatatgttatctacattgaacgggtgcagcgggaaaaggctaatggcacaactgtccacgtaggcattcaccccagcaaggtggttatcactaggctaaaactggacaaagaccgcagaaagatcctcgaacggaaagccaaatctcgccaagtagga

SEQ ID NO: 15630 - DNA, 471 bp, Homo sapiens
  misc_feature (1)...(471): n = A,T,C or G
ggtggganagggaggnnnnncctgtagtacattaccattngcggnggaattcgatttgggtaaagcttggatgaagaaaaggattctgctgccctgcagaagtttggaaacccctgcttatgcgcctgctgtgctgcagtgggagcgctggatagcatagctgtcagtgtggcgggcgttcgtttaggcagaaattcattaagcagtgtttggttggcacctactaagtgctgggcctggcttacagcactgtgaatgcacagggcgggtgaggcgagggctctgtcctagaggaactcccagactcaagcttttagctgagtaagctggacccagaaggctccaggaggaagcagaggaggcggcgaggccagtggggtgctggtgttgggcacagcgccgtgaaggacccaacccgggactcgggctctccttgagctcagcaggaagcctcacggcggagcaaggagg

SEQ ID NO: 15631 - DNA, 449 bp, Homo sapiens
  misc_feature (1)...(449): n = A,T,C or G
ntggtnctccaccaggaccccttagcgaggcnagcananccggnggaantcgtaattgctcagnaggggcagcagtaaggacaatgtacccaatcactctctgtattgctgtttccaactgttgttttgaccctataggttactactttacatcggacacaattcagaattcaataaaaatgaaaaactggtctgtcaggagaagtgacttcagattctctgaagttcatggtgcagagaattttattcagcataacctacagaccttaaaaagtaagatatttgacaatgaatctgctgcctgaaataaaaccattaggactcactgggacagaactttcaagttccttcaactgtgaaaagtgtctttttggacaaactatttttccacctccaaaagaaattaacacatggacattttaaagtctttagtataaagaaaatttgag

SEQ ID NO: 15632 - DNA, 490 bp, Homo sapiens
  misc_feature (1)...(490): n = A,T,C or G
gttgagaccctatccangtggaggaacacttgaccctcggctgctgcagggatctgcagcgactgcagccatggaggcccacctggtccggcgctacctgggcgatgcctcggtggagcccgaccccctgcagatgccaaccttcccgccagactacggcttccccgaacgcaaggagcgcgagatggtggccacacagcaggagatgatggacgcgcagctgaggctccagctgcgggactactgcgcccaccacctcatccggctgctcaagtgcaagcgtgacagcttccccaacttcctggcctgcaagcaggagcggcacgactgggactactgcgagcaccgcgactatgtgatgcgcatgaaggagtttgagcgggagcggaggctgctccagcggaagaagcggcgggagaagaaggcggcagagttggcctaaggccagggacccggggaagtggaccccaaggtggccctgtagggggtg

SEQ ID NO: 15633 - DNA, 458 bp, Homo sapiens
  misc_feature (1)...(458): n = A,T,C or G
agggtnnnatcgancccattgatcaccattaggccagtccggaggaattcgcagggcttttccctctatgtcacctatacgtgatatttatttattttattattatttttttgagacggagtctcacgctgctgcccaggctggagtgcagtggcatgatctgggcttactgcgacctccgcctcccgggttcaagcaattttctgtctcagcctcctgagtagctgggattacaagcgcacgccaccacgcccggctaatttttgtatttttagttagagatggggtttcaccatgttggtcaggctggtctcgaacttctgaccttgtgttctgcccgcctcagcctcccaaagtgctcagattacaggcgtgaaccagtatgcccggcgttcaatgagcatttttaaagttttatgactcatgaaacatagtccacagatatatgctcattgtga

SEQ ID NO: 15634 - DNA, 456 bp, Homo sapiens
  misc_feature (1)...(456): n = A,T,C or G
catcgacgcccntnattgaagacccctagntccgngtggtggaattcgcaaagtgaggttcaagctctgggtctgggtcttttctccaaagcagtgaaaatagcttggactttgctgttacagaattatttaaatctggaatctgcctcttggtaagccctgtgcctggaaacaagtgacaagtgatctgatctctccagacgcaatattcatcaatgctgctatccattccctgagtttttttttttttttttttgaaacaaagtttctttttgtcccccaggttggagggccttggcacaatttaaattaattgaaacttttgcctcccaagttaaggcgattttcttgttgcctaagtttccaaaaaagtggggataacggggcccccccaccaccccgggttagtaatttggggttttaaaaaaaaagggggttcccccatgttgcccaggt

SEQ ID NO: 15635 - DNA, 486 bp, Homo sapiens
  misc_feature (1)...(486): n = A,T,C or G
atgtgctcacactgatagctgacgccccgncgnggaantccgctgcggtactctgctccggattcgtgtgcgcgggctgcgccgagcgctgggcaggtggcttcgttttgccctggttgcaagcagcggctgggagcagccggtccctggggaatatgcggcgcgcgtggatcctgctcaccttgggcttggtggcctgcgtgtcggcggagtcgagagcagagctgacatctgataaagacatgtaccttgacaacagctccattgaagaagcttcaggagtgtatcctattgatgacgatgactatgcttctgcgtctggctcgggagctgatgaggatgtagagagtccagagctgacaacatctcgaccacttccaaagatactgttgactagtgctgctccaaaagtggaaaccacgacgctgaatatacagaacaagatacctgctcagacaaagtcacctgaagaaactgataaagaga

SEQ ID NO: 15636 - DNA, 463 bp, Homo sapiens
  misc_feature (1)...(463): n = A,T,C or G
caacactgagaccctcggaagactgangtccntccgatttaacaaatgttagctattcctgttgaagcataaccttggagaaaggttactttacatgggggtgaggagtggggaagtgagagctgagctcattcttgatggatgaggagttagtcatgtgaggcgcttaggttaaaactacattcactataactcagtaaagcagtcccgcccactctccgacccatgcagaaataggcctagagagtcacatgtctcagttcagaaatctatcgaagtggcagagctggaattcaaacacaagcagccgttctctgctattccaccctggtgtccaagcaacatggtagggcagaaggaagaggatcttacaaagagtaagggaaagggagaggggcagaggctgcttctcagagccaccaaaggacaaaataagacaggtgtgagcccagtggaggaggct

SEQ ID NO: 15637 - DNA, 463 bp, Homo sapiens
  misc_feature (1)...(463): n = A,T,C or G
cgccccccccntnnnatagatagcgtgcntannggcnggcantctatctctatgacgtcgaggtcaagtgctgggagcagctgctagaggataaacatttccagtcctactgcctgctggaggcagctcctggtcccgagggcttcggattgtgtgctatggccaatggggaaggtcgtgtcaaggttgtccccatcaacactccaactgctgctgtggaccacaccctgtttcctgggaaggtgcacagcttgagctgggccctgcgtggttatgaggagctcctgttgctggcatcgggccctggcggagtagtagcttgcctagagatctcagccgcaccctctggcaaggccatctttgtcaaggaacgttgtcggtacctgctgcccccaagcaagcagagatggcacacatgcagtgccttcctacccccaggtgacttcctggtgtgtggtgaccg

SEQ ID NO: 15638 - DNA, 460 bp, Homo sapiens
  misc_feature (1)...(460): n = A,T,C or G
natcgtagatccactagtcttggtgcggcggactatcccatgcggtgcaattcgtgagatgagatcgcactactgctctccagactgggcgacagatcaggaccaccatctccttagattatatatacataaataattaatattatagaagagaacatacacaaatcatagatgctatggataatataaaaagagtacctgagatgtatttttttaaactcttagagatatctgtaactcaaatttttcttaggagaggaggattattaactggcacatatgtactaaaaacccctcacttaaaaatggcagactcaatcctactggcattctttttattttaaaataaataaataagcctatctttttgtgcttacatacttagaaggatatcattaagtatataaacaatcgttacttctgtggttttaatgaatgcaggaaaataatatttttatgg

SEQ ID NO: 15639 - DNA, 493 bp, Homo sapiens
  misc_feature (1)...(493): n = A,T,C or G
agtgnnnnaaattgaganactgatgaccctacgccagagccgaggaattcgcacttggagccaagggttcagagactcagggccccagcactaaagcagtggaccccaggagtccctggtaataagtactgtgtacagaattctgctacctcactggggtcctggggcctcggagcctcatccgaggcagggtcaggagaggggcagaacagccgctcctgtctgccagccagcagccagctctcagccaacgagtaatttattgtttttcctcgtatttaaatattaaatatgttagcaaagagttaatatatagaagggtaccttgaacactgggggaggggacattgaacaagttgtttcattgactatcaaactgaagccagaaataaagttggtgacagatnnnnnnnnnnnnnnnnnnnnnnnnnnnnnnnnnnnnnnnnnnnnnnnnnnnnnnnnnnnnnnnnnnnnnnnnnnnnntnnnnncgcg

SEQ ID NO: 15640 - DNA, 455 bp, Homo sapiens
  misc_feature (1)...(455): n = A,T,C or G
cgggcnnnatcgagaccattgtagacattagtcagtgcggtggaattccatattcatagctacagaatgatcttatcttttgccctagtaattaggtttctttccttatcaagtgtaacactaattaaatgtgttatgagctgctttccctttcttatatcttgttttgtaaataatggttttgtttaaatgtgttatttagttatttaacctattttgtgtggtttgacagtttttagcatatataaattaatgtcccggctgtaagtgggatcaaactatctagatctgtgaactgttacgttctaattctagtgctttatacattgcaacattaaaaaatcagatattcattttttctttttcccatgttttactgattctatttttcttcaagtttcttccttcttttcctattacatcaatcatctgctcttttaacacagcaaattgcn

SEQ ID NO: 15641 - DNA, 449 bp, Homo sapiens
  misc_feature (1)...(449): n = A,T,C or G
aggggggatcgagacatagtagacgttangaagtccgtggtctgtggctgatttactaacagtaactgccattttttgtctgtgataacagagtgatttgtaaaacagtggttgttttttcattgtgttttcttcgtggattgttttttctgcgggtcatattcataccttctgatgaagttgtacaacaccagcaacattataatggccctgtagctctgaatgctatttgtgtaactgaaaggttgcactctagggtgaaccaagctataaaagcccatgcttaaataaaaattatgtccaaaagccattgaagatcattggtcttcattcatttttaattaaattttatgtaagatttgcaaggctggtcagtttggaagttatgatgtcaaatatttgcaccagtttttggtttcatcattgataatagcaattagaagccacat

SEQ ID NO: 15642 - DNA, 456 bp, Homo sapiens
  misc_feature (1)...(456): n = A,T,C or G
tgggccnnatcgagaccatcgtagacattagtccatgcggtggaattcgcaagatgacgttctcatagttgattcggatgaagaagattcttcaaataatgccgacgtcagtgaagaagagagaagccgcaagaggaaattagatgagaaagagaatctcagtgcaaagaggtcacgtatagaacagaaggaagagcttgatgatgtcatagcattagattgaacagaaatgcctctaaacagaaccctcttactatttagtttatctgggcagaaccagattgttatgtcctttgttccaaagggaaaaattgacagcagtgacttgaaaatgattctgctccctttgaaagcattcattttgctagaactgttagacacattgcagtatgctgtattgaaagtaggaatatagttttaaaaaccctttgaacaaagtgtgtgcataaccagtca

SEQ ID NO: 15643 - DNA, 472 bp, Homo sapiens
  misc_feature (1)...(472): n = A,T,C or G
tgcgtgccnnncctgatgcctaccgtgaacatagaacangcggnggaantcgcctcgcctctattccagaatcaatgctgcagaatgtgttagctgcagataggcatggtctcaggtatgaacagacactttgaaacgactgtaggtctttcttttctccagtgttttaaacatgttgattatccaaagaattgaaactcctagcacatccagtttttacaacagatttgcagctcattccttaccctggttaggtcactacttttgcagattttgctggcactgatctggagatctgcagatctggaggagacgggaaggagtcgattcttaaataaggatcagtgaggcatcctgtcccaagctactgtttggtggggatctgggttcatctcacccacagagggaggatctttatgaggagaaaaaagccaagagggaaagccagagttccctgttctaggggactacg

SEQ ID NO: 15644 - DNA, 455 bp, Homo sapiens
  misc_feature (1)...(455): n = A,T,C or G
cgggcnggattggagaccatagtagagcgctgnggaantcacccaagatgtccagcaagcgggccaaagccaagaccaccaagaagcggccacagcgggccacattcaatgtcttcgcaatgtttgaccagtcccagatccaggagtttaaggaggctttcaacatgattgaccagaaccgtgatggcttcattgacaaggaggacctgcacgacatgctggcctcgctggggaagaaccccacagacgaatacctggagggcatgatgagcgaggccccggggcccatcaacttcaccatgttcctcaccatgtttggggagaagctgaacggcacggaccccgaggatgtgattcgcaacgcctttgcctgcttcgacgaggaagcctcaggtttcatccatgaggaccacctccgggagctgctcaccaccatgggtgaccgcttcacagat

SEQ ID NO: 15645 - DNA, 576 bp, Homo sapiens
  misc_feature (1)...(576): n = A,T,C or G
gtcccgtcactcattagnctactcgcatgtagtgccttgtagtcttgtcgtctcactcnnataagtgatattctggatgtcgtgccacaccccgcncaccgcgngnnnnnnnnttttgtattacatcagcatgngcaggnaaccgngcaactaagnagnacgctagcctgggaaaggattttcatcttgtcatttaagtttcagtttttgtgtaccacactagaacacccacaaatgagattctgttacagagtatcttttttctactacagaacatactgtagacagttattcagtggttaacttgtggaaataatcagaagatgcttttcacttttatgactggatatattttaatatttatcatattaagagaaacttaggttacttacagctcataaacgttgctatgaacatcattcatttattcacttatttatttttatggcgctcctagaaagaatttcctggactaaaggatttatgctttaaaaatattggtagttactgccaagaattgccatccagaaacagggtagccattcataaactcaacaacaaggtatgagagtgcct

SEQ ID NO: 15646 - DNA, 468 bp, Homo sapiens
  misc_feature (1)...(468): n = A,T,C or G
tttttttagcnccnnnntttgactgcagaccttagtccatgcggtggaattctggctccagactctgaagaataccttgttggtgccaacacagactagaatctagactttttgtctagagcccaagattcttttattcttttccaaacactatactttgtaatcatgttttaaaactttacagagatatggatggttttcaacaacaaattcctaaatttcagtcaataaatgaagtgctggtggcgtgtggtggctcatagcgctttgggacaccgaggcaggaggatcactggagtccaggagttcaagaccagcctgggcaacatagtgagacctgtctctacaaaaataaaaattagccaggcgtgatggcccgtgcctgtaatctcagctactcaggaagctgaagtgggagaatcacttgagcccaggcatttgaggctgcagtgagccatgatcctgcca

SEQ ID NO: 15647 - DNA, 472 bp, Homo sapiens
  misc_feature (1)...(472): n = A,T,C or G
tgcgtttnnnanaactgatgaccacttgatagcgtgtggaannccntaattntgattcagagaaaaaatacaacccagtatctaaaaagtgttaactagtccaagatagtaatgcatatgccaaagaaatattacgcctaatctcatgtttagaatttaaaatagaattggtcagctacttattcttaccaccctacttccagtattttagctctgtcattattaaattcagatcttcctgattattttttctgttgaaagttaaactactgctttcaagtaatttaaagttatcctaccttttattcatgggtagttttgcaaaattaacatggtagccattgtttgaatttaatcgggcatcataacttttcatttattgaggaactaatcattattactataaagcatacaaattagccagtcagcacactttggtcttctttacctaagggttaaacatcagaacatc

SEQ ID NO: 15648 - DNA, 516 bp, Homo sapiens
  misc_feature (1)...(516): n = A,T,C or G
cgataatacatctctcccacttcctctctctcttaaattatctctctaagcccaaccccaccncnnaacgganggttgagactttagagagcctgtggaancacannnnnaaatatcacaaaatgagggtagcttaacttctaaactaggatttctgtgaatgctttatcttggcacagtaacttagttcctcatgaactacatttgtcgtaaaatggtcaaaatgaaaagaccagagtcacgtaaaaactcttatcagctgctgttttcttagagtacataaccttaggatatattatcgtgcatattctttaatggtaggtttgttgaaaatcagtcatagcccaaacagaaataaatgtgacatgctaagaaatgaaacatacctcagtttgctttttgaatatttttttgttttaaataaactgtgaggtgcagtgccacagatacataaaaatgcatatattacaactaatgttcaagaaggaattgaataatttataacaaaagaaaagg

SEQ ID NO: 15649 - DNA, 480 bp, Homo sapiens
  misc_feature (1)...(480): n = A,T,C or G
tggtccaannnnananaggctgaaaccctngaannactgagtccctagtccatgcggtggaattcctaaaccctttcctgattgagagttaaagcaataggagtcaagttactggtgccacagatctggaggtatgataggtcaggggctaggtgttgaacttagttaatggaagactgagagcagaacaggtttgtcatctccgcaaggccagaaagtgatcacaaaaagaggcagatgatagacactggggtagggtcataccacagggaaatacctttcctgggcttgttttctagcatatcactgacctgggatctttgggtgatcaagggtgtggttagtggaggctctgtgctgcacgtatgcagtatcctatctctttctacatcagatcaaaacactaagttggtgtactgcctcgaccttttttcagctcatcctggaacatatacagagttgagagttttagacaatctc

SEQ ID NO: 15650 - DNA, 567 bp, Homo sapiens
  misc_feature (1)...(567): n = A,T,C or G
gtagaganactgntgaggcngnngnnnnnnntctcagcaactgagaattcctatattttgtaaatggaaataccactactaaaaacagaatgccataaatagaacgaggtcttttgtttccaaagtcgatatactcgagcaatgcagaagtcatcatgaaaacgagagatttcatggcaaacttatctcggggtaaacgctgcagctgcaagcactgccggtgagtgttctcagggcaaacaggaaaagggctaaaaacaaatggatgaaaaaaggtataccatgttaatacaaaccgagagaaagctggagtggcgacactaataccgggtaaagatttaagaataacatactaaatataacaaacaacatcacaaaattataagggggtcaattcatccagagcgcattctcccaaaggtgcatatacctgcaaagagaccttcaaaaccacgaagcanagctgagagaactaaagggagacaaggtaagtcaccatcacggatggagatttccacagaactattcaataagtaaccaacaggtacatannaatcagtacagacc

SEQ ID NO: 15651 - DNA, 466 bp, Homo sapiens
  misc_feature (1)...(466): n = A,T,C or G
tggtanaanactgagaccctgacagcgcttggaantccgacctttgccgtggtgggcatcttgggacacttcagcaagaccatgctactattcttcatgccccaggtgttcaacttcctctactcactgcctcagctcctgcatatcatcccctgccctcgccaccgcatacccagactcaatatcaagacaggcaaactggagatgagctattccaagttcaagaccaagagcctctctttcttgggcacctttattttaaaggtggcagagagcctccagctggtgacagtacaccagagtgagactgaagatggtgaattcactgaatgtaacaacatgaccctcatcaacttgctacttaaagtccttgggcccatacatgagagaaacctcacattgctcctgctgctgctgcagatcctgggcagtgccgtcaccttctccattcgatatcagctcgttg

SEQ ID NO: 15652 - DNA, 458 bp, Homo sapiens
  misc_feature (1)...(458): n = A,T,C or G
cctgattagcctagcatacgccanggcannncngaaagattcaatgttagaaatgctcattaaactttgacatacttcttgcttagatttatagtgattatgggaaaacaaaagtattgtctctactgtttatgaaagatcaaatgttttccttactcttgtaaaggataaaatactagatcttaagtaccattcttggctgctactaagcgtccattttattgaaaatggattttctgcaaataattctcctataggaacataaactactagggaaatagaatcacagtcttgatgaggtgctaagacagatgtgacaccaatcttaaatgttgtcgttggaagcacagcacttgtagcagaaaggggaaacaaacactcttatgcaaatatattcattcattcattaaacctcttaaatagctgaattaaaaaaaaatatgagtgtggtgcccatg

SEQ ID NO: 15653 - DNA, 471 bp, Homo sapiens
  misc_feature (1)...(471): n = A,T,C or G
cgcgtacnnnnaccgagaactggtagaacataggacagngcgggggaattcctgaggaaacagctccagcagttcttgagcggcaccagggggccctgtactccctctttcctgatcaccacgtgaaaaagtactttgaccaggtggacatttccaatggtttggattggtcgctagaccacaaaatcttctattacattgacagcctgtcctactccgtggatgcctttgactatgacctgcagacaggacagatctccaaccgcagaagtgtttacaagctagaaaaggaagaacaaatcccagatggaatgtgtattgatgctgaggggaagctctgggtggcctgttacaatggaggaagagtgattcgtttagatcctgtgacagggaaaagacttcaaactgtgaagttgcctgttgataaaacaacttcatgctgctttggagggaagaattactctgaaatgt

SEQ ID NO: 15654 - DNA, 470 bp, Homo sapiens
  misc_feature (1)...(470): n = A,T,C or G
nttcgagaacattagaaagagccgnggnnttgaggacatctgtaccngcggnggaattcggagataggcagctcaacaaataatcacaatgttgtgagccccaaactctaatcattagcacctggcaggcacaagggactccttcccgcagagacccagagcctgcaaagaaaaagaggatgcaaatcacagccaaacaaggcattgatttcagatctttatagaattccaaccaatgctgcagagacactcagactgttactgtgcattccctgtatgcatggatggccaaagtgcggtaattttgggatggtctctgacactggcagcttctatttttaaagaggccttcctggggaagtgctgtcttcctgtccttgtataagttagtctgagactcaagatggagcaagagatctctgctttcaaagactgcagtagatttaccatgagtctccaattaataataa

SEQ ID NO: 15655 - DNA, 473 bp, Homo sapiens
  misc_feature (1)...(473): n = A,T,C or G
tggtccaannnaacaaacctgaaacactggaagactgatggccttcgcaatggncagctggtgggttgtgtccttatttctccctgaagtgtcatagggtgggtttctgctggctgaggtgaagatggtgaagtggctactgattgatggttctgcgtgggcaatggcgttggaggaacaaaggtagagaccattgttgtcattggaacacttgttttcattgaaatgctcgttgttgttggaacagtctttgtcgttggaacagttgttgtcgttggaacgcttgttgtcattggaacagtgatgctcgttcaaacagtagtggcggttggaacagttgtgacaattggtgtagtcgtgaccctgggtggcacaatctccaatgatagagtgattttcatgtcattgaaccacccactgtgctcaacatggcaacaatataagccactgtcagacacagctgtattttctat

SEQ ID NO: 15656 - DNA, 492 bp, Homo sapiens
  misc_feature (1)...(492): n = A,T,C or G
cgccccccccattgatncccctnggaaactgagaccactaggacagngcggnggaattcggaagcagcactggtggtgcctcagccatggcctggaccgttcttctcctcggcctcctctctcactgcacagcctctgtgacctcctacgtgctgactcagccaccctcagtgtctgtggcccccggaaagacggccaagatcacctgtgggggcgacaagattgagaggaaaagtgtccactggtaccaacagaggccaggccaggcccctatcctggtcatccattatgatagagaccggcccggagggatccctgcgcgattctctggctccaactctgggaatacggccaccctgaccatcagcagggtcgaggcgggggatgaggccgactattattgtcaggtttgggacagtggtcgggatcgtgtggtcttcggcggagggaccaagttgaccgtcttgggtcagcccaaggctgccccctcgg

SEQ ID NO: 15657 - DNA, 475 bp, Homo sapiens
  misc_feature (1)...(475): n = A,T,C or G
catgatgaccctagganatgacgaccatcgagagaccctntnttatcacatgtagtcacaacctgttttgtttttgtaaaacataggatttctctttaatgctttgatttgttttatatttggactaaggttcttgagcttatctcccaaggtactttccataatttaacacagcttctataaaagtgacttcatgcttacttgtggatcattcttgctgcttaagatgaaaagcattggttttttaaaattagagaataaaatatgtatttaaatttttggtgtgttcacataaagggatgtagctaaaatgttttcataggctattatatattctcgcagcatttccagttaagaggatattaggtatataattctcttcttaaccgaatgtcagatggtcttacgccacagggtgcaggtaacccttggtctgtaagcaccaccgatccagggatcattgtctaaataggtg

SEQ ID NO: 15658 - DNA, 460 bp, Homo sapiens
  misc_feature (1)...(460): n = A,T,C or G
actgaaatgcataacatagaccagtgcggtggaattcccaatttaaattgtatgttttcaggctgtttgtatatttaattaagggatgggaggggttatttgtcatttacagtattggggtttttatgaatgtgaagcaaacaaaaaaaatttgtatgtaaactgaaaataagaaaatacattagcaagcttaatggttatccttacttgagtccacatgggttggacagtccccacacacattaaattctgtaaatgaaagccaccttttgttaaaaatttgctctaataaaacataccaaatcctgaanaaaaaaaaaaaaaaaaaaaaaaaaaaaaaaaaaaaaaaaaaaaaaaaaaannnnncgcccctcttattttaaggggccctttaaaccccggttaaaacccctgggggggctttttatttcccccccttttggggtgcccccccccccct

SEQ ID NO: 15659 - DNA, 450 bp, Homo sapiens
tttgtgtgactccctagacaggcgggaaggttaagaataccaatcccacagaaaaatctcttaatttttgtttttccatggggagatgatcacagaatcatgggttattgctggcgctaagagttttttttttagaccagatgggggaaacagccaatgtattggagcctaacatggttgaaattctgacaaagagagcttaccctgtgtttttaggtcctaaaatcatttgttcaccaggttttttcttccatttgcattttcttctgtacatgtcagtagcttataaatgtggctcctaggaagtaatagggtggtgggcagaaaatactttttctcttcttttctggaccatctatttggagtccttccagcttttgtatggaaggggacctgctactcacttgagagaggagctcaaaagatgcctctcctttggaatacggggag

SEQ ID NO: 15660 - DNA, 455 bp, Homo sapiens
  misc_feature (1)...(455): n = A,T,C or G
actgataccatagcagngctgataaccctggaaatgatcggaaatgcaaaggactctttgagagacaacaggaaactacagaggaatatttcaggcatgtaactgtgccatttgaaaaaatatccgaattcatccagcctacatattttcttctaaatcaaataattcatactggaaagaaactctatgaacaaaaaaaaaaatgaaaaaatgttactcaacagggaaaaattcatatcagggacaagcttgacaaaaggtgggggaacacctctgtattttgcccaaatcatatgaaacatcagacaaattttaatgcaaagaaatgcaatgtatttaaagaatgtggcaaagactgcttgtaactttcaactaactcaatatcaaataagtcatgctaatcaaaaaccctatgaatgtcagatatgtggaaagccctttagaaagcgtgcccc

SEQ ID NO: 15661 - DNA, 449 bp, Homo sapiens
  misc_feature (1)...(449): n = A,T,C or G
catcganatccatagcatctgcccgngcggtggaattcatcagaaatcagaatgctgtgatatgaatatttagtatattttaatcatgataaattatacatccttctaccttatgataatggattttaagatctatgctgttaaactctatatttatcctttaattcatatcttgcttattttacatttatctgagaatacattgggtctactaaatctttactatcattcacaagtcttacatcttaagataacttttcaataaaataaaaattcttcattgcacctagaaaggagcagggttttgaaagcgatcaatgattactctgatacctaatataataatataatatagtaaaaatcaaaatacttgaatgaaaaatgtaaaattaatagttttgctttcattgtttttattccagtgtctattttagaatgtttttactctg

SEQ ID NO: 15662 - DNA, 455 bp, Homo sapiens
  misc_feature (1)...(455): n = A,T,C or G
caatgatgtccatcgcancgngcggnggaattcagggtttgtgttattgggttggaccattcataaatggcttggtgctgagttttctggagagagttagttctctctctcatgatactgtattatttcttgaggaaatggattatttctttcaagagttagttataaagccaggacatccttcaggtcttcctctctttgtagatggctacatctgctttgacttctccagtatgttgtgacacagcatgaaagaccttgccaggagctagggccatgtccttgaacttagcctgcagaaccatgagctaaataaatctttaaatgacccagtcccaggtgttctttaatagcaacacaaaacagactaagacagccagtagaggagattgagaaatatggcaagtgaggtatgaggagaacttgagaagtgtggtatcctggaagtcatatgn

SEQ ID NO: 15663 - DNA, 455 bp, Homo sapiens
  misc_feature (1)...(455): n = A,T,C or G
nctggtgatcattaggcttccgcggnggcattcgngttgtctgtcttgtcactctggccctgaagtgtgttttgtaggacagcatctaactacaagtttgatttccatggtagatggagggctatactagttatatatacatctgtctgtccgtccatctgtttgtcactccatccatccatctatctctagagtgagctttgatggtttgtgtctttcaaggagtttttctgttttatttaagtactcaaatttttcaaaatattattttcatacttgtagaatttgtagtggtgcaacctcttctattcctgatactgggaatgtctatatttttcttttaaccttgattgggttgggtagagatttatcaattttacaattttattgatcttaaagtacttggtattattgaattntctggtttctgatattttgggaattttctttttcat

SEQ ID NO: 15664 - DNA, 450 bp, Homo sapiens
  misc_feature (1)...(450): n = A,T,C or G
natgaagccccatttgagacatctgaacangcggnggaattcgtgaaatatgtgaattatattgaattttatcttaagtttggaattttaataagaattgtaaaaccatgtatagtatttttctgtggattactaaaaagttaatcataaagtagttttatatttaaaggatttaagaaaaaaatactctttacattcatcaccaaagtctgataatttggccgggcacggcggctcacacctgtaatcccagcactttgggaggccaaggtgggtggattgcttgagcccaggagttcgagaccagtctaggccacatagcgagacgccatctctaaatttaaaaagcaaaacaaacaaaagaatgaagtgtgataatttaatatcttgtttgtcatgcattactttttgctaatagaatttttactagtgttttagtatataaattag

SEQ ID NO: 15665 - DNA, 446 bp, Homo sapiens
  misc_feature (1)...(446): n = A,T,C or G
nttcgagttcactagcccgngcggnggaattcgctgtacattatatgagtagcatgagtctattctacttttaccttcagtctcattgggctaaacaaaaacttcatgggttggagaaaagcttatttatcttttctcagcatccagagaggcatgtgactgaaatgcagtcatggacagacgcgagactggaacctgagtgtacaattaccactgtggtgagatcagcaacattgtattcagacaggccatttacttacctgcagcctatgcagtaaccagaatagactcttgcccttatgtgacccacttgttggaatgagtgtggatctttccatttatctatcacttcccatatgcatttttgtttttagtttttattatatgcaagcatatttattttatggaggttgagtaggaaacctaagctaaaggaagcctcagtg

SEQ ID NO: 15666 - DNA, 475 bp, Homo sapiens
  misc_feature (1)...(475): n = A,T,C or G
natgagaccctagcctagaggncattngagagaacgctattggtgatccatataaaactcacatttccagtgcagcgctgtctctgaattccttgcatactgtcagatattattctaaagtcaccccttcctacgatgcaactgctgtaacaaatcagaacatttcaattcatttaccttcagccatgcccccggtctcaaagcttctccctcggcactgcacttctgggttgggccagacgtgcactacacatcccaactgtctgcaacagttttgggcgtattaaaagcacatgtttgaaattcacactctcaaccacctactgggcgcagtttgacaatctaggaaaagtggaacaaagaatgattttgaaagctccacccaaagacctaatatcaaaagagttggcatggtttggcttctgataaatgcactcaaagcttctgcagatagaaagaccagcagcgaacaagn

SEQ ID NO: 15667 - DNA, 457 bp, Homo sapiens
  misc_feature (1)...(457): n = A,T,C or G
ctttgaacctgagagcataggccaangcggnggaattcaacttcgcccgcgtctctgggcttttgctctgtcaggctggtggcgttttggtgtcttcgtttgttatggccgctgctgtcgctatggagacagatgatgctggaaatcgacttcggtttcagttggagttggaatttgtgcaatgtttatccaacccaaattaccttaattttcttgcccaaagaggttacttcaaagacaaagcttttgttaattatcttaaatacttgctttactggaaagacccagaatatgccaagtatctaaagtaagtttaatttttataatcctaagcatgtgtatactttattatataatagatttcttagtttcacattggcaaaaatgtatttggaatctctccacttctttttgttatcaccgtcttaatacaagacaccctgatctcttacttgtg

SEQ ID NO: 15668 - DNA, 458 bp, Homo sapiens
  misc_feature (1)...(458): n = A,T,C or G
ccctgaaattgcactacactcngaggggaanncggttcacgcctgtaatcccagcactttgggaggccgaggtgggcagattacaaggtcaggagatcgagaccatcctggcgaacacggtgaaaccccgtcgctactgaaaatacaaaaaaaaattaattgggcgtggtggtgggcgcctatagtcccagctactcaagaggctgaggcaggagaatggcgtgaacccggggggcagagcttgcagtgagccgagatcacaccactgcactccagcctggtcgtcagcgagactccatctaaataaaaaagattgtatgttgaagaaccaaggggtagaagttacagagatgctccgatcgttcagcatgtggaagaactatcagatagctagaactgtccaaacagcaacaaacttccccttaagagtagtgagatccctgttaatattcagaagg

SEQ ID NO: 15669 - DNA, 525 bp, Homo sapiens
  misc_feature (1)...(525): n = A,T,C or G
gctgagcgtgaacgtggtatcaccattgatatctccttgtggaaatttgagaccagcaagtactatgtgactatcattgatgccccaggacacagagactttatcaaaaacatgattacagggacatctcaggctgactgtgctgtcctgattgttgctgctggtgttggtgaatttgaagctggtatctccaagaatgggcagacccgagagcatgcccttctggcttacacactgggtgtgaaacaactaattgtcggtgttaacaaaatggattccactgagccaccctacagccagaagagatatgaggaaattgttaaggaagtcagcacttacattaagaaaattggctacaaccccgacacagtagcatttgtgccaatttctggttggaatggtgacaacatgctggagccaagtgctaacatgccttggttcaagggatggaaagtcacccgtaaggatggcantgccagtggaaccacgctgcttgaggctctggactgcattctaccancactn

SEQ ID NO: 15670 - DNA, 457 bp, Homo sapiens
  misc_feature (1)...(457): n = A,T,C or G
ttttattgaaccttatgcacgtgcnggaattctcaggatataaatcaagctctaagtctttggaccctctgtggaaacatttctaacccgaattttaatttggccttttcaaccaaaggcttagagtggtagcaagggatttcttccaataggaaacctgatgtttctgatttaaagagaaggtgatattttaattgtttgaattaagctccttgcaaagttcgggtgtgtttacccacttagggctttctttcccagtcaacgctaacacattttgttaaatgatccctttccctgctcacattgtgtgtcatttctcatcatcagtagtcctccagcctgggcagctgtccccaccctttttcatgtaggtgcaggaagttaaatctcatttccaggatgcatgtgaacatttacaaagttgaactttgagtgcattctgctcatatgaattatt

SEQ ID NO: 15671 - DNA, 491 bp, Homo sapiens
  misc_feature (1)...(491): n = A,T,C or G
agccccgggaatggagaccctgggnactgagacactaggacagagcggnggaattcggggtcaggggctaggggagggggctgagtttccccactttatgatgaggtgggggctatttctatgcaaatagaaagcaggacattcctcctacttccctttcctccactccccccatatctttaaagtgtggaagcagaaaggacctgcattttcctacattgaggagctgacataagggtaaggtatgggagacgtacgcggatccaaggaaaagcagcggggacggaaggcagagaaaccactcaacccccacctggaaggggccaagaaaagccagagctccatgtacgtactcctgtgctggactgtttccagagtaccagcaggtgcctttctgtctctcatgggcctaacataggaatgagccagggatgctttcctggtccctaagatcaaaccccatggagcagccagcgttagatgcccccacc

SEQ ID NO: 15672 - DNA, 480 bp, Homo sapiens
  misc_feature (1)...(480): n = A,T,C or G
catagagaccactaggctttagacgngcatttcaaaaatactatcttttgctattacttaaaatcatgataaaaatatgtttacttgaaaatatgtaaggagtgcacagagtccaaaaattattttaggagttctgtgagcaaaaatgtataaaaactacagggttgatcttaaattacatgtcagggtactgagaaagtttctgtactgcacatgagttaccaaggtctaaagtcaatcaccagaggaccatttttggatggagccattgtctaatcatgagctgaaaggcaaatatttaaaatgcaaacatccatggttaggtagcactcttaagaccttattagctgcttaccacaactgagactgtgaagtaatggctcactttctttgaggctcagattccatatctgtggagtggaagcgagtgcttaccatacaattttcacagggctgctgaatgtgtgtatgtatgtatgt

SEQ ID NO: 15673 - DNA, 531 bp, Homo sapiens
  misc_feature (1)...(531): n = A,T,C or G
gcgctggaattcgatattaaaatctagagagaagagaacccacccagccctctacccctctaaataaatcaagacggaagagggatgagagggtagtgaactagggtcccatgccaagatgtaggcggaagacatgctgatcttaccttcatcttttcattttctgcttcttttgcaagttgatcaacaagctcaattaaaccaccaactattttctgaaactggccaatttcttttaggaaaagaacaaaaaataaaatatttccttagtatcatcactccccttcggtagagtgctaaggcagtgagagggcagagcggactgccccttctaatttgtgttaaaatagttcggtgtgggccaggcgtggtggagagcaactgtagtcccagctactcagggggctgaggtgggaggatcacttgaacccaggagttagaggatgtgtgatcatgcctgtgaactgccactgcattccagcctggngaacatagcaagaccctgtcgcttaaacactttgggtgcctgtg

SEQ ID NO: 15674 - DNA, 461 bp, Homo sapiens
catcgaccacattatagacgacccttagaacagcgtggtggaattcaatctgttaaaggaccacgtaaaaaagccagtgcttttcctggatgaataccaataagtccatgtttcttaccatgtcttgccacagctttagaaatttgctctgcagtttgctttacaggttgatttgggattgaagtgtgtgagagggaactgactaacgcagttcactagctgggaaactgcttgcttaaatgcttttgaattgtaaataaaaataaatccacattggcatcattagtatctagagcatttctcagggtcttaaggctggctctccatgagtgctgactgattgactctcatctatatcgggaacgttctttatgccccacattgtgctctttcacacttcggcatttaaatgactttctatttgctttaattgtacacagagaaatacgtcattattcaga

SEQ ID NO: 15675 - DNA, 460 bp, Homo sapiens
  misc_feature (1)...(460): n = A,T,C or G
nttcgagaccctgaggcncgntcggnggaattcgaattgactgaggagcggccgggtgcggaggctcacatctgtaatcccacacgccttgggaggctctgaggcgggtagatcacctgaggtcaggagtttgagaccagcctggccaacatggcgaaaccccgtctccactaaaaatacaaaaattagccaggtgcagtggcacacacctgtaatcccagctactccgaaggctgaggcaggaggatcacctgagcccaggaagttgagactgcagtgagctgagattgcaccactgcactccagcctcagtgacagcgagactgtctcaaaaaaagaaaaaagtgactgaggaggaagaggccaggtggcaaatggaacagaatcaccaaagggtgaacaggactaaggcaatgtagtgtatggctcanctacgtcagagtggaaaaggtgttattat

SEQ ID NO: 15676 - DNA, 487 bp, Homo sapiens
acgcgatgataccattgagagcgtggaaaacgcgcaggcggacacattggcgtgagacctgggagtacgttgtgccaaatcattgccacttgccacatgagtgtaaatgatggcggatgccaagtatgtcctctgccgatgggaaaagcgattatggcctgcgaaggttttggcccgaaccgcgacttcaacaaaaaataagagaagaaaggaatattttctagctgtgcaaatcctctctctagaggaaaagttaagtgttgtgttgttttaatactgttttttcccgtgtagatttctgatacttcaatcccctactcccccaaaacagttgaagcccagcccactcttaatgggcttattcaccatttgtgtaattcattaatgctcataataacctcatgagaaagcaactagtttgattttatgtcagtttggaagctgaagatccaaacgaggcattctgtgagatctatggagagattgg

SEQ ID NO: 15677 - DNA, 486 bp, Homo sapiens
  misc_feature (1)...(486): n = A,T,C or G
gggccgttaggagaccctggataggatgaccntatggaaggcgcggaatttcttatagaccataggcccactgatgaatggaatgaaaaagcgtttttagactgctgttttatcctgtgaagcaattaatcgaaagctgcagaaggagcagagagaattagtagcacaagccctgaaagcagatttggttccatacctcttaaaattactcgaaggcattggccttgaaaacctggacagcccagcagccactaaagctcagattgttaaagctctcaaggcaatgactcgaagtttgcaggatggagaacaggtgaatgaaatcctgtgccgttcttcagtctggagtgccttcaaagatcacaaacatgattcgttcatttgtgagtcacaaacagcacgatacctcacaggacctggagttgctggctaccttaccgcaggtacatctacatcagtcatgtctaacctgccacctcctgtagn

SEQ ID NO: 15678 - DNA, 452 bp, Homo sapiens
  misc_feature (1)...(452): n = A,T,C or G
nattcgaagtaccactagcccagngcggnggaattcaattcaagccaccagatgctttccaactaacagggaccaaatgggaccgttctaagatatcctaaaagatttgggagttagaggaggtaaactaagataattatattacaaagggtacaagaccacaagacaacaaccgactccggaattcttggacctccgccttccgtacaagatggagtcttgctctgtcacccaggccggagtacagtggcacaatctcagctcactgcaacctctgcctcccaggttcaagtgattctcctgctgcctcctgagtagttgcgatcacaggcgtgagccactacgccaggataatttttgtatttttactacagacggggtttcaccatgttggccaggctggtctcgaactcctgacctcaggtgatccacccgcctcggcctcccaaggg

SEQ ID NO: 15679 - DNA, 458 bp, Homo sapiens
  misc_feature (1)...(458): n = A,T,C or G
gcgcgagccggggaaaataaaactgtaacctcgaagnttcgaggaccttcactcccaagataactagcctactccagcaataacagacagcattaatcattcatgatggcagagccctcataacctaatcatctcttaaagtttccacctcttaacactgttgcattggggattatttctaacacacgaactttgggggacatattcaaaccatagcactcagaaaatgttacttcccttcccagccacctttcagattgtttcatgggaaatgttttcagatttcacataaccaggaaagacatgatcattgtctggaaagattcttagttgggaactgcttgtattaacatctctcagccttgggtatattcttgtcgtggagaaacactctagtagggcacaagtggttgtaaaatcagtttagtaaattatgaccagcttttctttttaatgag

SEQ ID NO: 15680 - DNA, 508 bp, Homo sapiens
  misc_feature (1)...(508): n = A,T,C or G
ccccgcccccccccccatggagacccnattgagaccctctggccagngcggnggaattcctggacttaattacagaattggataaagcagtagcttcattttgcagagtagtggtcatattagggaggccgaagcccaattttgttggttatctaaaccagggaagaggagatttcaaataatttcagaacggtctcttgctgcctctcaaaattcatcaagaccattcctttttgttggggtcctcaaaagagaatttttaaattttttattattaaaaatttcgaatatgttgttacaaaagtagagggagcaatgtaaaaacttcatgtactcttatgtagcttcaacatttaatagtccatagccaaccttgactaatttacatctttaatttctccccagctccatgcctcaaattcttttgaaacaaatctcagactccatataatttcatttctaagtatttcagaatgtatccctaaacgatatgaactcttggagtttn

SEQ ID NO: 15681 - DNA, 456 bp, Homo sapiens
  misc_feature (1)...(456): n = A,T,C or G
ctccataggaagacttgagaaccntgcggaggaacnccagnngactaccccgcaatgcaaatgcctgcttgcgaaatgttgcgctgatcttttcaagcttgcagaaggggatcaaatcttatcgggtggagtgtttcataagcagaaaagccacgatgatattatcgttcctgagtttggtgattcagctcgctttccccttccatcgtcgggacatgtatattgcaagacagatcggcttaccaaaggatcagaatgtgaccaaaagagccttcgttgaaatcctttcctctggcgtccctttgaatcatgatgtgaaataggggggaaaagccagatcctgaccaaacattttgattcacctctctagagagctttagcaactgcctgtccaagtgttgcgccacaacacttggacctcgtcctagtttatgtcacagacagcccgagaccgtt

SEQ ID NO: 15682 - DNA, 458 bp, Homo sapiens
  misc_feature (1)...(458): n = A,T,C or G
cggggnnnattgagtatcactagcccagtgcggtggaattcggcgagtttagcctcagggggaaggagctccgggagaacgggatcaataggatcggaaacctgctggtgcccaatgagaattactgcaagtttgaggactggctgatgcccattctggaccagatggtgatggagcagaacacagaggtggggctggggcaacctggaggggccagttcagtgggagtcaggggaggcatggcctgaaggtcacatcctctcctagggtgtaaagtggacgccttctaagatgatcgcccggctgggcaaggagatcaacaacccagagtccgtgtattactgggcccagaaggtgaggacctaagcgggagcaaagtagccagactttggcatgtgttaacttatttcatctttccagcctcctggggattcagtactgttattctcagcatcctc

SEQ ID NO: 15683 - DNA, 446 bp, Homo sapiens
  misc_feature (1)...(446): n = A,T,C or G
ncttgangacccctagtccattgtggtgcaattcggaacatgagcctttgttgctatcaatccaagaacttatttgtacattttttttttcaataaaacttttccaatgacattttgttggagcgtggaaaaagattggatcaggagattcttacaccattcttcccaggggacaaggtctcctgttaaggcagactcactactgatggctcatatcaggccctggaatgctggcagatcgctggcagatcactgtgcagacagcgccaagtggcaggtgcattccgtgctgacccgggaaatggttctggctctggcagccctggagaagtagcagctgcaggacctgaatgaaagcactggacctggagccagtcttcagcctcttcgcctttctttctttaccctttttttaagatgtgaatcttgctatattgcccaggctg

SEQ ID NO: 15684 - DNA, 471 bp, Homo sapiens
  misc_feature (1)...(471): n = A,T,C or G
agggggtttcgtagacactagnnattgaggtgcattagncagcgcggtggaattcgttccagctactcaagaggctcaggtaggaggattgctttggccaggagttcaaaaccagccttgtcaacatagtgagacccccatttctttaaaaaaaaaaaaaaggctcggcttcttcatttcctttttaaaaagcgttaccttgctttatattttctggagggggaccactatctggaattataaatttattttttagttattattggccccctccctctaaaagggaagcttcatgagggcagggactgggttttgttcttgctgtatccgtaaagcctaaaccagtgcctgacatatggcgggcccttaataaatatttgaatcccaaagttaatgttatagtagtgaaggagaaattatttcaaccaaaagtatttcagtaagccatgtatcccacattatgcaagaatg

SEQ ID NO: 15685 - DNA, 464 bp, Homo sapiens
  misc_feature (1)...(464): n = A,T,C or G
ggggnatcgtagacactagtcattgaggtgcaatacgaaacaatatgcattttgtatataaaacactgcctggcacagagaaagtattcaacacatcttagctattattattcttctaaggggcactcaataaacaatagctactattttaaaaacttccaatgaggaaaacacaattaaacaagttcttttgtgttctctgttaatatgaatcccagtttgagacccacaactaaaataggaaaagtagaaggagtgtcgctataaatttcacattgacacaagaaatctattcccaggagtcgttgagagatctttgtttcttctcttttttcttcttactgaagtttatatgtttacattcctctgtattcagcctgtttgtccattttttcctgctttgtgttcatctattgtgccagcattcttttcgtggtatacaaagatgagatcagattcaaaaa

SEQ ID NO: 15686 - DNA, 450 bp, Homo sapiens
  misc_feature (1)...(450): n = A,T,C or G
gataagactgagnccntntaancctgagttccctcctccagtgtcgtggaattcccctgagtagggtgtgacctccgcagccgcagaggaggagcgcagcccggcctcgaagaacttctgcttgggtggctgaactctgatcttgacctagagtcatggccatgcaggctcacagctttcctacaaatgaagactgtaatcaagtggccctttgtgtgctttccacttggagaaaattacctcagttgctctcatctttcctcctaaaacctgtttttctatcatgactattatttattagacagataaaggacattttaaaaagaaaatcacactatacagtcgcaacattggaaacaccaactatttgccattttttaattttagaccttactcatatgtataatgatttttaaataagagtaataagagcataaataatagttttgt

SEQ ID NO: 15687 - DNA, 470 bp, Homo sapiens
  misc_feature (1)...(470): n = A,T,C or G
atccgagtccctaattcgtgtccatagtcagtgtggtggaattcccaaaagccagatagccaaccccatgtgtctccaagagctgtctcctacatcccagggaatacctaggaagatagcatattagaaatgaggaaaggtctcagcacaataacctaagttcccaccacaagaaacaaaaaaaaaaaaaaggattttttcttataaaaatatgacctcatggaaaggatgacttaaacccattaccaaagggagaaaaccaagggggttttttttacccttcaaacccaaacaaaaaaaatatttttgggggtttaaaaaaaaaaaaaaaaaaaaaaaaaaaaaaaaaaaaaaaaaaaaaaaaaaaaaaannnnnngggcccccttttaaaaaaaggggccccaaaaaaccccgtaaaaacccctggggggttttttttaagccccccctttttgggggcccccccccc

SEQ ID NO: 15688 - DNA, 506 bp, Homo sapiens
  misc_feature (1)...(506): n = A,T,C or G
cgccgcccccccccccattgagaccanattgaagngcggtggaattcactgtgagtgccacttctcctaataagtgcaaaagaccaatgaatgccttcatgctttttgccaaaaaatacagagttgaatatactcagatgtatccagggaaagataacagagccataagtgtgatccttggtgacaggtggaagaaaatgaagaatgaagagagaagaatgtacacattagaagcaaaggctttggctgaagaacagaaacgtttaaatcctgactgttggaagaggaaaagaaccaattcaggctcacaacaacattaaaccaggatgcttatgttcttaagtctatatttgcatatacattgactcttgatggaaagacttaagaagatcaaggtctcaccatttgtcctcaattcgtgtgaccataagatactgatagcattgagtcttgaaatgatttaataatatgagtgaggatttgctttctccattagagcattaagc

SEQ ID NO: 15689 - DNA, 480 bp, Homo sapiens
  misc_feature (1)...(480): n = A,T,C or G
nggccggnattggagccccctnnnaatgatgatccttagtccatgcggtggaattcgaccaatcagcaggatgtgggcggggacaaataaaagaataaaacctggccaccccagccagcagcagcaacccacttgggttcccttccatggtgtggaagctttgttctttagctcttcacaataaatcttgctggtgctaactctctgggtccgtgacatcttcaagagctgtaacactcatcacaaaagtccgcagctccattcttgaagtcagcgagaccaagaacccaccagaaggaaccaactccagacacaccctgacgtgggataccccatttcctgaggcatggagaggcatcaccccagtaagttgcccatgccctgtgctggcagcctcccttttacccccaaccatcctttgctctagcttctggccccaaatttgtccaaggagccccccattcaaatcctttccctgct

SEQ ID NO: 15690 - DNA, 471 bp, Homo sapiens
  misc_feature (1)...(471): n = A,T,C or G
ggccgggnnnnnnnncctgactgcatacncagggcggaattccatgttgtcagcagatgcctggacagcacagccacccatctcccattcacatggcccacctcctgcttcccagaggactggccctacgtgctctctctcgtcctacctatcaatgcccagcatggcagaacctgcagcccttggccactgcagatggaaacctctcagtgtcttgacatcaccctacccaggcggtgggtctccaccacagccactttgagtctgtggtccctggagggtggcttctcctgactggcaggatgaccttagccaagatattcctctgttccctctgctgagataaagaattcccttaacatgatataatccacccatgcaaatagctactggcccagctaccatttaccatttgcctacagaatttcattcagtctacactntggcattctctctggcgatggagtgtgg

SEQ ID NO: 15691 - DNA, 443 bp, Homo sapiens
  misc_feature (1)...(443): n = A,T,C or G
tttaaactgagaaccctatcagngtgatggacctttggagactcgctctggtgcccaggctggagtgcagtggcgtgatcttggctcactgctagctccgcctctcaggctcatgtcattctcccgcctcagccttccgagtagctgggactacaggtgcctgccaccacgcccagctaattttgtttttgtatttttagtagagactgggtttcaacatgttagccaggatggtctcgatctcctgacctcgtgatctgcccgccttggcctcccaaagtgctgggattacaggtgtgagccaccgcacccggccaatagtttttgaatctaaaattgatcaatcaggaagcatgacatctacggtgtgagccaccttacccagccaatagtttttgaatctaaaattgatcaatcaggaagcatgacatctacccaaagaa

SEQ ID NO: 15692 - DNA, 463 bp, Homo sapiens
  misc_feature (1)...(463): n = A,T,C or G
tggcggggnnttttccctgaactgcatngcatngngcnggaacncggaagaaattaaagaagacctaaataaatggaaagacattttatgttcttgggtcagattactttatattgttaacatggcaagactttgctagtcaatctatagattcaatgcaatccctatcaaaatttcaaatgcctttttgcagaaatagacaagctgataccaaaactcatatggaaatgcaagggaccccaaatagccaaaacagtcttgaaaaagaagaacaaggccgggctcagtggttcacccctgtaatcccagcactttgggaggccgaggcaggcagatcacttgaggtcaggagttcaagaccagcctggtcaatatagtgaaactctgtctctactaaaaacagaaaaaattagcccagcgtggtgttgggcacctgtaatcccagctactggggaggctgagg

SEQ ID NO: 15693 - DNA, 463 bp, Homo sapiens
  misc_feature (1)...(463): n = A,T,C or G
nattgaactgcgtacactaggccangnggtggaattccgacaagcagcagcagcagcaacacatcgagtgcgtggtgtgcggagacaagtcgagcggcaagcactacggccagttcacgtgcgagggctgcaagagcttcttcaagcgcagcgtgcggaggaacctgagctacacgtgccgcgccaaccggaactgtcccatcgaccagcaccatcgcaaccagtgccagtactgccgcctcaaaaagtgcctcaaagtgggcatgagacgggaagcggtgcagaggggcaggatgccgccgacccagccgacccacgggcagttcgcgctgaccaacggggatcccctcaactgccactcgtacctgtccggatatatttccctgctgttgcgcgcggagccctatcccacgtcgcgcttcggcagccaatgcatgcagcccaacaacatcatgggtatcga

SEQ ID NO: 15694 - DNA, 460 bp, Homo sapiens
  misc_feature (1)...(460): n = A,T,C or G
agcggnnnnattgnattcgatnacnattantccangcggtggaattcggctgagctgtgggctcacgaccccgaccccggcccgggggctgccccgggagacgctggccttcagggaggagctggatgtcctcaagttcttgtgcaaagacctgtgggtggcggtgttccagaagcagatggacagcctgcgcaccaatcaccaggggacctacgtcctgcaagacaacagcttccccctcctcctcccgatggcctctggcctgcagtatctggaggaagcacccaagttcctggccttcacctgcggcctcctgcgcggcgccctctataccctgggcattgagagcgtggtcaccgcctccgtggcagccctgcccgtctgtaagttccaggtggtgattccgaaatcctaagcctgcctcgcacctgctgagccgcactgcttgccctggcctcan

SEQ ID NO: 15695 - DNA, 461 bp, Homo sapiens
  misc_feature (1)...(461): n = A,T,C or G
cgcgtgccnnnncgggagnacccttgaaacctcngnncttgcngggtaagtacaaccggnggaaatnggnngncgcactccacagattgaacaggctgtgggcatcgtggtagctgtcatcatgccacacaacatgtacctgcattctgccttaggcaagtctagacaggtaaaccggaacaataagcaggaagttcgagaagccaataagtactttttcattgaatcctgcattgcactctttgtttccttcatcatcaatgtctttgttgtctcagtctttgctgaagcattttttgggaaaaccaacgagcaggtggttgaagtctgtacaaataccagcagtcctcatgctggcctctttcctaaagataactcgacactggctgtggacatctacaaagggggtgttgagctgggatgttactttgggcctgctgcactctacatttgggcagtgg

SEQ ID NO: 15696 - DNA, 477 bp, Homo sapiens
  misc_feature (1)...(477): n = A,T,C or G
cccgcccccccnncccattcgtcgtccatattcagtgcggtggaattcggaaatttggtatggcagggcctaacctaaaaggttatttataaaatcaatagcactgaatgataatttttttaatgacagtcatgtattttattaatgatatctgaaagctgcttaaccattaggaattacaattctttatggttggagtatgatgatttcatcaaatgtttgaatatttacataatttttatgtaaccataattaaaccaaattagtctttttttcttcatacttttcttcggtaaatagtgaagaaataatgggcatatctaattaaccagttctagtgggtgttgtgatatctttatatctagttcagtctcagatgtatgaatatgattatatagtcatgattgaagttcanaatgaggaagtatacaaaatcctcagccactggaaaaatcagttaacttgttatactcctgt

SEQ ID NO: 15697 - DNA, 339 bp, Homo sapiens
ggttgggcttggaataaaggagatgatacataataaactattctttggttagcattagtaatgcttgtagacactcaaacaaggaaggcgaagtcctgatgatgatttattgtatcaatacctcattttatttggttgtggtctcagtttgcctcactggagaatccactaagaaagatggattttaatgggaagaaaagaattattttctacatcgttcctcatctcttgagtttgtcaaaaagttttctaagaggcagtgtgaagagccagagatgtccgaaattgcctgacttcatcgtttggaagattcctaagtcacatgaaatcatctatcag

SEQ ID NO: 15698 - DNA, 461 bp, Homo sapiens
attcgagactccgtagacccttaggcggaattcggctagtacgtggtgggttaaagttcctcacacctctcctgaacgggaggaagctgctgataaccagtttccagtgctcaatgcgggcaggtggggcatctgtgcatttggtaaatacatgatgtttcccatagattctggattccttgtgcaattcatcttcacccctactgtccatggcaggccctgataaaaatgccactaagagaacacaagcttgctcctggttggcaggttctttactgcatggcccccgagacctccagaccctttactgaaggcccccattaccactgccccattgtttcctcagcttacttagggttttgccacattaccccttcccctcaccccgaaatttttttttttttccctgaaaggaggatttgctctgttgccccgcttgcagtgaaggccctaatttggtt

SEQ ID NO: 15699 - DNA, 464 bp, Homo sapiens
  misc_feature (1)...(464): n = A,T,C or G
attcgcgncttcgtagacccctagtccatgtggtggaattcgttcttcctaccactgaaaaagagtccaagaaggtggggacagtagcagaagagactttgccaggtcttgcagatggggtaccttgatggggccagcctttagaaggacagcttgccaggcctcgccagcctcctgcccatgtgcagaaacctgaggtgccgaccccagcccactgttgtgtgagcaggctgtgctgatgacccatttcccgtccagcctgcccttgtgctctgtgtgtgggctctggggcagcagcgcctgggcactactgctgcagctgaacacttctgcatcctgccccgagtgagcctgggctggggccacagccaggcagaggcttcccagctgttctgatgttgaagctaagattgaatgtagatgtgtctttaataattcaccccaagtggttcctttctagtctg

SEQ ID NO: 15700 - DNA, 499 bp, Homo sapiens
  misc_feature (1)...(499): n = A,T,C or G
tggggtnccccccaatagatcctattgagancatcggacangcgnggaattcgcgagtctgtgtcctccctgtcccccagagcagagaaccctctctgtgtctggaccggggaggagcagacgctggacaggtttttggcagaatgctggcaattcccaggaagatatgtggagaacggaaaggttgctacacccaaatagtggcgcaaaggctatgattatggaggattggacctgcaaactccagaacagagcaaccttgtaaaatgtgtgtgggcagcacagagaccttgggcaagttaacagtttcctcatctgtaaatactgatttatggaaagcacctggtgtatgttctgccctctgaggaccctgccctttcccaaaaggggtatcttaagaaggaaaatatggctgctctttgccggacagcagagtcccagaaccccatgcaggtgtttcagggctttacgtcattcaaggatgtggctgtgaacttca

SEQ ID NO: 15701 - DNA, 467 bp, Homo sapiens
  misc_feature (1)...(467): n = A,T,C or G
aggcggcgcnnnttttncattgaactacatatgcatcgngcaggaacncggnggaggggatagatgatttctaaggtcctttctaagaggataagagtgcttcccctgttcagtggttctggctagtctcctccctcccttcaaaatgcgaagcaaaaggcagggagaaggtctccttgcagatcttcagctctctcagggaaagagacccacgtcactcccagcagagtcctgcatggcagcaaggggccagggcggaagaagaacaaaagacacctggagaagaaaggcagtgcctttccctgcagcagccagggctgcagatatgatggagcaggggagatggtctcttctagagcagcatgagccgagttacacagatgatgtaaggaagaagtagagaaactgcagtctcagctcagagttttccttacatgcttgtgaaaataaagtcaccctctgttgca

SEQ ID NO: 15702 - DNA, 502 bp, Homo sapiens
  misc_feature (1)...(502): n = A,T,C or G
cgcccccccccccccttgagaccaaattgaangcggtggaattccatggacctagcgaagtcaggtatcaagatcctcgtgcctaaaagccccgttaagagcaggaccgcagtggacggctttcagagcgagagccctgagaaactggaccccgtcgagcagggtcaggaggacacagtggcacccgaagtggcagcggaaaagccggtcggagctttattgggccccggtgccgagagggccaggatggggagcaggcccaggatacacccactagtgcctcaggtgcccggccctgtgactgcagccatggccacaggcttagctgttaacgggaaaggtacatctccgttcatggatgcattaacagccaatgggacaaccaacatacagacatctgttacaggagtgactgccagcaaaaggaaatttattgacgacagaagagaccagccttttgacaagcgattgcgtttcagcgtgaggcaaacagaaagtgccn

SEQ ID NO: 15703 - DNA, 486 bp, Homo sapiens
cgccgcccgccccccccctttcgtagtccttttagaagacccctagtcagtgtggtggaattcctaaaatgactcgcttctaagtatcactcaaaccctacaaaacctaaccctttccttattcctaattgatatttcactaaaggtaatggtagtttcagttagattggaagtcattatttgggtgagcaaagtctgcaataacctactgataggaaggacctatttcatagaaaagtatcttgtccttggtgatttagccattcaccttacatgaagagtggtccagatgccagctccacattgactttttctgtgtccctctttaggtaattaacccagtgatgtaaaggagagcccacagtaaaacatctgttaaacagcacttggagtactatagtgttattaatttatgtgctataatttcttatgccatcataaaatctagtgtatgtaccaggttcccaattcattgcctcaaacaaa

SEQ ID NO: 15704 - DNA, 482 bp, Homo sapiens
  misc_feature (1)...(482): n = A,T,C or G
ccactgaaaaaacctagaaaannncnnnnatnactgangatcantgganagngcggnggaattcctcctggccaggtctcagcttatcttccctggtgtggggtgtttttcaagccttccatccacagctgtctcccctcaggctggacggctccggggtgacagggcttcaccctctgcctgcagacccctggtgggcacatctcacaggcttccgtcttgctgagttgggtacggaggcagaagtggggtgtggaggaaagtcagagggaaatctgcttcagaaaggaagggtctttagacacaaagactggaggcccttccccgcccgcacgggagctgccatcgtgggtctcatgcacgtcaagaccttcccacatccaaactcagcttccagcagggattttgactttggatgacaaggctttatttgtaaatatgctcttaatatgcaactttgagaataaaatagaaacatcatg

SEQ ID NO: 15705 - DNA, 462 bp, Homo sapiens
  misc_feature (1)...(462): n = A,T,C or G
tgcggcgcgngtnnttctggctgcataccatagccangngcnggaattcgcaacttcaattatcactctcagcctggaaggggactctgtgggacacagagtttacactatttctcaggctgtcccttcaatcattgcccttctccgaagatcgctcctgctggagtcggacatcttcatcttctacctggctcaagctgggccagagtgtgtggttctcccaggggtggttggaccccaggactgaggaccagagtccactcatagcctggccctggagatgacaagggccacccaggccaagtgccccagggcagggtgccagcccctggcctggtgctggagtggggaagacacactcacccacggtgctgtaagggcctgagctgtgctcagctgccggccatgctacctccaagggacaggtaacagtcttagatcctctggctctcaggaagtggc

SEQ ID NO: 15706 - DNA, 467 bp, Homo sapiens
  misc_feature (1)...(467): n = A,T,C or G
aattgaagaccattagaagacgcctaggccagngcggnggaattctgcagcaaagatgagtggcggngggactgcctcgaggtcttgaggtataacacgttggtcacgttggccaacatttccgggcagctagacttgtctgcttacacggaaagcatctgcttgccaattttggatggcttgctgcactggatggtgtgcccgcctgcagaggcacaagatccctttccaactgtgggacccaactcggtcctgtcgcctcagagacttgtgctggagaccctctgtaaactcagtatccaggacaataatgtggacctgatcttggccactcctccatttagtcgtcaggagaaattctatgctacattagttaggtacgttggggatcgcacaaacccagtctgtcgagaaatgtccatggcgcttttatcgaaccttgcccaaggggacgcactancagctag

SEQ ID NO: 15707 - DNA, 476 bp, Homo sapiens
  misc_feature (1)...(476): n = A,T,C or G
gaggcaggnngccccnnaataganncccactgatgaccattagtacagngcggnggaatttcatgaaaaagagtggaaagaaaagaataataatgagaatctgacttagtaaaagcaaagttctttctctgttagtatcacaaaaacagagaagtccccaggcctttcatgtgtattctggaaggaacgcccgcttccaaaaatgtttctttcaggtgcttcttcagggactgcctgatctcttcacaatgctcctgctcctgatcaaggaaaagacatatgattttgcagtctcctttagctctccttcatggaaatgattctcttgatactgaaactaaaacatattctaggcatggctgaaaaccaaacactacaatggatgtggaataaatgagcaacaaatattgaattaataaataaacatcgcactttctgatgaggctggaggctctcacttgatagcagaggataaa

SEQ ID NO: 15708 - DNA, 443 bp, Homo sapiens
  misc_feature (1)...(443): n = A,T,C or G
gggccgccnnttttccccaggtcancgcatgtcagngcantancaggccaggacgagactgtggttgttccatcagtggtccccagcgaaccacacctccaggatccaggccctcctgatcctctctctcggaatctgggtttggcaggtgcctcactttggatagagggtcatcagtgaacagaacacagggagaggctggctgggccctgcactctggaccttgacctctgagagtgccctgggctgccgtgcagggcctaggctgcctccagggtccggccacccccggagcctgactaatgtcgtcctacctgaccatgtgaggcagcctgagagaggccagcagaagagtggcccagacaactccctgaatcatatgggagaaacgtgctttgctttgatccaagttcaaagttctggggtggttgttgatgcaagan

SEQ ID NO: 15709 - DNA, 445 bp, Homo sapiens
  misc_feature (1)...(445): n = A,T,C or G
aggccggcccccttttcccggaaactgnnncgnagcnanncngngaantnnaaaaatattctgttgtgttttcttttatgagccttatactttagatctatatttcatttgaaactaatttcacctatgatggtaccgagggggttgaaattatattttccccatacagttatatgtagttctttcaactatcaattctttaaaagacttccctttcctcattgagttgcttcggtgtctatgttataaatgaattgtgggtcatttctggactttgtctgttccattgatctatgtaattatcctgaaaccaaaaaccgtactttcttgattgaaactttgtagtaattcttaaaattggatagtcaaactcctcacagtttgttcttctgcaacgttttttctattgtagatcttttatagttctatggaaaaatttagaagc

SEQ ID NO: 15710 - DNA, 450 bp, Homo sapiens
  misc_feature (1)...(450): n = A,T,C or G
atgggaggacccctggntttcgacgaccatagtcagtgtggtggaattcgtggtgccttcgcccaaagtgtcagacacagtggtggagccctacaacgccaccctctcagtccaccagctcgtagaaaacacagacgagacctactgcattgataacgaagctctctacgacatttgcttcagaaccctaaagctgaccacgcccacctatggtgacctgaaccacctggtgtctgctaccatgagtggggtcaccacctgcctgcgcttcccaggccagctcaatgctgacctgcggaagctggctgtgaacatggtcccgtttccccggctgcacttcttcatgcccggctttgccccactgaccagccggggcagccagcagtaccgggcgctgaccgtgcccgagctcacccagcagatgtttgatgccaagaacatgatggctgc

SEQ ID NO: 15711 - DNA, 464 bp, Homo sapiens
  misc_feature (1)...(464): n = A,T,C or G
nggggnattgtagaccctagtcattgaggtgcaattcctgacttcccctcattgccccagcccttcccactcctgccccagccccatcaccaccctgatagcttcctgggtgcagagtcggccattgaaaactcaagagcttcgagagccagtgttgtcagcagccattgccacgaagatggcgcaatttcatggcatggagatgcctttcaccaaggagccccactggctgtttgggaccatggagcggtgagtcaggagcctcctcagggctcctgtactcctgagctgaacctccatgccagcggatgtgtcgggggctctatccagccctccacttgagtggatctgatgtcatgggctgtcacagaacaggcttttaaatgcttgccagaggccacatgcagtgcctcatgcctgtaatcccagaactttgggagccgaggtgggtgaggtgggaggat

SEQ ID NO: 15712 - DNA, 588 bp, Homo sapiens
  misc_feature (1)...(588): n = A,T,C or G
nattaggatagaccgntnagngnggggnnnnattcgaaccctagtcagtgtggtggaattcgagaggtgctgagctaacagtgccaacaagtgctccttaagcctgcgaggcccaggcctgtggggctggttctcacctttgacagctgaatgttcctaaagaactgctgccccacagtgagggtgggagcagcggaacagggaatgccagacacaggctcgctgctgctggaaggcggggtgggacttccttcctctgtccggagaggcacaggtgtcaccagttccagccaaaggctcctcacaggcgctgtgaatttttgtacaagtcttgtaattatcgaatcaacaacttgcttcaatttaataaaaatgctcatgggaagtgcnnnnnanaaaaaaaaaaaaaaaaaaaaaaaaaaaaaaaaaaaaaaaaannnggggggccccttaaattaaaagggcccctaaaaaccccggttaaccccccgggggggtttttttaaggccccccctttgtggggggccccccccccgggtttttttttggcgggagaggggcccctcccttttccttcttaaaaaaaa

SEQ ID NO: 15713 - DNA, 465 bp, Homo sapiens
  misc_feature (1)...(465): n = A,T,C or G
tggcgtgnnnnttttncattgagttgcatatcnattgtgcnggaattcggccttcacccacgggatgccgggttctcctttctttcctcaccccaacctttactccaccagagaaacttccttttgaactcagtggggaagagggtgatgagacaggactagaaagtagtgggggacccagcgagtggacgccctgctccgggattcctgagtctgtaaatagtgtgcccagcagctgtgaactccccttatagcctcaggctgcagtgtccttcccagctgtgtgagaaaatgaaagccgacgtccacagggacccaggcagggttgggtgttgtgactcactccacctctgtgccctgcagaggtactgttgggtccttgtcttgtgagcctggggtgagctctctgtacatgttgttgttccacgtatgggttgacttggcatgctggggggtcctcgttca

SEQ ID NO: 15714 - DNA, 455 bp, Homo sapiens
  misc_feature (1)...(455): n = A,T,C or G
atcgacaccttttngggaggaccnctcgnacagncnggnggaattcgcctagggaaaactccaatggatgattttctgggagctatcttgtctaccttgaggttcctgaacaatgaattcccagtaatgagcaggcttcagtattaaaaccactgtcttgtcacctcattttgcattactgtcttccgtggatgtttcagttacaactgtaatgttatttatagaacaacattaatccattaaagctaacctatttttcaatatttatgataatctatgtacatatattgcctgtccatatgtatttgtaaataggttgtatataatgtcaggtttgggtcttgggttcaagtgtatatattcctgtaagtttcttaactgcattttgatgaattcacattatgtaactataagaattgtcccaaaagtacctgtacagaaaattgaatattgan

SEQ ID NO: 15715 - DNA, 470 bp, Homo sapiens
  misc_feature (1)...(470): n = A,T,C or G
agggcaggnngnncccccctagagaccattgtgaagcgttaggaatcctctcttgattcgggagagattcgcagaatgtattaaatgaataggtggatgacagagccttgttaaatgtaaaaaaattagttaaataaaataaaacatgatccatctatatactgtctataaatacagactcactttagatacaaagacacaatgagattgaaaacaaaagaatgaagaaatgaattccatgcaaaaagtaaccaaatgaggccaggcttagtgactcatgcctgtaatcccagcactctgggaggctgaggcgggcagatcccttgaggtcgggagttcaagaccagcctgaccaacatggagaaaccctgtctgtactaaaaatacaaaattagccaggcgtggtggtgcatgcctgtaatcccagctacacggtaggctgaggcaggagaatcgcttgaacccaggag

SEQ ID NO: 15716 - DNA, 471 bp, Homo sapiens
  misc_feature (1)...(471): n = A,T,C or G
ngggggattgtagacattagncattgtaggacattagtcagngcggtggaattccatcgtggtgtgttcttgactccgctgctcgccatgtcttctcacaagactttcaggattaagcgattcctggccaagaaacaaaagcaaaatcgtcccattccccagtggattcggatgaaaactggaaataaaatcaggtacaactccaaaaggagacattggagaagaaccaagctgggtctataaggaattgcacatgagatggcacacatatttatgctgtctgaaggtcacgatcatgttaccatatcaagctgaaaatgtcaccactatctggagatttcgacgtgttttcctctctgaatctgttatgaacacgttggttggctggattcagtaataaatatgtaaggcctttctttttacnngaaaaccagaaactcttaaaaaaaaggaaaaacagtagaaacaaag

SEQ ID NO: 15717 - DNA, 454 bp, Homo sapiens
tcccaatagaagaccattagtatagagcggcggaattcgggctggccggccgtagatgactggtgtggggtggaaaggctgcagaggcctctccatggtggtgaggggtggaaatagtgtgcacctgggtcctgggagtggcaccctgaccagtttcagggaggaaggtggcagggccctaggacaagtgtgttaaaaacttgagcccacagtgtagacacactggttccaaagacccctcaggatgtgcctcccttctcagatctgggctttccctgttcctaagcatcacctggggggatcactctgggtcctcatctccagccacatgttcactcctcacgtgggcctccctaactgtccccctcagggcaagcccttcctccccacttccagaaagctgctcgttccctggccatcccacacctctgacctcgtgccacttccggggcct

SEQ ID NO: 15718 - DNA, 583 bp, Homo sapiens
  misc_feature (1)...(583): n = A,T,C or G
caatcatatgnactagttcagagtggngcaattccttcgaatactatagaggatatatatatatgtatatgtaggtatgtgttgtgtgtgtgtgtgtgtgtatgtatatctacatatgtgtacatagatgtatatattagaagcctgaaacttttttattatcctgtttggctggattgactgctgtttccagtaaaatgttttactaaaactcaatttaataaacaggaaaagacagagatgcttttatgatagagttgaagttcagccacctgagttttcatcagtatcattaatcacgttgcctgcctaccacataaggcaaggtcccattgtactgatcactcggccacatcttttcacacccccgccacccccacccccctgtcctgctttccacttggcattcctgcttcccagttcccacagcatttgtgatttcccacagctggcccgttggaagaagagcgagttggcttccctgcattcagcggcatctctcgcctgacctggctggtctccctctttgaagagctntctcttgtgtctgccactttggaagagcganaggaagatcagtatn

SEQ ID NO: 15719 - DNA, 581 bp, Homo sapiens
  misc_feature (1)...(581): n = A,T,C or G
cattaggaagcactgctcagagaggngcaancaatagatggcccctatggacaagccatccccaccagcccctgagacatgtgagagaggccagaacaggccatccggaccccactgtgctggtggatgagacagcagaaggaatatcaacctaccaacagaatcctgagaaatgctcactcttacttcaagctgctgcattttgatgttatgaaaccataaataacttatgaagtcatctttgctgacttaaagttttccataactttattataacatatcaaaattatgaaaaatgtgaaaagtagaaaactgatgaattttgcttcttcatatggtctttaagaatctcaaaggcactgaagttttttatcttttctgtcttagaataaaaaaccttgaatgaaaatctgcttcttggaaaagcagcaaggtttatgcagaggcaatctggtatttgtgtgcactggcagctgatcatacccagcatgcacgcactctcagggcagagtctgatgccccacataatggggcatggtaaggactcccatgtccttgagatnaaaatgataggaanatcn

SEQ ID NO: 15720 - DNA, 454 bp, Homo sapiens
gcggtaaattcgtagacactagtccagtgcggtggcattcattcaacttgagtggggttttttttccactttggtcctggatataatgaaatgatacatattaggataaattttcactgtgtatagtagcaatacgaacacacatgccaatgtatcaacatatctacttggttacattttggtttatgataattaaccttgattcatgtattgggaagctacagggactacgtaatacctgcttatcacataggaaaattatgtccatgattctgagctcccttcttcaaaagtttcctcctgggtgttctatgttctctctttatcctgaaatacatttattaggttgtgaggtatgttgaagaagtagaagccaggggtatgctttcagcatttattgcaaccaaaagttaaccccatcacggttaacgagcatctttggtctcttgtggaa

SEQ ID NO: 15721 - DNA, 457 bp, Homo sapiens
  misc_feature (1)...(457): n = A,T,C or G
agggtaaatcgagacattannnatttgatgaccttagtcagtgtggtggaattcaggagctccttcgccaggaacagaggcggaaggagcagcagatgaagaagcagcctccttccgaggggcccagcaactatgactcgtataagaaagtccaggaccccagttacgcccctcccaaggggcccttccggcaagatgtgcccccctccccttctcaggttgcgaggctgaacagacttcagactcctgagaaagggaggcccttctattcctgagcacgcaaataacggatgcttcatgtcgcgcaataaaagacattttcctatgaagacttgtattttgggagtttttttaaaacctcgatggtactatggagtatttctgttgttggtatcagtgcctttaagcggtgtaggcaaagaaatggaaggccttaatgtctttgccactatgtctc

SEQ ID NO: 15722 - DNA, 483 bp, Homo sapiens
  misc_feature (1)...(483): n = A,T,C or G
gcccccgcaactgagaccntaggcactgaggaccntngcgnagctcccgcactccaggcctgtgctagactataggctggggggagggtaggaggtgtgaggcaaatactttcacctgcgtgtcaatctccggctcctccatggcttctatggaggactcctctcttctgcttctgtggatgtgatgccctggcaggcccagggcagctgattcccctaaaacttatgattaccaggatggaaaggccttggtcccatggcactgggtggggctgggggatattctctactttgaacacttctccaaagaggcagaagggccacagagttctgccaccctgaacatttttctcacttccctgggagtttttgtggcagcctttgtgggagtggtctgactggctgttgacctatcatgcttcataaatcagggtttggccctctgcttggagcatccaaccccttgaactcaaacctgtcgag

SEQ ID NO: 15723 - DNA, 444 bp, Homo sapiens
  misc_feature (1)...(444): n = A,T,C or G
atcacactgatacctacggtagagcgcggaanncgggcangngaccagagacactgccaaaccctaagaaatcattagggcatgatcatgctcaccatatttcacaaatgaaatcttaatgtgggctgttttttatgatcaaactgtcatccatgttgacctgatgaaaataacaccctccttcacctccctcagggtaatgaaagtagaaatttgactgaagctcctacttccttatacagcctttccttctgtgggcttgtcacttttcagtacatttctagtggggaagagcagggcgacccctctgctgggtttctccttaaatgtgaagcaaaataaatttatataatggaatttggtggcagtgactgatgtttgtctctagctaaaaccaactgtttagttgactttttagttataggataagttggaagtccttgt

SEQ ID NO: 15724 - DNA, 587 bp, Homo sapiens
  misc_feature (1)...(587): n = A,T,C or G
nttggaaggccgntnngnannnnnccnnnnatagtaacccctatccagagnggngcaattcaagaggacaaaaggagatcttgngctgngccaggattagggtgaggggagtgaggcaacatttataataaataaagacaagatcagtgacagtattgtgcaagccgtattggagcttaaagtgaaaggaaaaaacaccgatcctatcttttatttatttatttatttatttatttagtaactctgtcaccccaggctggagtgcagtggtgcgatctcagctcactgcatccttgacctctctgggctcaagtgatcctcccatctcagcctccctagtagctggcactacaggcacatgccaccacactcagttaatttttgtatttttttgtacagatggagttttgccctattgcctaggctagtctcaaactcctgggctcaagcgattctccttgagggcagggtggtattgcccttcaaacctaanaatgcacacactctntgtccagcaaccctactactggtagtacttctatggctggactcatgaatgtctttcaagatatatggacanaggtatt

SEQ ID NO: 15725 - DNA, 487 bp, Homo sapiens
  misc_feature (1)...(487): n = A,T,C or G
agaattagattcccttnnannttttgagaccatagtcagtgtggtggaattcagggtttgaaagcagcagaattcaatggagaacccaagtctgcctggccccagagcccatcgtctttctgctgcccagcctctccagttcccaccacctccaggccccgcccagatatcctggcatttgctcttcccagggctgagcactgcagcacagctcctcctccctcaccaggctccctcctgcactccagagagccccggtctctgactgcctgtctgccaacctcgcctgtcaatgaattattgatttctgcccttggcaagcatcggagatctttgttgttgagcactccagctttcgtgaaactctaggaaataattgttcacagacagggttctattaattataaagaggacttaatttcagtgagaagccgataggcctgttgctaaagccatttccctaacttgctgataaggccctggagcn

SEQ ID NO: 15726 - DNA, 482 bp, Homo sapiens
  misc_feature (1)...(482): n = A,T,C or G
cgcccccccncctgatnaccctggcaactgacggccatcgaanncacnganaaaatcagtgtccgtttgccagtaataaatttaatattctgttttatactataaagttattaaaatgccaaacttgtttatttaattgttttcttatgttttgggtgtaatagtccttttttggtttttgttttgttttttaaggcaggtctgtcatttttgaatactgtaaaactgtgataaactttatattgaagctgtattttaatatgaccgctttgaatccttacatgaaatgttctgggagttgttataaacacaccccaaggaagcaatatttaataaaactaggtcaaaaacaaaacaaaacagtgacactcacttgtgtgtatataaactctagagacatcttaagccctcccttcatctttaacctggtggatggagccagntattaatttataataatacatgtctgaaatttgaccaaa

SEQ ID NO: 15727 - DNA, 446 bp, Homo sapiens
  misc_feature (1)...(446): n = A,T,C or G
attgacgacctatttgatgccgtcgatancncnngngaaatggaattttttgagaacaggtcttcttaagaagaacattatgttctgggaatattacaaaactgttacttttcctattcatctctcaaattttagagagaaaactttgccttatgaccctcaattctttaatggatccaagaagggtaattgatttgatgtttattttttacttgcacggctgggattgacaatttctacgttccttacttgtgagaccagaaattggaagtctctgacttcatttttttgtgatgtttgatggatgatagctttaaaatctcattattgccaggcatggggactcacacctataatcccagcactttgggaggcggaggcaggcagatcgcttgagcccaggagttcaagcccagcctggccaacatggcaaaaccctgtctctn

SEQ ID NO: 15728 - DNA, 463 bp, Homo sapiens
  misc_feature (1)...(463): n = A,T,C or G
aggccgtgnnntttccatagatagcatgcatangngcnggcantcccctcggataccaaggggatacagtgggaccatttgcagatcctctagagtgctctctcctgtctgtctccctgtctttccgctttaatactctgtcctgcatactctagctgttttgatatcctccgatgctcagtttatctcaattaatgaagtccacacaagctccatctggattctctttccctttgctgggacctgagaattctctcaagacattaagccggggcagtcatagagttcacgttgtttgtttcccatctctcagggatcactgttctctctaaagtccattgtcttaaaaattgtcatttcatatgttttgtctggtttttatttgtgggagaggggttgtttcaagtaaaagggtaaaatcctgtccccattactttgccttggccaagagtgaaagtggcct

SEQ ID NO: 15729 - DNA, 483 bp, Homo sapiens
  misc_feature (1)...(483): n = A,T,C or G
gaaattcgatacccttcccagngcgtgagaaccctngagacgagcaaaanctactggtggagtcactccattattcttatctgtggagatctatatcttgatttgaaagtttctgagaaaatcttcagctcagacttgagggtcaactttaccagctgaaggatctgcatttactgctcaaccacatctaatttgatgtcctctgcagatttaaaatgtgtgccttcttttccgtcaccaagtcatccctgggttactactgaacatccttctcaattccccccgacccatggatggctgttctccattgtctgtttcaccagatgtcctcaaaacaaacagacagaagaaggaagtggctaatggagctgtggagtccaagtgtgactgccaagaggaatccagcaaagccaaaaagcccaagcatgtagccctgcccgaagcacgccacacgcatggaaaacccagaggaaatgagtgagg

SEQ ID NO: 15730 - DNA, 475 bp, Homo sapiens
cccccatcgagatccctagtccagtgtggaggcattcgcgccgacaggatgggcaagtgtcgtggacttcgtactgctaggaagctccgtagtcaccgacgagaccagaagtggcatgataaacagtataagaaagctcatttgggcacagccctaaaggccaacccttttggaggtgcttctcatgcaaaaggaatcgtgctggaaaaagtaggagttgaagccaaacagccaaattctgccattaggaagtgtgtaagggtccagctgatcaagaatggcaagaaaatcacagcctttgtacccaatgacggttgcttgaactttattgaggaaaatgatgaagttctggttgctggatttggtcgcaaaggtcatgctgttggtgatattcctggagtccgctttaaggttgtcaaagtagccaatgtttctcttttggccctatacaaaggcaagaaggacagaccaagat

SEQ ID NO: 15731 - DNA, 454 bp, Homo sapiens
  misc_feature (1)...(454): n = A,T,C or G
aattgangttcgacgaccactagtcagtgcggtggaattcgtaagaggaaaacaaacgaagaaagaacaaaaaacagcccactttcttcctatggcaataacttaattgcatatggtatataaagaaccagttccagtagggagatttctttaagaggactgttttctttcttctcaaaattttctttccttttattttttagcaatcaagaaaggctggaaaactactgaaaaactgatcaagctggacttgcgcatttatgtttgttttaaggcactgcattaaagaaagattggaaaagtatacacaaaaatcagatttagtaactaaaggttgtacaaaattggaaaactggctgtacaatcatgatgttagtaatagaaatttttttcttaaattaatttacccttaagagtatgatagatttgattatctgataatgagtatttaaat

SEQ ID NO: 15732 - DNA, 465 bp, Homo sapiens
  misc_feature (1)...(465): n = A,T,C or G
nggaggccccnnccatttcactgagacctccgccatgccagcttcgcacanccggnggaattnatcanaacttattctacatcagagacttcatactggtgtcaaaccttatgaatgtaaagaatgtgggaagacctttaggcagcattcgcagctgattctgcatcaaagaactcacacaggcgagaaaccctacgtatgtaaagactgtggcaaggctttcattcgtggctcccaactcactgtgcatcggagaatccacacaggggccagaccctatgagtgtaaagaatgcgggaaagcctttagacagcactcacagctgactgtacaccagcgaatccacactggtgagaaaccctacgagtgtaaggaatgcggaaagggctttattcacagctcagaagttactcgacatcaaagaattcattctggggagaaaccctatgagtgtaaggaatgtgg

SEQ ID NO: 15733 - DNA, 577 bp, Homo sapiens
  misc_feature (1)...(577): n = A,T,C or G
ccttcgcagcactgtcagagaggggattcgtgggactgcggtctctcctggagcccgggacccgcctggtctttcagccatgctgatgaccacaccccgtccaggccagacaccaccccccaccccactgtcgtggtggccccagatctctgtaattttatgtagagtttgagctgaagccccgtatatttaatttattttgttaaacatgaaagtgcatcctttccctccnnaaaaaaaaaaaaaaaaaaaaaaaaaaaaaaaaaaaaaaaaaaaaaaaaaaaggggcccctttaattaaaaggggcccttaaaaccccggtaaaccccccgggggggttttttttagccccccctttttggggggcccccccccccgggtttttttttgggggggggggggcccccccccctttttttttttaaaaaaaaagaaaaatctcccttcttttgggggggggggggtcttttcttttttgggcnnnnnnccccncncncnnnncccaccgcccccncttcggcgancgccccccacacctggaggcgggccgcccccgacgacaaaggacaaggggag

SEQ ID NO: 15734 - DNA, 586 bp, Homo sapiens
  misc_feature (1)...(586): n = A,T,C or G
ctttagaagcccgctccgnannnncnnnnnatagtaacacctatcagagaggngcaattcctaaacaaagtttaggtaaatgaattatcgcagagaanaaccacatgagaaaatttttgtactccaaatttacttcccaataaatattcagcaaagtagtaaaatgaccttaaagataaaaatgattagggaatagccttagaaaatttataggtataaaaaattcaaggacaaactgtgcatttaatggacacaagaattgactctaactccatgtctgtggtttctttgaacccatatcaaatgtatgactatttagagtgtttataagagataatggaactgaactttcactcaattaattgggcattaacaaccttcttttatgtttgttcctgatatagtctgaatcttaggaagaaggtaaaagaaaggaggcaagagaatagttatgatgaatatgtgttaagtgcctgctctgaaggaggcaatgttcttctcatttgaatccttatggcaaccttattcaatagggtttcccatatttcagatttaataacttgaggccagagagattaatttgccn

SEQ ID NO: 15735 - DNA, 487 bp, Homo sapiens
  misc_feature (1)...(487): n = A,T,C or G
gcccaccgatgaaaccttggatatgatcaccnctagacagngccgnggaattcattacttgatggttaaagagaacctgtgtgtagtgtgtggcaagttagactcctacattctgaagaacgtgattccacatgagtaccggaagcacttccccatcgagatgaaggaccacaactcccacgatgtgctgctgctctgcacctcctgccatgccatttccaactactatgacaaccatctgaagcagcagctggccaaggagttccaggcccccatcggctctgaggagggcttgcgcctgctggaagatcctgagcgccggcaggtgcgttctggggccagggccctgctcaacgcggagagcctgcctactcatcgaaaggaggagctgctgcaagcactcagagagttttataacacagacgtggtcacagaggagatgcttcaagaggctgccagcctggagaccacaatctccaatgaaaan

SEQ ID NO: 15736 - DNA, 462 bp, Homo sapiens
  misc_feature (1)...(462): n = A,T,C or G
gagccggcgcccccctgagacactgatagccgtcggaannncgccgnccatatgttaacccacactccccagccctgggactattccagtagagtgaaatattttttcctgtacaaagtggcctgaatgactgttggagttcctgtgtctggttttcctgtttattccctgtgatgcccagagtaatggcccatccaaagatgtccagatgtccatgtgctagtctccagaacttgtaactgtgttgttatgtggcaaaggggaatgaaggctgcagatggaagtaaaatagattatgctggattatctgggtgtgcccaattgatcaccggatccgtaaaagtggaagagaggcagatcaggatgtcagcgtgatgaggtgtgagacagacttgacttgctgttgctgggaggaaggggaggtcatgagccaaggaatgtggacagtctcttgaagctgga

SEQ ID NO: 15737 - DNA, 455 bp, Homo sapiens
  misc_feature (1)...(455): n = A,T,C or G
cttgacactgataccatagcccangcggnggaattcgggaaaatttccaaaacaaccaggctctcacctactgggaatgtgtctatttactcatggtcacaatgtccaccgttggttatggggatgtttatgcaaaaaccacacttgggcgcctcttcatggtcttcttcatcctcgggggactggccatgtttgccagctacgtccctgaaatcatagagttaataggaaaccgcaagaaatacgggggctcctatagtgcggttagtggaagaaagcacattgtggtctgcggacacatcactctggagagtgtttccaacttcctgaaggactttctgcacaaggaccgggatgacgtcaatgtggagatcgtttttcttcacaacatctcccccaacctggagcttgaagctctgttcaaacgacattttactcaggtggaattttatcag

SEQ ID NO: 15738 - DNA, 454 bp, Homo sapiens
  misc_feature (1)...(454): n = A,T,C or G
cggaaatcgagacattagnaattgcgagaccttagtccgtgcggtggaattcccgggatcagagcttcacttaccagtataagatacaggacaaaagcgtgtccttttttgccaaaggaatgtctcctgctgttctgtgacctgatttcggagcagctgaagctacataggactgtttttggacgtggaagatagagcaacatagcaagaatgggtctttctcctctgtagtaatatttcaggctggaccggcgactccactgtgaccagagggttgagtgctgcagtgatggcatgccttggctgccctgggccctgttcagaaaacacaagggaccacaatcctgcctttgctgagagagaggctggatgctagacccaagtgaaaggggtcctttggagcctttgtttaaatatgccttagccccagctgcccatttttggttgacaagcc

SEQ ID NO: 15739 - DNA, 506 bp, Homo sapiens
  misc_feature (1)...(506): n = A,T,C or G
ngagtactccaaggtcnnnnnnnnaactgatgccntcgnagnggcnatagatagccntncgcacgcacgggcctntgcacgctccgtccccacgcgacaggactcgagtccgattcggggctccgactcagaccctaccccgcagcgccctcctgcaaatgctctgctgaactttggttttccccgccttgctttcttcctcctcctgtagccgctgcctctcgatctcagaagcttctcttcctctgcactcagtgctaggccagatcccaaggcgacctgacctttcccctggctttgcccaacaacacaggcaccggtgactccaaacctgcatctcccctacgttccaggccccagcatcccactgcatgttccacatcccccccccttagacagctcgccttccctccccaaacgattccttacacagtcttcactttctcagaacgcggcgctaaacttctctaagttggaagggcaaaaaccttgcagctaactttgat

SEQ ID NO: 15740 - DNA, 486 bp, Homo sapiens
  misc_feature (1)...(486): n = A,T,C or G
cgggccgcctaggaagacattggatanatatcagcactagggaanngccgaggaatttcagggctgattctctcaaatagagcttgaaggataaatctttatttttgtttcaacttaacttcgaaacaaaatggaagaaaataatctacagtgcagtactgtggttgacggtaattttgaagaagttcccaaggagacggcaattcagtttaaacctccactatacagacagcggtaccagttcgttaaaaatttagtggatcaacatgagcctaagaaggttgcagacctgggatgtggtgatacttcactcttaaggctgctaaaagtcaatccatgcattgaattgcttgttggagtagatattaatgaggataaattacgatggagaggggattcgttagctcctttcctgggggattttctgaaacctcgggatctgaatttgaccatcacattgtatcatggctccgttgtggagagagn

SEQ ID NO: 15741 - DNA, 472 bp, Homo sapiens
  misc_feature (1)...(472): n = A,T,C or G
ccgccccccccccccccccattgagcacactagttagagcggcgtaattcgctgggccgggagcagtggctcatacctataatcccagcactttgggaggccgaggcaggcagatcacctgaggtcaggagtttaagaccagcctggccaacatggtaaaaccgtctctactaaaaatacaaaaagtagccaggcgtggtggcacgtgcctgtaatcccagctacttgggaggctgaggcaggagaattgcttgaacctgggaggtggaggttgcagtgagctgagatcacgccactgcgctccagcctgtgtgacagagtgatactccatctcaaaataaaatcaaagtacagggctggggagagggagaaataggaagcagctgcctaatgggtacaggattttcttttggagtagtgaaaatgtttggaactagatagaggtggcggttacgcatcactgtgaagacan

SEQ ID NO: 15742 - DNA, 487 bp, Homo sapiens
  misc_feature (1)...(487): n = A,T,C or G
atcagaaacccttgaancctccgataacctcggaagngncgnggaanncgaagaaagcaaaaaaggcctcaaccaaagattctgagtcaccgtcccagaagaaaaagaagaaaaagaagaagacagcagagcagactgtatgacgagcaccagcaccaggcacagggatttcctagccgagcagtggccatccccatgcctctgacctccaccgacctctgcccaccatgggttggaactaaactgttaccttccctcgctccacagaagaagacagccagcttcaggggtccctgtgctggccaagccagtgagcctgcggggaggctggtccaaggagaaagtggaccagctgccatgacctcaccccactcccccaacacaggacgcttcatatagatgtgtacaggatatgtatttttttaagtgacctcctctccttccacagaccccacatgcccaaaggcctcgggacttcccaccaccn

SEQ ID NO: 15743 - DNA, 460 bp, Homo sapiens
agagaaaaaatttgagactcgtagacattagtccaagtggtggaattcgtcatgcgctttcttctgagggtccgctgctggcagtaccgccagctctctgctctccacagggctccccgccccacccggcctgataaagcgcgccgactgggctacaaggccaagcaaggttacgttatatataggattcgtgttcgccgtggtggccgaaaacgcccagttcctaagggtgcaacttacggcaagcctgtccatcatggtgttaaccagctaaagtttgctcgaagccttcagtccgttgcagaggagcgagctggacgccactgtggggctctgagagtcctgaattcttactgggttggtgaagattccacatacaaattttttgaggttatcctcattgatccattccataaagctatcagaagaaatcctgacacccagtggatcaccaaaccag

SEQ ID NO: 15744 - DNA, 455 bp, Homo sapiens
  misc_feature (1)...(455): n = A,T,C or G
catcgacgtccattcgcccgngcggnggaattcgtttcagaagcaggatagtataaaagcatcagcctaagaatggcactcccactaactagctatgtaatcttgacctctttgggctttagttcctctcataaaaggaagagatgtattggattagactagatgatcaccactttctcttctagttctaatttttttaattctaatacctatattttcaagttatgtcaattaaatcattatcaggttatttcctaatgtaagaatagctaaaatgttgcagagaaataagtgacccaacaaaatttattcatctgttatgggtaagatctgccataaattcttcctaaataatttgtttactaactctttaggccactgtgctttgcggtccattagtaaacttgtgttgctaagtgctaaacagaatactgctattttgagagagtcaagac

SEQ ID NO: 15745 - DNA, 462 bp, Homo sapiens
  misc_feature (1)...(462): n = A,T,C or G
nttcgagaccactttgaatgcggtggaattcgtgtagtgtccctggcaggcatttaccaggccatgtgctttaacgttacggcaatactttactttacgcatccctcctgttgctagcagccttttgacctatctgcactgcactgttctcagtaagaaatgatcatctgttacatggaaaaaatgttgatggagcattgtgaaattaaaaaacacaacttgcagaaccaaatatatggcatcagtacatttttgtaaagctaccaagatacttacctattaatatagtatagaaaacacttatgaaagctgtgtccactataagattaacagtggttatctctgggagaaagtttctgtgcttttttgttcatctgtccatttttctcctaaaaacagatttgtttagtcgtagaaataatttgatatactgtatcgcgaaacagtgcaagcagaaaaaan

SEQ ID NO: 15746 - DNA, 470 bp, Homo sapiens
  misc_feature (1)...(470): n = A,T,C or G
cggggtgcccgnnntggggnnacctgagaccctagaaactgacggctatgagacaagactggcttctggcttctgccaaaacactcccttaacagaaagcaccgaggggatgggggtaggggggttggggagagtgaggcttgagtgtgaaggaagtctcatatatgcagagctgaaatctccctctttgnatgtccacacttttgtcttgctctctagactgattcttgctattccaaatcctcttccacgttgacagcccttcagatatttcaacactcctctcagcatcctccacttcccccatctctccaagctgaacttggttcacagggtgggattgtgtatgtgcatgcaggaggtgggggtggacagtgccctgggctggaatcccccttagttctaagtgcctccttgcccgcagcttcgagagctgtgcccaggagtgaacaaccagccctacctctgtg

SEQ ID NO: 15747 - DNA, 455 bp, Homo sapiens
  misc_feature (1)...(455): n = A,T,C or G
catgatgttcatcgcacgngcggnggaattcgggcactcagagttcagggaatgggccgtggtgcagcccagagggatgttatgtgttagggtgatggaggcagaatgtcatctcaagttggaagatggaaagtagagtaagcaccagtaaccctggggcagcccaggagggcttcttggagttggaggaggcagatcttgaaggatgagtgaaattagtaggaacgtgggattgtcggtcaagattcctcaaggaaaacatggggagaagagcaggtgaaggaccttccatagccaggggatacaaagccacagtcctgggccccctcccttcctgccccctcatacccacatggccggccccgaagtcctcagacctagggccccatctgggccatcctttggccaaaagtcattactccctcaagcagggtttctcacccgtggccctgtgn

SEQ ID NO: 15748 - DNA, 412 bp, Homo sapiens
  misc_feature (1)...(412): n = A,T,C or G
aggatggccgcctgtccctgactattgagtcctgttgttgtaagccaggcatggagggctcctgcccttctgctgagccacagcccattgcagcactgtgctggccagacttcagctgccttgggaactgaagccctgccactgttgctagtcaggggcttggttctcccacttacactgttgacatctattttctgaagtgtgtttaaattattcagtgctaatcattgttttttcctttgtaaatgttgattcagaaaaggaaagcacaggctaagcagttgaaggttccccaccattcagtgagagcagaacccccattccccagcctctgctggtagcatgtcgcagtttccatgtgtttcaggatcttcgggctgtcgttagacaggttaatgaagaacacttctcn

SEQ ID NO: 15749 - DNA, 440 bp, Homo sapiens
  misc_feature (1)...(440): n = A,T,C or G
gatggggncgnattgagccctnnnattgtagtccatagtccatgtggtggaattcctgaattacaactgtggtaagagttacaaaggagagtgcgctaagaacctgaccttttctgggagacacaggaaaagttctttgagcaagtaatgtttggacacgaaggataagtagaagttaaccagtggaggaaagaacattgtgcgaagatattttgtgttttcccttctctgtgcttttgtgtattcagttccatctgcttatacagcatgcctgtttcaagtatccaaatcctaactcaagatttggctcctggcctggcgcggtggctcacatctgtaatcccagcactttgggtggtggaggcaggtggatcacttgaaatcaggagttcgaggccaggctgagcaacatggtgaaaccccgtctctacaaaaatata

SEQ ID NO: 15750 - DNA, 432 bp, Homo sapiens
  misc_feature (1)...(432): n = A,T,C or G
atcgannnccntnnnnattgtagaccactatccatgtggtggaattctaggaaaatactaatacacagacaatgcaacattgtatcatttacaaatccttaattttttagcattataaaattatattttttagactgagataatatgcaactcaaaatacacaaggaagaccaaatagatactcaattcagtaaactctgaatgttaactctggggacaaggcactgtgctaggcccgggattccaaggagaggggcttatgccttacctcagtaggctggggtaatattgctacagtcatggtgctagtatggacgcggccttgcttttctgtctttggcactctttgtactctgtgaacacctccttcaaatttcatgtgcctataggcttctgaacccccaatgctggcagatgcatgtctaaggccac

SEQ ID NO: 15751 - DNA, 468 bp, Homo sapiens
  misc_feature (1)...(468): n = A,T,C or G
attgagactcgtcngaccatagtccatgtggtggaattcctggacttagtgactaacttccaaagaacagagtatggaaagggaggaggagagtaacttcatagtacagaaacctggaaacactgtcttggccaggtggtcaaagttaatatcatcaagtcatgttgatagcatatactcccaatatactgtgatgagaagggcaattcacctctgtggtattctcaaaacctataacccaatctagtctaaacatgaaaaaaaaaaatcaaactaaaattgaaggacattctataaaacacctgatcagtattcctcaaaactatcaacgtcgtggggaacaaggaaagattgaaatactgtaacagaccagaggaaactaaggaaacttaattgatgactgaatgcagtgtgctgtgttgaactggatcctagagaaaatagacattagtggaaaaactactgaaa

SEQ ID NO: 15752 - DNA, 469 bp, Homo sapiens
  misc_feature (1)...(469): n = A,T,C or G
catcgaccccccttttagacngacccctagtccagtgcggtggaattcgcagtctaattgaggagcactatagtgtagcagtcaagagcatggatctgaaatcagaccagcctggatttaagttttggctctaccattacctagatgtttgatctttctccaagttacacactctcagcctcaggtttctcacccataaacaagcatataaggataataacctgcctcaggttgtaaggattaaagggaacttatataaaacctataatgaatctgactcactaggctcttaatagtagctcctcttataagcagaacagggcaaagtagtaattgcaactgagaagagaaaatgcagttcaaagcaagattaaaaggatgagtaaagtcccctagagagctcagccctacaggatttgagattctcattcattcacaccttccctccttccttcccttctaatttttg

SEQ ID NO: 15753 - DNA, 475 bp, Homo sapiens
  misc_feature (1)...(475): n = A,T,C or G
ggcggccaattgagncccctnaatgatgaccctaggccgnngcgnggaattcgcgacggcgtactttgggcttcatcatggaggactacctgcagggttgtcgagctgctctgcaggagtcccgacctctacatgttgtgctgggaaatgaagcctgtgatttggactccacagtgtctgctcttgccctggctttttacctagcaaagacaactgaggctgaggaagtctttgtgccagttttaaatataaaacgttctgaactacctctgcgaggtgacattgtcttctttcttcagaaggttcatattccagagagtatcttgatttttcgggatgagattgacctccatgcattataccaggctggccaactcaccctcatccttgtcgaccatcatatcttatccaaaagtgacacagccctagaggaggcagtagcagaggtgctagaccatcgacccatcgagccgan

SEQ ID NO: 15754 - DNA, 457 bp, Homo sapiens
  misc_feature (1)...(457): n = A,T,C or G
aggggtttcctgagacatcgactgagcgatagntnggccaaggaactccgccaacatcccagggtctacaacatccacagccggaccgttacccgctattttgccaactctatcgtggtcgtaggaggctgtcctgtctgcagggttggggtgctggaggactgcttcaccctcctgggcatcttcctggccatcatcctcttcccctttgggttcatttgctgttttgccttgaggaagcgacgatgccccaactgtggagccaccttcgcttaaagggaacaccaggcccggctttcctacacccagctctctttttctaatgtaaatgttgtgtacaataattttatttgattaagcttcaggactgttttgtaaagcgaggtgggaccgatgtggcacacgccagctgcggtttcccggagcgtggagaggcagtgctgctgctcccgcccga

SEQ ID NO: 15755 - DNA, 476 bp, Homo sapiens
  misc_feature (1)...(476): n = A,T,C or G
ngaggccccccncttttnnnnnaagcctttagnaagnacnnncnnntnnnntnaannnngcaaactacatctcagacccggctatcttatggagggcttatcttcatatcctgatgacatttcaaatgaagttttggtacggatcacagctggcttactggcttcatgcttttcctgaactctacttccagaaaaccaaaaaagaagatattcctcgtcagcttgtctacattggtctttacctcttccacattgctggagcttaccttttgaacttgaatcatctaggacttgttcttctggtgctacattattttgttgaatttcttttccacatttcccgcctgttttattttagcaatgaaaagtatcagaaaggattttctctgtgggcagttctttttgttttgggaagacttctgactttaattctttcagtactgactgttggttttggccttgcaagagcagaaaaa

SEQ ID NO: 15756 - DNA, 475 bp, Homo sapiens
  misc_feature (1)...(475): n = A,T,C or G
ngatgcggccggctgnnccccnaaaagtcccanagncnnnncnctnnnntnagaggacnacccagcacaactgactgcttcagtgctgctatcagaaaatttcttttatcttttgngaatgattggaactttggaaggtcccctcctctcctcctttcacctctgcacctanttttttcccattggttccagacaaaggtgacttataaatatatttagtgttttgccagaatctctcttgctttgccattaagcagaagaactagtttccctgtatagcctgctgggagagacccacttctagggtatgggggatgcagcttcaagcccagtgcccagtgtctccctgttaactgcaggaatgccaagcacctggccagagcagcccagccccaatatgcttaggaggagacagagttccctctgtatagcctctgcgacaagaaaaagaaaacacaagaatgtatacactgga

SEQ ID NO: 15757 - DNA, 431 bp, Homo sapiens
  misc_feature (1)...(431): n = A,T,C or G
natcgaagacatctgncattgcggtcgtattcggcgagaacgacccccggaccgaccaaagcccgcgcgccgctgcatcccgcgtccagcacctacgtcccgctgccgtcgccgccgccaccatgcccaagagaaaggctgaaggggatgctaagggagataaagcaaaggtgaaggacgaaccacagagaagatccgcgaggttgtctgctaaacctgctcctccaaagccagagcccaagcctaaaaaggcccctgcaaagaagggagagaaggtacccaaagggaaaaagggaaaagctgatgctggcaaggaggggaataaccctgcagaaaatggagatgccaaaacagaccaggcacagaaagctgaaggtgctggagatgccaagtgaagtgtgtgcatttttgataactgtgtacttctggtg

SEQ ID NO: 15758 - DNA, 463 bp, Homo sapiens
  misc_feature (1)...(463): n = A,T,C or G
ntttgtagaccattagnnnantttgatgacccttagtccagtgcggtggaattcgctcactgcagcttcagactcctgggcccaagtaatcctttcaccttagcctcccaaagttgctgggattacaggcatgagccactgtgcatggcctgttacgtttttcaagtaaagggaatgtaacgttcaaaagtcaggttagttttataattgtcaatccagccttttggaatatagttaaaagagtaaattcccctaatatgaatatactctgtttaagtcatttgagagagttggccagttctatattagggattaatttttaaaaaatagaatgcaaaagtcaaacagaataatgaatttctatatacataaagcccagcttcaaaaattaaaaacattttgcaaattttgttcctttcccccaacttaatttccctgttgtatttaaatacaaatgccagaa

SEQ ID NO: 15759 - DNA, 501 bp, Homo sapiens
  misc_feature (1)...(501): n = A,T,C or G
tgggtnnnnnnnnaagtacgacatcctaggaagcgncgnggaattcctcacacagctcttgatgcaaatgtttttatttgccacttaaactacagtttccctgtgctatcctgatggtgtgggggtgtggaacaggctgctggaaccatggtttacagtagtagcaggtagatgattagtagcatgagtggtgaaatgctgcatctaagtgcctgtcactttgctcccaggggaatatcatgcagcccaggaatagtgttagactgggaaggactgtggcaggaacagtcactgtctctcctcattttggtgaggaatgggtcccacataatggagagctcaacagaagcatccagtcttgttctgaatggagcaggtcagtggcagcagcctcttgctttcatttacccctttgggctgcttgcctaaagtctctcttccttcacctccccaggccttttggcaagagggaagacactgccattcctggctctttccctg

SEQ ID NO: 15760 - DNA, 452 bp, Homo sapiens
  misc_feature (1)...(452): n = A,T,C or G
ncttgttggccctccnnccctgacgtacatctagaaagtgcggtggaattcgaagaaaatatgaaaggtcacacttcaatcttcttttaattctgaggatacagttataaacattacagttttgaaactcagttcattagttctttttttttttggaaagggagcctaatttggccccccaggcgggagaccaagggcgggatctttgctcactgaaacctccacctcccaggttcaggagtttctccgggctcaccccccggagtagcgggaataacaggcccgggctgccgttgccacccccagtaaattttggggtttttaagaaaaaagggggtttaaccatgtgggccaggcgggtcttgacccccggacctaaggggacccccctgccttacgggcgggagccaccttgccgggcctagtttttttaaaaaataaaatcttggggc

SEQ ID NO: 15761 - DNA, 451 bp, Homo sapiens
  misc_feature (1)...(451): n = A,T,C or G
actggataaccntnggncttgtacgacattagtncagtgcggtggaattccagaacatcacatatcactgcaaaaatagcattgcatacatgtttcaggccagtggaaatgtaaagaaggccctgaagctgatggggtcaaatgaaggtgaattcaaggctgaaggaaatagcaaattcacctacacagttctggaggatggttgcacgaaacacactggggaatggagcaaaacagtctttgaatatcgaacacgcaaggctgtgagactacctattgtagatattgcaccctatgacattggtggtcctgatcaagaatttggtgtggacgttggccctgtttgctttttataaaccaaactctatctgaaatcccaacaaaaaaaatttaactccatatgtgttcctcttgttctaatcttgncaaccagtgcaagtgaccgacaaag

SEQ ID NO: 15762 - DNA, 327 bp, Homo sapiens
  misc_feature (1)...(327): n = A,T,C or G
gagcggnnnnnnaatcgagatctctagnatttgacggcgaattcgccgtgttggtcaggctggtctcgaactcctgacctcaggtgatccgcctgcctcggcctcccaaagtgctgggattacaggagtgagccactgtgcctggcctatcccacttggtttttgactgaaggggaagtgtagaaatatattgatttgtgatttctggtgtcacctgtgttaccaaaaatcaaaacaaatcttttttattttttattattattattatttttgagacagagtctcgctctgtctcaaaaataataataataataaaaaaaaaaaaaa

SEQ ID NO: 15763 - DNA, 489 bp, Homo sapiens
  misc_feature (1)...(489): n = A,T,C or G
cgcgcgggggccnccaatttgagnccntnnnaattgagcatccctagnccgtgtggtggaattcgtcctggggggcatggtgaggatgaagtgggcttgtgcctgggacgttcctactcagccagtgccctgcctgaaacactaggatcgaactgtccattcagccaggcaccttcgaactcctcccaggcataatctctgtctggaaactccttgtgttgaataagatgggaaaatccatccatgagaactgaagccacaaacagcgcttgcaggacaagaggagagaaggtctttgggaggagatggccacatcgtttctagtccccacctcacacctgatcttggcctgtctggaacatgcagtgtgacccagggaaggccatgggtctcccagaggcccggtgaagcggggagcctttcctattcccagttaagggcctttgagaggcctcattttcttccctgaaggtctcgtccttccagcaa

SEQ ID NO: 15764 - DNA, 496 bp, Homo sapiens
  misc_feature (1)...(496): n = A,T,C or G
agcgttntnnttccgatgtacggtagngacngcaannngnaagggatatggaaaggggcacggagcttctgtgccctctctgggtatgccatcctttttgatcctccgcatgtttggctatctagaagctctctgaacccagtccatttgggtttttatgggtgcctcattacacaggcatgatcaacttaagtttcatcctctctctctgccttcctggaattggggatggaggactgaacgtccaaccctctaattatgccttggtctttcctgtgaccagctcccatcctaaaactatatggactgcaagccttattagcatataaaagacactcctattaccctggagattccaagcgttttaagagctttttgccaggaaatgggatgaagaccaaatacatatgtatttcacaatatcacaggtaccccttaggaagttataattgaccaagagatgatggtggcttgggtaaagtagtgacagtgaaag

SEQ ID NO: 15765 - DNA, 479 bp, Homo sapiens
  misc_feature (1)...(479): n = A,T,C or G
ggagggggccnncgattgtagacattgagcacagtggtggagtgccgngcgcaactgggggcgccgggggctccgcacggaccatgtattttctgagcggctggcccaagaggctgctgtgccctctggggagcccggccgaggcgcctttccacgttcagtccgacccgcagagggctttcttcgccgtgctggccgcggcccgcctcagcatctggtacagccgacctagtgtgttaattgtaacctacaaggagcctgcaaaatcatctactcagtttggatcctacaagcaagctgaatggaggccagatagtaccatgatagctgtatcaacggcaaatggatacatcttgttttttcatattacatctacaagaggggacaagtacctttatgaaccagtgtatcccaagtaagtttgttgcctttcattcttttaatatgtgatttgcatactttatattcagaanaacatt

SEQ ID NO: 15766 - DNA, 442 bp, Homo sapiens
  misc_feature (1)...(442): n = A,T,C or G
actggagaacttaggttgggcggccgtcttngtgatcgcanagtcacagcatatgtagctgaccgaagcagattattttgactttgtttatattgccgaattggattttgctgtacattccagtgggctatttgaattgttttatctgctgtaatatccttctgatgaatcttgcttaaaatatgtcattctccaaagttcaacaatatttctttgtaaaatttttgttttgatataggacataattgagatttttacatataaaatgccttaagataaatatgtgttacgacactttaacttttatgcaagttatatttattgaatcctttaatagtaaattacatgaaagaatattaaagaatcataaagagtagggattaaaggggttgtagttatttttaattctgaaaaaaataagacaattaaaactatccttaag

SEQ ID NO: 15767 - DNA, 456 bp, Homo sapiens
  misc_feature (1)...(456): n = A,T,C or G
gaagccnnnnntnnncctgagattgtaggccatgcggggaactaaggctgcggcggcgacgagctccgagcgggacactgaacggcccgtatgcgcaagataagcacggactgaatcaggtacacgcacctgccggggacgcactgaccgaggtgcggacggcggtaccaggacaggtaaagccgcgaacactcggacctaagaacttgacaggtacaccctgcctgatgaagctacgtacggccagagacgaagtttcgccatgttgcccaggctgatctcaagctcttgggctcaagcaatccacctgccttggcctcccgaagtgctgggattacagggtgagaacctacttcttcataaagagaatttggagggagctttttgttctgcggggacaacatctggatttgaatacatccatgctcaaaaggagatttctcataatggacccaa

SEQ ID NO: 15768 - DNA, 449 bp, Homo sapiens
ctttgaaaatagtagaccattaggccagagcggtggaattcgcaacgcgagtgggagcaccaggatctcgggctcggaacgagactgcacggattgttttaagaaaatggcagacaaaccagacatgggggaaatcgccagcttcgataaggccaagctgaagaaaacggagacgcaggagaagaacaccctgccgaccaaagagaccattgagcaggagaagcggagtgaaatttcctaagatcctggaggatttcctacccccgtcctcttcgagaccccagtcgtgatgtggaggaagagccacctgcaagatggacacgagccacaagctgcactgtgaacctgggcactccgcgccgatgccaccggcctgtgggtctctgaagggacccccccccaatcggactgccaaattctccggtttgccccgggatattatagaaaat

SEQ ID NO: 15769 - DNA, 442 bp, Homo sapiens
  misc_feature (1)...(442): n = A,T,C or G
actcgagacacttgntttggaggccgttttntaaaggtggtaaagcactggtctaaaacaatcttggtggaaatgaaatgtttttttctctgtcttctttcaggtctttgttgagtatgcaaatgctggtgattccaaagctgcgcagaaattactgactggaaggatgtttgatgggaagtttgttgtggctacattctacccgctgagtgcctacaagaggggatatctgtatcaaaccttgctttaatcagtaacctaaggactgtttcctttttctcctcttccatttcttgggttattccacatatgaatgcaggactacccccttaccattttaagaaggtactttatacatttatttaatcctactaatgtgcagccattgcccaagcagtgactgcgttgcatacatttggcactgagtaggacaagacctctt

SEQ ID NO: 15770 - DNA, 451 bp, Homo sapiens
  misc_feature (1)...(451): n = A,T,C or G
aactggatgaccntnggntttgtacgacatctgaaagtgcggtggaattccgctttcctaccgcccctcagataatgtaagctcatccaccattaagcctgcaccatgttttgaggttgagtgacatgttcgaaacctgtccataaagtaattttgtgaaagaaggagcaagagaacattcctctgcagcacttcactaccaaatgagcattagctacttttcagaattgaaggagaaaatgcattatgtggactgaaccgacttttctaaagctctgaacaaaagcttttctttccttttgcaacaagacaaagcaaagccacattttgcattagacagatgacggctgctcgaagaacaatgtcagaaactcgatgaatgtgttgatttgagaaattttactgacagaaatgcaatctccctagcctgcttttgtcctgttatttttta

SEQ ID NO: 15771 - DNA, 455 bp, Homo sapiens
  misc_feature (1)...(455): n = A,T,C or G
nttcgagatccctagtccagtttgatggccctcgcaggctgaaggggcctcttcttaacaaatttctgaccacagccaaagataagaaccgctgggaggaccctggtaagcagctctacaacggggaggccacatgctatgccctcttggccctactgcagctaaaagactttgactttgtgcctcccgtcgtgcgttggctcaatgaacagagatactacggtggtggctatggctctacccaggccaccttcatggtgttccaagccttggctcaataccaaaaggacgcccctgaccaccaggaactgaaccttgatgtgtccctccaactgcccagccgcagctccaagatcacccaccgtatccactgggaatctgccagcctcctgcgatcagaagagaccaaggaaaatgagggtttcacagtcacagctgaaggaaaaggccaaggg

SEQ ID NO: 15772 - DNA, 493 bp, Homo sapiens
  misc_feature (1)...(493): n = A,T,C or G
nggagtncaggcggnccnnnnnnaattgaaaactgagacctatagcccagngcggtggaattcgttaggagtatgtatgtgaactgggatagaaacacatgaaggaggagagggtggaaaactaaagatgaagattggctttgagagataattcattcatttaataactgcatattgtagtaggttgactagtggcacccgaaataatatgtccatgtctttgctccctggaacctgtgaatgtgaccttatttggaaaaaaaaaaagatcctaagttaaggatcttgagatgagatcatcctagattatccaggtaggtcctaaatccaatggcaagggtccttataaaagatgaaagaggagaagacacagagaataggagaaggcgatgtgaagacggagatagaggttggggctaatgccaccgcaagccaagggaagctgaggaatgccaggcagctgccagaaggtagaagaggcaaggaacttctt

SEQ ID NO: 15773 - DNA, 458 bp, Homo sapiens
  misc_feature (1)...(458): n = A,T,C or G
ggggnaagtagacatctggccattgaggngcatttcaaacatccctaactgatcgaatatatcagtaatttcagaatcagatgcatccttttataagaagtgagaggactctgacagccataacaggagtgccacttcatggtgcgaagagaacactgtagtcttgttgttttcccaaagagaactccgtatgttctcttaggttgagtaacccactctgaattctggttacatgtgtacctctctccctccttaaataaagagaggggttaaacatgccctctaaaagtaggtggttttgaagagaataaattcatcagataacctcaagtcacatgagaatcttagtccatttacattgccttggctagtaaaagccatctatgtatatgtcttacctcatctcctanaaggcagagtacaaagtaagccatgtatctcaggaaggtaacttcatt

SEQ ID NO: 15774 - DNA, 489 bp, Homo sapiens
  misc_feature (1)...(489): n = A,T,C or G
gggggggagccgggccnnnnnaaaattgagaactgaaggcatngcggnggacttccacatttaatgttatacagtatttacatatagtggaacatagggataactcagttttatgtaaatttttgttaagtgttgtagcctgcccagagtgacttctattttttcttctttgtctccaggtggtgaagcagtattttccaatttgaagattcatttgaaggtggctcctgccacctgctaatagcagttcaaactaaattttttgtatcaagtccctgaatggaagtatgacgttgggtccctctgaagtttaattctgagttctcattaaaagaaatttgctttcattgttttatttcttaattgctatgcttcagaatcaatttgtgttttatgccctttcccccagtattgtagagcaagtcttgtgttaaaagcccagtgtgacagtgtcatgatgtagtagtgtcttactgggtntttaataan

SEQ ID NO: 15775 - DNA, 459 bp, Homo sapiens
  misc_feature (1)...(459): n = A,T,C or G
ccttgactgcagaacttagtccangnggtggaattcgtggcacagcgtcgggctgactctgcttgtgttcgtggccacgctgctgatcgtcctgctgctgatggtgtgcggntggtattttgtatggcatctttttttatcaaaattcaagtttctccgggaactggtgggagacacaggatcccaagagggagatcatgagccttcagggtctgaaactgaagaagacacttcctcctctccacacagaatcagatccgctcgccaaaggagggcacctgctgatgaaggccacagacccctgacatagtcctgtacttgtgaaggatgaaaagacagttgccagcttctgtcttttactgacttcgctttgaaatttactaatgactgaagaacatttgtattggattttaagtcgaattttaaaaaagatttacatgtaagccatataaaaataaa

SEQ ID NO: 15776 - DNA, 483 bp, Homo sapiens
  misc_feature (1)...(483): n = A,T,C or G
cgtatgaactattgagagcgtggaaacattancctacacaagcctgcctgagccccagtagtgggagctgggtccagccacacacacctcagtctttgctggccacgctcatgcccctcccaggtaagcctcactcaggtatctgttttggggtagggaatagtgcaatgcaatgccaccccccacagaaatgtggacagcagtctcaataaaggtatatgagggggtaatattcatactgttatgggggtgatggcagtaaaggctcagaggaaggcctactctctcgagtctagggtggggagagtccatcttgtccctcacccctcacctctatccccaagagctaagggagctggatgcaatggcagagtgcaaggcccagatgcacctactgccctcaccacctgaaccccggctctgcggactgagtgagggcccccaagcctggctgttgcgacgccagagtcgcgctctcttgag

SEQ ID NO: 15777 - DNA, 572 bp, Homo sapiens
  misc_feature (1)...(572): n = A,T,C or G
ataggaaacttcgctcacctatccangnnnaaattctgagtcctcatggagggtgctgaggcagggaacaggggtgcagggacagtgatcagggcacctggtaccctgaccaacttgatgatggcatctcttttaagatgcccaagtctgcgcacttttattcctttattcggcccctagcaccccctccccaccccaaagaaggtcagttgcatgcgtgtggggatgtagctcaaaaaagaaataagatggagtggaaaggaaagaaaggaagaagcaggaattcaaggtgggtgggctgagcttggggccacctagcccacctgctccaatcaagggctggaacaaacctgaggccacttggagaggcagggctgggcagggacagggggtgggggccgaaatcacagcttccccatcagagccagatgtgtgaaggaaatgtcccagatggcagtagtttctcggcaaggaggggaatcctggagatggttcatgtctgtaatcctagcgctttgggaggttgaggcaggagaatcccttgagcccagagttcaagaccagcctgggca

SEQ ID NO: 15778 - DNA, 466 bp, Homo sapiens
  misc_feature (1)...(466): n = A,T,C or G
ggggnnaggannnannnnntttgtagtctttagtacgtgcggtggaattcgttagggtcgccaggccgagccgaggtgggacggaccgacgcagagaggaagggaagccacctggcctgaagatcctgtctctaagatcccattctgagagttttgctcttcttgcccaggctggagtgcaatggcatgatgttggctcaccacaacctccacttcctgggttcgggtgattctcctgcctcggcctcctgtgtagctgggattacaggcatgctccaccacgaccgactaattttgcatttttagtagagacgggatttctccatgttgttcatgttggtttcgaactcccagcctcgggtgatctgcctgcctccgcctcccaaagtgctgggattacaggttgtgagccactatgcccggcctctcttaatctatttctgagagttctgttacatattctgat

SEQ ID NO: 15779 - DNA, 459 bp, Homo sapiens
  misc_feature (1)...(459): n = A,T,C or G
agcncccccntnnnnatagaagatcgtagtcattgcggaggaactccagatttttactgtgagccacatctgagccattcggtctgaatgtcccactggatccctggtgtttgtgtggatctgcggtggagagtggggatttgacatctttccctacatccaccccccacacctgatctttctgacctgagacccttcaacattcagatgcagtgacatccgtgtcagtgtcggatgaagccatcacccacaccatgggccgctgctgggatgagaaccaatacttgttgtgcccccactcagaggtggccgtgaactaccattaccatctgatagacaggcagcaacccaggtacatgcaatgggggcctgggccactgacggaccatttgaatttcaggggccctcttcttctccaagcagtgggagagacaggactacgaaaaaatggctgtaatg

SEQ ID NO: 15780 - DNA, 482 bp, Homo sapiens
  misc_feature (1)...(482): n = A,T,C or G
aggacagaggcggggngccgngnncctgannaactgagaacatctccangncgnggaattccctccgagtcactctgttccttgactgtctttgtgtttctgtacctcaaggcactgaagctggaggactctgtccatgcccgtgtcaccctcgtgtgggagcctctgggctcggcaggtccacatttcatgagctgaggcgtgggccagggccatctggaaagggaactcggcttttccagaacgtggtggatcatctgtcgggtgtgtggtgaacacgttcagttcatcagggcctacgctccgggaaggggcccccagctgtggctctgccatgccgggctgtgtttgcagctgtccgagtctccatccacctttagaaaaccagccacttcttttcataagcactgacagggcccagcccacagccacaggtgcgatcagtgcctcacgcaggcaaatgcactgaaacccatgggcac

SEQ ID NO: 15781 - DNA, 459 bp, Homo sapiens
  misc_feature (1)...(459): n = A,T,C or G
agggggccgnnnnnatagaaaatcgtagacttagcccgagcggtggaattcggaggaggaggtgaccacaagccacaaggaaagaagacgaagtttgaatagcttctgtccctctgctttcccttttccatttgaaagaaaggactctggggtttttactgttacctgatcaatgacagagccttctgaggacattccaagacagtatacagtcctgtggtctccttggaaatccgtctagttaacatttcaagggcaataccgtgttggttttgactggatattcatataaactttttaaagagttgagtgatagagctaacccttatctgtaagttttgaatttatattgtttcatcccatgtacaaaaccattttttcctacaaaaaaaaaaaaaaaaaaaaaaaaaaaaancccggccctttgaatttaaagggcccctttaaacccctttaacg

SEQ ID NO: 15782 - DNA, 452 bp, Homo sapiens
  misc_feature (1)...(452): n = A,T,C or G
acagaatttcgagccccttcnnnannnnnncaattcctgggattttggggaaagacggacttaaagcagggatcgaagctggaaatattaatataacctctggagaagtgtttgaaattgaagagcatatcagcgagcgacaggcagaagtattggctgagtttgagagaaggaagcgagcccggcagatcaatgtttccacagatgactcagaggtcaaagcttgccttagagccttgggggaacccatcacactttttggagagggtcctgctgaaagaagagaaaggttaagaaatatcctctcagttgtcggtactgatgccttgaaaaagaccaaaaaggatgatgagaagtctaagaagtccaaagaagagtatcagcaaacctggtatcatgaaggaccaaatagcttgaaggtggcaagactatggattgctaattattcgttg

SEQ ID NO: 15783 - DNA, 463 bp, Homo sapiens
  misc_feature (1)...(463): n = A,T,C or G
gggtgcccccngnnctttcccttgatacctccgccctgnctgattagcanagngcggnggaattnnaanaagggatttgagggaagaggagagtttaaaagtcccatatgaatgtattctctatggcacatttttatatgacagtcttctgaaatgcctgcagaaagaaatgagtcttagttgctgtaggtcctgagatgggcagagattatgagagcgagcatcacatagacttggtgctatggacagaattgtgttccccaaaattcatgataatttcgtttagctaatccacaaggtgatggtatttagagatggggcctttgggagacaattgtgtttagatgaggttatgagggttgggctttcataatgggattagtgcccttatgagaaggggaagagatattatggctctctcattctctacccttctccatctctcactttctccccctttctg

SEQ ID NO: 15784 - DNA, 480 bp, Homo sapiens
  misc_feature (1)...(480): n = A,T,C or G
gggttccnaannnnaggaagcctgatgaccntnngaanaactgagtccctcgtccatgcggtggaattccagtcccctcaccatagaagatgagaggcacatcacatctgtaacaaacctgaaaaccttgagtattcatgacctacagaatcaacggctgccgggtggtctgactgacagcttgggtaacttgaagaaccttacaaagctcataatggataacataaagatgaatgaagaagatgctataaaactagctgaaggcctgaaaaacctgaagaagatgtgtttatttcatttgacccacttgtctgacattggagagggaatggattacatagtcaagtctctgtcaagtgaaccctgtgaccttgaagaaattcaattagtctcctgctgcttgtctgcaaatgcagtgaaaatcctagctcagaatcttcacaatttggtcaaactgagcattcttgatttatcagaaaa

SEQ ID NO: 15785 - DNA, 471 bp, Homo sapiens
  misc_feature (1)...(471): n = A,T,C or G
acttgaaaacanctggagaacctaggaagngcggnggaattcgttctctttgttaatgttcacaatcaagatcttgggctgagaagaggcccttcacccaaggagtttgaagtatcacagtgtgtgggaaggtgggaaccaggatacccattcatttccaaccgagacacagagaagtgagtcacagaatttgagcccgctctcttgactgcccagccagagacactgatttctgtaacctcttcacttgatcctgcctcttaagcattaaaacattctcctaaacctctgagtgttttgtgggttctgggtgttttgtacattttagccaagctaaccacttgtctgcaagtactgactttcctatgaattctttgaagattattgagtcagaaaggaaaaatatagccccaaattcccaggcttttaatgcattacattaactgcctattgaaatgagaagttcttcan

SEQ ID NO: 15786 - DNA, 482 bp, Homo sapiens
  misc_feature (1)...(482): n = A,T,C or G
gatgcccnnaagtnngnaaaatgagaccatagtcagngngcnggaattctccaaccctgtctgatacccaggcccgtttctcacctgagcgcaccaccacctggcgtgtagaatctccaggaagcctggctgcagcttcccatttggttacgaggttggagaaaaagtcaaagtcccctcctgggctgtcttcatcatactccgcagtcagactgggctggtagtaagctgccggtggaacacaatcatttgccctgggtgtccttggtcctgcctggctctctgtagtggaggctccccttggcatcaccttctctggcccttaggatctccccatttggagacagagccatttggatattttccccttgaacttctccatgacctgaagcgttccttccctggaggaactctttggttgcagggctaaacttagaggctgctagagtgtagtggttaagaacaggaacttgggtaccagg

SEQ ID NO: 15787 - DNA, 482 bp, Homo sapiens
  misc_feature (1)...(482): n = A,T,C or G
ggctcgagcacgnannnnngnnattgannaactgagaacctactccangtggtggaattcttcagatttaactcttcactgctagacccagttgtgttcaactttttacatattattgccaacacactttatctctctgtgtacagtgttaatctgatcttataaatctatatttttttctttaagcaaatttttgttttaaaatttgaagccaatcataaagataatatagcataagacattttcttttctaaaaacaatcagcatcattttaaaaggatgaactaatacaggtgtatgtaatagcagtgtttccaaactggcaatttatgctttaaatttaaaaataaggtcatttttctccatcaggggcaaatgtttacttgtaattttcttcctacagttcgtgttaaattactttttactattattatattgtaaactccttgggatttggcaccatttaaaaattcatctttgtn

SEQ ID NO: 15788 - DNA, 483 bp, Homo sapiens
  misc_feature (1)...(483): n = A,T,C or G
ngtnccgagccgggggngnttttnaattgaganactggtcactcgtcgnggaattcaaaaataggaaattgtatttatttcatgttagttgttcttgttggttttaactttgaggcacattatcatagcacctaacccattctgttaagtttccagtttgcttgtttatatttcttgacagactataaactccttgagggctagagacttatcttgttcactagagtatttcatttattataaacagtatctcatgtagttagatgcttaattagtggaaagaaagagagacataatatcaaaggtaaaaaatgattctctctaagtactgaagttatagctggtgattaatcattgttaccattttgaaaatggtgaaattaattcccagaaggaaagagaatacaaaaacacaagtcatggtgctttgccatgagtgttatctctgagtcttaacttgggccctctgtcttgcttcctagg

SEQ ID NO: 15789 - DNA, 455 bp, Homo sapiens
  misc_feature (1)...(455): n = A,T,C or G
gggccgatccttaatgggatcattaatggagctccgaagnggcnggaaanctgctctgacacgccctgaggccttcaatgaatatgttatcttcgcttttaccaaccgtgttcctgcctgactacctgaagggactcttcaggagtgtgccggccagccggcccagcgagcagctgctgcagcaggtgtccaagctggcttcactgcagcatcgcgccaaggaccacttctacctgccgagcgtgcgggaagtccaggagtacatcccagcccagctctaccgtacaacggcaggctcgacctggctcaacctggtcagccagcaccggcagcagacacaggcgctcagcccccaccaggcccgtgcccagtttctgggcctcctcagcgccttacctatgttcggctcctccttcttcttcatccagagctgcagcaacattgctgtgccagct

SEQ ID NO: 15790 - DNA, 472 bp, Homo sapiens
  misc_feature (1)...(472): n = A,T,C or G
nattgagaattgatgnactactagcccagngcggtggaattccttgattgaggcattttgcccctttgagttaaagggtctcgatgaactacaaatatgccttgtggaagacttaacaacaacaacaacaaaatgagagaagtcacactgctaatgagaaacaatgtgtgatctaggaaaatgccaacccaacttctgactttgataaataaactgagaaactctatcttgaccccaagctgagtgctttcttgagatttccaaggtctgaggattcttttgagtggaatgcatcatggagttttcggggactgggctctgaggcaacctggctcctctacaaccaaattcttttgagaccttgggacagcttctgctcttcttagttttcataggaccaaagaagtggtaaatacctgaagcagcagcacagcaagtggataaaagcacagactctggagccagcctgtct

SEQ ID NO: 15791 - DNA, 447 bp, Homo sapiens
  misc_feature (1)...(447): n = A,T,C or G
ntggtnttccaccaggangacgttaaataggccggaananncgccngaaactcctttttgccagcagccagtccatgagtcaccacaacttcatctaaatgagggcctggcagggagagagccagactggtctgcttcttccatgtcctgccacaggttacaggatcatgcttttgattttagtaggactcggaacattcaagatggtagtgagggcacatgaaactcacttcaggatgaaatctgggcagagacttattaattaattttgcatttactacctcagagctcagaagaaactccgaagtcagcatttgctttactctttctttatgattgcatctgaccgcaccaaggtgggccatgcgttgtttggtcttatacctgatgaagaaatggcaacagctgacagaaatgggtacagctcatcaaaaatgtgcagcaccg

SEQ ID NO: 15792 - DNA, 457 bp, Homo sapiens
  misc_feature (1)...(457): n = A,T,C or G
nttcgtagaacactcttgagngcggtggaattcggacctagggcaatgtttctcaaactttgctgcatgttgggatcacttaggaaatctttaaaaaatactgatgcccgtctcctaccttctgatttaattagggtttgaattggactttgggattttgtttttttaagtccctagatggtttttaatgggcaacaagcttgtgaaccatgaacttaggggactagagaagtcaagactggagagactgtccataataacagaaagatgatattttggtggcaccggtgctgtttgtcccactcttggtacaactgtagggtatgtgcggattcttggcctccggcctcccctatcctcagcgggcccagcctcctctgctctccagtcttgcaaggccctcggtgctttcctcttcctcctcggtgcaggctgtggcttgccgtggctgcagccn

SEQ ID NO: 15793 - DNA, 462 bp, Homo sapiens
aaacaggcaacatggacaatttaaaggtgtacaacatccgaggttccatttcaccctcaggcagcacggagtggacaagagatggggtctcactttgtcacccaggctgggctcaaactcttggcttcaagcgatcttctcgccttggtctcccaaagtgctgggattacaggcttgaactactgtactcgactgacttttcctatttctaatgtcagcatgaagaacacaagaagtcagcttcaaagacggagtctctctcttgttgcccaggctgaagtgcactggcgcaatctcggctcactgcaatctctgcctcccaggttcaagaaattctcctgcctcagcctcccgagtagctgggatttcagacatgcaccaccacgccagggcatccagcaatatcatctattctccactttgctaaatcttacctttggcagagccttcatgaacaagatt

SEQ ID NO: 15794 - DNA, 478 bp, Homo sapiens
  misc_feature (1)...(478): n = A,T,C or G
tgggttccannananagnaacaactgagactctaggacagctgatggacctcctagctttctgcagataacaaacaagaaagctattccaagactcagatgatgccagctgtctcccacgtgtgtattatggttcaccagggggaactggcaaaagtgtgtgtggggaggggaagggtgtgtgagtggttctgagcaaataactacagggtgcccattaccactcaagaagacacttcacgtattcttgtatcaaattcaataatcttaaacaatttgtgtagaagtccacagacatctttcaaccaccttttaggctgcatatggattgccaagtcagcatatgaggaattaaagacattgttttttaaaaaaaaaaatcatttagatgcacttttttgtgtgttctttaaataaatccaaaaaaaatgtgaannnnannaannnaannaaaaaaaaaaaaaaggggccccttttgt

SEQ ID NO: 15795 - DNA, 491 bp, Homo sapiens
  misc_feature (1)...(491): n = A,T,C or G
natcgagatcactagcncagtgtggnggaattcctagaagtatctgccactacaggttgagtataccttatccaaaatgcctggcaccagacgtgtttcagattgcagatttttttcacattttggaatatctgcatgtaatatcagttgaacatcccaatgtgaaaatccaaaatcctaagtgctccaatgaggatttcctttgaacgtgacctttgaatatcatatcagtgctcaaaaagttttagattttggagaatttcagattttagacttttcaggttaggaatgctaaacccataaaatgcaaaacagtgcagtgttttatgaagtgagtctgcaaatcttgcaaaagacataggatttcctgaagttcatgaaagtgattttttggtgagctgctccaaccacaaagcctctgaaaatatggcaaagtgaacgtctagtgggcttccaccagctttcaaatgaagaagtgaaaataaaaagag

SEQ ID NO: 15796 - DNA, 466 bp, Homo sapiens
  misc_feature (1)...(466): n = A,T,C or G
agagctgcgngttttaactgatcgatagcatggccaggacgnggaattcggntcgaggccctttctataagttttcagtacaccttaaacaggactaaaaattctttattagtgtgctttcaaagaattttaaaacatgttggactcaaagatgaatttgaagtgagttaattataatactggaaaacttaaggttagcataaaatagtttatatatatcccctgccccctttgggatttacttccaccatcaaatcttcaactgttagaatttcacttaaaagtgaataactgccatacatgttttcttggcatcttcatttacagaaataacatacagcatctaaagcaagttctgtccctcttaatgtgtatgacatctttttaagtagctgatcagcaataatagccaccagttgactaggtcagcctgatatactagtggattactggccaagataaaaag

SEQ ID NO: 15797 - DNA, 464 bp, Homo sapiens
  misc_feature (1)...(464): n = A,T,C or G
agtgcgcgngttttaatgaattcatggcatngtgcnggaactcctatctgggcacctgaaagagagcgccaatcgctgctggatgggatctgttagcatcagttccacgctgctcctggaggccatgtactctgccatgcactccactggacccaccttcattcagggctcagtccaggaccagccatgggaagcctccctggcctccacagagtccactgctccctcttctgtgcccctcagtccctgggctccccccaccttcagccctgaccaccttgtggtgttcttgtcaaaatccccagtaaaatccgacattcctgagacaggtgatcaaacacttactgagtgcctactgtgtgcaggcgcacatttggtgctttaacatgttactgcatttagggcacacaatcatactatgaagggggtgtttgtactcccaacttacgggtgagcaatttgag

SEQ ID NO: 15798 - DNA, 486 bp, Homo sapiens
  misc_feature (1)...(486): n = A,T,C or G
gggggcccnnaatcgtagaccactatcgagngccgtggaattcggcgtcaaagaatccagtcagtgctaagatatttgacccaggagaaaagaagaggggtgctaaatgacaagaacgcaaagactgatgcaaagggctcctgaagatgcttcagaattttggcaagtctcctctgtccctactttttgtaggctttcctccttccggacactttagtactccttcctgcataccccctcactgtgagcacagagagagagatcttggaaggcaggtggaaagcagcagaataaatttcaggaggaagtaaaagtcaggtgaagggaataaaaatgagacttagcctaatatccagaaaagggattggactagatggagcaggaagagaaatagctatgcaggtgaatatactgaaggaatttttaaaaggtagccatgggtctacatattgaaaagatccctatattagaaaataaaaggccaat

SEQ ID NO: 15799 - DNA, 601 bp, Homo sapiens
  misc_feature (1)...(601): n = A,T,C or G
tgcttctcnaagggnaaccnnnttttgaaaaccccctagaataactatccagagaggagcaattcgnntttattgcagtgatgtttttccaataatttaagtaattctcttcctagtataatacagttttcataaataatgtttacttgctttctttatattttcaaataaaattaaaatgctcgagcacttcctttcagaaagttataaaattaaaaataattattttaaatgctcattcaaatgtgtctgtatacttgctatgcccctttttctataattccaaactgagactgatttttcagagatttttaactttaataattttaaatctagaatcaagtgaaacagatatgttaaatactgagtctagttttcttccatcttatggagcttcatggaataagaaactaatctagtgcaaatgaagattaaatatttctgggtgatggagagatagtcaacaaatttatttatccatcctctgcacatcagtccactggagcaggagttctacacattataaatgtaatgggatcagcctagcattggttggggttcttttgttgattttttagaatggnggtggcggcctaagtgg

SEQ ID NO: 15800 - DNA, 463 bp, Homo sapiens
  misc_feature (1)...(463): n = A,T,C or G
gtgcggccggnnaaaattgaacctanactcgtacgcanngncgnggaanncgnnntttctccttattaagcttccttaagaattcagaatatctacactcatggtctgattaaacctttttctttctctttctttttcttttgctttttttttgagacaggcttgctctgtcaccaggctggatggagtagtgcgatctcggctcactgcaacctctgactcccaggttcaagcgattcccctgcctccgcctctcaagtagctgggactacaggcatgcaccaccacacctggctaattttttgtattttttagtagagatagggtttcaccatgttggccaggatggtctcaatctcctgacctcgtgatccacccacctcagcctcccaaaatgctgtgattacaggcatgagccaccgcgcccagccaaaaacctttttcttatatgagttggagggag

SEQ ID NO: 15801 - DNA, 482 bp, Homo sapiens
  misc_feature (1)...(482): n = A,T,C or G
cggggnnaatgagacatgataaccgtcggggaancctctaaaggaatctttgtacagagtctaatccctttctatgtagccaccagcatgacagcacccagcaactttctgcacaggtgctcgtggttggtgccttcgccaaaagtctatgcacatcatgctgtttctactcttgggatttccaaaaggaccacaggatattggtcccattctattcagtttctttttgcacagtatatgcctgaatggctctgggtgtggggagcaaatattctcaaccgttcactacgtaaggaagccttatcctgcacagcctgagtctggatggccacttgagaagttttgccaactcctgggaacctcgatattctgacatttggaaaaacacatttaatttatctcctgtgtttcattgctgattattcagcatactgttgattcgtcatttgcaaaacacacataataccgtcagagtgctgtga

SEQ ID NO: 15802 - DNA, 467 bp, Homo sapiens
  misc_feature (1)...(467): n = A,T,C or G
ntcgtagacctatgcangcggggaatctcagatcccggacaaggctggaaaggtcaaagcaaggttacataaaacttacaatgctccaacacccaagacccccggtctccacctcaacatggcataggcattaggttggtgcaaaagtaattgtggtttttgctttttttttttttttttttgaaacccgagttttgttttgccccctaggctgaagggcaggggcccggcctcggttaattgcaccctccccctcccgggtcccagggattttcctgcctcacccccttaaggggcgggggtcccaaaccccccccccccccccgggaaagttttttggcccttgggaaaaggcggggttcccccatgtaaggcgtggctcaaactcctgacctgggaggacccccccccctcgccctcccaaagggctggaataacggggggaacccactggccccggttaaaag

SEQ ID NO: 15803 - DNA, 463 bp, Homo sapiens
  misc_feature (1)...(463): n = A,T,C or G
gccggcgngtnnnccttgatcgatagcntagccangncgnggaattcgaagcttctgctggcagctcgtgcaactgctgccattgaaaaccctgctgatgtcagcgttatatcctccaggaatactgcccagagggctgtgctgaagattgctgctgccactggagccactccaattgctggccgattcactcctggaaccttcactaaccagatccaggcagccttccgggagccacggcttcttgtggttactgaccccagggctgaccaccagcctctcacggaggcatcttatgttaacctacctaccattgcgctgtgtaacacagattctcctctgcgctatgcggacattgccatcccatgcaacaacaagggagctcactcagtgggttcgatgtggtggatgctggctcggaaagttctgcgcatgcgtggcaccatttcccgagaacacccat

SEQ ID NO: 15804 - DNA, 453 bp, Homo sapiens
  misc_feature (1)...(453): n = A,T,C or G
agggtctccacatgataccccaactgangatcctcgcanagngcggnggaantctcactttgggagctgcaatgaggaaatctgctccaggccattttcatcactactcacttttgctcgctcccctacaatgtgccacgctgccccaggcctggccagccttgcgtaagcctgccaagcactggttgatttccctccctctccccctcgccatcctaaatacaaatacccctcacatccagggctgggtagccatttaaatacaaccatactcagggattcttcagccatcgctgatctcccgcgcagaccgttgtttcccccaaggcctcaccctgagcactgggcttctgctttctgctctggcccacatgtgactcttgatattctccaaagacaccagccaattaaaaagcgtcacctgaaaaaaaaaaaaaaaaaagcggccgttgn

SEQ ID NO: 15805 - DNA, 491 bp, Homo sapiens
  misc_feature (1)...(491): n = A,T,C or G
aggcggccccgggngnttttntttgagaccattggacgtgcggtggaattctggatctgaacaccaccttccttgagaacagccaggagcccacttggattcaagagtgactttgaacttgttttcacacctccaacagactctcattaagattcagttatttccgctccccagccccacactcctttcagattatcgttcatgggcgtaagtctcttctcagagttaacaagtctttggtagtcatcctctgtccaaatattgtatattattaaaaggcatttttaataattaccagaattagctcaaacctttagggatctttcagccatgattattaaggatatgtatgtgaatttttgggaaacctctcggtgctggatgccagcctacagcagggtccattgctggcaatggatggcccaggaaggtccctagagatcactcacttgaaaaatgagggtcccatgaaagtatttggttgccttctg

SEQ ID NO: 15806 - DNA, 459 bp, Homo sapiens
  misc_feature (1)...(459): n = A,T,C or G
tggcggcgnttttnactgactcatagcatngngcaggacnncggntgcagggggtccgcttcctcagttccagagaggtggatcgcatggtctccacgcctttcgtttgcctcagctacgttcaggggtgcaccaaaaagcatcttaacagcaagactgtgggccagtgcctggagaccacagcacagagggtcccagaacgagaggccttggtcgtcctccatgaagacgtcaggttgacctttgcccaactcaaggaggaggtggacaaagctgcttctggcctcctgagcattggcctctgcaaaggtgaccggctgggcatgtggggacctaactcctatgcatgggtgctcatgcagttggccaccgcccaggcgggcatcattctggtgtctgtgaacccagcctaccaggctatggaactggagtatgtcctcaagaaggtgggctgcaagg

SEQ ID NO: 15807 - DNA, 488 bp, Homo sapiens
  misc_feature (1)...(488): n = A,T,C or G
ggaagcccnnnnaggcgncctttgagcccctngattgagcaccctagnccgngcggtggaattcgtctgggcccctgcacttcccgtgcttgagtcacgtggctgcatggccgggcgctggccggatggaacacctcccccagcaagggaccagggaccagagccctggcctgccctgctgagccctgctgtgcagagggcctggcacagatgaatttgagattttgccgcaaggtgttagcacttcacacccattgagtctttgagattttaagtgaatgtaagcagaaaaagtcagatccaatttacagaaatcagagttagctacagctaggactcgtttggttggggttttttagtttgtctttctaaagtcatgtggaccttaatttaattacaaaagtctaccctggtggtcataaaataggcaggcctatgaagaaaggccttttactcttccatctcgtcccagccccgagttgacccac

SEQ ID NO: 15808 - DNA, 484 bp, Homo sapiens
  misc_feature (1)...(484): n = A,T,C or G
agggggaatgagacattgatccatgtcggggaanncagngnngtttattgaagctactactttgtagtgattgataaccacatcaagtatcattaaggggccccttgacctttgtgggggcagttgggtggggcacaaaagactccttggatcacctgtgtatcttgctggttccacttaccattaacagcaacaagaaatatcacctaaaattggggaaatgaatgaaactactcttgatgaaatatatactagtgagaaataatattaaataaattattcagtgggacaaaaaggtgagttttattctatcttaactgtctacaatacatatgaattgtgtggaggagccttaagttcatattctgcaccttgaggacaaccatatgagaaattttatttcaggtcggtcagtagaatttatgaagagacaggatgataattatgaggaatccctacgaaaagtgggaggaaaacaacagtn

SEQ ID NO: 15809 - DNA, 467 bp, Homo sapiens
  misc_feature (1)...(467): n = A,T,C or G
agcgcggcgngttttaatgagttcatctgcatngtgcnggaattcttttcctgcatccgggcctgagagtgcaggcttgagggaagcatggaggtccatagcatgccccaggctagcccgagttgttcgtcgcccacccgggattcctcaggagtcccagtgtccaaggagctgctgacggcgggaagcgacggccgcggaggtatatgggacaggttgctcatcaactcccaacctaagtccagaaagacctccactcttcaaacagttcggatagagaggagtcccttattggaccaggtacagacatttctcccacagatggcacgggcaaatgaaaagctaagaaaagaaatggcagctgcaccacctggtcgtttcaatattgaaaacattgatgggcctcatagtaaagttatacaaatggatgtggctttgtttgagatgaatcagtcggattcaaaagn

SEQ ID NO: 15810 - DNA, 466 bp, Homo sapiens
  misc_feature (1)...(466): n = A,T,C or G
gtggacctgagnncctcgagaacctacgccagngncgnggaattcgagcgtgtgactgcggaagctgtgaagccacgggagacctcggagcctagagcagcagctcagcgcttctgtgagaaattccctttcctttgaagttttttgccctttatttgcatccttaaagcagttcgcttgttttccctccttggaaaaattaattatgatagtattggcttatttatgatcaccaagacttgtattcccttagcatagcttacagtataagttcacacttagctttgagcaccagcaccaggaagacagctttttaaaattacttacttacgtaccatcttgttccaaaaaagatttgtggtggtacaaaagctatatagaatacagaagatgaaaaaggaattgagtgtatccagagggtggaagcagcccaggtgtcccatcaacagataaatggataaacaaa

SEQ ID NO: 15811 - DNA, 440 bp, Homo sapiens
  misc_feature (1)...(440): n = A,T,C or G
gcgtcttccaatgataccttagagagtctcgaananncaagngngaaagagcatgtgaatacagcatgggaagattgtgttcacagattttttttccggcacgtccttagagatccgatgtatagatgatgaccaccaggggctgtctgcaatacgaaaaattcctgcttgcctgcctgcctgccaatggccctgaatccagcttaggttacttagttcagcatcaagttcttcttaaatgttgggaatcagttattcaaataaaaattggtattgaggcgaggctgaaatctgccaaaaacagccaacatgatttgactggaccttttacaggaagctagagataaatttctgaagagaactatctgctattatataataatgttttaaattcaaactagtaaattttagtttgtcttcagagtttaaaaggttttcat

SEQ ID NO: 15812 - DNA, 481 bp, Homo sapiens
  misc_feature (1)...(481): n = A,T,C or G
ngactgagaccntggcagngccactgagtatcctggaacgacccctgaatatataaaacacacacgaagagcaatagtttgccccttttggaacgacccctgaatatataaaacacacacacgaagagcaatagtttgccccttttggaacgacccctgaatatataaaacacacacacaccccgcgcactctcactccttttccaggtttcatagacttggtgagggatcacagcttagcatgggtgagagatgatttaaagcacagggagattcttgtcacattggggtctccaaagctagaatgggatttcatgtgcttggaaacttgcagtagaatcagggactgacatcgcagttcctctcctctcttcattccctcacagcagattggccggcaccaatcttagtcaagagtggctgtgatcacatttgtgatcaattatgtgagaattttatataattgtcttcatttcaattn

SEQ ID NO: 15813 - DNA, 487 bp, Homo sapiens
  misc_feature (1)...(487): n = A,T,C or G
ngggcgtccnaatcgagaccntgttgtagaccatagtccgtgtggtggaattcgaccgcgtccatgctggctgcggcgcccctgcatgagcaaaagcagatgattggggagcgtctctacccccttatccatgatgtccacacccagctggctggcaagatcacgggcatgctgctggagattgacaactcggagctgttgctcatgctggagtctccagaatccctccatgccaagatagacgaggcagtggccgtgctgcaggcacaccaggctatggagcagccgaaggcgtacatgcactgaaaccagaaaaggaaatcctcgcttccatggctgccaaaaggacagtgtttctggctctcagccctaaggccctgcaaactctaacttatttcccaattagtctgtatctatacttgggctctgtatgtgaatgaaggttggtcacccatccagcctattaccttttgctttgtgtattaaa

SEQ ID NO: 15814 - DNA, 461 bp, Homo sapiens
  misc_feature (1)...(461): n = A,T,C or G
gtgctgggttttnaatgacttcatggcattggcgggaactataatagctcctctggtgcaagtgtggtagctattgacaacaaaatcgagcaagctatggatctagtgaaaagccatttgatgtatgcggtcagagaagaagtggaggtcctcaaagagcaaatcaaagaactaatagagaaaaattcccagctggagcaggagaacaatctgctgaagacactggccagtcctgagcagcttgcccagtttcaggcccagctgcagactggctccccccctgccaccacccagccacagggcaccacacagccccccgcccagccagcatcgcagggctcaggaccaaccgcatagctgcctatgcccccgcagaactggctgctgcgtgtgaactgaacagacggagaagatgtgctagggagaatctgcctccacagtcacccatttcattgctcgct

SEQ ID NO: 15815 - DNA, 490 bp, Homo sapiens
  misc_feature (1)...(490): n = A,T,C or G
gtgggnnaattgannncactgatgacccttagtccagngcggtggaattccagtctcattcttgggtattctttgctaagtttctccttaagggttggagccattgtcttatgcaacagaatgttggcgctgtcaatcttgtccttgtgggaaaccagccccccttttttggatgctgtggatgagtcagttatgccccatccccactggttccctagaggctgtggccaggcagctaccccttcattttcccactgtcccccaggtccagatggctgtggaggccaagtttgtccaggacaccctgaaaggagacggtgtgacagaaatccggatgagattcatcaggcggattgaggacaatcttccagctggagaggaataaccatccctacaactcgaggatagccatcaggagcactgttggaatcagcaggcctctgtgctccctctgccctccagaactcagtgactcttgaacatggatgtt

SEQ ID NO: 15816 - DNA, 496 bp, Homo sapiens
  misc_feature (1)...(496): n = A,T,C or G
cgcgagtccccnnnganattaaacctaggggngccccgnacttgacgancatacgnaggnncncgnacncnannaganngaacaggcgtgtnngggcatcgnggttagtctgtcatcatttctcacacaacattgtactctgcnnattctgccttagtgcgaagtcttagacaggggtaaacttcggaacctaataagcannggaagttcgagaaagcccaataagtacttttttcatatgaagtcctgcagttggcactctttggtttccttcatcatcaatgtctnttgttgtctcagtcntttggctgaagcattttttgggaaaaccaacgagcaggtggttgaagtctgtacaaataccagcagtcctcatgctggcctctttcctaaagataactcgacactggctgtggacatctacaaagggggtgttgtgctgggatgttactttgggcctgctgcactctacatttgggcagtggggatcctggct

SEQ ID NO: 15817 - DNA, 468 bp, Homo sapiens
  misc_feature (1)...(468): n = A,T,C or G
ctgaccgccctggnnatgagantcatatccagtgtggtggaattcggggaagggggttatatttcgatgacgtactgcttttgcatgagctgcgaactctttttgttttttcattttttccatcttttaacctgtaaacagttaaatataaatagtatctatgatcatatgacctggttttaattggttttaatgtaaaaaagtaggttnntttttttttttttttttttttggggaaaaggggtttttttttttttccccccgctggaaggccgggggggaaattcggtttattggaccccccccccccgggggaaaaaaaattttcctcccctgggtttagggaaaatggggaataaccccccccccccccccccccggttttttttttttttttttaaaaaaaagggggttttttttttggggccggggggggttaaaaccccctccctaagggaaacccccccg

SEQ ID NO: 15818 - DNA, 466 bp, Homo sapiens
catcgaccccctttgccatttgagggcatcccaagctgcagtgcagtggcgccatcttgtctcactgcagcctcgacctctgggtttatgtgattcaccacctgagccttctcagtagctgggactacaggcctgcactgccacacctggctaattttttgtatttttagtagagacggggttttgtcatgttgcccaggctggcctcaaacttctgggctcaagtgattcgcccgccttggactcccaaagtgctaggattacaggcgtgagccaccgtgcttgtctctaattgtttgtttgtttgtttgtttgttttttaaagataattgtttaaatttggtataaagacagttatctaaaattgtggactggagaagtcttaaaaccaatgggatccttcatagttcttccagtattaaaaagatgaaggtgataattctcaccacttttgaaaaatattaag

SEQ ID NO: 15819 - DNA, 465 bp, Homo sapiens
  misc_feature (1)...(465): n = A,T,C or G
gcgctgcgnntnnnaactgaatcgatagcatatgcagngncgnggaattcataaatcattaattgaaaaacatttttatgagagcaataatgaaaaagagagctcaatttgtaagatacaagagacatgaattctggtcctggctgtaaaaagcaaaattgtgattctggacaagctctaagaaaggcagccttccttttctctctgcttgcctttaacatcttttctttatcttcgcagatttgcaattttaggaaagatttaaggccgggcgcggaggctcacgcctgtaatcccagcactttgggaggccgaggcgggcggatcatgaggtcaggagatcgagaccatcctggctaacaaggtgaaaccccgtctctactaaaaatacaaaaaattagccgggcgcggtggcgagcgcctgtaatcccagctactcgggaggctgaggcaagataatggcgc

SEQ ID NO: 15820 - DNA, 258 bp, Homo sapiens
agggttttaaaactagaccattcagatgagtctggaaatcccgggccctgccttcaaaccccggccccctccaggggacagttatttaaacgagtggccgggagcatctgccacctgctggggaggcagagaccctgcaatggccacctctttaaaagggcagctgtacagggctaggttttttcaatgaagtttctgtattaaaggagtggctctggaaaaaaaaaaaaaaaaaaaaaaccgcccgttcaattttaa

SEQ ID NO: 15821 - DNA, 486 bp, Homo sapiens
  misc_feature (1)...(486): n = A,T,C or G
gactgaatacctccgaannnccaactgatantcatggtaagngcgcggaattccctggccagctggacccacagctattctggctgtagcttcacatcaggcatcctggattagaatgccaacctggatgccagctgctttctaaatggtggccttgaagggtcaagggaaggcagccttcctggcacctcagtgccacccatcatggacgctggccggagtagctcagtggatctcagcttgtcttcttgtgactcctttgagttactccaggctctgccagattatagtctggggcctcactacacatcacagaatgtgtctgacagcctggacaacatcgaggcacctcacttacccctgcctggcctgtctccacctggggatgccagcagatgcttcctggagtccctcatgggcttatccgagccagccgccgaagccctagatccctttattgacagacagtttgaggacactgtccca

SEQ ID NO: 15822 - DNA, 492 bp, Homo sapiens
  misc_feature (1)...(492): n = A,T,C or G
tggggatgacccaggnnngnnncnaactgatgaccacattgaagagcggtggaattcgtctgcagnagtatactagagtttaggaaaatgaaaattttagaaaatatgttttgtcaccctgttggtcagaaagatgtctttctggttttaacgcatgcaggcatgtaaatatttgtctggagtcacagtattaatgaatgagatcttaagcatctggtgacatcagaactctgtgtcagccacttttatttgtatattgaaccctagctagtgccccaagctgcactattgggaatggattgtggctgaacagcaaatcaaaacaccagaaatatttttatatgttaacgtcatattatgttaatgttgctgaaaacaaaacctaacaaaccttgatgtaccagtccaataccatgtagcgctgagtgataaagttaaaatgtgctgtgcttcccacccttgtcagagggaagggtggctatgtgttatttt

SEQ ID NO: 15823 - DNA, 465 bp, Homo sapiens
  misc_feature (1)...(465): n = A,T,C or G
natggagaccatagaactgagaccctaggccgcgcggngcgacttcgcctgcccccggggcgaggctccccgcgcgggttcgcgtcccgtctgcagaggccgaggctgctgcctgccgggcagatgggtccgcctcgttccggctgcagctttcgccgccggggcttgctggctgacgggaactagtcaactggagtttttgttgacttcccacggttcaaaagggccttccagaatggggggctggaattaaatcttgggtctaacttaaaggaaggcgccatattattccataggtgatgctaatacctttgtgtttcgttatttgttttttaggaaacatgccctgaactgtcacagaatgaaaccagcgctcttcagcgacctgtgtgagatcaaagagaaaacaggtctcagcatcagaggagcccaggaggaggaccctcccgatccccagctaatgag

SEQ ID NO: 15824 - DNA, 466 bp, Homo sapiens
  misc_feature (1)...(466): n = A,T,C or G
acgcgccagngtgnaaactgaatgatagcatatgccgngacgnggaattctcaagttcgagctttctggctgcaccagcatgatgacataccgatctacattttgtgttgtatggaccgacgtccgatgctgctccccgcacagaaccaccaccctgccgggggagttcatgtgccctgacggcgaggtcatgaagaataacatgatgttcatcaagacctgtgcctgccattacaactgtcccggagacaatgacatctttgaatcgctgtactacaggaagatgtacggagacatggcatgaagccagagagtgagagacattaactcattagactggaacttgaactgattcacatctcatttttccgtaaaaatgatttcattagctcaaggtatttaaagctgtgtttctaactgggggataagattcccacccaattcaaaacattgtgccatgtcaaan

SEQ ID NO: 15825 - DNA, 483 bp, Homo sapiens
  misc_feature (1)...(483): n = A,T,C or G
agggtnnattgagactttgaccacgtcggggaanctgtcacattacctaaaactaaacttctcttatccagacctgcttgttacttgaaattccacagaatcaggaaaagaacagaaagagaaaaggagaggtgaagagtagaagctgggggaaatgaaaacggagaagaaaagggagtatgaggaggcagtaggaattagatggggcacggaaaggccacatttaaggccagcgaccctttttattttacaatttttgttagcaactttcttccttattcctgcattctcccacttcctctagtcattctgctttattctcctcttcttattttccgttggggtcccctgaactatgttggaagaaagtggtgtgtgagaggaataggaatgtctgctcagcgccaagaccccagctttcctatagtctatcatctctgaaattttacttacaaatagcccttttccgctaccagtactttg

SEQ ID NO: 15826 - DNA, 482 bp, Homo sapiens
  misc_feature (1)...(482): n = A,T,C or G
naactgtagccctccgcagngccactgagtcccttggggaggacctatacccataatagaattatggcactcatttctgacagtgatcaagaaatcagttatttccttactgttggaaggacattgtaaagtatgtggttatatgcagtgaaactgcagaaaatactcctggttgaggagttttcactttactacagtgatataaaaaccagcagtttttacactaaattttttaaagaaatattagacaaaaatatagaattaaaacctttggttccaaaatgggaaaggttccacgatacataaatcatttctcatttgctttaaaaaatttaaaagtgtaaaaattatgagagactttattcgttaacaatgggggtaaagagctatatacatgaaaatgagtcttataaaattaagtgaagtgcaaataaaagcactgctactataagacattctggaatggttgtttaataagggtn

SEQ ID NO: 15827 - DNA, 455 bp, Homo sapiens
  misc_feature (1)...(455): n = A,T,C or G
agcggccannnaggatgaaacttggagcctccgnncatgcgngttatgaaagcnngnanatnnaagaactaacggagagatcagtatgtagagatctgtgttacctaacatgttcagtttcaacacaaaaattgagatatgcaaagagaacagaaaagtatgtgtcctatatgacagagaaatgtaggaaatataaagttttgagggataccaaatttaggataaatgctaagcagctgttacaaatgtatgttcaaaaggctgagtgcagtggttcatgcctgtaatgccagcagtttgggaggctgaggtgggtggatcacttgaggccaggagtttgagaccagcctggccaaagtggtgaagccccgtctctactaaaaataaattggccaagcgtggtgggcgcctgtggtcccagctactcaggaggctgaggcaggagaatcgcttgg

SEQ ID NO: 15828 - DNA, 460 bp, Homo sapiens
  misc_feature (1)...(460): n = A,T,C or G
natcgtagaccactagtccagtggagtggcattcggagcgagttcgcatctctccttttcctggttagactctgttcaaccacattcttatgttggcagatctgcttccagattgatttttagagcaccatcactttcacattcctgattctgattttgttttgttttgtttgggttttctgaaacttaaaatgctgccccgaaaatactatatttttgagtttgtgttctgaaagcctccgtgctgctggatctttggggggaaatacaggatccttcagcactgaggtgtttaagatttgcaactagcaatgcaattttttctaaatatggggatatttacctttattaagaaattatactaaacattgatgtccttgatcattttatgttctcatattacttttgattctactatgattgcgtggnggngaacaaagatcattacaaacaaaaactg

SEQ ID NO: 15829 - DNA, 476 bp, Homo sapiens
  misc_feature (1)...(476): n = A,T,C or G
nggctgagaccctagccannggactgatttcgtctctgctttgcggaagggaatgtgtttttctcccaaacttgtttttatagctctgcttgaagggctgggagatgaggtgggtctggatcttttctcagagcgtctccatgctatggttgcatttccgttttctatgaatgaatttgcattcaataaacaaccagactcagttcaaaaaaaaaaaaaaaaaaccgcccgttcaagtttaaaggccccgttaaaccccgttgatcaccctcgatgggcccttttattggccacccttttgtggttggcccctcccccggcctttctttgaccttggagggggccactcccattgtcttttcttaaaaaaaggaggaaatggcttccctttgtcggagaaggggtcttttttttgggggngaccgcgangggcccccccccacgggcctcccaacagaaagggtgagtggcatctg

SEQ ID NO: 15830 - DNA, 489 bp, Homo sapiens
  misc_feature (1)...(489): n = A,T,C or G
gtgggcnttttggggcactgatgnaccattannccgngcggtggaattcgcacgatctgattttctggagagatgtgaagaagactgggtttgtctttggcaccacgctgatcatgctgctttccctggcagctttcagtgtcatcagtgtggtttcttacctcatcctggctcttctctctgtcaccatcagcttcaggatctacaagtccgtcatccaagctgtacagaagtcagaagaaggccatccattcaaagcctacctggacgtagacattactctgtcctcagaagctttccataattacatgaatgctgccatggtgcacatcaacagggccctgaaactcattattcgtctctttctggtagaagatctggttgactccttgaagctggctgtcttcatgtggctgatgacctatgttggtgctgtttttaacggaatcacccttctaattcttgctgaactgctcattttcagtgtcc

SEQ ID NO: 15831 - DNA, 483 bp, Homo sapiens
  misc_feature (1)...(483): n = A,T,C or G
cggggnaatgagactttgatcactgtggnggaantcctcnaggaagtgtccgtgggcagggggaggaatgaacaaaatggcgctgtttctttggctcagactcctagaatgcttgacaagacagaatttttttggaagaacctcatctcactatagttacttttttcacttttgttatatatgtatttattagagcatttgaatattggtacctttaaaagggtcatttggtgttttgctgttgagctggtttttgagtcatagatcttggcttcctttagaagccacttaacttccatacactataataaactgtgaacatatttttgttacctaatgcatccactgatgaacatgcaaactttgggcataatgtgaactaaaattgaaatggaaaatgttagtggccattttgcaacaatgaagaggatagcactttatctagatgaaaactggatttcttatctttgaaatatcttgaan

SEQ ID NO: 15832 - DNA, 486 bp, Homo sapiens
  misc_feature (1)...(486): n = A,T,C or G
ggtaaagaggggngaannnnnnnnnaattgannaactgcagtacctactccgtgtggtggaattcgccaaaccctccttcttcctagagcccagccagcaggcaggagttcctggaccctcaggacagtgaacttccagacctcagggcaggtctatgggccactgcaggagatgagaccagccttctgtgttcacctaacgatttatactgtgtatctgtctttgatggaattttgtaactttttatatttttttatgcaaaagcagcttcttaacagatggcattttctgtgactctaggcctcacaaaagagccagagttctggacccatgtttggagcatttgtagccttattctcttgcgtgtgaatctcttaccctgaaaaaaagccataatgaattaagccagactgaccacttgcttggagtgtgtgcttgaaaaaaccagagcaatactgttgggtattgtatcaggcttcagtaca

SEQ ID NO: 15833 - DNA, 487 bp, Homo sapiens
  misc_feature (1)...(487): n = A,T,C or G
nggctgagaacctcgaangncacttgnagtcctcgtaagngncgnggaattccgctcctccagaagaacaccaagcagcagaaagggcgcagtgagtgtacatcctgggagacctgcacgttctgattccacccagacccaagtggcaagccttgcctctgaagcggtcacaatttccgtggtacagcaggccctttcccgtgaagctgagaagcacctggaaaagagtaagaaaaattagaacgcaagtttttcatgctctctgatttccttaaggcagtagtaaccaaacttcaagggagacacctaaatagcaaaagtccccaaatgctgagtgttctagagctcaaacaagccatgagacaccagccagcagttattcgtgtacactactcctggccacagcctgcaagcacactatcactgtgaaggtcggtggtcactcagcacagtgtttccagaacagcaactctgctgtgcaacttgg

SEQ ID NO: 15834 - DNA, 456 bp, Homo sapiens
  misc_feature (1)...(456): n = A,T,C or G
nttctgagaccactagtctagtgtggcggaattctggattcataaacttcgcaaatttcttggatcagatgaataagataaggatagcttacaggaactctctacagaacagaaatgctttgttgaacacatcctttgtacgaatccattgccctgcaggcagactgctccaattcgaggattttggattgtacctgacattctgggacccacgatgatctgcatcaccagtacctatgaatgcctcatatggccgttattaagtacagtccatccagcgtctcctcccctgctttgtactcgagaagatgttgaagtggcagagtctcccctccgagtctggctgaaaccccagattcctttgaaaagcatattacaagcattctgcaacgtagtgttgccaatacagcatttttgaaagcttctgaaaaggacatatgccctcctcctgaagaa

SEQ ID NO: 15835 - DNA, 474 bp, Homo sapiens
  misc_feature (1)...(474): n = A,T,C or G
catcgaccccctngnnnatgagacctatagtcagtgtggtggaattcccaacatggtgaaaccctatctctactaaaaatacaaaaattagaaaggcgtggtggtgagcacctatcatcccagctactcaggaggctgaggcaggagaatagcttgatcccgggaggcataggttgtagtgagccgacgtcatgccactgcactccagcctggatgacagagcaagactccatctcaaaaaaaaaaaaaaaggaaaaaaaaaaaaggggagttttttgagaaaaacccctttaccaaagaaactttttttggggaaacagaatggtttggaggccttgctccttaagtggaccacaaaaataacttcttgcccaaaaaagggccttgcaaaaagctctgacaatttgggttcggatcccatctttagttttaaccaattatgggttaacctttcctccccacttattaaaaaag

SEQ ID NO: 15836 - DNA, 490 bp, Homo sapiens
  misc_feature (1)...(490): n = A,T,C or G
gtgggnnaattgagnccttgatgnactattanncagngcggtggaattcggaaattctacaggattaggatttctaagactactataggaattggttggcagtgccagctggctcttttttttaatattttattatttttgttaactttattatatgaaggcactggaataaaaggaacagacatccctttctaactgcactgcctacatgcgtattaaggtccattctgcctgtgtgtgctgtggctttgaactgtaacacctctaatcaattcaggagaaacacatatcatttaaagcaacataggctaacctgtacgtaacactgcagtattgatgttttactgcaaatcttatgggtctagataatcagtaaaagccatcttccatatgtggtgttagaacattgccctattggtttggacatctgtagaatatatatgaagacaatttctgtaatggttttaagagatttagaatgaaattcacn

SEQ ID NO: 15837 - DNA, 451 bp, Homo sapiens
  misc_feature (1)...(451): n = A,T,C or G
catagaccccnaactgagatcatcgaacangcggnggaattccttccttctctgcgctacctggcgctaatctttttactctagatcactgctactcaatcaaagcataatatgaggcacagataggaccttcatgtgtaattttaatttatctagtatccatatttgaaaaaattttaggtgaagttaaatattatatttgatttaaatcaatataccaaaaatagtatttaacatgtaatcagtataaaaagttattttatacatttttttgtttcatactaggtcttctaaatccagtgtctattttatatttaaacagcatatctattttcagactagtcaatttgaagtgcccaatagccacatgtggccagtggctactgtattgaacagaacaggtatagatttagtggtgtttgggtttgttatatgtatattttactggaag

SEQ ID NO: 15838 - DNA, 502 bp, Homo sapiens
  misc_feature (1)...(502): n = A,T,C or G
ccgcccatcgannnccnnttnnnnntttcgagaccactatccatgtggtggaattcgaagtttgatcccaccgtgctgcagtgccgattccagcacacgtgcactccagttcctgcctcatttgcttgcatgctcgctcctgcaaggagttgagagtggcaggctgaataaacgaggcacccgtcacaagtcccacaaaggggtcagggaaacatcctgcttcagttccatcaaaggcaatttaaaagcttatgcaaaaaaaagtattactatggctgcgctgtatacaaataatcaggtcaagtataataaagaaaatcagccctgccatgatttgtctttagtaaaaatgggaaatgggagagagaagaattatgtttcaaaaaatgataatacacctgttgttagattctagtcttgcctaatgtttttccatttttattattttctacagtttcgactgaattctaatttttcttggctacaggtcttcaaaagattg

SEQ ID NO: 15839 - DNA, 463 bp, Homo sapiens
  misc_feature (1)...(463): n = A,T,C or G
ggggggaatgagaccactggaagttgagngccattcgaagctncaacacatagttgtggtacatgatagaactcttacaagaacttaggagtctgccctcagaaggcatggtgttaaattggatgcaaagaatctgggccaggcttccggagctttcattcacctattagcacactcatttgtgtatccattttctgtgaagggtttatatagggcacagatttcctgtttgaagaacgatgggtcagattaatttaacttgatgctgtaaagcaagcttgtccaacccacggtccacggactgcatacggcccacgatggctttgaatgcagcccaacacaaatttgcaaactttcttaaaacattatgagatttttatttgagatttttttttttttttagcttgacgcctattattagggtctgcgaatttcgtgtggcccaacaaaatcttgttcttgg

SEQ ID NO: 15840 - DNA, 470 bp, Homo sapiens
  misc_feature (1)...(470): n = A,T,C or G
aggcgcggcgngngnntatagatagcgtgcctangccgngacgnggaattccttctggactgtgaagaaagtaaccggaagactcctggtgggccttcgatggtggaaccagatagatgaagatgggaagagccactggatctttgaagccaggaaggtctctccgaatagcattgctgccacagaagctgaagcacgaatcttctggctgggcctcataatctgccccatgatatggatggtgttttttttagcaccttattttccttgaaactaaagtggctggctctggtggttgctgggatctctctccaagctgcaaacctgtatggctacatcctttgtaagatgggaggcaacagtgacattggcaaggtcacagccagtttcctgtcccagacagtgttccagacggcctagcccagtgactttcagaagcctggctcgaagggctggagactaccagcatt

SEQ ID NO: 15841 - DNA, 466 bp, Homo sapiens
  misc_feature (1)...(466): n = A,T,C or G
nagtgnaactgaganactgagancccgtgcgggaagtcaaattactttaaagcttagcagctcaacacacgactgacttggaaacatcacgaaacctctgcaatgattacaccaccttgtactttgctcccatttctggtctctggattttaatacctttccttccttctgagatggaactggaagctgagaagtgatttgttaactcaagcgcagagcttcataatgtcctttggttaaatttctacctattactgtcagactatattctggttcagtactattcaaaaatttgggaggaaagacctctcatggtcactgttcctaaagaggtgacatcaaagattttaaaaagatgaaccttggtagtgtagtgctgtaacttgattgtagtggttacgagagtctacacgtgctccaattgcgaacacacacatacacaagtgcacgtaaaactagcctaatc

SEQ ID NO: 15842 - DNA, 477 bp, Homo sapiens
  misc_feature (1)...(477): n = A,T,C or G
gggggccggnnnncccccaatagtnatcattagacagacntgcggaattcctttattcacataagcacaatatgtgttttatttataacttcataacaaacttataatataataatttaccttagcagacatgcaaaagcttattcttgtgtgacttactttctttaagctaataatataaaaataaatatgtatcttaaaaatctataataaaacattagaaattaaaaaaaaaaaaaaaaaaaaaaaaaaaaaaaaaaaaaaaaaaaaaaaaaaaaaaaaaaaaaaaaaaaaaaaaaaaaaaaaaaaaaaaaaaaaaaaaaaaagaaaaaaaaaaaaaaaaaaaacaaaagaaaaaaaaaaaaaaaaaaaaaaagagagaaaaacaaaaaggggggggggggggggggcttggttcccccccccccctagaaaaaaaagggggggggtctcgctctagaggaaaaggagggggag

SEQ ID NO: 15843 - DNA, 492 bp, Homo sapiens
  misc_feature (1)...(492): n = A,T,C or G
gcactgatnaacctccgnanngncactgagnttcctcggccagngncgnggaattcccaggctctgtgaatagggtgggagctatagagtcctgctgctggcctcctgcttcctcctgggtgggctttctccctcagttagactccattaggggtttggacagttccttcctgatctcccactcagaacttcaactaccagtcccaaagctatgtgggcctatattgcatggtgccaatggtggctgtacttataaagatggcttatctaccctagtccatattttctccatactttcccatttctcatgagactaaggtttggccacattcctggggccaggatgaccttctgcccttgctggagcctccctgttttccaatactccagtggagagtattcagaacactgctgctagattctggcatttgtcatcttaatctgcaccacttctccccctgccacctcccacccagagcctggccattactt

SEQ ID NO: 15844 - DNA, 476 bp, Homo sapiens
  misc_feature (1)...(476): n = A,T,C or G
nggggnngaattgatnacccctcggaanctggagnaccattagtccagngcggtggaattcctgaggcggcggtagcatggagggggagagtacgtcggcggtgctctcgggctttgtgctcggcgcactcgctttccagcacctcaacacggactcggacacggaaggttttcttcttggggaagtaaaaggtgaagccaagaacagcattactgattcccaaatggatgatgttgaagttgtttatacaattgacattcagaaatatattccatgctatcagctttttagcttttataattcttcaggcgaagtaaatgagcaagcactgaagaaaatattatcaaatgtcaaaaagaatgtggtaggttggtacaaattccgtcgtcattcagatcagatcatgacgtttagagagaggctgcttcacaaaaacttgcaggagcatttttcaaaccaagaccttgtttttctg

SEQ ID NO: 15845 - DNA, 468 bp, Homo sapiens
  misc_feature (1)...(468): n = A,T,C or G
tacactttganncccttnnnattgattacctantccatgtggtggaattccaagctttgtatgttggccaaagcccgagagagtgcctcagctaaaataaaggaggaggaagctgctaaggactagttctgccctcccgtcacccctgtttctggcaccaggaatccccaacatgcactgatgttgtgtttttaacatgtcaatctgtccgttcacatgtgtggtacatggtgtttgtggccttggctgacatgaagctgttgtgtgaggttcgcttatcaactaatgatttagtgatcaaattgtgcagtactttgtgcattctggattttaaaagttttttattatgcattatatcaaatctaccactgtatgagtggaaattaagactttatgtagtttttatatgttngaatatttcttcaaataaatctctcctataaaccaaaaaaaaaaaaaaaaaaaaaa

SEQ ID NO: 15846 - DNA, 550 bp, Homo sapiens
  misc_feature (1)...(550): n = A,T,C or G
cccctcccctctacgttcgcgcctcccctattacttctcgcccctcaccagaaagtcaccttcgccccaccccggccccccccccttttgagacccttagatgtgacgcggtagnctgcccattccccagcctctctttctatcccatcccatcccatcccatcccatcccatcccgctcttttcctacttttccttccctcaaagcttccattccacatccggaggagaagaaggaaatgaatttctctacagatgtcccattttcagactgctttaaaaaaaatccttctaatctgctatgcttgaatgccacgcggtacaaaggaaaaagtatcatggaaatattatgcaaattcccagatttgaagacaaaaatactctaattctaaccagagcaagcttttttattttttatacaggggaatattttattcaaggtaaaattctaaataaaatataattgttttttatcttttctacagccaatttataattttaagattccttttcttgtttatcagcagttgttattacatccttgtggcacg

SEQ ID NO: 15847 - DNA, 484 bp, Homo sapiens
  misc_feature (1)...(484): n = A,T,C or G
tgggtccanannnaacnnaaaactgagaccctcgaaaaactgagaccctagaacangcggnggaattctcagaggagaggtgctttggctcaatgccactgacttcaacttttgctcttaaaatgttgttttgatgcatagtgtagtgatggctgaattgatttctgtgcataaacggtggcctagattcttgccctgtggaaatccatggaattaagaactctaggttcctggagtgataagaggtaagcaaatgattagatatgcatgcagggaaaaaattcaaatgctcatagaatagaaataagggtctatataatttgcaagtttaatgtaaatgcaagccactaatacaaccaataatttaatgctaatatgtgaggataagtaaatgttattctaattatttcctatttggtgtgttctcaaagagttctgagcaaaaaatatactgcattgaaatatttccctggctactcaggat

SEQ ID NO: 15848 - DNA, 265 bp, Homo sapiens
ctattctgtggcatgccatgctgggacctctcctgccgagatgctgacacccctgcagaaagcagaccccaactagtgggaagggggagtgcacaattttccatgggcttcatgggcaatgatggaggctggttgatgctaagtgattgtataaaaagtaagtatgacccttccatgcctgaatgacatgctccatatcataagagtggatttcagcttttatgctttgcctccactaatccctatagccatgcttgggaggtgt

SEQ ID NO: 15849 - DNA, 455 bp, Homo sapiens
  misc_feature (1)...(455): n = A,T,C or G
cccttgnacctagcgcaatngcggnggaannaagagcagntgactgtgaggaaaagtaaatggttctacagattctttatgatctacctcccaccagaggactgcagtactcccttgttatttatattttctgccccaatttttgccttctccacaaattttataccttttgtagctgcctactccagattacttcacctttccagactatcagttcttccacttttattcttcataaagaaaattccaataacctgtttcacttaggtttttctattactcttcaagcatgaatcctaatttccctgactatatcttacctctgatctccataactgatggattcctatcctagactatgttactctaatattacccaagattttctccagcctgtttttactcttactttgaaacagctgtttaaaatgactcgtaatctgcttaaatctacc

SEQ ID NO: 15850 - DNA, 450 bp, Homo sapiens
  misc_feature (1)...(450): n = A,T,C or G
gcggcccccnanattacctaggacctacgnatgacggcgtagaannacaaaaactagaaatgtctgtttgcattataacatgaatataagtagatatatttctatctgtatacataagaagggacctaagtttttaatggaagctgtgaactgaagcaagaataggagtatctaagaaaaaagttggaaatgtctatcagttaaaaatacaaatctaaagcccagagtaaaagagagagttaaagagatttgggagttgttaccacacatagatggtaagtgaaaccatgtgaatggatataatcattataggtaggaaagattgttttctgcttcacaatcgctgtgtctaatatgcatgtgcataaaatcgtaattctttcctaccgttttacaacttatacaataggttgttagcatactgttataaatattaaaaaaaaatttatn

SEQ ID NO: 15851 - DNA, 468 bp, Homo sapiens
  misc_feature (1)...(468): n = A,T,C or G
gannaaaatgagaccntcgnaaactgatgatcataggacagngcggnggaattcgcgattatgaagtgtagcaagttagtgataaataagcgtgataaaccatatatttgtattagaaataatatttgaattatcaactgaataaaaaggctgcaactgctgattcctttgggtgggcatgtgataaaaataaaatacagttaagtatacttggaataaaaaattgtgtatgcttcaatataatagaaaccttttaaattgaatgtgtttttgagtttatagcatttaaattactgggagaattaaaagatttgctttgctttctgacattaagcttttcaaattagaattttaaaaaacatttctaactcattcatcagtagaagactttggcttttatataagatactatagttctcccccatattttcagtgattntccaatggagtagcaataaaaaaacttta

SEQ ID NO: 15852 - DNA, 451 bp, Homo sapiens
  misc_feature (1)...(451): n = A,T,C or G
attcgtagaccctattgcagngcggtggaattcgctgctggcacccttactcaaggacattctgaaagcttcccttgcacatgtggctggctgtgagctgtgtcaaggaaagggctttatttgtgaattttgccagaatacgactgtcatcttcccatttcagacagcaacatgtagaagatgttcagcgtgcagggcttgctttcacaaacagtgcttccagtcctccgagtgcccccggtgtgcgaggatcacagcgaggagaaaacttctggaaagtgtggcctctgcagcaacatgatgcccctgagtactgtgaaaaagactgttcaacatgccttatgataacaccgatttgtgtctattattggtgacattgttttagatattgggtattgtatattaaggaaaaagatggtctatattctctttattgcatatacttaatgtt

SEQ ID NO: 15853 - DNA, 469 bp, Homo sapiens
gaaaattaacatcgataccctttccattgaagtgccattccaagtgggaatgttcaagatatggcaatacatttaaaaatggtgacaccacaggttgaaatcataccagaggaataaaggtgaaaattcctcagcctagaattctagaccctccccaatagggaatccatgtacctgttgaggtctgtccaacccatggccagggatggctttgaatgtagcccgacacatttttttttcattctcatcagctatctttactgttagtgtattttttgtgtggcccaagacaattcttcttcccatgtagcccagggaagccaaaagattgaacaaccctggtctagatcctatgcctactccttctccaggtcatctggaccaggagctactgtttgctgatctcatcttcagcatcagtttgtcttcgctcatccatgatcccctataacattgggggagcacttta

SEQ ID NO: 15854 - DNA, 453 bp, Homo sapiens
  misc_feature (1)...(453): n = A,T,C or G
catagaccccccatgatgaccatagtacagngcggnggaattcatcacctggaagcttattaaacccagctccttggtcccactcagtcattcagtatgtctggggtggggcccatgcacctgctctgcttttctaataagctccctgattgctgctgatgtgagtctctaaagcaggtctccaaactcttgtatacccctttcagtaaaaaaatattctaaaccacactacccatgtgtttataaatcaaatacatgtaacactagtaataataggtacataataaatattttctttttttattttttagatagtctcgctctgtcacccaggctggagtacagtggcacgatcttggctcactgcaagctctgcctcctgggttcacgccattctcctgcctcagcctcccaagtagctgggattacaagtgttcgccaacacacccagcn

SEQ ID NO: 15855 - DNA, 465 bp, Homo sapiens
  misc_feature (1)...(465): n = A,T,C or G
ctcgaccccccnntttgtagtccctagtccgtgtggtggaattcctggtcatgactaaatctgtgagtaagcatatgtttattgctctgtgaagttttgtgttttttttgagacggagtattatcttgtcgcccaggctggagtgcagtgacgtgatctcagctcactgcaacctccgcctcccgggttcaagtgattctcctgcctcagcctcccaactagctgggattacaggcgcctgccaccatacctggctaatttttgtatttttagtagagacagggtttcaccatgttggccaggctggtcttgaactcctgacctcaagtgatctacttgcctcagcctcccaaattgctggggttataggtgtgagccaccacacatgacctgtttcatagacaccttatacacatagcctgaaggtaattttgtacactattttacataattntgtgcatgaan

SEQ ID NO: 15856 - DNA, 469 bp, Homo sapiens
  misc_feature (1)...(469): n = A,T,C or G
ggggcgtggaatgagccttgnnnnncnatgatncccttgacgacatggggattnctttataggaaaagacgtcctgtacaatgggttcactggtcgaaaaatcacatcacaaatatttattggccccacttattaccagcgtttgaagcatatggtggatgataagattcactctcgtgctaggggacctattcagatcctcaatagacagcccatggagggtagatctcgtgatggcggcctgcgttttggagaaatggaacgagattgtcagattgcccatggagcagcccagtttttaagggaaagattgtttgaggcatcagatccatatcaagttcatgtttgcaatctttgtggaataatggcgattgccaacaccaggacccatacatatgaatgcaggggctggcgcaataaaacccaggtgtgtatagactttactggcagttgatatttgtttagagan

SEQ ID NO: 15857 - DNA, 479 bp, Homo sapiens
  misc_feature (1)...(479): n = A,T,C or G
cgccccccccccccatcgannccccattgtgcaccatagtcagtgtggtggaattcctaaagcagggaatatttttggaactgtgtgtttcttgtgtggtgtctctcaaattatactcatggctgtacagagaagaacattttatgacatctgacataatagtgctttatttttaagggatctgtgctctaaaagaacaagtacagaattatatgaggaatatcaaatggtcaggagataagaaacatcttcatatatttagttttccctttctctttaggtgtagctagggtgaagactaattttgtgtatatagctgaggcttatagagtgtcaatttacaatgtttctttagttaaatgtttatttattaaagactctgtttcaccatacaagtcctcatttgctgttgtatgtagacacctgttaaatcctgcttggaagtttttactgtgtagtttgctataaatcagtcaggc

SEQ ID NO: 15858 - DNA, 470 bp, Homo sapiens
  misc_feature (1)...(470): n = A,T,C or G
taaaattagatacccctcnnctcgattncntactcagngtgcaggaattccaagtgggaatgttcaagatatggcaatacatttaaaaatggtgacaccacaggttgaaatcataccagaggaataaaggggaaaattcctcagcctagaattctagaccctccccaatagggaatccatgtacctgttgaggtctgtccaacccatggccagggatggctttgaatgtagcccgacacatttttttttcattctcatcagctatctttactgttagtagtattttttgagtggcccaagacaattcttcttcccatgtagcccagggaagccaaaagattgaacaaccctggtctagatcctatgcctactccttctccaggtcatctgaaccaagagctactgtttgctgatctcatcttcagcatcagtttgtcttcgctcatccatgatcccctataacattgggg

SEQ ID NO: 15859 - DNA, 497 bp, Homo sapiens
  misc_feature (1)...(497): n = A,T,C or G
tgagagctcnntgnnaatagaagccccttngnnnnnngcgnatagatgtaccctctagtcagtgcggtggaattcctttctggggcagacccttgtcctctgggatgatgggcactgctatccacagtctctgccagttggttttatttggaggtttgtgggctttttttaaaaaaaaaaagtcctcaaatcaggaagaaacatcaaagactatgtcctagtggagggagtaatcctaacacccaggctggccgccagctggcacctacctctatcccagactgccctcgtcccagctctctgtccaactgttgattatgtgatttttctgatacgtccattctcaaatgccagggtgttcacatcttcgctctggccagcccattctgtatttaaagcttttgaggcccaataaaatagtacgtgctgtctgcaaaaaaaaaaaaaaaaaaaaaaaaaaagccgccctttaaattaaaagggcccgtttaaacccg

SEQ ID NO: 15860 - DNA, 469 bp, Homo sapiens
  misc_feature (1)...(469): n = A,T,C or G
cgccgggcnnnnnnnttattgatagcgtaccntatgccgaggcatgccaggcagaatggagggggaggggagtcacagatgtggaggtctgattcccttgccatctgttcagagttgttttttgtttgtttgtttgtttttttcttacttctccacggccccaggaattatctcattctcatatttgaattccatgttgttactggtaaaaatcttggcacttacatatttgtttgtttgtttgtttttctattggagaggggggcgtgaaaacagcttgcacttatatttctatgtatgaacaatgcacacataaaaactggaattaaaaatacaatacctttataataatattgaattactagatgtaaatataacaagacataggagcttttatgctgtanacttcatagcactgatgaaagaaatcagaggtctgaattatggagaaacatattattagcagacn

SEQ ID NO: 15861 - DNA, 448 bp, Homo sapiens
  misc_feature (1)...(448): n = A,T,C or G
agggcggcccgctttaaacggaacttcagcagagtcagncggnggaannnaagatgntcttttacatttttttaaagggctagtatgttccagagtaggcaagtagtcattcaagccaaatgaaagagttaactggtccttgaggagtgttagcaaaatttaaattttgaccctggccatttgtactacagaagtgattatgggattaaaagaatacataattacagtgttttgggattgggctctttttttttcttaatagaaaagcagaaacttcataaataatagctgtgctttagataccagataacaaatattgtttcccctgaagatatgacctactagaactactcacatatatagtccaataattactgacttaataggtatggtaaaatagctgataataagtcagactctcaagagtttctgtaccttgattattgac

SEQ ID NO: 15862 - DNA, 259 bp, Homo sapiens
  misc_feature (1)...(259): n = A,T,C or G
tactcatcgggtgagatgccggacttctacacgatttactttctcataagtattacttttttttccttataatctatgcttaagaattgtcctgcaggtaaccttttctatatctaatttttgctagaacatctatgggtttattcagatacacattcctgtatgtcctccctcctccattccttttaaccacagcccacaggttaaaagtattcttaaggacttttctgacctatcatcttttctaatcgncttttct

SEQ ID NO: 15863 - DNA, 478 bp, Homo sapiens
  misc_feature (1)...(478): n = A,T,C or G
agaaaatgtgaaacctcgaanaccactnccggatgntccactagtaaagngcggtggaattcgctacatagtaaatgtattattcttccagagaatgtattcttcaaatgtacactattttagttaataaagtaatgataaagctgataatgagagtgatgttgaaataattgattctggcaaggatcatcaatttgaactaaaagtattaaattgaaatgcttatttaaaaaaaatttacattttaccccttttacatgataccaaagctaactcatagataacttgttagtcacaaaggaacaaatgtacctgtagaatgggaagacccagctgtcagtgatccatccttgtatcactaataatagggtggcgagacatgtgcccttaggactttattatgataactgtgaagtgtacagcagctcttctttttgattttttaacttttattttttgagatggagtctcactcttg

SEQ ID NO: 15864 - DNA, 454 bp, Homo sapiens
  misc_feature (1)...(454): n = A,T,C or G
natagatgaccattagaccgngcggnggaattcgtgggcgtaggaccctccgagccaggtgcgggatataatctcctggtgcgcctttttaagcccgtcggaaaagtgcagtattagggtgggagtgacccgattttccaggtgccatctgtcaccccttactttgactaagaaagggaactccctgaccccttgcgcttcccgagtaaggcaatgcctcaccctgcttcggcttgcgcacggtgctctgcacccactgtccagcactccctagtgagatgaacctggtacctcagatgaaaatgcagaaatcacccgtcttctgcgtcgctcacgctgggagctatagaccggcgctgttcctattcggccatcttggctgtcctcctatatcgagatctatcttcttatgaaaattctgcaaattcttcatggaaggaaagtatggccacag

SEQ ID NO: 15865 - DNA, 476 bp, Homo sapiens
  misc_feature (1)...(476): n = A,T,C or G
nnnnaattcgtcgaccactagtctagtgtggcggaattcgtcgccacatgtcgaccgccatgaatttcgggaccaagagcttccagccgcggcccccggacaagggcagcttcccgctggatcacttaggtgaatgtaaaagctttaaagagaaattcatgaagtgtcttcataacaataattttgaaaatgctttgtgcagaaaggaatcaaaagaatatttagaatgcaggatggagagaaaattgatgctacaagaaccattggagaaactgggatttggagacttgactagtggaaaatcagaggcaaaaaaatgaattttgatgagaagacccctgggccgtgttcagtggtctctcaggacagagtgcatcatcctgcctcttaagttggctgaggcctgcgtgtggtgtccttagaaatgggcttcgaatagaagctccagccctgtgggggcgtctcctgggtaggga

SEQ ID NO: 15866 - DNA, 430 bp, Homo sapiens
gagaagaggacccaacagctgacattcactatttatgacactccaagagacagggccagtgtgggcacattaggtcatcctcaaacagttttgaacccaggacccagaaaagacaggagggtggctgaggacacaacaccacgtgaaggttccaaagggaaacctccatccaaacacgtttgtgagtgtgcctagggaagacaaaaggaggagaggtacaaagaattttttatagtggactagatcaggtgattattctctgttttcacaaggaatgttcagaaacagctcctcactgctcagtgaaaacatgataaacaattacaatactgcatctggttcaaatgcacaataaagaacaaataataatgttgtaaattggaaaggggaagttggagtttgagagtacgaggaagaaactggtaattca

SEQ ID NO: 15867 - DNA, 476 bp, Homo sapiens
  misc_feature (1)...(476): n = A,T,C or G
cggggcgtgcnggaattgagacccctcgacgacattaggccangcggtggaattccaaagctacctatgataaactctgtaaggaagttcccaactataaacttataacctcagctgtggtctctgagagactgaagattcgaggctccctggccagggcagcccttcaggagctccttagtaaaggacttatcaaactggtttcaaagcacagagctcaagtaatttacaccagaaataccaagggtggagatgctccagctgctggtgaagatgcatgaataggtccaaccagctgtacatttggaaaaataaaactttattaaatcaaaaaaaaaaaaaaataaaaaaaaaaaaaaaaaacaaaaaaaaaaaaaantaaaaaanaaaaaaaaaaaaaaaggaaaaaaaaaaaaanaaaannnnccannaaaaggggnnnnnnnnnnnnnccgccctcttattattttttcttt

SEQ ID NO: 15868 - DNA, 462 bp, Homo sapiens
  misc_feature (1)...(462): n = A,T,C or G
cccccatcgatgacattagaccagcgtggnggaanncgngccaggaaatggtaaaagcattattaagatggaaacttctgggttgggattatattttgacatattaaccagcgttttgattttgtcctgatggggtactttttccctatctcccttggggagctgctgtagcacttgaggtgcttataatctctgaggaagatgtgagccttcctggttttgaactccaaattaacattcaggagacacattaagagtgagggcaagggtctgaggaaagtggggcagtaatgagaagatgacatggaggtgtggggagtagagacatcactggtcttggagtcaggatcctggagctggcttccttgatcaggtagcagaaatcccaggcaggctgagtatctgagaagtgcccaggactttgctctgcttcctgagaagagcccagcgaggaagtgactg

SEQ ID NO: 15869 - DNA, 489 bp, Homo sapiens
  misc_feature (1)...(489): n = A,T,C or G
agagttcctnnnaatagtagacattagnccgngcggtagatgaccattagtccagagcggcggaattcgattcgtgaaagggaatttgtgacagaaaagttatacaatgttaaagggtagtaggtctactaaatgctttaaggtcataagcaactactatgactcttaactgtgcaacttgcctgctttaaagctattaaattctaggtaaggtcctgggacatacagagttagtcacgccccctagctatgctggaaagtcaaaccttatctgcagttctgtctggtgttctaggctccaaacctagtacataattagaatagcttacttactatgattttcaccaaaagtaaaagttgctaagagttaacaatgtaacatgtctagaaaagcagttttacaggcaaggcgtataaggaaaatagaatgtgcttttggtaaaaccttataagaaggcttggtaatgtacacatttttgcttcgtttaa

SEQ ID NO: 15870 - DNA, 438 bp, Homo sapiens
  misc_feature (1)...(438): n = A,T,C or G
gaagggcccggnnaagcncgccactgagaccattgnatagtaggccnttagtcgatacttcttgcttctcatgatgcatcacccatcccttctgcatattagcaacttgtcactcctgagcaacagtgctcacatcactgaggtctgtgaacagttgctaatatgcagaagggatgggtgatacttcttgcttctcatgatgcatgtttctgtatgttaatgacttgttgggtagctattaaggtactagagttgataaatgtgtacagggtccttttgcaataaaactggttatgacttgatccaagtgtttaacaattggggctgttaagtctgaccatacatcactgtgatagaatgtgggctttttcaagggtgaagatacaagtcttaaccacagtgtaacttacagtttcctttaaaaaaaaaaaaaaaaaa

SEQ ID NO: 15871 - DNA, 461 bp, Homo sapiens
  misc_feature (1)...(461): n = A,T,C or G
gtcggccgannaattttgaattgaacctactcgcanagacnnggaannncanaaatataaaaatatagggagtaaagaaagctttagtaatttctttacgatttgtatttccatttatggagcctttattacatagagggggtttgaaaaagtagaattattgaacaattttaactaatgtgagaaatctgttggacaacagaaattaatactagtatcagcaggcacaccaaaaactgtgtccatcaaatgctgggccataacctcattttatgctgtgcccttggtactattgctttgggaaatgaaagatttaattcatttacttttcctgatctggcattacaagtgtaaatgtatatacaccttgaaattttcccacctaaatgcagatttttaaacctgaatataatggcacaaaattgcaaattgcatgcttctcttttgatatgtgcgcactt

SEQ ID NO: 15872 - DNA, 462 bp, Homo sapiens
  misc_feature (1)...(462): n = A,T,C or G
natcgagtagcctagcacagngncgnggaattcatttcttcttcttcttcacaaatccagagaaccttggggtggttgtgccagcctgcctttggcagctgcaagctgaggtggcagctctgaccacctctggccccaggccctcagggagaaaggagcaacacactgcccctaggcgtgcgtgtggcccagtttctctctgctctccattaagtgcattcactctgcttgccttgggcccagcccctggtgatcacagggttcaaacagtgtcctcctagaaagagtgggagagcagctcacttctctgtgttctgcctcccctctggtctccagagttttcctgtcctctagaggcaagccaggccagggagctgggagcgagcaagctgaggccacgtccacaaggagcttttcatgcccctgtgccgcatagcctcacctctttcctccagagtggcg

SEQ ID NO: 15873 - DNA, 471 bp, Homo sapiens
  misc_feature (1)...(471): n = A,T,C or G
tggcgccgngnnnnttatagatagagtccctangcagngncgnggaattccttacagttccacatgtacctatgggcccttgggatggggcccagggcctcaacatgctccattctggtctactgttcccccacctgctttgcctccagcctccattgggagagctgttccccaacctaaaatggagtctaggggcactccagctggccctcctgaaaatgtacttcccttgtcgatggctcctcccctcagtcttgggctacctggccatggagctcctcagacagagcctaccaaggtggaggtcaagccagtgcctgcatctccccatccgaaacacaaggtgtctgccctggagcaaagtccccagatgaaggctctagcatgtgtgtctgctgaaggtgtgactgttgaggagcctgcatcatatacgctanagcctgagacccaagagaccaggcctcaggagan

SEQ ID NO: 15874 - DNA, 467 bp, Homo sapiens
  misc_feature (1)...(467): n = A,T,C or G
attcgaccccccnnnattcgaagactattagtcagtgtggtggaattcgcacgaaattggtggaactggcatatttgtttttctctttgccagggttgttgaactcagtagctgtgaagaaactcaagcattagcactgcgagttatactctcattaattaaatacaaccaacaaagagtacatgaattagaaaattgtaatggactttctatgattcatcaggtgttgatcaaacaaaaatgcattgttgggttttacattttgaagacccttcttgaaggatgctgtggtgaagatattatttatatgaatgagaatggagagtttaagttggatgtagactctaatgctataatccaagatgttaagctgttagaggaactattgcttgactggaagatatggagtaaagcagagcaaggtgtttgggaaactttgctagcagctctagaagtcctcatcagag

SEQ ID NO: 15875 - DNA, 462 bp, Homo sapiens
cccccattcgagaccattatttgatgatccctagtccagtgaggaggaattctggagacaaaaattacattccccatcaaatcttgtggctaatgaagaaaaaataatatatcttcggctggctgtggtggttcacgcctgtaatcccagcactttgggaggccgaggtgggcagatcacttgaggcaggagtttgagaccagcctggccaatttggcgaagccccgtctctactaaaattacaaaaattaaccgggtaaggtggtgggtgcctgtaactccagctactcggaaggctgaggcaggagaatcgcttgaacccaggaggaggaggttgtagtgagccaagatcacaccactgcatgacacagtgagactatccccaaaaaaaaaaaaaaaacaaaaaacacccttttttctttgtttttggggggagggggaggaacaggttttttttttagt

SEQ ID NO: 15876 - DNA, 503 bp, Homo sapiens
  misc_feature (1)...(503): n = A,T,C or G
agcccaatagagacccctnnnannaactgagtgcatcgtaagngncgcggaantggancaacaggggttccattagcaagcaattgggtcacacccccatggtcctgatggcgttgcttaaataccagcgctgttctgatttatacatgcttacagatatatttgtaggaactgaaactgctcatttaaaatagcagataagccaggtgtggtggctcacacctgtaattccatcacttcggaggccgaggtgggcggatcacaaggtcaggagagggagaccacccaggccaacatgtgaaagcctatctctattaaatatacaaaagttagctgggcgtggtggtgggcgcctgtagtcccatctactcaggaggctgaggcaagagaattgcttgaacccgggaggctggggttgcagtgagccgagatcatgccactgcactccagcctggtgacagagcaagactccatctcataagaaaagaaaaaaaatagctgaa

SEQ ID NO: 15877 - DNA, 512 bp, Homo sapiens
  misc_feature (1)...(512): n = A,T,C or G
tggggnagagaagggagggcccnnnnnnagnncnnncctacttgagaccattaggttttgatgaccattagnccagngcggnggaattccagggatcacctataggaaaacatggagtatcagaatattggtctctcaggaacctggctttgtggggtggtttgaggcagtagatgccccttcatatgtgcacccaggcccctgccagacaggtaatcacattgcctcctccttgtggcagattatatttcccagaaagtgcctgcaacaatacttccagtcccatatgtgcttctagagccggtcactctctcagtttaaaggtggagtctatttcccttccccttaagactgcctcaatggttagactatggcaagaaagatatcatgtgacttccaagacaaatcctaaaaggcaacacagcttccacctggctctttctattttgagccacttacctatggaacaccagccaccatgttggaaggaagcccaggtgacatggagaagn

SEQ ID NO: 15878 - DNA, 465 bp, Homo sapiens
  misc_feature (1)...(465): n = A,T,C or G
cccgcatgatgccnatcgaggacccttagacagngcggnggaantcgctgttttttgtcatcatgcgtggagaatatgatgccctgcttctttgtccgtttatgcagaaagggacactcatgctgatggatcaggggtcctctcgacgtcatttgggagatgcattcaagcccgaccccaacagcagcagcttcaagaagcccactggagagatgaatatcgcctctggctgcccagtctttgtggcccaaactgttctagaaaatgggacatatattaaagatgatacaatttttattaaagtcatagtggatacttcggatctgcccgatccctgataagtagctggggaggtggatttagcagaaggcaactcctctgggggatttgaaccggtctgtcttcactgaggtcctcgcgctcagaaaaggaccttgtgagaccgaggaagcggcacaaagccga

SEQ ID NO: 15879 - DNA, 456 bp, Homo sapiens
  misc_feature (1)...(456): n = A,T,C or G
ctttgtctgcgtaacctacgccanngcgnggaangggtagnttctcttctggctgaaagctgtagaactccatgcagggagcctgtgagcctttgtgggctgatgaaacactcagaagaaaaaagaactttatggaggcagttgcctgtttagcagacgggatctgaatggaaggtccgagggtctgcagatgtcagagctgtccatggctttgcctggtgtctgtctgagcgatctggcctttgtccctgatgcctaatctgcctgtttgtctctctgagatagccaccaggtggtctactgatgatcaaagccctcgatggtgcagactgctgtcacccctcggctgagtcccaagatggggagtttgagaatgccgagtcttgctgttgccctttctgaatggggtgatgcctggtcagatttcagtttcctggaacatgtgttaatggttct

SEQ ID NO: 15880 - DNA, 457 bp, Homo sapiens
  misc_feature (1)...(457): n = A,T,C or G
catgaaaccttgagcatcgcccgngcggnggaattcatttaaaaacttaaatatgagactccacactgtaaaactactaaaagaaaacacagaagaaacacttcaggacattggtctacattggtctagccaaagattttatgtctaagacttcaaaagcataggcaacagaaacaaaaataaataaatgggattatatgaaactaaaaaacttctgcacagcaaaggaaacaatcaacagagtgaagagatgacttgtagagtgacagaaagtatttgcaaactattaatctgataagggactaatatccagaatatacaagaaactcaacaggaaaaaaaagtcccattaaaaagtgggcgaaggatctgaatagatatttctcgaaagaaaacaagcaaacggccaacaaatacatgaaaaaatgcccaacatcactaatcatcagggaaatgg

SEQ ID NO: 15881 - DNA, 485 bp, Homo sapiens
  misc_feature (1)...(485): n = A,T,C or G
ttggacccctctggatatggcngctcttcgnaaggccgnggaanncctctactctaacagcaagagaaatccggcagcgatttatagatttgttgaagaggaacttttcatacgtatgtttactcgtctgccaccatcccattggatgaccccactttgctctttgccaatgcaggcatgaaccagcttaaacccattttcctgaacacaattgacccatctcaccccatggcaaagctgagcagagctgccaatacccataagtgcatccgggctgggggcaaacataatgacctggacgatgagggcaaggatgtctatcatcacaccttcttcgagatgctgggctcttggtcttttggagattactttaaagaattggcatgcaagatggctctggaactcctcacccaagagtatggcattcccatggaaagactttatgctacttactttggcggggatgaagcagctggcttataaan

SEQ ID NO: 15882 - DNA, 461 bp, Homo sapiens
  misc_feature (1)...(461): n = A,T,C or G
ggcgcgnnnnnnnacctgagaccatcngagagcgtggaaatnacactcttttgttctagattttcccctggtgacctcaccgaggcctacagctttaaataccatccatatgctgataattcccaaatttatatttccagtcccaagctctccactgagtttcaggctcatatatccaaatgtctacttcttgccttcagtataccttacaaacctctcaagtttgacatgcctagaactggactctggattttaccttttgcccgtatcaacaagttcctctcttagtcttccaatcacagaaagggctccaccatcaagatggacatgagcctaaaacccaagaattcttgtttcctgccttcctttccttctctcacattcagtctcctggtagacttgttcatttacttccaccatttctatctacttcttttcatctccagtgccaacattcttgt

SEQ ID NO: 15883 - DNA, 454 bp, Homo sapiens
  misc_feature (1)...(454): n = A,T,C or G
nttggagactctatgaccctagtccgtgtggtggaattcgatccgcatcgaacatggaaatgggcgacgggcgtttattggaattggtttcggcgaccgaggtgatgcctttgacttcaatgttgcattgcaggaccatttcacgtgggtgaaacagcagtgtgaatttgcaaaacaagcccagaacccataccaaggccctaaactggacctgggcttcaaggagggccagaccatcatgctcaacatcgcaaacatgattaagaaggaaggagcatctgggaatccccgagtccggcctgccatcacaggagggctgagcctgcttccccctcccccaggggggaaaacctccaccctgatccctccccctggggagcagatggctgtggggggatccctcgtccagccagcagttgctgccagatcagatcaacttccagccagacccagn

SEQ ID NO: 15884 - DNA, 461 bp, Homo sapiens
  misc_feature (1)...(461): n = A,T,C or G
nattgangaccattagnncatttgatgacccctagtccagtgcggtggaattcaagactagtataaatgagaaaatccaagctattaagtaccattagctacagtgatcttagcttccttgcttacaattgttcagtgggtcatctaaattcttctatgtcctgagcatgatctacaaacatgggctagcttctgtctctccgtcttcccgccatcattgtgctgtagccatatggaactcctttcagttctctgaccatgccctttcctgcctcagatttcagcttaaattttgcctcctcagagagatgccttcccaaactccccatctgaagctggcctctgccttttactccctatcatgtcactctctgctcaccatccttatcacaatgtgtatttgatttgtttgctagtttactgtcttcacaacataatgtccgtttgtgcaagggtcttat

SEQ ID NO: 15885 - DNA, 461 bp, Homo sapiens
  misc_feature (1)...(461): n = A,T,C or G
attgannnattgagatacctcacgcagngtgctggaattcaagaggtttggcatggattttaaagaaatagaattaattggctcaggtggatttggccaagttttcaaagcaaaacacagaattgacggaaagacttacgttattaaacgtgttaaatataataacgagaaggcggagcgtgaagtaaaagcattggcaaaacttgatcatgtaaatattgttcactacaatggctgttgggatggatttgattatgatcctgagaccagtgatgattctcttgagagcagtgattatgatcctgagaacagcaaaaatagttcaaggtcaaagactaagtgccttttcatccaaatggaattctgtgataaagggaccttggaacaatggattgaaaaaagaagaggcgagaaactagacaaagttttggctttggaactctttgaacaaataacaaaag

SEQ ID NO: 15886 - DNA, 480 bp, Homo sapiens
  misc_feature (1)...(480): n = A,T,C or G
nggcgagctgaancctaggtagcccctgatatctnggaagaanncannngnctgcaccagcgggngggtgggccctggcttcgagctgcaggaaaggccgatgtgccatgttgtccgtgtcgacccgcnnagcctgctgaagttgaggaatgggtgcgaggtcgtggtttcgacaccggggcttcggagtccttctcaagnccgctcccgctggaggagcnaggtagagtggaancccccagctattagaggtcccaccccaaactcagtttgattacacagtcaccaatctagctggtggtccgaaaccatattctccttacgactctcaataccatgagaccaccctgaaggggggcatgtttgctgggcagctgaccaaggtgggcatgcagcaaatgtttgccttgggagagagactgaggaagaactatgtggaagacattccctttctttcaccaaccttcaacccacaggagg

SEQ ID NO: 15887 - DNA, 454 bp, Homo sapiens
  misc_feature (1)...(454): n = A,T,C or G
nttcgagatccctagtccagtgcgagggcatttctcttatccatgacactgcccaccatattctctctgctcattttggccaatttcagcatgcattcttttaatatcacaagctccccgataaagccataacttttcttgacattatatgaacctggcctcaccaccaaatcttagtgcctttgtaaaaaacccaatcggctgggcgtggtggctcgcgcctgtaatcccagcactttgggaggccgaggcaggcggatcgcttgaggtcaggagtttgagaccagcctggccaacacggagaaaccccatctccactaaaaatataaaattagctgggcgtgatggtgtgtgtctgtggtcccagctacttgggaggctgagacgggagagtcgcttgcacctgggaggtggaggttgcagtgggccgggatcatgccactgcattccagcc

SEQ ID NO: 15888 - DNA, 459 bp, Homo sapiens
  misc_feature (1)...(459): n = A,T,C or G
aggggaatcgtagacatctgncattgacgngcatttcggagntgctaattacaaaaaaacagcacatatgctgaggaaagtataatacctaatatatatggtttaagcaatgtaaaattccatgaatatgttccttttcatcttaaaatttgtgatttaaaaaacattgatattactataaagaattattgttatttcccttgatttacagagtattgttacaatcacatttgaagtaccaggaaatgcaaaggaagaacatcttaatatgtttattcaggtgaatgcaatttttaactgataaatgatttatcaatggttttgttacatagttgttgctattagcgatggttggtcttattaaaatatgtcacttgatacagaatctcctgtgggaaaagaatgtgagaaacaaggacaatcactgcatggaggtcataaggctgaaagtacagtttn

SEQ ID NO: 15889 - DNA, 466 bp, Homo sapiens
  misc_feature (1)...(466): n = A,T,C or G
aggcggnnnnnnttttgtttgctgtacatctgaccangcggnggaattcatacagcattatttgcatttcagacaacatcaaagagttttaaatggaaatgtcattgtttaaaaaagacatatttttggcttcattactttctaaaaccttaatttaaaaaatttaatgtaatatatttgcattatacctttgtgtttctgcttatttttatttaaaggatggaatggccgtatgcatgttcatgcaaaacaccttaacaagatttatgaggtaatgcagccttctttttaaaatatgatttctaaaagaccaaaaatagctttttgctattccattatttgtactagttaagaaataatagctaattttcaaattacatctattctaatgatgtactatttttttgtgccgtagaggataatcatttaattacatgttaatgaagtatatacatatgtattttag

SEQ ID NO: 15890 - DNA, 477 bp, Homo sapiens
  misc_feature (1)...(477): n = A,T,C or G
ggcgggannnnngnaggctgagaccctcggaanactgatgactctagtacagngcggtggaattcgaaccagtgatagtaacactggctcggagagcaacagtgcaacagtggaggagccaccaacagatcccataccagaagatgagaaaaaagaataagtgttgccttgttttgtgtgttctaaatacttttttaatgaaaaaatgttttttggttttaatggtgttacgtggtttgtgtattaattttttttcttgtccatatcacaccaccaaaggcttttggaccatttagcatcatgagcctaatggctcagtcagtcacctttcttaagtgttgtgaagatggctcttttctttggatcttgtttctagccctcaactgctgaaagcctcagaatttagattaattgagaaaacacccacctcttttagagaattatcctttgatgctgcagaatctactcttacaatgc

SEQ ID NO: 15891 - DNA, 490 bp, Homo sapiens
  misc_feature (1)...(490): n = A,T,C or G
tgaaagaccccgggannnnnnnnattgacgaccatagtcagtgtggtggaattcgtgggagcaggggtatggatattgcataagttattgaaatgctgacccccgttcaggaaaccatgcagccccttcccttcccttcccttcccttcctttcccttccctagccagggctcaggtacctcactctcctgccttgtgcgtagctcctggggccccggtcagtccccagcagccttggcacacagtgtctggagcctctgctcctgctgcaaaagcagaaaccatgtgaaccttctggccagtactggaaaggggaatgctatttatttttatattgtgtatattttgtcgtggtctgctgattccctgtttcactgagagcgacacttacctcaatagttagttcaatattgtgtgttggataattttttaaaagaactttttaaaaagctttttgatccttggaggtctgtagatttatttccatatg

SEQ ID NO: 15892 - DNA, 455 bp, Homo sapiens
  misc_feature (1)...(455): n = A,T,C or G
attganncctcgagaacctcatccatgtggtggaattcgcactgattacagataaaaattgcccatcccctcatatttggcaccagttttattgagctagtttgttggccatgcctagctgagaaatagagaagtggagggagatggggggatgggagagcttttcctcatggcacactctgctccaggagtctgtatacaggagtgtggagaaaaggaagtgttaccttgcaggaagttgcccccaaagcaagggcaggaggtgggggtgggggacttggcctctgatggaattctggaattctgatgagagaggtgctagcctgacctgaacaggagatgctgacaggcagtgctgggcatgttgcacagagatggctggttacacagccccgtggcaggatcccagagtgccgagaccagctgggtcgtggagaccctaacccagtggcgcn

SEQ ID NO: 15893 - DNA, 465 bp, Homo sapiens
  misc_feature (1)...(465): n = A,T,C or G
aggcaacnnnnnnttttgattagcatacatagngcggngcaanncggacccttgatcttcggtgggcagtaggaatcaaggaccctcaaattcgggacttgcttactccaccggctgataaaccaggtcaggacaatcgcagcaagctccggaacatgaccgacttccggctggcaggccttgacatcacagatgccacgcttcgcctcataattcgccacatgcccctcctgtctcgactcgacctcagtcactgcagccaccttacagatcagtcctccaatctactcactgctgtcgggtcttccactcgctactctctcacagagctcaatatggcaggttgcaataaattgacagaccagaccctgatctacctacggcgcattgccaacgtcaccttgatcgaccttcgaggatgcaagcagatcactcgaaaagcctgcgagcacttcatctcagact

SEQ ID NO: 15894 - DNA, 473 bp, Homo sapiens
  misc_feature (1)...(473): n = A,T,C or G
naaacgtcgatcactagtccaatggagggcattcggctgacacctgtaatctcagtgctttgggaggctgcagcaggagactagcttgaggccagtagttcaaggctgtatgccacacctccagactgagcgacagggtgagaccctgtatcttaaaaaaaaaaaagaagaaaaaaaaaaagaaggataaggggaaaagctatgtacataattattattctttttcaacaataaaaactttccaggtagaagtgtttctaaagtatgttactataaaaattctaattaaaaaattggcttttgtacctgggaattattattaacactttttaatggatgtttctctccatacttatcttccaggggccataaaatgcagtaaaaacaaatccagttcccaagaagctgtacaaatgctttcttctgttcgactcaatttacggggcttgttatctaaagcaaagcaacttttn

SEQ ID NO: 15895 - DNA, 315 bp, Homo sapiens
  misc_feature (1)...(315): n = A,T,C or G
gccccccattcgtcgaccantagnnnagttgtagntcctattagtccgtgtggtggaattagttctgtggtcctggtcccagctactcgggaggatgtcttgagcccaggaggcagaggttgcagtgagctgagatcacaccactgcactctagtctgggcaacagagtgagactgtgtctcaaaaaaagaaaaaaagtttaaatactatatatttttctaaaaagaggagatgtttctgatttctcacaatttgattttttcttattgaatgaaggtgtagccctaggggaagaacatcattcaaaaaaaaaaa

SEQ ID NO: 15896 - DNA, 468 bp, Homo sapiens
  misc_feature (1)...(468): n = A,T,C or G
atttgagccctattgtagaccatctagaccangcggnggaattccgcagacctacaatgatgcactttttatgatttgagaattccttcatggtcacgtgctctgtttttatcatggttgggagcctgcagagcaataagggacatgcctttgctgatttgaggattcctctgaggttgggagctaagtttgcatcatgcttagaaaggagtgtgcagacctgtaatgattgcactttgctgattgaaggattccttcaagtccatgtgctccacttgcaccatttttaggatggagcctggagacctataatgaacaacttgtgctgtgttaaggattcctccatgatcacgcgccccatttgtacaccatgcttgggaaggtgcatgcagaccaataatggacgtacttgtgatgatttaaagatgcctccaaggtcacgtgctctgtttgcaccatgcttaggan

SEQ ID NO: 15897 - DNA, 459 bp, Homo sapiens
  misc_feature (1)...(459): n = A,T,C or G
ntttgtggaccttcgacgacattagnccagngcggnggaattcccaccattctagtgtcttctagaggtagagtcgagtgtatctgagagtgcttctctcttagaataaatgacattaacatatgaaaaaacagctacttgtgcctgactatgggcattttcatgtacaggagttcttgaagctgagtttattgagaatggttttgttacctgctgatagctatctttttgtgtttagttctttttgacttctttggcctctaatgttttgacagtggcacttagatgacagtcagcaattgcaacagtgaatgaaatcacacagcttgagttcaaggtggaaagagaaaaaatctagagaggatgttatctgacctggcatgagaggtgatcatcctgtctctgagcagtgggttcttgctctcgaccttatggtgtaatgtggccctgctccttgta

SEQ ID NO: 15898 - DNA, 477 bp, Homo sapiens
  misc_feature (1)...(477): n = A,T,C or G
cccccccattgtagatcactagnccgatggaggcctattccagccagcgctacaagaactgctaaaaggagctctaaaccttgaaagagattcttgaaatactccaaaatagaacctccttagaccggaaatcttacctgacctatgtaacaataatatgatttttaagagaaggtattcaggcaacaaatagcatgaggaatagaatagtacctcacatctcaatactaacattgaatgtaaatggcctaaatgctctacttgaaggatacagaatggaagaatggataaaaattcaccaaccaagtttctgctgtcttcagtagactcacctaagagtaaggactcacacaaacttaagtaaaggggtagaaaaagatacttcatgcaaatggacaccaaatgtgagcagggatcactatttttatatcagacagaacgatcttaaagcaacagcagatatgaaaaaacactgag

SEQ ID NO: 15899 - DNA, 491 bp, Homo sapiens
  misc_feature (1)...(491): n = A,T,C or G
nttcgagattcatagccccatgcggggaactcanagtgctgggattacgggcctaagccaccatgcccagcttgactgtactttcttctgcacacaaccagccaagtgctgttggagcaagtcgcagaacaggatgagtgacattactgtaaattcatgttcagtgacctcagatagatacaaaattattctgcaggggcaaatcttcatgtcctgggaccagaagtttatatagtttggggagtctttttaacgaaaataatgcaattacaaatacgaaatttggatgaatatgtatttagaatgaggaaataaatcaccaacaaattcccgaagccctggagatgcagatgtctttcttctaagatttataggtaatttaccagaatccttacatattcttcctgagtacagcttgacaccccctctccactaggacactccacttctcctagaagctccccactctcacaagaggcctgtgcaatgac

SEQ ID NO: 15900 - DNA, 476 bp, Homo sapiens
  misc_feature (1)...(476): n = A,T,C or G
cggtctcgcagcncnnncnnnnntttgaattgctgaccatctgnccangcggnggaattcgtgcagtctggacttcaatcatttgtgttcttatatagtgtatccaaaatatacatagagacagtgggaagggactttcttctggctaggggaaacatcaattccttgacacaaacaaaaatcgaattaagagtttattctgaattaatagtactgaggaaggttaatgaaaaataaacaaagagtagtcattaattaaaaatattagcaatccagtaatatagtctccgtatggagcatcctcactactaacaggcatctttagcatttattagatttcaggcaaggctctctttagtagcctttgttcaggcacacaaaatgacctgctcctttatacttctgtacttttaaacaatctatttatttatttagatggagtctcactctgtcacccaggctggagtgcagtggca

SEQ ID NO: 15901 - DNA, 479 bp, Homo sapiens
  misc_feature (1)...(479): n = A,T,C or G
tggccggnnnnnaggagactgataccctcggaanactgangacatttcgcaaangcggaggaattctgtcagttgaagaagtcatgacaattaaagcagaaataaaggctgccaaagcaggtaggtctaaaagtaatctggtttttctaacaatttaaggagcccagggtatgaaattgtttattttatttagtagtgtggtgtgtttcaaggtggcagttccgggttcaagccttagctttgacacttaccagatgtgtaaccttgagcaagttattacacctctcagcctcgatttcctcatcagtaaaatggaaataattgtacctattgggttgttaccaggattaagtgtgaatttaagtaaaagcatcctattttttttttttaaatagatggttagacttataaaccagtcaaaaaaggtgtatttcattactgcctgaagtttggtatgatatgtagtatatttttcattn

SEQ ID NO: 15902 - DNA, 453 bp, Homo sapiens
  misc_feature (1)...(453): n = A,T,C or G
naattgagtacattacatcgngcggnggaattacagaacgggagctgccggcgggagcagagctgcgaggaggtggcctttgagggcagcgcggggtcgaaatcccatcccagcgctgtgacctcttggagcccacattgcctctttggtggaggggagggagtggtccagctccgagccgagcctgggagctgaatgacccagtgtgcaaggcgcacctcggagaccgaaagcaaccgctcccccggcttcaatttcacaccacctgcagatacacgtctcaaaatctgcggctaggaagacctgggccgccagaagctaaacgtgtgcattttgtcatcagccccggtttctcgttttagagtgagttcccacctgccctacctaaactgacctgaaacggaaagttgtatgcccccacgaccatcctcactgcagaactgcagagggttt

SEQ ID NO: 15903 - DNA, 469 bp, Homo sapiens
  misc_feature (1)...(469): n = A,T,C or G
nattgacgnccntngnaatgatgaccctctagtcagtgcggtggaattcgatttctgtctctctccagaccagactagtgtcatactaatctcccccttcttccttgtgctccatctcccagtatttacctttgccaccttagcacctttgctttcacctgcctctagcccatggtttctcaaccttggcagtgttggaattaggggccagattaattttttgttatgggggctgtctggtgaattgcaagatatttagcagcatccctggcttctacccactagatgccagcagcacccaaagccccagtcttgacaaccagaaatgtctccagatgttgccaaatggtcaactatgagaggtggaggggaattgcccccagttgagagctactgatagccaattctgacttcaggtctcagattacttctccaagagttctctgagctcccaggcctgttataccct

SEQ ID NO: 15904 - DNA, 453 bp, Homo sapiens
  misc_feature (1)...(453): n = A,T,C or G
attgagttcagtaccactaggacagngcggtggaattcaagaaaacctacgactgcagcgagtgtggcaaggcctttagccgaagctcgtccctgataaagcaccaaaggatccacacgggagaaaagccgtttgagtgtgacacctgtgggaagcacttcatcgagcgctcgtccctcaccatccaccagcgggtgcacacgggcgagaagccctatgcctgcggggactgcggcaaggccttcagccagcgcatgaacctcactgtgcaccagcgcacgcacacgggcgagaagccgtatgtgtgcgacgtgtgtggcaaggccttccggaagacttcctctctcacccagcacgagcggatccacacgggggagaagccctacgcgtgcggggactgcggcaaggccttcagccagaacatgcacctcatcgtgcaccagcgcacgcacn

SEQ ID NO: 15905 - DNA, 487 bp, Homo sapiens
  misc_feature (1)...(487): n = A,T,C or G
tggcatggccnaaattgannnccccnatcgtagactctagtccagngncgnggaattcaacattctcaattgtacttgggtgtgattatgttcttgtgctttcctgcaggaagcttattttcgatacatggcagaaaacccaactgctggtgtggttcaggaggaagaggaagacaatctataatatgatagtgacggaaatccaattgcacctaccaaaaaaatcattgatcctcttccccccattgatcattcagaggtatggtgtttcttgctgaattttactcttgtttcaagctgatgctttacttcagctttaacatttagattttctcagtagtggaatactcttacatcatgagcgtatgcatcttgtcatctctactaagtggntgagccacaaattccatgaggctttatagcctattttgttcaaaagtataaccaaatcacttacatttgactttagaattaaaacatttttttc

SEQ ID NO: 15906 - DNA, 455 bp, Homo sapiens
  misc_feature (1)...(455): n = A,T,C or G
ccttgaatagcagaccactagnccagngcggtggaattcgcnaaacaatttttgcgtaaaagatgtcacactgatctgctggagtggggtggacacatgaattcagttttatcatgaacactcgccactggctgcttgttaattcagggataatggtggcattcttacaaactgctcgggaaatagaatgacgggaacacttttagggagcccaggaagttaccagggacattggtgtcgccggcccaggcaacagcagcgtacgcttttcaaagatcattgagttgtcttagaatttgaagctgtgtaatgacaatgtcacctggagttcgtctccatttcttaactttttgttgcacaagtatttggacagaagtcgaactgtgaatgagatactgaaatgcactaaattgtattacattaaactggagttacttgatacaatgaagaaaaan

SEQ ID NO: 15907 - DNA, 494 bp, Homo sapiens
  misc_feature (1)...(494): n = A,T,C or G
gggaagtnncggcagggcccgnnnaaattgagactgagatcctagcccagngcggnggaattccacggcacagctgcctgaggggatgtgtcactcagggagttgctgggacctactgggcccagcgttgccatcagcaccaacagcttcagagagggggacatatgctggggtgactccaaggctgtgggcggcacctgcctcagatagagaacaggcacagagacactactgggggacactactgggatactggccacccccctgccctgtgcctgggtcacagcctacacactgcagccctgtgcccctcacacccagcaggttcctgctccagcgtggctcctggactggcgccagatgctggccctgggggtttcaatccaagcataattcagtgaagcatgtgtttggcagtgggacccagctcactgttttaggtcagcccaagactaccccgtcggtcattctgttcctgccgtcctgtgaggagc

SEQ ID NO: 15908 - DNA, 458 bp, Homo sapiens
  misc_feature (1)...(458): n = A,T,C or G
ccccccctggttagcactacatcgnngcgggcaantccacacagganagagtccctatagatgcagtgaatgtcaaaaagctttactcagaaatcggctattactaatcatcagaaaccccagcagaaaggaagaaagtccatgcagtgacttagaatatgagagagcttttttgattagtcacatcagctcagacacaatagaagttccatgaatactatgattgtaatgggcccttttggaactcttgtgggagagaaaccttatagatgcaatgaatattttaagccttcttttttgaagatatccctcgtttaccgtagagatctcacaagaagaatcattggccaggcgcattggcccatgcctgttatctcagcactttgggaggctgaagcaggcagatcacttgaggttgggagttcaagaccagcctggccaacatgatgaaaccctgg

SEQ ID NO: 15909 - DNA, 591 bp, Homo sapiens
  misc_feature (1)...(591): n = A,T,C or G
cattagaagnccccctcgnaannnncnnnnnatagatcacctatccgagaggngcaattcagttcgcaaccagcctggccgacatagtgaaaccccatctctactaaaaataccaaaaaatcagccgggcatggtggcgcatgcctgtagtcccagctactcgggaggctgaggcatgagaattgtttgaacccacgagccagaggttgcagtgagccgagatcgtaccaccgcactccagactgggtgacagagtgagactgtctcagaaaaaacacacaaaagcaagaataaaaaagaatctaagaatatagtgtgggctttctttatggaggagcaggctttgggaacaaatttgaattcagaagataagcagtttaattggttggggtcagataagaagaggagtgacaatcaagccaacagtagatgatgactgaagaataccagttaaataatacattcggatggatttggaagttggaattcctcttaacaaccaaggggtttattttcaaagcaatattggggaattgatttcacagtttcgtaccttagtaggtaacgggctgaaagactgttgtaccagtn

SEQ ID NO: 15910 - DNA, 489 bp, Homo sapiens
  misc_feature (1)...(489): n = A,T,C or G
gtnatgggaggcggnnnnnnnaaattgagatcgtaggcagtgcggnggaattcgtcagcagcttatacccacagaagccagtgccagttgacgctgaaagaatcaggcaaaaaagtgagaatgaccttcaaactaaatatttaaaatagaacatactccccaatttagtctagacacaatttcatttccagcatttttataaactaccaaattagtgaaccaaaaatagaaattagatttgtgcaaacatggagaaatctactgaattggcttccagattttaaattttatgtcatagaaatattgactcaaaccatattttttatgatggagcaactgaaaggtgattgcagcttttggttaatatgtctttttttttctttttccagggttctatttgctttaatgagaatagaaacgtaaactatgacctaggggtttctgttggataattagcagtttagaatggaggaagaacaacaaagacat

SEQ ID NO: 15911 - DNA, 472 bp, Homo sapiens
  misc_feature (1)...(472): n = A,T,C or G
nattgagaactgtnactatagcccagngcggnggaattcctctgacactgtggtagcccaagaagatttagctaccaagaactctctcaaaaatcagaattttcaataggaggggagttagagtcttccaaatcctgtgaccagcacaaagctttcagtcatctgatgagaaggagacgaggaattatgtgtttccaaccatttcatcttccaattcatttttataactgagaagttttcattgtgcatggaaataacagaacagagaagaaagtgacagtggtgatagctggttattgaaatcaccatagaaacccctcataaacacacactctcacatagttgcatacgcacacacacacacacacgatcacacaacacacacaaatcctccacaaggtgttttttcggaaccacctctctctaaaaaccataagataacaccaagaacatattttaaaatgacccaggt

SEQ ID NO: 15912 - DNA, 479 bp, Homo sapiens
  misc_feature (1)...(479): n = A,T,C or G
gccccccaatcgtagaccactagnccaactgagtgccattcggncagtggtacaaggtatttaaatttaacttgaatagcaactatactaatttctgcctcaatctttttgtgtacattattagataagtaatctttataattgctagtactggaagagagaaaaatcctggctttacagagtaaccgtgatatttccaggtttttaagcatatggcaggatggggatctctttttttggtcaagaatcttttacttacaagaaaaaaaacatccaaggcctcaaaacaatttaagtagtttcagttttatatttttagaaagagaatatatagagttctactcagggacttttaagtgtaagtaattttgaagaccctactttggtttcacagcatagcttaatgaggcacaggggagagaagattagactgcagtgttgaagctactcccctctgagcattgttttgatattatatn

SEQ ID NO: 15913 - DNA, 546 bp, Homo sapiens
  misc_feature (1)...(546): n = A,T,C or G
agtttgaacacantccgaaannnctcgatcactatccgagngggcaattcgggaggggataggctcagacacaaggagaggcttggagagagcagacgccttctggattcaagaagacgaggctcacctgttactcggcctcccagaaagatggataggagaaatgactacggatatagggtgcctctatttcagggccctctgcctcccccggggagcctggggcttcccttccctccagatatacagactgagaccacagaagaggacagtgtcctgctgatgcataccctgttggcggcaaccaaggactccctggccatggacccaccagttgtcaaccggcctaagaaaagcaagaccaagaaggcccctataaagactattactaaggctgcacctgctgcccctccagtcccagctgccaatgagattgccaccaacaagcccaaaataacttggcaggctttaaacctgccagtcattacccagatcagccaggctntacctaccactgaggtaaccaatactcaggcttcttcagtn

SEQ ID NO: 15914 - DNA, 473 bp, Homo sapiens
  misc_feature (1)...(473): n = A,T,C or G
aggcgagnnnnnagaaaactgatacattggaagattgatggccctccgcagaggacaaagaaggttgtcagatggacaaagagccatctgctgttaaaaaaaagcccaagcctacaaacccagtggagattaaagaggagctgaaaagcacgtcaccagccagcgagaaggcagaccctggagcagtcaaggacaaggccagccctgagcctgagaaggacttttccgaaaaggcaaaaccttcacctcaccccataaaggataaactgaagggaaaagatgagacggattccccaacagtccatttgggcctggactctgattcagagagcgaacttgtcatagatttaggagaagaccattctgggcgggagggtcgaaaaaataagaaggaacccaaagaaccatctcccaaacaggatgttgtaggtaaaactccaccatccacgacggtgggcagccattctcccccg

SEQ ID NO: 15915 - DNA, 455 bp, Homo sapiens
  misc_feature (1)...(455): n = A,T,C or G
ntttgaatagcctacgattagnccagngcggnggaattcgggaaacacacctatacactttatctccaagttacaaaagtttgaggtgcttaggtaaggccagattttttttttaatgaaattatatggattagatctcagtatttaaactgttcctcaattttgggaggctgtgttggaaataacccgcctctagtgctgttggtatgcaaggcagcggggcttaatcaatatttcctgtgctcaccagaggcaaaatgtaccaatatcctgacaccattctctctccatttacttctgggggttaccctgactcttgactcttaaaagtgcccgagatggggctaacctttattaaacagatcgcatattatgatcttgctgcagccacagtgcagctccacattaactctacagaccaaaccatttgtatctggcatcacttactaacacac

SEQ ID NO: 15916 - DNA, 455 bp, Homo sapiens
  misc_feature (1)...(455): n = A,T,C or G
natcgagaccctagagcagcgtgcnggaattcgtaatccaccctccttggcctcccaaaatgctgggattacaggtatgagccactgcgcctagcctcacatcttttttttcaaactccgattctcccgcctctcttttatacagacacacaatattatattgaaggccaatcttgacaacccaggctaatctcttcatcccaagattcttaatttactggcattttcaaagtctctcttgtgtttttgttacccttgtatacatagccttccaggcattaggttttagagacttggaggtggttatctttgatggacattatcgagccaactgccctgccaaagttaaatagaatccgtctccaatcacttctgatctggtccatttgggtaactttagtaatgaggaactcactacttgcttaaggaaaattcccagttttggcccctctccn

SEQ ID NO: 15917 - DNA, 525 bp, Homo sapiens
  misc_feature (1)...(525): n = A,T,C or G
cgcttctctggggacacagtgggcccacatgggccagcatggaccctgggctagagcaagcacatctccatctcttccacctcaggcagtgtggctccagatgtcaggagggactgacctcaggaccttccaggttcctctgtgccaggaatgagaggccaggcccgatcctaccacctcgccttgaccctgaagtcagagcaggccagccaagcaggaagcacactgtttactttttgcatgaaaagtaaatgtgtacttgatagagctaaaatatgatcttttttaatttctcaaccccataatttgagccattgccttgcttaattttggtttccaccatttccttttagtggagaagagaggaagtcagagggtagggacctttgcctgcccctgggcgagtgcgggcagggatctgagaccagattgttctcgcacccctgccagaactcactctcccctggagtttanggtcccatcttccagaatgtagttggtttgcanactcagtttggcaggatt

SEQ ID NO: 15918 - DNA, 468 bp, Homo sapiens
attcgacgacacattgaagagcgttggaaatctcaaaaactaactggaaagattatatgttctttctgaattattcagaaattatgcatcattttctttcaagaatgacagggtcagaatgtggaattccaagatagctcttgacttcctctcaagctccatgtgtggtcagtggaggcccatgcgagctcagcatgtgtactaagaagtgttagtttctttggggcccatctaccctgaccacatcatgatgttcatctgcagctattgcaaggtgttcagattgtgtaaatacaaatggcataaaaactttaaaagaagcgcaattctggaaagattaggtggactaaagcattttgtaaagcaactggtaataatgagcttacagtgggtaattcatttgaatttgaaaaatacagaaatgagcctgtcaaataccggcaagaactatggaataaaactactgat

SEQ ID NO: 15919 - DNA, 482 bp, Homo sapiens
  misc_feature (1)...(482): n = A,T,C or G
nggggngattgtagatccctagnccaactgagacctattgaccgtgcggtggaattcgcaaccaccaccataatattacccaggaaaccagctgtgttctgtagaaggccggcctatcagattcaagttgcaagccttatacacagtaagtgtctcatgcacatatccatgaggattcacataagctgccatcggcccacataaggataaactaaaacaaagaatcaacatggagaacacgtcaaaacgagaagtctaattttattaaatgcttagaattttattgaagttcaccaagaaatgaggtatgagctatacagtttttaatccttcagttttatataataccaggatcttagtatgaaaatggggtgggggtacagctggcagacaggcctgttttgtctaaatgtctaaatgttttctgtgatgacccaaaggaaatagtacttgtttttaaaaccctcctcaagacagacatt

SEQ ID NO: 15920 - DNA, 455 bp, Homo sapiens
  misc_feature (1)...(455): n = A,T,C or G
aatgggaccctagagcagcgtgctggaattcgcggnggtgtttggcccgaggagtcagtgttattactggtggatgcaccgtgtccacagtagcccccaatcccagcgatgcgtcagatcttacgtggcttcctgctgggggagatggccttcacccacgggatgccgggttctcctttctttcctcaccccaacctttactccaccagagaaacttccttttgaactcagtggggaagagggtgatgagacaggactagaaagtagtgggggacccagcgagtggacgccctgctccgggattcctgagtctgtaaatagtgtgcccagcagctgtgaactccccttatagcctcaggctgcagtgtccttcccagctgtgtgagaaaatgaaagccgacgtccacagggacccaggcagggttgggtgttgtgactcactccacctctgtgcg

SEQ ID NO: 15921 - DNA, 536 bp, Homo sapiens
  misc_feature (1)...(536): n = A,T,C or G
ngtcgaaaccgtcagggggtagatgtctatgggatcccagccacgccgggcatatgagcccctgngaacaagccggagctgtatgaggaagtgaagttgtacaagaacgcccgggagagggagaagtacgacaacatggcagagctgtttgcggtggtgaagacaatgcaagccctggagaaggcctacatcaaggactgtgtctcccccagcgagtacactgcagcctgctcccggctcctggtccaatacaaagctgccttcaggcaggtccagggctcagaaatcagctctattgacgaattctgccgcaagttccgcctggactgcccgctggccatggagcggatcaaggaggaccggcccatcaccatcaaggacgacaagggcaacctcaaccgctgcatcgcagacgtggtctcgctcttcatcacggtcatggacaagctgcgcctggagatccgcgccatggatgagatccagcccgacctgcgagagctgatggagaccatgcaccgcatgagccacctcccacc

SEQ ID NO: 15922 - DNA, 550 bp, Homo sapiens
  misc_feature (1)...(550): n = A,T,C or G
ngttcgatcacanctcgagagncctcgtatcacctattcagagtggtgcaattctagatttctccgcagatcctgtgccttcaaaccctacgagtccatactttaaaacaaaatgaagaaagtaaggcttaaggaactagagagtcgcctgcaacaagtggatggatttgaaaagcccaagctacttctggaacagtatcctaccaggccgcacattgcagcatgtatgctctatacaatccataacacttatgatgacattgaaaataaagtcgttgcagatctaggatgtggttgtggagtacttagcatcggaactgcaatgttaggagcagggttgtgtgttggatttgacatagatgaagacgcattggaaatatttaataggaatgcagaagagtttgagttaacaaatattgacatggttcaatgtgatgtgtgcttattatctaacagaatgtccaagtcattcgatacagtaattatgaatcctccctttgggaccaaaaataataaagggacagatatggcttttctaaagactgctttg

SEQ ID NO: 15923 - DNA, 541 bp, Homo sapiens
  misc_feature (1)...(541): n = A,T,C or G
agctcgatcaccactcagagaggngtagtacgccgctgcagggacgagaaggtggcgccgctggctccttgacgcgctcccgggcctcatggtcctgccctccggaggagcagcctcgaggctggtggttttcagagcaggaggccgacgttttctccgcattggaagagcccgccgtctgcaggggcctggaggaatcactggggatggtggcacaggcactgaacaggctggggccttttgacggccttcttggtttcagccaaggggctgcgctagcagcccttgtgtgtgccctgggccaggcaggcgatccccgcttccccttgccacggtttatcctcttggtgtctggtttctgtccccggngcattgngttcaaggaatccatcctgcaaaggcccttgtcattgccttcgctccatgttnttggggacactgacaaagtcatcccctctcangagagtgtgcaactggccagccaatttcccggagccatcaccctcacccactctggtgccacttcattccagcagctgca

SEQ ID NO: 15924 - DNA, 550 bp, Homo sapiens
  misc_feature (1)...(550): n = A,T,C or G
agtttgatccccantnanaannnnccccgtatcacctagtcagagtggtgcaattcagcaagggtaggtgccgcggtgtcggagcatcggcagaccctgagtcctgtgccccagcagttttccatgagcaacatcctgtggaagccgtggctgcagccgtgctgcggacatttcccgttctgttcatgccacgaggatggggatggcaccccctgaatgccaggactgtgagagaggatccaggagagcctgactgcgttgcaaacaaaattctccaagcttggttctatcttcagcttccctttttgcaaggaacatgccctggactgagagtgggtccccactttctttctttctttctttcttttttgagacagagtgtcgctctgtccctcaggctggagtgcagtggcacgatctctgctcactgcaacctccgcctcccgggttcaggcgattttcctgcctcagcctcctgagtacccaggattacaggcaccaggcacctgccaccatgcctagctaattntttgtagtttggtggggacgn

SEQ ID NO: 15925 - DNA, 462 bp, Homo sapiens
  misc_feature (1)...(462): n = A,T,C or G
aggggnattgtagaccantgnnnattgatgaccatagtccatgcggtggaattcctggtccgagggggctggcttggccatgcctttctgtgcctttaatgaggactaataagcaagattgggccacactgtctggactcaaagcccagctccaccactgagcacccgtgtgactctttccatatgtataacgtggggataataataatagctgcttcacaggatgaaatgaagtttgaggtgagaagcattcaccatggtgcccatcgtgttactccattgtcagaggaggaaacggggtcaggcaggaaagcaacttaaaggagggcctgcaagcagccagggtcagagacagggcttggttctgcttcctggtgaagcatggcttcggggtgctgcctctccctccctgtttgaatctgcagattgtgttaggcccccagctgagggcctggagtggtg

SEQ ID NO: 15926 - DNA, 461 bp, Homo sapiens
  misc_feature (1)...(461): n = A,T,C or G
nggggnaatcgtagatcactagtccattgaggngcaattctgaagaggtggcttgtaagttggtgatcattgaaggagacatgggatgcacagaggaacgagctgagctggcagagtcccgttgctgagagatggatgagcagatcagactgatggaccagaacctgaagtgtctgagtgcagctgaagaaaagtactctcaaaaagaagacaaatgtgaggaagagaggaagattcttactgataatcttaaggaggcagagacccatgctgagttggctgagagatcagtagccaagctggaaaagacaattgatgacttggaagataaactgaaatgcaccaaagaggaacacctctgtacacaaaggatgctggaccagactctgcttgacctgaatgagatgtagaatgccccagtcccaccctgctgctgctccttcctctgaccctgactgcgc

SEQ ID NO: 15927 - DNA, 471 bp, Homo sapiens
  misc_feature (1)...(471): n = A,T,C or G
cccctttcgtagacacttggaagtgcggtggaattctgaggacatacaactgggaaatactgaaacttgctgcctattgggtatgctgaggccccacagacttacagaagaagtggccctccatagacatgtgtagcatcaaaacacaaaggcccacacttcctgacggatgccagcttgggcactgctgtctactgaccccaacccttgatgatatgtatttattcatttgttattttaccagctatttattgagtgtcttttatgtaggctaaatgaacataggtctctggcctcacggagctcccagtcctaatcacattcaaggtcaccaggtacagttgtacaggttgtacactgcaggagagtgcctggcaaaaagatcaaatggggctgggacttctcattggccaacctgcctttccccnnnnnnnnnnnnnnnnnnnnnnnnnnnnnnnnnnnncnnnnntn

SEQ ID NO: 15928 - DNA, 540 bp, Homo sapiens
  misc_feature (1)...(540): n = A,T,C or G
agttcgatcaccactcagagngggttagatactcagtacaggacagacgcaatatacaactctgggttcacacacaagctgagatgagaagaggaatgagccatatattggggaaaatcatagtttgtaggtataattatatagtgcttttctccctcaaagtatttttctagccttgaattcattttatcttcattatccctgtgaagtaggtgggacaagtataaggggaagaggggtgctgaatttttaggccaaagactgatattaatacaaatcactcactaactgtagagccttgggcattatcagtgaactactctgagatttactgtcttcatctgtttaatgagtagaatgtccgtgatgcctacctcacagggttgttgtgagggtcaaatgagaatgtatgtganagatttgtaaatggtaaagcactatattcttggttggtagtcctttttcctttctttgggtagacctacagncagatgttttgtntatggatcacttattttccttactgttagactgtcgttn

SEQ ID NO: 15929 - DNA, 459 bp, Homo sapiens
  misc_feature (1)...(459): n = A,T,C or G
ccccacctcgagtagcactacatagnngcggggaattcgtaaaagcctacaccagggcctgaggttgtgaaactcatggcagtccacgcctgataagataaggcctgaaagagaaggaagagcccatgggacttgccacggttttgacttacatctgcaactccaaggctacaggcaggaagtaagaacagtgctcaagtggcagcagatactgactatggcttcatttcacagcttcacacagcagggtagcagaaaacaaagaatgtaagattggacccagttgctgctgttcaccaactctgtgatcttcaaaaagccatatagcttctccagacctgttaatcagggaagaagcagataactgaaggctggctttgagaagtttcgaggtaacataggaacctgctcatgcaggcactctttccatctgacttgggccaaggtgctccgtgattg

SEQ ID NO: 15930 - DNA, 471 bp, Homo sapiens
  misc_feature (1)...(471): n = A,T,C or G
ggagggccggggccggnnnnnncctgacctgcagtacataggccangcggtggaattccagttttatcatcaatgagaagatgaatgggaaagtgtgggaccttttccccgaggctgacaaagtccgcaccatgctggttaggaagatccaggaagagtcactgaggacctacctcttcacctacagcagtgtctatgactccatcagcatggagacgctgtcagacatgtttgagctggatctgcccactgtgcactccatcatcagcaaaatgatcattaatgaggagctgatggcctccctggaccagccaacacagacagtggtgatgcaccgcactgagcccactgcccagcagaacctggctctgcagctggccgagaagctgggcagcctggtggagaacaacgaacgggtgtttgaccacaagcagggcacctacgggggctacttccgagaccagaaggacg

SEQ ID NO: 15931 - DNA, 488 bp, Homo sapiens
  misc_feature (1)...(488): n = A,T,C or G
ggacgccccgggggcccnnaatgagacccatgaagncgtcggaanncgcgncaccagggccccattttctccaactcctccctcagttgtccttgttggtctgcctccccagccctcagtctcctcattgtgaggatgggggcagtcatgctcagaggttaggctgagtgctgcaaggtgtgcagcagacccagcgcttactggtgacccataagcagtagcgattttagataacttcagaaatagtcatacaattatagatagtgtcttgcagttatttttcaaagaaattggaaggaactttggacctcccccactccccgaaattgtatattactttgctggtttaattaaaatgagtcacttactagataagtgttttctttaacattgagtcagcagcaagtgcccttgaactagtgggaaaaaaaccacaccctttggtttgcagagttggcgcaatgtgcccttgaaggagactagagcan

SEQ ID NO: 15932 - DNA, 540 bp, Homo sapiens
  misc_feature (1)...(540): n = A,T,C or G
nttcgatcacagtccgtgtggtgtagtacctcttatttgtcattgatacctgtagtaagttgacaatgtggtgaaatttcaaaattatatgtaacttctactagttttactttctcccccaagtcttttttaactcatgatttttacacacacaatccagaacttattatatagcctctaagtctttattcttcacagtagataatgaaagagtcctccagtgtcttggcaaaatgttctagtatagctggatacatacagtggagttctataaactcatacctcagtggacttaaccaaaattgtgttagtctcaattcctaccacactgagggagcctcccaaataactattttcttatctgcagtattcctccagaagagctaaccagggcagggctggcatgagaagtgacatctgcgttacaagtctatcttccttataagtctgtaaagagcaatggaatcttctagctttagcaaacctaagccaaaggaagggaagccacgaagaatggcaaagtcaaaccctcatgacaag

SEQ ID NO: 15933 - DNA, 476 bp, Homo sapiens
  misc_feature (1)...(476): n = A,T,C or G
gcgcccccccccccatcgancccttgtagaccctagtccgtgtggtggaattcctcccttcttttttttctctcctgtagtccagagaggttgaaatgtctgataacatagcaggtttgcgacatgaaagagatgagagcctagctggtctcctagtatctaatacaatattctttcccttacatattctttttaaatataagatatttttattgaaatggacaattatgacaaaggccttaggagagctcggtccaggggagcaatagagaagaactcagagaaaaagacaggctttgtttttccagacattttccttatatccctggcttgctctttcccctgtgagcaccctgtagctccagccctccgtcaccttctttctcccattttgcctgtgacttaggaacgaacatgatggttaagctaccttcattaagcagcatgaccgcttcctgagctcctgctgccgcatt

SEQ ID NO: 15934 - DNA, 461 bp, Homo sapiens
  misc_feature (1)...(461): n = A,T,C or G
cgcnnaatcgagaccctagnnattgtacgtcattagtccatgcggtggaattcaacacactaaaggactttgaagaaggctgttacctgctttgtaaaagtgaagccatacaagtgactacgaaagacatcctagttacagagaaaggaaatactgtgttagaatttttagtaggactctttaaaccttttgtggaaagctatcagataatttgcaagtaccttttgagtgaagaagaggaccacttcagtgaggaacagtacttggctgcagtcagaaaattcacaagtcagcttctcgatcaaggtacctctcaatgttatgatgtattatcttctgatgtgcagaaaaacgccttagcagcctgtgtgaggctcggagtagtggagaagaagaagataaataataactgtatatttaatgtgaatgaacctgccacaaccaaattagaagaaatgctg

SEQ ID NO: 15935 - DNA, 487 bp, Homo sapiens
  misc_feature (1)...(487): n = A,T,C or G
nggggcannaggggaggggncggnnnnttttaaactggacctttcatgtacctacgaagnggcnggaannncacagacaaagatatcactggtactctttctaatcctgaggttttcaattatggagtggaaacccacgaagcctacaagcaaaggtctctggctagcgacatcactgatgagcagaaaaaggttcgggaggctgacctagtgatatttcagttcccgctgtactggttcagcgtgccggccatcctgaagggctggatggatagggtgctgtgccagggctttgcctttgacatcccaggattctacgattccggtttgctccaggtatgtgctcttggataaggatcactatggatagttggagggaggggacagaggatgcgtcttctatcaagttatatttctagtttccttccttttcttagcaaatatcgattgagcacccactatgtacaaagcaccatgtgctgcacac

SEQ ID NO: 15936 - DNA, 497 bp, Homo sapiens
  misc_feature (1)...(497): n = A,T,C or G
nggtnagcnnagggccgggccggnnaanaattgaaactgangtacctaggacangcggtggaattcgttttaaaggggatcagggagggtgaaggactggagaattagggttgttgatggtcagagcaagcaggataaagtcatcaggatgtggaaactagattctttggtaagtcagctcgtggtgcccctcagaccagctgagtcaatggggtccttcagaccacctgaaatggtaggtatatcagcatgtaaaaagtgtgaaagagtatctcaaaggaaaaacttaatgttttataatggtcaagttatcaatagagtagttaatcttgtaacagggtgatatggtttgcctgtgttcctacccaaatctcaccttgaattgtaagaatccccacctgtcatgggaaggacccagtgggaggtaactgaatcacgggggtgggtttttctgtgctgttctcatggtagtgaataagtctcacgaacgtatgatn

SEQ ID NO: 15937 - DNA, 415 bp, Homo sapiens
  misc_feature (1)...(415): n = A,T,C or G
ctaggccaataggaacagaccgggaccttgtctcacactgatgatacctcacatgttgaccggctatgtgaactgcctatttcctatgctggagttttgatttttaactaaacgcaaatctgtagattctctcctctcccatcccagaaaacaaaacaaaataatgcttttcgaaattgtttctaggactttaaaacataatggtatatccaaaattctttatttcagaatgcaacaatagattccattaatatagactcaagatcaaaacagcatacctgctaagctaagatagatggtgttgattccactgggttttgatcaatacaataacaaacctttttcctttgacatactctgaattttgttgtttggngggagggggtgtgtgtgtgtgtgtgtgtgtgtgnnnnnn

SEQ ID NO: 15938 - DNA, 489 bp, Homo sapiens
  misc_feature (1)...(489): n = A,T,C or G
ggattgaccgcccccccttatgagaccatantganagcgtcgaacangccgnggaattcttttttttaattgagatagagtcttgctctgtcaccgaggctgtagtttagtggcgttatcttggctcacggcaaccactgcctcctgggtgcaagtgattctcctgtctcagacttctgagcagctgggactacaggcacatgccaccacgcctggctaatttttttttttttttttgggattttaagaagggggggggtttaacattgtgggccaaactggtcttaaactcctgacctaaggggatccgcctgcctcaccctcccaagggggtggattacaaaagggaccccccatacccaccctaaaattaaatctttaaaaggggccaatccaggggttttatccccccccccccccccccccccccccgggggggcaaccttttcgcccatggaatcccaaaacttttttttcccccctaaaaag

SEQ ID NO: 15939 - DNA, 568 bp, Homo sapiens
  misc_feature (1)...(568): n = A,T,C or G
ggattcgatncactgtccagtgtggtttagattacctcctaggctaactcctgctgaggaaaatcactggtaaactagtgactactctgctaaattgcctctcttgacattgtcaacctgaagccatcaaaaggatcagaatacagagtttatgcaagtagaaagctgggaatggccaatcagagaacacaaactttagaaaatggggtcagtgttcccaaaagctttattttcttttatggacttctacttctttgatggagatgtcaccaattaaaaggtagctgaagaaagacacaggtagggaatttttaaaataactttgccagaaagatacagatacagaatttttaaaataactttaccaaaacagaaaaataatatactttccatattgtactaagatttggcattntactagaanagggcataagaatagtgacttttctagtcaggctacctgaaatatagtacaaataaaccaatctttgagtgatcccaaaacaccttcttctaatcagtcaaagtagatatacaaaagctaaacattaaagctcatgtactactt

SEQ ID NO: 15940 - DNA, 569 bp, Homo sapiens
  misc_feature (1)...(569): n = A,T,C or G
ggttcgatcacccctnannnnnnaatcgaacnactatccatgtggtggaattcgtgcttattggtattgtctcctggggcaccaaaaactgcaatgtgcgcgcacctgctgtgtatactcgagttagcaagttcagcacctggatcaaccaggtcatagcctacaactgagctcaccacaggccctccccagctcaacccattaaagacccaggccctgtcccatcatgcattcatgtctgtcttcctggctcaagagaaagaagaggctgttgagggtccgactccctacttggacttctggcacagaaggggctgagtgactccttgagtagcagtggctcttcctagagtagccatgccgaggccggggcccccacccctcctccagggcaaccccttggtcctacagcaagaagccagaactgttggaatgaatggcagccctccctggagaggcagcctgtttactgaatacagaggatacgtttacaaactggggnnnnnnnnnnnnnnnnnnnnnnnnnnnnnnnnnnnnnnnnngggggccccttaattaaagggcccctt

SEQ ID NO: 15941 - DNA, 457 bp, Homo sapiens
  misc_feature (1)...(457): n = A,T,C or G
cgggggattgtagacatctgncattgagggcaattcactcaaacgagtaacatttgctgttttaaacattaatagcagcctttctctctttatacagctgtattgtctgaacttgcattgtgattggcctgtanagttgctgagagggctcgaggggtgggctggtatctcagaaagtgcctgacacactaaccaagctgagtttcctatgggaacaattgaagtaaactttttgttctggtcctttttggtcgaggagtaacaatacaaatggattttgggagtgactcaagaagtgaagaatgcacaagaatggatcacaagatggaatttagcaaaccctagccttgcttgttaaaattttttttttttttttttaagaatatctggaatggaactgactttgcttgctttgaagaaactcttttttttttttttttttttttatgaaggcatg

SEQ ID NO: 15942 - DNA, 455 bp, Homo sapiens
  misc_feature (1)...(455): n = A,T,C or G
ggggaaattgagaccctancattgagggccatgcaaangccctatgactatatcccctctaagacggacctgggtgcagccgcaggctccaagcgccccacctgtgtgataatggtcaagccccatgaggagtaccaggaggcttacgatgagtgcctggaggaggtgcagtccctgcccctacccctatgaggggctccggtagcacctgggcacctgccgctggaagctattgggctggcagcaggacgactggctgtcctcctgcccacccacactgacggcatcttcccagttccccaaggcacgccttcttcccaggcagctctaacagccctttcatgaaggtaatgctagtcttctgtccatcagtgccatttcctgtagaactaaaggctgttccaagaatgtggggtggggaaagtaaatgctaagactaaaaaaaaaaataaaan

SEQ ID NO: 15943 - DNA, 465 bp, Homo sapiens
  misc_feature (1)...(465): n = A,T,C or G
gggccaaattgtagaccattgnnnattgtagaccattgtcagtgcggtggaattctgaaagcttaagaaagcccttatcttaggaacttgaagctgaggataatctcaagttcacttagtgccagtcactttagttttttaaaaaatttaacttaaaccccagcctaggcaacatggcaaaaccccgtctctactaaacatacaaaaattagtcaggcatggtggtgtgtgcctgcagtcccagctagttgggaggctgaggtgggaggattgcttgaacctgggaggcggaggttgcagtgagccaagaatgcaccactcccctccagcctgggtaacagagcaagactgtctcaaaaaaacaaaacaaaacaaaaaaatttaaactcttcttgtgtctttttccttggaaaacattaactaaaagttattggtagtaaatggtgactgttttacaattaggtt

SEQ ID NO: 15944 - DNA, 449 bp, Homo sapiens
attcgcggatccctagtcctttgcggtgcaattcgatgaacagcaagataatagtgaaactattgaaaaggtcttagattcaagactgggaaagaaaggagccactggagcatctactactgtatatgcgattgaagctaatggcgaccctagtggtgactttgacactgaaaaggatgaaggtgaaatccagtacctcatcaagtggaagggttggtcttacatccacagcacatgggagagtgaagaatccttacagcaacagaaagtgaagggcctaaaaaaactagagaacttcaagaaaaaagaggacgaaatcaaacaatggttagggaaagtttctcctgaagatgtagaatatttcaattgccaacaggagctggcttcagagttgaataaacagtatcagatagtagaaagagtaatagctgtgaagacaagtaaatcta

SEQ ID NO: 15945 - DNA, 410 bp, Homo sapiens
cttatgcgtattttattttgtgatgcaccatcagtaagggtttctctaaaatattgttttgaacatccttgtaaaagagttgcgagttaaactattttatttactgtctgtgagagcattgggagtaggaaacgatggactccaaagtacaagggagaatacccattttcattcagctatctggagtaaaatatcaagtacttccttcaactaatcttgtctcattcactcaccttttgatatcgaaggcagaaattgcgtttacaacactgaagaccatagcttttaattagtaaacaagcggaacatatataatggacaatgctggccactgccattctgtgttcagaaagactatgagacctgaacatatggccgagaggaaagacgagtgacgttgtctaagatgt

SEQ ID NO: 15946 - DNA, 451 bp, Homo sapiens
attgtagaccactagtccacgtggtggaattcaccaaatccaagatggcggccagcaggaggctgatgaaggagcttgaagaaatccgcaaatgtgggatgaaaaacttccgtaacatccaggttgatgaagctaatttattgacttggcaagggcttattgttcctgacaaccctccatatgataagggagccttcagaatcgaaatcaactttccagcagagtacccattcaaaccaccgaagatcacatttaaaacaaagatctatcacccaaacatcgacgaaaaggggcaggtctgtctgccagtaattagtgccgaaaactggaagccagcaaccaaaaccgaccaagtaatccagtccctcatagcactggtgaatgacccccagcctgagcacccgcttcgggctgacctagctgaagaatactctaaggaccgtaaaaaatt

SEQ ID NO: 15947 - DNA, 490 bp, Homo sapiens
  misc_feature (1)...(490): n = A,T,C or G
tggacagcccncggttccccaaatcgagacctnattgacggcggtngaaacctcgcgccccttggaagccaagaatatgaggaagtcttcttccttcgcgccttcttctttcttacgctccanggcagcctgacagagccgctcgaaagctctgctggccgcggctagccgggtgcagcagaagtctcaggtagctgagaagttcatggaatcttcttatttgctacacctttcactactgcttgtgatatagtgcagggttgggatgtgcagacatttctcaagtgcactgtgtacctacacagcatgctgcaatttggctactgaagtcaagagaaactggtttgaacaactactgagtgtaacataggaagcgcatttcatttgataacaggaacacagcttttgtgctaataaaatgctttgaaaattannaaananaaaaaaaaaaaaaaaaaaaaaaaaaaagcggccctttaaattaaaaggn

SEQ ID NO: 15948 - DNA, 390 bp, Homo sapiens
  misc_feature (1)...(390): n = A,T,C or G
gacccctttaaccccttcctgaaaaagatttttcatggtcaggtatttttaaatacttgcatactttgttcagaaatctgtatacattaaaaaaacatgttctctttaagaatattctggccaggcacggtgactcttgtctgtaatcccaacacttttggaggccaaggcgggaggatcacttgagcccaggagtttgagaccagcgtgggtatagtgagaccttgtctcanaaaaaaaaaaaaaaaaaaaaaaaaaaaaaaaaaaaaaaaaaaaaaaaaaaaagggccccctttaattaaaagggccccttaaaaccccggtaaaacccccgggggggttttttttagcccccccctttttgtttccccccccccccccccccccccg

SEQ ID NO: 15949 - DNA, 445 bp, Homo sapiens
  misc_feature (1)...(445): n = A,T,C or G
attgannnccntattgatgactcttagtccgtgcggtggaattcgtgatgatcatggttcactgcagcctcgacctcccaggctcaagcaattctcctacctcagcctcctgagtaactgggactataggatttctttgaagaaaaatgtgcttcttgaatcaactgcagtctctcctctgcataagagctcttaagggtactagcaggatagaagcaaatgaaactgaaagctcatctgcagctcagaaaagcaaagacatggaattttaaagagtgaaggtagcatggtgtcggccatgggtgaacaagacacagccagacaatgtggaccaatttcttcaaactacggcttttctgctgtctgcttgcagtgttgatggtggtggtgctggtcatcaatgttactcaggtagagtacttggaccatgagactgtttcagcca

SEQ ID NO: 15950 - DNA, 445 bp, Homo sapiens
  misc_feature (1)...(445): n = A,T,C or G
attgaagcccccactgatgactcttagacagngcggtggaattcgtagaggacgacgctgagggccacctgatctaccacgtcggggactggctacaagagcgatatgaaatcgctagcaccttaggagaggggaccttcggccgagttgtacaatgtgttgaccatcgcaggggtggggctcgagttgccctgaagatcattaagaatgtggagaagtacaaggaagcagctcgacttgagatcaacgtgctagagaaaatcaatgagaaagaccctgacaacaagaacctctgtgtccagatgtttgactggtttgactaccatggccacatgtgtatctcctttgagcttctgggccttagcaccttcgatttcctcaaagacaacaactacctgccctaccccatccaccaagtgcgccacatggccttccagctgtgcca

SEQ ID NO: 15951 - DNA, 442 bp, Homo sapiens
  misc_feature (1)...(442): n = A,T,C or G
nattgacgaccatatggacgcccgttggaattcggaatcgattgtaaaagtcccaggttctaaattaactaaatgtgtacagaaatgattgtgtaagtaatgtttctacaggtctttgcaacaaactgtcactttcgtctccagcagagggagctgtatgaatagtgcttccagatgtggtctcccgtgtggggcccagcaatgggggcccctgatgccaagagctctggaggttcttgaaagaggggacacgaaggaggagtgactgggaagcctcccatgccaaggaggtgggaggtgccctggaaatagctgcctcatgccacttatgccatgactggatttaatgtcagtggtgtgccacagtgcagtggctagacaactgaaaggggctaccaaggctgggaaaaaaatgcaattgttgctgtgagtgactttgaan

SEQ ID NO: 15952 - DNA, 489 bp, Homo sapiens
  misc_feature (1)...(489): n = A,T,C or G
cggccccccattgaganccncttggggngantcctccgnaaangccgcgaagnatanncgaaaccacatttgcactggagcagttgaaatgagagagatgttaatgggacttacccgaaccagaggaatttttattactgacccattaacagaggtgtcaaagccacaggaacaaggatgtgcacctcacaaacacagaggctagcctggctgaagctcatctgcacagagtctgtcctgagaagcagaatgccactgtcccctgggccctccagactgccaaggctgctcatattcagagagcaggctccctgtggcctcacacgccggctgccagctgggccaggtaactctggacaggctgcactgtgaagaacacgagagtcggcggagacctgtgcctgctcttctcagcctcaatgtctggaagacaaaaaaaggcatcctgctcccaagattgtggaggaggccagcagggtgactcacatg

SEQ ID NO: 15953 - DNA, 491 bp, Homo sapiens
  misc_feature (1)...(491): n = A,T,C or G
natagagacccctatgccagngtggaggaacctgttagcatctcaggggttgaatcataggcaagtggtgtgtggcacaaaatgcaacacgctatttgtcgtagatgtccagacaagccagatcaccaagatccccattctgaaagaccaggagcctggaggtgtgacccagcagggctgtggtatccatgccatcgagctgaatccttctagaacactgctagccactggaggagacaaccccaacagtcttgccatctatcgactacctacgctggatcctgtgtgtgtaggagatgatggacacaaggactggatcttttccatcgcatggatcagcgacactatggcagtgtctggctcacgtgatggttctatgggactctgggaggtgacagatgatgttttgaccaaaagtgatgcgagacacaatgtgtcacgggtccctgtgtatgcacacatcactcacaaggccttaaaggacatcccca

SEQ ID NO: 15954 - DNA, 472 bp, Homo sapiens
  misc_feature (1)...(472): n = A,T,C or G
natccgagccccnnngnnnnattcgagnatccctagtccgtgtggtggaattccttatttctattattatttctgcaagaaaagtataaagagagttgtagtggaggtgagatttgtgatcgggaaagccttcgactccctccttctccgtcttccgcctctctctctctgattagttcctatccagcagcagattgaagcaggagatgattcttctcaaggtttgttcagcagcttcacttctaggcgaaggcttcatgaaccaagtgacgtcaaccaacaaggcttctctctctctcctctctctaacaatgaaagttgctgttaacaagggaaaaaaagagagagaattgtttataccatttcagttccaataataaatgacctatcagctcctaaaggagccaagggagggggttgcttcttctttccaagaatactgtagctntgagtttgcaccgttcctttgccc

SEQ ID NO: 15955 - DNA, 444 bp, Homo sapiens
  misc_feature (1)...(444): n = A,T,C or G
gttgaaaccctactgatgacccttagacagngtggtggaattcctaagccacttgtatggaaagaaaaagaggaagaagccagtactgtgactgcgtaagcttcccccagcatcacccgctatgagatgtgtggcagctgagacccgggaactgctcaagggcaccaggccccatctgtctgcactcactcaccttcctcagaagacaggaatgtcaggcctctgagtccaagctaagccatcatatcccagtgacctgcacgtatacatccagatggcctgaagcaactgaagatccacagaagtgaaaacagccttaactgaagacattccaccattgtcatttgtttctgccccaccctaactgatcaatgtactttgtaatctgccccactcttaagaaggttctttatcatctcccccacccttaagaagtttctttgt

SEQ ID NO: 15956 - DNA, 472 bp, Homo sapiens
  misc_feature (1)...(472): n = A,T,C or G
catcgagaccanattgacggcgtggaanacctctaaaacagggtaggatttaagaatagatggtttttaatcctggaaattgtgattgtgacccatgagtggaggaactttcagttctaaagctgataaagtgtgtagccagaagagtacttttttttttgtaaccactgtcttgatggcaaaataattatggtaaaaaacaagtctcgtgtttattattccttaagaactctgtgttatattaccatggaacgcctaataaagcaaaatgtggttgtttcaaaaaaaaaaaaaaaaaaaaaaaaaaaaaaaaaaaaaaaaaaaaaaaaaaaaaaaaaaaaaannnnnnggggcccccttaaaaaaaaggggccccaaaaacccccggaaaaaccctcggggggttttttttaaccccccccttttgggggggcccccccccccctctttttttttggggggggggggcccn

SEQ ID NO: 15957 - DNA, 441 bp, Homo sapiens
  misc_feature (1)...(441): n = A,T,C or G
gttgangcccccctgacgcctcttagaccanctggtggaattcccaggaaggccagtgggcagggggcaaaaatgcagaacttggagcaggatagtgtctgaaaatttctcacatggggtcattaactgtggttggggggaaggaaatctccagttcatttactcactgattgactgattgattcattcattgtttccatttcccgagcactcccttgctcctgctcacattccaggcccttgtcctggcctcagggtgatccaggagctgcaggacagaagggccaggcaggagagaaggggagagccggcatgcctggtggacctggcaagagtggttccatggggcctgttgagccaccgggccctgcatgagagagaggccaccctggagctccggggccttctgggagccctggcttgcctggtgtgcctggctcn

SEQ ID NO: 15958 - DNA, 441 bp, Homo sapiens
  misc_feature (1)...(441): n = A,T,C or G
attgangaccccatggacagaccgttggaattcgcttcagaggggcagtttaggcaggtattatattatgaactactagcaattcgagaagcctgcatcagtttggagaaagactatcaacctggaataacctacattgtagttcagaagagacatcacactcgattattttgtgctgataggacagaaagggttggaagaagtggcaatatcccagctggaacaacagttgatacagacattacacacccatatgagttcgatttttacctctgtagccatgctggaatacagggtaccagtcgtccttcacactatcatgttttatgggatgataactgctttactgcagatgaacttcagctgctaacttaccagctctgccacacttacgtacgctgtacacgatctggttctatacctgcaccagcgtattatgcn

SEQ ID NO: 15959 - DNA, 405 bp, Homo sapiens
gaacctaccgaggcaaagctaaaatatgaaattttattccggatgtcatagggagccatatagtgttctttagattgtgagcatagtctgattcataattttgaaacatcccaatggctttttatgagggaaactgattacaaagtagttgtatcagccaaagtagttatatcagtagttatatcacaaattgattacaaagtagttatgtatcagtagttatatcagaaattgattacaaagtagttacgtatcagtagttatatcagaaattgattacaaagtagttacatcagccaaagtagttttatcagtagttgtatcagaaattgattacaaagtagttctatatcagtagttatatcagaaattgcactaggtacttcaaacagatgagatttagta

SEQ ID NO: 15960 - DNA, 453 bp, Homo sapiens
  misc_feature (1)...(453): n = A,T,C or G
ntttgagttcactagcccagngcggnggaattcttggagaccagcctggccaacatgctgaaaccctgtctgtacaaaaatacaaagatagctgggcatggtggcgcatgcctgtagtcccagctactagagcgactgaggcaggagaattgcttgaacctgggaggcggaggttgcagggagccaagatggcgccaccgcactccagcctaggtgatagagtgagactccctctcaaaaacaaagcaaaacaaaaaaattagacaaatgctacattaatgtttgggtggacagattctactttgaatctgaagtttgcagatatgcctatagatttttggagtttaccactttcttattctgtatcattaatgtaatattttaaattactatatatgttaccatttttctggatttagtaagaaatttgcagttttggtttgatgtaacacg

SEQ ID NO: 15961 - DNA, 469 bp, Homo sapiens
  misc_feature (1)...(469): n = A,T,C or G
caatgagaccaaattgcaggcgtgngaaaccgcgcgnngccagggtgatcaggtgactcccggttcgcggcgctgggagcggccgtgttgtcaggcgctcggctgctcctcacttgctctgagacaggtgcggcaagtctactgcgggctggtccgggctcctcaggttcagacccgaccgttatccagtcggttcgtggagaggagaggtgcactttacaggtccccgatgaaccaagagaaccctccaccatatccaggccctggtccaacggccccatacccaccttatccaccacaaccaatgggtccaggacctatggggggaccctacccacctcctcaagggtacccctaccaaggatacccacagtacggctggcagggtggacctcaggagcctcctaaaaccacagtgtatgtggtagaagaccaaagaagagatgagctaggaccatccacctgcctg

SEQ ID NO: 15962 - DNA, 408 bp, Homo sapiens
gggcgcctgtggtcccggctactcgggaggctgaggcaggagaatggcatgaacccgggaggcggagcttgcagtgagccaggatcgtgccactgcactccagcctgggtgacagagcaagactccgtcttaaaaaataaataaataaataaatagacagatagatagatagatagtgtctatgaaggctgcccaagaacttgaccattagggaaacatggctgtttctgtggattaactagtcaagcccatacaggaagaggaggtcagctcccaggtggggcaggatgtagtggacgcttggaagaatttgggaccacacacgaattgctaccatggtgagccagtgaaacttgaggaaggcaggactggattgtgattacaactgagtaagtaggcagagaattg

SEQ ID NO: 15963 - DNA, 564 bp, Homo sapiens
  misc_feature (1)...(564): n = A,T,C or G
nattcgaagcactattccagngncgnggaattcgacatttcagcattnttaggttggttgtaaatcactaaaaatatttattcggatttgaaggatttaagtgctaaaaatcaatccatttcttgcccttcaataattgtccatgcctgccttttgttgtttacatgctcttctgcccagactgttagtaatctagggaccccctttggagctgataagtacagttcagccttttctcctcaaatatataatgactttaacattcctaagaatataggtatttctgaatgatttaaatttgaggaattttaatacatagaatacaatgtacaaactttctgcccactcagatctcttctccatcatgtacttagtatttcccattaacctacacactgatttttatgctactccttgtagaaacaaaattctgngttgactcagattttgtggttataaacttattggaatgtgaaccccgtttatgtgaagaattatgacctatcagtcatagctaaatagcgaacctcanaanggtaactattgactattcaatgtagggtg

SEQ ID NO: 15964 - DNA, 482 bp, Homo sapiens
  misc_feature (1)...(482): n = A,T,C or G
gggaagggcggggccgggnnnnnaattgaattgantccctaggccgngncgnggaattcctttggccaactccgtgcccccttcggaggcatgcaaccatgcagtcctagcctgcagcctgggcatccctgaggaacactacataagcgaggctgtggaagatgctcccagctacagagggtaccgggatgcctgcaccattactgatgtgtgcaacagcaccgatcttccggaagtcgagatcattagcctgctggaggagcagctgccccattataagttaagagccgacaccatctacggttatgaccacgacgactggctccatacacctctcatttctccagatgccaacattgacctcacaaccgagcaaattgaagagacgttaaaatacttccttttatgtgctgaaagagttggccagatgactaagacatataatgacatagatgctgtcactcggcttcttgaggagaaan

SEQ ID NO: 15965 - DNA, 443 bp, Homo sapiens
attgaaaaccctattgatgactcttagacagtgtggtggaattcgaatcatttacattataaagaacttccttactctcttctgtgcatgaataggcttaaaatacagcaatgactattattgttcacaatgctatagctgttacttggaacatacgaagtgctctaacatcacaaattaattgttaatgagaatattgctattgaagagttgtattgttcagagggaatatgattgttccatagaaaagatggtgtctcttatgttgttgtaatcttgggtagataagcaaagccagtgtctgtccaagtcatgaggtacctcagactcccctttctgttttaggtatgtttgaactgaacgcgttcaggatgcaacgatcaaaacatatcttcccaatgttatggaaaaggaggatcaaatccattttgattagaaatcta

SEQ ID NO: 15966 - DNA, 439 bp, Homo sapiens
  misc_feature (1)...(439): n = A,T,C or G
ntttgacgacatattgacagaccgttggaattctattagacccagttattacatttcattgtttactgattggtctattgttttccagaatgccttgggatgtaatttgctccacagtctgatccacttaaattcaggcctctttgcagggctagttttagaggccagtcttttttttttttttttttttnnnagggaaaaagaatattttttttgtcccagggaataagattgggggataaaaaaaattaagtggcttattatgttttaagggtaaaaaaattttcccacccaatgtttgtaaaagtcatgaaatacgggggacccccccctcggcgggaaaatttttggattttaaaaaaaaaagggggttaaaataggggcccggggtggcataaaaatggggaggaagaggaaaccccctttgattacataaaag

SEQ ID NO: 15967 - DNA, 452 bp, Homo sapiens
attgatttcgcgaccctagtccgtgtggtggaattcccgggcagccttcctgagaagatgcaaccaatcctgcttctgctggccttcctcctgctgcccagggcagatgcaggggagatcatcgggggacatgaggccaagccccactcccgcccctacatggcttatcttatgatctgggatcagaagtctctgaagaggtgcggtggcttcctgatacgagacgacttcgtgctgacagctgctcactgttggggaagctccataaatgtcaccttgggggcccacaatatcaaggaacaggagccgacccagcagtttatccctgtgaaaagagccatcccccatccagcctataatcctaagaacttctccaatgacatcatgctactgcagctggagagaaaggccaagcggaccagagctgtgcagcccctcaggctacctagcaa

SEQ ID NO: 15968 - DNA, 449 bp, Homo sapiens
  misc_feature (1)...(449): n = A,T,C or G
atggaggaccnnngnnatggtcgaccctagtccatgtggtggaattcgtggtgcgtgcctgtaatcccagctacttgggaggctgaggcaggagaattgcttgaacctgggaggcggaggttgtggtgagccgagattgcgccattgcactccagcctgggcaacaagagtgaaactccatctcaaaaaaaataaaataaaataaataaataaaaaataaatgggacaaacagcagtacctccctcatcaggtactgtgggattaaatgagattatatatatatatgctgggctccaaacagagcctgatatatagcaagcattcagtgaatcttaaccagcatcattgtgattccacacaggagcccatctgcttgaggaatttagctgtaaaaataaaagtttgaacactactggatgggatgatctagaacagggtgtccaatctt

SEQ ID NO: 15969 - DNA, 404 bp, Homo sapiens
  misc_feature (1)...(404): n = A,T,C or G
actggcttcaggcaatccttctgcctcccttcccaagggttgggattacaggcttgagccactgcaccaagcctgaaaatgtcgttttgaatgagcccacctgaaacgaagacgcttcattagggttactggtttgagaattaagatcagttctggccgggtgcggtggctcacgcctgttatcccagcactttgggaggccgaggtgggtggatcacaaggtcaggagatcgagaccattctggccaacatggtgaaaccccgtctctactaaaaatacaaaaattaaccaggcatggtggcaggtgcctgtagtcccagctactcgggaggctgaggcaggagaatcacttgaacccgggaggcagaggttgcagtgagccgagatcatgccactggactcn

SEQ ID NO: 15970 - DNA, 472 bp, Homo sapiens
  misc_feature (1)...(472): n = A,T,C or G
nattgagaactgaggtcatcgcgaagngcggnggaattcatttgttcaatgaaaatctatccagtacttacaacatgccacagactatgagggacactgcaggtacaaaggaaccagatatggtccttgtccccgaaggagttcagaaaatttcctatacacttcagaaagtggaagaatgagctgggactgatactttttcctatgagttttgtcattatgttttttaacgcatgcccatcatctgtcctgaagaataatttccccaatgttgtgatagtcataagtttaagtttttagtttgacttattgcttgccatcatctgcaaagcccattctggaaatttgtcaaggcttacaaaacacattcatgtttctgaagcctacatgcccagatgagttgttttctgctcataaaatattaaggattgttactttctgattgaatgctagacaccaaatgataaaaccn

SEQ ID NO: 15971 - DNA, 474 bp, Homo sapiens
  misc_feature (1)...(474): n = A,T,C or G
accagcggggngnnnnnnnatcgaatgcgtgcactngncgnggcattcgaggaatggcccttgtctcagccctgagccacatgtcactacatgggccccaaggagctcttgtgcccacagtcctgctaaggctcgttcttcacccctctaaagtggctcaaactagcgtaggccaggagggagcagattctatgccacctccattgcttccgtgccttctccagatccattttttccaaaagctgtgtttgaattctgcacaggggcatctctgtctccaacactgaaaccccttttgccagacccagagaagatttaactgccttttttttgagacagggcctcgttctgtcacctaagctggagtgcagtggcacgatcttggctcacggcaacctctgcctcctgggctcaagcaattctcctgcctcagccacccgaatagctgggattataggcgcaggccaccacatn

SEQ ID NO: 15972 - DNA, 446 bp, Homo sapiens
  misc_feature (1)...(446): n = A,T,C or G
tcgtatgggacgtacgatatggaacctcggtagaggcngnaannatnaagncagctgcagaacaagggggctgattcttctgctttttttctggaaaatctttttttgcttttggcggaaaggtacctataggttgcaaccacaggatgtagcttggtctcttatttgcctttttgggaaaccaattaagattaatacaggataaaggaaaaaagcaatctattcattatataacacagttgtttgtattacttgttccctgcaaaggaaatctgttgaatgcttgcattttgaattcttttctaatagaacaaccaaaaaaggcttcttatggtgcagcaggaaaaaagatcatttttatagctttgcattcttaacatagcatttaaagagcggcatgaattataggaaagacatggaacacacaggtagtcggtttgagatcg

SEQ ID NO: 15973 - DNA, 499 bp, Homo sapiens
  misc_feature (1)...(499): n = A,T,C or G
gggcgtnccagggcggggnngngatttgatcccaatcgtagtcactagtccatgtggtggaattcgtggcgtgtgcctgtaatcccagctactctggaggctgaggcacaagaatcacttgaatccaagtggatcacttaaggtgaagagttcgagaccagcctggccaacatggtgaaacctcgtctctagtaaaaatacaaaaataagccaggcacggtgatgcacgcctataatcccagctactcaggaggctgagacacaagaatcgcttgaacccgggaggcagatgctgcagtgagacgagatggcaccagtgcactccagcctgggcgacagagcgagactctgtctccaaaaagaaagaaaaatattgtggcactggggcatcaacttgattgaacgtccagaggattatagtctgctgtatatggccatccttggttttaccagtttttcagagctcagtctggggaaaagaaaaaaaaaattatacttc

SEQ ID NO: 15974 - DNA, 499 bp, Homo sapiens
  misc_feature (1)...(499): n = A,T,C or G
aaggggctcatgagaatcgagaccctagcccgngncggggaattcagtgggaagaggagccggcgcaaacggaggcgtgaggaggacgccaggtggacacgcccatccttggacttcctgaaaatgacccagccgcacagctgtgcccgcgagtgcgagtcccgcgtccgaggcctcggcgtgaccttacagcatctgtcgggtccgagcagtcagtccagagggtcgactctgaatgaaaacaaaacgccgtggtttgaaatggaaggaaacctggcccctgaagaggaatctgaagaaacgtgctggatgtccccagagaaggagctgaaccatttgagtgggggcttcactgactctccccacacacagggcaccgggggagagcagtcacatgaccggcaggcgggggttttgaccctggtgggaggggatgagagggcccagtccggccctgagacacccccaagacagccctgactgggcactctgcggatgn

SEQ ID NO: 15975 - DNA, 449 bp, Homo sapiens
  misc_feature (1)...(449): n = A,T,C or G
atttttatggatacgctcgcagtangtaggccatcggcaaancccnggccgaggacataatgcgccttcgggagaaattgcaggaggagatgtttctgagagaggaatttgaacacaccctgcaatctttcagacaggagggtgacaatgcgtctctggcacgtcttgaccttgaacgcaaagtggaatctttgcaagaagagattgcctttttgaagaaactccacgaagaggaaatccaggagctgcaggctcagattcaggaacagcatgtccaaatcgatgtggatgttttcaagcctgacctcacggctgccctgcgtgacgtacgtcagcaatatgaaagtgtggctgtcaagaacctgccggaggcagaagaatggtacaaatccaagtttgctgacctctctgaggctgccaaccggaacaatgacgccctgcgccaggcg

SEQ ID NO: 15976 - DNA, 435 bp, Homo sapiens
  misc_feature (1)...(435): n = A,T,C or G
ntttgagacctatgacgccgtgggaannccgctgctgcatctcctgcagctgggttacctgtacaggggttggcatctgcacattcttcctgggcatctcgtgggcactgctcgactaccaccgggccttgcgcacctgcctcccctccaagccgctcctgggcctgggctcctccgtgatctacttcctgtggaacctgctgctgctgtggccccgagtcctggctgtggccctgttctcagccctcttccccagctatgtggccctgcacttcctgggcctgtggctggtactgctgctctgggtctggcttcagggcacagacttcatgccggaccccagctccgagtggctgtaccgggtgacggtggccaccatcctctatttctcctggttcaacgtggctgagggccgcacccgaggccgggccatct

SEQ ID NO: 15977 - DNA, 442 bp, Homo sapiens
  misc_feature (1)...(442): n = A,T,C or G
attgaaccccttttgatgactcttagaccangcggtggaattcccgccgttcagtcgccaatatgcagctctttgtccgcgcccaggagctacacaccttcgaggtgaccggccaggaaacggtcgcccagatcaaggctcatgtagcctcactggagggcattgccccggaagatcaagtcgtgctcctggcaggcgcgcccctggaggatgaggccactctgggccagtgcggggtggaggccctgactaccctggaagtagcaggccgcatgcttggaggtaaagtccatggttccctggcccgtgctggaaaagtgagaggtcagactcctaaggtggccaaacaggagaagaagaagaagaagacaggtcgggctaagcggcggatgcagtacaaccggcgctttgtcaacgttgtgcccacctttggcaagaagaa

SEQ ID NO: 15978 - DNA, 471 bp, Homo sapiens
  misc_feature (1)...(471): n = A,T,C or G
ggcggnncgcccnaatcgagaccttttgaagagcgtggaantccgcggactcatcgggtcacagtttatgcttttatgacgcgggaacacaacagatttgagaagccttggattaaggaataatttatgaagctccgttgactaccgtggagagatcataatttggggttcaagattccagtctgtgtttttccagaggtgccctgaggagcagggaagcatggctattgtggatgtaaaagccatgttcaagccaggtatggtggtatgtgcctgcgagcccagctactcgggaggctgagatgggaggattcacttgagcccaggaggtcaagtccaggctggacaactatcaagaccccatctctaataataaatacatagcatttttcactgagatcagggacatgttgctggccataaggtgccagctgctgcccgtgctggtgccattgcgcctgttaagtactg

SEQ ID NO: 15979 - DNA, 443 bp, Homo sapiens
  misc_feature (1)...(443): n = A,T,C or G
ntacttgatgacanctggacagcccgtnggaanncgcaaaaagaaaaacggacagggggacggacgattcccccaaggactctcaggaggacttacaggaaaggcatctgagcagtgaggagatgatgagagaatgtggagatgtgtcaagggctcaagaggagctaaggaaaaaacagaaaatgggtggttttcattggatgcaaagagatgtacaggatccattcgccccaaggggacaacggggtgtcaggggagtgaggggtggaggtaggggccagaggggcttacacgatatcccatacctttaatgcctttggccttccattctgatttctctgatgagaatattgctggccctgctttccctggtaggtatttgccaggcccaatgctttaaccttaagctgatactttgctttagatgtcagtctcgttaccag

SEQ ID NO: 15980 - DNA, 429 bp, Homo sapiens
gaacagtcacttttagtagtaacatactttggctaaatgatatttaaattattaactttcagggaaaactaataaaattttagaaaaatctctagcttacttcctccaaatttccaattagcttgcctaatgtgctatacatggaagaagttcaataatctttttaggtgtttaatttttatacggtaaatttattattcaacttaattgaagctagactgtaagacaaaaaaattatgttatattaagttacaggaacatatctaaattaagtatgtgtatactcaattgtatcacaaaattatctaaggaagaaagccctgtgaaacaaaaatttaaatagcaaaatacaattttaaggtacaaaagtatctgccacaaggaacaaccacaaagtggcctacagcattagttttaaattgctacata

SEQ ID NO: 15981 - DNA, 463 bp, Homo sapiens
cttcgcgacctatggtcgaccactagtcagtgcggaggaattcagcctacctggcctgctatcttttgagtatttatactttctacgggcttggaggtaaacataaaaagagaaaaaatatcccaataatacagtttttaaccttttatgataaagacatgcttagaattgctgttaagctttctgagatttaaccactgaaactaagtaaaagacaaagcacttaggtaaagcttcattcagtatccattcacccaatactggtttgattctagggcctaggaaaataggactgagcaaagcccttgtccagatggaacttatgttttagaggggaaaacaaaccataaaaaggtaaacagtataaaatcaggaaaggataaatgtatatgaagaatcaaaatgaggacggtgatggggataagaggggaaggtttttgaggagagcagagcaatgatgtaa

SEQ ID NO: 15982 - DNA, 469 bp, Homo sapiens
  misc_feature (1)...(469): n = A,T,C or G
ggggggttttnccttgactgcntncatangccgngnggnggaattcagaagatggaggctgggcagggagctctggccaccagagaaccacctgagaacagggcttcaggcaggttcttaggagagggaatgtctgtgctgaggcctgaaggagagttggccagggaactgagagcagcgtgtgcagaggcccagtggtcagcaccacctaccatacagaacgcagccagccgcctggtgtgggagatggggggcactgaggcagggggcttgggtgcgtggcacatggggccgcaccacctggtctagcctcagaagaagtctagacatcaccctgagagagatgggacccctcagagggttttaagcagaagatagtgtaggagtggaaaaggaatatctcactactgtgttcatggctgaggcacctataataaaagactaacgcgagaaagcaaaaaaaaaaaaa

SEQ ID NO: 15983 - DNA, 450 bp, Homo sapiens
  misc_feature (1)...(450): n = A,T,C or G
nttgcgggacatctagnattgaggacccttagtccangcggnggaatgttagtgaaataagtcaggcatagaaagacaaataccacacgatctcactatatgagacatctgtaaaagtagaactcagtggaagtacacagtggactggtgtttaccagaggctgggagaggggagtagatgctgaaaaggtatagatactgatcaaaggatacaaagttttagctagacaggaggactacttaatgacctgttgtacacaatggtgactataataaatataatgcactgaaggctgggcatggtggttcacacctgtaatcccaacactttgggagtccgaggctggtgtgtcacttgagctcaggaattcgagactggccagggcaacatggcaggaccctgtctctactaaaaatgcaaaaaataaaaaataaaaaaatttcaaaaaa

SEQ ID NO: 15984 - DNA, 459 bp, Homo sapiens
  misc_feature (1)...(459): n = A,T,C or G
cgcatcggtaatgagacctattgaanacnggaaacngtacgcagagnctnggaannngncaaaaagagagccaattattttggtttctctctaggatttttttaaattcctttgatttctagtcaaagcagttgagcatcctcacattgaacaaaatgaaagcaaggaagcgatcaatctcatttgaaaagtgaacaaacataaaaatcattatcttttaaaatttttcatttttacatgttgcaaagaagaataacctttcttatgtttcttgcatgtttcttatttcctcagtaattaaaaaatcatatttagatacatttattactagtgaatgctttttcatagttttaatcacattgatttgttgagaattatcagaaaacataattattcagataaggaattgcgaacagtcttatggattaatacgttctcagaacatcagtgttttagcag

SEQ ID NO: 15985 - DNA, 465 bp, Homo sapiens
  misc_feature (1)...(465): n = A,T,C or G
cttcgaaatagattcccctgcgcangngcnggaattcgctttctctgtttttcatattttggaaaatatccctctttaatctcttgttttttgaaagcctaaagatgccaggtaacaaatgttgcactctagaaccgtcaccttttttatataactttatagtagtttcttccacatttattatgaccttatgaattagctcagtaacattgctctgacaggtatcactaattaaatattgttcaaaaattctgtgaagcattctgcctcattaatgtagcatcattggtgaggctttataatttttttcatctgtctgcgcagtatgttttggttttctaatgctagcaagagctacatgcaacatatcatttgcctgggctgccagcagctgtgcatcttttgtaacctgtacgtaaaataaccattagcagccagaaatgttaacacattaaccttctctta

SEQ ID NO: 15986 - DNA, 459 bp, Homo sapiens
  misc_feature (1)...(459): n = A,T,C or G
tattgaaatagngcaatggcggaaccgtggatntatttggcttgggatgtaatccagctgttttgaagtggaacgatttgctgatgatggaatttaatgattacttgtaataatttgcctttgtactagggcaggaacttttaaggaattactctttttaagaaaataggcatatatctgctagaaaggaaaggaatttatattcataaatatatgaatgcgaggtcatccctgccgtacatgaagtaaatgtttaatgcatcttagctcggacacagcaatctgtgtccacaaagcatcgttactctcctgtgaggatctccactgtcagccccaacttacctgacagggccaagtcccaggatactttattatcagcatttgcttgacaataatttactgcgcaccctcgtagggcctttcatactgtttgttgaaagagacttttccatacgactt

SEQ ID NO: 15987 - DNA, 465 bp, Homo sapiens
  misc_feature (1)...(465): n = A,T,C or G
natcgagatccctagtccagtgcggtggcattcgtcaaggtgagtgtaaagaaggggacttggtaattctcacaaataaatccccatacactccagggaaacctccttttgtgcctcaacgtggggtggaaaggagaattcatccccgcgtgcgttgtatgaaggatgcttctgacgcctgtggttctgatcgcctcgctatctcctcccttctcctccggagatggggggcccgctcctgcctcacctcctcactctggtggtccctttaaccgcttgactcctggtcatgcttcacctctcctctttatcccgtatcctcttctctggtctgagccagcgtcattccctctaccacaggtcactcctacctcctacctctcacctccgccttctgccccccatcctgttaacctgcgactctttgcgagccccttcctaccctctggtttactccccctgctg

SEQ ID NO: 15988 - DNA, 475 bp, Homo sapiens
  misc_feature (1)...(475): n = A,T,C or G
catcgacgaccccngnattcgtcgaccactatcagtgtggtggaattccatagtcaaagcttttctcagaaatcgtattcatttagtttggctaaattaattgccccctcccagatctgccaagttacaaaagtaaatatttatattgatacaataggaggtatttgatgtgggggtagtgtatgactttgcaatgctttagaaacaacaacaaaaatcacctgaccactacaggaacccctgtagaattgacaatgaattaaagagccttgacatgctttgctgttatggaaggagatggccataagaaaaatggaaattagcaaaactattttgtgatattacccacaatagcagagaagaattggcaaaagtattgaaccaagattgatagggtaatttaagcatattgctgaggatgttttgaatgtgtgtcccacctgccagtgacataatcctgacaagatcgttataa

SEQ ID NO: 15989 - DNA, 461 bp, Homo sapiens
  misc_feature (1)...(461): n = A,T,C or G
gatagagaccatatggcangcggtggaattcggtgggtggatcacttgagatcaggagttcgagaccagcctggccagtatggcggaaccccgtctctactgaaggtgcagaaattggtcgggcatggtggtgtatgccagctgctcgggaggctgagacaggagaatcgcttgggcctgggaggtggaggttgcagtgagctgagattgcaccattgcactccagcccgggtgacagagcaaggctctgtctcaggaaaaaaaaaaagaaaaaaaatctggcccaggtccctgacccctcccttagtcccctgactctcactttgcctccagggagctctttgacatcctcaaagatgcgatccacatggcccgtgaactcctcaaaatcaggaatgacaaacttctttcggaatgcctgggtcaggagcacaatgttgctgctcacacacctggatccn

SEQ ID NO: 15990 - DNA, 498 bp, Homo sapiens
  misc_feature (1)...(498): n = A,T,C or G
agcccaatcgagatccctagtccagngtggaggaactctgcgtcgctctctggtaaaggcgtgcaggtgttggccgcggcctctgagctgggatgagccgtgctcccggtggaagcaagggagcccagccggagccatggccagtacagtggtagcagttggactgaccattgctgctgcaggatttgcaggccgttacgttttgcaagccatgaagcatatggagcctcaagtaaaacaagtttttcaaagcctaccaaaatctgccttcagtggtggctattatagaggtgggtttgaacccaaaatgacaaaacgggaagcagcattaatactaggtgtaagccctactgccaataaagggaaaataagagatgctcatcgacgaattatgcttttaaatcatcctgacaaaggaggatctccttatatagcagccaaaatcaatgaagctaaagatttactagaaggtcaagctaaaaaatgaagtaaatgtan

SEQ ID NO: 15991 - DNA, 479 bp, Homo sapiens
  misc_feature (1)...(479): n = A,T,C or G
ccccaatagagatccntagtccagtgagagggcattcttttaaatcaagggcagacattgagtaaaagcttatgactttggatggatttgaaacatgattaaatgacagagtaaataaaagcccctagtcaagtgaattctaatgggggaaataagaggactatataaaaattgaacctctgttttgaaaacaaatctttccaggaagtggtaccactctggggtcaagagaaattgtaagaacaataaaatgagcacacatgaccttcctttcctataaaaatatgaagcagaaaactcccccatgatttcctcatgttgcttagaatagtgtgtatttcagaacttttccatttaatatttttggaccacagttgactgaaactgaggatgggaggaagggatgcttaaaaccttggatagtaccaaaccctatatatattatagttttttctatatatacacagctatgataaagt

SEQ ID NO: 15992 - DNA, 451 bp, Homo sapiens
  misc_feature (1)...(451): n = A,T,C or G
cttgagggcattacatagngcggngcaattcggcggcgacggtggtggtgactgagcggagcccggtgacaggatgttggggaactataccgaggatatatgagcaatttaatccagaccataaaaatatgacagtgaggacttctaataatgaaggaaagtgaagatatcaaagattataattcaaaagcacacatttacctgatgaaactgaaggctgttgtatatctctgtaacgtacacctaatagtttgaagtaacaaaaatatcaaattttggctattatgcttgcacatagttgtcagtctagtacagataaattacataattaacttttttgtctattaacaatttccttaaatatttctgggattaatatatcatttcatgttacaactgcagaaatatgaattaccatatcagtctttaaaaatgccaaattctatagggc

SEQ ID NO: 15993 - DNA, 448 bp, Homo sapiens
  misc_feature (1)...(448): n = A,T,C or G
nttgangactcgtagtccgtgcggnggaattcagctgcttctctctcaatgtatttgaattattggtctagccaacctcttcttttccccttgctgcagtattttaggaggaaggaacaggctaaatcctagctagacgtgcgcatgcattctggtatttaagagccaataaaatatagccaggaatcaccttgtctcctgtaccatacttggatttgtagttcagatcttcaatgtagtgcttaaaagaaacacacactggggttttcatggtgaagtccaaggcaagggcatagaaagaccacttgaccctggatggaacaacatgtggaaaccctccttgccctcctttttatcttctttactttttttactatggccagggttggaaatgtgggtggatgatgggttttacttctttgaaatgttaagtgcggaactttgaacc

SEQ ID NO: 15994 - DNA, 451 bp, Homo sapiens
  misc_feature (1)...(451): n = A,T,C or G
nttgangactagtagacccctaggccgtgtggtggaattccggcgatggcggcggggatagtggcttctcgcagactccgcgacctactgacccggcgactgacaggctccaactacccgggactcagtattagccttcgcctcactggctcctctgcacaagaggaggcttccggagtagccctcggtgaagccccagaccacagctatgagtcccttcgtgtgacgtctgcgcagaaacatgttctgcatgtccagctcaaccggcccaacaagaggaatgccatgaacaaggtcttctggagagagatggtagagtgcttcaacaagatttcgagagacgctgactgtcgggcggtggtgatctctggtgcaggaaaaatgttcactgcaggaagtcactctgaaaactcaggtttacacaacatctacttgtacaatcaagcacaca

SEQ ID NO: 15995 - DNA, 462 bp, Homo sapiens
  misc_feature (1)...(462): n = A,T,C or G
aggcggcgcgannaattttggatgatagcctggccangnccnggaattcgngagaatggctggagcaacacctgtttttattcccctgagatctaaacctgtttattttaaaagatggtctagttctgactggacattagatcctcaagaactggaaagtaaatttaattccaaaaccaaagctattatactaaatactccacataacccacttggcaaggtgtataacagagaggaactgcaagtaattgctgacctttgcatcaaatatgacacactctgcatcagcgatgaggtttatgaatggcttgtatattctggaaataagcacttaaaaatagctacttttccaggtatgtgggagagaacaataacaataggaagtgctggaaagactttcagtgtaactggctggaagcttggctggtccattggtccaaatcatttgataaaacatttacc

SEQ ID NO: 15996 - DNA, 480 bp, Homo sapiens
  misc_feature (1)...(480): n = A,T,C or G
aggtcgccnncctgaagacataatgaggacgttgaatacattgaacgcaacttgctagttatgacagagaggaccagggtgagaactaatgctcaagagagcaagattctgtaatcctcttgccctctcacatcacaaattctgatatgccaaacatttggcccaatgagaatgactgatagacttgctgatgtgcatgtggggggatgaggtgtgtatatgcctttctcctgactggccattcagagctcaggctgtcattcaaattggataggaaaaagttggtgaggaaggaatggatagagcaggatccctggactccctggtccccaaactccttgactgtcacttgtaattgtatataatatttgtgtttcttgctccatttcctcatgctgccatccttaaagtccatctgggaagggaaaaatgctgaacaccattgtatagtttcttcaactgtcccagccatgttgtaca

SEQ ID NO: 15997 - DNA, 491 bp, Homo sapiens
cggcccttgagaccatatcaggatgagaacctcactcaggcttccttcccctcccttcccctgagcttaactgatcctcccacttccccctcccaaagtgctgggattacaggcttaagctaccactgcaccagtctaccttgcctcttcatatctttgtcagcatcttctgccggggccggctagtacatgcagttttccatccttagatttcacagaagagtttccgaatttcctttgtcatttatgtatcaccattttcatattaactaattaaactctacctctcagcccacaatggacatgttcagaatgcagagagaatgctgttacctctatgctgaaagtaaacaatttggggacaattttactgaacctcttagctctggagtatgcatatatataactttgagtttctgttctttaaaaacaatgctgggtgtggtggctcacagctgtaatcccagcactttgggaggccgaggcgggca

SEQ ID NO: 15998 - DNA, 507 bp, Homo sapiens
  misc_feature (1)...(507): n = A,T,C or G
tgggcncggggnccccnnattgattgacgtcactagtccgtgcggtggaattcgaattttagacagaggctgcttcagtctctcgaagaatttaaagaggacatagactataggcattttaaagatgaagaaatgacaagggagggagatgagatggaaaggtgtttggaagagataaggggtctgagaaagaaatttagggctctgcattctaaccataggcattctcgggaccgtccttatcccatttaattaatttctctgacaattcaattattttctgttattaatgttgccactgctttctgtttgtctgcactttcttgataaatatttgctatcgttttactccagtcattcgatgttgctgagatttacatatgactcttgtcaacatctcatcttttgacccaatcttattcatttaataagaggtctcattcatttgcatggaaaaatgctcattgtatattgcaaagtgaaaataacgagttgcaaaacagtgtn

SEQ ID NO: 15999 - DNA, 493 bp, Homo sapiens
  misc_feature (1)...(493): n = A,T,C or G
gatggtggccnnaatcgagagctnatcgatgaccctcggaaancacgnccctaccctcggagaggctgattcactgggtctgggaaggagcctggggattttaatttttcacaagtgccccagatgattctcatcaccaagcaaattttggaaatgctgttcaacagcgcccttaaattggaaacatctttgcagctcgttttattgaaattcataatcaggggtgtcctctagctcccacggtctccagagcagcaaggccggctatggagctgccgtcgtgtgaccacagtgtgatgtctcagaagggctctgggtgggctgagcatctgggctgtgccctggctctgcttttcaccctggacaaagtcgctgtggacttcaatttcttcacctctaaaatgggggacttggaccaggtagattgctgagctcactaccaggttcaaagttcaatgacaaactcagtttactgaggtttgagagaacatcc

SEQ ID NO: 16000 - DNA, 449 bp, Homo sapiens
  misc_feature (1)...(449): n = A,T,C or G
cttgaattcatnaccactagccagngcggtggaattcgggaggctgaggcaggagaattgcttgaacctgggaggcagaggtaggataactgcttgaaccctggaggcagaggttgcagtgagccaagatggcggcattgcaagccagcctgggggacaaggctgagacttcatatcacaacaaaacaaaagaaaaaaccaaaacagaacaaaaaaactgcaggaaaaaaaattaaatagttggagtggccttagggtgtgccaaaatattctttaatataactatgccattacattttattccttaatctaaatatttgagctcagaaacattagtacattatcttttatgacaaggtaaaataaaatcacctaaagttattattgggttatcttcctaatattatgagaagattttttgtatataattcttattcttgcccagcaaa

SEQ ID NO: 16001 - DNA, 496 bp, Homo sapiens
  misc_feature (1)...(496): n = A,T,C or G
ngcagcacgggccggcccccnnanaattgagaactganagctacgcacangcggnggaantcctctactaaaaatacaaaaattagccgggcgtggcggtgcgcgcctgcaatcccaactacttgggaggctgagacatgagaatcgcttgaacccaggaggcagaggttgcagtgagccaagatcgcaccactgcactccagtctgggcaacagggtgagattctgtctcaaaaaaaaaaaggaaaaaggaaaaaggagaattgccaagaattacatttctgacagcttccctgtagggctgctgctgctgctgccatctaacattaaagttccatggcacatgactgctctctttcctttcccctgtttgggataacatatataaagggaggagtttctgcctatacaaactgtttaatattgaaaatgtttctctccctccaaactatgaagaaatcgggagtgcactttttgactgtagattgttcaaagaa

SEQ ID NO: 16002 - DNA, 451 bp, Homo sapiens
  misc_feature (1)...(451): n = A,T,C or G
ntggcagacttgtaggaccctagtccgtgtggtggaattcggactatggtgttttgctatagcagtccaattgactaatacaatagagaagacatctcttctcaattcaaaataaatgcctctacctgtgctttagatagattattctgcttcctcagaagccttgctcctccagacttgcccttcctttgcttaggattccaattttcaaaagtaggaaattatagaactgaagtcttttttataccattctctaatctattcctccctatccatacataaccactatcctaaagttagaatatggtttctcgtgtagcttcttctgctacccgtggtagcagaattgtcttctaaagatgtccatgccctaatctctgaagtctatgactgctaccttacatggcaaaagagattttgcagatgtcattaaagttatagaccttacaat

SEQ ID NO: 16003 - DNA, 476 bp, Homo sapiens
  misc_feature (1)...(476): n = A,T,C or G
catgcgaccntggaattgacggcatgcgagangccaccaagtttctttggtttgtagcaagaccattttgcattacaggtattcattaaatcactgatcaattactaagatgcatcttcataagaaataaattcttgacatgcatagaagtatatggatggttgaaagtaacttggaaattggagtaactaaaataatttaatctaatccagtcatttcacaggtgggatagtggaggcccaagttacttatgggattgggtcaaagaaagccagcattctttgaccagtattaacatctgtgtgtcctgatatctactcaaactatgacatgataatatctgtacaccaatcacacagaaatgaactagaggtgatatagtttagatgtcccttccaaatctcatgttgaaatttaacacccagtgttggaggtggggtctggtgggaagcggatccctcatggcttggtgttcn

SEQ ID NO: 16004 - DNA, 451 bp, Homo sapiens
  misc_feature (1)...(451): n = A,T,C or G
tttgcgactctagtccatgtggtggaattctgatgatgatgactaacaggaattacagaaaggagaaagcactaactgaagaaatggtgatgctctcagtttctctgccttccctatcagcagaaaggctcggggaaggccctcagcctcccagtctggtgaagcttcctgtatggtccatgaccgtattccaccccaggctctgggaggctccctgagatgtgctgtccactaagcactgcacaaacaagcaatcaaattatgaataaacataataaatatcagccgtgcgtgactgaaaaaaaaaaaaaaaaaaaaaaaaaagataaaaaaaaaaaaaaaaaaaaaaaaaaaaanattaaaaagacatagatggtaaaatgtaaaaattaaaaantnnnttggggggctttattatgaagagggggttgataacccccgaacactcctc

SEQ ID NO: 16005 - DNA, 482 bp, Homo sapiens
  misc_feature (1)...(482): n = A,T,C or G
gggcggnnnngnngccngccttgaaaacccancctagnntngctnagcanannccggnggaantnctatatagtaggcattcaataatatttttgaacaaaattatgggtgaacatactgagaatgccacagaattctagctacaagttagttaacctctctgaggctcagtttgcttaaatggggataatagtacccataaagccatcttcatgggtactattacccatgaatgcacccgctgcaagtcttgagcaagttatctatttaacttttctatgcctcagtttccttctatttaaagtggaaacaatatactcttattggctgggcatggtggctcacgcctgtagtcccagcgctttggagggccgaggagggaggattgcttgagaccaggagttccaggccagcctaggaaacaaagcgagaccccgtctctacagtaaacataaataaataaataaataaataagacttan

SEQ ID NO: 16006 - DNA, 463 bp, Homo sapiens
  misc_feature (1)...(463): n = A,T,C or G
agcgggnnnntnnaacgtgacgttcaggtnactncgngaanncnnnnnnannaagnactaacattcctctcaactctgctttagctgtatccttccaattttgatatgctgccgtcactttttcatatttcaaaacggtttccccttatttattcaatgatctgtagatctagaagtgtgttatttaatttccatgtattgaaggactgtataggtttcttattattggtttctaatgcacattccctgtaatgtggcaatcttttgaagtttattgtgacttatggtccagccaatagtctatcatggggactgttcaggtacatgaaaagaatgtaatttttcaattgtgggtatggtgttctgtaaacaacaattaagtcatgttgactggggtggatcatatcttctatacagttgtcccttgctatccacaggggactggttccaggacaccttgtgg

SEQ ID NO: 16007 - DNA, 448 bp, Homo sapiens
  misc_feature (1)...(448): n = A,T,C or G
natggagttcgatagcacgngcggnggaattcccaggaggcagaggtattccagaggagagattcatggagcttgggaaagggagggttttggccccaggggcgacaggctgctttgtgacccacctgagagtgtggttcacacctcttctccccagcagcactgggacgctggccccagggatctgggcccctccatgaccttccacactggatgcctctttccctgcaggcccttccacctgcctcgtatccctgttgctgactccgtccaccctgttcctgttagatgaggatgctgcagggtccccggcagagccctctcctccagcagcatctggcgaagcctctgagaaggtgcctccctcggggccgggccctgctgtgcgtgtcagggagcagcagccactcagcagcctgagctccgtgctgctctaccgctcagcccg

SEQ ID NO: 16008 - DNA, 480 bp, Homo sapiens
  misc_feature (1)...(480): n = A,T,C or G
gccccccccccccccccccattgagccccttatagtagaccatagtccatgtggtggaattccagctctctctcccacctcctccccagatgggaggagagcctgaggcccaagcaggacccgggggttccagcccctagctgctctggagtgggggaggttggtggaccatggagtccctggtgctgcccctcaggtgggacccaggcgttctcagctgtaccctctgccgatggcatttgtgtttttgatatttgtgtctgttactacttttttaatacaaaaagataaaaacgaaaaaaaaaaaaaaaaaaaaaaaaaaaaaaaaaaaaaaaaaaaaaaaaaataaataaaangggccccccctgtttgagggggccttttaaataaaaaggccctttaaaccccccttaacccccgatggggggtttttttaggcggccctcttgggtgtgctgccctcccccggccttttttgac

SEQ ID NO: 16009 - DNA, 470 bp, Homo sapiens
  misc_feature (1)...(470): n = A,T,C or G
tgggcatttaatcattgcatacgacagngcggnggaattccacccccttccccacgtcttttatttgtttaagttatttttgcacaaatgactcttttatatttaattcgatttcattgcctcccttcttaaagccaacaggctcagtttacaaacctgtgagctactgttggctgctgccctccttcccagtgaaaggtacaaagcaataagcatcatgcatcctccccttacccctccaacacccctctgcctctggctcaggttgctcaaagcacagatcctctcttaccccgtccccaggtttgaaacacatagcctcatttcaaggtgtagccaggttcccccgactttcctctgggatataaaaaagggggtaagggggcaaagagagccctctgggcctctcctcccatacacactacactgtcccttctccccccatcaaaacgctcagagacgttgtgatg

SEQ ID NO: 16010 - DNA, 471 bp, Homo sapiens
  misc_feature (1)...(471): n = A,T,C or G
agggggccggngnncnccccaactgagaccnactgatagccgtcggaanncccgaagctgttaaggctaaatgtcgcatgcatgaggcgggctgcaggcctccttaggccttttttggggtaattacaccagtatttaaaaacatttttttttgtttgttttgagatggagtcttgccctgtcacccaggctggagtgcaatggtgcgatctcggctcactgcaacctccgtctcccaggttcaagcgattcttctgcctcagccttctgagtagctgggattacacgcgtgtgccaccacgctcggctaatttttgtatttttagtagagatgggatttcaccatgttggccaggctggtctcgaactactgacctcgtgatccacctgccatggcctcccaaagtgctgggattacaggcgtgagccaccatgctcggcctaaaaaacaattttcttgaagaatccgat

SEQ ID NO: 16011 - DNA, 486 bp, Homo sapiens
  misc_feature (1)...(486): n = A,T,C or G
tggtttcgacgccagaannnnnnnnnnttttgagncctgacgaccatctgtccangcggnggaattcgctggctttctccatccctatctgaatcctccctgctgtgtggcctcccctggtctcatccgtaacacagcccagcttagtgggcctctgttcctgcgggtggccagcctgtctgtgtggctgggctggggaggccacgtctggtatctgaatgctatcggtgggttggggtggaggaaccaggagagggctggagggagggagatggtctcagccccacagagtttggagtcctcagtgtgctgagcaaacgtggagacaccgtttccctcctctagacctcatcttggagagagagatgttggatggggccatctattccagctttattcacacaaatcatgtctgttggcctggaaattggaaaaccagttaaaccaaaaacatgatattaagaaaacaggcaggctcaccatatg

SEQ ID NO: 16012 - DNA, 471 bp, Homo sapiens
  misc_feature (1)...(471): n = A,T,C or G
tggggatnnaatcgatagcgtncgttaggccangcggtggaattcgcttgagcccgggagtttgagactagcctgagaaacctagtgagacctcttttctacaaaaaatttcaagaatgagctgtgtgtgggtatgtatgcctgtggtcacagttactctacaggctaaggcaggaggattgcttgagcctgggaattcagggctgcggtgagctatgattgcaatactgcactccagcctgggtgacaaagtgagaccctgtctcactaaaaaacaaaaaaaaaaaaaacccccaaaccttaaaattgggttggaaaaaaaaactttttggggccaaaaaaatgggaaaaatgccggcccttaggtaaaatcctttgcttggttttaaacacaatttttttataaccattgtggggggggggcctggctccggtttttaacattaataaaagaaaaaaattttttttctt

SEQ ID NO: 16013 - DNA, 451 bp, Homo sapiens
  misc_feature (1)...(451): n = A,T,C or G
nttgangattcgtagtccatgcggnggaagttatctgtgtttccgactcacagaaacaaaataaatgaatcaaaagcgcttgtttttttctcttcatgtagaacaaattacctgctgcagtaacagaaccagagacaaataaatttgatagtaccggatatgataaagacttagcagaagctttggaaagagatataatttcccagaatcccaatgttggatggtaagttatatcacaaccaaataattgggtgctggcgatgctattcggaatggaaaatggagcaaatgtgagcatgtactgaagagcagagcttgaggacagaaccggagtatgtgcagcgtgagcatgacttccctgcattcagcctattccaatttttgtctgagagtctgaggtttttggttttgttttttggagacagggtctcactttattgcccacgctggn

SEQ ID NO: 16014 - DNA, 474 bp, Homo sapiens
  misc_feature (1)...(474): n = A,T,C or G
cggcggnnngnnncttcttgaaaccctacttaatngcccgcanangcgnnggaannnngagaagtaggtggagctgctgttgcagccttgagagagttttattgtaaaactcttgtaatttatagtaatcggaggggaaaacacctcttccttttaattgctctgaggaccgctgccaaagaaacgcagtagatccgctccctcttgggggcggggagaaagaacgggttgtgtccgccatgttggtgaagtcaagcgaaggcgactagagctccaggagggccagttctgtgggctctagtcggccatattaataaagagaaagggaaggctgaccgtccttcgcctccgcccccacatacacaccccttcttcccactccgctctcacgactaagctctcacgattaaggcacgcctgcctcgattgtccagcctctgccagaagaaagcttagcagccagcgcctcagtag

SEQ ID NO: 16015 - DNA, 478 bp, Homo sapiens
  misc_feature (1)...(478): n = A,T,C or G
ggccggaatgagaccatcngaacttgcagtctaggcagangcgnggaanncgagtatttcaaagagaagacctgctaatgcttatatcntgataatattctttcacaaattttcttatgcaggtacttataaatttatgcagaagtgaatacatttatatacttatctacaaaatataagatctcattctacatttagttttataacctgcttgtctcactaaaaccatacctcaaaggtcattggttgtgagtaaatatgagtctttaccacagagatagtaaatactaatggccaataaagacagagaaacaaatatggctacaatatgttatgtgccaagtgctttttagctactgagtcgttcaattctcacggcacccttacaaggttgaaactgttgctgatctccattttgtagatggaaaactaaggagcagatagaataaaaattttacctgagactgcacagttaggg

SEQ ID NO: 16016 - DNA, 463 bp, Homo sapiens
  misc_feature (1)...(463): n = A,T,C or G
agggcaccnnnnnnnnaactgagtccatagcacangcggnggaattcgcgctacatagaaagaatgccctgaggtgaaggtgacagctcggcagtttcttaataccctgaacttgagcgtggcctgcgctagagaaaatacacggtgcttcttaaaaacaaaagccagcagcctgcgagagggctgtgcctgcgagttcctgggagcaggagggggctgttcctccgcccctggctccagtttcacccaagtcacttcacagcagttggaaggaggtcaccaattaataacagagtacaccagtcatcataagaagaaaaattcacatttaaagtttggaaagcaacaggacaaaggtctgtcttcagtggtgcgtagacatgctcgtgattgaattggaaatagttctctttccttctctctgacttcctaactgaaaagctgcagcgtggggagaaaggct

SEQ ID NO: 16017 - DNA, 501 bp, Homo sapiens
aagggtccatgagactgagaccctacgccaggcgggaattccggacccgtcgccatgggccgtgtgatccgtggacagaggaagggcgccgggtctgtgttccgcgcgcacgtgaagcaccgtaaaggcgctgcgcgcctgcgcgccgtggatttcgctgagcggcacggctacatcaagggcatcgtcaaggacatcatccacgacccgggccgcggcgcgcccctcgccaaggtggtcttccgggatccgtatcggtttaagaagcggacggagctgttcattgccgccgagggcattcacacgggccagtttgtgtattgcggcaagaaggcccagctcaacattggcaatgtgctccctgtgggcaccatgcctgagggtacaatcgtgtgctgcctggaggagaagcctggagaccgtggcaagctggcccgggcatcaaggaactatgccaccgttatctcccacaaccctgagaccaagaagacccgtgtgaag

SEQ ID NO: 16018 - DNA, 458 bp, Homo sapiens
  misc_feature (1)...(458): n = A,T,C or G
nttcgagaccctagaaaggcggggaattgtagtgaaaacctcgcagggaccaaaattttctgaaaacgtacgaagntttaatttgcttttcacacaaattagatgcaactgttccgatgtctgagtacttatttaaaagaaaggtaaagattggcctgttagaaaaagcataatgtgagctttggattactggattttttttttttttaaccacacctggagaggacatttgaaaacactgttcttaccctcaaaccctgatggggttccattatgtaaatatttcaaatattaaaaatgtttatttttgatcctggggactcatattctttcaaaatcatgtaaataaatggcatcatgttgtaattggggggggcatactaaaaaagttaaaaatatgggctgaactttttatggacttgatttttatgactattgggatctaaaggccaaggaag

SEQ ID NO: 16019 - DNA, 506 bp, Homo sapiens
  misc_feature (1)...(506): n = A,T,C or G
cacggtnccaattgagnatagtaggccgtgtcgcggaactcgaaggacatggctgattttttttataaaaattggcactaataagtgggtttattggtcttttctaattgtataatttaatttagtacaaagtttgtaaaatatcagaggatatatatatattgtttctacgacatggtattgcatttatatctttttactacagtgatctgtgacagcagcagcttcatgttgtattttttttactgaaattgtaaaatatccatcttaaagacatcaactattctaaaaattgtgtacaggatattcctttagtggtggaattaaaatgtacgaatacttgctttttcaaaaaaatgtattttctgttaaaagcttaaagagttttgctatatattatggaagaaaaatgtaatcgtaaatattaattttgtacctatattgtgcaatacttgaaaaaaacggtataaaagtattttgagtcagtgtcttacatgttaagaggg

SEQ ID NO: 16020 - DNA, 452 bp, Homo sapiens
  misc_feature (1)...(452): n = A,T,C or G
nttcgagatccctagtccatgcggtggaattccggtttcctgtctcttcactgtccgcacatttcttagtattccctccaggcttgggcagggagactcgcagatgcacacccacaagtattcagttctcaaactctagacgagtgttggcaactggattgcaagatgctcctaccctgatagatcaggggtggctgctggaggctgtgctggggatctgaggtttggtctgggctcagtgggagatggcagtgcaatcctgatgagtgatgtctgccaggcaccgtaagtttgattagtgatgtctgccacgggcagggatggaaggagcagtgtgatgtctgctctcttctctcccctctgtccctcttcaggaagaaagagctcattctgtctcacaagccaccggcatcctgtatcagcttccagcctcccctcaggctttccagtcn

SEQ ID NO: 16021 - DNA, 549 bp, Homo sapiens
  misc_feature (1)...(549): n = A,T,C or G
nattcgaatacattcccagtggcggaagtccttctctgcctttgcctcatcatcctcagtttccacaagaagaaggcggtgagggcagtggaggttgaggagaatgtatatgctgtcatgggttaatctctcaggcctccagactgtacttccagatgtctcctcatccagttcctccacagtctgaatggccatgtttcttcttcattgctggagaatgaagtgcaaatgccactgcctggactgaaggcctttcacgatctgtcttctgctggactctgctcctgatcccccttctccttgcatcacccgaagtctccctacacccaccaggccaagccctctgtgattctgagactttgcatgtgtagttacttctcctgaaatggccttcctccccattcctgccaatccaggtccttatcatccttcangttgcttaaatgtcattcangnggtgatttttatgtaatccttgatgatataagcggagatgtgcatttgtcattanttgagacctattcggaccatactgatacatatatgatt

SEQ ID NO: 16022 - DNA, 462 bp, Homo sapiens
  misc_feature (1)...(462): n = A,T,C or G
gtgcgggnttttccctgattacatcgcattgngcnggaactctctgttcttgctttttgttctgtttgattgatttattgggcttctctttttatatccagtaggggaatcagattgtggccaaaggtagtggattaactctagaaaaggagattatatctacagttcctcaaacaattttagatttttcttttcaaggacagctagagaagataatgacataataactatttccttttttaggatctgaatctaaaaatggtgaagcagacagttcagataaagaaatgaaacatgggcaaaaatctcccactggaaaacaaacaagtcagcacttaaaacgattaaaaaagtctggtttagggcacttgaaatggaccaaagctgaggacattgacatagaaaccccaggatctattcttgtcaacactaacttgagggcattaataaataaacatacgn

SEQ ID NO: 16023 - DNA, 450 bp, Homo sapiens
  misc_feature (1)...(450): n = A,T,C or G
ntagatntttgttagccattcnggngnaannngtgtaacagcagcatgcctgtagcatcagggaaaaggtaagcgtgtggctgcatcagaaaaatcacgatgtttagcagcagaagaattcagaaaggttaaggaagttaattaagatcagaccatggtaaggacttgagcttttattcagctgtcagcgagttgagctgaatcctgttgtctctgtctgctgtgttgataatatataatcagagaacaaagggtgaaatataaagacctttagtatcatattttgaaacattcatacccctcagagatgatggggtactttgtctaatgtggtagtagtgagcaccatgataactcactttctggctatgttttgaggttagagccaacaggactttgtgatggattgaatgtgaggcttgagagagagaggggagtggaggattctgn

SEQ ID NO: 16024 - DNA, 467 bp, Homo sapiens
  misc_feature (1)...(467): n = A,T,C or G
tgtgcgcacgngtnnnaactgactacatagcntggccangnccnggaattctcagaaacaggcatgcatagagggaggatgatatgaagagacagggagaagatttccattcacaagctaaggagggagtcctcaggaggaatcaaccccgctgctactttgctctctgacttccagcttccagagccatgagagaataaatgtctgttgcttaagcccctcagtccgtggtacattgtcttggcaaccctagcaaatgaatacacagactatgtatcgaatattgaaattgggttttaaggcagtaataaggcccatgctgcttccttgaggaaaattcagccgcaaaagaggattcactgcttattaatatggagacacgttctaccagatagagctctgggaatccaggttctccataggcaagcacagcagtgaacagtttttccaaacgtctccttcctaag

SEQ ID NO: 16025 - DNA, 450 bp, Homo sapiens
  misc_feature (1)...(450): n = A,T,C or G
catcgatttcgatgacactagncagngcggtggaattccatccgcgggctggcccattccatccgcctgctcctggaatacacagactcaagctacgaggaaaagaagtacacgatgggggacgctcctgattatgacagaagccagtggctgaatgaaaaattcaagctgggcctggactttcccaatctgccctacttgattgatgggactcacaagatcacccagagcaacgccatcctgcggtacattgcccgcaagcacaacctgtgcggggaatcagaaaaggagcagattcgcgaagacattttggagaaccagtttatggacagccgtatgcagctggccaaactctgctatgacccagattttgtaagtccccccaccccactcccagtctccccttccctactcccagtctcccctttccctgcagagtttgtgtccaan

SEQ ID NO: 16026 - DNA, 476 bp, Homo sapiens
  misc_feature (1)...(476): n = A,T,C or G
attcgaagaccctaggacagagccgaggaatttanagttgatngaccttcagaccagnccggcggaattccggacganccggctgagtaccatatttaatcgggctgtgtgccccttctccacccttaggagggcaaaccccaaagccattataaccagggatatggtgaacctcttggacggaaaactcatattgatgattacagaacatgggacatagtcaaggctacacaatatggaatatatgaacgctaacgagaattggtggaagcacgttatgatgtacggcaaccggacaaaaaaaatgataccctcctccattgggctgccatcaataacagaatagatttaggcaaatactatatttcgaaaggcgctattgtggatcaacttggaggggacctgaattcaactccattgcactgggccacaagacaaggccatctatccatggctgtgcaactaatgaaatatgg

SEQ ID NO: 16027 - DNA, 447 bp, Homo sapiens
  misc_feature (1)...(447): n = A,T,C or G
natcgagttcattancncgngcggnggaattcgcttttatatactgtacatcaagtataggaaatgtgcactgagtatactaaaagtatatgcaggattaattttacataaaggcctcttctgtaacatttctctatttttgaaatacaattgcaataacttcagtctttttacattcttctgctgcatccatacaatgctccactgctgttgagtgtcctttaactgtggaccaaaggcaacccctgcagtgtttataaaacaattttaagaccattcaggccacataagatgagaatgcaattttgcaggattacaaaaaagccattaatatgccagtcaagactacagttaaaactactcttgcactgcaacagtgcatatgacctttatgtgattgtacagtattaaaagttttttcttatgtacagtaaactttatcatatg

SEQ ID NO: 16028 - DNA, 452 bp, Homo sapiens
  misc_feature (1)...(452): n = A,T,C or G
attcgaaacccattgaggacccctantccatgcggtggaattcgctgtctgcaacaaagtgctgcttgggttgcagaggggtgggtgcctgtaagtgtggtgcacatttacacacatttctacaaaatgactctaccttgtggcacattgaagataattgtgtaagtagttatctctgaaaactaatatgccacctaatgctttaacacctgactctgcaggggtagacgattgttggatttgtccagccgtggtcctggtttcgtgttcagtgtctgcacgtcctgccatcatcactgccacacttactgttgacagctgtccctgctgcatgctcttagccagctccatcctgtgctctcagctgatatttcacaggctgggcctggtgtgctctggtgactcagtttactgtttcaggatgcacctctctctgactgtacggaaactan

SEQ ID NO: 16029 - DNA, 410 bp, Homo sapiens
gtgtccatctggtggctgggtagcacagtgctctaggtgtgagcctgccactatggccccctagaggcagatcctccctctccctcccttcccccagcctcctggctcccccagcaccagctctcacaaatgcttccctccctgggcttcagtcagccaatctacaccttcctctggcctctgcagacacaggagcagaggggataagtggtgacatggcagctcagggcttggggggcttggcaatccatagttaacagtcactgttcctggcccaggctggccctgctcatctgaagcggcccgggtggttcttgttctcagtctggacagtggcctcacctgcacctgggctctgcgcctgctctcatgcctttgcaggtgtgtgggccagaagcctgcaactgggt

SEQ ID NO: 16030 - DNA, 452 bp, Homo sapiens
ttttactgagaccatttgacagcgctgtggaattctagagagtagcccgcgggatcttcacctggtgtttaagcccttgggggttgtgtccctccaccaccagaaatcagaggaacttttcaataagattctgatctgcggtcatccccgaaaaggggtcacattgaattttcagcatttttgtttcttctggtcaaagttgatactttcagtgacatcagtggggaatttcatttgtaataaaagctgaatgaaaaagttttagggccagccctgctgccgtctgccgtgatgtttctggaaggtccttggtggtgggaagggacactgggcccggtgagtgcatttttggctgcccccagggaggggcctctgaaaatccatatgaagggaggcgcccatcgggtgatgcacttggcccacacgcgtgtgctggggaggccgtggggaca

SEQ ID NO: 16031 - DNA, 468 bp, Homo sapiens
  misc_feature (1)...(468): n = A,T,C or G
gtgcgtgngnnttttnccctgaactagcatcgcatngngcaggaacncctcattctgtggattctttgcctggaggagcccccttaatgttgctaatcacgtgtggttaaattgctcgtaaattccgaacaaaacaaatagcgacctgtgttacactgtttcttggtaactgggaaagttactggtggcttgaagtatacgcagaaaatacaaagattaaaaactagggaagagttcactgaatgaacaccgtaacatttctgctctgcagggtaaaataatttcgggacccaggtctgggaaagatttgtattaacaaggtaaacggtgggtagagtgcctgagaagctattcgtatcgtctttggtagcctctgggcactaggactagacatggaattaggggtcccccaacaatgacttcaattttaggttaatagaaaccatctgccacttaagggaaagaaag

SEQ ID NO: 16032 - DNA, 466 bp, Homo sapiens
  misc_feature (1)...(466): n = A,T,C or G
tggggcacgngtnnncctgattagcataccntggccangngcnggaattcggaatgggccctgacacgggcccccaggcccaggtacgtgtgtatgagccccgtcggttctgctggctttcgctaccctccatgcccacaccctgctatggggcctccaccttcctgcacgggaacaagatctatgtcctggggggccgccagggcaagctcccggtgactgcttttgaagcctttgatctggaggcccgtacatggacccggcatccaagcctacccagccgtcgggcctttgctggctgcgccatggctgaaggcagcgtctttagcctgggtggcctgcagcagcctgggccccacaacttctactctcgcccacactttgtcaacactgtggagatgtttgacctggagcatgggtcctggaccaaattgccccgcagcctgcgcatgagggataagagggg

SEQ ID NO: 16033 - DNA, 465 bp, Homo sapiens
  misc_feature (1)...(465): n = A,T,C or G
tggcggcggttttncctgaatacatggcatngtgcnggaactcgtggatcccgtggagccacatggcgagatgaagtttcagtgggacctcaatgcctggaccaagagtgccgaggcctttggcaagattgtggcagagcgtcctggcactaactcaacaggccctgcacccatggcccctccaagagccccagggcccctgagcaagcagggctctggcagcagccagcccatggaggtgcaggaaggctatggctttgggtcaggagatgatccctactcaagtgcagagccccatgtgtcaggtgtgaaacggtcccgctcaggtgagggcgaggtgagcggccttatgcgcaaggtgccacgagtgagccttgaacgcctggacctggacctcacagctgacagccagccacccgtcttcaaggtcttcccaggcagtaccactgaggactacaaccttat

SEQ ID NO: 16034 - DNA, 473 bp, Homo sapiens
  misc_feature (1)...(473): n = A,T,C or G
tgtggcnnaannanagaanactgagaccttggaagngttgataacctcttaagggnctccccaaactgatcatggctttgagaccgatcctgaccctttcctgtttgacgaaccagctcctttaaaaagaaagaactctgtgaaggtgatgtacaagtgcctgtggccaaactgtggcaaagttctgcgctccattgtgggcatcaaacgacacgtcaaagccctccatctgggggacacagtggactctgatcagttcaagcgggaggaggatttctactacacagaggtgcagctgaaggaggaatctgctgctgctgctgctgctgctgccgcaggcaccccattccctgggactcccacctccgagccagctcccacccccagcatgactggcctgcctctgtctgctcttccaccacctctgcacaaagcccagtcctccgggccaaaacatcctggcccggagtccg

SEQ ID NO: 16035 - DNA, 414 bp, Homo sapiens
  misc_feature (1)...(414): n = A,T,C or G
gcttataactggagatcttttggcttttctatgttgtcgaatgtaatgtctgagactagctaaattaacacgggcatttgtattttgtaatttttttaaataactggacatatgtcattttaaggacaatagaaacacttagacttacttgaaaatccaatgctgcaccacttgtaatgaaggcaacaccgctctccacattgtacagagcttcaggtttaatgtagcccagctgagtcagaaaggttgtgacctgaaggcagaagaacccgaatgccacacctcattggagtatagccagtgttggtctgtggcacttgggctgaaaggtgataatggcattgcgtggtagctgacaatgagcaccttcggttccatgtggagcggggtttaactcatgcaaaagacttgcan

SEQ ID NO: 16036 - DNA, 447 bp, Homo sapiens
  misc_feature (1)...(447): n = A,T,C or G
nttcgagttcgttagcccgnngcggggaattcgccatcacaccctctagaaccaaggggtagtgttttaagatagaggactgggtgagtatcataaagctgtgctttgaaaacctgactgcttttaagtatttcctgttttgttctcattttgtaggtattagaattatttctgaattatcagtctctcatttgtgctttggagaagcagaaaaggcaaaaggggtctttggccatcttctgctggagcttccagggaggatgtgtctccaagagaccagatgtaccgagtttgaaatcccagaagcccaagaggaaaagaatcacagggaggaaaagactgtccaaaggcttctggagtcttctgttctctaaccttggaaggttttgaacaatatttctcagaggatagcctttcacttattcatctgtccagcatgactcatcc

SEQ ID NO: 16037 - DNA, 453 bp, Homo sapiens
  misc_feature (1)...(453): n = A,T,C or G
nattgtagatccctagtccagcgtggtggaattcactcacaattgaaaagaaaaggacacttaggggcctggtggtgtgttcatgctgctttgaatggagggtgaacaaatccttgccagttcctttaatgtattcctactaccctcaaagggttagtgtgcctaccttataccaagaacataaactttaaaataaaaaccctcaggatattctatttttattttaaatattccaactatatgcagaataaaaagcaacggcttttgaatcagacctacctgagttcaaggcatgtgctttccctactctgccctttattagagtatttccttataaggcacctccttcgccaaactggaagacagatgcaacttttccctaccatcctactgaacatataacccttagatttccttagatttttccttaataaaaattattatatataaaaa

SEQ ID NO: 16038 - DNA, 463 bp, Homo sapiens
  misc_feature (1)...(463): n = A,T,C or G
ggatgaaaacctgatgacctgttgagtgccgtggaattctatcnctaaaagtagttgggttgaatgaaaatgggctgttttcttgaaaagaaatttctttaaaaagatttttctctgtgatccactagagggaagagttattcctttaaatacaggttttgtgttgttttttttttctgagactgagtctcgctctgtcacccaggctggagtgcaggggcatgatcttggctcactgcattctccacctcccaggttcaagcgattctcctgcctcagcctgccgagtacctggggctacaggcgcacgccactgcacctagcgaatttttctgtgtttgggagatgggttttcactatgttggccaagctggtctcaaactcctgaccttgagtaatccgccctcttcggcctcccaaagtgctgggactacaggtgtgagccactgcacctggcataatn

SEQ ID NO: 16039 - DNA, 469 bp, Homo sapiens
  misc_feature (1)...(469): n = A,T,C or G
ggaagaannntttgaanaccntcctggagntccatagtacagtgcggtggaattcagaagacagctctcagaaatatgaagtacaggaaatgtaagtagcacctcctcagcgttccagtttctgtacccacaaccccatgcactcactatttatgtagcgtaattcgaagcatgtacatggaggaactggtggtttgctttttcctcccaacatgtcagggacagcatacttaagtggctgcttctctgctagcggagtgagtctgcaatatttgacaggtgtcatttttaaacatcctggtgactaataaaacggtgcaatcgattgcctttaatatcagattataaacgtgggtgtcttactggatcctttattttctattcactaatacagatagagcacacgggaagacaatactttatgggctaaaagctgaataacttactagaagttctaaactttatgatt

SEQ ID NO: 16040 - DNA, 469 bp, Homo sapiens
  misc_feature (1)...(469): n = A,T,C or G
ggcggccagngnnnnntttgaactgataccntggccangngcnggaattcggatcacttgaggtcgagaattcgagaccaatctgggcaacatggtgaagcccgtgtctactaaaaatacaaaaattagctgggcatgatggcgcatgcctgtaatcccagctacttaggaggctgaggcgtgaaaattgcttgggtctgggagacagaggttgcagtgagccgagatcacgacactgcactccagcctgggtgacagagtgagactctttctcaaaaacaaacaaacaaaatattcccacaaagaaaattccaagcccagatggtttcttcagttatacaattaagcatttaagaataagtaactctaatttcacacaaactttttcagagacactttccaattcatccacaacactagcaaaacttaacaagaacaataagagaaaggaaaatgcaggccagtctct

SEQ ID NO: 16041 - DNA, 461 bp, Homo sapiens
  misc_feature (1)...(461): n = A,T,C or G
agggcnctnnnnatagagaactagagaccgtgcggaggaactcggaggaggctgtcaatactgtgtttctttccagggaggcaacgggtgggtgcgatgttgtcacttaagttgccacctctgcataagagctctctgatcagaaagcagtttctttgttgaccccagccagccttggctctcgggttgggaaatacagtcacggtatccatggagacctcttgaggtggagacgggcgttaaatccttctcaggcagtctgaggtggccagagtctgaagcaagcagcctctatggagcgaggggagcaggtgggcccagcctgagcggggcctctgcacagccagctttcccccacacctgtctccagccagggcacccacaggccctttctctcccaggatgaagcctgctgggagcgtgaatgacatggccctggatgccttcgacttggaccggan

SEQ ID NO: 16042 - DNA, 464 bp, Homo sapiens
  misc_feature (1)...(464): n = A,T,C or G
caggcccntnnnatagagacctagagacatctacccagagcggnggaattccaaaataatgtcttttgccgcgacttggatgaagctggaggccattattcttaagtaactcaagaatagaaaaccaaatattgtatgtactcacttataagtgggagctatgaggacacaaaagcataaaagctatgaggacataaaggcataaaaatgataaaatgtaatttgaggactcgggggaaattggaagaaggatgagggataaaagactacatattgggtacagtgtacactgcttgggtgatgggtacactaaaatctcagcaatcaccaccggagaacttatctatgtaaccaagaagcacctgtacccccaccccaaaactattgaaataaaaaaattggagccccaaaatacaatctattaaaaacctttaattgcacttcatcacaatttaacacttgct

SEQ ID NO: 16043 - DNA, 473 bp, Homo sapiens
  misc_feature (1)...(473): n = A,T,C or G
gcggtncttttaatcgatagcactacgcaagngcggngcaattcgnttcaccctgtccatttctctttgatgtgccattcatgccttgagcctcactttcacctcagcccacggcaccaggccccaggccctgtctccttccctattcaggtaggcttgatcacattcatggccctggtaggcagctttgtgccagcagaggaggccgaaattggggcagtagacgccatcttcacacgaattcatagctgcgaatccatctcccttggcctctccaccttcatgatcgacctcaaccaggtcaaagggaacaaagggaggtgggattgaggaaggggataatgggaaaggaacccctgaaaatgctcataacaggaaagcatgccctctgctgcatgccctttatactaaaagtggggagcactaaggtcagagataagaagaatcaataccataaacatttcttgaaccct

SEQ ID NO: 16044 - DNA, 468 bp, Homo sapiens
  misc_feature (1)...(468): n = A,T,C or G
cggaatgtgnaactcgagaccctattgagtggnttgaattccgcttgagcccaggagtgtcgagacagcctgggcaacatggtgagaccctgtctccataaaattttttattaaattgccaggtgtggtcgtgtgtgcctgtgaggctgaggtgggaggctcgcttgagcccaggggtcaaggctgcagtgagccatgactgcacgccactgcactccagcgtgggtgacagagtgagatactgtataaaaaaaaaaagctaaaacaaaacaagaagttttatcttaagcatgttatttaaaaatatggagataaataaaaataactgaaagtaggtagttgcttctgaggaaagaaattgggagttggcaagagagtactgtttttcaaccatgtaaatgtatttgttttattaaaaacagattaaaggcaggcgtggtaatcccagcactttgggaggccgaggcg

SEQ ID NO: 16045 - DNA, 475 bp, Homo sapiens
  misc_feature (1)...(475): n = A,T,C or G
catcgagacctctatcgagngcggtggaattcaaactctgcccagctgcaaatactctgaatgagatcttcttaatccatttcatcactttctgccaagaaaagggagttgatgagtggctgaccaccaccaagatgaccaagcaccaagccttcctgtttggtgcagactggatttggaccttttggggatctgacaagcaaataaagcttcagctcgcagtacagactctgcagatgtcttcacctcctcctgtggaatctaagccttgtgacctttccaatccagaatcaagggtagaggagtcttcctggaagaaaagtagatttgataagctggaagaattctgtaacttaataggagaggattgcctgggtctgtttatcatctttggtatgccaggaaagcctaaagacatcaggggagttgtcctggacagtgtcaaaagtcagatggtgaggagccatctgccagg

SEQ ID NO: 16046 - DNA, 462 bp, Homo sapiens
  misc_feature (1)...(462): n = A,T,C or G
acgcgcccctcnttaagataactagagaccgtgcggaggaacgcngnagacattcagactgagcgtgcctaccaaaagcaggcgaccatctttcaaaattttaagatggtcctgctgggagaaactggcaaggagaagctcccgcggtactacaagaacatcgggctgggcttcaagacacccaaggaggctattgagggcacctacattgacaagaaatgccccttcactggtaatgtgtccattcgagggcggatcctctctggcgtggcgaccaagatgaagatgcagaggaccattgtcatccgccgagactatctgcactacatccgcaagtacaaccgcttcgagaagcgccacaagaacatgtctgtacacctgtccccctgcttcagggacgtccagatcggtgacatcgtcacagtgggcgagtgccggcctctgagcaagacagtgcgcttn

SEQ ID NO: 16047 - DNA, 456 bp, Homo sapiens
  misc_feature (1)...(456): n = A,T,C or G
gtttgagnccccattgtcgnacccctagtccgtgtggtggaattcggcgaccgccatgtacttggagcactatctggacagtatcgagaaccttccctgcgaacttcagaggaacttccagctgatgcgagagctggaccagaggacggaagataagaaagcagagattgacatcctggctgcagagtacatctccacggtgaagacgctgtctccagaccagcgcgtggagcgcctgcagaagatccagaacgcctacagcaagtgcaaggaatacagtgacgacaaagtgcagctggccatgcagacctacgagatggtggataaacacattcgaaggcttgatgcagacctggcgcgctttgaagcagatctgaaggacaagatggagggcagtgattttgaaagctccggagggcgagggttaaaaaaaggccggggtcagaaagaaaaaag

SEQ ID NO: 16048 - DNA, 454 bp, Homo sapiens
  misc_feature (1)...(454): n = A,T,C or G
attcgangaccccttgtccagcgcggtggaattcggtcctaatgggccaaatattcagaagcttttatatcagaggaccaccatagcggccatggagaccatctctgtcccatcatacccatccaagtcagcttctgtgactgccagctcagaaagcccagtagaaatccagaatccatatttacatgtggagcccgaaaaggaggtggtctctctggttcctgaatcattgtccccagaggatgtggggaatgccagtacagagaacagtgacatgccagctccttctccaggccttgattatgagcctgagggagtcccagacaacagcccaaatctccagaataacccagaagaaccaaatccagaggctccacatgtgcttgatgtgtacctggaggagtaccctccatacccacccccaccatacccatctggggagcctgaagggccn

SEQ ID NO: 16049 - DNA, 424 bp, Homo sapiens
gctccctgcactgccacagcccagatgcagttctcctgacccagccgtgctacccggacacttgtcattgttaccagcagtctccaaactggacagtgcacaagggcccagaacaactctgatgccaccacaaaacaaacatgttcactagcggattccattctttgggttaaagctgcctccagcctcaggagcagtgtggaggaagatgagggccaggaaagaaggaaaccttggtttctccatccttgtgaatgtcctcgtctgtttcaaatacagtgcagtcagttttatatgatgtgcaataaaccaaaaaggctttattaaaaaaaaaaaaaaaaaaaaaaaaaaaaaaaaaaaaaaaaaaaaaaaaagggcccctttaaataaaaggggccccttaaaaccccggtaaaaccctttg

SEQ ID NO: 16050 - DNA, 460 bp, Homo sapiens
  misc_feature (1)...(460): n = A,T,C or G
gagcccntnnttttgagaactgagancattacgccagagcggnggaattcgtcttggccaaattttatcttctgcctatagtttttactagcctttttaaactataatagtgagtgatcattactttatattctcgtaagttagaaatacttgaatgccaaattaattttgttttaagaaagcttatttttaacataattttttagtgtggagggtttgtaaataatgtaaagtttgtaaacctgtatttaaaataccaaagtttttcttcttttataacattgtaagatactagaaaaatgggcttcaagttttttaatagctttcacagtttgtgtagttttttttttctatttggttaagatgtgagttggaaatgtattatttgaaacatttaaactaatttttgtatttaacagcagtctcagacatttgtcttttcaactcagttgagttgtag

SEQ ID NO: 16051 - DNA, 489 bp, Homo sapiens
  misc_feature (1)...(489): n = A,T,C or G
aggagggattgagacatggtcaccgtggnggaanncgaagcattaccaataggaatggatcgatagttgaataatgattttttatacatagatatataaaatacagccaggaaaacttaaattacttttcttttaaaatatctcacaatttatgtggtatttttaaagactgatcttagaccaagtcaaattcccatttatcatttagttattttttgagattagagaataatttgtacatatttatttagacctttgatatttattaaagcaattactcacaatggaagtgaaagaatcacgagaaaagccttttaaaaagtattctccaggtttgtcagggtcactctaaagataaaaatgtaactaagtcttctgtgaaatatcatccatctaatcttgatgctgttgcagatggtggtgacacaagttaattgacaaactactgccaaatggtgcacaatattttgtacaaagtacccactagcn

SEQ ID NO: 16052 - DNA, 458 bp, Homo sapiens
  misc_feature (1)...(458): n = A,T,C or G
nttttaattgatgacctttagtccgtgcggtggaattcaagaaggtgatgaactggaaagaaactttgacttttcctccagaagttcccatctctgagaaagccaaggatctaattttgaggtattagagaacatccctccaccttctttctcagctttttaatatgaatgattccatttttttaaaaacttttgttatctcctgaatctgctttctgtttcctcctattcctctctttaaacaaataaaaaggctgtgcatggtggcttacgcctataattccagcactttgggaggctgaggcagggggatcacttgagcccaggagtttgagaccagcctggacaacacagcaaaaccccacctctaaaaagaaaaaattggctgggtgtggtggaacctgtggtcccagccacttgggaggctgagatgggaggatcccttgagcccaggaagt

SEQ ID NO: 16053 - DNA, 411 bp, Homo sapiens
acttgaaatgcaatttagacagaggccctgtggtgaaagttgcaatattaagtttacctttagaagatcccttctcaaactcagaaccctagcagtgttaccttaaacaaaaatgagctcgagaaaaaagtagctcagttacagagaagcaaatcgagttatttcccacataaaaagtttcccagattctaagaattgcagtatcctgtaccctaaaatttttcaaggtgactcctgttgtcgtctgttgataactttaataaaggtcatttaaggacataagtttttaaagactcccaaagtgaaacttaaacattttcgggattatcgattgcatatatcagtttatgctgtgtgctgaattactatgccatgtgctattttagtgtttggggaaaatgaaaaataaaa

SEQ ID NO: 16054 - DNA, 459 bp, Homo sapiens
agtcgaagaacataatcgatagccgtggaattcgtcattgattgacagtggaaaaatagtccacttacgtgttattcctgctgtaaatatttttctggagtattatccagcgataagcagcaaaagctataaaagctgataatactttttgatatgatcgttccattgtttgcaatatatttttattatacagaagtaactctcaaaagaggatttttcttttgcaaaatgtgctaaatgtaatagaaaaagaaagacaaagtagtatgttggtataaaaaccatctcattaagaactatagcaggtctctgtattacctcgtaaaaaaaaagtatattaataaaatgagaaggaaaaaaggcagaacacagaagcatatgtgtaatgataatattaattatgcttaaggatcaaagagtccataaaacagattaatggtttccagaggttaaggatgg

SEQ ID NO: 16055 - DNA, 491 bp, Homo sapiens
  misc_feature (1)...(491): n = A,T,C or G
cgagnnnagcgcgngccnnnnnaaaatcgagaactgagatctatcgcggaggaacncctagaactcctgaccttaggtgatctgcctgccttggcttcccaaagtgctgggattacaggcgtgagccactgtgcccaaccttccggcttcttagattgcttataaactatatagtcttgctttcgtaggtctgaaataatgatataaattttacttttaggtaagtaggttgcagtttgcatttttccataccttttgggtgtttagaagtaagtctgatcctttatttcaattcaaagaccatgaacagttgctttttataacacttaacagatgagtgttcagcttattttagctggggtccctgaacttcattatcttagggttcagatttgtttttgctatggactttatttctggcttattttatatcctaggtttaggatgtgctatttactttgtaacacgtattactgtagtttcaattgttt

SEQ ID NO: 16056 - DNA, 470 bp, Homo sapiens
  misc_feature (1)...(470): n = A,T,C or G
nattgagaactgtgaccctagtccagngcggtggaattcagaaaacccctgaacaatgttcatcttctgtgaaacttgttcaaatagttaagcttaaccatgttgctgccaaagacttttcctatgcagtggtggggcaccttgatcatcatcattatcttgattggctgaaaaaaaaatagttttaagcacacaccactgtctatgagaactgcaaattgggagaataggtgaaatgcagaatctgagagaacgcgagaagatgagatcattacagggtggaaagttctgcagcagccttttctggtaatccctttctgcagaacctgatgtttatgggctctaaaacgcagcttagctttagaagcaacagaaagcatgaaatagggtgtccattttaaatgtgttcctgcaacttttttcattaaaactttgagggcccaattttaatttgtggaatattcccgtta

SEQ ID NO: 16057 - DNA, 458 bp, Homo sapiens
  misc_feature (1)...(458): n = A,T,C or G
nttgagaacctccctgagtcnctacgnaagngcggnggaattcgattacaggcgtgagcgcaccaagcctggccttctgtcatccttttatagggtattattataatccagcttgcagtatgggggatgagagacctgtgtgttctaatttctaggataccattccatttctatgagtcttctgcacaagtgtggtctctagggttgcactgtggttatttgtaattgctgaaagtgaaactttctccttggattccccagcgggtcagagtctgttattacagattagagtccaggattatagaatcagtaatttttattaacagttggctatgactatctagagtaagcactgcatttatttttccaagatgttgtcatgtgacataacttatggccagtaggatgtaagtgaatatttttggcagttctggaaacctctcttaaaacacagctgg

SEQ ID NO: 16058 - DNA, 470 bp, Homo sapiens
  misc_feature (1)...(470): n = A,T,C or G
gggtggccngnnttnaggggacctgagactatagacattgaggncgtatgctcggngaattgggaagcagtgtttttcgccatccttgcaaagttttgtaagtagcaacggattgcctccaagccctattcccagcccaacgacccgatttaccacccggagaagccagagccccatcaattgcattagaccaagtgttcttggaccattgaaaagaaaatgtgaaatggaaactgaatatcagccaaagagatttttccagggcatcaccaacatgctttcttctgacgttgcacagctgtcagatcctggtgtgtgtgtatcttcggatacccttgatggaaacagcagcagtgccggatcttcttgtaactcaccagcgaaagtcagcactaccaccgactctcctgtgtcacctgcccaagcggcttctccatttattccactagatgaactttcgtctaagtgan

SEQ ID NO: 16059 - DNA, 494 bp, Homo sapiens
  misc_feature (1)...(494): n = A,T,C or G
nagtcgggccaggnnagggataattcatgtangcanngttcagctcgcctaacgnnanngncgnggaattcgngtttaatgtgaggcatcagctgctagacagtgtctgcctttccaggacattcttcttggtattccttacctgaagcctggttcccacagctcttccgtgtcatcttcatccccttcctttaatcaaaggctgaaatctctgcctgacctggcagcctggctccctctgggtcatatggtgcagactgtgaccagcaccaggcaggcagtcctgtctgcgtgtggaggagcagccgtgactgcccgtggctctgctgccgcccactccctgccttgtgagtggcctgctgcctcacctcccgcaggccgccacacttattgcaggtcagtgatcctttggagtttgaatttcacaaagctttttttatcttcagttcctaaaatataatctgataattaatggtttgtggaatccattatgn

SEQ ID NO: 16060 - DNA, 434 bp, Homo sapiens
  misc_feature (1)...(434): n = A,T,C or G
cccaaaagacagaagaaacttccatacctgaggtccctgcgagtagattcgaggccgttcttttttatttttttgagacggagtctcgctctgttgcccaggctgaagtgcagtggcgcgatgttggctcactgaaacctccgcctcccgggttcacgccattctcctgcctcagcctcccagctgggactgcaggcgggtgcccccgcgcccggctaattttttgtatttttagtagagacggggtttcaccatgttggccggatctcgatctcctatctcgtgatccgccgcctcggcctcccaaagtgctgggattacaggggcgtgccaccgcgcccggcctcgagggtgttcttaagatcccacggggatcgcttctcacggagctagccgagcctctggctggagactacgtcagctaattcgctacn

SEQ ID NO: 16061 - DNA, 360 bp, Homo sapiens
ggttccctggctgtgaaaatacatgagataaatcatgaaggccactatcatcctccttctgcttgcacaagttgcctgggctggaccgtttcaacagagaggcttatttgactttatgctacaagatgaggcttctgggataggcccagaagttcctgatgaccgcgacttcgagccctccctaggcccagtgtgccccttccgctggcaatgccatcttcgagtgggccagcgttctgatttgggtctggacaaagtgccaaaggatcttccccctgacacaactctgctagacctgcaaaacaacaaaataaccgaaatcaaagatggagactttaagaacctgaagaaccttcaccg

SEQ ID NO: 16062 - DNA, 470 bp, Homo sapiens
  misc_feature (1)...(470): n = A,T,C or G
tgggagatttaattgatagcatacgtcagngcggngcaatttcaactcttttgtcttgtaaaatcatatcctcgttgagggcatgaccacagtgatttgtttttaggcttgtttttatgtagtacctactaaatatgtttaaaaaattcattttgaaagtaaaaagtcaacacataggaaggtagacttctcttgtaacctgtatactttccatataaaccgaagcagtaatcaggtttaaattatttgtcttctgaagtgcctatgattgggtctgaaaggctggccttgctcccagacgtttagaaaagcagctagatgtgcacaggtttcctgcgggtgacagagaggccagcgcagcgcctgctgttcaggagcgtctcagaggcacacgagagcctgttggctgctcgcgcagagagcgcatgtggacacctggacagccgcgtgacttggaagcatgggagttn

SEQ ID NO: 16063 - DNA, 465 bp, Homo sapiens
gcgggcttttatcgataccttctccatgcggggaattccggtgtgagccactgcgcctggcctaaacaaactttttgaaaagctgtttctaaaagattccttaaattcagatatgacagctaattacctcatcataaattacttttatactaattgtttccagggttttagagtagttgaatgtttatttcacaaggcaccctaaattctatagaaataaaacctcagatgagtctccttcttagagtgttacaatgaatgggagtttacaacttttatgtgtcatgtttccaacagctgtgtttggggtggtcactggcaggaggggaccgtatctcagaatggcacattatttctattttacacatgagcaaattgaggcatagagagttagataacttgcccaggttacacagattgtaagttgatgaagctgggatttgaatcttcacatgtgtgtactta

SEQ ID NO: 16064 - DNA, 444 bp, Homo sapiens
  misc_feature (1)...(444): n = A,T,C or G
ctcgacnttgatgaccattacacagngcggnggaattccaagtttgagccactgcacctggctaacttgccctattttaaagtcaagcaatgggaagaataacaagattatatagtaatcagtttcatgacactaaaagtcatatagtcatagggttttttcatctttcatatctttgcctaaattcatttgctacagtgcaggaaccaaaacttgttcatctcatgattccctacatctgacataaggaaagtaagtgctcagaaaaatgtgcaggtcaataagttgcaaaagttggggctgcaattaatgctaacataagagctaaatgcttgattagaaatgatctcaaaaccttttagaatttccaaaatcttcatattactgaaactgtcggaatatatgggtcctgaaattcagaagatgatagtcactcttcccatn

SEQ ID NO: 16065 - DNA, 478 bp, Homo sapiens
  misc_feature (1)...(478): n = A,T,C or G
caagagaccacattgagngcgtggaaatcggcctttggaaggctttgggggtgcactagagatgaaagggcggcgtctagacttacaaggaatacgggtgctgaagaaaggtccccaggatggagtggccagaagctcttgctatggagactgcagaagtgaagatgatgaagcaacagaatggattacattccaggtcaaacgtgtaaagaaacccaaaggagatcataagaaaactcctgggaaaaaagtagaaacaggtcagatagaaaatggacatcgttaccaagcaaacctagagatcactggccccaaggtggcatctcctgggccacaagggctactagactggaagaccaggaaagtgccatagacataatgtaactggatttcagcaaggcatttaacagagcctcttatgatatccttgtgaaccagatggagagatgtgggcttgaagccttcccattgcctacag

SEQ ID NO: 16066 - DNA, 480 bp, Homo sapiens
  misc_feature (1)...(480): n = A,T,C or G
catgaccccttaattgagaccctaggaagngcggggaattaataatggaaactgcaaggatcagcataaagtgttcctttgttctgacgttggtataacattgcttcttgaaaaatgaaagtatttggacatacagacagaagcaatattattcaggtcttccttgttgcaagtgagggaaatccaattaaaactggtttaaacctaaaaaaaaaaaaaggaagaaaagaaaagaaaaattttggggggggttttgctttttggaatctgctttttaatcaaaaagtgcaaaaaaagggctagcttcaggaacaattggatgcagtagttcaaatcacaagttaagcctctgctttttttctccatctcttttttggcttcctccacactggctttattcttaggtaggcttacccagatagtcataaacacagccaccaggggcagctgggctcacttttgtccttggagccagtgacg

SEQ ID NO: 16067 - DNA, 489 bp, Homo sapiens
  misc_feature (1)...(489): n = A,T,C or G
cgccgccccccnagnnnnnnattcgagacanngnnnnatttcngaccctagtccgtgtggtggaattccgctgggatatgaagcttcgtcatcttggactcagtaaaagtgattctagcaatagtgattccactcagagtcagaagtctggcaggaactcgaacccccggcaagcacgcaactaaatcccgaaatacaaaaagtaacacagtggacttcctattaagacttacttgcattgctggactagcaaaggaaaattgcactattgcacatcatattctattgtttactataaaaatcatgtgataactgattattacttctgtttctcttttggtttctgcttctctcttctctcaacccctttgtaatggtttgggggcagactcttaagtatattgtgagttttctatttcactaatcatgagaaaaactgttcttttgcaataataataaattaaacatgctgttaccagagcctctttg

SEQ ID NO: 16068 - DNA, 474 bp, Homo sapiens
  misc_feature (1)...(474): n = A,T,C or G
gctgggnttttnntttcgatgaccattactccagngcggnggaattccatttatggggtacatgagatatttttgatacatgcatgcaatgcatattaatcacatcggggtaaatgggatatccatcccctcaagcatttatcctttgtgttacaaacaattcagttgtttattttaaaatgtacactaaatgattgttgactgtagtcacccttttatgctattaaatactagatcttattcattctaactacacttttacattttgaaacatagtgaaaatgtcatacttgatattagagtgaattattcagtgtacacattatatgtattttaatatgtttctctttaggctgccttctagtaccaaatgttataatcagataattgacctggtgtttgtggtgatctgatattatcaggaaaagcattactctgcctttttaaactcttaaattgatacaactgctggaa

SEQ ID NO: 16069 - DNA, 528 bp, Homo sapiens
  misc_feature (1)...(528): n = A,T,C or G
tgagtctcncnnccccccccctttagaccctcntcagtgtggtggcattcgccaagtcttcgattgcatagaagagcaactttgtaacttcatcttaacctctgattggttgctttctgcaaccaatcacatgtttgcataagcgtgtgacctttgtaacttcacttcaacttctgattggctgctttccacaaccaatcagactgattgtgggccaccacttcctttacgtgaggtgaacaccaagtggccaatggaaaacctcaagagggtatttggacctgagaagattctgtatctggggcccttgagctgctgctctgcccactctcacatggtggagtgtaagttcactttgaataaatctctgcttttgttgcttcattctttccttgctttgctgtgtatttagaccaattctttgatcaaaacgccaagaacctggacaacttgcagtcaagaccctctaccagtaacactagatggatccctgtaaatgaatgggctgtgaagattttctagaagaaa

SEQ ID NO: 16070 - DNA, 459 bp, Homo sapiens
  misc_feature (1)...(459): n = A,T,C or G
ggtaaaatcgtagacattagnanacttgaagatccttagtccgtgcggtggaattcgagaaaatggcagacgatattgatattgaagcaatgcttgaggctccttacaagaaggtgagaaaaaacatgtcggngaggtttatatatttcttaatttagcattattcacgaaactactgctgaaatgtaaactaacctccccggagccctcttgatttatcttatcagagatgcattacgtgtaacttacaaaagtaaatatatgctattgatgtaataatattgtgcagtagtttcacttcagcgtgatgaataaatgcccatctatctctctttgtagacttgcctaacgatatctcacctctactcccatgaattcacctttgattccagtgtgaactgtcaatcataaggtagtaattgagtgacttatcgctgtaccgtggtcccctaggtaaan

SEQ ID NO: 16071 - DNA, 491 bp, Homo sapiens
  misc_feature (1)...(491): n = A,T,C or G
cgggggaggccgggtcnnnnnaattgagatcgatggcatctgcccagngcggtggaattcaaacaagataaatgctgtggctccttcctaactggggctttcttgacatgtaggttgcttggtaataacctttttgtatatcacaatttgggtgaaaaacttaagtaccctttcaaactatttatatgaggaagtcactttactactctaagatatccctaaggaattttttttttaatttagtgtgactaaggctttatttatgtttgtgaaactgttaaggtcctttctaaattcctccattgtgagataaggacagtgtcaaagtgataaagcttaacacttgacctaaacttctattttcttaaggaagaagagtattaaatatatactgactcctagaaatctatttattaaaaaaagacatgaaaacttgctgtacataggctagctatttctaaatattttaaattagcttttctaaaaaaaaa

SEQ ID NO: 16072 - DNA, 478 bp, Homo sapiens
  misc_feature (1)...(478): n = A,T,C or G
cggcgggcccccnaggatnanctacnaccttcgattgangcctangaaggnncgnnggggaaatgggagagttcctgtccccctccacatatccctacatgaaatatgggaaagttgctgctattgattcagggtctgtcttggaggcagaggacccttggtggatagttggtcagtgcctggaaaacctgtcccagtttatcaggaacgcaggcctggggagcccccagtggcggggacagggccagatttcatgttgaccctggggatgctgtgaatttctcctgcaggagagacatcattgaattttttcaactgtatcagtagcacagtatttttgtatgaaaagtgggagacttctgaacagtaattcatttaattgcaaagcattttgaaataaaaaaaatcaaacttaannnannnnannnnnnnnnnaanaaaaaaaaaaaaaaaaaaaaanannnnnaaaaaagacggg

SEQ ID NO: 16073 - DNA, 455 bp, Homo sapiens
gcggttaactcgtagtcactagtccagtgcggtggcattcgttggcactcaataaatattggttaaataagtgaattacaagcaggttggattattaggtaatatggttcgcagtgtgggactcctgaactccaagatgtctttgaaagtagccatttttttttaatttctaatggtttagtcagactacggattacttaataacagggactatagttcattcatggatatatccccagaatcaggaacagtttctagaatacgcttgagtgctcaatagacatagctattatagttaattgaaatggaattggcaatgtgggaaataagaaatcacatttttggccaggcacagtggctcacacctgtaatcccagcactttggaaggccgaggcaggaggatcacttgaggtcaggagttcgggaccatcctggccaacatggtgaaacccct

SEQ ID NO: 16074 - DNA, 553 bp, Homo sapiens
  misc_feature (1)...(553): n = A,T,C or G
gaccggactgacgcatgctctatgtgcatcatagttctcgtctaatattcaaccatatcctaggatagcnngnanccngnnnnnnnggtttgagacctttcgaagnccgtnggananngcggnggaaganaagagggncaccaanagacagctgttgaaaagacaaccgaccggggattcggaaaattcagcattatccagaattttttcttggaaatgaactctaggaggaagcatgatttcactgaatttacagaagatctcacaagccctggatctttaagccagggtagatggacaaacagattttaattccttaaggcctgctaccctagcacctcacatatataaattttgatcaagtcttgagtgacttgagattgtgtcaaaattctggcagggatctttaagctaatactgtgttcataagaagaggttccataaggacacagagtttcaattatagaaagagcagatctcagaactgggaaggttttagacgttacccagcctctatttcttgattgtatggtggagtcaacaaagacctacg

SEQ ID NO: 16075 - DNA, 504 bp, Homo sapiens
  misc_feature (1)...(504): n = A,T,C or G
cgaggctcncccatgagaactgagtcactgtcgnggaattcgtttacttgacatggttcagactgaccaatgcatttttttcagtgacagtctgtagcagttgaagctgtgaatgtgctaggggcaagcatttgtctttgtatgtggtgaattttttcagtgtaacaacattatctgaccaatagtacacacacagacacaaagtttaactggtacttgaaacatacagtatatgttaacgaaataaccaagactcgaaatgagattattttggtacacctttctttttagtgtcttatcagtgggctgattcattttctacattaatcagtgttttctgaccaagaatattgcttggatttttttgaaagtacaaaaagccacatagtttttccagaaaggtttcaaaactcccaaagattaacttccaacttataagtttggttttattttcaatctatgacttgactggtattaaagctgctatttgatagtaattaaatn

SEQ ID NO: 16076 - DNA, 460 bp, Homo sapiens
  misc_feature (1)...(460): n = A,T,C or G
cggtaaactcgtagacattagnanatttcgaagtccactatccatgcggtggaattctggacatcacggttattcttcctgaactcagccctgatagtgcagtgccccagtgcaagtccctggcacattggcctggagtttaaggctctgcataccccacccgggcatcctgcttcccctgcacaatcgctttgctggatcagtgctagctgggtctgtctctccagcgctttagaagccgccctcctgctgtgtcttcgctcattctgttcccttctcccggtcccccactgtttgctgctttgctttttatttctcaaggctcagttcaaaagccaccatttccaccaagacgtggtgacctcaactggattggagacaacgcctctccccagctcctctggaatatggttctgtcctctgagcctggtatcggcgtcgatgctgtctacatgcgctg

SEQ ID NO: 16077 - DNA, 456 bp, Homo sapiens
attgaagaccacttgacgacccctagtccatgcggtggaattcgcgggcgctcgtggtcccagctgcacgggagactgaggcaggagaatggcgtgaacccaggaggcggagcttgcagtgagcagagatcgcgccactgcactccggcctgggcaacagagcaagactccgcctcaaaaacaaaaaaaagagggcttatgctccttaatcacatttctcctgtacatggttttctccatgttttatgacaggtaatctctactactgatagttctctagtcttggtttggttcatcaagataaagaagaaattaaacaccgacaacaggtttagcaagtgtggtaaaaggtgctgtggatgtaaaaatatccaaatgatcattaaagaacaatgaaaagaatcatgctggcttccaagaaattgcacagaagataattctcttgcaaggtgaagg

SEQ ID NO: 16078 - DNA, 465 bp, Homo sapiens
  misc_feature (1)...(465): n = A,T,C or G
atcgacccccnnnnaattgtagaccattagtcagtgcggtggaattctccattttaaaatgataggaatctaaaactctttttcaaaaatgccaacctgtttttccggcatcatagtagttggaataatacagatataattgactaatcataaagtacatgagagtacagaagggaaatttggaaacggtaagtctgctagggcattacaatcctgtcctagcactccacctttattctgccaacctgggttaattaaagatggtagcctggaaagtaatgaatgacattgacttcaggcaatctttccactgattattcttggctgaacttcatttatcgagtcagagaatgcactggctgagaaatgtcccagaggagtgaatcctaggcctggccacagtagaatcgcctggagaatttaagaaaaaaattgttgggcactcactctttccagtgatctttn

SEQ ID NO: 16079 - DNA, 464 bp, Homo sapiens
  misc_feature (1)...(464): n = A,T,C or G
gaataannntttgtagaccatattgagngccgtggaattcgactacaggatcttgcactgcctggtgtccatctgcttccagatgactgtcctgcgggacctggagaagctggcaggctggcaccgcatagccatcatctacctgctgagtggtgtcaccggcaacctggccagtgccatcttcctgccataccgagcagaggtgggtcctgctggctcccagttcggcatcctggcctgcctcttcgtggagctcttccagagctggcagatcctggcgcggccctggcgtgccttcttcaagctgctggctgtggtgctcttcctcttcacctttgggctgctgccgtggattgacaactttgcccacatctcagggttcatcagtggcctcttcctctccttcgccttcttgccctacatcagctttggcaagttcgacctgtaccggaaacgctgccagn

SEQ ID NO: 16080 - DNA, 467 bp, Homo sapiens
  misc_feature (1)...(467): n = A,T,C or G
tggtttannaaactgagacatttgaaagcgctgtggaattcctgccacccaggtaagaagaggccgctcttcctggggttgtttctccgtgtgacgtgtggcctttgagatcaactctcctgtaccagcgtaggccgcatgagtggggggcgggctcccgcggtcctgctcggcggagtggggcattcttcgggggtgcatcagagggagggcagagcctgaggatctaagcgaaggcttccccgggtgtaatttcctgggctgtttgtgaggagagatcgaattcgcctcctgctctcaggcctctctgctcctgtcttttgtttggatgccggcgctgctgcctgtggcctcccgccttttgttgctaccccgagtcttgctgaccatggcctctggaagccctccgacccagccctcgccggcctcggattccggctctggctacgttccgggctcggtctctg

SEQ ID NO: 16081 - DNA, 468 bp, Homo sapiens
  misc_feature (1)...(468): n = A,T,C or G
acgccgcgnnnnntnnnnatagaatagcctatcnagngaggnggaattcggcgtggtggtgggtacctgtgatcccagctacttgggaggctgaggcaggagaattgcttgaacccaggaggcagaggttgcagtgagccgagatcatgccattgcactccgactctgggcaacagagcaagactctgtctcgggggaaacaaaaaaaaagtgtgctttgtcaagagaagcaccagcagacctctaagaactgctctctaaggctgcggtagcaaattatctactattgcaggtgccttattggtagagggctctgaagagccaaaactgtatatgcaacacttgtaagataaaagggactttaataatcaagattttcttgaagatttgttagaaataatgtcttatttctgcgaacctttccctttttgtatttataactctactaaccaaattacctatcaataa

SEQ ID NO: 16082 - DNA, 489 bp, Homo sapiens
  misc_feature (1)...(489): n = A,T,C or G
gattgagccccttgnnnnnncntttgtagaccatagtccatgcggtggaattcccgcanaagagctcatgacttgttagacgattggttagtctctttataagttaattgttcctgtcaacaggtacgtatatttttcagccgttttttttttttcgttccaaattacattgggggtttcggcatacaattttttaggctacaatccttttatgttaattgaagaagggccttaaattgcactgaaaaggctagggtaatagggtctgtttaccttaccacttttattttgagtacctaaaaatgcatggttttcgacataagggggaaaaccgcaagacactgcgtaaccgctcaaaaggggggagagcgaaaaacaaagccggggcctggcaatgggccggacccgcgaattaccgcaaccaatcatcttcctggaaaggagggtgggccttaaattctagcggcctgttttctattacttaaccta

SEQ ID NO: 16083 - DNA, 456 bp, Homo sapiens
ctgaccagcaccatggcggttggcaagaacaagcgccttacgaaaggcggcaaaaagggagccaagaagaaagtggttgatccattttctaagaaagattggtatgatgtgaaagcacctgctatgttcaatataagaaatattggaaagacgctcgtcaccaggacccaaggaaccaaaattgcatctgatggtctcaagggtcgtgtgtttgaagtgagtcttgctgatttgcagaatgatgaagttgcatttagaaaattcaagctgattactgaagatgttcagggtaaaaactgcctgactaacttccatggcatggatcttacccgtgacaaaatgtgttccatggtcaaaaaatggcagacaatgattgaagctcacgttgatgtcaagactaaccgatggtacttgcttcgtctgttctgtgttgagtttactaaaaaacgcaacaat

SEQ ID NO: 16084 - DNA, 444 bp, Homo sapiens
  misc_feature (1)...(444): n = A,T,C or G
atggttctcccaactaaangccattgagtatctggcaannnccaacnaannaaaaaaattatcaaaggtcagatgtgactactacagtaagttggctatcataaagaatattccataaaatgttgtatctgccatacaaaattactgggtttatggccggatgtggtggctcatgcctgtaatcccagcagttcaggattacaggttatatacaggttataacaatggataccaggacatcagaatatctgataaagcaaatatttatatgctaatttaaaatatcaaattgctactggacataaaatacatctggaagcttggggtaagaagaaagaaaagaagtgttccgttctgttttcaactaagggtaaacgaagtcccagagtgttttccctgtaggtcaaattaaggtaacatgtctttatttgatcatctattgtc

SEQ ID NO: 16085 - DNA, 458 bp, Homo sapiens
  misc_feature (1)...(458): n = A,T,C or G
cttcgagcaccctattgcagngcggtggaattcaaacggacgaaaaataaaggagaaacgtgagaccagcaaggaccatgcagcaactactgctggagctgctagcctagcaggtgggcaccaccgggaagcatgggccaccaaaggtccttcctatgaagacttatacactcagaatgttgtcattaacatggatgaccaagaagatcttcatcgagcctcactggaagggaaatctgccaaagagaggcctatttggttgagagaaagcactgtccaaggggcatatggttctgaagatatgaaagaagggggcatagatatggacgcatttcaggagcgtgaggaaggccatgctgggcctgatgacaacgaagaggtcatgcgagcactgctcattcacgagaaaaagacttcctctgccatggctggttcaggggagggcagctgctcagtgn

SEQ ID NO: 16086 - DNA, 455 bp, Homo sapiens
  misc_feature (1)...(455): n = A,T,C or G
attgtagaccctagtccagcgcggtggaattcgccttgcccttccacaaaccctaggcccttgagaagctgatacttctccttttgctcacagctgccttggccccacccctgggagatgtagcaaattgagtgtgggttttggagtctgagcctcaggctcaaatccaggccaagtgatcttgggcaagttaatctctgggaactttgggtttcttatcctcaaaaaaggcgatggaagggctggggaagtgattaaataaaagcaacgcangaaaaaaaaaaaaaaaaaaaaaaaaaaaaaaaaaaaaaaaaaaaaaaaaaaaaaaannnnnaaaaaannaaaaaaaaaaannnaanannnnnnnnnannnnnnnnnnnnnnnnnnnnnnnnannnnnnnnnnnnnnnnnncccannnnaaannaaacccaaggaannnngggaaaaaaaata

SEQ ID NO: 16087 - DNA, 478 bp, Homo sapiens
gcccccccccccccccccattgtagaccaatgtacatctggtggaattcgtgggccatccgcagggcatacctggatgggtctggggcgcagacgctgatcaacaccaagatcaacgaccccgatgacatcgcagtcaactgggtggcccgaagcctctattggacccacacaggcactgaacacatcgaggtgacgtgcctcaacagcacctcccacaagatcctggtgtcagaggacatggacgagccccgtgccattgcactgcatcccgagatgggcctcacgtactggatagactggggagagaaccctgaaatcaagcgtgccaacctggacaggcaggagctgcgcgtgctggtcaatgcttccctcgggtggcccaacggcctggccctggacctgcaggaagggaagctctactggggagatgccaagacagacaagatcgaggcgatcagtgtcgatgagacgaagag

SEQ ID NO: 16088 - DNA, 478 bp, Homo sapiens
  misc_feature (1)...(478): n = A,T,C or G
cgcccccattgangcccattagnnnaatggaggactattagnccgtgtggtggaattcgtttaatagcctgaggaaataggaaagctgtgaagctactaccattctttacttttaataagaataataggaaagaaaagtcaggtcagtaatccaaatccaaatatgtatactgcaaatgctcaagaagtcacattttttgataaattgtattgagtacagaagaacttatatgaatttattatctgttaataacttagttttgacaacagaataacatttggaaattgtgagaataatcaagctgtttttccattaacagtgtaaattcataacatgtccttcaaaaggtgatattctaagctgtcttaattgtctacggttgataacttttaaataaagtacaggactttctgaaagtgtttggcatgttatgctgccaaaaacaatctgtgttttgaaataccaattaatcagttn

SEQ ID NO: 16089 - DNA, 413 bp, Homo sapiens
cacagaggacagaaacaaatgggtggggagaaagggatgagctgaatggtgtgggtttgggagctttgtgctgcttcattttcaccccaaagttcttcctaccacccaaaatattatgcatttgttctcaggtgtcgcttctgtctctccactgaaatgtcacgtccttgagtgcagaggctttgtctgttttgttctctaatgtgtctccagcacctaggaaagtgcctggccatagcagatgctctagtagatattttcagagtgaataaatgaacagattggattgaatatagggtgagggagagagaagagtcaacagcgatgtctgcatctcgcgcatgccacccagggatcagggagctggttattgaaacccagaggaaacccagaggggagcgtatgtgggggag

SEQ ID NO: 16090 - DNA, 447 bp, Homo sapiens
  misc_feature (1)...(447): n = A,T,C or G
cctagaacactgatgactatcgcacagngcggnggaattccaaaaattataattgaccttggtaatggttaccagggaaggcatttggattcaattagaatgcgtcatgaagcatggagagcttcagggctatcctgtttaaaatgtctaagccaaataaaatttggaagtggagtttgttcaaatcctcaaggaaattaccatttggatttttagaaagccttgaatattacaatggaatcattaggccaggatctaagaaaagtggctgggtctttcagatacctggctgaagacagtaaagattataataaaaattggaaataaatggatatttatgtttttgatgctgaacatttggcaggccaccatctaggaattgttaagttattatgacattaggatgtttgggaatggctggtgactctttctctaggtagcatatat

SEQ ID NO: 16091 - DNA, 497 bp, Homo sapiens
  misc_feature (1)...(497): n = A,T,C or G
catcgacnccntccgnannnattgagaccctacgcagngncgnggaattcccggctcccgcgaaatcaagtcccagcagagcgaggtgacccgaatcctggatgggaagcgcatccaataccagctagtggacatctcccaggacaacgccctgagggatgagatgcgagccttggcaggcaaccccaaggccaccccaccccagattgtcaacggggaccagtactgtggggactatgagctcttcgtggaggctgtggaacaaaacacgctgcaggagttcctgaagctggcttgagtcaagcctgtccagagttcccctgctggactccatcaccacactccccccagccttcacctggccatgaaggaccttttgaccaactccctgtcattcctaacctaaccttagagtccctcccccaatgcaggccacttctcctccctcctctctaaatgtagtcccctctcctccatctaaaggcaacattccttan

SEQ ID NO: 16092 - DNA, 494 bp, Homo sapiens
  misc_feature (1)...(494): n = A,T,C or G
cgccgatagagaccctacccagngtagaggaccntggaaaagacgttggtcaaagattacgaaatttcagttagactggaggaatacgttcaagagatctcgtgtacaacatggtgactacagttaatgaaaatgtatttttgaaaaatgctaaatgagtagatattgtgttctcaccacaaaaatgacaactgtacgaggtaacatatattttaatttacttgactcagtcattgcacaatgcctatatatttcaagacatcatgttgtacatgacaaatatgtacaattttatctgtcaattaaaacataagatcaaaaaagaattttatttggaaaaagtttaaatatgtttggtttgccttggaaacactatgtgaagaaggcatgtacacttggcagttgtatttacagaatgtgaacacactgttagctaccacatcatcctgtgcccctcatgaaaacccacaggaaaaaatattctttaatctcan

SEQ ID NO: 16093 - DNA, 467 bp, Homo sapiens
  misc_feature (1)...(467): n = A,T,C or G
cgggccggnnnnntnnacctcgaganccattcnngagagtctgcgannnacgggaagacaanctggagccaggcagagcctgtctttcccaaagaagctgaagtcttcttctcttgaacagtggggaccatctaatctcttgagcccttttcctgttggcttctaggaagctcagagctagattcaggggtgcacccagacctgtcctagcatgctcctttccctaatgaccgagtctttcctgttgaattatcccattctccatgggtgcctttgactttggcctccttactggaaattagcggagctgctgtttgcacacactgagctgtgaggtggctttccttggaagtggatgatagtgtcctcttcccttcttgcctctctctttctcctgagacaggatccccctggggcctaggtttgctcctttgttgtacaggggctgtcccagttagtgctgacct

SEQ ID NO: 16094 - DNA, 593 bp, Homo sapiens
  misc_feature (1)...(593): n = A,T,C or G
tggtgccncnaggggnnnnnnattttgatcccccactcgagaggacgattncgactctacccaccactcagcaccatccgagacgtgtctttgagaattgccatcaaagttctcgactacgcttacaaacacaatctggcttcctactacccagagcctaaggacaaggaggcttttgtaagatccctggtctacactccagactatgactcctttacactggacagctacacttggcccaaggaagccatgaatgttcagacggtctgaggcagtctcagaggctagtatggggctagatgaagcccagagtaacacccacaatataaatgggttccaaaatggcccaagtgaaaaaaaaaaaaaaaaaaaggggcccgttcaagttaaaaggcccggttaaaccccgttaacaacctctaaggggccttttaattggccacccttgtgtggttggcccttcccccggcctttctttgacctggaagggggcccttccccttgccctttcaataaaaaggaggaaatggctcgaatggctgggnaggggctttctttttttggggnnnncccnnaaccccacanccaccccc

SEQ ID NO: 16095 - DNA, 441 bp, Homo sapiens
  misc_feature (1)...(441): n = A,T,C or G
atcgagatcgatgaccactgtccgngtggtggaattcctggctcagtccgtcgatagcaacaaagaggagctctgactgtcccttcctaagctgtgggcacagtggccaggcctccccacctaggcccatggtcagtccctctttccccgcaacctcacactcccgccaatgcgtgattgccaaagaccactcagatcatggcagtgtctgcagcaaagccaccagatggcacgtgagggctgaaagtcggggatgcggtggtctcctccctcctgtcagggggcagaagggcatcctctgccaggtgggagctgccttccccagcccagtttgtctgcaatggagctgtcgctgagccccaggccagcccagttctgccccgtctcaagtgctcctcttccttccaagcccctcctcagatgggcctgcatcccgcctgg

SEQ ID NO: 16096 - DNA, 449 bp, Homo sapiens
  misc_feature (1)...(449): n = A,T,C or G
cctagacaatagtagaccctagcacagngcggtggaattccacaaagcaggcattcgggctcctcgcacctaccccagcaactcaaattcaccacctcggactcctgcgaccgcatcaaagacgaatttcagctactgcaagctcagtaccacaggtgagctgggggactgggggtccctgcgtcccgagaatgtgagtccccccatttcttctgcgcagatggcaaggctgaggcctggagattgggaaaataatatatgctagactctgacctaatcacttgacaaatactgaattcatttattttaaacagccccattttgtagaggagaaaaccgaggcacaaaaataggtaaataatttggccaaaaaatcaactggggggctttaaaagcccttccttcttccccaatacccccaagtcccccattggataaaagaccttccn

SEQ ID NO: 16097 - DNA, 465 bp, Homo sapiens
  misc_feature (1)...(465): n = A,T,C or G
tgcgggcccggattcnnaaacgatgctgtctcgaagcgtcnngaaanaccnnanangnnanagacggggtttcaccgtgttagccaagatggtctcgatctcctgacctcgtgatccgcccgcctcggcctcccagagtgctgggattacaggcgtgagccactgcgcccggcctgttgtacagttattaaagttatcatttaacatggaagaagatgagttcattggagaaaaaatattccaacgttattgtgcagaattcattaaacattcacaacagataggtgatagttgggaatggagaccatcaaaggactgttctgatggctacatgtgcaaaatacactttcaaattaagaatgggtctgtgatgtcacatctaggagcatctacccatggacagacatgtcttcccatggagatgggagacctttaactctgaaggacatatgggaaggagttcag

SEQ ID NO: 16098 - DNA, 471 bp, Homo sapiens
  misc_feature (1)...(471): n = A,T,C or G
tggggtncccggatgccnaaacttaaaccactgcaagcgtcagaacaagcggnggaantccagctactcagaaggctgaagcaggagaactgcttgaaccctggaggccaaggttgcagtgagccaagattgtgccattgaactcctgggtgacagaggtagactctgtctcgaaaaaaaaaaaaaaaaaaaaaaaaaaaaaaattttggggtaaaaaaaaaacccaaaaaactttttttttaaaaaggaaaaaagcttggaccttaaaattgaaaaacggtttggcccttaaaaatttttttttttttttttaaaaaaaatctctcaaaatttttttttttccccaaaaattgaagggaaaagaatttttaatcaaaaaccatttttttatttcccattaaattttttaaaaaaaaaaacagggggaaaagacctttttaattaaattaaaaaatttgccctaaaaaagg

SEQ ID NO: 16099 - DNA, 453 bp, Homo sapiens
  misc_feature (1)...(453): n = A,T,C or G
nggcgccttttatcatgatacccgaagnacccgnanaancnnnnanggtnnnnnntgncatctaggccttagggagaggagattgaggacttggtcagccatggtgcgctctggggttcctgggctgggccgtcatgaagcgaggcctggatgccctcctgcagcatctgctcatccaaggccgcccacatcggagtccctggggagaagctggccccagcccagtccaggcctgcctctgaggagccctcccaggatgggtgacaggcagctccgccaggctacccggggtggcaaggagcctcaggggccagcaccccgccaaggtcctgcacaagacgccctcctgcagcacctgcagccgtcgctctgagggttccagccaccggaaggccccagctgcatctgtctgcccggggcagggcggccggtcaaggaaaaccaaaagcagcg

SEQ ID NO: 16100 - DNA, 465 bp, Homo sapiens
  misc_feature (1)...(465): n = A,T,C or G
ggtggcccaggtggcnaaaactgtangcttcgacgtctgcgaannncnnncccagggcatcttcagcagcagaaccttccacagagctgcttcatctgctgcccaaggagccttccaggggaattagtcctcctctcttctctccccctcagcctttctctcgcctgccttctgagctgcactttccgtgggtgccttatgtggtggtggttgtgcccagcacagacctggcagggttcttgccgtggctcttcctcctccctcagcgaccagctctccctggaacgggagggacagggaattttttccccctctatgtacaaaaaaaaacaaagctctctttccttctctggtnnaaaaaaaaaaaaaaaaaaaaaaaaaaaaaaaaaaaaaaaaaaaaaannngggcccccctttaaaataaagggcccctaaaaaaccccggaaaacccccgggggggtgtt

SEQ ID NO: 16101 - DNA, 462 bp, Homo sapiens
  misc_feature (1)...(462): n = A,T,C or G
gcgtgcttacccagggaccttcgatangagctctcgaaannncnggcagnggacctgngaagagggagaatctanccttcagtctgtccagtgttaaccactagagaaactgagctttatatcctttgttaatgcctgtgaattttagcatattgaaacattagagcaaatactcaggggatttttcattaaacatccctcagataatttagctatatatcattagaaagggaaagctatcatttttattttaaaactaaacaaggccatcttataaactgtcaccaaagtcttcccttttttattgcatgtgtgccttgaatttcataaaacattaattcacaatgggggtcagaatgtactcttgttgaaacacttcttgtaccattttatgttcatattatgtttgagagggtaaaaatgtatgagcagcttaactgaagtagaactattcatgatgcg

SEQ ID NO: 16102 - DNA, 447 bp, Homo sapiens
  misc_feature (1)...(447): n = A,T,C or G
nttcgagtgcactagcncgngcggnggaattcggaaattttacattaaaggacatgtatgatgataataatgcatataagactgagaatgaagatgaatagttgtgaaaagtatctagttattatcccacatcgttaaatagccagcatggtttactataaagagtaatccatgttgagtgctgggagacttgcattctggtactatacctgtctataactattgcatgatattgggtgagtcatttcctccaaaagatactacagtagcttttaaattacttccaattaaaacattttaagaaatgcatggaatcaaatctaaagctatttgtataacatgttttcttcctgataccccatgaacatacactgaagaatgagagaagatatttcctaaaataaaaactatttaaacaaagaaaaatgaccacagtcactttgctag

SEQ ID NO: 16103 - DNA, 460 bp, Homo sapiens
  misc_feature (1)...(460): n = A,T,C or G
cgggttccaaataaaggacttacatgaagcctagcgaaaanccgaaaaangggaaactctttgtagaaacactgttatgtatcacaaatcttccaaatacgaaacacatgcttaaaaaaagtaccaaattcctaaatagcactttacattgctcattattactagtgaatgaggtaaagtctctgagagcaacttcctgaaatgtatagaagtatttgaaagaggttccagttgtcttaggtctgattattactaagcagccagagagatctagttgactttctatgagaaaataacatgatttgcatatcaattcatgtatctaaacactgaaaaatgcccttttatcacctctagattcttgccaaagacattaaggaaatgtctgaagaaatggataagaacaaaaacttgttttcccaagcttttccagagaatggtgataatcgagatgttattg

SEQ ID NO: 16104 - DNA, 407 bp, Homo sapiens
  misc_feature (1)...(407): n = A,T,C or G
aatagacatttttcaaaagcagacatacaaatggacaacaagcatacaaaaaatattcaactcactaatcataagagaaatgcaaattaaaaccacaatgagatatcttcttataccagccaaaagggttttggttaaaggtaaaccaaccaaaccaaaccaaatgtggggaaggatccaaaaaaggggaaaggctaatcccctatgggaagaaaggtaaagaagggcaccctttatggaaatcagattgggaattccttaaaaaactaggattaaaaccttctttcattctaccaatcccactatggggtatctactcagggaaaaataggcctttttatcaaaaaaatacctgcttttttatacttatcccagcccattattcccattagcaaagatttagaacn

SEQ ID NO: 16105 - DNA, 447 bp, Homo sapiens
  misc_feature (1)...(447): n = A,T,C or G
atcgcattcatnacactaggccangcggtggaattcccaattctgggctccctagggaagtatctggagtccctccacttcctcttctctacccttgaacccactccagcctcagtcccacctctgccactccaccggcactgttctttccactgccacctggggcccaccgtgaagcattctcctgatcacgtctccccaggatgcttccttctcctgcaccatactgcccgcctccacctccctggccactccttcccctctccccagctgtctgctcctcagagttctgagtgtcagcttccccaggaccaacccttcacctgaactcagcttgacatccacctgcccactcgcccgctgtcccggtcacctgacacctccagcctcagaccttcaggtctggatggctccttccactactgtcacctgacagcccatttcttc

SEQ ID NO: 16106 - DNA, 441 bp, Homo sapiens
  misc_feature (1)...(441): n = A,T,C or G
attgaagatcgttagcccgtgcggnggaattccgcccgcttccgcccggcttattgtcctccttattgacaaacagagcggtcgcggtggcgactctcggcgtgcggcgatagccaagccatgggagacaagaagagccctaccaggccgaagcggcagtcgaagccgtccttggatgagggttactgggactgtagcgtctgcaccttccggaacagcgccgatgccttcaagtgcatgatgtgcgatgtgcggaagggcacctccacccgatccacattgtttgaagttattgtgagtgcctcgaggaccaaggaaccgttgaaatttccaatttcaggaagttccagtggatgcccatcaggaagattctcatgctgaacagaagggcaagagaggtggatctgtgagggaaaagacccaataggataactcaagttn

SEQ ID NO: 16107 - DNA, 442 bp, Homo sapiens
  misc_feature (1)...(442): n = A,T,C or G
atcgacaatcgagactctctgnccagngcggnggaattcaacacaaacaggatacgggaaaataacattttggggtctatactcaaggtttttgtagacttcccgattacagagacctagcaggggtcatcagttaggccctagacgtcctcacacccttgcaaaggggatgtgtggtcagctgccacgtcttgtccgtggccaaaggctgtagctcctccctgaagcctgagcacccctcccccgacacctcccagagtaagctccgtgatgcccctggggccctgagtgtctgcttataaccaaccctgtttaattttcctgtgaagaatggagacttttgctgtcggctccagagctgtgcgtctgtgtgagtagggggtggccgtccccccagggagggtgcagcttcatgtgtctggtggcctttccttccagaccc

SEQ ID NO: 16108 - DNA, 452 bp, Homo sapiens
  misc_feature (1)...(452): n = A,T,C or G
natcgagaatcgagaccgtgcggnggaactccttgccctgatcttccatgaacataacagaagagagaccaattgagacttgaaaccattgcgttactttaaccattatttagttatatcctatccatctctttctctctgttgaacagagaggttcctttggctgccctgacttttgtaaatgtttcactcaacttgttgtggtttatcatttggacagaatgctacattggggatttttcgcccccactaagtcctcaagggaaaatgacttctgtatgcctcatatatgatacatgaacatacaccctattctcttcattttaagaagcaaacctaagttttttggcagctgagaaaactgcatttctcagaaatacctcctccatctaaaacgtacttgaacataactttgaagggcttattttttgacaggtatattaatgaagaag

SEQ ID NO: 16109 - DNA, 491 bp, Homo sapiens
  misc_feature (1)...(491): n = A,T,C or G
atagagacccctgnccagngtggaggaactcttgggtcgtcacatgcgagaaatcgtctcaccccagccagtgtgacggagtgagagcaaaagaaagttttgatagcagcgtacgatttatattcagctgtatgctgggcaggtccaacttggcatttcttggctgtatctctgaaggaaagtcatcttaatctctatgagcctccatttcctcagctgtaaaatgggaagatcttcctcacactgctgtgaccccacgttatcaagaaaagtacaggaaatctgccgttgggagagcggcagcacccatgtggagtgccactttctgatctgggacttaaacaacattgctgttttcctccttgctccaagtcatccattttgacaattttatatcagcatggacccttcaccaagactgaaataactctgttattgaggcccagaaccatatcctgctccacaagcctcgtccttggcaagaagttgca

SEQ ID NO: 16110 - DNA, 456 bp, Homo sapiens
  misc_feature (1)...(456): n = A,T,C or G
nttgagnatcgtagaccattagncagagcggtggaattcttgctatttcagtgggtataatttaaactttttaaagaaaatctgtacttttataatgatgtattttgtataacttaaataataatgctaaagtatactagggttttttttttcttgagaatgttactgcaatcatgttgtagtttgcacagacttttatgcataattcactttaaaaacatagaatatatggtctaatagttttttaaagcttttggactaaagtattccacaaatcttacctctttaggtcactgatggtcactccgattctgagtgccacattggtagactcctaaaatacagttgacaacttagccaattgcaactccagtgttgataattaaaatgaaatggtaaagcagcagactgtagggtctttagagattttttttttaaggttcaggccgaaggtcn

SEQ ID NO: 16111 - DNA, 486 bp, Homo sapiens
  misc_feature (1)...(486): n = A,T,C or G
nactgagaccntaggccanngcgtggaattccgttatttctttgctaacatggtagtagatgctgtacttgctattaaatacacagacataagaggccagccacgctatccagtcaactctgttaatattttgaaagcccatgggagaagtcaaatggagagtatgctcatcagtggctatgcactcaactgtgtggtgggatcccagggcatgcccaagagaatcgtaaatgcaaaaattgcttgccttgacttcagcctgcaaaaaacaaaaatgaagcttggtgtacaggtggtcattacagaccctgaaaaactggaccaaattagacagagagaatcagatatcaccaaggagagaattcagaagatcctggcaactggtgccaatgttattctaaccactggtggaattgatgatatgtgtctgaagtattttgtggaggctggtgctatggcagttagaagagatttaaaaagggacct

SEQ ID NO: 16112 - DNA, 490 bp, Homo sapiens
  misc_feature (1)...(490): n = A,T,C or G
natgataccctgggcangncgttgaagacactaggacagngcggnggaattccttagtatttagtactaatggtttagagcaggaattgactaactgtggcctggactcatggaccaactctggcccaccacctgtttctcagaagaaaattttattggaactcagccacacttactcatttacatgttgtccttgactgcctttgtgtccagtgtcagaactgagtagctgcagcagaggttgtgcctctgggctttaatatcacaaacagagcagcttataagcaacagaaacttacttctcacagttttggaggctgggaagtccaagatcaaggtgtcaacatatttagggtctagggaaggtctgcttcttggttaatagaaagcacctttcactgtgtcttcacatggtagaaggggagagctctggtatcttcagccccttataagggcactaatcccattcatgagagctccaccctcacgg

SEQ ID NO: 16113 - DNA, 459 bp, Homo sapiens
  misc_feature (1)...(459): n = A,T,C or G
gcgtcttatcgacgcngtcngcatgngcgtctcgnananacncgnaaanagaacnnnaaactgcaacacatagcttcaattcaatatagagattttgtaataccttataagtggagttggctaaggtaccttatccatataaaacttattctattctttgcatgcttattttgtgtgttggttgctagcttaaagtttgatttgttgttactctttgtgtgccaaattcactaggcaagcggatttttcctcagacttcaaaaaataattcttttaagaaaaaatgtaaaaatgtttattctaaaaagctgcattaaagggacaacctataaaaagttttgctagctcatctttagaaggaagaaagaatattagcttgggtgatgtttaatttgggtggcgatagtttctgtaggctaaactttatgagaaaagtgtacctactctataaaggtaatt

SEQ ID NO: 16114 - DNA, 459 bp, Homo sapiens
  misc_feature (1)...(459): n = A,T,C or G
cccagcccccnnnnnnaatggagatcgtaggccattgcggaggaactcgattttcaacattagtagaatattgtatagtaattgattaatgcattatactgatcggtttgctgcattagtacaaccttttaagggaaaattctggcgtttccctctggctggctcagcttctgcaacctcagcccttacaattgcagtgcttctggccatggcttgcttgttaactttcttgttcttgactttatccttatcctggcacacaaattccagtgtccttccacatgctcatcttagttttcacagtttcagttaccagctgatctgagaagtgcctatcagccttgatgaccttgactcaaaagggaccctgttgtcatcaaggagtttgtaattggacagcagattgtatgtcttcacaaaattgttgcctattttttagccagcattttatcttgactn

SEQ ID NO: 16115 - DNA, 462 bp, Homo sapiens
  misc_feature (1)...(462): n = A,T,C or G
cggagggccccaatagaaanctccttganccgtacgtacaagcggcggaannatatnttttgttttgttatttaaagaagtttggctgactttagttcccagcgaagatagtgatttaggcttaacattctttggagctgtattctattttgtttctctttcctctgttttgtggattgtttccaatgggtttagcttagaaaagaggttatttcatgatgccttcagatttacaattctattttgtttttaatttttaagatgtagtgataattatttaagatgctgtgaaagttattgttttctttagacaggacactggaaaaagattaacttctgcagtagtccagacccatctgccaacttcatgtctgtctgaatttttgttcaccagtgaaccccagctttgggctcataaacctggagagggttgaaagcatggtgcttaaatgcactaaacag

SEQ ID NO: 16116 - DNA, 452 bp, Homo sapiens
  misc_feature (1)...(452): n = A,T,C or G
attgagaatagagnccgtgcggnggacctcgntctgacagccaagggtgacgaggtgaagagtggccggagcaagccagactccatgtgtcgtatcctctagggagctatgtcaaggcggtctcttccaaaagcaaatagtccctttgctgggaagccaccagagtcagcctgttatactgcacattcattgtgtttgttttgaacagtaagtgctcatattaccagcaagttaaataatggccgcctgctggataaatgcaatggtcaagtgaaataggtggactcttattcccctctcttctgagtcagcctagcagctgctgagtatcatttgagcccttagtgccctccttatagacagaacagggggaaagggtggacttcacttagacatcatgcttgagggtgacttaagcactatcatcagtgacaaacgtactaagccagcaa

SEQ ID NO: 16117 - DNA, 465 bp, Homo sapiens
  misc_feature (1)...(465): n = A,T,C or G
ggagaacccgggtgcnnnaaattgganacattgataggcgnggaaaaccncangaaactggatgcgtgtaatccgaatggtcataatgagacaacagctaacactgaatgcttgctgtgtgtttggcactctgctagacgttttactggtattaaccgatttaatcctcacaataacgaagtatgtactactataattgccagtttacagacgagaaaactaaggcacaaagtttaacttgccccaagcgacagagtggataagtaaaagggcgaggactgggaccctggtactctgaatgaagagcctgtgcctccctctctcccctaacagttttaaggagatacaatttacctgccacaaaatttacccattttaggtttatacttagatggttgttcagtaagtttatagagttgtgcaactatcacaaccaatgttagaacaactcaaaaaaaaaaaaat

SEQ ID NO: 16118 - DNA, 485 bp, Homo sapiens
  misc_feature (1)...(485): n = A,T,C or G
gggagtgccaaatggagacctntcgatggagcggcgtaanggacgaccctcccttngaagaggaaaaaaggatatttggtcgccctggcttgtccccagaaccttcggtggagggggtggaagcggttcctggatggcctctccaccagcccgtgatggcgggttccccgaacattatcagcttggtgaaatgacggctgcagagagaagggaagaagagttggcctccaaccatgaaattgacactcaccctcaagaacaactgataacaacaggagatgaaaggaccgattttacagttttacttattatacattagtgggccttgggtcaaggtaaataaagtagtatatggaactatttctttataataaccataaaataatgacaaataatctgtagtgtgttaagaggaaagctgaaagaataataaaagttgtcatgcaattgggggaggagaatcagaagacggtgaactcatatan

SEQ ID NO: 16119 - DNA, 475 bp, Homo sapiens
  misc_feature (1)...(475): n = A,T,C or G
gggcggccaattgannccctaactgagancactagaagngcgggaattcgtggggtcatagtactactactatttggggagctttgggagccaaggtggggagggaagctagtggtgtcatgattttctggtgttttttgtttgtttgtttgtttgttttgttttgtttgagatggagtttatctcttgccgcccaggctggagtgcagtggtgccatctcaactcactgcaacctctacctcctgggttcaagcaattctccagcctcagcctccctagtagctgggattacaggtgcccgccatcacccctggctaatttttgtatttttagtatagatggggtttcgccatgttggccaggctggtctcgaactcctgacctcaggtgatcttcctgcctcagcctcccaaagtgctgggattacaggtgtgagccaccatgcccagcctgcgtcatgattttctattgttg

SEQ ID NO: 16120 - DNA, 492 bp, Homo sapiens
  misc_feature (1)...(492): n = A,T,C or G
tgggctcccaggccncagtcccctttggtagacattagnccnnatagaggaccctctgtccagtgtggtggaattcgacaaaaccaggtgtgctgagcacgacaggtgctgggcccacctgattcagtgcagccagcccccatcgctcacctcatttggttctccttttctagggccccagagttctttttttctgactcgtctaccccctctgaggtttccacttccgctgacattgctgctgggtgtggttcttgctgctctcgctcctctggtcctgcagagacacaaggagctggtgatgtggcacccacggcagtcacttccccaaatacctgtcggttctgctttcctcagagcgaatgtaaccaaggtgacacccacacaccccaggattgttttctttaaaataaagctctgccattactgggaccatagtggaatatggaaaaaatctgaatatgaacaatgtattaggtaatagcattgtat

SEQ ID NO: 16121 - DNA, 486 bp, Homo sapiens
  misc_feature (1)...(486): n = A,T,C or G
natcgaagaccctaggccanngcgtggaattcccttanatatattaaaacaatttacaccctgcagattttatgatgtgtgataatttggctttgacacttatcttccattattttgagggcaactgtgtacagaaccaactaagggagccaataaaattcgctaggagtggctgggaggctaggatgaccaaaggtcaaatacatttaagaaaactaagctttagtgtagcacctagatgtcttaggataatttatatttaatttcacattctatgctctaaagtgatacttgataactgtgaacatttcttaataaatgccattattattactgttcaatcctaatctttgggggtgagatctctggtaccagagggctgagttacacttccagtcatggcaccccagcctcactggtctgtgaaaagcctttcttttgttagttacgtggttggtctatttttattccattctttcattctcn

SEQ ID NO: 16122 - DNA, 551 bp, Homo sapiens
  misc_feature (1)...(551): n = A,T,C or G
aagaaacacaaaacttgatnccccnttcgaagcatcattcgtgtggtggaattcttagtacagtgcttttatacctttaatgcaatgttgtattcatttgggtactattgtgtagtatttaggatgtatgcatgtttgtttatatgtaagcttggttggtgctttcgcttttgtgctacctttcttggatttttgtaccagagatgtgctaaactgatgaaatacattgagaaagtttccatcttattcttttatatgggactgatgatgtgtgttggggtagactgctcctgcagagtttggaagaagtcaccagcaaagccggcctaaccaagaaaagtcaaggcccttcatgaccttgctgggcacagaaaacaccctcgtggagtacactaatttgaactggactggtctcagtgtgagcacttggcacactttactaaacacatatacaaccccaccgtgagtcaactttaaagtatacattatagattcttgtgatncnnnnnnaaannnnntgtnccaagacanaactccccaggtatcaaatg

SEQ ID NO: 16123 - DNA, 457 bp, Homo sapiens
  misc_feature (1)...(457): n = A,T,C or G
nctgatnacactctattggacgccatatcgngatcctcccacttcagcctcccaaagtgctgggattacagatgtgagccaccatgcttagctggtaaatttaaaatgattgaaatttatatatgttctgtcaccacaatggaagtaaaattaaaatagaaattattaaaatatctaggaatgatccaaatatttggaaattagacaacacaagtttaaatgatcatgagtcaaagggaaatcacaattagaagacatttttaatcgaatggtaatgataatataatgtcaaaattcatggaatgtagctaaagcagtgcttggagggcaaattatagtttaaatgcttttattataaaggaagaaaagtctaaatgtcagtaaccaaagtttctaccttatgaagctagaacaagaacagcaaagtaaacctggagtaagtacaagtaaggaaaca

SEQ ID NO: 16124 - DNA, 486 bp, Homo sapiens
cccgcgccccccccccgcattcgtagtcctttttgaagatccctagtccatgtggtggaattcggctcaagggccagcctccagcgctgctctttctgtaggttatttattagtattggatgaaggcgaaggctgggagtgtctttcccaccagcccttgcccatggtggggaggacatctggtctgagtcagagatctgtgcacactttctaaacagcttgtgatgcaagtgtgagcctattgtgttacttgaccttattttggaagttttgaattggcctaggaggaaacccagaaatgaaccaggggtatgtcatcacttttttcatatcaagtcctcaccctccttccacataatgctctatcctctaaggttggaactctgaagttggagaaggtggaataaagttacacctggagtttgttgttggttttgagtatataaaatactgactttgaacaggaaaggagtctcctgaggggag

SEQ ID NO: 16125 - DNA, 417 bp, Homo sapiens
gccgcttttcccctcagtcgcctcgcgcctgcagtttttggctttcacccccaaccagtgaccaaagacttgaccactcaaagtccagctccccagaacactgctcgacatggacaccggtgtgattgaaggtggattaaatgtcactctcaccatccggctacttatgcatggaaaggaagttggcagtatcatcggaaagaaaggagaatcagttaagaagatgcgcgaggagagtggtgcacgtatcaacatctcagaagggaattgtcctgagagaattatcactttggctggacccactaatgccatcttcaaagcctttgctatgatcattgacaaactggaagagctcataagcagctctatgaccaatagcacagctgccagtagacccccggtcaccctgaggctggg

SEQ ID NO: 16126 - DNA, 467 bp, Homo sapiens
  misc_feature (1)...(467): n = A,T,C or G
ngggggaatcgtagaccactagnccattgaggagcaatacggaactcagtctacctggggccaacttcatgatcatgtgtagaaggggtttctgcatagagcttttggagcacacagagggagtaaggacttctgcctgggaagcttgggaaaggcttcagagcgaggtgactttgggcttcaccctaaaagatgatagccagacccccagacagggcagggcagggtaatataggcagaggcacagggtgttgacctggattcaagaaagcaggcccggttcggtggctcatgcctataatcccagctctttgggaggccgaggcaggcagatcacctgaggtcaggagttcgtgaccagcctggccaacatggtgaaacccccttgctactaaaaatacaaaattagctgggcatggtggcacacgcctgtaatctccttatgcaggagaatcacttgaacctag

SEQ ID NO: 16127 - DNA, 540 bp, Homo sapiens
  misc_feature (1)...(540): n = A,T,C or G
acctcgatcaccgnnctgagaggnccacttcgacanaagcatcatgattaaatattggaccgtcatgttctcacataagaagtacctgaccgccagccagcttgttcccccagattatcaggacacccggagcaacctggacataactgtctgctctcggcaacaagccacccaaggctggatcaacacataccccctgtccagcggcatgtccaccatctccaagaaatcaggcatgtctaagaaaaccaaccggggctcccagctgcacaaatactacatgaagcgcaggacgctgctgctgtccctgctggccactgagatcgagcgtctcatcacatggtacaacccgctgtcagccccggaactggaactagaccaagccggagagaacagcgtggccaactggagatctaagtacatcagcctgagtgagaagcagtggaaagacaacgtgaacctcgcctggagcatctctccctacctagccgtgcagctgcctgccaggtttaagaacacagaagccattgggaacgaagn

SEQ ID NO: 16128 - DNA, 549 bp, Homo sapiens
  misc_feature (1)...(549): n = A,T,C or G
aggaacacaaattgaaaccccctggaccactattcgtgtggtggaattcagaggacagctcgggtgtgggtttgagccctggattaagactgcccgttgtccactaaaatctcttctttccttgctgcacgagggtagagagacacccagctggacactccatttcccagctgctcttgttgccaggtgtagacacaggggaatgtgaggcaagcatgtcctcaaagcctgatgacattgggtaaattctcctttgtgttctctctttcatgagctgggcagatgtgcctgagacaggtttgaccaggcaactgaaaagacatccctaagggaagacaaagcaaaggtatgaaaggaacacacgtccctgactgactaggaggaacagagctgcctgctgtctggaaccgcttcctcccagactaagtgagaaataaacttctgttttctataannnnannnnnnnnnnnnnnnnnnnnnnnnnnnnnnnnnnnnnnnaaaaaaacgggccccttaaattaaaggggcccttttaaaccccgttaaacg

SEQ ID NO: 16129 - DNA, 457 bp, Homo sapiens
  misc_feature (1)...(457): n = A,T,C or G
nattggagaatttgagaccattaggcagagcggnggaattccaagaattgtagacatatttaaaaatcaccacagaggccatacctgatgctgcattatggtactctgtttccttatggcaaataatgcaatttgcaattctgtattgattctttgactgtgtatgtgatgtttagctcaaaagctactcaagggcagggactatgtttggttcaccagtagactcccagtgcttggaatatactggaagatcaatgagtacatgaatgaacgaatgaatgaatgaaaaattaagcaaatgctgttgctgaaaaaatcacaaactaaagtaattcctaggttactaactctcttgcattccatttatcatgactctcctctaataacatctgttacagaaaagcagaagagcaaagccggaaaggacccgtggggtaaatcagagagtgactctatn

SEQ ID NO: 16130 - DNA, 551 bp, Homo sapiens
  misc_feature (1)...(551): n = A,T,C or G
cgaaaaacaaaaatttgaaaccccctcgaaccacagttcgtgtggtggaattcacgagagaaaagtaaacacagagaaggagaaaaggacagggataggtaccacaaagatagggaccacactgactgaactaaaagcaaaaggtaaaatttgcaggctgcttcaggattacatttaaataactgttaaaatgttgtatcttgtaaacaaaagaaagattgcctgctaggattgtgccatctttaaaatttttactattggtcatttgcagaacagtaaattctgtgtgttggtacagagtgctctgtaccagtgctcatcatcccttcttcataccaacggtccctagttataggaatttaatatttttaaaagttttacattgctgtatattcaaagatttgttttattaatatgcaataaaggcttagaaattttagttttattccttaattggtaaatatggntaactatggaatatatttacttcctctagtgaatgtcctttatataatgactaatttgggagtaatgtgtgctctgtaagtttg

SEQ ID NO: 16131 - DNA, 479 bp, Homo sapiens
ggtttgagacctagccaggggttgattccgatctcttcaagcaaagcacccaatggacacagaagtcaccaaagccaagatcattggatttggttctgcacttcttgaagaagttgatcctaatcctgcgaatttcgtgggagctggaatcatccacacgaaaaccacccagattggatgcctgctgcgcttggagccgaacctgcaagcccaggtcaggccctcaggaaatggtggaacacacttgagttgctttttattctggcacaatgtacgtggtgagatgtgtagctctttagtgcagttcagtcagttttgacagatgttgtttaaccaccaccctgtcaatacatggttgcctcccagcctccccgcagctggccaccgtggagcatcatccctagtgcagttcagtcagttgtgacagatgttgtgtgcctgtttaaccaccaccctgtcaatacatggttgcatcccag

SEQ ID NO: 16132 - DNA, 464 bp, Homo sapiens
  misc_feature (1)...(464): n = A,T,C or G
gtacggccaaanaaanccttgacttganacgactgcgaagngacgnggaattcgatcttttgtacatacattttgttttaaaatcatgtttaataaatgtttgcatttaatttcatatgtacagaagcctatttcaaaaggaaatgaaagttgctagtaaaatgtttgagattacatttagaactaactgataatgcatatagattgtagaaaattttgtgatttgtttctgtgtgataagggaagctgttggtctttgaattcatttaattatgtcaaaatagttccccaaagatttaattttaagttgcttcttaaagagtaattttattttttatgtcatgtggcttcatattagtattgtgtgagttacatgttttgctttatattttataaaattttttaaaaattttaatgtttctgcaatgatccatgtatctgctttccctatgtgtggttatcta

SEQ ID NO: 16133 - DNA, 465 bp, Homo sapiens
  misc_feature (1)...(465): n = A,T,C or G
nnnnaattgtggaccatagtcagtgtggtggaattcaataggaaatagaaaatcaatgaaatcaataaagaaaaccaatggaaccaaaaagaaagttgttaaatgacgagttagtgggtgcagcgcaccagcatggcacatgtatacatatgtaactaacctgcacattgtgcacatgtaccctaaaacttaaagtataataataaaaaaaaagttgtttgaaaagataaaaaaaaattggtagacctctaacctgactgaaatggaaaaagagagagataaccaaattaccaatattgggaatgacactctacagatattagaagtataacaagtggatattattaacaactttattccaataaattcaacaacttacataaaataaacaaatttcttaaaagacacaaactaccaaagctcattcaagagaagaaatataaatggatctatatcattaaggaa

SEQ ID NO: 16134 - DNA, 477 bp, Homo sapiens
  misc_feature (1)...(477): n = A,T,C or G
cctagaanactgagaggcctaggccagagncgnggaattcgcaagggttccgagacagggaatcccagcagtgcccaggtggacaggggtcacttatgactcttatgagttggctgcacactggattaatggggggtctgatatttttcttgattagaaatatgcagttattcctcaaagtctttatatgtagatactttatacactttaaggggctctctttcgctctctttctctttctctcccccactcctcatctgttcctataaaatgcctgcattctttctcagcaaaggtgatctaccccaaccagacaaagctgtgtgccatttccaagatgttgctggcactcgaactttcactcaaggtgtcttacataccttctcctcactctcattcagaatgtgcttccacattctatgcgctcagacttcaaaatctcaccaacttcaacatccaggtaagtatccaatttct

SEQ ID NO: 16135 - DNA, 461 bp, Homo sapiens
  misc_feature (1)...(461): n = A,T,C or G
attggcgaccataatgtcgntccctagtccgtgtggtggaattctggaaagcctagtttttagaaactgggagagttgatttagaagccacaataaggttagaacagtcaccactgtagggttgcagagaaaagtcagaacaattttgttgaagattcatcatgagttccaaaagatgtggggaaagagttttagaatgtacaaaggtaaatgtgaatttattcccatgatgactcatggatactgaaggcctggggctttctggagtgctcagagtatgggcagaggaaaggccaggaatccatcatttctgagcactgggggaaagaaaatcccaaaatttagtatctttatcttggtgattaaaagactcaagcctgtaatcccagcactctttgggaggccaaggagggaggatagcttgaggtcaggaattcaagaccagccttggaaacatagcn

SEQ ID NO: 16136 - DNA, 488 bp, Homo sapiens
  misc_feature (1)...(488): n = A,T,C or G
aggtagtacccaggnngnnnnnntttggagacctattgacgacattagaacagngcggnggaattcaggagatctccaagcgaactcagcctcctcccaagctccctgtgggtcctagccacaagctctccaacaattactattgcactcgcgatggccgccgggaatctgggcccccttccatcatcatgtcgtcgcagaaggcgctggtgtcaggcaagccagcagagagctctgctgtagctgccactgagaagaaggcggtgactccagctcctcccataaagaggtgggagctgtcctcggaccagccttacctgtgacactgcaccctcacggccacccgactactttgcctccttggatttcctccagggagaatgtgacctaatttatgacaaatacgtagagctcaggtatcacttctagttttactttaaaaaataaaaaaatagagacagagtctcaccatgttaaaaaaaaaaaaa

SEQ ID NO: 16137 - DNA, 603 bp, Homo sapiens
  misc_feature (1)...(603): n = A,T,C or G
cgacaccanaaggnaaannnntttgaaacccccttcgtaacacctatccgagnggngcaattcctcaaccagagtctccctccacagagtaccatcatggcatttcccagcacagagcacatgacagctgggactatccttgtgggacaaatggacgatggacagaagcatctgcttccaacaggagggtctcaaccatccccttagaacctatgccccctttggatagtattttatgacatcccccattccactaccatgaaatgaaaatcatagcataatctgcctacacacataattgcaaaaaataaatgcatgcataggttcaccaaaagacacgtacaagaatgttcacagcatcattattcataatggccagacactagaaacaacacaaatggatatggtatgtccacatgatgaaaacgaacaaacttctgccaggcacggtgggcacagtggctcatgcctgtaatcccagcattctgggaggccagggcgggcagatcacttgaggttaggagtttgagaccagcctggtcaacatagtgagaccccgtctctactggaaattcanaaattagcggngcatggtggcggatg

SEQ ID NO: 16138 - DNA, 442 bp, Homo sapiens
taaaatttcgagaccattagtctttgcggtcgaattctggtaatgtaacgaaaatacaagtttaatcacttgctgcttgcagaatccaattcacaagagtgaggtctggtacgaagaaagtgactttattccaaagctagcttaggggaagaagtataggctcctgcctttaaggtactgtttcccttctgggacaaaaaacaagggcttttacagggggacttggcataaatggcatgcagaagagggagcaagcaggtgcacggtctatgtgacttcttgggtgccttatctacccgatggtcaagctgacgccattgtgggcagagctagattgtaaaatggccattgtttcaagacacttggacagagttccctcatgggcctaactgaggttgtaaattgactgttgtctcttaaggccttctcctggtgggagaga

SEQ ID NO: 16139 - DNA, 466 bp, Homo sapiens
  misc_feature (1)...(466): n = A,T,C or G
tggcggccagngnnnnnactggattgcatagcntatgccgngngcnggaattccagatgctactatggaattccccatcattctcctgggtgtggtaacagtcatggttatgtaggagaatgtctttactcttaagagctgtgtgctgaagtatttagcagtaagatgtcataatactgcaaatggttcaattttttaaaaaatagaggcacaataaagtaaatatggcaaaatgtcaacagccgctccatctaagtggggcacattaacacattaaattgcccaggcgagggcaaaagcattcaaaagctcccaggggcttttctctcggtctttctgggaagcggcatcaattgagctgcaccatctcttcggcgttcacaatcgtacacaacgggccacccgcctgcagacaccactgccgagtccaaggtcagccagaaaccagacttagaacacagacagt

SEQ ID NO: 16140 - DNA, 474 bp, Homo sapiens
  misc_feature (1)...(474): n = A,T,C or G
catagatattcgtaggccactngcgaggaaccggangggggngggggcacagcctcagagggctcgaggagcacgtggagtggttgcttcatggaggtttgtagcccccctcccacagggacccttactgtcgtgtgttgaacatcctcaattttgcaggtgaacatcaagtcttttcatctatgagaactttgattccactgttgtagtatttgatctcttgttgcctccctgtctattcctcatcctttggctgggacactcctctgagcagagggtgagtaaaccaggagctttcctggcatgcaggctcaggtttgcatatggaagggatgcctctctcaacagaacccgatgtgtatcacacacacccctttgcagctcctagccaaaccacccaagttagagttaaccagattatgtgggaccccacccctaaatatactttcttttctttaaatttgtttttaaccc

SEQ ID NO: 16141 - DNA, 491 bp, Homo sapiens
  misc_feature (1)...(491): n = A,T,C or G
tggcggggnagggggnnnnnnntttgagatcctggaagtgcggtggaattccttggccaggatggtctcgatctcttgacctcgtgatccgcccgcctcagcctcccaaagtgctgggattacaggcatgagccaccacgcccagcttgttttgtagctttaattgtataggcctaacatacttttttgttctgtttagtctatttcatatttttatgctaccgtaaatagtattttttaaaatttcaatgtccaggtgttttttgctagtaatatattttttatgttgatcttgtatctttcaaccttattatactcatttattagttccagcagcttttttgcaaattccatcagatttttaacttagatgaacatttttttttttgcaaataaaggcaacttttcttctttatatcaaatctgaattttttttatttccttttcttggctgattatatgggctagaatctccaatacaatgttgaatt

SEQ ID NO: 16142 - DNA, 416 bp, Homo sapiens
  misc_feature (1)...(416): n = A,T,C or G
cgtagtaccaggnannnnnaattgagacccttcgaaaccttggaaacagcgcggaggccgacgatgcctggagttactgtaaaagacgtgaaccagcaggagttcgtcagagctctggcagccttcctcaaaaagtccgggaagctgaaagtccccgaatgggtggataccgtcaagctggccaagcacaaagagcttgctccctacgatgagaactggttctacacgcgagctgcttccacagcgcggcacctgtacctccggggtggcgctggggttggctccatgaccaagatctatgggggacgtcagagaaacggcgtcatgcccagccacttcagccgaggctccaagagtgtggcccgccgggtcctccaagccctggaggggctgaaaatggtggaaaaggaccaaga

SEQ ID NO: 16143 - DNA, 455 bp, Homo sapiens
  misc_feature (1)...(455): n = A,T,C or G
taaaattgatnacattagtagangccgtggaattcggcgcctgtaatcccagctactcaggaggctgaggcaggagaattgcttgaatctgggaggtagaagttgcagtgagtcaagatcatgccattacaccccagcctgggctacaagagtgaaactccgtctcaaaaaaaaaaggatcatatgaattttagagcaaaaactgcacagcccattaatgatagggttgggacaagttgttttaatctttccagggcaatatgctgtctggactgagtaaaacgggcatttagggtgttcccgaaccctttcttaggtagatagtttttgcaggcagtatacaaagctgtatgtatgatagtttaaacctcttattttcctttttatatattaatagttactggatagccaggaatacatacgtatgcaatactgttttaatccaattgtacgtn

SEQ ID NO: 16144 - DNA, 461 bp, Homo sapiens
  misc_feature (1)...(461): n = A,T,C or G
atcgagaccctagaccagcgtggtggaattcggctggcctgtgcctatcacctcttatgcacacctcccaccccctgtattcccacccctggactggtggcccctgccttggggaaggtctccccatgtgcctgcaccaggagacagacagagaaggcagcaggcggcctttgttgctcagcaaggggctctgccctccctccttccttcttgcttctcatagccccggtgtgcggtgcatacacccccacctcctgcaataaaatagtagcatcggaaaaaaaaaaaaaaaaaaaaaaaaaaaaaaaaaaaaaaaaaaaaaaaaaaaaaaaaaaananaaaaaaaaaaanaannnnaaaannnnnnaaaaaaanannaaaaaaanannnnnnnaaaanannnnannnnnnnaaaanaaaaaaaaaannaaaaaaaaaaaaaaaaaaaaaaaataaaataa

SEQ ID NO: 16145 - DNA, 465 bp, Homo sapiens
  misc_feature (1)...(465): n = A,T,C or G
ggggnnaatcgaagaccattagnccattgacgngcaatacgacagacatactatctcactagcttgactaacggcaacaaagttccagcttgtgtactctctttttatcgaccacatgaatcgaaaacactcatcacaattaatggcactatcattaatgagacatgagtaactaaaaagtgatagaacactattaacagtgcggctacatggtactgaaaatgcatgcattacaccagctgttacacaagcacaagcatgctctgtaagagctttacatttctgagattttgtatagcgattgagatgtctattttattattgatagactattactaatgtccatattgaacactaccctggaattcctgcctggttttcctgcccaaattgtaccactccttgaagaactacaggcacagtaaaaaaatatggcgtattatgtgaactaaaagagttctaaag

SEQ ID NO: 16146 - DNA, 559 bp, Homo sapiens
  misc_feature (1)...(559): n = A,T,C or G
natcgataccctngngnancctacngnngctttgtangancaacnncantggtntgtcgtgcttcccctcgaacgctttctacaagatccactgtaaatcagtctttccggaaagtggtcaaaaatacatctggaaaaactagttaaccatgtgactgagtgccctgtggaatcgtgtgggatgctacctgataaaccaggcttctttaaccatgcagagcagacaggctgtttctttgacacaaatatcacaggcttcagggttaagattgctgtttttctgtccttgctttggcacaacacactgagggttttttttattgcgggtttgcctacaggtagattagattaattattactatgtaatgcaagtacagttgggggaaagcttaagtagatatattttttttaaaaggtgctgcctttttggatttataagaaaatgcctgtcagtcgtgatagaacagagttttcctcatatgagtaagaggaagggactttcactttcangtggaacaggcatcactatcaagatcaactcatggaaggagaaaagaaa

SEQ ID NO: 16147 - DNA, 462 bp, Homo sapiens
  misc_feature (1)...(462): n = A,T,C or G
tggcgtgcgnttttncaccgtgngcatcgcatngngcaggaacncagnttgaactcaggctgtttcaagatccctgcttttaatagctcacgattatgactagttcacattcagtaaatatttgcctccctctctaagtgtgagtatgttccccctgagaatgtgaacaaattcaagcttaaaatcacaagaggcatctgtgaaatggctataaaagagtaaatgaccctggaaaatttgaccccagaggtcctaagtcacaaaatatgtgttttaatgtggattagatcctggaacagaagaaggaccttgctggacaaactggtgaaatgtgaataaagtctgcaatttagtcaattgtacattaatttcttactcttgacgaatgtaatcatgattatgtcggatgctggcattggaggaggctgagtgaaaggtatacagaattctattctatctttg

SEQ ID NO: 16148 - DNA, 478 bp, Homo sapiens
  misc_feature (1)...(478): n = A,T,C or G
natggacctactggccattggacggctatagctcanngccactggagacgaggaactgggacaccaaaaggagaaactctggccacacttgcaccctgttcccaatcctggtccagtgtcacccacagatggtaaggagctctagagacctcaccagcccctgggattggtcacctcactcttctatggacagagattcctgctgggatcctttgagggcaagcagacccttcttccagctcggactgtgaactccactgcagccgtaaggactgtctgtgacagtgagcccgagatgactgggctctgtgctccctcccggccctccaatccttggcctgccacagagaactgagctcttttattagcaccatgaatgtgactgatacagctagccattcccttgtgcgaatgactcagtttattaatgctctgctaaagatggcttctttgcttgccagcagccttaaacagtatn

SEQ ID NO: 16149 - DNA, 457 bp, Homo sapiens
  misc_feature (1)...(457): n = A,T,C or G
nttgtgnccttgagaaccatatcagtgtggtggaattctggggagttagcgtttaatgggggcagagcttcagctggggaagatgaaaaacttctggagatggatagtggtgacagttgcacagtggaaatgtacttcatgccacatgttacgtatatcttatacataacgtaaaatttaaaaatggcttgaaaaaggcaaggaatggctgggtgcagtggctcaggcctgtaatcccagcactttgggaggccaaggcgggtggataacatgaggtcaggaattcgagaccagcctggccaacatggtgaaaccccaactctactaaaaatacacacacacacacacacacacacaaattggccgggcatggtggtgcacacctgtagtcccagccactcgggaggctgaggcgggagaatcgcttgagcctggaaagcagaggttgtagtgagcn

SEQ ID NO: 16150 - DNA, 448 bp, Homo sapiens
  misc_feature (1)...(448): n = A,T,C or G
tttgacnaccctgnatatgacctcagatanccgcggaatttcggggggcttcggacttgctatgctattatattctggacattaccgaagaatttcatttaactaaaaagaaatggggtccactcttgaggccactctggaagaggacggatcctgcccatagctcttgatgccactgggtgactcttctcgcagggacgcctattgtaagagcaggcgtcagaggaaggaatcactatagaaagaaagagggagagtgagactgtcactgaaaaggattaataaacatcaaggctggcctgggcatggtggctcacgcctttaatcccaatgctttcagaggctgaggcagacagactgcttgaggccaggagttcgagaccagcctgggaaatagagaccctgtctccacaaaaaaatgaataacacaaaacactgaggctggtag

SEQ ID NO: 16151 - DNA, 564 bp, Homo sapiens
  misc_feature (1)...(564): n = A,T,C or G
ttgagancctaagaagccccnnnnnnnnnnaaattcctcacatgtgctacataccaacttttaagacctttatgaccccagagtattaactggcgctctcactgacagacttgtgaaaagcattgttccaatagacatctatattgataaaaatatttatctgtttcatagatgggaattctgcatgaaatcttatttggaaaaaatggggccaggaacagtggctcaagcctgtaattgtagtgctttgggaggccaaggtgggcgggggagaggtcacttgaggccaagagtttgggaccagcctgggttacatagcaagaccctatctctacaaaaaaaaaaaaataaactatttgggtatatagcgcatgtctgtagccccagctacttggaaggctgaggcaggaggacctccttgagtccaggaatttgaggctgcagtgagctatgtcacgccactatcctccaatgtgggtgacacaaacagatctctgctaaaaaaagggggggtttcttcgatcanaaattcctaggatttcttttcgatctaacctggatgaa

SEQ ID NO: 16152 - DNA, 479 bp, Homo sapiens
  misc_feature (1)...(479): n = A,T,C or G
catcgacacctcnatcgtagagcgctagaacagcgcggaggaattctttttttattaaatcacaatgatttttattaaccatgtctaactacgtatctgtgccttagcttgcagtgaggcaggccactcgtggcagatacaaggggctcctgagaggcagtgggtaggatggtcacactctgcccattgccctcctggaggccccatttcctcatcataaaatgagggacttttaaataaagtgctatgccgggggataattattttgatgtgtttacctagggtttttcatacaaggggccaggttggaaacccacagccatgtgttaatggccacgtggtgtgagcagcaatccatcatgaatggcctacaggaaggcctcggcttttggagataaagagtagggctgggcatggtggctcacgcctgtaatcccagcactttgcaaggccaaggcaggcagatcacttgaggccag

SEQ ID NO: 16153 - DNA, 441 bp, Homo sapiens
  misc_feature (1)...(441): n = A,T,C or G
atagaggacccttgnntttgtagaccattatcagtgtggtggaattccggcggcggacctgtcgcgatgtcagggctgcgcctctctgcagcagaatttgaatgaatatgttgaagcattaattaccttgaaacaaaaaattatcaatacagataatttgttaacagaatatcagaagaaatgtgatgagctgcagtttgcaagaagagagaatagtaatctgcatcaccaagtggaagagatgcttcaaaaaatttctcctctacagaaatgtcaggaagaactgggatctttaaaagcagagctagaagagaaaaagagttctttaaagttgtatcaggatactcatcaggaatatgctcgtgtaaaggaagaatgcttgaagagtgatgctcanaagaagaaactagaagctaaggtgaagaagctgcaagaggctgc

SEQ ID NO: 16154 - DNA, 479 bp, Homo sapiens
  misc_feature (1)...(479): n = A,T,C or G
natggagaccctaggcctttgaggngctattccaggaaatagaagccgagcctagaaactaacacagccatcaagggaatgacttgggcggccttgggaaatcgatgagaaattgaacttcagggagggtggtcattgcctagaggtgctcattcatttaacagagcttccttaggttgatgctggaggcagaatcccggctgtcaaggggtgttcagttaaggggagcaacagaggacatgaaaaattgctgtgactaaagcagggacaatttgctgccaaacacccatgcccagctgtatggctgggggctcctcgtatgcatggaacccccagaataaatatgctcagccaccctgtgggccgggcaatccagacagcaggcataaggcaccagttaccctgcatgttggcccagacctcaggtgctagggaaggcgggaaccttgggttgagtaatgctcgtctgtgtgttttag

SEQ ID NO: 16155 - DNA, 483 bp, Homo sapiens
  misc_feature (1)...(483): n = A,T,C or G
taatgagcctnctgganatgacgagcatacggaagngcggnggaattcatgaaatactactgctattcccattttacagatgaggaaactttgttaagcatatattaacttacatcaaaataaatagactgcagggcagggagggaggggagaatagtgtgggcagtgtacagtgcagaaacaaagttctaggcagaggaaaaaggatttacagaaagcctggcatacagggcagggggacggggcctgcacacggggctgtttcaccgttagacgttataagcacagtacttggggctatgggcttcctgaaggtcccaagtatttgagacctgaaaaaaatttattgacacctacataggaaaagtgaacttttaaattaataattccaaaattcaaatcacgaattgtttcaaaaattttacatgatagaattcatatttagtaagcgatacgggtatattttaatgcatttgattntaa

SEQ ID NO: 16156 - DNA, 456 bp, Homo sapiens
  misc_feature (1)...(456): n = A,T,C or G
atcgagancctgttgacngtgcnggaattccttgcagatggttctactgcttacatacaacacaattctaaagatgcaaaactcatagattgccaggtcattcagttggaagatggttctgcggcctatgttcaacatgtacccatacctaaaagtacaggggacagtttgcgtctagaggatggtcaagcagtacagttagaagatggtaccacagcatttattcaccacacctccaaagatagttatgaccagagtgcattacaggcggttcagctggaagatggtaccacagcttatatccaccatgcagtgcaagtcccgcagtctgacaccatcttggcaattcaggctgatgggacagtggcaggtctgcacactggggatgctacaattgaccctgacaccatcagtgctttggaacagtatgcagcaaaggtgtccattgatggaagg

SEQ ID NO: 16157 - DNA, 460 bp, Homo sapiens
  misc_feature (1)...(460): n = A,T,C or G
ntttgagnacctgaganccnctacccagngngcnggaattctcggagtttaattatttgatagattatatagatgatggatggcagtcatactggttgatacaatgggtgtctccttacccatttaaatggatggctgcaggcattgttcttcctaaaccaaaaatgattcatccctttgttaccccagaacatcctgaattatggaaattacctgcagatatgacaggaataaagatatggaacactacctatcaactccttcacactaataccaaaacacccacattctgcatcaccttgatatctgaacagatgatactcatcaggagctgagtccaacccccttacgtgctgttggttggaaatataattatcattcccaatacacaaactacataacgtgatatgggtaagctgctcacgtgcattgatgctacttttaatcccacaacatgtat

SEQ ID NO: 16158 - DNA, 486 bp, Homo sapiens
  misc_feature (1)...(486): n = A,T,C or G
ggcggccngttgaaacccctaactgagagcctaggcagngcggggaattcccttgtagaaagcactgctgagggaatagattggttattcatattataaaactatttaaaactctagaaaactatagtaagatataagattataaaaatatcaaaactaagatattgacagtaatagaattaacctactcatctatttgcattttaccagattaattttttcttatgtgtgtgtgttctgtgcaattttattacatgtgtaggttcacctaccagaagattaactcgttttcctcttataaccacatccgcttcccttctccccaccatacccactctgattctgattctttgaaaccattaatttctatttctgcaaatttgtcattccaataatgttatataaatgaaatcataacctgtgcaaccttttgtaattggcccttttccttcagcataattccttggagattcatctaaattggtt

SEQ ID NO: 16159 - DNA, 439 bp, Homo sapiens
taaatttgtagaccttagtccttgcggtcgaattcaggagacaacatttatgaatggaggtcaactatattgggacccccaggatctgtctatgaaggaggggtgttctttcttgacattaccttttcaccagactatccgtttaaaccccctaaggttaccttccgaacaagaatctatcactgtaatattaacagccaaggtgtgatctgtctggacatcttaaaggacaactggagtccggctttaactatttctaaagttctcctctccatctgctcacttcttacagattgcaaccctgctgaccctctggtgggcagcatcgccacacagtacatgaccaacagagcagagcatgaccggatggccagacagtggaccaagcggtacgccacataggggcctgctgcctgccgccccgcgggacctgtgcaag

SEQ ID NO: 16160 - DNA, 479 bp, Homo sapiens
  misc_feature (1)...(479): n = A,T,C or G
gtnncggggnncggggnnttttnccatcggtccctagtcagtgtggtggaattccacgcctgtaatcccagcactttggaaagctgaggtgggcggatcacctggcggtcgggagttcgagaccagcctgaccaacatggagaaacccccgtctctactaaaaatacaaaattagtcgggcgtggtggcgggtgcctgtaatcccagctactcgggaggctgaggcaggagaattgcttgaacccgggaggcagagcttgcggtaagctgagacagtgccattgcactccagcctgggcatcaagagtaaaactctgtctcaaaaaaaaaaaaaaaaaaaaaagggaaggggccccccccccaaactaaatttccttgaccctaaaaagggggggaaaaattaaaaaaataccctgccgaagggaaattggggaaaaacccctatggctgacttttgggccccgggagaggtggaaaaa

SEQ ID NO: 16161 - DNA, 451 bp, Homo sapiens
  misc_feature (1)...(451): n = A,T,C or G
atagatgaccattgtagagngccgttgaattcgctgggcgaagctagaaataactgggggcatggagaatgcggtggctgtaaagggccgctgaggcggtggaggcctggcagagagcgtccccgcggtcgcggcttctggcttctctgtggagcttggttcttccgtggtggtgcagcaccccaggaacttcaggaaccagtccttccttggagagctccccgggacagccacgggggccaagtgaaactagcgcgttttcttggatcctacactttatagtgagtcataaatactttaaatacaaagccaacaacatttgctgcaaataaacgtaaaaatactgttaaagtgtaaaatgttttcctccgtaccatctgacgtttctggcggttcgttgaacgcgagagaacgctgagccgtctgcactgagcccgggagcatcttcagg

SEQ ID NO: 16162 - DNA, 455 bp, Homo sapiens
  misc_feature (1)...(455): n = A,T,C or G
atagacaccctntttgaggacccttagaacangcggnggaattcctggcccggtgggaagcccagacgaggaggacggggaaccggattacgtgaatggggaggtggcagccacagaagcctagggcagaccaagaagaaaggagccaaggcaaagagggaccactgtgctcatggacccatcgctgccttccaaggaccatttcccagagctactcaacttttaagcccctgccatggttgctcctggaaggagaaccagccaccctgaggaccacctggccatgcgtgcacagcctgggaaaagacagttactcacgggagctgcaggcccgtcaccaagccctctcccgacccaggctttgtggggcaggcacctggtaccaagggtaacccggctcctggtatggacggatgcgcatgatttatgataagctgtcacccagtccccataag

SEQ ID NO: 16163 - DNA, 481 bp, Homo sapiens
  misc_feature (1)...(481): n = A,T,C or G
aggatgccggnncccctccaaatcttctcgnatagagcancactaggccagngcggaggaatccgtgagttcccaccaacttttaattattcatgcccttgaccatgtttttgcttggagatctggggtcttctgcagactgaagaagacacatttctagattatttgtcctttttatcctctcaaaaatttaaacactgtacctcttcagaggtcaaaagaaagttggaaacttttcctacatattaggcgttagcatgaggacatttgtttgaattatagaaatttgccctgagctgaactgggttgtgctaacacattggcagagctatgattccttcccagttctaagagatacgatctgtaagtccctatgtcaccacattgcttgagatgatcattcagttacttgacaggatttctcctcttcagagagatttttttttatagcacagattcctttgccccttttatctcctta

SEQ ID NO: 16164 - DNA, 485 bp, Homo sapiens
  misc_feature (1)...(485): n = A,T,C or G
nttcgaagtccctagtccagtgtggaggaactcagcagacagaagcggaagttctcttctttcttcaagagtttggtcatcgagctggacaaagatctttatggccctgacaaccacctcgttgagtggcatcggacacccacgacccaggagacggacggcttccaggtgaaacggcctggggacctgagtgtgcgctgcacgctgctcctcatgctggactaccagcctccccagttcaaactggatccccgcctaacccggctgctggggctgcacacacagagccgctcagccattgtccaggccctgtggcagtatgtgaagaccaacaggctgcaggactcccatgacaaggaatacatcaatggggacaagtatttccagcagatgtttgattgtccccggctgaagttttctgagattacccagcgcctcacagccctgctattgccccctgacccaattgtcatcaaccatgtcan

SEQ ID NO: 16165 - DNA, 460 bp, Homo sapiens
  misc_feature (1)...(460): n = A,T,C or G
nttttaatcgagatccctagtctagagtggcgtaattccccagtggcaagtatctgattgtgtaactaacgctcagttggccatttaggattggctgatctgaagtttcatttagtttaatttggaactgggtgttggatccatctcggtgtaatggcttccccctaagttattttaacacgaggcggttattggtacctttaagatgggtttcatttttggaaattagacatcagttagtaccaaggctggggaataagattaagtgaagtagtacatcacatttggtcaaaaacaaccaagttctggaagaagtttccaaagaggaatttgggaatgttttgcatgttggccttttgaagttcgatgattgtttcagtgcacaaactccaacatacttgttaaaaattacctcatttctttacagtttcttcatcccagttccccagcctcctgtgaa

SEQ ID NO: 16166 - DNA, 471 bp, Homo sapiens
  misc_feature (1)...(471): n = A,T,C or G
natggagaccacatcgagngctctagaaagcgcgnggaannttgtattcacctatactctaccaatatatggtatttaggaaaactttttttatccattcacaaagaaaagcacacacatttttataatcatctgcttcatcagggtaaataaataatttaacaaatttgatcagcatctctagtttaccagtactttaatattagttttcttacaaattaatgtattttgcaatatttccagaaaatcactgtgggagaataatgtaatatactttaggatatatttcctgaccttttcttaaatggcttcatgtgctattcccccaaattctgctttctctattttcttttttatttaacctataattatactttctagtatattctgagtctatcttctaagccaccttacatttttcctggaacaagggagggaataaatagttgcctccactaaatcaggaaaaaa

SEQ ID NO: 16167 - DNA, 216 bp, Homo sapiens
gctggccagagtacctcatccacgctttcttctgtgtcatgtttctttgtgcagcagagtggcttacactgggtctcaatatgcccctcttggcatatcatatttggaggtatatgagtagaccagtgatgagtggcccaggactctatgaccctacaaccatcatgaatgcagatattcctacatattgtcagaaggaaggatggtgcaaattag

SEQ ID NO: 16168 - DNA, 449 bp, Homo sapiens
  misc_feature (1)...(449): n = A,T,C or G
agcgtatccccctgaaactcgctaaagacctnagcacagngcggnggaantccaggggccctgccttcaaaccccggccccctccaggggacagttatttaaacgagtggccgggagcatctgccacctgctggggaggcagagaccctgcaatggccacctctttaaaagggcagctgtacagggctaggttttttcaatgaagtttctgtattaaaggagtggctctggaaaaaaaaaaaaaaaaaaaatggggccctttcgattttaaaggccccgttaaacccccttgataaccctcaacgggccttttaaatgcccaccctttggttgttggcccttcccccgtgctttttttgaccctggagggggccacccccactgccctttcttaaaaaaaggagaaaatggcaccgctttgcgggagagggggcctttttttcgggccc

SEQ ID NO: 16169 - DNA, 467 bp, Homo sapiens
  misc_feature (1)...(467): n = A,T,C or G
ggggggcgtttttncctcgaganccctatttagagtggcgtaattcgtggaaactgaccacggatgagaccaactatggaattccacagcgtgctctgcggggtcactcccactttgttagtgatgtggttatctcctcagatggccagtttgccctctcaggctcctgggatggaaccctgcgcctctgggatctcacaacgggcaccaccacgaggcgatttgtgggccataccaaggatgtgctgagtgtggccttctcctctgacaaccggcagattgtctctggatctcgagataaaaccatcaagctatggaataccctgggtgtgtgcaaatacactgtccaggatgagagccactcaaagtgggtgtcttgtgtccgcttctcgcccaacagcagcaaccctatcatcgtctcctgtggctgggacaagctggtcaaggtatggaacctggctaactgc

SEQ ID NO: 16170 - DNA, 495 bp, Homo sapiens
  misc_feature (1)...(495): n = A,T,C or G
aatcggagagcantggananngccnnnnaattgagnaccactagtccatgcggtggaattcctgagactaagggctggtttttaatcctcataagaaaccagccttgaagaattaacaattctcttcattggtattctaaacctcctaagatatttaggcttctgtacataaaagtgtttttgctaaatttacagtatatatagatcctttcatattattttactaagaatgtttgaactttgcatatttgatatagttcctggtaggaatagcacagctcaaacattagtttttctacttacctcctctaacacgtggtttgtctggagagtttctaaaaattcagctataaccccagttcatgtatttactggtgattgttcttgctgaggtagtaacagcccaatcttgggctgttaaatcctaggaaatctcgaatcatagtgattaaaatagttggggtaaagttgtagcttatatgcaatactacttgg

SEQ ID NO: 16171 - DNA, 486 bp, Homo sapiens
  misc_feature (1)...(486): n = A,T,C or G
ggggagtnccggggccggggggnttttnaatcgagaccctatctagagggcgtaattcgccgaggcgcaagtagagacctaattgtaacaatcatcatagagtgcagagatgatcctgaagcgtcacatacactaaagtccagacactatgtccgatgggggtaaaatccattaaagaacaggaaaaaataattataagatgataagcaaatgtttcaggccaatgtcaacccagttaaaaaaaaaattaatgctgcgacaaacgggtgaattagtttgcaaactatataaagacatatgcagtataaagtctgttaatgcacatcctgtgggaatggagtgttctaaccaattgccttttcttgctatctgagctcttctatattatcatactcagacaaccaaattaaaagaattagaatatgatttttaatacacttaacattaaactcttctaactttcttctttctgggataattcaaaan

SEQ ID NO: 16172 - DNA, 470 bp, Homo sapiens
  misc_feature (1)...(470): n = A,T,C or G
agggcgccttttnaatcgaganccntatactgagtggcgtaattcagtgccaaggattacataatcgacagtcactttggagctcatgatggatgtgacgtacgttctatggagtatcaataatgtcgtgcttatatgcagccgccacgtgctcataatgccgtgctccaaagtcatcgtccggtttctcactgtgatgatgaagcatggctacattggcgaatttgaaatcattgatgaccacagagctgggaaaattgttgtgaacctcacaggcaggctaaacaagtgtggggtgatcagccccagatttgacgtgcaactcaaagacctggaaaaatggcagaataatctgcttccatcccgccagtttggtttcattgtactgacaacctcatctggcatcatggaccatgaagaagcatgacgaaaacacacaggagggaaaatcctgggattctttttctatg

SEQ ID NO: 16173 - DNA, 467 bp, Homo sapiens
  misc_feature (1)...(467): n = A,T,C or G
cttttgagattcatgcgcaatgngcaggnaacctgnngncaaatatatttcagggaaacaatgaaggaaagcaatatgtggccgcagaattatcatcagacaaaatagaaattaaggcgcaatcattaaaccagagaggattttttatttttataaaagatgcaatgaactaggaaaatggtcttttaagagctatctacctaaactaaatacatcaaccaaaagttcttagaacaaaggtaaattggttgcaagactgctgtgtgagcctttaacacaatttccaagccttcaaagatcatggagattaaaaaagtaataacggcatcaaaaatttgtaagatatacttaatgagactgaaataatgattggaaattaagctgagaatacatattctttttgaagggtgatgagttgattttcaaaactaagttacaaaaaattacaaaatgcatagggtatattg

SEQ ID NO: 16174 - DNA, 502 bp, Homo sapiens
  misc_feature (1)...(502): n = A,T,C or G
ccgcccatcgagaccctancnagatttgaganctntatcnagngncgnggaattcgtttctggcggaggactattgctttgctgaccttgctccccataagcccgcacccccacttgacacagataggtttgtgctactgatgtccggcctgggcctggttggcggtggaggcgagagcctgctgggcacccagctgctggtggatgtggtgacggggcagcttggggacgaaggggagcagtgcagcgccgcccacgtctcccgggttatcctcgctggcaacctcctcagccacagcacccagagcagggattctatcaataaggtatggagcccacctggctgcattcagccccagcccaggagcctgcaagcctgtaagaccctccttccccagggcgagtagggtaccctgtgaggtctcgcaggtcggtgggaagcgccctgcagtgactctggggcctcctgcaatggggctcctcatgcccaggccctcgctgg

SEQ ID NO: 16175 - DNA, 489 bp, Homo sapiens
  misc_feature (1)...(489): n = A,T,C or G
tggcgcttggggnagnnnnnaatcgagaccantgnnnnatcgtagaccatagtccgtgtggtggaattctggtattgttaaaacatttgataatatgcattatgtatttttgtatttcagattaaataatcaagtcattattgtgaatttggatctaaatgacctggcagaaaccatggagatgatcttggatttaaagaggaaaaactcaaagcaatgtattctgatcaagaaatggcaggaaatggcagctacctgatatggaacaatcaacaactgaaggtttattttgaatgagaggtgttgtccaactgcgagacggagtgattgaagctgagaataaatggaaacacaatcaatagtcactccagtgaggtaggaaagaaagccattccgaagtggcagagaagctgctttttcctcctgcatgctgcctgctagtgtggatcttggcataacagacactacttggcaaaagatccatccttt

SEQ ID NO: 16176 - DNA, 483 bp, Homo sapiens
  misc_feature (1)...(483): n = A,T,C or G
atcgagccccctaatggagactctagaccangcggnggaattcctgctttttactgagtgaggcggaaagccttcagaggactgagtcttgctctgtcgcccaggctggagagcagtggcgcggtctcggctcgctgaaacctctgcctctggggttcgggtggttctagtgcctcagcctcctgaatggctgggagtacgggtgcccaccaccacggcagttaatttttgtatttttagtagagatgggatttcgccatgttgaccaggctggtctcgagctcctgacctcaggtgatccacccacctcggcctcccgaagtgctgggattactgtcatgagccaccgcacctgacaagcctcctgtttcttaataagctgcagaatttgttttacactattttccacttgagctgtacctgtcattccaactgcgtcatgcttgaaatcaggacatctacttctgcattgagtcagtgatg

SEQ ID NO: 16177 - DNA, 477 bp, Homo sapiens
ccgcccccccccccccattgtagaccaatggaagtctggtggaattcgttacagcccagatagctcttcagcctgcactgaagttcaatggtggtggtcatatcaatcatagcattttctggacaaacctcagccctaacggtggtggagaacccaaaggggagttgctggaagccatcaaacgtgactttggttcctttgacaagtttaaggagaagctgacggctgcatctgttggtgtccaaggctcaggttggggttggcttggtttcaataaggaacggggacacttacaaattgctgcttgtccaaatcaggatccactgcaaggaacaacaggccttattccactgctggggattgatgtgtgggagcacgcttactaccttcagtataaaaatgtcaggcctgattatctaaaagctatttggaatgtaatcaactgggagaatgtaactgaaagatacatggcttgca

SEQ ID NO: 16178 - DNA, 569 bp, Homo sapiens
  misc_feature (1)...(569): n = A,T,C or G
ccccccccccccnnnnnnattggagcacattgagagncgngcaanncgnctgaaggaggtaccagattatttggatcacattaaacatcccatggactttgccacaatgaggaaacggttagaagctcaagggtataaaaacctccatgagtttgaggaggattttgatctcattatagataactgcatgaagtacaatgccagggacaccgtgttctatagagccgcggtgaggctgcgcgatcagggaggtgttgttctgaggcaggcccggcgcgaggtggacagcatcggcttggaagaggcctcggggatgcacctgcctgagcggcctgctgcggcaccgcggcggcctttctcctgggaagacgtggacaggttgctggaccccgccaacagagcccacctgggcctggaggagcagctgagagagctgctggacatgctcgacctcacctgcgctatgaaagccagcggctcccggagcaagcgggcaagctgctcanaaaggagattgccttctnctgaacangctgagccaggcagacagcctagccttgccacggggn

SEQ ID NO: 16179 - DNA, 451 bp, Homo sapiens
  misc_feature (1)...(451): n = A,T,C or G
agggagancccactgaaaccccgctagngtngcgagcanaaacggcggaantncgtgtatgcccacggctacctcaagggcaccaagggccctggtttcactggaaccaaaggggatcccactggagcagggcccgaggccgccctagagcctggggccgactctgtgtcgatgcaggctttctctcgcgcccagcctggtgctgctcctggcatctaccaacaatcagccgaggcgagcagtagccagggcactgctgccaacagccagtcgtataccatcatgtcacccgctgtgctcaaatctgagctccagagccctacccatcctagttctgctctcccaccggctaccagccccactgcccaggaatcctacagccagtaccctgttcccgacgtctctacctaccagtacgatgagacctccggctactactatgacccccaga

SEQ ID NO: 16180 - DNA, 464 bp, Homo sapiens
  misc_feature (1)...(464): n = A,T,C or G
gggttgcgcatagangnccnttngaatagatgaccattagtccagactggtggaattcctcacacctgtgatcccagcacttagggaggccgaggcaggcgcatcacttgatgtcaggagtttgacaccagcctggccaacatggtcaaaccccatctctactaaaaatacaaaaattagccgggcgtggtggcaggcacctgtgatcccagctactctggaggctgaggtgagagaattgcttgagctgggaggcggaggttgcaatgagcagagattgcaccactgcactccagcctgggcactagagtgaaactccatctcaaaaaaaaaaaaaggggaggggaaaaaaaaaaaaaaaacccccccaaatcttagaaaataaaaatttttcaaaaaaaagaaccggggtaaacccccatgggaaggggcaggtctttgtttttagggaacccttttttttt

SEQ ID NO: 16181 - DNA, 563 bp, Homo sapiens
  misc_feature (1)...(563): n = A,T,C or G
ggttgaatagaantactattccagagnggngcaattcgacatgctcagcaaaataacaacgaaaccagagggggaactctctggcatgcaagttcaaacacgactctacaactacggcagaaaaagagagagagagaaactaaaaatatatatatatcctatttttttcacagctatcagtttctttcactgagctttcctaaatttaagcctctagaaaataataaatacttggatatcttacctacaaacatggacagatgtgtgtatgcgctcattttagagaacttgaatttttttttttaaaggaaggtgtcaactttggcttttgagtgtttggcatggttacaatgccttaaaaaaacagatgagcagcttagctactaaccatgctgaccactgttcggaacgggattgaatcacagaaaaacagcaaatggctctctcttacagagtgtctgaacttcaaagcacaattcctgagcacattgtgcagagcacctctggtcacgttatctcttctaactgggctggattacagacagaatcaataccagaggaag

SEQ ID NO: 16182 - DNA, 472 bp, Homo sapiens
  misc_feature (1)...(472): n = A,T,C or G
cattgagaccctaggacattgagngccattcttctcctgcaggggctgatcattttggacttaagcttgtttccacttttccagagcagtcgttggcttcgctatcttagtatcttctggggcctggtaagccaggccagcttatggtttgccaccttcctcagtgtcttctattgcaagaagatcacgaccttcgatcgcccggcctacttgtggctgaagcagagggcctataacctgagtctctggtgccttctgggctactttataatcaatttgttacttacagtccaaattggcttaacattctatcatcctccccaaggaaacagcagcattcggtatccctttgaaagctggcagtacctgtatgcatttcagctcaattcaggaagttatttgcctttagtggtgtttcttggttcctctgggatgctgattgtctctttgtatacacaccacaagaagatga

SEQ ID NO: 16183 - DNA, 463 bp, Homo sapiens
  misc_feature (1)...(463): n = A,T,C or G
ttcgttagcactagaanttcggtagaacctaggacagngcggnggaantcgcattacaagtgaaggtggtaaattattttaaatttctcttttgaaattcatccttatttgcaagcattttgtcatacaaaaattcaggctagagggaactaagtcttttttccttcttgaagattaagtgattgatgttaaattcacagacaattttaaaaagtcacaaactcatggtgtgtgtcagaggagcaaggacatctggggaaagatgtaacttcagtgttaaaaattttttattcagctatttcatatttttaaaagtatgaaatctgttgctgttaaatcttcatggcatgcttttcatttatcatgattgtctcaaggaatggatgtaagatggaagggactacttccttaggtgtggcttctttatattactgaaacctggaaaaagcaagaacactaattt

SEQ ID NO: 16184 - DNA, 476 bp, Homo sapiens
  misc_feature (1)...(476): n = A,T,C or G
agaggtccnnnnaattgagaaactgagaaccgtcggaagagccgnggaattccactgactcacccagagcaactcccacgcctgcaagctccattcatggtaagtgccctatacaggcgtaacattttaaatcttttatacagtacttttactgtattttttctatctttcaatatacaaatacttacgattgtgttacagttgcctacagtatttagtatggtaacatgctgtgcacatttgtagcctatgagtgataggctatataccatatataccatataacctcagtgtgtaccatctaggtttgtgtaagttcattctatgatgttcacacaacaacaaaatcacctaaggacacatttctcagaatgtattccatcattaagtgacacatgatggtattaaaaagaaagcaagaattagccagatccaggggcaggaggaaggttgtttcacctagcagaaacaacctg

SEQ ID NO: 16185 - DNA, 495 bp, Homo sapiens
  misc_feature (1)...(495): n = A,T,C or G
cggggcgggaggcgcggnannnnnaaaattgagacctgaaggcattgcggnggaattctgaagaggtggcttgtaagttggtgatcattgaaggagacatgggatgcacagaggaacgagctgagctggcagagtcccgttgctgagagatggatgagcagatcagactgatggaccagaacctgaagtgtctgagtgcagctgaagaaaagtactctcaaaaagaagacaaatgtgaggaagagaggaagattcttactgataatcttaaggaggcagagacccatgctgagttggctgagagatcagtagccaagctggaaaagacaattgatgacttggaagataaactgaaatgcaccaaagaggaacacctctgtacacaaaggatgctggaccagactctgcttgacctgaatgagatgtagaatgccccagncccaccctgctgctgctccttcctctgaccctgactccgcctgaggccagcctgcn

SEQ ID NO: 16186 - DNA, 418 bp, Homo sapiens
atccgggaagatggcggacattcagactgagcgtgcctaccaaaagcagccgaccatctttcaaaacaagaagagggtcctgctgggagaaactggcaaggagaagctcccgcggtactacaagaacatcggtctgggcttcaagacacccaaggaggctattgagggcacctacattgacaagaaatgccccttcactggtaatgtgtccattcgagggcggatcctctctggcgtggtgaccaagatgaagatgcagaggaccattgtcatccgccgagactatctgcactacatccgcaagtacaaccgcttcgagaagcgccacaagaacatgtctgtacacctgtccccctgcttcagggacgtccagatcggtgacatcgtcacagtgggcgagtgccggcctctgagcaag

SEQ ID NO: 16187 - DNA, 564 bp, Homo sapiens
  misc_feature (1)...(564): n = A,T,C or G
nattcggataccagtccgcgtggtgcaattcgccatttatggctcttgccgtttatgtcactgacagtttctgaggcagaagccgtatcatgtctaccacctgtgaggtccacacagtgtgtatcatttacctcctgaacctgctcaaggaagcagacctctgcttctccccatttgctagaagaaatcatgaatagtctgagtcttcctctctgacaagttagggcatggacttgacccagctttgtgccagagaacccaatatgagtgttgttggcagcttgccaagaaggactgtctttttcaagacatactgggttcatgtgacacctccatggatttttttccagcctctaagtcaccaacttgggaactgcttgtctcacgttgctttgttttttacaataataaaagcattattatttaagctaaannnnnnnnnnnnnnnnnnnnnnnnnnnnnnnnnnnnaaaaaagggggccgtttaattttaggaggccctttaaaacccggtaaaaaccctggggttggccttttattggcccgccacctgtggttgccccc

SEQ ID NO: 16188 - DNA, 561 bp, Homo sapiens
  misc_feature (1)...(561): n = A,T,C or G
atttgaatagaacacctatccgcgnggtgcgaattcgccatttatggctcttgccgtttatgtcactgacagtttctgaggcagaagccgtatcatgtctaccacctgtgaggtccacacagtgtgtatcatttacctcctgaacctgctcaaggaagcagacctctgcttctccccatttgctagaagaaatcatgaatagtctgagtcttcctctctgacaagttagggcatggacttgacccagctttgtgccagagaacccaatatgagtgttgttggcagcttgccaagaaggactgtctttttcaagacatactggtttcatgtgacacctccatggatttttttccagcctctaagtcaccaacttgggaactgcttgtctcacgttgctttgttttttacaataataaaagcattattatttaagctaacggaaacaggacactgaaactggtgccatgacaataaaaaaaacccgcctcctgcattaaaggggccgtattaaacccgcggataacccctgagggggctttttatggccgcccattttgtgtt

SEQ ID NO: 16189 - DNA, 459 bp, Homo sapiens
  misc_feature (1)...(459): n = A,T,C or G
gaagccnnnnntnnncctgagatcgtagtccatgcggaggaattccgagcggccaggggtaggatagtataggaagtagaaggggaaggagggttagatagagaatgctgaataggcagtagttgggagagagcctcaatattgggggaggggagagtgtagggaaaaggatccactgggtgaatcctccctctcagaaccaataaaatagaattgaccttttaaaaaaaaaaaaaaaaaaaaaaaaaaaaaaggggccccttcaattttaagggccccgttaaaccccggtaatcaccctagagggggcttttaaaggcccccccttttgtggttggccccccccccgggctttttttgcccggggagggggcccccccccctgccttttctaaaaaaaaggagaaaatggccccgctttgccggggggggggtttttttttggggagcccgaaaacn

SEQ ID NO: 16190 - DNA, 442 bp, Homo sapiens
attgaagatccctagttagagcggcggaattcgattataccagaataaagagcctcagcatcaatgtgaatttgggaaacaaagaagtgatggatactactaaaagtcaagttagagattatccaaaacataatggacaaattagtgatccacaaagggatcagaaggtcaccccagagcaaacaactcagcacactgtgagtttgaatgaactgtggaacaagtatcgggagcgacagaggcaacagagacagcctgagttgggtgacaggaaagaactgtccttggtggaccgacttgatcgtttggctaaaattcttcagaatccaatcacacattctctccaggtctcagaaagtacacatgatgatagcagaggggaacgaagtgtgaaggaatggagtggtagacaacagcagagaaataagcttcagaaaaagaa

SEQ ID NO: 16191 - DNA, 415 bp, Homo sapiens
aattatccagtgacgaaatcaaacgggcaattctaacaatggacgaacaggaagatctgcccaaggacatgttggaacagctcttgaaatttgttcctgaaaaaagtgacattgacctattggaggaacataaacatgaactggatcggatggccaaggctgataggttcctttttgagatgagccgaattaatcactatcagcaaaggttgcaatcgctgtacttcaaaaagaagtttgcagagcgtgtggcagaagtgaaacctaaagtggaagcaattcgttctggctcagaagaggtgtttaggagtggtgccctcaagcagttgctggaggtggttttggcatttggaaattatatgaataaaggtcaaagagggaatgcatatggattcaagatatctagcctaaacaa

SEQ ID NO: 16192 - DNA, 482 bp, Homo sapiens
  misc_feature (1)...(482): n = A,T,C or G
agggtaccnnnnaattgaagaccaactttgagaccgctagggaagngcggaggaataccggcagtgcgagcgctcgctggaaaactctccgtctttgctaatggagtcgcgacttcaacacatgaccgctactgctcttagtactgacgccatgatgagtattacctgcagaaattcctctctaaatgaacaagtaaccacatctgcacgcggcagtgaagtccagatagtcacagcagattgttttgctactttttcatatggtatatgtttctgatttttaatatttcttttgagaaattctgagttctgatgtaggagctttcctgtgatttctgtttcacgttccttcctgtcacaccctcctttggcgtctctgtgtatatccttgctttattttcttggaacctttgatttcaacactgagggcctggagacctcggctcctcctgctcctgaaccaggaggcttcatgtggggga

SEQ ID NO: 16193 - DNA, 475 bp, Homo sapiens
  misc_feature (1)...(475): n = A,T,C or G
aggggaccnnnaactgagaccaactgagaccgtggggaagncgcgagacctaagtgcggtccaggggctcagcaccctcttccctgaagggcactgggttctcctctgtgcacacgtaccagtacctgctgtgagaagtgtcacgtgggggaaggagagaggcgtgggtaagggacatttcccttcatttctctgcttgccacccttggggcctccttcagttcacattttactcagtctcccggtggctgtacagccgggggcgggggcatgtgtggacatccacacacagcgctggttgtatcctaaccaggaaactcaaagcagccttgcccaccacagtgcgttgaatggtgaccctctaaagatgtgtcctggggggctggggagggaggatggcttgagcccaggagattgaggctgaggctgcactgaactgagattgtgccactacactccagcctgggcaacacag

SEQ ID NO: 16194 - DNA, 413 bp, Homo sapiens
gcgaagaaatttataatgaaaagaagatgattttcattatgtaaacgctcaggcatgactacgctgtttgaaacagacagatgtttactcttccttgtaatgagtaggtttggatttaagagccgattagaggctacttcctgtaaacaagtacaggaaaatgaaactagacgggtgggggacactagaatgaaaaccagtgttagggtaaagacaaaacagactatgtacataatctgtatatgggaaaagaaagagcgaaattaccttacttaaggataataggacaagacaaattacagattgtctcagagaaaacaaatgagttactctctcggacaagctgtaggtcctacctaaatgtccagcaggacattagacagtcgtacagggtacagaataattcttcgttg

SEQ ID NO: 16195 - DNA, 392 bp, Homo sapiens
  misc_feature (1)...(392): n = A,T,C or G
cccacgcgtccgcccacgcgnacgcacttccatcatgcttggctagntnttctgtttttagtagagacagggttttgctatgttggccaggctggccttgaactactgacctcttgtgatctacctgtcttggccttccaaagtgctaggattacaagcgtaagccacagcgcctggccttgctacattttttttttttttttttttttttaaaaaaaaagggcctccttttgtcccccaaaagggttttgtcttgggccaaaaaatttttgcccaaccctcccaaggggttggaattacaggggggaggccccttctggcccccttttatatttaggggccagggttgtgaaaccccgccccccatagccccttgttccctttatttgggg

SEQ ID NO: 16196 - DNA, 494 bp, Homo sapiens
  misc_feature (1)...(494): n = A,T,C or G
aggccgagaagnttttnnnaactgagtagctccgtangnctnnnncctgcntcctgcgcannancggnnnggnattnnngggncgacccacgcggncgagaacacttagccttcatgagagnccccaccatggcctggatgatgcttctcctcggactccttgcttatggatcaggagtggattctcagactgtagtgacccaggagccatcgttctcagtgtcccctggagggacagtcacactcacttgtggcttgagctctggctcagtctctagtagttactaccccagctggtaccagcagaccccaggccaggctccacgcacgctcatctacagcacaaacactcgctcttctggggtccctgatcgcttctctggctccatccttgggaacaaagctgccctcactatcacgggggcccaggcagatgatgaatctgactactactgtgtgctgtatatgggtagtggcatttcggtgttcggcgg

SEQ ID NO: 16197 - DNA, 409 bp, Homo sapiens
  misc_feature (1)...(409): n = A,T,C or G
agatcatcgagattttaaaagggatcgtgagacacatagagatcgagaccgggatcgtggtgttattgactatgaccgggatcgatttgacagagaacgccgaccccgagatgatagagctcagtcatatcgagacaaaaaagaccattcctcatccagaagagggggttttgataggccatcctatgaccggaagtctgaccgaccagtctatgaaggaccatccatgtttggaggagaacgaaggacttatcctgaggagcgaatgcctctgccagctccttcactgagccaccagccacctccagctccacgagtcgagaagaagcctgaatcaaagaatgtggacgatattttgaaaccaccgggccgggagagcagacctgagagaattgttgttataatgagn

SEQ ID NO: 16198 - DNA, 412 bp, Homo sapiens
  misc_feature (1)...(412): n = A,T,C or G
tggtcatggcgccccgaaccgtcctcctgctgctctcggcggccctggccctgaccgagacctgggccggctcccactccatgaggtatttctacacctccgtgtcccggcccggccgcggggagccccgcttcatctcagtgggctacgtggacgacacccagttcgtgaggttcgacagcgacgccgcgagtccgagagaggagccgcgggcgccgtggatagagcaggaggggccggagtattgggaccggaacacacagatctacaaggcccaggcacagactgaccgagagagcctgcggaacctgcgcggctactacaaccagagcgaggccgggtctcacaccctccagagcatgtacggctgcgacgtggggccggacgggcgcctcctccgcgggcatgaccn

SEQ ID NO: 16199 - DNA, 413 bp, Homo sapiens
  misc_feature (1)...(413): n = A,T,C or G
gaggcagcgctctcgggacgtctccaccatggcctgggctctgctattcctcaccctcctcactcaaggcacagggtcctgggcccagtctgccctgactcagcctgcctccgtgtctgggtctcctggacagtcgatcaccatctcctgcactggaatcagcagtgacgctggtgattatagggatgtctcctggtaccaactgcacccaggcaaagcccccaaagtcataatttatgatgtcaatattcggccctcaggggtttctaatcgcttctctgcctccaagtctggcaacacggcctccctgagcatctctgggctccaggctgaggacgaggctgaatattactgcagctcatatacaaacaccaacactcccctttatgtcttcggaactgggaccaaggtcn

SEQ ID NO: 16200 - DNA, 409 bp, Homo sapiens
tgaatgtgtaaacaacactgtttgtgacagtcacgggttttgtgacaatacagctggctccttccgctgcctctgttatcagggctttcaagccccacaggatgggcaagggtgtgtggatgtgaatgaatgtgaactgctcagtggggtgtgtggtgaagccttctgtgaaaacgtggaagggtccttcctgtgcgtgtgtgctgatgaaaaccaagagtacagccccatgactgggcagtgccgctcccggacctccacagatttagatgtagatgtagatcaacccaaaaaaaaaaaaaagggggggccgttttaaagaatccttgggggggccaaagttaacccgtgcttgcaacggaatacttttttccttatagggaggcgaattataacctacctgggaatt

SEQ ID NO: 16201 - DNA, 416 bp, Homo sapiens
  misc_feature (1)...(416): n = A,T,C or G
atggctgcggccgaggtggcggacactcagctgatgcttggagtcgggctgatcgctctcaccaaggaccgaggggccgtgggaaacgtctgacgcccacttcacggaggagcaaatggaggcccaggccgtcattgtgcacggacacaccataggccgtacagagccgggagtgggaccctcgcagtgtagcccagagcccccaacccccaccagtggagagctcctgcatcatgtgatcgagcttgtgcataaataaagcaggagtttctacncnnnnnanaaaaaaaaaaaaaaaaaaaaaaaaaaaaaaaaaaaaaaaaaaaaaaanggggggggggcccttttaaaaaattcctggggggggccaaattttccggggggggggaaattttttttttttttttaaagggggg

SEQ ID NO: 16202 - DNA, 409 bp, Homo sapiens
  misc_feature (1)...(409): n = A,T,C or G
aagtgctgctggcagccgccagcatgacgaatccacagccttaaagcccacctgcctcactgtcgcccttccatttagctcggcctcatccttgacctctgtcccccaccttgaggaaactcgaggacttcttcccaggcagctgctccaggacacattccagttggggatgtctccccttattccctctgggtgcagaccatctctaagacttgtttccagatgccatcagcatctcctctccttgcctaccttttctctgttctcggggcgagttcctcactgactcccaggtcctgcccaactaaagcacctgggcctgtcatctatggggcctctaannnnnanaaaaaaaaaaaaaaaaaggggggggcccctttaaagaatccctcggggggcccaaccttag

SEQ ID NO: 16203 - DNA, 386 bp, Homo sapiens
tcagaccggactgccaccgatgacctccgacgtgtttttttccatcttcgccaacaagctgggcgtgtggctcttcttgcttgacgttctctatcactacgtggccgtcaacaatcccaagaagcaggaatgaaagtggcgctttctccgccccatggttccaagacatagcccgatgcttgaaggagggtatgaggggccttaacacttcacttcatcccttctacccatcacagcatacaaagaaactacacctggatttttccaaacgacttttatttcctcagaggggtccttaatcctatggaacaagaggctgccactgaatatggcccaggataggggcttgcttttctactccctccccccagtataaaaagatagac

SEQ ID NO: 16204 - DNA, 440 bp, Homo sapiens
atgacacatttgaagcctcgaaccgcggcggaccccgcgtgcgctcgaagataaccaagcagtcttttaaagaaaagatttgttgccttgccaactaatacgacctcatcgagacctctgactgagtgttgtagtgatgcaggtgactctcctttgaaacctgtcagctgtccaaaatctaaagcatcagacaagcggagtttacttccacatcacatcaggcagatatatgacgaattatttcagatacatgtgaaattgcagtgtgaaactgcagcacaacagaaatttgctgaagaacttcaaaagcgagaacgttttttacttgaaagagaacaactgcttttcagacatgaaaatgccttgagtaaaattaaaggtgttgaagaagaggttcttacaagatttcaaattataaaagagcagcatgatgcagaagt

SEQ ID NO: 16205 - DNA, 410 bp, Homo sapiens
  misc_feature (1)...(410): n = A,T,C or G
cgaatggttaatatatatgtagatatatattttagcagtgacattcccagagagccccagagctctcaagctcctttctgtcagggtggggggttcagcctgtcctgtcacctctgaggtgcctgctggcatcctctcccccatgcttactaatacattcccttccccatagccatcaaaactggaccaactggcctcttcctttcccctgggaccaaaatttaggggcctcagtccctcaccgccatgccctggcctattctgtctctccttcttccccctggcctgttctgtctctgagctctgtgtcctccgttcattccatggctgggagtcactgatgctgcctctgccttctgatgctggactggccttgcttctacaagtatgcttctcccacagctgtggcn

SEQ ID NO: 16206 - DNA, 413 bp, Homo sapiens
cgtttgcggagacctcaaggtataatctatcccagatcctttcccagagagaaacttggcgatcacgttttcacatgatgctcacgctcagggcgcttcaattatccctccccacaaagataggtggcgcgagtttcagggtctctcgtctctctcctacagaaaagaaaaagaaaaaaatgtcattagaagaggcgtaacacgtcagtccgtccccaggtttgtgtttcctggagtggccgaaagagatcagttctaacctgctctgcaggaataacggtcctgcctcccgacactcttggcgaggtttttagacagtttgctccgggagctgcttcttcgcttccacctttttctgccccacacttcgcggcttcttcatgctttttcttctcaccatttctggccaaaac

SEQ ID NO: 16207 - DNA, 403 bp, Homo sapiens
cggacgcgtggggccgaaagcgaataaggaagctcctgcccctcctaaagctgaagccaaagcgaatgctttaaaggccaagaaggcagtgttgaaaggtgtccacagccacaaaaagaagaagatccgcacgtcacccaccttccggcggccgaagacactgcgactccggagacagcccaaatatcctcggaagagcgctcccaggagaaacaagcttgaccactatgctatcatcaagtttgcgctgaccactgagtctgccatgaagaagatagaagacagcaacacacttgtgttcattgtggatgttaaagccaacaagcaccagattaaacaggctgcgaagaagctgtatgacattgatgtggccaaggtcaacaccctgattcggactgatgga

SEQ ID NO: 16208 - DNA, 486 bp, Homo sapiens
  misc_feature (1)...(486): n = A,T,C or G
gtgactgacgcctgtggnacnatggacgaccttccggancgacccacgcgtccggtgcaagagtcggcggctcagttgtccatgaccctgaaggtccaggagtacccgatcctcaaggtgccctacgagacgctgaacaaacgcttttgtgccgctcagaagaacattgaccgggagaccagccacgtcaccatggtggtggccgagctggagaagacgttgagcggctgccccgccgtggactccgtggtcagcctgctggacggcgtggtggagaagctcagcgtcctcaagaggaaggcggtggaatccatccaggccgaggacgagagcgccaagctgtgcaagcgccggatcgagcacctcaaagagcatagcaacgaccagcccgcggcggccagcgtgtggaataggaagcgcatggatcgcatgatggtggagcacctgctgcgttgcggctactacaacacggctgtcaagctggcg

SEQ ID NO: 16209 - DNA, 418 bp, Homo sapiens
acgaggaggactatgagctgggccgacagaaactcctgaggaacttgatgctgcaagcattgccctgacctattccctcttctcactttggggactgttcccatcacccacctctggagcttacactgttctggggtttgttctctacccttccaaccaatcacacccctgccttttttttttttttttaaaaaaaaaaacaaaaaaagggggaaggggttttccccccccctccttgcccccatgggccggggctccccttttatttcctttttccattaaccccgaagggggtttttacagttactttaccactgacccgtaaaacaaatgtttaggaaaaaccaaggtctccagcccatattctttgaaggggatggaggagaccactttttttgggaggcactaaggagttatc

SEQ ID NO: 16210 - DNA, 418 bp, Homo sapiens
aagattcccagagctatactttgaacaaggaagctgcttcggaggtcagcctgacagcacagcctctgccacagcttcagccaaaacccctctaccactgtacttccagaaggatcatgcaatcacgcagtcacttcacagtactcactctgccttcagtgagggttcatcttggtgaaaactaggtcttacagaaatgctggcaggaggggagtctaggaaatgtagcttttggagatttagcagcctctagtattacacacaacatcatgatagaaaggggttgaaatagtgttaagagagtcggtcttcaaaatatgcagcctattaggtgatggggaagcctgttactgcagagacagatggtgtttgagcagacacctgaggggagtgaaggagcaaagccagagataacctc

SEQ ID NO: 16211 - DNA, 397 bp, Homo sapiens
  misc_feature (1)...(397): n = A,T,C or G
actcctagccgcagacctcctcattctaacctgaatcggaggacaaccagtaagctacccttttaccatcattggacaagtagcatccgtactatacttcacaacaatcctaatcctaataccaactatctccctaattgaaaacaaaatactcaaatgggcctaaaaaaaaaaaaaaaaaaaaaaaaaaaaaaaaaaaaaaaaagggggggggccctttaaaagaacccttgggggggccaaattttaccgggggaggaaagaaaaaatttttttcctttagggggggggattaaaaaccccggggggattttggggaaagaacccttctttggggggggggaattttgggcccaccctccccccaaaaattaaaccccttgggggaaaataaaan

SEQ ID NO: 16212 - DNA, 442 bp, Homo sapiens
cttgatgttggaaccagggcccaagcctgctcctcattgtctcctgccctcctagtccccaggagaggaaaagaaatactgttttagagaaataacattttcaacaaaacatccctggagtcagattttgagttggggtgggctaatcagggagtcggggctctctgcgtgatgtcagttctatggctaactggtttttctaaaccagccagctgcctatcaaaacagtacaacttttctaggaaatgcaattggcaaagacacttacgatgctgagaagtacacaaggtgaaactgctccagtttttctcatagcagggtcagcaggaaagcaagtggtgcccctggtcccatcccacacaggtgagactgcaccgagaggtaacgtggtcctcacagcccaccacgcctgggcttcgcccaattttgatacttcgtaggt

SEQ ID NO: 16213 - DNA, 384 bp, Homo sapiens
cggacgcgtgggccagaagtcagacatgaagaaacacactttcatccacactggtgagaagcctcacaagggccaggtgtgcggcaaggcattcagccagagctccaacctcatcacccacagccgcaaacacacaggcttcaagcccttcggctgcgacctctgtgggaagggtttccagaggaaggtggacctccgaaggcaccgggagacgcagcatgggctcaaatgagcaccctggctggctgcaagcagcagctacacaacactacagagggcagcctccctgcttgccaccactctgctccctgcttgcctccactcccttctgactttccagaccccaggtccagtctgcagatcctaccaggttgctcctccttc

SEQ ID NO: 16214 - DNA, 415 bp, Homo sapiens
ccgaggtcagcgagcagagcaatcaggccaccgccctggccttcctgggctcccagagcctggctgcccccactgactgcgtgtcctccttcaaccaggatccctccagctgtggggaggggagggtcatcttcaccaaaccagtccgaggggtcgaagccagacacgagaggaagagggtcctggggaaggtgggagagccaggcaggggcggccttgggaatcctgccacagacaggggcgagggccctgtggagctggcccatctggccgggcccgggagcccagaggctgaggagtggggcagcccccatggaggcctgcaggaggtggaggcactgtcagggtctgtccacagtgggtctgtgccaggtctcccgccggtggaaactgttggcttccatggcagcaggaa

SEQ ID NO: 16215 - DNA, 416 bp, Homo sapiens
  misc_feature (1)...(416): n = A,T,C or G
atcatttctatagtgtgttactagagaaggttctctgaacgtgtagagcaccgaaaaccacgaggaagagaggtagcgttttctcctgagcgtgaagccggctttctggcgttgcttggctgcaactgccgtcagccattgatgatcgttcttctctccgtattggggagtgagagggagagaacgcggtctgcgtnaaaaaaactaaaaaaacaaaaaaaaaaaaaaatacaaaggggggccccccttaaagaaacctcttggggggccaaaatttgggggggggggggggttttattttttttttttttggggggcggtttaaaaacactgcgagggctttttggaaaaacccctctttttgggggggggatatagtgggccaacccccctacagaatttaaacccctaaaggg

SEQ ID NO: 16216 - DNA, 387 bp, Homo sapiens
gcacggtgctatgtgagctcattaatgcactgtaccccgaggggcaggccccagtaaagaagatccaggcctccaccatggccttcaagcagatggagcagatctctcagttcctgcaagcagctgagcgctatggcattaacaccactgacatcttccaaactgtggacctctgggaaggaaagaacatggcctgtgtgcagcggacgctgatgaatctgggtgggctggcagtagcccgagatgatgggctcttctctggggatcccaactggttccctaagaaatccaaggagaatcctcggaacttctcggataaccagctgcaagagggcaagaacgtgatcgggttacagatgggcaccaaccgcggggcgtctcaggcag

SEQ ID NO: 16217 - DNA, 409 bp, Homo sapiens
  misc_feature (1)...(409): n = A,T,C or G
aacgtgaccgccagaaacttcccacctagccaggatgcctccggggacctgtacaccacgagcagccagctgaccctgccggccacacagtgcccagacggcaagtccgtgacatgccacgtgaagcactacacgaattccagccaggatgtgactgtgccctgccgagttcccccacctcccccatgctgccacccccgactgtcgctgcaccgaccggccctcgaggacctgctcttaggttcagaagcgaacctcacgtgcacactgaccggcctgagagatgcctctggtgccaccttcacctggacgccctcaagtgggaagagcgctgttcaaggaccacctgagcgtgacctctgtggctgctacagcgtgtccagtgtcctgcctggctgtgcccagccan

SEQ ID NO: 16218 - DNA, 400 bp, Homo sapiens
  misc_feature (1)...(400): n = A,T,C or G
gtgcaccaagtgacagacctttctagaaatgcccttttgtttaagcgctctttgctggagatggcaacggtctgagaagaaaaaaaagaggaaggggactgcgttaacggttactaaggaaaactggaaatactgtctggtttttgtaaatgttatctatttttgtagatattttatataaaaatgaaatattttaacattttatgggtcagacaactttcagaaattcagggagctggagagggaaatctttttttttccccctgagtggttcttatgtatacatagaagtatctgagacataaactgtacagaaaacttgtccacgtgcttttgtatgcccatgtattcatgtttgtttgtagatgtttgtctgatgcatttcattaaaaaaaaaacn

SEQ ID NO: 16219 - DNA, 474 bp, Homo sapiens
  misc_feature (1)...(474): n = A,T,C or G
nttttcatagatagctatgatagagaggccctgaaataccgcgtcgacaccacgcgtgcgaccacgcgtgcgaataatttaacaaaagtaccatcatatgcctttgaattacttaaaagtgttagaagactttctttgtcggataatcctatggaagcaatacagccctttgcatttaaaggacttgccgatttggaatacctcctcctgaaaaattcaagaattaggaatgttactagggatgggtttagaggaattaataatcttaaacatttgatcttaagtcataatgatttagagaatttaaattctgacacattcattttggtaaagaacttaatttaccttaagttagatagaaacagaatacttagcattgataatgatacatttgaaaatatgggagcatctttgaagatccttaatctgtcatttaataaacttacagccttgcattccaaggggcctaagccg

SEQ ID NO: 16220 - DNA, 402 bp, Homo sapiens
aaatcaatgcgtgcgagaaatagatacaaggacaaacctcctgactttgcatatctggcatccaaatatggagattttaagcagcatgttcagataaatctgaatggaagagcgagccttaattttaaagaccccgaagcagtcagagctctgacgcgtactctcctaagggaagattttggactttctattgatattccattggagagactaattcccacagttcccttgagactcaactatattcactgggtagaagatctgatcggccaccaagattctgacaaaagtactcttcgaagaggaattgacataggcacggaggcatcttgcatcgaccccttacttggagcaaccttgaatggctggtgtttcctcccatcagaagtggatgatatgtgt

SEQ ID NO: 16221 - DNA, 475 bp, Homo sapiens
  misc_feature (1)...(475): n = A,T,C or G
ggcgcgttccgatagaacgctttatagacggccttaaatcccgcgtcgacccacgcgtccgctcaagtggtccacccgagaccccttgagcaccaaccctagtcccccgcgcggccccttattcgctccgacaagatgaaagaaacaatcatgaaccaggaaaaactcgccaaactgcaggcacaagtgcgcattggtgggaaaggaactgctcgcagaaagaagaaggtggttcatagaacagccacagcagatgacaaaaaacttcagttctccttaaagaagttaggggtaaacaatatctctggtattgaagaggtgaatatgtttacaaaccaaggaacagtgatccactttaacaaccctaaagttcaggcatctctggcagcgaacactttcaccattacaggccatgctgagacaaagcagctgacagaaatgctacccagcatcttaaaccagcttggtgcggatn

SEQ ID NO: 16222 - DNA, 406 bp, Homo sapiens
  misc_feature (1)...(406): n = A,T,C or G
gcgcaccacacccagctaattttgtatttttagtagaggttgggtttctccatgttggtcaggctggtcttgaactcccgacctcaggtgatccgcccacctaagcctctcaaagtgttgggattacgtgtgtaagccacagtgcccagcccgaattggatatctttaagatatctgtaagtgttgtatccctaaccaagaaaaaatatgaaaataattaagactagaatcaagcagtagataattgaatccaatcttgggtattattagataatgtataacttgcacccagggaatgggggtctatgagacaaccccacttggagaagaatggggttagggtctctaattgcaaagtgactgtacaataggacgaaagttgcctctgtgtctgagaaagtatctn

SEQ ID NO: 16223 - DNA, 414 bp, Homo sapiens
aaacaccaaatggcggatgacgccggtgcagcgggggggcccgggggccctggtggccctgggatggggaaccgcggtggcttccgcggaggtttcggcagtggcatccggggccggggtcgcggccgtggacggggccggggccgaggccgcggagctcgcggaggcaaggccgaggataaggagtggatgcccgtcaccaagttgggccgcttggtcaaggacatgaagatcaagtccctggaggagatctatctcttctccctgcccattaaggaatcagagatcattgatttcttcctgggggcctctctcaaggatgaggttttgaagattatgccagtgcagaagcagacccgtgccggccagcgcaccaggttcaaggcatttgttgctatcggggactacaatggc

SEQ ID NO: 16224 - DNA, 404 bp, Homo sapiens
  misc_feature (1)...(404): n = A,T,C or G
cccacgcgtccgcgccgagcgatgggcatctctcggtacaactggcacaagcgccgcaaaaccgggggcaggagaaagccctaccacaagaagcggaagtatgagttggggcgcccagctgccaacaccaagattggcccccgccgcatccacacagtccgtgtgcggggaggtaacaagaaataccgtgccctgaggttggacgtggggaatttctcctggggctcagagtgttgtactcgtaaaacaaggatcatcgatgttgtctacaatgcatctaataacgagctggttcgtaccaagaccctggtgaagaattgcatcgtgctcatcgacagcacaccgtaccgacagtggtacgagtcccactatgcgctgcccctgggccgcaagaaaggagccan

SEQ ID NO: 16225 - DNA, 395 bp, Homo sapiens
aaagaaaagcataatactggcgatagtatcctatttgtatgccaactttcatctcaagtaggatactatcgccagtagttatattacaaacattatcggcctttctagtgtgaatgaacattagacacattattgtcattcctagtttaaagttaaggttgcgtggttggatttttccactatctttttctaatttttctaccatttggagaccgtaggcatttgggcctgtcaccccttggatgggttcctagtttgtttacattttcctgaaccctcctgagcgcccgttcttggtctaatccccagtcgtgatgattccacacttcctcagccgcatgttgtcttgcctcattcatgagctggtcagcgtttcgtctctttaactgacatgt

SEQ ID NO: 16226 - DNA, 448 bp, Homo sapiens
  misc_feature (1)...(448): n = A,T,C or G
atcatttctatagtgtgttactagagaagtttctctgaacgtgtagagcaccgaaaaccacgaggaagagaggtagcgttttctcctgagcgtgaagccggctttctggcgttgcttggctgcaactgccgtcagccattgatgatcgttcttctctccgtattggggagtgagagggagagaacgcggtctgtgtttntnnntnnnnnnnnnannannanannntnttntttttggggggcgccccttttaaaaatcccttggggggcccaaattttccggggggtggaaaaaaaatattttttcccttaaggggggcggtttaaaaaccacccggggcttttttgaaaaaaccccttttttggggggggggccttatgggccccccccccccccaaaatttaaagcctcgggggaaaaaaaaaatttctaaggggtaaagggggaa

SEQ ID NO: 16227 - DNA, 397 bp, Homo sapiens
acgaggcctgtatctctgctggcaccatcactgaccgtatcttcctgcagaccctggacacgcaccaccgccatcatctacactacaccagccgccagctctgccccacagacaagaccatggagttcggccgagacttccggatcaagcactatgcaggggacgtcacgtactccgtggaaggcttcatcgacaagaacagagatttcctcttccaggacttcaagcggctgctgtacaacagcacggaccccactctacgggccatgtggccggacgggcagcaggacatcacagaggtgaccaagcgccccctgacggctggcacactcttcaagaactccatggtggccctggtggagaaccttgcctccaaggagcccttctacgtccgctg

SEQ ID NO: 16228 - DNA, 174 bp, Homo sapiens
cctttatcaacataaacaatagtaactgagctattaaaggcaacctctctgaaaaaaaaaaaaaaaaaaaaaaaaaagggggggcccttttaaaaaaacccttggggggcccaaatttaaccggggatggcaaggaaaaatttttttccttatggggggccaaataaaaccctc

SEQ ID NO: 16229 - DNA, 432 bp, Homo sapiens
aattgctccagaactctatcataagatgcttgtggttggtggcatcgaccgggtttatgaaattggacgccagttccggaatgaggggattgatttgacgcacaatcctgagttcaccacctgtgagttctacatggcctatgcagactatcacgatctcatggaaatcacggaaaaagatggtttcagggatggtgaagcatattacaggcagttacaaggtcacctaccacccagatggcccagagggccaagcctacgatgttgacttcaccccaccctttcggcgaatcaacatggtagaagagcttgagaaagccctgccgatgaagctgccagaaacgaacctctttgaaactgaagaaactcgcaaaattcttgatgatatctgtgtggcaaaagctgttgaatgccctccacctcggaccacaa

SEQ ID NO: 16230 - DNA, 513 bp, Homo sapiens
  misc_feature (1)...(513): n = A,T,C or G
ggtgttnnccnnccccaggggggttccccttagaacntcctgttagaccggcctgcagtaccgggccgaactacgcggtcgacccacgcgtccgctcatagacaccctcatgatctctcgtacccctgaggtcacgtgcgtggtggtggacgtgagccacgaagaccccgaggtccagttcaactggtacgtggacggcgtgtaggtgcataatgccaagacaaagccacgggaggagcagttcaacagcacgttccgtgtggtcagcgtcctcaccgttgtgcaccaggactggctgaacggcaaggagtacaagtgcaaggtctccaacaaaggcctcccagcccccatcgagaaaaccatctccaaaaccaaagggcagccccgagaaccacaggtgtacaccctgcccccatcccgggaggagatgaccaagaaccaggtcagcctgacctgcctggtcaaaggcttctaccccagcgacatcgccgtggagtgggagagcaatgggcn

SEQ ID NO: 16231 - DNA, 511 bp, Homo sapiens
  misc_feature (1)...(511): n = A,T,C or G
aggagtncnnnncccccaggcgggtttccgaatagaactccntcatagancggccttcaggacccgcnncgacccacgcgtccgaccagcgcagcttctcttgctcctgctactctggctcccagataccaccgcagaaattgtgttgacgcaggctccaggcaccctgtctttgtctccaggggaaagagccaccctctcctgcagggccagtcagagtgttagcagcagctacttagcctggtaccagcagaaacctggccaggctcccaggctcctcatctatggtgcatccagcagggccactggcatcccagacaggttcagtggcagtgggtctgggacagacttcactctcaccatcagcagactggagcctgaagattttgcagtgtattactgtcagcagtcccggactttcggccctgggaccaaagtggatatcaaacgaactgtggctgcaccatctgtcttcatcttcccgccatctgatgagcagttgaaatctggn

SEQ ID NO: 16232 - DNA, 416 bp, Homo sapiens
gctaaagcccagagacagcttgatcaaaggcacacagcaagtcaaggttggagcagtagctggagggaccttgtctcccagctcacggctctttcctccacaccatacaggtctttctttccgaggcccctgtctcagggtgaggggcttgagtctccaacggcaagggaacaagtacttcttgatacctgggatactgtgcccagagcctcgaggaggtaatgaattaaagaagagaactgcctttggcagagttctataatgtaaacaatatcagacttttttttttataatcaagcctaaaattgtatagacctaaaataaaatgaagtggtgagcttaaccctggaaaatgaatccctctatctctaaagaaaatctctgtgaaacccctatgtggaggcggaattgctctt

SEQ ID NO: 16233 - DNA, 485 bp, Homo sapiens
  misc_feature (1)...(485): n = A,T,C or G
gccgcctcccgatagaactcctcatggcacccntgagaaccgcgccgacccacgcggtcgacggatcacagacccaaaaatgacatgtcacatagaccagctgaacacttggtatgatatgaaaactcatcaggaagtgaccagcagccgcctcttctcagaaatccagaccaccttgggaacctttggtctaaatggcttagacaggcttctgtgctttatgattgtaaaagagttacagaatttcctcagtatgtttcagaaaattgtcctgaacagttctgtctctcaggatactttaaaaaccctcatgaatgctgtcagtcccctaaaaagtattgtcgcaaattcaaataaaatttatttttccgccattgccaaaacacagaagatttggactgcgtatctcgaggctataatgaaggttgggcagatgcagattctgagacaacagattgccaatgaattaaattattcttgtcggt

SEQ ID NO: 16234 - DNA, 411 bp, Homo sapiens
gcagtgctttagcctgaagtttaaccttaacaaacaccagaggtcacacacgggggagaagccatttgtatgtacggagtgtgggcgaggctttacccggaaatcaaccctgatcacgcaccagaggacacactcaggggagaagccatttgtatgtgctgagtgtggacgaggctttaatgataagtccaccctcatttcacaccagaggacacattcaggggaaaagccttttatgtgcagggagtgtggcagaaggtttcggcagaagcctaacctgtttaggcacaagagggcacactcaggtgcctttgtgtgcagggagtgtgggcaaggcttttgtgctaagttaactctcattaaacaccagagagcacacgcaggggggaagcctcatgtgtgcagggagtg

SEQ ID NO: 16235 - DNA, 389 bp, Homo sapiens
gacagaactgctgggttgtctttttccatgtaacttaagcatagtaatataaataaagtaatagttggatgcttttggtcctgtgttgcttttaaaaacaccttataaaagaggagagtatttgataagcaattttcatagtagtaaagttttttttcatctcttaaactaaattgaccatgcatataatattctttgtttaaatgaaagcatactgttgaaacccgcagtgttgcatttagaaaacagttgaacagaatgtcaatgtgcattcatgcaaaaaaacatttaatctgcatctgttttagaaaagggggaaatgaagcaacttgtctaaaaatactgctttacaaagcatttcagcctttccccctcagttttgcattgat

SEQ ID NO: 16236 - DNA, 411 bp, Homo sapiens
  misc_feature (1)...(411): n = A,T,C or G
gttaaaatatgcatagaaaatggtctagatgaaatatgaaaaaattatcactgcttgcctacaactggggtttgtttttgtttttatacttttctgtacttgaaaaatttacaacaaacaaataaggaaatggggcttaggagaccaaaaataggtctctccagtggaacaatagagaataaataaaggttataaagctgggctttgtaaaccggcatgctgggattaaatcctggctcaatttctctgtagaagagaaaagagagggcacaaatcctctgtccatagatgaattccttcacccttcctagcctcctttttctcatctataaaatgggcataatactggtacctctctcatatggttgttttagaaatcggtggtacaatgtgtgtaactgacttatctcn

SEQ ID NO: 16237 - DNA, 400 bp, Homo sapiens
ctcgcttcctatctatgctaacttcatgtctgtgaaagagcaacttaatgattccttagtttgcatttttgatggctaggaaagtggaactattttccatttattaaaattaaccagctgcaattctttttgtgtgaaacgtctgtctgtattatctgttcatgcatctgctggagagggtaccctcttgcctggggagctagctgcagatactgttctcaatccgtttcctttttattttaggttttttctctgtgcaagttttaaacttgcatgtcctcttgcccgccaattttgttctgtcatgtcttatgctgcatcaaatcttgggaagttttcattccctacagcgatcagatgagtgtttaattctgtctttctgctgcattttctacaattt

SEQ ID NO: 16238 - DNA, 403 bp, Homo sapiens
cggacgcgtgggcggacgcgtgggcggacgcttggttcccttcctgggcatcgaggctgaggtgctggtgctggacaccatcatcttcatctacgagaagcgccggaagcccgagagacgtcctggatgatgacgacgccggctctgcacccctgaagagcagcgggcagcaccagaatgacacatgcaagaacgtccgccagaggaactcttcctgaggtggcccgaggacgctccctgctacacgtatgcgccgacggcggagtccactcccagtgcttgcaagattccaaggtctcacctcttagagaaaacccaccccgtagagtcccatcatacacttccttcttttttaaaaaagatgggctttctccattcaggactctggtccttagggtctttt

SEQ ID NO: 16239 - DNA, 408 bp, Homo sapiens
  misc_feature (1)...(408): n = A,T,C or G
atgccccccacctctcaaaatagatatatggtggttgaagtaaacaaaaacttaaaacacagagttgaggagttaaagaagagactagatgcaattgaagacagagtaatttggaagatagagcttagggaacttcacaaaatgggttacagtgagacaggtagaaaatgtgaaagaatagttgagagcatagaataagagtctagttggagatccaggaatagaaagcagaaaaaatcctggagagaaaaatattcaaagagatggcaactgagaattagcctgagaaatgcatgcatgaggtcttaaattgaacaagtacatcaagttttgaattttcaagtttaatgggaatgataaatcctcagatccaagaagctgaacaaaccccagtcaggatggacacan

SEQ ID NO: 16240 - DNA, 400 bp, Homo sapiens
  misc_feature (1)...(400): n = A,T,C or G
aagaagggaagcttggttcactattctctttcctctgcctacctcaaaaaggagaattgaaggcgcaccttgctattaaactttttgctgaggattttgaaccaatcagccttcaagtcaggaagaagctccttcagtctccagcaccgatgggggagatgggccctgcatcaccagccttgtcttctagggaggggtgcgtccacccgggaccctggagtgtgctctcctggatcctgctgataatacccatggctgggatttgtgcagcccttaccctgagcagggcattgagctaaacagttaaggtacattatcttatttagcccttatagcagcccctgcaataatgtcattcccattattcagatgaggaaactgacatgagagtggcatcccn

SEQ ID NO: 16241 - DNA, 397 bp, Homo sapiens
ggggagccgccgggttgagcctatccgctgcggggagggcgggacttcctgcgcgggggcccgagccgctcagtctccctgctctccgtggtcccggctcgcgtgtagcggcggcggcggcgtctccgtgaggaggcgcgcggggccatgacgtcagcgtccacaaaggtcggagagatcttctcggcggccggcgccgccttcacgaagctcggggagctgacgatgcagctgcatcccgtggccgactcttctcctgcgggcgcgaagtggacggagacggaaatagagatgctgagggctgctgtgaagcgatttggggacgatcttaatcacatcagctgtgtcatcaagggcccagataaaggccactgtgaaacgcaaggtatatgaagat

SEQ ID NO: 16242 - DNA, 400 bp, Homo sapiens
acaggaggcattcagtatgtgcaaaactcaaaaagagaaaggtctatgtcatgcagccagcaaaggagatgggcttggctggatgcaggaggttcaccagcatctggggcactgtgttgcaggcataggcgatgttgacgacggccaggtgtgagaggaagaagtacatgggggtgtggagtctggagtccagtgagatgagccccaggatggtcccattccccagcagggtgaagacatagaacagggagaagagcccaaagaggagcatctgaatccttgggcccaggagaaatcccagtaggaggaactctgtgaccattgtctgatttttcaccatttcactactaaaaaacaaacaaagaaacaaacaaaaaacaagcagctgtgtgacacgctt

SEQ ID NO: 16243 - DNA, 391 bp, Homo sapiens
cccacgcgtccgcccacgcgtccgacggcctacctccccctcaggtgctcttacagcctgttccaagtgtggcttaatccgtctccaccaccagatctttctccgtggattcctctgctaagaccgctgccatgccagtgacggtaacccgcaccaccatcacaaccaccacgacgtcatcttcgggcctggggtcccccatgatcgtggggtcccctcgggccctgacacagcccctgggtctccttcgcctgctgcagctggtgtctacctgcgtggccttctcgctggtggctagcgtgggcgcctggacggggtccatgggcaactggtccatgttcagtaattcgaagcagactgccatatcacagcctgggggacagagcgagac

SEQ ID NO: 16244 - DNA, 400 bp, Homo sapiens
caggccatcaaggtgctggagaacatcgaactgaacaagaagagtatgtattcccgtgtgccagagtgccaggtcaccacatactattatgttgggtttgcatatttgatgatgcgtcgttaccaggatgccatccgggtcttcgccaacatcctcctctacatccagaggaccaagagcatgtttccagaggaccacgtacaagtatgagatgattaacaagcagaatgagcagatgcatgcgctgctggccattgccctcacgatgtaccccatgcgtatcgatgagagcattcacctccagctgcgggagaaatatggggacaagatgttgcgcatgcagaaaggtgacccacaagtctatgaagaacttttcagttactcctgccccaagttcctg

SEQ ID NO: 16245 - DNA, 390 bp, Homo sapiens
  misc_feature (1)...(390): n = A,T,C or G
accctcaagagtgtgggtgagacatatacagcctgttagacctgaaggcagatggctcttcttaaggccaataaggatctcatttccgcaggattgaaggagttcagcgttctgctgaatcagcaggtcttcaatgatcctctcgtctctgaagaagacatggtgactgtggtggaggactggatgaacttctacatcaactattacaggcagcaggtgacaggggagccccaagagcgagacaaggctctgcaggagcttcggcaagagctgaacactctggccaaccctttcctggccaagtacagggacttcctgaagtctcatgagctcccgagtcacccaccgccctcctcctagctcagggacccagcccctcctctctgagan

SEQ ID NO: 16246 - DNA, 401 bp, Homo sapiens
cccacgcgtccgcagcaaacctcttccctcaaacaagtcttacgcttcacatgtggcctgacacagaggggacttttaatggtgaatgccttacaactgatcattacacaggcggcatgaagcaaaaatatactgtgaaccaatgcaggcggcagtctgaggattccaccttctacctgggagagaggacatactatatctcatcagtggaggtggaatgggattattccccacaaagggagtgggaaaaggagctgcatcatttacaagagcagaatgtttcaaatgcatttttagataagggagagttttacataggctcaaagtacaagaaagatgtgtatcggcagtatactgatagcacattccgtgttccagcggagagaaaagctgaagaagaa

SEQ ID NO: 16247 - DNA, 391 bp, Homo sapiens
aaaacaccaaatggcggatgacgccggtgcagcgggggggcccgggggccctggtggccctgggatggggaaccgcggtggcttccgcggaggtttcggcagtggcatccggggccggggtcgcggccgtggacggggccggggccgaggccgcggagctcgcggaggcaaggccgaggataaggagtggatgcccgtcaccaagttgggccgcttggtcaaggacatgaagatcaagtccctggaggagatctatctcttctccctgcctattaaggaatcagagatcattgatttcttcctgggggcctctctcaaggatgaggttttgaagattatgccagtgcagaagcagacccgtgccggccagcgcaccaggttcaaggcattt

SEQ ID NO: 16248 - DNA, 400 bp, Homo sapiens
cggacgcgtgggctgcgcaggagccgcagggccgtaggcagccatggcgcccagccggaatggcatggtcttgaagccccacttccacaaggactggcagcggcgcgtggccacgtggttcaaccagccggcccgtaagatccgcagacgtaaggcccggcaagccaaggcgcgccgcatcgccccgcgccccgcgtcgggtcccatccggcccatcgtgcgctgccccacggttcggtaccacacgaaggtgcgcgccggccgcggcttcagcctggaggagctcagggtggccggcattcacaagaaggtggcccggaccatcggcatttctgtggatccgaggaggcggaacaagtccacggagtccctgcaggccaacgtgcagcggctgaaggag

SEQ ID NO: 16249 - DNA, 391 bp, Homo sapiens
cggacgcgtggggaaaaaggcttccgggctgtcctctgcccagtgagatggaggacgctagagaaagtgctgagtgtcccgagagaggcccccgagccagtgcatggaggtccttcggcctggctcagctgggctgcaggatgcccactttgaggagggaggcacagggcttgggcgaggggcagaggccatcagaactgcccggcttttttggaaactgaggacccaacaactaaccacgtttacacgacttgagttttgaaccccgattaatgtctgtacgtcacctttcctagttctgaccctgagccctggggaacaggaaagcgtggctggcctcttgcactgctttgtctccaaaataaactactgaaatcaaaccgcatttcac

SEQ ID NO: 16250 - DNA, 392 bp, Homo sapiens
cggacgcgtgggcggacgcgtgggtttatggccagcgggccaatccgagcctacatccttgcccacaaggatgccatccagctctggaggacgctcatgggacccaccagagtgttccgagcacgccatgtggccccagattctatccgtgggagtttcggcctcactgacacccgcaacaccacccatggttcggactctgtggtttcagccagcagagagattgcagccttcttccctgacttcagtgaacagcgctggtatgaggaggaagagccccagttgcgctgtggccctgtgtgctatagcccagagggaggtgtccactatgtagctggaacaggaggcctaggaccagcctgatgcaggtctatgaagaccagtggtagtgg

SEQ ID NO: 16251 - DNA, 399 bp, Homo sapiens
cccacgcgtccggcggctcacacccttctcaacgcatgacatcctctgcggctcctggggtttgaagagcaaacgtttttccctgggctcagtgcgttttgtcccaacttcatctgtttctgaaatgttctcacttggcagtgtctagtcaaggagtcggctttcaggttcctgacggccaggcagggatgctaaggtgtggctcagccgtcactgtctgtgtcactgcagtggtgcggtcctcaggcttttctgcctgtctttcccccttccttctcacctgacagcgagggagagggaagcctcttagggctggaagccaccacgctggccctctccttccccgaacacagcacacggtcaactccgcgggacacgaggacacgggacggcatctcc

SEQ ID NO: 16252 - DNA, 392 bp, Homo sapiens
aaaatttaaacaaaaaagaaaatagctcccaaccactgatcactcaggttcaataagtaccaatgttctgccattcggtttttgtttgttttaatttaatttttttccaagagacagggtctcagctactctgggcatactgcctgtgggttagccctactctgcaaggagcagtaaaaaatataaagataaaaaggaaggctgggcacggtggctaatgcctataattcctttggaaggctgaggtgggcagatcacaagatcaggagatcgagaccatcctggctaacatggtgaaaccctgtctctactaaaaatacaaaaattagccaggtgtggtggcgcgtgcctgtggtcccagctactcaggaggctgaggcaggagaatcact

SEQ ID NO: 16253 - DNA, 398 bp, Homo sapiens
ctcagcatcccaaagtgctggaattgttggcctttattccctatacttcctattttgagccactaagcagtaaccattcaactaagatatctttgaaaatgactgctaccttatatcccttctcaccttaggcctctcttctgtggaaactctgaagccgaccagttgggcaaaatctttgacctgattgggctgcctccagaggatgactggcctcgagatgtatccctgccccgtggagcctttccccccagagggccccgcccagtgcagtcggtggtacctgagatggaggagtcgggagcacagctgctgctggtactggagatggctgtgggcacagggaaagaaatagagactggggaaagaaataaagcagtatgcagggccctggccac

SEQ ID NO: 16254 - DNA, 393 bp, Homo sapiens
caggctgctacgggatcccagggatgcccggcctgcccggggcaccagggaaggatgggtacgacggactgccgagacccaagggggagccaggaatcccagccatttccggtatccgaggacccaaagggcacaatggagaacccggcttacccggccatcctgggaaaaatggccccatgggaccccctgggatgccaggggtgcccggccccatgggcatccctggagagccaggtgaggagggcagatacaagcagaaattccagtcagtgttcacggtcactcggcagacccaccagccccctgcacccaacagcctgatcagattcaacgcggtcctcaccaacccgcagggagattatgacacgagcactggcaagttcacctgca

SEQ ID NO: 16255 - DNA, 302 bp, Homo sapiens
cacgcatgaagggagcaccgtggagaagacagtggcccctacagaatgttcataggttctcatccctcaccccccaccacgggagactagagctgcaggatcccaggggaggggtctctcctcccaccccaaggcatcaagcccttctccctgcactcaataaaccctcaataaatattctcattgtcaatcagaaaaaaaaaaaaaaaggggcggccgttttaaaggatccctcggggggcccaagctaacccgggcatgcgacgtaatagctttctccctatagggagccgaattataac

SEQ ID NO: 16256 - DNA, 388 bp, Homo sapiens
  misc_feature (1)...(388): n = A,T,C or G
gtcaatgtccacttcagcattgagaaaaacagctaccggaagactgcggagtggcttaccaagcacaagacgtccaatgggatcattaactttccacccgagaccgcacctttccctgtatcccaaaacagtttgcccgcgctggagttgtatgaaatgtttgagagaagcccatctgataactccttgaacacgactgggattatctgcagaaacgtccacatgctcctgagaaggcaggagagcagctcctctctagagatgccctcaggggtggctctggaggagggtgcccacgtgctgaggtgcagccacgtgaccctggaaccaggggccaaccagataacattcaggactcaggccaaggaacctggaacgtatacactcn

SEQ ID NO: 16257 - DNA, 396 bp, Homo sapiens
gggaccccgagagtagcctgtgtgtggagtatgagcaggagccagttcctgcccggcagaggcccagggggctgctggccgccctggagcacagcgaacagcgggcggggagccccggcgaggagcaggcccacagctgctccaccctgtccctcctgtctgagaagaggccggcagaagaaccgcgaggagggaggaagaagatccggctggtcagccacccggaggagcccgtggctggtgcacagacggacagggccaagctcttcatggtggccgtgaagcaggagttgagccaagccaactttgccaccttcacccaggccctgcaggactacaagggttccgatgacttcgccgccctggccgcctgtctcggccccctctttgctgagg

SEQ ID NO: 16258 - DNA, 394 bp, Homo sapiens
acatttagaagtatattggcaatctattaggtccattggcaaagtatattggtccatattcaaacctattccaaaaggttagaagcgtttaagattcctttattgaggtaccatgtctgattacctatgcttatgaccaacagtaaattactagtttaccttctggaattttaattgttataaccgaatcaattattggaaagtgaaaaacacctcccggtcacacaacagggtacgtaaataaatgtgttgttaccagtgaaagacctaacctctttctttttatgtgccggggggtccgattaaagaggaattcagggcccactctttccccgggctgtggagaggttttctctttccctttgtggggggggactgaatccattattggact

SEQ ID NO: 16259 - DNA, 405 bp, Homo sapiens
  misc_feature (1)...(405): n = A,T,C or G
cccacgcgtccgcccacgcgtccgcacatccatctcccagcatccatctgcattcagctaagggcgggaaactgacctagtgcctgtgttgcagaccatttctgaggtctccaccatccaaggaggcacagccgtcattactgtcctccatgccttcagcagcccccctcacagctaaggtacataccaccccttctgccgcgcctccacccctggcaccaaggtcttctgctgcttatgtctaaagggatcacctatatttaactgcctcagtgacctaacctctttcttctcatgtgccagatgttaagatgaaggaggaatacaacacatactcaagcctcagcctgtttagttgttttcactggggctcgctnttctgggacggtatttattatcagactg

SEQ ID NO: 16260 - DNA, 477 bp, Homo sapiens
  misc_feature (1)...(477): n = A,T,C or G
agagcggnnangnncgccctgatcgccgtcggatagatcnccgtatggccgggccgacccacgcgtccgagaagatgggccaactaaatcagatcctcggtgcctgacccgctattactctagtttcgttaatatggagagagatctagcttcaggactcattggccctctcctcatctgctacaaagaatctgtagatcaaagaggaaaccagataatgtcagacaagaggaatgtcatcctgttttctgtatttgatgagaaccgaagctggtacctcacagagaatatacaacgctttctccccaatccagctggagtgcagcttgaggatccagagttccaagcctccaacatcatgcacagcatcaatggctatgtttttgatagtttgcagttgtcagtttgtttgcatgaggtggcatactggtacattctaagcattggagcacagactgacttcctttctgtcttctt

SEQ ID NO: 16261 - DNA, 471 bp, Homo sapiens
  misc_feature (1)...(471): n = A,T,C or G
tcccatgactcctgatgacgccntgaaaaccgcgncgacccacgcgtncgcccacgcgtgcggataaccatgctggctgccacagtcctgaccctggtcctgctgggcaatgcccatgcctgctccaaaggcacctcgcacgaggcaggcatcgtgtgccgcatcaccaagcctgccctcctggtgttgaaccacgagactgccaaggtgatccagaccgccttccagcgagccagctacccagatatcacgggcgagaaggccatgatgctccttggccaagtcaagtatgggttgcacaacatccagatcagccacttgtccatcgccagcagccaggtggagctggtggaagccaagtccattgatgtctccattcagaacgtgtctgtggtcttcaaggggaccctgaagtatggctacaccactgcctggaggctgggtattgatcagtccattgacttcgagatn

SEQ ID NO: 16262 - DNA, 485 bp, Homo sapiens
  misc_feature (1)...(485): n = A,T,C or G
tggtcccgggagggttaanncctagcntgcttcgcananacggctcganactganggcctcgcacgcgcncggacacatncgnctggccgncgnccgnccgncagtctgccctgcccgcctctggctgggctcagggcttccagtccttcttgatggtggttctgcctgtgctgtgggggagagaggccgcagccaggcctctgctgccctttctgtgccccccaggttctatctccccgtcacacccgaggcctggcttcaggagggagcggagcagccattctccaggccccgtggttgcccctggacgtgtgcgtctgctgctccggggtggagctggggtgtgggatgcacggcctcgtgggggccgggccgtcctccagccccgctgctccctggccagcccccttgtcgctgtcggtcccgtctaaccatgatgccttaacatgtggagtgtaccgtggggcctcactagcctctaact

SEQ ID NO: 16263 - DNA, 398 bp, Homo sapiens
catcttggttccgcgttccctgcacaaaatgcccggcgaagccacagaaaccgtccctgctacagagcaggagttgccgcagccccaggctgagacagggtctggaacagaatctgacagtgatgaatcagtaccagagcttgaagaacaggattccacccaggcaaccacacaacaagcccagctggcggcagcagctgaaatcgatgaagaaccagtcagtaaagcaaaacagagtcggagtgaaaagaaggcacggaaggctatgtccaaactgggtcttcggcaggttacaggagttactagagtcactatccggaaatctaagaatatcctctttgtcatcacaaaaccagatgtctacaagagccctgcttcagatacttacatagtttttg

SEQ ID NO: 16264 - DNA, 412 bp, Homo sapiens
  misc_feature (1)...(412): n = A,T,C or G
aatttttgtatttttagtagagacggggtttcgccgttttgttcaggctagtcttgaattcctgacctcgtgatccgcccacctcggcctcccaaagtgctgggattacaggcgtgagccaccgcacccaactgaaatctgtttttaaagcaatttagccctgcataccaagtcaggccctaccttctaacccagtaacaccactcggtggaaagtggcttatggctcttttatacaataggagacacttgcgtggggcactaataactcatgtgagtcagacagacactcttcctgttgggtttaagaatactgccttagggtggtctgaaggtagtgagttaatttaattgattgttaatagtcaattacaaatcaatcaaactattcgttctactctttccctcttttn

SEQ ID NO: 16265 - DNA, 421 bp, Homo sapiens
  misc_feature (1)...(421): n = A,T,C or G
cggacgcgtgggcccgagctctactgactcccaacagagcgcccaagaagaaaatggccataagtggagtccctgtgctaggatttttcatcatagctgtgctgatgagcgctcaggaatcatgggctatcaaagaagaacatgtgatcatccaggccgagttctatctgaatcctgaccaatcaggcgagtttatgtttgactttgatggtgatgagattttccatgtggatatggcaaagaaggagacggtctggcggcttgaagaatttggacgatttgccagctttgaggctcaaggtgcattggccaacatagctgtggacaaagccaacctggagatcatgacaaagcgctccaactatactccgatcaccaatgtacctccagaggtaactgtgctcacgaacagccctgtggn

SEQ ID NO: 16266 - DNA, 512 bp, Homo sapiens
  misc_feature (1)...(512): n = A,T,C or G
tgagacagagcagaggttttnnttgatcagatgacctcggaccgcccggattcccggtcgacccacgcgtccgattatttaggagaaaaactattttaggaattattttacacagaattctaatcatgctgccttggaggggaggcgactaccattcctcactttgtagctttattgattctcttctgaagcttgcagtagcctcctaacttgccttgctgccagtccttccttgtcccagtctatccttcacattgccaccagtgttatttttctgaaatacgaaagcgaatatgaggcttctctgctccttggcgataatagtataaagtccaaactcttaagtattacataaaaagtatgtttcacagcacacctcaactttggtttctataatctcttaatcgtaatgagatctgggctaaataatgctatcactttaactacctttgtgcatgcttcctcccaacttctggagtaacctttttccatctttacctggcaaacttcaa

SEQ ID NO: 16267 - DNA, 447 bp, Homo sapiens
  misc_feature (1)...(447): n = A,T,C or G
atcctgtccccacgctcctccactcccgcccttggccgaagcatagattgtaacccctccactcccctctgagattggccttcggtgaggaattcagggctttccccatatcttctctcccccacctttatcgaggggtgctgctttttctccctcctcctcaagttcctttttgcaccgtcaccacccaacaccttccatgacacttccttgctttggccagaagccatcaggtaaggttggaaagagcctctgacctcccttgtttagttttggaaccatactcactcactctccaccagcctgggaaatgaatattgggtcctcagccctgccaccctctgctgtcatcagctgatgcattgtttttagctcaagttttgataaggtgaaaagaatagtcaccagggttactcagacctgccagctctcggagtccttggtggn

SEQ ID NO: 16268 - DNA, 479 bp, Homo sapiens
  misc_feature (1)...(479): n = A,T,C or G
cccgcctccccaaagagacccatgaactgaggatcgtgcggnaccgcgncgacccacgcgtgcgcctcgctgccgcataccatgctaagcgctgcgcgcattgccgtgcggagattggaggccgcgcgggtccctggtctgggccatgtctggctgtgatgcttgggagggagactgttgttcccggagatgcggcgcgcacgacacggagcatccaagatacctgatcccagaactttgcaaacagttttaccatttaggctgggtcactgggactggaggaggaattagcttgaagcatggcgatgaaatctacattgctccttcaggagtgcaaaaggaacgaattcagcctgaagacatgtttgtttatgatataaatgaaaaggacataagtggaccttcgccatcgaagaagctaaaaaaaagccagcgtactcctcttttcatgaatgcttacacaatgagaggagcaggtg

SEQ ID NO: 16269 - DNA, 483 bp, Homo sapiens
  misc_feature (1)...(483): n = A,T,C or G
gggggttttnacattagngccgnanantcccactganaactngcannnacgcgnngggttggntntnttaaccctttctcttctcccatcctgcctcaccaaggaaggttggaggggcctgcctctggcttctgcatctgggccagcaaacatcactgccgttggtctctcatgacttaactggcttccctctgctgctgccttggcttcctcctaatgctcgtgctctcctgtccttctgaaggtgctccttggccaaatctccagctcccttcttgttttcctcatcctcctaccctgtactcccaccaaaccatggtcctttaaggcacgctcctgtcctcctcattgcccagcagtagggaggggcaggggtaaggggacctgaggataaagggtggggaaacagggtcccctgatgcctgtgggggctgcaggggaggaggatgtaccttgtgtctctttcaagtgccttaatccgag

SEQ ID NO: 16270 - DNA, 406 bp, Homo sapiens
agaaacggcaggaagacccttactactgtccaagggatcgctgatgattacgataaaaagaaagtagtgaaggcgtttaagaaaaagtttgcctgcaatggtactgtaattgagcatccggaatatggagaagtaattcagctacagggtgaccaacgcaagaacatatgccagttcctcgtagagattggactggctaaggacgatcagctgaaggttcatgggttttaagtgcttgtggctcactgaagcttaagtgaggatttccttgcaatgagtagaatttcccttctctcccttgtcacaggtttaaaaacctcacagcttgtataatgtaaccatttggggtccgcttttaacttggactagtgtaactccttcatgcaataaactgaaaagagccaaa

SEQ ID NO: 16271 - DNA, 441 bp, Homo sapiens
  misc_feature (1)...(441): n = A,T,C or G
aacctttttaaaagggttggttaactacctcagtagcagaggattgaactataccctgtctgtactgtacatagaaaatctttgtagataaaagcaaggcttgttaaatatgatatgagggtaagattttaatataccaaatgtaacattcttagttgcctttagtttcagaggcttgtaagacttcctcatgaccatcataacaggccttgcttttgtcgtattttgtggctgaaaaagcagccttgcttcttcagatattgtagttatttggatgtataatagtttagcaagatgttacttttgtaagacatcagatgttcaaaaaagtgcatccgaacttgtactaaatactgcagtgtccctttataaaaagtcagactaaaactgacaattgtacagcgaagcctgacatttggatattttgaagttttttcatan

SEQ ID NO: 16272 - DNA, 486 bp, Homo sapiens
  misc_feature (1)...(486): n = A,T,C or G
agcgnaagatttttgactgatagcttgcananccgnnactganaccgtngganccacgcgnncgngcacgcgtgagacttctccgccgcagacgccgccgcgatgcgctacgtcgcctcctacctgctggctgccctagggggcaactgctcccccagcgccaaggacatcaagaagatcttggacagcgtgggtatcgaggcggacgacgaccggctcaacaaggttatcagtgagctgaatggaaaaaacattgaagacgtcattgcccagggtattggcaagcttgccagtgtacctgctggtggggctgtagccgtctctgctgccccaggctctgcagcccctgctgctggttctgcccctgctgcagcagaggagaagaaagatgagaagaaggaggagtctgaagagtcagatgatgacatgggacttggcctttttgattaaattcctgctcccctgcaaataaagcctttttacacn

SEQ ID NO: 16273 - DNA, 441 bp, Homo sapiens
  misc_feature (1)...(441): n = A,T,C or G
aagcattgatggccagcctgtttgacccatgggcaatggaccttccaaagggagctatctagcactttcctctccacagcatgtggcttcaggtgtctgcctatcctgctctagccagatgacctgtccctttgattttgaacagagtctcagtgatgacctcaatggatgaccctcccctctgctgaatgcctcccctggggctgagcgaagccacctcctccaagctgtcctccagggcatccacaaaatcccggaagcggaggcggtcatgacggaagatgccatcctcaccaaagaaagcagggtctggctctgtcgtccaggctggagtgcagtggcacgatcacaactcactgtaacctccacctcccaggctcaagcgatcctcccacctcagcctcctgagtagctgagactataggcatgcatcattacacn

SEQ ID NO: 16274 - DNA, 484 bp, Homo sapiens
  misc_feature (1)...(484): n = A,T,C or G
ggcgaaagattattccctaggtaccttgtanancgncgctgantncgtcggancaccncnncggncagncaggggtccagcacagccctaccccgccccagtatcatgcgatggtcccccacaccgggtccctgaacccctcttggattaaggaagactgaagactagccccttttctggggaattactttcctcctccctgtgttaactggggctgttggggacagtgcgtgacttctcagtgatttcctacagtgttgttccctccctcaaggctgggaggagataaacaccaacccaggaattctcaataaatttttattacttaacctgaaaaaaaaaaaaaaaaaaaaaaaaaaaaaaggggggggccgtttaaaagtccccttggggggcccaaattttccgggggggggaaagtttatacttttttccttaaggggggccgttttaaaagccccggggggtttttgggaaagaaccc

SEQ ID NO: 16275 - DNA, 498 bp, Homo sapiens
  misc_feature (1)...(498): n = A,T,C or G
agcgggngnttttnncctagnaggcttcgtanaantcgccnactgantatccgtctcanacccgcnncggaatnnnnggggcgacccacgcggncggncaancgcttgccccagcacagctgncattcttctctacagaagagcttctcctcatcaactggggatgattacagttcttcctaaaaaaggatggctgctctttttctaaagaggttaacactacaaactgtaaagtctgaaaatagttgcattagatgttttggtaaacacatcctgcaaaagacagcaccagcacagttgtcccctattgcttctgccccaagactctccttcctaattcatgcaaaagcctttagtaccgctgaagacacccagaatgaaggaaaaaagacaaaaaagaataaaacagcttttagtaacgttggaagaaaaattagtcagcgagttattcacttatttgatgagaagggcaatgatttgggaaacatgcaccgagca

SEQ ID NO: 16276 - DNA, 441 bp, Homo sapiens
cggacgcgtgggttatatagtgtgttactagagaagtttctctgaacgtgtagagcaccgagaaccacgaggaagaaaggtagcgttctttcctgagcgtgaagccggctttctggcgttgcttggctgcaactgccgtcagccattgatgatcgttcttctatccgtattggggagtgagagggagagaacgcggtctgagtaaaaaaaataaaaaaaactagaaggggcggacgttttaaagatccccgaagaggaccaacataaagctgtgaaagaagaactgtaattctcccattaagaggggggagttaaaaaaacccctggggatctggaaaaacaacatcaatttacgggtgggaaaactgtgggctcacttgcttgagggagtttacggtttcccggggaacctatatgttgtgacggctcagggctacacac

SEQ ID NO: 16277 - DNA, 507 bp, Homo sapiens
  misc_feature (1)...(507): n = A,T,C or G
ggaggccnnnnnaaactgaaaccagncggctgcagcannncgcattncnggtcgaccacgcgtncggtcttcccgcgtccgccgattcctcctccttggtcgccgcgtccttggctggcgtcagaaaaatggctacaaacttgctagcacatgagaagatctggttcgacaagttcaaatatgacgacgcagaaaggagattctacgagcagatgaacgggcctgtggcaggtgcctcccggcaggagaacggcgccagcgtgatcctccgtgacattgcgagagccagagagaacatccagaaatccctggctggaagctcaggccccggggcctccagcggcaccagcggagaccacggtgagctcgtcgtccggattgccagtctggaagtggagaaccagagtctgcgtggcgtggtacaggagctgcagcaggccatctccaagctggaggcccggctgaacgtgctggagaagagctcgcctggccaccgggccacggccc

SEQ ID NO: 16278 - DNA, 444 bp, Homo sapiens
  misc_feature (1)...(444): n = A,T,C or G
gcctaacccctgtctttagatttacagtccaatgcttcactcagccattttacctcacccccaanaaaaaacaaaaaaaaaaaaaaaagggggggccgttttaaagaatccttggggggcccaaacttaacccgggcatgcaaggaaaaacttttttccttatagggagccgaataaaaacctacctgggaatttttggaaagaaacctaatttttggggggggaaaaattggcccaacctccctacaaaaattaaaggctttagggaaaaaaaaaaattttaaagggaaaaaggggaaaaacaacctcaatatccttgctgttaaaaaattaacntnncnnnnccnngnaccnnnanaccgngaaccggaggctggaaaacaaaanccgggagcacttggaaaagaaaggaccccaggncaaaaacnggagccannacgncan

SEQ ID NO: 16279 - DNA, 497 bp, Homo sapiens
  misc_feature (1)...(497): n = A,T,C or G
agcggngaagnttttanccactcgantcctcagcanaaactnnnnccctacntcgctccgnannanccggnnggaatnnnngggnngancnaggcgggnggnngnnngnaaagnnggagnnntggggttnttttntnnnnggagaggaagagannnannantgggtgnannttntnnanaaagtaggggtgnttgggttttgtnnaggngcccagntanggngcccggccggtcagnagngcggccagcgtctatgcaggcgctgggggctctggttcccggatctccgtgtcccgctccaccagcttcaggggcggcatggggtccgggggcctggccaccgggatagccgggggtctggcaggaatgggaggcatccagaacgagaaggagaccatgcaaagcctgaacgaccgcctggcctcttacctggacagagtgaggagcctggagaccgagaaccggaggctggagagcaaaatccgggagcacttgga

SEQ ID NO: 16280 - DNA, 426 bp, Homo sapiens
cccacgcgtccgcccaaaacaggtaaaaatcttaaatgtgcaccaagagcaaaggatcaacttttagtcatgatgttctgtaaagacaacaaatccctttttttttctcaattgacttaactgcatgatttctgttttatctacctctaaagcaaatctgcagtgttccaaagactttggtatggattaagcgctgtccagtaacaaaatgaaatctcaaaacagagctcagctgcaaaaaagcatattttctgtgtttctggactgcactgttgtccttgccctcacatagacactcagacaccctcacaaacacagtagtctatagttaggattaataggatctgaacattcaaaagaaagctttggaaaaaaagagctggctggcctaaaaacctaaatatatgatgaagattgtaggactgg

SEQ ID NO: 16281 - DNA, 408 bp, Homo sapiens
ccctgtggctgctgccaccacagctggtcctgctgctgctgcagccccagctaaagttgaagccaaggaaaagtcggaggagtcggacgaggatatgggatttggtctctttgactaatcaccaaaaagcaaccaacttagccagttttatttgcaaaacaaggaaataaaggcttacttctttaaaaaaaaaaaaaagggggggccgttttaaaggatccctgaaggggcccatgcttacgcgagcttgcgacgtattacctttctccctatagggaggagaattatgccctccctgggcatctttgggaaggacccttacttctggggggtgacataatggaaaacattccttacggagacttaaagcgctaggcgaaatttgacttttttaggcgtatctggagc

SEQ ID NO: 16282 - DNA, 405 bp, Homo sapiens
aaagattagagatttgcggcaatggaccgaagaacgggccaggaagtcctccaatttcctttggtctttccaggagattggactacacattgtaaagactgactgggtttcaactagtcaaaaagcactttcttctgatttcaatccctgttcgatttgtgcttctgtgcttgtaggagagatggccagggtggcagccctcatgcaagttgaagtatatgtagcctcagcctgatattcttggtgcgaaggtaaaaaaaaaaaaaaaattaaaaccattggcctggttgagggcgggaccaccaaaacatatatgttgggcccgggtccatcctgggtatttatactgtatatgaaaagcctaaatttatatactgcaatgtaaaaaatatatatatttacctt

SEQ ID NO: 16283 - DNA, 416 bp, Homo sapiens
cccacgcgtgcgctacaccttggaggtgaacttctcacctgagggctgtaaagactcgtttgaaaatggagagccaagaaccaacggaatcttctcagaatggcaaacagtatatcatttcagaggagttaacttcagaaggaaaatgggtcaagcttgaaaaaacaacggacatggatcctactgtgaaaactagaacttgggaatcagtgaaacgtacaaccaggaaagagcagactgcggatggtgtcgcggtcatccccgtgctgcagagaacacttcactatgagtgcatcgttctggtgaaacagttccgaccaccaatggggggctactgcataaagttccctgcaggtctcatagatgatggtgaaaccccagaagcagctgctctccgtgagcttgaagagaaactg

SEQ ID NO: 16284 - DNA, 403 bp, Homo sapiens
  misc_feature (1)...(403): n = A,T,C or G
attagctccaaataaggagttacatgtttgtgtagcgtatgcattgagtttgcattagtgtcatgcttagtaaggctttactttttttcgaggtggagagggtggtcaaggaagaattttatacaaaaattagctgggcgtggtgacacgctcctgtaatcccagctactcgggaggctgaggcaggagaatcgcttgaacctgggaggcagaggttgcagtgagccgagatctcgccactgcactccagcctgggcaacagagtaagtctccgtctcnnannanaaaaaaaaaaaaaaaaaaaaaaaaaaaaaanggggggggggccctttttaaaaattccttgggggggccaaattttacggggggtgggaaaataattttttttttttttatgggggag

SEQ ID NO: 16285 - DNA, 420 bp, Homo sapiens
tggtcatggcgccccgaaccgtcctcctgctgctctcggcggccctggccctgaccgagacctgggccggctcccactccatgaggtatttctacacctccgtgtcccggcccggccgcggggagccccgcttcatctcagtgggctacgtggacgacacccagttcgtgaggttcgacagcgacgccgcgagtccgagagaggagccgcgggcgccgtggatagagcaggaggggccggagtattgggaccggaacacacagatctacaaggcccaggcacagactgaccgagagagcctgcggaacctgcgcggctactacaaccagagcgaggccgggtctcacaccctccagagcatgtacggctgcgacgtggggccggacgggcgcctccttcgcgggcatgaccagtacgcct

SEQ ID NO: 16286 - DNA, 482 bp, Homo sapiens
  misc_feature (1)...(482): n = A,T,C or G
gagtgggggcgcgggggatttagaaattgacgccctcggtacgaactganagcgtcgtgaaacncacncgtntggaagaaccggaacacactgtccgagaagcccaaaccatatgggcggactgttgaagtggctgagggtgaagctgttcgaacacctcggagtgtaacagcaaagcagccaccagagattgacaagaaaaatgaaaagtcaaagaaaaataagaagaaatcaaagtcagatgctaaagcagtgcaaaacagttcacgccatgatggaaaggaagttgatgaaggagcctgggaaactaaaattagtcacagagagaaacgacagcagcgtaaacgtgataaggtgctgactgattctggttcattggattcaactatccctgggatagaaaataccatcacagttaccaccgagcaacttacaaccgcatcatttcctgttggttccaagaagaataaaggtgattctct

SEQ ID NO: 16287 - DNA, 406 bp, Homo sapiens
cacatgtggaggaggatgacgatgatgagctggacatcaagctcaattataagcctccaccacagaagtccctgaaagagctgcaggaaatggacaaagatgatgagagtctaattaagtacaagaaaacgctgctgggagatggtcctgtggtgacatccgaaagcccccaatgtcgttgtcacccggctcaccctggtttgtgagagtgccccgggaccaatcaccatggaccttactggagatctggaagccctcaaaaaggaaaccattgtgttaaaggaaggttctgaatatagagtcaaaattcacttcaaagtgaacagggatattgtgtcaggcctgaaatacgttcagcacacctacaggactggggtgaaagtggataaagcaacatttatggttg

SEQ ID NO: 16288 - DNA, 409 bp, Homo sapiens
  misc_feature (1)...(409): n = A,T,C or G
cccggctgcggatctgggaagcgcctcttcacggcactgggatccgcatctgcctgggatcatcaagccctagaagctgggtttctttaaattagggctgccgttttctgtttctccctgggctgcggaaagccagaagattttatctagcttatacaaggctgctggggttccctctttttttccacgagggtgtttttggctgcaattgcatgaaatcccaatggtgtagaccagtggcgatggatctaggagtttaccaactgagacatttttcaatttctttcttgtcatccttgctggggactgaaaacgcttctgtgagacttgataatagctcctctggtgcaagtgtggtagctattgacaacaaaatcgagcaagctatggatctagtgaaaagccattn

SEQ ID NO: 16289 - DNA, 504 bp, Homo sapiens
  misc_feature (1)...(504): n = A,T,C or G
agcgtnnnnnnaaatgatgactgaagncgtcggcatnnggtngaccacgcgtccgcccacgcgtccgcccacgcgtncgcacacatgctcctccagaatatcacaagccaaatggatgcgggacatgtctacttgacaggactctgattttaacttcctggattgtaagctccaaagttttatacaggagttgtcaaacccagcagcaagcagcttgctatcaggggagatttctgcagtgttcaacagctgctaggtgttatagaagcagacggtagtgagggagggacacccatccttgacttgcttaatgcgctcctgtaagacctccagggcagcatcgttctgcagaatagggctgggcatatcaggggcctccaagtaattgttctcactgcgggaggagctgccacttgcatacagctgttagtctgttgtcttggcaggctgcacatcaagatgaataagtaagataaacattttgcacagggcagtatagctgtn

SEQ ID NO: 16290 - DNA, 400 bp, Homo sapiens
aagtcggcggtgtttccattcggtgatcagcactgaacacagaggactcaccatggagtttgggctgagctgggttttcctcgttgctcttttaagaggtgtccagtgtcaggtgcacctggtggagtctgggggaggcgtggtccagcctgggaggtccctgagactctcctgtgcagcgtctggattcatcttcagtaactatggcatgcactgggtccgccaggctccaggcaaggggctggagtgggtggcagttatatggtatgacggaagtgataaaaactatgcagactccgtgaagggccgattcaccatctccagagacaattccaagaacacgctgtatctgcaaatggacagcctgagagccgaggacacggctgtgtatcactgtgcg

SEQ ID NO: 16291 - DNA, 382 bp, Homo sapiens
  misc_feature (1)...(382): n = A,T,C or G
cggacgcgtgggcggacgccctggaaaaacggctgtaatggcattaactagggcagccctcatggcctaatcacttctttagggcccccctcttaataataatgcattagcaacacctgaattttggaggcgatctattcaaaccataggtcaggacatccaggccatcctggctaacacggtgaaatcccgtctctactaaacaaaatacaaaaaattancccgggcccggtggcggacgcctgtactcccagctactcgggaggctgaggcaggagaatggcgtcaacccgggaggcggagcttgcagtgagtgaagatcgcaccactgcactccagcctgggcgacagagtgagactccgttaaaaaaaaaaaaaaaag

SEQ ID NO: 16292 - DNA, 403 bp, Homo sapiens
tacccgagtctcgtttcctctcagtccatccattcttcattgggccagagccctctctccataatctgagcagcaatgccgcttgctgaagacaagacctataagtatatttgccgcactttcagcaatttttgcgatgtggatgttgcagagattctgccttacctgccctggctcacaggcagagaccaggatcgactgcgggccacctgcacactctcaaggaaccgggacaccctctggcatctcttcaatacccttcatcggcggcccagctgggtggagtacttcattgcggcactgaggggctgttagctagatgatctcgcggaccaaacggcctctgtctaccagagctaccaaactcggaccttggaccgctccccagacccactggagcccg

SEQ ID NO: 16293 - DNA, 401 bp, Homo sapiens
cagcagggaaaacctggcgctgcaaaatgtgcaggctcgaatacggatggtcctcgcctatctgtttgctcagttgagcctctggtctcggggtgtccacggtgggctcctcgtgctgggatccgccaacgtggatgagagtctcctgggctacctgaccaagtacgactgctccagtgcggacatcaaccccataggcgggatcagcaagacggacctcagggccttcgtccagttctgcatccagcgcttccagcttcctgccctgcagagcatcctgttggcgccggccaccgcagagctggagcccttggctgatggacaggtgtcccagaccgacgaggaagatatggggatgacatatgcggagctctcggtctatgggaaactcaggaaggtgg

SEQ ID NO: 16294 - DNA, 413 bp, Homo sapiens
  misc_feature (1)...(413): n = A,T,C or G
cccacgcgtncgctcactgtccccggcttctcatgaactccgtataccccctcccagacattttcccgtccggatccatctctccgccacatcacctctcatttcccccagaactcagctcctttgtgaaacctttcttgccgaactctaacaactaaatctccccgggagcctgctccgaactgaactgttctggttgctagattgcttacgggctgtcttattgcaacaaaggagaccagataccgaaaaaagatttctgagctattgccttcttcaaggaacgttttctgatatttacagtttattgttttcacaggctggaacggcttttaggcattttggcttcttatttagagagggctcctatttccttcatagacgcatagttttttagagcaggaaattgacct

SEQ ID NO: 16295 - DNA, 387 bp, Homo sapiens
tgcggcggtcgccgttatggccactgggctgggcggctgaccgccgggctaggaaagggcccagggccccgaatctcggtggccgctgctccagcggcctgcgccatggcctcctccgccgcctcctcggagcatttcgagaagctgcacgagatcttccgcggcctccatgaagacctacaaggggtgcccgagcggctgctggggacggcggggaccgaagaaaagaagaaattgatcagggattttgatgaaaagcaacaggaagcaaatgaaacgctggcagagatggaggaggagctacgttatgcacccctgtctttccgaaaccccatgatgtctaagcttcgaaactaccggaaggaccttgctaaactccatcgggag

SEQ ID NO: 16296 - DNA, 396 bp, Homo sapiens
ctggagacgacgtgcagaaatggcacctcgaaaggggaaggaaaagaaggaagaacaggtcatcagcctcggacctcaggtggctgaaggagagaatgtatttggtgtctgccatatctttgcatccttcaatgacacttttgtccatgtcactgatctttctggcaaggaaaccatctgccgtgtgactggtgggatgaaggtaaaggcagaccgagatgaatcctcaccatatgctgctatgttggctgcccaggatgtggcccagaggtgcaaggagctgggtatcaccgccctacacatcaaactccgggccacaggaggaaataggaccaagacccctggacctggggcccagtcggccctcagagcccttgcccgctcgggtatgaagaa

SEQ ID NO: 16297 - DNA, 417 bp, Homo sapiens
cccacgcgtccgcccacgcgtccgggccaagaaaaagacggacaagaagcgggcgctgcggcggctgtagtgggctctcttcctccttccaccgtgaccccaacctctcctgtcccctccctccaactctgtctctaagttatttaaattatggctggggtcggggagggtacagggggcactgggacctggatttgtttttctaaataaagttggaaaagcccaaaaaaaaaaaaaaaaaaaaaggggggcccctttaaaagaatccttggggggcccaagtttacccggggttgggaaggaaaaatttttttccttatagggggccgaataaaacccaccttgggaaccttggaaaggaacccttctttttgggggggggcttatgggccaacctcctcccaaaatttaaaggct

SEQ ID NO: 16298 - DNA, 387 bp, Homo sapiens
  misc_feature (1)...(387): n = A,T,C or G
ggaaccaagatgctggccgcgtacctgtatgaggtctcccagctgaaggactaggccaagccctctgtgtgccatctccaatgagaaggaatcctgccctcacctcacccttttccaacttgcccagggaagtggaggttccctctttcctttccctcttgtcaggtcatccatgactttagagaacagacacaagtgtatccagctgtccacgggtggagctacccgttgggcttatgagtgacctggagtgacagctgagtcaccctgggtaagttctcagagtggtcaggatggcttgacctgcagaagatacccaaggtccaaaagcacaaggtctgcggaaagttctggttgtcggctgggcaccacggctcacacctatan

SEQ ID NO: 16299 - DNA, 396 bp, Homo sapiens
aggaaatccaactcaaagaagctaagcacattgcagatgaggcagataggaagtatgaagaggtggctcgtaagttggtgatcattgaaggagacttggaacgcacagaggaacgagctgagctggcagagtcccgttgccgagagatggatgagcagattagactgatggaccagaacctgaagtgtctgagtgctgctgaagaaaagtactctcaaaaagaagataaatatgaggaagaaatcaagattcttactgataaactcaaggaggcagagacccgtgctgagtttgctgagagatcggtagccaagctggaaaagacaattgatgacctggaagataaactgaaatgcaccaaagaggagcacctctgtacacaaaggatgctggacc

SEQ ID NO: 16300 - DNA, 475 bp, Homo sapiens
  misc_feature (1)...(475): n = A,T,C or G
ctccccatagatcnccntcatagaccgctntgaanacccgcgncgacccacgcgtgcggtgacctactgcccattgtacctactcaaagcaactttctttaggaaataagaccacagtctactttcctaagcataaactcagttctcattccacctctaccacctgcaagatttgttaggcttaagcagtcccttaacttctttgagtgtttgttgccttgcctacttcattggaagtaaggctctggaacagggaaggcttgcctccataagactaaaagttatgctaatataagagactagcaaaatgggagacatattcagctctcttcttgtggggaataccttgcccttgaccaaaagccttgtcccaaaaagagccgcgtgggtgttggctttgtgcccaacatgtggctcctctgccatgattgatggcttcatttaagaaacaggctttaggattctttcccctaaa

SEQ ID NO: 16301 - DNA, 396 bp, Homo sapiens
cggacgcgtgggcaagaagatcaccattgctgactgtggacaactcgaataagtttgacttgtgttttatcttaaccaccagatcattccttctgtagctcaggagagcacccctccaccccatttgctcgcagtatcctagaatctttgtgctctcgctgcagttccctttgggttccatgttttccttgttccctcccatgcctagctggattgcagagttaagtttatgattatgaaataaaaactaaataacaattaaaaaaaaaaaaaagggggggccgttttaaaggatccttgggggggcccaagtttacgcgggcatgcgaggtaatagttttttccctatagggagccgaattataagctagctggggatctttgggaaggaacctt

SEQ ID NO: 16302 - DNA, 415 bp, Homo sapiens
  misc_feature (1)...(415): n = A,T,C or G
acacagcttatgccctatggctgcctcttagaccatgtccgggaaaaccgcggacgcctgggctcccaggacctgctgaactggtgtatgcagattgccaaggggatgagctacctggaggatgtgcggctcgtacacagggacttggccgctcggaacgtgctggtcaagagtcccaaccatgtcaaaattacagacttcgggctggctcggctgctggacattgacgagacagagtaccatgcagatgggggcaaggtgcccatcaagtggatggcgctggagtccattctccgccggcggttcacccaccagagtgatgtgtggagttatggtgtgactgtgtgggagctgatgacttttggggccaaaccttacgatgggatcccagcccgggagatccctgacctgctgn

SEQ ID NO: 16303 - DNA, 410 bp, Homo sapiens
  misc_feature (1)...(410): n = A,T,C or G
taaaaaggcctcccagtacctgagtcggagcatcttcgcagagatcaagaacctggtgggagccctggacgagggtgacgggtaaagcgccgcggttagcggcggggggcgctggaggctttaaaaggggctttcctcgcatctcatcacctacaaactctcacacgccctataagatggaggggaccatcgccaccatcaccactcggctgaggggtgggtcggaggcatagccatggatccagggcgcaaagcctagggcagctctagaggacgtatgaaacccagactcaacagaatgcgattcagaaccgagatcgtccacaccacaccctctttcatggacccacatcatccgctggagggcangggggaggagggagtggtggaggaacgacctgtgtaaggcn

SEQ ID NO: 16304 - DNA, 480 bp, Homo sapiens
  misc_feature (1)...(480): n = A,T,C or G
gtaggggccgggggggntttagaaatgaacgcgctcggtaccggattgaganctgctcggagacccacgcgtnncgattaaaagccctgcagcttccagttttggatcacctggattttcaggacttccagcttccttggcaacaggtcctgtcagagctccagtggccccagcctttggaggtggcagttctgtggctggttttggtagtccgggctcacattctcacactgctttttctaagccatccagtgacacttttggaaatagcagcatatccacttctctgtcagcctcaagcagcatcattgcaacagataatgtgttattcacacccagagataaactaacagtagaagaactggaacaatttcaatccaagaaatttactctgggaaaaattccattaaagcctccacctctggaacttctaaatgtttaaaagggcaattttaaatacaaaaaagaatgatgtttaat

SEQ ID NO: 16305 - DNA, 397 bp, Homo sapiens
tatttttagtacagatggggtttcactgcgccagccaagatggtctcgatctcctgacctaatgatccggccgccttggcctcccaaagtgctgggattacaggcgtgagccaccccgcctggccactaaaatttcttaagaaacaaaattgcatattaaaagtgcgtattttatatggaataccgaaaagcatgagaggtgtttagttagctataaagtagccttggtggccatgatagatgccatcacaactccaccctcttattttcactatgcagattattttgtccagattgaatattcatagcatgaaaatcataactgaaaatcatcattctctctctattgtatagatggataagttgctctacttgctacatgagtttatattggttg

SEQ ID NO: 16306 - DNA, 457 bp, Homo sapiens
  misc_feature (1)...(457): n = A,T,C or G
ctcagaactgacagcctcgataccaatgaaaccgtcgnaganncacgcgtccggtccaattgctggccggttcactcctggaaccttcactaaccagatccaggcaaccttacgggagccacggatacttgtggttactgagcccagggctgaccaccagcctctcacggaggcatcttatgttaacctacctaccattgcgctgtgtaacacagattctcctctgcgctatgtggacattgccatcccatgcaacaacaagggagctcactcagagggtttgatgtggcggatgctggctcgggaagttctgcgcatgcgtggcaccatttcccgtgaacacccatgggaggtcatgcctgatctgtacttctacagagatcctgaagagattgaaaaagaagagcaggctgctgctgagaaggcagtgaccaaagaggaatttcagggtgaatgn

SEQ ID NO: 16307 - DNA, 398 bp, Homo sapiens
cccacgcgtccgagagattccagttcattcctagcttttaaagcaacgttttgagccacaactgtcacaactccagctggtgtgcatagaagccaggttgatgccatctatcataggtgtctcttacacctcagagccagttgaagggctgagagaggatgtggaagccaatggaacacagccagcgcaggaggcaagattttgaaatctatgggccgcgatgggcctcttggaacattggtgtgttcatctgcattcgatgtgctggaatccacaggaatctgggggtgcacatatccagggtaaagtcagttaacctcgaccagtggactcaagaacagattcagtgcatgcaagagatgggaaatggaaaggcaaaccgactttatgaagcctat

SEQ ID NO: 16308 - DNA, 393 bp, Homo sapiens
agagagcgagctgagtggttgtgtggtcgcgtcttttaaaccgttttcgcttgcagcatggctgaccaactgactgaagagcagattgcagaattcaaagaagctttttcactatttgacaaagatggtgatggaactataacaacaaaggaattgggaactgtaatgagatctcttgggcagaatcccaccagaagcagagttacaggacatgattaatgaagtagatgctgatggtaatggcacaattgacttccctgaatttctgacaatgatggcaagaaaaatgaaagacacagacagtgaagaagaaattagaaaagcattccgtgtgtttgataaggatggcaatggctatattactgcttgccaacttcgccatgtgatgactaa

SEQ ID NO: 16309 - DNA, 391 bp, Homo sapiens
cgcttatttgtgtgcatccacggcgattcttcccgttgagttgtgaagcgaaaggcttacggttaaaagggagaaaaaaaaatggagataatgcgggagtacaattgacaaagcgtgtgggtcgctcagcctccagcagaaactgctgatctccagttcttggagggttccggtgagaagaacgcccctactgcggtactgaggaagcggctggaggagatgcggcccctggacatagacgaggtggaagcgcctgaggaagtggaggtgctggagcccgaggaggatttcgagcagttcctgctcccggtcatcaacgagatgcgcgaggacatcgcgtctcttatacgcgagcacgggcgggcgtacctgtggaccaggagcaagcttg

SEQ ID NO: 16310 - DNA, 419 bp, Homo sapiens
gccagggatcaggcagcggctcaggcgaccctgagtgtgcccccaccccgccatggcccggctgctgcaggcgtcctgcctgctttccctgctcctggccggcttcgtctcgcagagccggggacaagagaagtcgaagatggactgccatggtggcataagtggcaccatttacgagtacggagccctcaccattgatggggaggagtacatccccttcaagcagtatgctggcaaatacgtcctctttgtcaacgtggccagctactgaggcctgacgggccagtacattgaactgaatgcactacaggaagagcttgcaccattcggtctggtcattctgggctttccctgcaaccaatttggaaaacaggaaccaggagagaactcagagatccttcctacccttcagtatgtcc

SEQ ID NO: 16311 - DNA, 420 bp, Homo sapiens
  misc_feature (1)...(420): n = A,T,C or G
gcgaacgcggagagcacgccatgaaggcctcgggcacgctacgagagtacaaggtagtgggtcgctgcctgcccacccccaaatgccacacgccgcccctctaccgcatgcgaatctttgcgcctaatcatgtcgtcgccaagtcccgcttctggtactttgtatctcagttaaagaagatgaagaagtcttcaggggagattgtctactgtgggcaggtgtttgagaagtcccccctgcgggtgaagaacttcgggatctggctgcgctatgactcccggagcggcacccacaacatgtaccgggaataccgggacctgaccaccgcaggcgctgtcacccagtgctaccgagacatgggtgcccggcaccgcgcccgagcccactccattcagatcatgaaggtggaggagatcgcgn

SEQ ID NO: 16312 - DNA, 414 bp, Homo sapiens
  misc_feature (1)...(414): n = A,T,C or G
cccacgcgtccgggtaaatattcaatgaatatatgttgagtgaatgaaaaaagcccatcctctctgattttgccaatggctcaggaccatcgtctagaaaagtcttacagcaggtggcttgcctcagttatttcagggcatccagaaagacacattaaccaaagactgctgaatgctttgggagagaattctggtgactgaaaatgtgtgtgaagagagtaaacttttctcaggatgtctgcactcggggaattacccttggcagcaagggcttctctcactgtgggttgctgtgctgggtcctgccagctccattcataacctcaagagaccagggtcctctgcccaatcttgcatggcaaaagatagttaacgtgaggaggccgggcgtggtggctcatgcctgtaatcccn

SEQ ID NO: 16313 - DNA, 422 bp, Homo sapiens
catgaatcccacccacatgtgacacatatgcaccttgtgtctgtacacgtgtcctgtagttgcgtggactctgcacatgtcttgtacatgtgtagcctgtgcatgtatgtcttggacactgtacaaggtacccctttctggctctcccatttcctgagaccacagagagaggggagaagcctgggattgacagaagcttctgcccacctacttttctttcctcagatcatccagaagttcctcaagggccaggactttatctaatacctctgtgtgctcctccttggtgcctggcctggcacacatcaggagttcaataaatgtctgttgatgactgttgtaaaaaaaaaaaaaaaaaaaaaaaaggggcggccgttttaaagaatccctggaggggccaaagtttacgccgtgttgcaaaa

SEQ ID NO: 16314 - DNA, 421 bp, Homo sapiens
  misc_feature (1)...(421): n = A,T,C or G
cccacgcgtccgcccacgcgtccgcactgaagatcctggtgtcgccatgggccgccgccccgcccgttgttaccggtattgtaagaacaagccgtacccaaagtctcgcttctgccgaggtgtccctgatgccaagattcgcatttttgacctggggcggaaaaaggcaaaagtggatgagtttccgctttgtggccacatggtgtcagatgaatatgagcagctgtcctctgaagccctggaggctgcccgaatttgtgccaataagtacatggtaaaaagttgtggcaaagatggcttccatatccgggtgcggctccaccccttccacgtcatccgcatcaacaagatgttgtcctgtgctggagctgacaggctccanacaggcatgcgaggtgccttttganagccccagggcact

SEQ ID NO: 16315 - DNA, 423 bp, Homo sapiens
cccacgcgtccgcacaggtgtcgtgaaaactacccctataagccaaaatgggaaaggaaaagactcatatcaacattgtcgtcattggacacgtagattcgggcaagtccaccactactggccatctgatctataaatgcggtggcatcgacaaaagaaccattgaaaaatttgagaaggaggctgctgagatgggaaagggctccttcaagtatgcctgggtcttggataaactgaaagctgagcgtgaacgtggtatcaccattgatatctccttgtggaaatttgagaccagcaagtactatgtgactatcattgatgccccaggacacagagactttatcaaaaacatgattacagggacatctcaggctgactgtgctgtcctgattgttgctgctggtgttggtgaatttgaagctg

SEQ ID NO: 16316 - DNA, 386 bp, Homo sapiens
cccacgcgttcgacggaggaacagctgtttcaggagcttctggtaccacggccggatgagccgccgggcggcagagaggatgcttcgagctgacggggacttccttgtgcgagacagcgtcaccaaccccgggcagtatgtcctcaccggcatgcacgccgggcagcccaagcacctgctgctcgtggaccccgagggcgtggtacggacgaaggacgtgctgtttgagagcatcagccacctgatcgaccaccacctgcagaacgggcagcccatcgtggccgccgagagtgagctgcacctgcgtggcgtggtctcacgggagccctgagccaggtgaccgttctcagccctggctcctgcctgttctcagccccggctcctgc

SEQ ID NO: 16317 - DNA, 432 bp, Homo sapiens
  misc_feature (1)...(432): n = A,T,C or G
agacttgcttttctgtactgtcaggcaagcccacgtcatcgagatatttttatgctccttactttctcttttctaagagctgtgggatctgggaagggatttgaggggactctgtccttttattggggatcctttttatactgaaacatctgtcctaacttgagtgccccaaggtccaactctctttcctaaagaaggtgcctgaagaagtctctcttctctctgcttcgcggcccctttcttaaatttctagggctgatgctgaccatgtggtttccacaccttattggccccagaggggccctcccatgggaagatctgcagcagtctccccaaatcagtgagcacctttgagcgcccacgaagaactttctcaacaccccccattacgagctctgaggctctcttggcgcaatgcaggtaaaatggtgn

SEQ ID NO: 16318 - DNA, 426 bp, Homo sapiens
  misc_feature (1)...(426): n = A,T,C or G
gcgcaagaacacgctgtatcttcaaatgagcagtctgtgagctgaggacacggctgtgtattactgtgtgagcgatttttggagtgatcactggggccagggaaccctggtcaccgtctcctcagggagtgcatccgccccaacccttttccccctcgtctcctgtgagaattccccgtcggatacgagcagcgtggccgttggctgcctcgcacaggacttccttcccgactccatcactttctcctggaaatacaagaacaactctgacatcagcagcacccggngcttcccatcagtcctgagagggggcaagtacgcagccacctcacaggtgctgctgccttccaaggacgtcatgcagggcacagacgaacacgtggtgtgcaaagtccagcaccccaacgcaacaaagaatagaacgtg

SEQ ID NO: 16319 - DNA, 401 bp, Homo sapiens
aggagggtctgtccccagatgctctgcctcccgttctataaacccactcatcctcagcttgcacaaactggttgaacggcaggaatgaaaaaaaaaaaaaaaaaaaaaaaaaaaaaaaaaaaaaaaaaaaaaaaaaaaaaaaaaaaaaaaaaaaaaaaaaaaaaaaaaaaaaaaaaaaaaaaaaaaaaaaaaaaaaaaaaaaaaaaaaaaagggggggggtccaataaaaaaaaaaatgaagggcaaaaaaaaaacaaaggaaaaaaaaaatatattttttttttttattgatgaaaaaaaaaaaaaccaccctaaataaaaaaaaaaaaacaaaattttttgggggggagaaattaactcaccacccacactaaatatatttttggggtgaaaaaaaact

SEQ ID NO: 16320 - DNA, 385 bp, Homo sapiens
cacgcgtccgctgtacagaagaaagcttttgggttttttaaccagacagatctggatttgagtcccagatgcaatatgatgaaggtgaagtgcctcacacaggatgtggcacatgacagtgcctgaatggctcccttcaaggaagccgtgctgccccgccccctcctctgctcctgcagcgccctgcacagctctgctccccgcatgcaccgcatcgggtctcagttttttgtttgcgagcttgccctgtccctgcttgtagcccctgagccctcacagttgtcacacacccagcagtctgccaaggagctgcttttcctgacttctgtgcctccatgcctagggaagccaaagccctgggccttgccttcagggagttgacagg

SEQ ID NO: 16321 - DNA, 432 bp, Homo sapiens
gagcccagcactgggattccgaggtgtttccattcggtgatcagcactgaacacagaggactcaccatgcagttttggctgagctgggttttccttgttgctatttcaaaaggtgtccagtgtgaggtgccgctgctggagagtggaggaggcttgatccagcctggggggtccctgagactctcctgttcagcctctggttttaccgtcagtaccaagttcataaactgggtccgccaggctccagggaagggactggaatgggtctcaatcatccatgccgatggtgctacatattacgcggactccgtgaggggccggttcaccgtcttcaaagacaattcccagaacacggtgttctttcaaatgaacaacctgagagccgaagacacggccatttattattgtgcgcgagcgggaacagtggcaggc

SEQ ID NO: 16322 - DNA, 384 bp, Homo sapiens
cccacgcgtacggtcggaggtaagtgtttatagaagtttggcggacccggaacccacaggacgcgacaccatgacttatgctgatctcttcaagtatatcatcatcggagacacaggtgtggggaagacatgtttcctcctgcagtttacagataagcggttccagcctgtccacgacctttcattaggtgtggagtttggagctcgcatggtcaacattgatggaaaacaaattaaactgcaaatctgggatacggctgggcaagaatccttccgttctatcacccgttcctactacaggggagcagctggagcacctgtggtggacgacatttcaaggcgtgataccttcaaccacctgacctaatggtaaggggacccccg

SEQ ID NO: 16323 - DNA, 478 bp, Homo sapiens
  misc_feature (1)...(478): n = A,T,C or G
aggtccagaagacttttntccttttngcttgtantncgactganatctngtannancacgcgnnngggangcgtgggcagagatgctgacagggaaaactctgttcaaggggaaagattacctggaccagctgacccacatcctgaaagtgaccggggtgcctggcacggagtttgtgcaaaagctgaacgacaaagcggccaaatcctacatccagtccctgccacagacccccaggaaggatttcactcagctgttcccacgggccagcccccaggctgcggacctgctggagaagatgctggagctagacgtggacaagcgcctgacggncgcgcaggccctcacccatcccttctttgaacccttccgggaccctgaggaagagacggaggcccagcagccgtttgatgattccttataacacgagaaactcacagtggatgaatggaagcagcacatctacaaggagattgtg

SEQ ID NO: 16324 - DNA, 409 bp, Homo sapiens
cggacgcgtgggttgaaagctcagaactcggagctggcgtccacggccaacatgctcagggaacaggtggcacagcttaaacagaaagtcatgaaccacgttaacagtgggtgccaactcatgctaacgcagcagttgcaaacattttgaagagagaccgtcgggggctgaggggcaacgaagaaaaaaaataacacagagagacagacttgagaacttgacaagttgcgacggagagaaaaaagaagtgtccgagaactaaagccaagggtatccaagttggactgggttgcgtcctgacggcgcccccagtgtgcacgagtgggaaggacttggcgcgccctcccttggcgtggagccaggaagcggtcgcctgcgggctgccccgctttgcggacgggctgtcccc

SEQ ID NO: 16325 - DNA, 409 bp, Homo sapiens
cccacgcgtccgcccacgcgtccgcccacgcgtccgtccacgcgtccgcgaatggacaagagtgcagtgggccatgagtatgttgccgaggtggagaagcactcttctcagacggatgctgccaaaggctttgggggcaagtacggagttgagagagacagggcagacaagtcagcagtcggctttgattataaaggagaagtggagaagcacacatctcagaaagattactctcgtggctttggtggccggtacggggtggagaaggataaatgggacaaagcagctctgggatatgactacaagggagagacggagaaacacgagtcccagagagattatgccaagggctttggtggccagtatggaatccagaaggaccgagtggataagagcgctgtcggcttca

SEQ ID NO: 16326 - DNA, 405 bp, Homo sapiens
atgcatgctgctgcctctgggcagtcgtagaatctcccacttcagtttctcgttgattgtactcacctttatggaatccaaatacatccaaaagggtaaggcagttttaaaaatgtgaaaacatttaaaaatgataatagcagggaattcttagattatagtaaatgccttttacttaactgtgcccagcaggctgggtgcgttaaaaagcccaagtattttgaaaaaaactcgaacagatttgacaagggtagccagcttggagtctagcaacttgccaatgtgtttaccaatctgggggcttgtttttcttttcttctttcaaataaatggcagttaactggctttacagtaaacattgaagagaggaggatttgtttattgtcactgggaatctgaccactt

SEQ ID NO: 16327 - DNA, 408 bp, Homo sapiens
ctttgttatcttttttgccttgaatgaactttaaatggaaatttataataaaaatgttaaccagaaggtaaacttgagtgtaattgtcagacagacacacttttccaccagtgtatttgaattttagaccagtgaccctgttttgtggcattcatgcaaaacatgctgagggctttgttcatctgggcatcgagtccaaatttcagtcatgtttgtagcaagattttggaagcattcatatttcctttttaaaaggtattcctttgtgttcaacagttaatcacaaccagagagtctagggcagcctctctgatgttgtcaatgatgtaaattcaggccctggattttaattttctgtctgatgtcacagatcattgttgcacacaaacgtggcatagaaaagaacat

SEQ ID NO: 16328 - DNA, 391 bp, Homo sapiens
agctgttgtgcatccagaggtggaattggggcccggcattccctcctcgtcccgggctggcccttgcccccaccctgcaactcctggttgagatgggctcagccaagagcgtcccagtcacaccagcgcggcctccgccgcacaacaagcatctggctcgagtggcggacccccgttcacctagtgctggcatcctgcgcactcccatccaggtggagagctctccacagccaggcctaccagcaggggagcaactggagggtcttaaacatgcccaggactcagatccccgctctcctactcttggtattgcacggacacctatgaagaccagcagtggagaccccccaagcccactggtgaaacagctgagtgaagtatttgaaactga

SEQ ID NO: 16329 - DNA, 439 bp, Homo sapiens
attgccccctctgcccctggcaccattccagaactgcccaccttccacactgaggtagccgagcctctcaagacctacaagatggggtactaacagcaccaccaccgtccccaccaccacccccagctactgaggtgctggccagtgcatccccactcccaccctcaaccgcggtccctgtaggccaaggcgccaggcaggacgacagcagcagcagcgcgtctccttcagtccagggagctcccagggaagtggtcgacccctccggtggctgggccactctgctagagtccatccgccaagctgggggcatcggcaaggccaagctgcgcagcatgaaggagcgaaaggtggagatcaacaagcagatggagcagggaccagtgagagccaccagccaaggtgggcacttgatgtcggatttcttcaacaagctggg

SEQ ID NO: 16330 - DNA, 407 bp, Homo sapiens
cccacgcgtgctcagacgcatggtttggccaaaagcttctagcctactcggaatggaatggccaaggtaaaacctctgaggtcgtcccaagcccctacccgggcggaccctgcgccccccagaggcatggatcgcaatggggcgcccccctctgccagagggggccccctgcccctggagatcatgtctggagggggcacccacaggcctccccggggccctccgtccacatccctgggagccagcagacgaccccgggcacgtccgccctcagagcacaacacagaattcctcaacgtgcctgaccagggcatggccggcatgcagaggaagcgcagcgtggggcaacggccagtgcctggtgtgggccgacccaagccccagcctcggacacatggtcccaggtg

SEQ ID NO: 16331 - DNA, 484 bp, Homo sapiens
  misc_feature (1)...(484): n = A,T,C or G
ttttgaatgagatccattaatgaacgcntgcggaaccgcnnccgaantcccggggcgacccacgcgtgcgaattactgaaaacatatcaagaactttttgacttatttatcttctttcacgcgagttatcaaaaggtacagatatggggaatttgagagacatcaatggctggacattaaggagatgtacattgagagaccagggcaggagaatcacttgaactcaggaattcgagaccacccttggacaacctagcaaaacctcgtctctactaaaaagaaaaaaaattatccaaaagtgagattcatttctgtagtcccagctattcaggaggctgaggtaggaggatcacttgatcccaggagatcaaggcttcagcagtgactgtgccactgcgtgtgtgtatttatatggggttgcagagggagagaaggagacacagacactgagcaccatcttatatatagaaatatatacacaccg

SEQ ID NO: 16332 - DNA, 421 bp, Homo sapiens
gcgagagaatatataagttaaaaaggttactgtagcaatagatttatctcaattaccagggcagcctctgaaaccctgactcccacctaatctcattcggtgcatacgcgctcaccgtgtgatttccaacacagctaaatgaaattataaagcagggttaaatttattaatcatttaattagctaaatgttcctgcaagtactggctagatgaatggcatgtcattttctaatgcaatttgcctctcaggcagccagggtcagaaagggaagctcctggcatctcgaatgagctctttatatcacaccttctactgggagacggttgttataccactgattatatttgagacttgtacacaagaccagggcactcagatgctggaattggaaaatgctctctttcttacctgggttacaaa

SEQ ID NO: 16333 - DNA, 386 bp, Homo sapiens
cccacgcgtccggtcacgtgtctggaatgaaattgtattcatttaggtaagcaacacactacataaatatcatagctgttagacccaggggactctcaggtgccagaattggggactcctttaattggaagggagctaaagggtctacctcctacctagaagtcctttctatgtggatatgaattaaattctcttgtctgttttgctctgatggggtctgtgtgggctagctggctctggtgtgtgcctgacgacagactgaactccttaccatttcagacagcttgaagatgtatgatcattatttgaaaagggagagagggaggactctttgttttctccaccagtttggctcctgaggtttcttcagcgttaggtttctgtag

SEQ ID NO: 16334 - DNA, 458 bp, Homo sapiens
  misc_feature (1)...(458): n = A,T,C or G
tatgaacgccttatgagggcatgcagaaccccncgaccacgcgtncgcttggaggaagcgcagctcgaaaagcgatgccgattctggtttcctttggctgcggcccacttcggaggacccaacgcggaggcggcggcgggcgcggcgggaggctgaagctgacaagccccgaaggctgggacggctaaagtaccaggcacctgacatcgacgtgcagctgagctcggagctgacagactcgctcacgaccctgaagcccgagggcaacatccttcgagaccgcctcaagagcttccagaggaggaatatgatcgagcctcgagagagagccatgttcaaacgcacgtacaaggtgaagctggaggagaagcgggcgttccaggagattcacgtgtagctgccatcaaatgccggagactctcccttcaataaaaaaatctcttctaactgaaaaaaaa

SEQ ID NO: 16335 - DNA, 401 bp, Homo sapiens
  misc_feature (1)...(401): n = A,T,C or G
cggacgcgtgggaagatatagtgctgcagcgtgcctgatgggatatattcagtcatggcgtccgaactttgtaagacgatctctgtggcaaggctagaaaagcacaagaatttgttcttaaattataggaatctgcaccattttccattggagttactgaaagatgagggactgcagtacttggagagactctatatgaaaaggaactccctgacatccttgccagaaaaccttgctcagaagcttccaaaccttgtggaactatacctgcactcaaataacatagttgtggttccggaagccattgggtctcttgtaaaactccaatgtctggatcttagtgacaatgccttagaaattgtttgcccagaaattggtcgtctgagagctttacgtcatcn

SEQ ID NO: 16336 - DNA, 444 bp, Homo sapiens
  misc_feature (1)...(444): n = A,T,C or G
atttgacacagttgatcagcctcggaancccgggncgacccacgcgtccgctgtttctcatttgctggttgactgtttttatttcttatgcttttgttagntctagaaaatagggaagcagcccctgatttgtggattaaaagcaacatttgagcgatgatgcacaacagtccaggaaaatgggcggtggacacttgaggctgaggatgggagttgacatgagcatggagagggaggtgcgcgctgcttatctgtgattgttgctcacctgagtgtggctgattgtgtacatccaacagttacaatttttaaaaattatacttttacatttattttatatttttctcacccccagtaatttccttcaaagaagttcacatgtaataagtagaaattctgtataggagaaaagcatttaaaatactattattaactgctttattt

SEQ ID NO: 16337 - DNA, 402 bp, Homo sapiens
gtcagttccgggtggtcaaggagcccctcggctttgtgaaggcgctgcaatgggtcttcgccatcttcgcctttgccacatgcggcagctacagaggggagctccagctgagcgtggattgtgccaacaagaccgagagtgacctcagcatcgagggcgagttcgagtaccccttcaggctgcaccaagagtactttgatgcacccacctgccgagggggcaccaccaaggtcttcttagttggggactactcctcgtcagccgaattctttgtcaccgtggccgtgtttgccttcctctactccatgggggctctggccacctacatcttcctgcagaacaagtaccgagagaataacaaagggcccatgctggactttctggccacggctgtgttcgcct

SEQ ID NO: 16338 - DNA, 407 bp, Homo sapiens
cccacgcgtgcgcccacgcgtccgcatcagtttatgcattcacaaaaaggatatgaggaaatcataattatatgaatggtttctgagctattgagacttaaacttctctataaaagttaaataaattacatagggcagggagatgaaggaaacataattattaaaacgttattattaaatatgattaagcaactactagtgttttaatctagatgatttcacctggaatatagttaggtccacccctgaaagtattcagcctctatatgatgcttttgaaacatctgtctcttcacagagatgccaaattttgttgctattgttgagtaatattttttgttttgttgctgctgtggttgtttcatttattcatttgtttaccttcagaaaaataacctttccaacac

SEQ ID NO: 16339 - DNA, 477 bp, Homo sapiens
  misc_feature (1)...(477): n = A,T,C or G
cggaggggggtnncctgacgctgcggaccgcttgaaaccctgagaccgccccgaactgaggacacccaccacaccttgaggaatggctcggccctttcaatcctggagggccagtccctgcaccttgtctgtgctgtcgacagcaatccccctgccaggctgagctggacctgggggagcctgaccctgagcccctcacagtcctcgaaccttggggtgctggagctgcctcgagtgcatgtgaaggatgaaggggaattcacctgccgagctcagaaccctctaggctcccagcacatgtggctgagcctctgcctgcaaaacgagtacacaggcaaaatgaggcctatatcaggagtgacgctaggggcattcgggggagctggagccacagccctggtcttcctgtacttctgcatcatcttcgttgtagtgaggtcctgcaggaagaaatcggcaaggccagcagtgggcgtg

SEQ ID NO: 16340 - DNA, 416 bp, Homo sapiens
cggacgcgtgggtgcacaggggtccatacggcgttgttctggattcctgtcgtaacttaaagggaaattgtcacaatgtgcggagcccttgatgtcctgcaaatgaaggaggaggatgtccttaagttccttgcagcaggaacccacttaggtggcaccaatcttgacttccagatggaacagtacatctataaaaggaaaagtgatggcatctatatcataaatctcaagaggacctgggagaagcttctgctggcaggtcgtgcaattgttgccattgaaaaccctgctgatgttagagttatatcctccaggaatactggccagagggctgtgctgaagtttgctgctgccactggagccactccaattgctggccgcttcactcctggaaccttcactaaccagatccaggg

SEQ ID NO: 16341 - DNA, 460 bp, Homo sapiens
  misc_feature (1)...(460): n = A,T,C or G
tttttaatgaagttnctaggagagcctcgaaccccccgacatccgggcgcccaccggcgccgcctgaggacatgngaacttttcctgatcgtttaatgcctggactgtcacttgcactgctggcttttggaccagggtgtaccgaaggcactacacgctggatgcttccctgcctttgcgtctgcgaccagagtcaatggagaagctgcgctgtctccgggcttgtgtgatccgatctctgtaccatatgtatgagccatttgctgctcgaatctccaagaatccagccattccagaaagcacccccagcacattaaagaattccaaatgcttacttttctggtgcagaaagattgttgggaacagacaggaaccaatgtgggaattcaacttcaagttcaaaaaacagtcccctaggttaaagagcacgtgtacaggaggattgcagcctccccttcag

SEQ ID NO: 16342 - DNA, 439 bp, Homo sapiens
aagcattgatggccagcctgtttgacccatgggcaatgtaccttccaaagggagctatctatcactttcctctccacagcatgtggcttcaggtgtctgcctatcctgctctagccagatgacctgtccctttgattttgaacagagtctcagtgatgacctcaatggatgaccctcccctctgctgaatgcctcccctggggctgagcgaagccacctcctccaagctgtcctccagggcatccacaaaatcccggaagcggaggcggtcatgacggaagatgccatcctcaccaaagaaagcagggtctggctctgtcgtccaggctggagtgcagtggcacgatcacaactcactgtaacctccacctcccaggctcaagcgatcctcccacctcagcctcctgagtagctgagactataggcatgcatcattacc

SEQ ID NO: 16343 - DNA, 470 bp, Homo sapiens
  misc_feature (1)...(470): n = A,T,C or G
gggatcaccacnaattgaacnccaattgatantcctnctgaaccgcnccggaaatcccggcgcgacccacgcgtccggagaggagctgatcaacggagtcatttactccatctttctgcgcaaggtgcagctgcaccgcggaggcaacaaggggcagtgctggctcgggtatgagaatgagtcggccctgaacctttatgagacttgcaaggcgcggaccgtgaaggctggcacgctggacaagctggtggagcacctggtgccagccttccagggcagcgacctctcctacgtcaccatcttcctgtgtacctatagagccttcaccaccacccaacaggtcctggacctgctgttcaaaagatacggctgcatcctcccctattccgacaaggatggtggaccccacgaccaacttagaaatgccatctcctccatcctgggcacctggctggaccagtactcggagg

SEQ ID NO: 16344 - DNA, 424 bp, Homo sapiens
ctgaattgttgaatttgtgaaagagtcaattttaaatcacagtcatttagtagtagaatatattgttaccatttttaaagctcttgacaaaatttctcattttcttgactatttaatatatttagggctggcactcacaggtctagctactgggatgtgggaaacacgagtaatgagcaaggcaggttcctgctctcatggagcttacaatcaataggttaccgagcatattcgtctgctacaagtttgattataggacactttgtgttgagtagtcttgttctatttgagtacttgtttgagcttactcctgtttattttttaattggattgctataactgttgactatttttttcgtgcacagttcgaaaatagtggtaaccatttgtttgtacacattgtgccattgaaaactacgttttt

SEQ ID NO: 16345 - DNA, 419 bp, Homo sapiens
cccacgcgtccgcccacgcgtccgcaaaagatggtaggtgcgagcccgaccaaggatgacagtaaggactcagatttctggaagatgcttaatgagccagaggaccaggccccaggaggggaggaggtgccggctgaggagcaggacccaagccctgaggcagcagattcagcttctggtgctcccaatgattttcagaacaacgtgcaggtcaaagtcattcgaagccctgcggatttgattcgattcatagaggagctgaaaggtggaacaaaaaaggggaagccaaatataggccaagagcagcctgtggatgatgctgcagaagtccctcagagggaaccagagaaggaaaggggtgatccagaacggcagagagagatggaagaaaaggaggatgaggatgaggatgaggatga

SEQ ID NO: 16346 - DNA, 388 bp, Homo sapiens
cggacgcgtgggcggacgcgtgggttttttacaaggttcaagagagactggaaagagagctggctgggcgcgagccccagtgaatcagaaacacatggcccaagttccccagcacgctgcccgtcctgccctccccaccctgccctagggactaagatctctccaaaccccaaacattttgaaacggccgaagtctcctcctccgcccacttctgctccttgtggactgaatggagacgggctaccgtggaaactggcaccccatgggggttactcccagctgtcaagtggtggggtggtcccctcatccctttacaccctctagcccacccctagtgtccctggcctgagcctgcagagcctccctgctgccagggtccccatgggc

SEQ ID NO: 16347 - DNA, 470 bp, Homo sapiens
  misc_feature (1)...(470): n = A,T,C or G
gagcgcgtccctatgacgcacgtagaccgcntcaaaccccgncgacacgcgtccgcaggagcccagctccttccaagttggcgggagggagtttcccaggcatttctgcagctgcccaagtcatggctgctggctgagcctccctgtgttcttggagaccaggagcaggcaggagccctgctctcctgggtgcaactgcagccacccaagtccttgctacagaccgtgttcttggaggctgggagcaggcaggagtgccaaagcaggcaggagtgctggagcaggcatgagcccttcctgcatcccccacctcctttgtgcagctgtagccacccaggttgtggctgcggaccaacctggatatctctgcactctaggggcctgggaaggcacccccacctcagcaggcttggaggtatctgcttctgctgcctggcctctccctgctcctggagactgctctgaactaa

SEQ ID NO: 16348 - DNA, 305 bp, Homo sapiens
tggcccagggtgagtgggggtctctagcttgtcctttgcacctttttactccataatggtctcaagaggttcctggcttttccgtttgaggaggaagaatcatttgacaaatagtttttacctgcctggcgtgtgccagatctccatagccccaagtcccctggctccgccctctcatacccattgtcctagaatttgagagggcaggtgggaggggtgggactacttccactttccccaaattcttttgccttattcactgtctactgatgaggccagatccaggtttaaaaaaaaaaaaaagg

SEQ ID NO: 16349 - DNA, 390 bp, Homo sapiens
gcgagcaagatgagcacctggcctcccattttagcatttttcctcaccccaccccttgcaggagagctgctctcttggcccagacccatccaagaatcagggggccacatgggagccaaagtccacacttgatactcagaaccctggcacatatggctggtgccaggtcagctctgaaggaactcaaaagtcaccatgccctgaccctgggaagccggagacagcaaatgatctcttcgccagagatcacgtgttttcaggagccacaggttttgtacatcaggaagaagaagaggctggagaagctacgccaccagctcatgcccatgtacaacttcgaccccacggaggaacaagatgagttggagcaggagctgctggagcatggcg

SEQ ID NO: 16350 - DNA, 402 bp, Homo sapiens
cttagaatagcgcctagcaaatagtgagtataatataagcattacttgctaccgtcattaccaccttgctgttttgcatttatgccgcagcatgctgtttaattgaatgcttttcagggtctccctcacaagatgttttccaggtggtggtgcagggctctatcttgttcccttgcatggactcattggttaatagtccctttgaatcctcataaccctaaaagtggctaactatgactcaaatttcagtgtttcaagattctctgtctctactgactgatcagctgtgattggctccaggtttctctgctagatctagcaggtagtaggacatttgacagatctcagttccattccacgctatttatttctcagtttcatttagttaggaaactggacttg

SEQ ID NO: 16351 - DNA, 414 bp, Homo sapiens
ctctttttgctgtaagaggatatgaaaataggggacttttaatcttttcatcttagagagggcactctccctatacatttttactttctgttttctatttcaaatttgtcataattttagattcagaaatttaggacagtgtgctagaatttgcatggtatgcctgaagtaaattggataattagtaggtactccatatttactaaaatagttacttgtaaattcaagtttgctgcaggcaaaagggaattacagaattttcatcaactttcttcagcctatatctaaataataatgtagtttatttcctaatacttgttttacatatcagagggtctaaccctattctgcaaaatatatatattttttatttaacaatatgtctattcttttcttctaaagttggattatagg

SEQ ID NO: 16352 - DNA, 402 bp, Homo sapiens
tgggcatggtggtgtgcgcctgtaatcccagctacttgggaggctgaggtgggcgaattgcttgaacccaggaggtggaggttgcagtgagctgagatagcaccactgcactccagcctgggcgacagagcaagactctgtctaaaaaaaaaaaaaaaaaggaaaaagaaaaaaattttccttttttcctaaaaacaaggacttttttttactttaccacagtttattttttaaaaacaggacctttttcaaactttataagtttttgcctttccccccatttatggcggtcatatggcttttattttataggctttttttgggcacttgaaaaaatattcataaatttgaaaagaactccaaaaatatacagggataattcacctaacattcttgcttccc

SEQ ID NO: 16353 - DNA, 471 bp, Homo sapiens
  misc_feature (1)...(471): n = A,T,C or G
ctccccatcgatcgctatcatagaacggccctggaaacccgcgncgacccacgcgtccggattgatgacatactcagtgtggcctccgtgcgtccagctgtcttgcatgtggaatgccacccatacttggctcaaaatgagctaattgcccactgccaagcacgtggcctggaggtaactgcttatagccctttgggctcctctgatcgtgcatggcgtgatcctgatgagcctgtcctgctggaggaaccagtagtcctggcattggctgaaaagtatggccgatctccagctcagatcttgctcaggtggcaggtccagcggaaagtgatctgcatccccaaaagtatcactccttctcgaatccttcagaacatcaaggtgtttgacttcacctttagcccagaagagatgaagcagctaaatgccctgaacaaaaattggagatatattgtgcctatgcttacggng

SEQ ID NO: 16354 - DNA, 473 bp, Homo sapiens
  misc_feature (1)...(473): n = A,T,C or G
cgccgctcncaatagatcgctatcatagacggccctgaatcccgcgncgacccacgcgtccggaggttgggtgatgcagttttctgagggtgacatgctgaattaaagaggattgagatttttatttatttattattgctttcttaattcccagtgtggtagcagaggattcagttttgaatgttaatttctggtggctgaaggaatctcacttgagactgaaacttgagcctgcaaacctaggttcaaatcataactctgttattaacttgccttatgaccttgggcaagttactttcctggatttcagcttcacagtgtggttgtagggattaagtgagataaattatgtaaagctcttggcatatcgagtgttctcaacaaatgggagatgttattagaaattggcctaaatttgacctgtcactctagcttgccaagatatattttaattctgtaatataaaacatttg

SEQ ID NO: 16355 - DNA, 409 bp, Homo sapiens
cggacttgccaacatggggcagtctattaacatcactgagctgaatctgccgcagctggaaatgctcaagaaccagctggaccaggaagtggagttcttgtccacgtccattgctcaactcaaagagggacataccaagtatgtggaagccaaggactgtctgaacgtgctgaacaagagcaacgaggggaaagaattactcgtcccactgacgagttctatgtatgtccctgggaagctgcatgatgtggaacacgtgctcatcgatgtgggaactgggtactatgtagagaagacagctgaggatgccaaggacttcttctagaggaagatagattttctaaccaagcagatggagaaaatccaaccagctcttcaggagaagcacgccatgaaacaggccgtcatg

SEQ ID NO: 16356 - DNA, 454 bp, Homo sapiens
  misc_feature (1)...(454): n = A,T,C or G
nattgaacgccnatggaacgcgntgcgaactcccggcgcgacccacgcgtccggcgaagcagatctgaggacatctctgtgccaggccataaaccgcccacctgcagttccttctccgggatggacgtggggcccagctccctgccccaccttgggctgaagctgctgctgctcctgctgctgctgcccctcaggggccaagccaacacaggctgctacgggatcccagggatgcccggcctgcccggggcaccagggaaggatgggtacgacggactgccggggcccaagggggagccaggaatcccagccattcccgggatccgaggacccaaagggcagaagggagaacccggcttacccggccatcctgggaaaaatggccccatgggaccccctgggatgccaggggtgcccggccccatgggcatacctggagagccaggtgaggagg

SEQ ID NO: 16357 - DNA, 390 bp, Homo sapiens
ctttgaccgggatcactccggcacactgggtcccgatgagttcaaagcctgcctcatcagcttgggttatgatattggcaacgacccccagggagaagcagaatttgcccgcatcatgagcattgtggaccccaaccgcctgggggtagtgacattccaggccttcattgacttcatgtcccgcgagacagccgacacagatacagcagaccaagtcatggcttccttcaagatcctggctggggacaagaactacattaccatggacgagctgcgccgcgagctgccacccgaccaggctgagtactgcatcgcgcggatggccccctacaccggccccgactccgtgccaggtgctctggactacatgtccttctccacggcgctgta

SEQ ID NO: 16358 - DNA, 417 bp, Homo sapiens
  misc_feature (1)...(417): n = A,T,C or G
gacaatgataagactcgctatatggggaagggtgtctcaaaggctgttgagcacatcaataaaactattgcgcctgccctggttagcaagaaactgaacgtcacagaacaagagaagattgacaaactgatgatcgagatggatggaacagaaaataaatctaagtttggtgcgaacgccattctgggggtgtcccttgccgtctgcaaagctggtgccgttgagaagggggtccccctgtaccgccacatcgctgacttggctggcaactctgaagtcatcctgccagtcccggcgttcaatgtcatcaatggcggttctcatgctggcaacaagctggccatgcaagaagtcatgatcctcccagtcggtgcagcaaacttcanggaagccatgcgcattggagcagaggtttac

SEQ ID NO: 16359 - DNA, 420 bp, Homo sapiens
catagctagaaatacagataattccacagcacatttctagcaaatttagcctattcctattctctagcctattccttaccacctgtgatcttgaccatataccttggagttgaatattgttttcatactgctgtggttcgaatgttccctccaacactcatgttgagacttaatccctaatgtggcaatactgaaaggcggggcctttgagatgcgatcggatcgtaaggctgtgccttcattcatgagctaaaggatcaatgggttatcacaggaatgggactggtgtctgtatacgacgacgagaagataactgagctagcatgcccagcccacatagagcctacactacagcgatgctaaagtgaaatgtgaggtgcagctgccacagagggctcccaccagggaaatgtctagtgt

SEQ ID NO: 16360 - DNA, 385 bp, Homo sapiens
acatttagaagtatattggtaatctattaggtccattggcaaagtatattggtccatattcaaacctattccaaaaggttagaagtgtttaagattcctttattgtggtaccatgtctgtttacctatgcttatgagcaacaataaattactagtttaccttctggaattttaattgttataaccgaatcaattattggaaagtgaaaaacacctcccggtcacacaacagggtacgtaaataaatgtgttgttaccagtgaaaaataaaaaaaaaataatataaataaaaggggggcccctttaaaagatcccttggggggcccaaattttccgggggtgggaaagaataatttttcttccttatgggggggtgtttttaaccg

SEQ ID NO: 16361 - DNA, 421 bp, Homo sapiens
  misc_feature (1)...(421): n = A,T,C or G
caacagtgtaccagcagggcgttggctatgtgcccatcacagggatgcccgctgtctgtagccccggcatggtgcccgtggccctgcccccggccgccgtgaacgcccagccccgctgtagcgaggaggacctgaaagccatccaggacatgttccccaacatggaccaggaggtgatccgctccgtgctggaagcccagcgagggaacaaggatgccgccatcaactccctgctgcagatgggggaggagccatagagcctctgcctcgatgccgttttgcccccgctctttggacacgccgacccggcgctccccaaggaatgctgtcccaacaagattcccgtganagagcacncgtgtcgcccccttccgtggacttctgtgccgcccgtncacacctgttcttgggtgcatgtgga

SEQ ID NO: 16362 - DNA, 380 bp, Homo sapiens
  misc_feature (1)...(380): n = A,T,C or G
ttgtattacaataacgcggccatcctttacctctttgttttccttgcnccacaacaatgacctacgatcccactattccatatgacgctcgccacatgaatctggcaaacagtccttttcgcgtttagcatttttttcttttcatattctactgggagttttgctgctgaatcttattaagtgcctgtctattatatatttaaataatcatataatttgcaccatttaatttgacataaaaattatattagacctgctaatgatgatccaaccttggatctctaaaattaatcttatttggtcataggtatagcttgtaattgctctagcacattataaaacttaatttcctaacaggcattttaatcatactctctacg

SEQ ID NO: 16363 - DNA, 441 bp, Homo sapiens
  misc_feature (1)...(441): n = A,T,C or G
cccacgcgtncgggagaacacaggtggagaaaatcggcagctgagacggccttggccggacttagcactcaggcctgtgaatcaggagatacaaagacctccaaaaaaggaccagttcctcggatgtgccccctcacagagagatgaaggggcagcagaaaacagctgaaacggaagaggggacagtgcagattcaggaaggtgcagtggctactggggaagacccaaccagtgtggctattgccagcatccagtcagctgccaccttccctgaccccaacgtcaagtacgtcttccgaactgagaatgggggccaggtgatgtacagggtgatccacgtgtctgaggggcagctggatggccaaactgagggaactggcgccatcagtggctaccctgccactcaatccatgacccaagcggtgatccagggtgctttca

SEQ ID NO: 16364 - DNA, 472 bp, Homo sapiens
  misc_feature (1)...(472): n = A,T,C or G
tccccaatagaatgccgtggaccggccggaatcccgatgatcacgtctccggancattntatttttgaggcagagtcttggtttctcacttaggctggagtgcagtggcatgatttcttttcactgcaatctccacttcctaggtccaagctattttcctgcctcagcctcctgagtgactgggattatgggcgtgcaccaccacactcagctaattttttgtatgtttagtagagacggggtttcaccatgttgaccaggctcgtcttgaactcctgacctcaagtgatccacccgcctcgacctcccaaggtgctgggattacaggcatgagccaccacacacagccagcatcctgtttaaaagagatagccagaggccaggcacagtggcatatgcttgtgataccaacactttggaaggccagggcgggctgatgacttgagctcaagagtctgagaacagcctgggc

SEQ ID NO: 16365 - DNA, 488 bp, Homo sapiens
  misc_feature (1)...(488): n = A,T,C or G
cggggcttccgatagaacgccatcatagaccgccntggaaancccgcgncgacccacgcgtccgggactgagcaacaaatttgaatctgaattcccttcttcattaactggaaaagtagctcctgaagaatttaaagccagcatcaacagagttaacagttgtcttaagaagaaccttcctgttaatgtacgttggctactttgtggctgcctttgttgctgctgcacattaggttgcagtatgtggccagttatttgcctcagtaaaagaacacgaagatcgattgagaagttattagaatgggaaaacaataggttataccacaagctgtgcttgcattggagactgagcaaaaggaaatgtgaaacgaataacatgatggaatatgtcatcctcatagaatttttaccaaagacaccgatttttcgaccagattagcatttactttatttatagagactttccaagtatgttgtctttccaatgg

SEQ ID NO: 16366 - DNA, 400 bp, Homo sapiens
  misc_feature (1)...(400): n = A,T,C or G
tggatgtaggagagcttcttttctaactaccatctgatcagacactgtttgaatcaatgactgtgggctgggaaactgtacctacctctcttcccactgcaaatttctgggatagaccacaagtgaatttgattatgtgttggctgaagttcttcattctgactgttgaggggaggttttcctttgaagagttttcatcccagactcagctgtcttttcacatggatgaaataattcctgctaccaacaacagagcttcaccaggaagatgagttttcaagatgccttgttgctttgaagaagggagagatgtcaattctcttgttacattctccctttagcaacctgagtaagagactctctgccactgggctgcaaaaaaataaattacttgactctn

SEQ ID NO: 16367 - DNA, 395 bp, Homo sapiens
cccctctttcctcatgaaactcccccaactcagagtctacagacccttcctccggtggcaccacaggctccctcctccatcctgctgccagcagcccccatccccatccttagcccctgcagtccccctagcccccaggcctcttccctctctggccccagcccagcttccagtcgcctgtccagctcctcactgtcatccctgggggaggatcaagacagcgtgctgacccctgaggaggtagccctgtgcttggaactcagggagggtgaggagactcccaggaacagcgtctctcccatgccaagggctccttcaccccccaccacctatgggtacattagcgtcccaacagcctcagagttcacggatgggcaggactggaggaggggtgg

SEQ ID NO: 16368 - DNA, 142 bp, Homo sapiens
cccacgcgtccgcccacgcgtccgcggacgcgtgggtaaaaaaaaataaaagggcgcccgttctaaaggatccctggaggggcccaagtttacgcgggcatgcaacgtcatagttttttccttatagggaggcatattataa

SEQ ID NO: 16369 - DNA, 389 bp, Homo sapiens
  misc_feature (1)...(389): n = A,T,C or G
cacccccattctcccctcaattaactctccttcatccccatgatgccattatgtggcttttattagagtcacgaaccttattctccaaaacaaaagcaacaaggactttgacttctcagcagcactcagctctggttcttgaaacacccccgttacttgctattcctcctacctcataacaatctccttcccagcctctactgctgccttctctgagttcttcccagggtcctaggctcagatgtagtgtagctcaaccctgctacacaaagaatctcctgaaagcctgtaaaaatgtccatgcatgttctgtgagtgatctaccaagaaaataaaaaattttaaacatcannnctnaaaaatcaaaaaaaaaacagactaaaaaaaaa

SEQ ID NO: 16370 - DNA, 396 bp, Homo sapiens
  misc_feature (1)...(396): n = A,T,C or G
cccacgcgtccgcccacgcgtccgaacaggacccgtcgccatgggccgtgtgatccgtggacagaggaagggcgccgggtctgtgttccgcgcgcacgtgaagcaccgtaaaggcgctgcgcgcctgcgcgccgtggatttcgctgagcggcacggctacatcaagggcatcgtcaaggacatcatccacgacccgggccgcggcgcgcccctcgccaaggtggtcttccgggatccgtatcggtttaagaagcggacggagctgttcattgccgccgagggcattcacacgggccagtttgtgtattgcggcaagaaggcccagctcaacattggcaatgtgctccctgtgggcaccatgcctgagggtacaatcgtgtgctgcctggaggagan

SEQ ID NO: 16371 - DNA, 483 bp, Homo sapiens
  misc_feature (1)...(483): n = A,T,C or G
gccgctcccattgaacgctatttagaccgccnttgagaacccgcgncgacccacgcgtccgactagttctagatcgcgggcggccgctcgcgttagacttcaaatgaacccatcaactggatgccaactctggcgaatgtaggacctctgagtggctgtataattgttaattcaaatgaaattcatttaaacagttgacaaactgtcattcaacaattagctccaggaaataacagttatttcatcataaaacagtcccttcaaacacacaattgttctgctgaagagttgtcatcaacaatccaatgctcacctattcagttgctctgtggtcagtgtggctgcatagcagtggattccatgaaaggagtcattttagtgatgagctgccagtccattcccaggccaggctgtcgctggccatccattcagtcgattcagtcataggcgaatctgttctgcccgaggcttgtggtcaagcaa

SEQ ID NO: 16372 - DNA, 477 bp, Homo sapiens
  misc_feature (1)...(477): n = A,T,C or G
tgggtgtncncggggcgnnnnnnaattgaacgccttaggaactcgtgcggaaccgccgcggagacccacgcgtgcggtacatttttattcctctgtgacagatgaggatgctcaggcacagataagtgacttacctatagtcacacagctaatgactgctggaacgtgaacatgaactctggtctgtcaaactgcagagttctgcaaatagtggcatttcaggttttcttaggaaaagatgagattgtgggagaggcagttccaatccccatcaaagatggagctgagctgtttcatcatccttctgttacttatggacctgttctttttgtttgttttttgtttctttttctttctttctttctttttttttgagacagagtctcgctctgttgcccaggctagagtgcaatggtgcaatcttggctcactgcaacctctgccacctgggttcaagcaattctcctgtctcaaccn

SEQ ID NO: 16373 - DNA, 392 bp, Homo sapiens
ttgttcccaaaacaagagggagctgggctggaagcaccactattcttctttaggcatcttgttacagagagaggcagggtcttcactgacatattaaatcctgttccctgaaccagcccctccctcttctgctccacttcctcacctgtgcagagtcattttcaggtgttagccttactgatttgcactgatctgtttgttccctgagctttttaaataccctgtgaaaattttctttcctcccttggtcatcatgcatctaattgtggggaaatgtttgtcaaaccaacctgcaaagcagcatggtgtagttgagaagaataaacagagaagactgggtgagaaaaaaaaaaaaagaaaactgaaaggggggcccctttaaaggaaccctt

SEQ ID NO: 16374 - DNA, 412 bp, Homo sapiens
ggaaccatggaagccccagctcagcttcttttcctcctgctactctggctcccagataccaccggagaaattgtgttgacacagtctccagccaccctgtctttgtctccaggggaaagagccaccctctcctgcagggccagtcagagtgttagcagcttcttagcctggtaccaacagaaacctggccaggctcccaggctcctcatctatgatgcatccaacagggccactggcatcccagccaggttcagtggcagtgggtctgggacagacttcactctcaccatcagcagcctagagcctgaagattttgcagtttattactgtcagcagcgtagcaactggcagtacacttttggccaggggaccaagctggagatcaaacgaactgtggctgcaccatctgtct

SEQ ID NO: 16375 - DNA, 462 bp, Homo sapiens
  misc_feature (1)...(462): n = A,T,C or G
attggaacggcccataggataatcgttcggaattcgccgggtcattccagggttgacccacgcgttcgcccacgcgttcgngaacgcgtgtgatcctgtctcaaaaaaaataaaacagatgtaatgcttacctaattcatagtttaatgatacaaattactagtagtttgaaatacattaaactagtctttgaataaaagtatacacacgttagtgctaaatgccattttgaacatctctagaaattcaataaactctcaaaagttaaccaaggaagtgttcacaagttgttgtaatgtgtgtcagtatagcttgcagggaaggaactcatgaagcaggcccagtactttgattctttgaatgcatggacatatagtacagtattggtctgttacattttaacagtaactttgtattaactagtaactttgccaagcataaggaaatggattcaaattttaa

SEQ ID NO: 16376 - DNA, 477 bp, Homo sapiens
  misc_feature (1)...(477): n = A,T,C or G
cccccatcgaactcatgatggccgccntgaaaaccgcgccgacccacgcgtncggctttcgcagcagtgcgccttccttttccagccaccggttctcctgaccccgagtgtggggggtgacttcagtctcctgacatccagtgttctctcgagccagtttccagcccacagaaaatgagctcttccggaagtgggcatcttattccaatcccctccctgtgaatgtgtggagaaaaagagatgggaacgaggcagaggaaatagagaaattttgaaagagaaatgaagaatgagagacccattaacagaaggcaaagtagaaggtttacaaattttaagaaagggagaataaagtgaaaaaaatctcagaaggaatccactcaacagacgaggattcacttccaaagagacatattatgcatggaagccacttggaagaggaaagaaaagaagtcaggaatggcccttactcaagga

SEQ ID NO: 16377 - DNA, 411 bp, Homo sapiens
  misc_feature (1)...(411): n = A,T,C or G
aagttctagtcgcgagcggccagtgttaacaccactgtcacgtagtgtacagattcatcttttatgtatttaaagtaatccatactatgatttggtttttccctgcaccattaattctggcatcagatcagtttttgtgttgtgaagttctactgtggtttgacccaagaccacaaccatgagaccctgaagtaaagataaggtacacatacattatttgagtaactgtttccttgggggccaatctgtgtatgcttttagaagtttacagaatgcttttatttttgtctataacaaacagtctgtcatttatttctgttgataaaccatttggacagagtgaggacgtttgccctgttatctcctagtgctaacaatacactccagtcatgagccgggctttacaaatan

SEQ ID NO: 16378 - DNA, 401 bp, Homo sapiens
cccacgcgtccgcagagaccctgtctcaaccaccacctccaccaccacccctactacccctgtattcaaggtaaaaattgaagtttgtatgatgtaagagatgagaaaaacccaacaggaaacacagacacatcctccagttctatcaatggattgtgcagacactgagtttttagaaaaacatatccacggtaaccggtccctggcaattctgtttacatgaaatggggagaaagtcaccgaaatgggtgccgccggcccccactcccaattcattccctaacctgcaaacctttccaacttctcacgtcaggcctttgagaattctttccccctctcctggtttccacacctcagacacgcacagttcaccaagtgccttctgtagtcacatgaattgg

SEQ ID NO: 16379 - DNA, 420 bp, Homo sapiens
aacaactggctattcagtaccaaggggccagagtggagggtaggagtgccactctctctttggtttaggtttttgaccttttcttcctttgttttttaaaagtttatgacagttggctccccccccacccccagcaaccccatcccagaatcctattttcctgggaagtccttaaagcccctaaccatcccacactcttcactttcctttccaccttattcattctctgtacttaccacagtattttgcacttgattacatatccttcactctcttctcttcatcccatcaccccctaaataggtcaggtgagggaggcggggaagaggtgggaggaggggcacaagtgaaggaagaataggaaggatattacctcttctgttatttttttaagaaacattgtttgggggcagcaatctt

SEQ ID NO: 16380 - DNA, 391 bp, Homo sapiens
  misc_feature (1)...(391): n = A,T,C or G
cccacgcgtncgcggacgcgtgggtgtaaacaagcacctctaacgctaaaagcacccttgcaagaaaggtaggagttactattcacatcctagagtcaaggaaaaagagaagatgtttgacttgctcaaagtcaagcaggtaatgtcagaattgaatctcaaatctatatctttatagatttgcagttctggtttatataataccaaagtcacatacaggtaatttcccaccattgaaccttcctgttggtgtgagatgccaaatctgtgaaaaccagacacaggtggccaggtgggtgtcgaactcctgacctcaagtgatccgcctgcctcagcctcccaaagtgctgggattacaggtgtgagtcaccacatctggtcggattttaac

SEQ ID NO: 16381 - DNA, 487 bp, Homo sapiens
  misc_feature (1)...(487): n = A,T,C or G
cggcagctgccgatagaacgtccttacngagagtcttgcgaaccgccccggaantcccggggcgacccacgcgtgcgcggacgcgtgggcaggacacagaattctgttcaatgttgttaaatatgccaatacttgaagctcttctatgttgttgtcggggcttgtttgaagaaaatcatgacattccaagctgacattcttttttcattttaattaaaatttgaaattctgaacaccgtcagcaccctctcttccctatcatgggtcatctgacccctgtccgtctccttgtccctgcttcatgtttgggggcctttctttaactgccttcctggcttaactcagatggcagatgagagcgtcttcaagggcctgggcacaggagggagagctgcagagtgtcctgcctgccttggctggagggacacctctcctgggtgtggagacagcttgggtccctttccctagctccctggagggagaatgg

SEQ ID NO: 16382 - DNA, 410 bp, Homo sapiens
  misc_feature (1)...(410): n = A,T,C or G
cagatgtccaaactaattttaacaaacgcattaagaggtttatttgggtacatggcccgcagtggcttttgccccagaaaggggaaaggaacacgcgggtagatgatttctagcaggcaggaagtcctgtgcggtgtcaccatgagcacctccagctgtactagtgccattggaataataaatttgataaggtggtgaanaaaaaaaaaaaaaaaaaaaaaaaaaaaaaggggggggcccttttaaaagaacccttggggggcccaaatttacccggggggggaaaggtaaaatttttttccttatggggggccgtttaaaaccctccttgggatttttggaaaagaaccttttttttgggggggggaattattggcccaccccccccacaaaatttaaagccttaaggg

SEQ ID NO: 16383 - DNA, 390 bp, Homo sapiens
  misc_feature (1)...(390): n = A,T,C or G
ntgaggatgttggcttcacttaatcatatccgagctgaccggtngtagggtgacagatcagaaggctctggtcaagagaatgaaaatgaggatgaggaataataaactctttttggcaagcacttaaatgttctgaaatttgtataagacatttattatatttttttctttacagagctttagtgcaattttaaggttatggtttttggagtttttccctttttttgggataacctaacattggtttggaatgattgtgtgcatgaatttgggagattgtataaaacaaaactagcagaatgtttttaaaactttttgccgtgtatgaggagtgctagaaaatgcaaagtgcaatattttccctaaccttcaaatgtgggagcttggatg

SEQ ID NO: 16384 - DNA, 391 bp, Homo sapiens
cggacgcgtgggggaaggtggatgttggacgctatactgatgttagtacgcggtacaaagtgagcacatggcccctcaccaagcaactccctaccctgatcctgttccaaggtggcaaggaggcaatgcggcggccacagattgacaagaaaggacgggctgtctcatggaccttctctgaggagaatgtgatccgagaatttaacttaaatgagctataccagcgggccaagaaactatcaaaggctggagacaatatccctgaggagcagcctgtggcttcaacccccaccacagtgtcagatggggaaaacaagaaggataaataagatcctcactttggcagtgcttcctctcctgtcaattccaggctctttccataaccacaagc

SEQ ID NO: 16385 - DNA, 422 bp, Homo sapiens
  misc_feature (1)...(422): n = A,T,C or G
aagcgctggtaggccttggagaggcgggttaggtttagtgttgactgctgcacggactctggaaccatgaacatatttgatcgaaagatcaactttgatgcgcttttaaaattttctcatataaccccgtcaacgcagcagcacctgaagaaggtctatgcaagttttgccctttgtatgtttgtggcggctgcaggggcctatgtccatatggtcactcatttcattcaggctggcctgctgtctgccttgggctccctgatattgatgatttggctgatggcaacacctcatagccatgaaactgaacagaaaagactgggacttcttgctggatttgcattccttacaggagttggcctgcgccctgccctggagntttgtatagctgtcaaccccagcatccttcccactgctttcat

SEQ ID NO: 16386 - DNA, 400 bp, Homo sapiens
cctggatctcacaggttctgggaatgcaataggggcctgctgtggctattccaacatctctggtcagggcctggaagtaccttatgacacatggggttggggtcaggactgcattctcagggaccagtggagagccctggaccagatgaactggagtctaggcctctctcgtgactgggacttgtgggacgtgggaggcccgtgagatccaggactaaagattatgctgtttcctaatgggcagatatgtaagtaggtaagtgggatcctcaggtaagcgggatccagaactaaagactgtgctatttcctgatgggcagatgtgttgtttctacctcatcttgggcagcacctggatatgctggcgctggttcatcactggaggagcctcttgtatttt

SEQ ID NO: 16387 - DNA, 410 bp, Homo sapiens
  misc_feature (1)...(410): n = A,T,C or G
ctccaagctccgcgcctccgagggcctgcagagcagcaatagccccatgacagccgcagcctgctccccacctgcaaacttcagccccttctgggcctcgtccccgcccagccaccaggcgccctggatccctggccctcctgtgnncacacaaacctgggctggccccaactccatcctatggttgtggggacacagaagggccagtgatccggggcgcacagtagctgtgtggcgtcgtggaactgagtatttacaggggcatagtgaagaaagcctccagctctttctttttccaggacaacctagaaggtgaatgtgagccccctcacacttttaggtacctaagaaggaagtgggacttgaaacgagttggtgtcgggaaccacttcgggttttgttgaggcctg

SEQ ID NO: 16388 - DNA, 405 bp, Homo sapiens
cccacgcgtgcggaggagccttagccctggattccaatgcctatccacttggtgatcagcactgagcaccgaggattcaccatggaactggggctccgctgggttttccttgttgctattttacaaggtgtccagtgtgaggtgcagctggtggaatctgggggaggcctggtcaagcctggggggtccctgagactctcctgtgcagcttctggatttacgttcagtcgctatggcatgaactgggtccgccaggctccagggaaggggctggaatgggtctcatcgattagtagtggtagtcattatatatattatggacattcagtgaggggccgattcaccatctccagagacaacgccaagaattcgctgtacctgcaaatgaacagcctgagagtcgag

SEQ ID NO: 16389 - DNA, 439 bp, Homo sapiens
tcccacatttgctgtgtgatcttgggaaagtcattgtgcccctccaaccgtcatcaagcacccttgcacagacatgcctttgtgtcttgagcatctattctgtttctccttgtgctaggggctggggacacacagaagaatgagctcggcaagatagggccacatcttcctttttaggttttctttttctttttttttaatttttatttttttgagacagcgtctcactctgttgtccagcctgggtgacagagagagactctgagaagataagaaagaaagataaagacaagaaaagaaaagatagagaaagatagacagaaagacaagacagaaagacagatagattatatggtgaaaccccagctctactgaaaaaaaaaaaaaaaaaaaattacccggaagtggcgcttgctgcctgtagtcccagctactcgct

SEQ ID NO: 16390 - DNA, 452 bp, Homo sapiens
  misc_feature (1)...(452): n = A,T,C or G
ccccccactgataacctcggaaccacgcggacgtccacgcgaccgaaacggtcagaaattgtttagtgtgaattttataaacaaagagttttatcttcacattccttcagccacgggtcggactcagacgagcatatcacttcagattgccacagatgatgacagcggaatcctcctgtataaaggtgacaaagaccatatcgcggtagaactctatcgggggcgtgttcgtgccagctatgacaccggctctcatccagcttctgccatttacagtgtggagacaatcaatgatggaaacttccacattgtggaactacttgccttggatcagagtctctctttgtccgtggatggtgggaaccccaaaatcatcactaacttgtcaaagcagnccactctgaattttgactctccactctatgtaggaggcatgccaggggaagagtaac

SEQ ID NO: 16391 - DNA, 407 bp, Homo sapiens
atttctgtaggcgcaaactcaatcagactaaatgtaaaaaagatagtaaaggatcctttagccctctttcctgagggtaattagcctgtttctgttagagtttaatttaccctcagcaagaggccaaattggccttaattgtgtcctaattatttgcttaaatagctaatctttctcctatcacctcttgatatctgtaagaggttacttctgagctgctgcctactttacaaatgtctttttaactctttaaatgttcctgcatggactagcttgttgctatattatccccattcctgcattcgacatcctccatgaattctactgaggtcttctcaacataaggaaaatgttcccgtattgtattttcacacagcaattattggtctccttcaaagtgtagccat

SEQ ID NO: 16392 - DNA, 489 bp, Homo sapiens
  misc_feature (1)...(489): n = A,T,C or G
ggagagcnnntnnnattgatccctgtcggaccgctttgatatcctgggtcgacccacgcgtccggtctgccataacaatgtaccacagtctctacagcttaaacagaaattttctcatggttctggaggctgggagcctgggattagagggctgccactgtggtcagcttatggagagggcactcttcctggcttgcagatgaccactgtgtctctctgtttccacatgatggatagagagactgagagcatgactgtgtgaactcccctgtctcttatgagggaactaatccccttgtgagggccccaccctcttgacctcatctaatcccaatgaccttgcagaggccccatctctccataccattgtactgggggttagagcttcaacatatacatttggaaggacacagctcagttcatagcatgtacttgtagacatgagcatgatcagatacaatatgggtagtctaaatatttgattcgcta

SEQ ID NO: 16393 - DNA, 402 bp, Homo sapiens
gatcactcggctcgcgcgtcgatgaataacgcatctagctgcgagaattaatgtgaattgctggacacatggatcatcgacacttcgaacgcacttgcgggcccggcttcctcccggggctacgcctgtctgagcgtcgcttgaaaaaaaaaaaaaggggagggctgtttaaaagattccttcgaggggaccccgcttgctctatgagagcagaaaaaaggttttgctttaaaagggccttctttttaacctttttggtaattttcgtgaggaacccttgtttgggggggggcagaacctggatgaccgtctgaataaagattctaggcttgacgggaatattaactactgaaccgcaagctggagtgaaatgacctgatttcgcctcactgttaaaacatt

SEQ ID NO: 16394 - DNA, 407 bp, Homo sapiens
gagaaggggggtgccacaccacctgccctgctcctgctgctctcccgcctctgcctggactacgagacggccaccatctcctacatcctcactctcactgatgaacagtttctggtgcaggatcagttcccagtgacgcccgtgagcacgctgtgtgcagaggccagggaaacggcgcggcggctgctgacccactacgtgaaggtgcagggcctggtcatatcacagatgctgcgcaagagcgtggagactcgcgactggctcagcactctggagccccggaatgtgcgggccgtcatgaagcgggtggtggaggataccaccgccatcgacgtgcaggtggggctcctgtacgaagagggtgttcgcaaggcccagagcagcgactccagcaagaggactttctc

SEQ ID NO: 16395 - DNA, 415 bp, Homo sapiens
gacctcctgcacaagaacatgatacacctgtggttctttctcctcctggtggcagctcccagatgtgagtgtctcaggaatgcggagatgaagatatgagatgctgcctctgatcccagggctcactgtggatttctctgttcacaggggtcctgtcccaggtgcagttatagcagtggggcgcaggactgttgaaggtttcggagaccctgtccctcacttgcgctgtttatagtgggtccttcagtggtgactcttggagctggatccgccagcccccagggatggggctggaattgactggggaagtcaatcatagtggaagcattaaatagagcccgtccctcaagagccgagtcaccatatcagtagacacgtccaagaaccacttctccctgagggtgaggtcttgtgg

SEQ ID NO: 16396 - DNA, 415 bp, Homo sapiens
cgccgagatgcgggtcatggcgccccgaaccctcattctgctgctctcgggagccctggccctgaccgagacctgggcctgctcccactccatgaagtatttcttcacatccgcgtcccggcctggccgcggagagccccgcttcatctcagtgggctacgtggacgacacgcagttcgtgcggttcgacagcgacgccgcgagtccgagaggggagccgcgggcgccgtgggtggagcaggaggggccggagtattgggaccgggagacacagaagtacaagcgccaggcacagactgaccgagtgagcctgcggaacctgcgcggctactacaaccagagcgaggccgggtctcacaccctccagtggatgtgtggctgcgacctggggcccgacgggcgcctcctccgcggg

SEQ ID NO: 16397 - DNA, 415 bp, Homo sapiens
caactgtgttcactagcaacctcaaacagacaccatgttgcatctgactcctgaggagaagtctgccgttactgccctgtggggcaaggtgaacgtggatgaagttggtggtgaggccctgggcaggctgctggtggtctacccttggacccagaggttctttgagtcctttggggatctgtccactcctgatgctgttatgggcaaccctaaggtgaaggctcatggcaagaaagtgctcggtgcctttagtgatggcctggctcacctggacaacctcaagggcacctttgccacactgagtgagctgcactgtgacaagctgcacgtggatcctgagaacttcatgctcctgggcaacgtgctggtctgtgtgctcgcccatcactttggcaaagaattcaccccaccagtg

SEQ ID NO: 16398 - DNA, 385 bp, Homo sapiens
  misc_feature (1)...(385): n = A,T,C or G
gattcctcctcctcttcctccgcggcgggtttgggttcagaggacccgcagttgcagcatttcatcgaggtagagactcaaaagcagcgcttccagcagctggtgcaccagatgactgaactttgttgggagaagtgcatggacaagcctgggccaaagttggacagtcgggctgaggcctgttttgtgaactgcgttgagcgcttcattgatacaagccagttcatcttgaatcgactggaacagacccagaaatccaagccagttttctcagaaagcctttctgactgatctcagcattacctctttggaaaaggaaggtagttcaagaaatgaagagctgttgatgggatgattgaagaaacagctatgagaggattggctn

SEQ ID NO: 16399 - DNA, 394 bp, Homo sapiens
cggacgcgtgggcaaatggtcagcgttgtttaaatgtaatcatgttattttattcattgctaatgctttgatgaaaaggctttatatgcagtagatctacgaaaatattgttcatactgatcagaattaaatttgtatagagcagagttttaaaatgaatgtaaatagcactaaacgttttctttctgcaacctgtacttacagattcttcctgtaaactaaataaaaaaaaaatgatagtgcattttgggggtaattttaaaggtcttgattaggtcaataattggttaagcaccgtgtcattcatgttttctactttcatttcttaagcttttaaaagtcatttaatcaatattctggtgtgtgtgtggagactattcccaatgtatctttt

SEQ ID NO: 16400 - DNA, 385 bp, Homo sapiens
gccaccgctgcctcaacctctgcctcccagcctctttctgagggaaaggacaagatgaagtggaaggcgcttttcaccgcggccatcctgcaggcacagttgccgattacagaggcacagagctttggcctgctggatcccaaactctgctacctgctggatggaatcctcttcatctatggagtcattctcactgccttgttcctgagagtgaagttcagcaggagcgcatacgcccccgcgtaccagcagggccagaaccagctctataacgagctcaatctaggacgaagagaggagtacgatgttttggacaagagacgtggccgggaccctgagatggggggaaagccgcagagaaggaagaaccctcaggaaggcctgt

SEQ ID NO: 16401 - DNA, 393 bp, Homo sapiens
  misc_feature (1)...(393): n = A,T,C or G
tttacagtgtgggcccacagcaccaattattgataaaaagagctcccctttgctgacagaactgctggatttggttctcattggtccagacgaggaaggtatccagcctcaagtcatcattgaggccacgaagatggaatacaccaaatggacaggcctggcatgtacccacagagactgagagttggtgctggtggttgtggtggcagatgatattacctgaagaagggacgaatgggtgctgggcaagacaaagcatcagctgtccagttcaggcctctcctctttccctggagtcttcattttcctccgtctccctgctgtcccttaccctctgcccaatctctcattactcctggncttgggagttgccttctgaggatactccactgg

SEQ ID NO: 16402 - DNA, 422 bp, Homo sapiens
gcagagggactatgttgtgagcctgcgaaagaagtttgtgcggggactgtgggcagtgaacgcgttgggaacaatatggaaaactgggagccgccttggaatctacagggccggagagaccgaggggctcactaggctgaccatgctggacttgaacttctggcctcaagccatcctcccacctgagcctcccaaagtgctgggattacatgcatgagccaccacatgcagcctccctaaaatattgaacagctgttaataaatctgctgaggccagcataataaggtgatgggcaaaactaatgcaaggtttcagttgtgcaatttcaccattaacaaagctttctgctgaaatctggcttttcaaagggagagtatccagaaacagaagatgctgctctgagaggctcttcctaatagaa

SEQ ID NO: 16403 - DNA, 462 bp, Homo sapiens
  misc_feature (1)...(462): n = A,T,C or G
gggccannnnngatanacctaaaggcccgnntaaagngctagcaaancgccngnaatcngggnggacnacgcgtccgaaaatctcttgattgatacagtcctctttatttttcaagatcaagttatgagacctttaccagcagtcatacattcttttggaactttgcacaatagtcatatgttcttttagaactttacacttctattctttattgccctgtattataattgcttgtatgcctgactcctctacatgactgtatggtttgaaccaaagtgtacgggatgtcgcacagtgtctaatagtgtcacacaacaagtaataggtattcagtaagtgagttaagatgaaatagtaacatgaaagagtgctttgaaagcagttttttaaagagtttctgttctgctaattggaagccattttttaaataaacatgacgtgtggtgttgtctttaaaagan

SEQ ID NO: 16404 - DNA, 451 bp, Homo sapiens
  misc_feature (1)...(451): n = A,T,C or G
aatagacaccngtcgaacgcccttcggaacncccggggcgacccacgcgtccgcggacgcgtggggcggattttcctgaatattaatccctgccctacccttgttagttattttaggagacagtctcaagcactaaaaagtggctaattcaatgtatggggtatagcggccaaatagcacatcctccaacgttaaaagacagtggatcatgaaaagtgctgttttgtcctttgagaaagaaataattgtttgagcgcagagtaaaataaggctccttcatgtggcgtattgggccatagcctataattggttagaacctcctattttaattggaattctggatctttcggactgaggccttctcaaactttactctaagtctccaagaatacagaaaatgcttttccgcggcacgaatcagactcatctacacagcaggatgaatgatgtt

SEQ ID NO: 16405 - DNA, 416 bp, Homo sapiens
cataaacctaactttttcttaactttttgatatttctagtctatgtgtttcatctgcaggttttttcaaattgttgaaatctctgaaaaattttattgaaaaaaaatccatatatgtaagtggacccacacatttcaaacctgtgttcaagggtcagctgtgtaaataattttcctcaaaattaaagtggaaaaggagagttactactagtagaaagtagaactgtacccttgggcaggggtgtgtgtgtgtagttaaagatcaatttaacttaaaaggtcttggttagagaataaaactggcccttattagctttaatttacatgaaaaatgaaaaattttaggccaggcacagtggctcaggcctgtaatcccttaactttgggagaccaaggggagtggatcacttgaggtca

SEQ ID NO: 16406 - DNA, 420 bp, Homo sapiens
cgaaaggggaaggaaaagaaggaagaacaggtcatcatcctcggacctcaagtggctgaaagagagaatgtatttggtgtctgccatatctttgcatccttcaatgacacttttgtccatgtcactgatctttctggcaaggaaaccatctgccgtgtgactggtgggatgaaggtaaaggcagaccgagatgaatcctcaccatatgctgctatgttggctgcccaggatgtggcccagaggtgcaaggagctgggtatcaccgccctacacatcaaactccgggccacaggaggaaataggaccaagacccctggacctggggcccagtcggccctcagagcccttgcccgctcgggtatgaagatcgggcggattgaggatgtcacccccatcccctctgacagcactcgcaggaag

SEQ ID NO: 16407 - DNA, 482 bp, Homo sapiens
  misc_feature (1)...(482): n = A,T,C or G
cggattgacgctgtagnaccgttgacggaccttccgggtcgacccacgcgtccgcggacgcgtgggcatttttcttgctgtcttgggcatcaaaacaggtgccatggtaacctgacactctcaggagacattaagatagaaggggctgttcttcagtggttcccattgattctccccatatctttttgctctcaggctctggccgtctcttcctgagccttaactgtgtctgccgttagtcctcctctccactcattgcaaacattattctatatgtttggtggggacatcagctatctgcgcttgtcagaattgtctattaataggggcaatgtgttagaacctccaagtattcaattatttctggatacgtgagatcttactgtatgtaaatctcaacatttaggtacttaagtattaccttgcaaactgtacgtgatttgcttctcaggacagacagactggattttaaatgaggccag

SEQ ID NO: 16408 - DNA, 416 bp, Homo sapiens
  misc_feature (1)...(416): n = A,T,C or G
tatcacttgagcactcattggacacaagaggtcaactgttttgtcatttgtgtagtaagaacaaaattaagtgtgtggcattaaagaaataacactgtctggccgggatcggtggctcacgcctgtaatcccagcactttgggaggccgaggcgggcatatcacgaggtcaggagttcgagaccagcctgaccaacatgatgaaaccctgtctctactaaaaatacaaaaattagccaggcatggtggtgcacacctgtagtcccagctgctcaggaggctgaggcaggagaatcgctcgaacccgggaggtggaggttgcagtgagctgagatggcgccactgcattccaggcctggngggtgacagagcaagactcagtctcnnnnnnnnnnnnnnnnnnnanaaaaaaaaaag

SEQ ID NO: 16409 - DNA, 420 bp, Homo sapiens
  misc_feature (1)...(420): n = A,T,C or G
cccacgcgtccgatttactgcagcattgtttgtagtggtaaaaatgggcaaacagagtgaatttccatcaatatatgaacgactgaattggaaaacccataacctagaatattaggcagctttgaaaagctgttaattcataccaaccaacctaaagtaactactgttctgtgttaacaaagaaatacatatgacatggctttgtttttgtaacacaaaccccatacagatgtgtgcatgtttgcatatgattatctgagcataacaaaggctacagaaggatacacagcacatgctctattgcagagtgaaatgggcggctggaagttgcccaacacatcttanacatccaactttttttttttttttttttatgagagggagttttgttttgtcacccaaaccagagggcaggggctg

SEQ ID NO: 16410 - DNA, 418 bp, Homo sapiens
cggacgcgtgggggctctcctccgcgcccccactcgcgctgcgatgacgcgctcactgttcaagggaaacttttggagtgcagacatcctcaccaccatcggctatgacaacattatccaacatctgaacaatggccgcaagaactgcaaagagtttgaagactttctaaaagaaagggcagcaattgaagagaggtatggcaaagatctgctcaacctctctaggaagaagccgtgtggacagtctgaaatcaacaccctgaagcgggcccttgaagtcttcaagcagcaagtagacaatgtggcacaatgtcacattcagcttgcacagagtttaagagaagaggccacgaagatggaagaattcagggaaaagcaaaaactacaacgaaaaaagacagagctcataatggatgct

SEQ ID NO: 16411 - DNA, 420 bp, Homo sapiens
tcgtcggggtttcctgcttcaacagcgcttggacggaacccggcgctcgttccccaccccggacggccgcccatagccagccctccgacacctcttcaccgtaccctcggactgacccaaagtccccgccgccgatccagcgccgtgcagtcaccggcgccgccgccgcctctccttagtcgccgtcatgacgaccgcatgcacctcgcaggtgcgccagaactaccaccaggactcataggccgccatcaaccgccagatcaacctggagctctacgcctcctacgtgtacctgtccatgtcttactactttgaccgcgatgatgtggctttgaagaactctgccaaatactttcttcaccaatctcatgaggagagggaacatgctgagaaactgatgaagctgcagaaccaacgagg

SEQ ID NO: 16412 - DNA, 404 bp, Homo sapiens
atgttactaaggagaccatagacttagatctcatgcttgtatagtttggttaatttcatttagatctacaatcatgagctatatcaatatatattatctttctgatcagccttcagatacttaccatggaggtctgataaagaccttaattgtcttgttggtggtcttcatgatcctccttctggtgttcatacccttatataatcccctccccttgagtgtgggcaggtcctgtgacttgcttctaaccaatagattatggcaatggtaatgggatattattcccaggattacattacttcatcttgccagtagacttgctgtcattccgtttgctggttttggaaaatgcagctgccacaaatcatacatgaatcagatagccataaggaacggaatgctgg

SEQ ID NO: 16413 - DNA, 410 bp, Homo sapiens
  misc_feature (1)...(410): n = A,T,C or G
cggagcgcgagcagtatctgggtgggcaccatggctgggatcaccaccatcgaggcggtgaagcgcaagatccaggttctgcagcagcaggcagatgatgcagaggagcgagctgagcgcctccagcgagaagttgagggagaaaggcgggcccgggaacaggctgaggctgaggtggcctccttgaaccgtaggatccagctggttgaagaagagctggaccgtgctcaggagcgcctggccactgccctgcaaaagctggaagaagctgaaaaagctgctgatgagagtgagagaggtatgaaggttattgaaaaccgggccttataagatgaagaaaagatggaactccaggaaatccaactcanagaagctaagcacattgcagaagaggcagataggaagtatgg

SEQ ID NO: 16414 - DNA, 419 bp, Homo sapiens
  misc_feature (1)...(419): n = A,T,C or G
ttcccttccttaggaggctcctcaggaggagcgcccccgctgctccccagcagctcctcctcctcggcgcttacttcctcgatcaggtagtcggtgatattcttcaagatcgggttttgcgagggcaggctctgatgggaggaagagaagcaagtaaggcagagaagaccttcagaggaggtaacctgagactttccacaagtgaaagagcagcgaggggacaggagttcaccggacataaatggcaccttttgcccccttgaaaaaaaaaaaaaaaaaaaaaaaaaaaaaaaaaaaaaaaaaaaaaaaaaaaaaaaaaaaaaannnggggggggggctttttaaaaaatccttggggggggcccattttccccggggggagaaaaaatattttttttttttttgggggggggaaataa

SEQ ID NO: 16415 - DNA, 414 bp, Homo sapiens
  misc_feature (1)...(414): n = A,T,C or G
cccacgcgtccgggtatctccatcaaggcttctgcaaatatggacctcatgagggctgacatgggaggagctgcaactatatgctcagccatcgtgtctgctgcaaagcttaatttgcccattaatattataggtctggcccctctttgtgaaaatatgcccagcggcaaggccaacaagccgggggatgttgttagagccaaaaacgggaagaccatccaggttgataacactgatgctgaggggaggctcatactggctgatgcgctctgttacgcacacacgtttaacccgaaggtcatcctcaatgccgccaccttaacaggtgccatggatgtagctttgggatcaggtgccactggggtctttaccaattcatcctggctctggaacaaactcttcgaggccagcatn

SEQ ID NO: 16416 - DNA, 410 bp, Homo sapiens
cggacgcgtggggtgatctggacagctatctccacttccaaactagaaaaggaggaagaggaagatgatggagatttgcctgtggtggcagagtttgtggatgagcggccagaagaggtaaagcagatggaggcctttcgttccagtgccaaatggaatcttctgggaggccacaacgaagacctaccctcaaacagacattttcgtcacgataccccggattcatctcctaggagggtccgtcatggtaccccagatccatctcctaggaaggaccgtcatgacaccctggatccatctcctaggagggcccgtcatgacaccccagatccttctcccctcagaggggctcgtcatgactcagacacatctcctcccaggaggatccgtcatgactcctcagacacttc

SEQ ID NO: 16417 - DNA, 426 bp, Homo sapiens
cccacgcgtccggtgttgtgtacctgtggtcccagctactcaggaggctgaagtgggaggagcacctgagcccaggaggtagacgaggctacagtgagctgtgattgcaccactgcactccagcctgggtgatgggagtgagaccctgtttaaaacaaacagacaaaaaaacctgtggattgaagggtaaaggatggagtatttaaaaagtactgtgacagaacaaagtactgtaagtactagagttgagtgtggatggaaacacagaacctgtaaatcaagtgtttcatttacgtgctcaactcctactgaattttagcaattaaaacatgaaaactgaaatattggttaacaaatgaaaatagaatttaaagacctgaacttcttttatgatctttaatgattatttgttctaatctttgactg

SEQ ID NO: 16418 - DNA, 425 bp, Homo sapiens
gcgatggtgttggaaagcactatggtgtgtgtggactttattgagtatatgcggaatggagacttcttacccaccaggctgcaggcccagcaggatgctgtcaacatagtttgtcattcaaagacccgcagcaaccctgagaacaacgtgggccttatcacactggctaatgactgtgaagtgctgaccacactcaccccagacactggccgtatcctgtccaagctacatactgtccaacccaagggcaagatcaccttctgcacgggcatccgcgtggcccatctggctctgaagcaccgacaaggcaagaatcacaagatgcgcatcattgcctttgtgggaagcccagtggaggacaatgagaaggatctggtgaaactggctaaacgcctcaagaaggagaaagtaaatgttgacattat

SEQ ID NO: 16419 - DNA, 414 bp, Homo sapiens
tttattgcagtggtctaaaaccgagtttgcgttatctctgaggtatgcctgtactctgattccgaggtaaaggaaggttaactggcagaacttcactgatacttttgttaggtaaacacacatctgtccccaggataattaacacaacgacagagaagggaggaagaaaaagagttagtagagagctagaaggggctggcaaaaggggaaagaataatgtgagatcatgaggcagaaacacatccatcccatggaggacctgtgtgtaagggcaggtggcccttaaagcagctttctttattttaataaagtatatttctctgcactcatagagacaatacagaaaaacattaagaatgacacacacacgtgtgcgcacacatatgcacccagaatcagagatcactgcttccc

SEQ ID NO: 16420 - DNA, 414 bp, Homo sapiens
cggacgcgtgggcggacgcgtgggcgcggcgtgagaagccatgagcagcaaagtctctcgcgacaccctgtacgaggcggtgcgggaagtcctgcacgggaaccagcgcaagcgccgcaagttcctggagacggtggagttgcagatcagcttgaagaactatgatccccagaaggacaagcgcttctcgggcaccgtcaggcttaagtccactccccgccctaagttctctgtgtgtgtcctgggggaccagcagcactgtgacgaggctaatgccgtggatatcctccacatgtacattgttgcgctgttaaaactcaacaagaataataaactggtcatgatgctgtccaagatatttgatgcgtttttggccttagagtctctgatcttgcagatttcatttattctttt

SEQ ID NO: 16421 - DNA, 388 bp, Homo sapiens
  misc_feature (1)...(388): n = A,T,C or G
tcggactctagtcacccatagcacctgcccgcctgcctgtcctccagcaggaagtagcaagtccccaggcgggaaccatgtctcaggctgcaaaggcctcggcctcggccacagtggcggtgaacccagggcctgacaccaaggggaagggggccccacctgcaggaacatcccctagtcccggcactaccctggccccaacaaccgtgcctattaccagcgccaaggcggcggaactgcctcctgggaactacaggctggtggtcttcgaactggaaaacttccagggccgtcgagcagaattctcgggggagtgctcaaatctggcagaccgtggcttcgaccgtgtgcgcagcatcattgtctccgcgggaccctgggtcgcctn

SEQ ID NO: 16422 - DNA, 390 bp, Homo sapiens
cccacgcgtccgaatcttcctaggaacaacatatgacgcactctcccctgaactctacacaacatattttgtcaccaagaccctacttctaacctccctgttcttatgaattcgaacagcatacccccgattccgctacgaccaactcatacacctcctatgaaaaaacttcctaccactcaccctagcattacttatatgataaaaaaaaaaaaaaaaaaaaaaacccaaaaaaaaggggggggccgttttaaagaatccttgggggggccaaagtttaccggggctggcaaggttttatttttttccttttggggggccgatttaaaacctccttggggattttggggagggaccttttttttgggggggggacaaaatggaccaacc

SEQ ID NO: 16423 - DNA, 396 bp, Homo sapiens
gctccgcagcagcctcctttctaacttgaccctcttcagacccttttcagcatggctgtcctgaatccagggactttgggaatttatcttcagcttttcttcctctctatcgtgtgtcagccgactttcatcaacagcgttcttccaatctcagcagcccttcccagtctggatcataacaagcgaggtggccacaaagcatgctgcctgctgacgcctcctccaccaccactgttcccaccaccattcttcagaggtggccgaagtccgcttctctccccagacatgaagaatctcatgctggaactggcgacctcgcagtccccgtgcatgcaaggctcgctaggctcccctgggcctcccggcccccagggtccaccggggcttcctggcaag

SEQ ID NO: 16424 - DNA, 389 bp, Homo sapiens
ctccaggccagactcctttcagctaaaggggagatctggatggcatctacttcgtatgactattgcagagtgcccatggaagacggggataagcgctgtaagcttctgctggggataggaattctggtgctcctgatcatcgtgattctgggggtgcccttgattatcttcaccatcaaggccaacagcgaggcctgccgggacggccttcgggcagtgatggagtgtcgcaatgtcacccatctcctgcaacaagagctgaccgaggcccagaagggctttcaggatgtggaggcccaggccgccacctgcaaccacactgtgatggccctaatggcttccctggatgcagagaaggcccaaggacaaaagaaagtggaggagcttga

SEQ ID NO: 16425 - DNA, 158 bp, Homo sapiens
  misc_feature (1)...(158): n = A,T,C or G
aaagtgntnnatgctggnctacgacatcaccaacgagaagtccttcgacaacatccggaactggattcgcaacattgaggagcacgcctctgcagacgtcgaaaagatgatactcgggaacaagtgtgatgtgaatgacaagagacaagtttgcgacg

SEQ ID NO: 16426 - DNA, 390 bp, Homo sapiens
cccacgcgtccgggagtaccactctcccctcccacaaacttcaactcctccatggatggggcgacacggggagaacatacaaactctgccttcggtcatttcactcaacagctcggcccagctctgaaacttgggaaggtgagggattcaggggaggtcagaggatcccacttcctgagcatgggccatcactgccagtcaggggctgggggctgagccctcacccccccctcccctactgttctcatggggttggcctcgtgtttgctatgccaactagtagaaccttctttcctaatccccttatcttcatggaaatggactgactttatgcctatgaagtccccaggagctacactgatactgagaaaaccaggctctttggggcta

SEQ ID NO: 16427 - DNA, 398 bp, Homo sapiens
cccacgcgtccggcggctcacacccttctcaacgcaggacatcctctgcggctcctggggtttgaagagcaaacgtttttccctgggctcagtgcgttttgtcccaacttcatctgtttctgaaatgttctcacttggcagtgtctagtcaaggagtcggctttcaggttcctgacggccaggcagggatgctaaggtgtggctcagccgtcactgtctgtgtcactgcagtggtgcggtcctcaggcttttctgcctgtctttcccccttccttctcacctgacagcgagggagagggaagcctcttagggctggaagccaccacgctggccctctccttccccgaacacagcacacggtcaactccgcgggacacgaggacacgggacggcatctt

SEQ ID NO: 16428 - DNA, 404 bp, Homo sapiens
aagtcgacaggccgggatccaaggtgaacaagaatgaggtggtggaggctgtgaccattgtagagacaccacccatggtggttgtgggcattgtgggctacgtggaaacccctcgaggcctccggaccttcaagactgtctttgctgagcacatcagtgatgaatgcaagaggcgtttctataagaattggcataaatctaagaagaaggcctttaccaagtactgcaagaaatggcaggatgaggatggcaagaagcagctggagaaggacttcagcagcatgaagaagtactgccaagtcatccgtgtcattgcccacacccagatgcgcctgcttcctctgcgccagaagaaggcccacctgatggagatccaggtgaacggaggcactgtggccgagaag

SEQ ID NO: 16429 - DNA, 424 bp, Homo sapiens
gcgccgagctctactgactcccaacagcgcccaagaataatatggccataagtggagtccctgtgctaggatttttcatcatagctgtgctgatgagcgctcaggaatcatgggctatcaaagaagaacatgtgatcatccaggccgagttctatctgaatcctgaccaatcaggcgagtttatgtttgactttgatggtgatgagattttccatgtggatatggcaaagaaggagacggtctggcggcttgaagaatttggacgatttgccagctttgaggctcaaggtgcattggccaacatagctgtggacaaagccaacctggaaatcatgacaaagcgctccaactatactccgatcaccaatgtacctccagaggtaactgtgctcacgaacagccctgtggaactgagagagcccac

SEQ ID NO: 16430 - DNA, 414 bp, Homo sapiens
  misc_feature (1)...(414): n = A,T,C or G
ggcgacggaggaggaggatggaggcggnggtgttcgtcttctctctcctcgattgttgcgcgctcatcttcctctcggtctacttcataattacattgtctgatttagaatgtgattacattaatgctagatcatgttgctcaaaattaaacaagtgggtaattccagaattgattggccataccattgtcactgtattactgctcatgtcattgcactggttcatcttccttctcaacttacctgttgccacttggaatatatatcgatacattatggtgccgagtggtaacatgggagtgtttgatccaacagaaatacacaatcgagggcagctgaagtcacacatgaaagaagccatgatcaagcttggnttccacttgctctgcttcttcatgtatctttatagnatga

SEQ ID NO: 16431 - DNA, 385 bp, Homo sapiens
cccagcgggagggggccaagtatgtgtcccacggcgccacaggaaaggggaacgatcaggtccggtttgagctcagctgctactcactggccccccagataaaggtcattgctccctggaggatgcctgaattctacaaccggttcaagggccgcaatgacctgatggagtacgcaaagcaacatgggattcccatcccggtcactcccaagaacccgtggagcatggatgagaacctcatgcacatcagctacgaggctggaatcctggagaaccccaagaaccaagcgcctccaggtctctacacgaagacccaggacccagccaaagcccccaacacccctgacattctcgagatcgagttcaaaaaaggggtccctgtgaa

SEQ ID NO: 16432 - DNA, 424 bp, Homo sapiens
  misc_feature (1)...(424): n = A,T,C or G
cgatgaggctgctgtcatttgtggagttggctctatttgctgtcactcaagcagaggaaggagccaggcttttggcttccaaatcactgctgaacagatacgccgtggagggacgagacctgaccttgcagtacaacatctacaatgttggctcaagtgctgcattagacgtggaactatctgatgattccttccctccagaagactttggcattgtgtctggaatgctcaatgtcaaatgggaccggattgcccctgctagcaatgtctcccacactgtggtcctgcgccctctcaaggctggttatttcaacttcacctcagcaacaattacttaccctgcccangangatgggccccgtgtgattggctctaccagtgcacctggacagggaggaatccttggctcancgggaagttgacn

SEQ ID NO: 16433 - DNA, 415 bp, Homo sapiens
tcaaggaagagatggaggctttccccgaaaagttctagctgagtggcagaagtgagaatttgtaaacttatgtacaatgtacgtgtaaataaatggattgaatttcagtttgtcatcaggccgcgctcccgttttgtttttaaggggttaatcttttgagcttccttctcagcagtgtgtgggccaaaaggctcatactgacccacctggtgaaggagaggcaaagtgggcagtatatacttcctcatttggctgtgagtgatagagggatgaaatgggatttttgttgggattgaagactgtaatctaagagtttcaatcagacatgactgtaacgtgcatcctcaattagaattaaagtgatatataaatatgaaaaaaaaaaaaaaggggcggccgttttaaagaatccctg

SEQ ID NO: 16434 - DNA, 482 bp, Homo sapiens
  misc_feature (1)...(482): n = A,T,C or G
gtgccgagcgggttaaaaactgagtagctcggagacccgctcganactgagatcgtcgacgccnncgntgacacctgggggncctgaagacagatgactcttctacaaaagtggacattaaggagacctacgaggtggaagccagcactttctgcttccctgaatctgtggatgtgggtggtgcatcaccccacagcaagaccatcagtgagagcgagctgagcgccagcgccactgagctgctgcaggactacatgctgacgctgcgcaccaagctgtcatcacaggagatccagcagtttgcagcactgctgcacgagtaccgcaatggggcctctatccacgagttctgcatcaacctgcggcagctctacggggacagccgcaagttcctgctgcttggtctgaggcccttcatccctgagaaggacagccagcacttcgagaacttcctggagaccattggcgtgaaggatggccgg

SEQ ID NO: 16435 - DNA, 417 bp, Homo sapiens
  misc_feature (1)...(417): n = A,T,C or G
attgatgttctccaactgctataagtacaaccctcctgaccatgaggtggtggccatggcccgcaagctccaggatgtgttcgaaatgcgctttgccaagatgccggacgagcctgaggagccagtggtggccgtgtcctccccggcagtgccccctcccaccaaggttgtggccccgccctcatccagcgacagcagcagcgatagctcctcggacagtgacagttcgactgatgactctgaggaggagcgagcccagcggctggctgagctccaggagcagctcaaagccgtgcacgagcagcttgcagccctctctcagccccagcagaacaaaccaaagaaaaaggagaaagacaagaaggaaaagaaaaaagaaaagcccaaaaggaaagaggaagtggaagagaataanaa

SEQ ID NO: 16436 - DNA, 417 bp, Homo sapiens
  misc_feature (1)...(417): n = A,T,C or G
gaccatgtgatgcacctgctccagaatgctgaccccctgaaggtgtacccgccactgaaggggagcttcccggagaacctgagacaccttaagaacaccatggagaccatagactggaaggtctttgagagctggatgcaccattggctcctgtttgaaatgagcaggcactccttggagcaaaagcccactgacgctccaccgaaagagtcactggaactggaggacccgtcttctgggctgggtgtgaccaagcaggatctgggcccagtccccatgtgagagcagcagaggcggtcttcaacatcctgccagccccacacagctacagctttcttgctcccttcagcccccagcccctcccccatctcccaccctgtacctcatcccatgagaccctggtgcctggctctttcn

SEQ ID NO: 16437 - DNA, 417 bp, Homo sapiens
accgcctcttactcacatggggtcgggggtctgttagttcattctggaccagcccacctatctacatgtccttttatacagactttgagacttgccatcagcacagcacacagcagcacccttcccctgaggccggaggggaggggagaagcgtcagcaggattggcgcgtgggaaagctcttgagctgggcactggccccccggacgagggggctgtgtgttcacacacacacacacacacacactcacacacgcacacacaggctctcgccccaggatagaagctgcacagaaactggtgcgtggttttttttcttgcgagcttgtgatatctcaaaccccttccagtcaaggaactagaatcagcatcgagagttggaagccttctcacatgcttccccagagcgaagaggctg

SEQ ID NO: 16438 - DNA, 420 bp, Homo sapiens
cggacgcgtgggacagaacgaggaattccgccccttcattcgaaggctcccagagtttaaattttggcatgcggctaccaagggcatccttgtggctatggtctgtactttcttcgacgctttcaacgtcccggtgttctggccgattctggtgatgtacttcatcatgctcttctgtatcacgatgaagaggcaaatcaagcacatgattaagtaccggtacatcccgttcacacatgggaagagaaggtacagaggcaaggaggatgccggcaaggccttcgccagctagaagcgggactgaggctgcctcacgtgttgcaagaacagttttgagccattgttaacaatgccttttttcttcacataaagtagttgattacgagggagtcaaattttctttttaaaaaggagcttcaa

SEQ ID NO: 16439 - DNA, 418 bp, Homo sapiens
  misc_feature (1)...(418): n = A,T,C or G
caaatgaataagaagctacagacgggttttacagaaccagaagtgttacagatattctgtgatacctgtgaagctgttgcaaggttgcatcagtgtaagactccaataattcaccgggatctgaaggtagaaaatattttgttgaatgatggtgggaactatgtactttgtgactttggcagtgccactaataaatttcttaatcctcaaaaagatggagttaatgtagtagaagaagaaattaaaaagtatacaactctgtcatacagagcccctgaaatgatcaacctttatggagggaaacccatcaccaccaaggctgatatctgggcactgggatgtctactctataaactttgtttcttcactcttccttttggngagagtcaggttgctatctgtgatggcaacttcaccn

SEQ ID NO: 16440 - DNA, 418 bp, Homo sapiens
ggagagggacctccttgtgtctggcagagacctgtggacctggcctccccactcccagctctcttgcactgcaggccctggggccagcccgcacacaccatgcctcctgtctcaacactgacagctgtgcctagccccggatgccagcacctgccaggtgccgccccggggcaagggccccagcagccctatggtgaccgccacactgtgccttaatgtctgccgggggcccaggctgtgctgtccctgcagcacgcctccttgcagggatctgagccaccctccccgcacagccctgcaccccgcccctagggttggcagcctcagttggcccctggcagaggaacaaggacacagacattccctcagtgtggggggcaggggacacagggagaggatggttgtccttgagagggcc

SEQ ID NO: 16441 - DNA, 426 bp, Homo sapiens
  misc_feature (1)...(426): n = A,T,C or G
gcgactaaacggggcaggggtccccgtcccccggagcatgtactaaacggggcaggggtccccgtcccccggagcatgaactaaacggggcaggggtccccgtgccccggagcatgaactaaacggggcaggggtccccgtcccccggagcatgaactaaacggggcaggggtccccgacccccggagcatgaactaaacggggcaggggtccccgtctcccggagcatgaactagacggggcaggggtccccgtcctgccggcgcgcaacagatgcaggccccatagctcatatgctaacggttgcataaacgagtgacagctgagtctggctcaaggacaaccccgtgaggcctggaaggtgtggctgccacacactcactgtctgacacatgccatggttgatgacctgtccgctgctggtgn

SEQ ID NO: 16442 - DNA, 416 bp, Homo sapiens
  misc_feature (1)...(416): n = A,T,C or G
ctgttacctgcatatcttcttaaaagaaatagctgttattaatgcctttttgttttccattgagtgtacactactgaataagtgtaggagttttatgtttaccatgtgagtcctgcaacactaaagatattttgaatatcagtcatgatggcaatttctgtataaaagagccttaaatggaacattgttttgagatcaaactccccaccctcacaaaaatggccacgttgcaataaaaattgtggcatattacnnaaaaaaaaaaaaaaaaaaaaaaaaaannggggggggcccttttaaaaaatcccttggggggcccaattttaccgggggtgggaaagttttttttttttcctttagggggggcgtttttaaaccccccttgggttttttggaaaaaaacctttttttggggg

SEQ ID NO: 16443 - DNA, 402 bp, Homo sapiens
aaggtgcacatgaatggcctgcgatatgctctatacattatggggcctgcccttacgagaggctgccaccaggtgcttattatgctatgctgcgaagtaatagaacggatcttgacttgatgatgaaggaagcttactttggcgaagtggatatcatggacgacctccctactgagaaatattagcgctaacgtcacaggcaggctatacaagtgtggggtgatcaaccacacagttgacctgcgccgtatgaaaacggaaaatggcagaataatctgcttccatcccgccagtttggtttcattgtactgacaacctcagctggcatcatggaccatgaagaagcaagacgaaaacacacaggagggaaaatcctgggattctttttctagggatgtaata

SEQ ID NO: 16444 - DNA, 407 bp, Homo sapiens
acgagctgagggcacggtcgcgggcggccagccctgttcgcttctacggcgaggaggggcgcgattgctccttgctgccgctccgcttagtggccgcgtccattccgcgcggcgtcccgattttaggggtagggagaagtgtcagcttcaggcatcgcgaggcgtggcggccccatggccccgctgggaggcgccccgcggctggtactgctgttcagcggcaagaggaaatccgggaaggacttcgtgaccgaggcgctgcagagcagacttggagctgatgtctgtgctgtcctccggctctctggtccactcaaggaacagtatgctcatgagcatggcttgaacttccagagactcctggacaccagcacctacaaggaggcctttcggaaggacatgatccg

SEQ ID NO: 16445 - DNA, 472 bp, Homo sapiens
  misc_feature (1)...(472): n = A,T,C or G
gccgcctcccaatgagcgctatcattgacggcattgaaaaccgcgncgacccacgcgtccgcggacgcgtgggcggacgcgtgggcggacgcgtgggtgatcatcaactttactgtgccttggacctaaagaggcgcctgcgtccccagcaaatagagaaaaacctcagcgacctgattgacctggtccccagtctatgtgaggatctcctgtcttctgttgaccagccactgaaaattgccagagacaaggtggtgggacaggattaccttttgtgtgactacaacatagatggggactcctataggtcaccatggagcaacaaggatgaccctcccttggaggatggggccatgccgtcagcttggctgaaaaagctggaggaggtagcccacaatgcctttgaccactatcgagacctgtattttgaaggcggcgtatcatctgtctacctctgggataggatcatggg

SEQ ID NO: 16446 - DNA, 420 bp, Homo sapiens
cccacgcgtgcgaacgcagccatggctcgtggtcccaataagcatctgaagcgggtggcagctccaaagcattggatgctggataaatagaccggtgtgtttgctcctcgtccatccaccggtccccacaagttgagagagtgtctccccctcatcattttcctgaggaacagacttaagtatgccctgacaggagatgaagtaaagaagatttgcatgcagcggttcattaaaatcgatggcaaggtccgaactgatataacctaccctgctggattcatggatgtcatcagcattgacaagacgggagagaatttccgtctgatctatgacaccaagggtcgctttgctgtacatcgtattacacctgaggaggccaagtacaagttgtgcaaagtgagaaagatctttgtgggcaca

SEQ ID NO: 16447 - DNA, 415 bp, Homo sapiens
cccacgcgtccgcccacgcgtccgcccacgcgtccgcccacgcgtccgcccacgcgtccgcccacgcgtccgtgaaaccacagctgtggaacgcggtggacgaggagatctgcctggctgaatgtgacatctacagctataacccagacttggactcagatcccttcggggaggatggtagcctctggtccttcaactacttcttctacaacaagcggctcaagcgaatcgtcttctttagctgccgttccatcagtggctccacctacacaccctcagaggcaggcaacgagctggacatggagctgggggaggaggaggtggaggaagaaagcagaagcaggggcagtggggccgaggagaccagcaccatggaggaggacagggtcccagtgatctgtatttgatgaggagg

SEQ ID NO: 16448 - DNA, 404 bp, Homo sapiens
  misc_feature (1)...(404): n = A,T,C or G
cccagctctgtcatgagcccagctggctccagccaggctgaggagcagcagtacctggacaagctgaagcagctgtcgaagtacatcgagcccctgcgccgcatgatcaacaagatcgacaagaacgaagacagaaaaaaggacctgagtaagatgaagagccttctggacattctgacagacccctcgaagcggtgtcccctgaagaccttgcaaaagtgtgagatcgccctggagaaactcaagaatgacatggcggtgcccactcccccaccgcccccggtgccaccgaccaaacagcagtacctatgccagccgctcctggatgccgtcctggccaacatccgctcacctgtcttcaaccattccctgtaccgcacattcgttccagccatgaccgccan

SEQ ID NO: 16449 - DNA, 386 bp, Homo sapiens
cccacgcgtccggttatttaaccactcctctgaacatggacatttctgttatttccaaatgcctactgttgcatataatgcttcagtgactaaacttgtgcatataccttccccataggaacaaacgtatctgtgagataaagtcccaaaataaattttctgtgtataaaaggcatatgcaggctgggctcaccagctcactcctataatcccagcactttgggagtccaaggggaggatggcttgagcccaggagttcaagaccagcctggacaacatagtgagacccagtctctacaaaaagtaaataaaaaaatagctgggcatggaggcacatgcctgtagtcccagctactcagaaggctgaggtcagaggattgtttaag

SEQ ID NO: 16450 - DNA, 401 bp, Homo sapiens
gtcatggcgccccgagccctcctcctgctgctttcgggaggcctggccctgaccgagacctgggcctgctcccactccatgaggtatttctacaccgtcgcgtcccggcccggccgcggagagccccgcttcatctcattgggctacgaggacgacacgcagttcgtgcggctcgacagcgacgccgcgagtccgagaggggagccgcgggctccgtgggtggagcaggaggggtcggagtattgggaccggaagacacagaattacaagcgccaggcacaggctgaccgagtgagcctgcggaacctgctcggatactacaaccagagcgaggacgggtctcacaccctccagatgatgtctggctgcgacactgggccgacgggcgccttctgcgagct

SEQ ID NO: 16451 - DNA, 307 bp, Homo sapiens
agatcatttctatagtgtgttactagagaagtttctctgaacgtgtagagcaccgaaaaccacgaggaagagaggtagcgttttctcctgagcgtgaagccggctttctggcgttgcttggctgcaactgccgtcagccattgatgatcgttcttctctccgtattggggagtgagagggagagaacgcggtctgagtaaaaaaaaaaaaaaggggcggccgttctaaaggatccctgggggggcccaactttacgcgggcttgcaaggtattacctttttccctattaggggccgtattaaaaaca

SEQ ID NO: 16452 - DNA, 401 bp, Homo sapiens
  misc_feature (1)...(401): n = A,T,C or G
gatagacaagcaggaagagcactggacttggagtcagggaatgacaatggataaaagtgagctggtacagaaagccaaactcgctgagcaggctgagcgctatgatgatatggctgcagccatgaaggcagtcacagaacaggggcatgaactctccaacgaagagagaaatctgctctctgttgcctacaagaatgtggtaggcgcccgccgctcttcctggcgtgtcatctccagcattgagcagaaaacagagaggaatgagaagaagcagcagatgggcaaagagtaccgtgagaagatagaggcagaactgcaggacatctgcaatgatgttctggagctgttggacaaatatcttattcccaatgctacacaaccagaaagtaaggtgttctacn

SEQ ID NO: 16453 - DNA, 401 bp, Homo sapiens
cccacgcgtccgtgatgacactgtggcacccatctctacgttcggcaaggcctacacactgaccccgttactagccaataaccgagagaagcggggcctcggcttggacgggaagctcaggcacgaagacacgaacttgggctctagcaccctgttgagggaaggagccaaccgcgagatcctggggatcattgtttcctacggagcgaaagagaagctggtggtgtgttggggcggggacgtggccggggaactgcccttcaccctaatgcaccgcaagcgcagagaggaacccccgcatcgtgaagtgccagagaacgagacgccggtagataccagactcatagaactctgcacaaatgatgacgacattggatttgaggactatgctcgccagatac

SEQ ID NO: 16454 - DNA, 405 bp, Homo sapiens
tggccgtcatggcgccccgaaccctcgtgctgctactttctgttgctctggccctgacccagacctgggcgggctctcactccatgaggtatggcttcacatccgtgtcccggcccggccgcggggagccccgcttcatcgcagtgggctacgtggacgacacgcagttcgtgcggttcgacagcgacgccgcgagccagaggatggagccgcgggcgccgtggatagagcaggagggtccggagtattgggacggggagacacggaaagtgaaggcccactcacagactcaccgagtggacctggggaccctgcgcggctactacaaccagagcgaggccggttctcacaccgtccacaggatgtatggctgcgacgtggggtcggactggcgcttcctccgcg

SEQ ID NO: 16455 - DNA, 385 bp, Homo sapiens
cccacgcgtccgtcttggtatgggcgacattgttggactgatagataaagtcaacgagttgaagttggatgacaatgaagcacttatagagaagttgaaacatggtcagtttacgttgcgagacatgtatgagcaatttcaaaatatcatgaaaatgggccccttcagtcagatcttggggatgatccctggttttgggacagattttatgagcaaaggaaatgaacaggagtcaatggcaaggctaaagaaattaatgacaataatggatagtatgaatgatcaagaactagacagtacggattgtgccaaagtttttagtaaacaaccaggaagaatccaaagagtagcaagaggatcgggtgtatcaacaagagatgttcaa

SEQ ID NO: 16456 - DNA, 407 bp, Homo sapiens
gaaagaatgtgttcacagtggcagagatgggacctccaaaaagaggactgtttcaggtaattaatgcatcacatttgagatgatggaagatcattcaaggggattcatagggtcttactggagaaaaccttatgtttctctttccccctgcaaccactgcatctttctgtattcaatgagcggctgggagtaggagtccctggtgcaattggagagaaggagacagcagaatgctcctgggagccagggctgagctgagagggcgtgcataccagccagcatccctgcctgaaatgccccaggggtggctggctgcacttggaagaaagtccaaactttttctgatggccaccaagctgtccctgagctaaccactgcctaccactctgcctttgctgctctgcggc

SEQ ID NO: 16457 - DNA, 366 bp, Homo sapiens
attcgaaacacaatacactgcctcgttctctcagttagcagctgggcagcagcgcaccattcatcatttaggcttgtggtttgttgtttactctaccaatgttatgtcgaaactgcattgtaaaaagagaagaaaatggcaggttttccaggtccacggaaaggtttggcctgacgctggagtgcggtgatgaacttacgtgacaatgattgtattcctcagtagcactttaaacgccgaagacagccctgcagcaagcctgcacacgggcttgggtgggttcctttggagaagatgtggctggaacacaaacaatctttgaaagaaataaatgtgcacacagaacactaaaaaaaaaaaaaaagg

SEQ ID NO: 16458 - DNA, 415 bp, Homo sapiens
  misc_feature (1)...(415): n = A,T,C or G
gaggaagcggnggaagtacaaggacaagaggaggatgaagaagaagaagaggaagaagctgaagaagaagggcaaggagaaggcggaagcacagcagagcatcatccgcaaggtggtggaccctgagacggggcgcaccaggcttattaagggagatggcgaggtcctagaggaaatcgtaaccaaagaacgacacagagagatcaacaagcaagccacccgaggggactgcctggccttccagatgcgagctgggttgcttccctgagggcccccgctggccaaggcctgtggacgacgctggcggcccagcctgggcaggtttcagggtgccagtgggaagcctgatgggtgctggtggcctttcccccgtggattggtctctggcccagcccagtctcttctcatgggcagg

SEQ ID NO: 16459 - DNA, 422 bp, Homo sapiens
  misc_feature (1)...(422): n = A,T,C or G
aagaggcgagaacgacccccggaccgaccaaagcccgcgcgccgctgcatcccgcgtccagcacctacgtcccgctgccgtcgccgccgccaccatgcccaagagaaaggctgaaggggatgctaagggagataaagcaaaggtgaaggacgaaccacagagaagatccgcgaggttgtctgctaaacctgctcctccaaagccagagcccaagcctaaaaaggcccctgcaaagaagggagagaaggtacccaaagggaaaaagggaaaagctgatgctggcaaggaggggaataaccctgcagaaaatggagatgccaaaacagaccaggcacagaaagctgaaggtgctggagatgccaagtgaagtgtgtgcatttttgataactgtgtacttctggtgactgtacagtttgaaatan

SEQ ID NO: 16460 - DNA, 432 bp, Homo sapiens
ccctgttcttcggtttcacagaagggcacctgctggatcagtattgagaaatgttaatgggaaattgtaggttgcatgagcagcatagctgaagatcatttatgttacctccctcctcggtggccagcgcagaaaccaattcccagcagccaggacctgacgtacctgtgctggaaatgaagacggagacccaagcagaggacactgagcccgatcctggtgaatccaaaggggagcccaggtctgaggtgggtgccgctccctaggaatgcattgactgcgtatcgcaactttacccacgtgtcctcgggcgaaggttggaaccctgccatgggtatccctgactttagttaaaatattctgtttgaatgtgggttcggggtttggtgtataggaaattgattgaaaacagcttggtttttcatttttaaa

SEQ ID NO: 16461 - DNA, 477 bp, Homo sapiens
  misc_feature (1)...(477): n = A,T,C or G
tggtccagggaggctaaaagctagntngctngantnacnctganatctcgcangaccacgcgnnngnggangngtgggctggtgnaantggtggntnatattgnagnggaaaacaacctgggagagggcggcattgtcaagatcaagggaatatcatcgcctctctctatgactacaaccccaacctggcaacctacatgaagccagagatgtgggggaagtgcctggactgcatcaatgagctgatggatatcctgcttgcaaatcccaacattcttgttggagagaatattctggaagagagtgagaacctgcacaacgctgaccagccactgcgtgtccgtggctgcatcctaactctggtggaacgaatggatgaagaacttaccaaaataatgcaaaatactgaccctcactcccaagagtacgtggagcacttgaaggatgaggcccaggtgtgtgccatcatcgagcgtg

SEQ ID NO: 16462 - DNA, 497 bp, Homo sapiens
  misc_feature (1)...(497): n = A,T,C or G
aggtnccgaggaggggcttttnnggcttgatnangtcggtgcgnantcnccnaactgatagtcttcgcannanncacgcgnncgantgaagatcctggnggcgccatgggccgccgccccgcccgntgntaccggtattgtaagaacaagccgtacccaaagtctcgcttctgccgaggtgtccctgatgccaagattcgcatttttgacctggggcggaaaaaggcaaaagtggatgagtttccgctttgtggccacatggtgtcagatgaatatgagcagctgtcctctgaagccctggaggctgcccgaatttgtgccaataagtacatggtaaaaagttgtggcaaagatggcttccatatccgggtgcggctccaccccttccacgtcatccgcatcaacaagatgttgtcctgtgctggggctgacaggctccaaacaggcatgcgaggtgcctttggaaagccccagggcactgtggccagggttcacat

SEQ ID NO: 16463 - DNA, 388 bp, Homo sapiens
  misc_feature (1)...(388): n = A,T,C or G
cccacgcgtccggtgagaatggcgtcctgcggccgttgtccggagcatggcggacccccagagctgctcacggatgattgatatccagaccaggatggctgggcgagcattggagcttctttatctgccagagaataagccctgttacctgctggatattggctgtggcactgggctgagtggaagttatctgtcagatgaagggcactattgggtgggcctggatatcagccctgccatgctggatgaggctgtggaccgagagatagagggagacctgctgctgggggatatgggccagggcatcccattcaagccaggcacatttgatggttgcatcagcatttctgctgtgcagtggctctgtaatgctaacaagaagtctgan

SEQ ID NO: 16464 - DNA, 437 bp, Homo sapiens
cccacgcgtccgcccacgcgtccgaaaccatccaggtggattgtttcgattcttataaaagggtcgatatttgggcctttggacttgttttgtgggaagtggccaggcggatggtgagcaatggtatagtggaggattacaagccaccgttctacgatgtggttcccaatgacccaagttttgaagatatgaggaaggtagtctgtgtggatcaacaaaggccaaacatacccaacagatggttctcagacccgacattaacctctctggccaagctaatgaaagaatgctggtatcaaaatccatccgcaagactcacagcactgcgtatcaaaaagactttgaccaaaattgataattccctcgacaaattgaaaactgactgttgacattttcatagtgtcaagaaggaagatttgacgttgttgtcattgtcc

SEQ ID NO: 16465 - DNA, 503 bp, Homo sapiens
  misc_feature (1)...(503): n = A,T,C or G
ggatggtnnnnnnntttgatnatcgtgacncgntcgcaaanccgcatcgacccatgcgtccgcggcgacctgtgtgggtgcgcaactggcaggacaaagatgtgtatcgtcggttatcacgccagctagtggccagtcgtcaccctgactggcgtgcagaccgcatagtcaaacaggcacaatatgagtttgagttcgcagcacagcagttcatgctggagacactgcgttatgtcaaggcagagcggccccggcacctctggggcttctacctctttcctgactgctacaatcatgattatgtgcagaactgggagagctacacaggccggtgccctgatgttgaggtggcccgcaatgaccagctggcctggctgtgggctgagagcacggccctcttcccgtctgtctacctggacgagacacttgcttcctcccgccatggccgcaactttgtgagctttcgtgttcaggaggcccttcgtgtggctcgcacccaccat

SEQ ID NO: 16466 - DNA, 415 bp, Homo sapiens
cccacgcgtccgcccacgcgttctcggacgcgtgggcctttatgcgggtcatggcgccccgaaccctcatcctgctgctctcgggagccctggccctgaccgagacctgggcctgctcccactccatgaaggatttcttcacatccgagtcccggtctggccgcggagagccccgcttcatctcagagggctacgtggacgacacgcagttcgtgcggttcgacagcgacgccgcgagtccgagaggggagccgcgggcgccgtgggtggagcaggaggggccggagtattgggaccgggagacacagaagtacaagcgccaggcacagactgaccgagtgagcctgcggaacctgcgcggctactacaaccagagcgaggccgggtctcacaccctccagtggatgtgtggctg

SEQ ID NO: 16467 - DNA, 429 bp, Homo sapiens
  misc_feature (1)...(429): n = A,T,C or G
cttagagaaattaatttaatattagaatttctattatgaatcatgtgaaagcatgacattcgttcacaatagcactattttaaataaattataagctttaaggtacgaagtatttaatagatctaatcaaatatgttgattcatggctataataaagcaggagcaattataaaatcttcaatcaattgaacttttacaaaaccacttgagaatttcatgagcactttaaaatctgaactttcaaagcttgctattaaatcatttagaatgtttacatttactaaggtgtgctgggtcatgtaaaatattagacactaatattttcatagaaattaggctggagaaagaaagaagaaatggttttcttaaatacctacaaaaaagntactggggtatctatgagttatcatcttagctgtgttaaaaatg

SEQ ID NO: 16468 - DNA, 406 bp, Homo sapiens
gccacactagtgtgtctgatcagtgacttctacccgggagctgtgacagtggcctggaaggcagatggcagccccgtcaaggcgggagtggagaccaccaaaccctccaaacagagcaacaacaagtacgcggccagcagctacctgagcctgacgcccgagcagtggaagtcccacagaagctacagctgccaggtcacgcatgaagggagcaccgtggagaagacagtggcccctacagaatgttcataggttcccaactctaaccccacccacgggagcctggagctgcaggatcccaggggaggggtctctctccccatcccaagtcatccagcccttctccctgcactcatgaaaccccaataaatatcctcattgacaaccagaaaaaaaaaaaaaaagg

SEQ ID NO: 16469 - DNA, 475 bp, Homo sapiens
  misc_feature (1)...(475): n = A,T,C or G
tccctaatgaagctctctacggaaggtcatgcggaaccgcgncgacccacgcgtncgcctgtaccagcgagggccgcggagatgggcgcctctgtgtgcgctaccacctcgaactttgacagcgacaagaagtggggcttctgcccggaccaaggatacagtttgttcctcgtggcggcgcatgagttcggccacgcgctgggcttagatcattcctcagtgccggaggcgctcatgtaccctatgtaccgcttcactgaggggccccccttgcataaggacgacgtgaatggcatccggcacctctatggtcctcgccctgaacctgagccacggcctccaaccaccaccacaccgcagcccacggctcccccgacggtctgccccaccggaccccccactgtccacccctcagagcgccccacagctggccccacaggtcccccctcagctggccccacaggtccccccactg

SEQ ID NO: 16470 - DNA, 390 bp, Homo sapiens
  misc_feature (1)...(390): n = A,T,C or G
cttgagaatctgctagtcacatggaatcaagtggggctggaactgaagcctcattcctcagctgagtgcaacttctgcaggaggccactgcattttgaagtgatgagtgaaagagagaagtcctatttctcaggcttgagcaagttggtatctgctcaggcctgagcatgacctcaattatttcacttaaccccaggccattatcatatccagatggtcttcagagttgtctttatatgtgaattaagttatattaaattttaatctatagtaaaaacatagtcctggaaataaaaaaaaaaaaaaaaaaaaaaaaaaaaaaaaaaaaataaaaaaaaaaagggggggggcctttttaaagattccctggggggccccattcttcccggn

SEQ ID NO: 16471 - DNA, 409 bp, Homo sapiens
ggggctggaagtggaagcgcagcggcagaaggagagggagagagaaagagagagaggctaattaaaaaaggatactccgagggaagagagcaagggcggtgcgccgccaaggaccaactagcggcggagcttcgatcttgcctaggcgcggagagctcccaacctgggctggaaccttgcccagcacaggtggctgctacaccccatgtaaaaagcggaaaataaaaatgaagattttccagcgcaagatgcggtactggttgcttccaccttttttggcaattgtttatttctgcaccattgtccaaggtcaagtggctccacccacaaggttaagatataatgtaatatctcatgacagtatacagatttcatggaaggctccaagagggaaatttggtggtacaaa

SEQ ID NO: 16472 - DNA, 489 bp, Homo sapiens
  misc_feature (1)...(489): n = A,T,C or G
ggggccggagagatttaaacctcagtgancttcgtananncgntggatcctgnaggtttgtaaagcncgggannnnggncggacgcgngggncctnggctttgacagagngcaagacgaagacttgcaaaagggcgcagcnggaacgcaacatagagaccatcatcaacaccttccaccaatactctgtgaagctggggcacccagacaccctgaaccagggggaattcaaagagctggtgcgaaaagatctgcaaaattttctcaagaaggagaataagaatgaaaaggtcatagaacacatcatggaggacctggacacaaatgcagacaagcagctgagcttcgaggagttcatcatgctgatggcgaggctaacctgggcctcccacgagaagatgcacgagggtgacgagggccctggccaccaccataagccaggcctcggggagggcaccccctaaaccacagtggccaagatcacagtgcg

SEQ ID NO: 16473 - DNA, 433 bp, Homo sapiens
  misc_feature (1)...(433): n = A,T,C or G
ctccggggaagacggtaaccatctcctgcacccgcagcagcggcagctttgccagctactatgtgcagcggtaccagcagcgcccgggcagttcccccaccgctgtgatctctcagggtaaccaaagaccctctggggtccctgatcggttctctggctccatcgacagctcctccaactctgcctccctcaccatctcttgactgaaaaactgaggacgaggctgactactactgtcagtcttatgataacgacaatgtggtgttcggcggcgggaccaagctgaccgtcctaggtcagcccaaggctgccccctcggtcactctgttcccgccctcctctgaggagcttcaagccaacaaggccacactggtgtgtctcataagtgacttctacccgggagccgtgacagtggcctggaaggcagatagcn

SEQ ID NO: 16474 - DNA, 411 bp, Homo sapiens
aggaggctgcgtttggatgccgctctcacaaccattgctttacattgagctccatagagacagcgcctgagcgagtgagagccgaacgggcactgggccactctgtgcctcgctgaggaaaaataactaatcatgggcgaaggagatcctaacaagccgcgaggcaaaatgtcatcatatgcattttttgtgcagacttgtcgggaggagcataagaagaagctcccagatgcttcagtcaacttctcagagttttctaagatgtgctcagagaggtggaagaccatgtctgctattgagaaaggacaatttgaagatatggcacaagcggacagggcccgttatgaaagagaaatgaatacctatatccctcccagaggggagacaaaaaagaagttcaaggatgccaat

SEQ ID NO: 16475 - DNA, 447 bp, Homo sapiens
  misc_feature (1)...(447): n = A,T,C or G
cccacgcgtncgtgtgtcttaatttctttactacccagcactgcaaagaatctatccccttgtgtacaatgagtgtgcgggaagtctggacatgctcatcccaggtgggagtaactaagcccaggactttactagataagtaacaggtgtgaaatgttgtcaaaaggctcttctctttgacagctgaattgagccataaaatttttaaataatttatgcaagtctgcaggagcccagatatagattgttaatccaaggctcagaatgcacaagtgttgatttcacagtgaaatgcttaaaagttaatttttgtattgcgtctcttatctttggcctaagtgaaaatattcagattgccccacaagtccagattgatttagtaaactattacccatggacttaacatgttctgtttgctcttaagtagaatcagaagttatcgtaatn

SEQ ID NO: 16476 - DNA, 411 bp, Homo sapiens
cccacgcgtccgcggacgcgtgggcgagccggggccatggcgaagctgctgagctgcgtcctaggcccccggctctacaaaatctaccgggagagggactctgaaagggccccggccagcgtccctgagacgccaacggcagtcactgccccccattccagctcctgggatacgtactatcagccccgtgccctggagaaacatgctgacagcatcctggcactggcttcagtattctggtccatctcttattactcctctcccttcgccttcttctacttgtacaggaaaggttacttgagtttgtccaaagtggtgccgccttctcactatgctgggacattgctgctacttctggcaggtgtggcctgcctccgaggcattggccgctggaccaacccccagtaccgg

SEQ ID NO: 16477 - DNA, 419 bp, Homo sapiens
cagaaaacttctagtaagtatctgcaacctgctaggctctgttccagaatctacacatttctactcacataaagagaatcctcataaagttaggattgttgttactaccttcaactgagcttaaaagacagcctcatcaagggaatgggataactgagccagtctaggacagtggtcaccttccacaggccacacactggaaagtgctaatgctactttaatagcaaacctctggatctaggagagagagcaattaattgcacaaaccaggagttaaaaccataaaaaaaacctatgcatctgtaatagtaaataacactcacgtactctggcaacatctagggtagtatcagaattatgtaaatggacatgacagggaaaaatcgtaggtttttttagtctaatccaacccaggaaag

SEQ ID NO: 16478 - DNA, 410 bp, Homo sapiens
  misc_feature (1)...(410): n = A,T,C or G
cagcaggccgctatccaggcctatgtggacatggtgaggcaggtccagcgctcacggttcatcgtggtggtgggaggaggctcggctggagtggagatggcagcagagattaaaacagaatatcctgagaaagaggtcactctcattcactcccaagtggccctggctgacaaggagctcctgccctccgtccggcaggaagtgaaggagatcctcctccggaagggcgtgcagctgctgctgagtgagcgggtgagcaatctggaggagctgcctctcaatgagtatcgagagtacatcaaagtgcagacggacaaaggcacagaggtggccaccaacctggtgattctctgcaccggcatcaagatcaacagctccgcctaccgcanagcatttgagagcagactagc

SEQ ID NO: 16479 - DNA, 417 bp, Homo sapiens
  misc_feature (1)...(417): n = A,T,C or G
ctaatacttgcataagaacgtatatgtgcattcatgcgtgtatacatattggccatcattaccttttgtctgttgtgtataatacagattcttgttcttctgtgtcatcaccaacatgtaatattgtcagaatttttattttttgtcagtttattggttttaaaactcttatcttgtgttcactttgcattccttgcaggttgaggatgttttgttttctggtcttagtctcattcttccttctttttcctgttgagcttgttcttttctttttgatttgtagggtatattaggatggtgcaaaagtaattgaggtttttgcatcgttgaaatttgtcatttgatactggaataccctcttaaaccttcttaaatgtggntatgttatacatcattttaatgggcatttctcacttt

SEQ ID NO: 16480 - DNA, 421 bp, Homo sapiens
  misc_feature (1)...(421): n = A,T,C or G
aggaatcaaggttgctgggttgtgataaatatatgttaaattttgtgagaaactgctagtttttcaaaatactgtatcattttgctcccccaccatcagcatataggtgttttgattgccctgtatccttgccaacatttcatagtatctattttactttaaattttagtcattttagtaggtgttgtacctcgtggtttgtttgtatttctctaatgactaatcagtaatggtgtggaatattgggatatcttttcatgtccctatttgccatttatatctcttaggtgaagagactgctcataacttttgtcctttttataattagctcttttaattattgagtttaagagttctttgtgtatactggatctaacttctttatgagataatgtgttttgcanatgtttctctacccatt

SEQ ID NO: 16481 - DNA, 407 bp, Homo sapiens
gccaagatggcgccgagcgccgggtgttcagcgttttttctgccgctagagccttcctgggccccgcgctggggtggcgggggcgggtctgagtggtaccccggaggagaccctttgaaggtcccttgtggggactggaaagaggacggccttccgtctgttacccaggctgttgtgcagtggcaccatcttggctcactgcagcctccaactcctcagttcaagcgatcctcctgcctcatcctcctaagtagctgggatgacaggttcacaccaccagggtctccgtctctccaccgggggcttcatccttccagggaggagaagagggactccagaatggctgaggagaagaagctgaagcttatcaacactgtgctgccctcggagtccatgaaagtgggggg

SEQ ID NO: 16482 - DNA, 441 bp, Homo sapiens
  misc_feature (1)...(441): n = A,T,C or G
cccacgcgtccgctcagggcttcattttctgtcctccaccatcatggggtcaaccgccatcctcgccctcctcctggctgctctccaaggagtctgtgccgagttccagctggtgcagtctggagcagaggtgaaaaagcccggggagtctctgaagatctcctgtaagggttctggatacagctttaccaattactggatcggctgggtgcgccagatgcccgggaaaggcctggagtggatggggaccatctatcctggtgactctgataccagatacagcccgtccttccaaggccaggtcaccatctcagccgacaagtccatcagcaccgcctacctgcagtggagcagcctgaaggcctcggacaccgccatgtattactgtgcgagacgaaactggngatcggagtactttgactactggggccagggaaccct

SEQ ID NO: 16483 - DNA, 394 bp, Homo sapiens
gctgtccccacagggctgtgtcacctgctccccaatcatccagccgcctgcaaccccccttcagcccccaccccacattgctgtccagtacccccaagcccccagggacgtcagaaccacggagctgctcctccatctcgacggcgctgcctcaggtcaacgaggaccttgtgtctcttccacaccagttgccagaggccagtgagcccccccagagcccctctgagaagaggaaaaagacctttgtgggagagccgcagaggctgggctcagagacgcgcctcccacagcacatcagggaggccactgcggctccccacgggaagaggaagaggaagaagaagaagcgcccggaggacacagctgccagcgccctgcaggaggggcagacaca

SEQ ID NO: 16484 - DNA, 413 bp, Homo sapiens
  misc_feature (1)...(413): n = A,T,C or G
cccacgcgtccgcccacgcgtccgcgctaccgcagcgtcatctcagacatctttgacggctccattctcagcctcgtgcagtgtctcacctgtgaccgggtatccaccacagtggaaacgttccaggacttatcactgcccattcctggaaaggaggacctggccaagctccattcagccatctaccagaatgtgccggccaagccaggcgcctgtggggacagctatgccgcccagggctggctggccttcattgtggagtacatccgacggtttgtggtatcctgtacccccagctggttttgggggcctgtcgtcaccctggaagactgccttgctgcttgagaaatggnnnnnnnnnnnnnnnnnncnnnnnnncnnnnnnnancnnnnnnnnannnnnnnnnncnnan

SEQ ID NO: 16485 - DNA, 407 bp, Homo sapiens
caactgtgttcactagcaacctcaaacagacaccatggtgcatctgactcctgaggagaagtctgccgttactgccctgtggggcaaggtgaacgtggatgaagttggtggtgaggccctgggcaggctgctggtggtctacccttggacccagaggttctttgagtcctttggggatctgtccactcctgatgctgttatgggcaaccctaaggtgaaggctcatggcaagaaagtgctcggtgcctttagtgatggcctggctcacctggacaacctcaagggcacctttgccacactgagtgagctgcactgtgacaagctgcacgtggatcctgagaacttcaggctcctgggcaacgtgctggtctgtgtgctcgcccatcactttggcaaagaattcaccc

SEQ ID NO: 16486 - DNA, 414 bp, Homo sapiens
ccctggggtaacagtccccacttctacccgaggtatttcaataaaagctatgtggttgagctcaggcctctcgtgcctggtgtcagagaaggcagagcccacagtaggtgcagggtgcaaggccctgggagggcactggccagggaaggtggtatagatggccctcagattgcggggtcccgagcagctccccactctgcccgtacaccttccctggctccagcctcattctctctttagtttaactatgcaaagagaggaggttgagagtgttctggcagctggagctcttttacttgtccttcctgccctacgaaggggccacctgtgtcggagcagcagtgtccatgtttatggagatcagaggcgtccccactgtgtggctggactgtactctgctgtccggatagcccg

SEQ ID NO: 16487 - DNA, 389 bp, Homo sapiens
  misc_feature (1)...(389): n = A,T,C or G
tgggagtcagccaagatttaaagggatgccagcgattgctcttttcaaaacctaccagtcccactgtgggtggagaaataaatggtctttctcctcanaaaaaaaaaaaaaaaaaaaaaaaaaaaaaaaaaaaaaaaaaaaaaaaaaaaaaaaaaagggggggggccctttaaaaaaaactcctggggggccaaaataatcccgggaaaaaaaaaaataatttttttctttttagagggacaaaaaaaaaaactgtgggggttttttaaaaaaaaacctcttttttggggggggaaaaaacggcccaacccccccaaaaaaaattaactctctaaaaaaaaaaaaaaatttttaaaaggaaaagggggcaaaacaacccgcatctcttt

SEQ ID NO: 16488 - DNA, 408 bp, Homo sapiens
  misc_feature (1)...(408): n = A,T,C or G
caaatggcggatgacgccggtgcagcgggggggcccgggggccctggtggccctgggatggggaaccgcggtggcttccgcggaggtttcggcagtggcatccggggccggggtcgcggccgtggacggggccggggccgaggccgcggagctcgcggaggcaaggccgaggataaggagtggatgcccgtcaccaagttgggccgcttggtcaaggacatgaagatcaagtccctggaggagatctatctcttctccctgcctattaaggaatcagagatcattgatttcttcctgggggcctctctcaaggatgaggttttgaagattatgccagtgcagaagcagacccgtgccggccagcgcaccaggttcaaggcatttgttgctatcggngactacaatggg

SEQ ID NO: 16489 - DNA, 393 bp, Homo sapiens
cctgaccttgggctacagctgaccgttttttgtggtgtactccgtgtcatcatgtccgtcctgacgccgctgctgctgcggggcttgacaggctcggcccggcggctcccagtgccgcgcgccaagatccattcgttgccgccggaggggaagcttgggatcatggaattggccgttgggcttacctcctgcttcgtgaccttcctcctgccagcgggctggatcctgtcacacctggagacctacaggaggccagagtgaaggggtccgttctgtccctcacactgtgacctgaccagccccaccggcccatcctggtcatgttactgcatttgtggccggcctcccctggatcatgtcattcaattccagtcacctcttctgcaatcatgg

SEQ ID NO: 16490 - DNA, 454 bp, Homo sapiens
  misc_feature (1)...(454): n = A,T,C or G
attgagcgccaattgataccgctcggaaccgcnnccgaaaacccggggggacccacgcgtccgggagacagaagccttcatcttatcttttctgcaaattggcctccctctttcactactcctcgtcagcacagaccctttacaggggtcgggctgggggatgtaaggtctttcctttcccacgaggccatatctcaggctgtctcagatgggggaaacctggacaatacccaggcttttctgggcaggggtccctgcggccttccgcagtgcattgcgtctctggttaatcgagaatggagaatggcgatggcttttaccaagcatactgcctgcaaacatattgttaacaaggcacatcctgcacagccctaaatccattaaaccttgattcaatatagcacatgtttctgggggcacagagttggggctaaatttacagattaacagcatc

SEQ ID NO: 16491 - DNA, 400 bp, Homo sapiens
  misc_feature (1)...(400): n = A,T,C or G
atatggtttctcgtgtagcttcttctgctacccgtggtagcagaattgtcttctaaagatgtccatgccctaatctctgaagtctatgactgctaccttacatggcaaaagagattttgcagatgtcattaaagttatagaccttaaaatagggagattatcttggattatccaggtggatctaatctaatcacatgagtttttaaaagcagaaaactttctcccactggtgtgagagagatgtgatagaaatggaagtcaaagagatttaaagcataagaggaagtgacctattgtttgttgctcaatgagggacacacagaatgcatgagaagtaatgtgggcagcctctaggagcaaagaccagcccccagctggcagctagcaaaaaaaacagagn

SEQ ID NO: 16492 - DNA, 396 bp, Homo sapiens
  misc_feature (1)...(396): n = A,T,C or G
aaggccttaggtgttgcatgtctatgcttgaggaacttttccaaatgtgtgtgtctgcatgtgtgtttgtacatagaagtcatagatgcagaagtggttctgctggtacgatttgattcctgttggaatgtttaaattacactaagtgtactactttatataatcaatgaaattgctagacatgttttagcaggacttttctaggaaagacttatgtataattgctttttaaaatgcagtgctttactttaaactaaggggaactttgcggaggtgaaaacctttgctgggttttctgttcaataaagttttactatgaatgaccctgtnnnaaaaaaaaaaaaaaaaaaaaaaaaannagggggggggcctttttaaagatcccttggggggccc

SEQ ID NO: 16493 - DNA, 422 bp, Homo sapiens
  misc_feature (1)...(422): n = A,T,C or G
caactgtctcctgcgttgctgggaagttctggaaggaagcatgtgctccagaggttgggattcgtgtctggctctggaattgctactgctgcctctgtcactcctggtgaccagcattcaaggtcacttggtacatatgaccgtggtctccggcagcaacgtgactctgaacatctctgagagcctgcctgagaactacaaacaactaacctggttttatactttcgaccagaagattgtagaatgggattccagaaaatctaagtactttgaatccaaatttaaaggcagggtcagacttgatcctcagagtggtgcactgtacatctctaaggtccagaaacaggacaacagcacctacatcatgagggtgttgaanaagactgggaatgagcaagaatggaagatcaagctgcaagtgt

SEQ ID NO: 16494 - DNA, 488 bp, Homo sapiens
  misc_feature (1)...(488): n = A,T,C or G
agggccgggngggcttttngctgattacctccgantnncncctgnnaccttcgnananacgnnnggaattnnngggnngacccacgcggncgngggcctattntgccatctcagnnntcctgggccctgcttcctgtgtaccactgaggggcagctgggccaggagctgtgcccggtgcctgcagccttcataagcacacacgtccattccctactaaggcccagacctcctggtatctgccccgggctccctcatcccacctccatccggagttgcccaagatgcatgtccagcataggcaggattgctcggtggtgagaaggttaggtccggctcagactgaataagaagagataaaatttgccttaaaacttacctggcagtggctttgctgcacggtctgaaaccacctgttcccaccctcttgaccgaaatttccttgtgacacagagaagggcaaaggtctgagcccagagttgacggaggg

SEQ ID NO: 16495 - DNA, 443 bp, Homo sapiens
  misc_feature (1)...(443): n = A,T,C or G
actgcgcagaccagacttcgctcgtactcgtgcgcctcgcttcgcttttcctccgcaaccatgtctgacaaacccgatatggctgagatcgagaaattcgataagtcgaaactgaagaagacagagacgcaagagaaaaatccactgccttccaaagaaacgattgaacaggagaagcaagcaggcgaatcgtaatgaggcgtgcgccgccaatatgcactgtacattccacaagcattgccttcttattttacttcttttagctggttaactttgtaagatgcaaagaggttggatcaagtttaaatgactgtgctgcccctttcacatcaaagaactactgacaacgaaggccgcgcctgcctttcccatctgtctatctatctggctggcagggaaggaaagaacttgcatgttggtgaaggaagaagtgnggtggaagn

SEQ ID NO: 16496 - DNA, 425 bp, Homo sapiens
cactcacgccctaataaggagcgaatcctacatccaccaaggcgggcgctctggccctcccttccttaagcccagtcctgtgtcctctgaaagaggtgcagtcactcacacctgcttgcgctcaccatcaataaaagtaatttcacccgaaaaaaaaaaaaaaaggggcggccgccctttttttttttttttggggtctttttttttttggggaggaaaagctcttgcgggaaaaaaaaaaaaaaacaaatggggggcgcccccgttttttttgtgaaggagagttactttttgcgcgcgacataatggaccaaacaacctcccaatattaaagtctttaagggcacacgaaactttttaagggaataaggggccaacccccccgctcatcctttttatttaaaaaccttttattttgggggggg

SEQ ID NO: 16497 - DNA, 419 bp, Homo sapiens
gcaatattactgaaccattgtttttttctctataaagattatttctttggtttgagttgcaagctgatggtcctcgctgtgcccttcatttaatgtggacctttgagttgatcataaatcatttatttcagcttcaaaaggacagaagtcatacctgcaacaagaggtggctaggaagatcaaatgtgaatgaaggagtttcccaactatgagcccacacataaaccagaggtgtcttttactttattataatacataacaaacatatatttttccccctgggaactacattttagcaatatatttttcattattttctattcttctggacattatacactgattgcctttaagatcccttttgtgaagctttccttgctgcgatcgctcttctttccatccaactttttataaaaaaa

SEQ ID NO: 16498 - DNA, 425 bp, Homo sapiens
  misc_feature (1)...(425): n = A,T,C or G
acgacctacgcacacgagaacatgcctctcgcaaaggatctccttcatccctctccagaagaggagaagaggaaacacaagaagaaacgcctggtgcagagccccaattcctacttcatggatgtgaaatgcccaggatgctataaaatcaccacggtctttagccatgcacaaacggtagttttgtgtgttggctgctccactgtcctctgccagcctacaggaggaaaagcaaggcttacagaaggatgttccttcaggaggaagcagcactaaaagcactctgagtcaagatgagtgggaaaccatctcaataaacacattttggatnnnnnnnnnnnnnnnnnnnnnnnnaaaggggcggccgttttaaagaatccttgggggggcccaagttaacgcgggctgggaaggtatagtttttt

SEQ ID NO: 16499 - DNA, 488 bp, Homo sapiens
  misc_feature (1)...(488): n = A,T,C or G
agagttgacgctgtgngaccgtgcacgacctcccggaccgacccacgcgtccgcggacgcgtgggcggacgcgtgggtatttttttgtatttttagtagagacagggttttgccatgttggtcagactggactcgaactcctgaccttaagcgatccacccgcctcggtctcacgcctgtaatcccagcactttgggaggccgaggcaggcggatcacctgaggtcagaaattcaagacaagcctggccaacatggtgaaaccccgtctctacaaaagtacaaaattagcctggcgcgatggcgggtgctggtaatcccagctacttgggaggctgaggcaggagaattgcttgaaccttggaggtggaggcctcagtgaggagagaccacaccattgcactccagcttggatgacagagggagactccatctgacaccaaagacagactgagaggcgaggcccacaaaataatcacatcgggggcct

SEQ ID NO: 16500 - DNA, 420 bp, Homo sapiens
cagcgctctcgggacgtctccaccatggcctgggctctgctattcctcaccctcctcactcagggcacagggtcctgggcccagtctgccctgactcagcctgcctccgtgtctgggtctcctggtcagtcgatcaccatctcctgcactggaaccagcagtgacattggtgcttctaactatgtctcctggtaccaacaccacccggacaaagcccccaaactcattatttataatgtcagtgatcggccctcaggggtttctaatcgcttctctggctccaagtctggcaacacggcctccctgaccgtctctgggctccaggctgaggacgaggctgcttattattgcgcctcacataccaccggcatcacttatgtcttcggaggtgggacctgggtcaccgtcctatgtcagccc

SEQ ID NO: 16501 - DNA, 485 bp, Homo sapiens
  misc_feature (1)...(485): n = A,T,C or G
ggtttgacgctgtangacattgaacgacttgccggaccgacccacgcgtccgctccactggatttaggaatgaaaatcgagatctgcctcccactaagcttcaaatgaaagctaaacgaagccacctagtgatggaggctctaaaacacaatctacctctctcttgctgaagtctcaacaccttcctgctcaattctctgcatatctgaatttacttactcggagttgttcaaggtctggtggaggcggcgggaagtcaggctcctgaggttggaaggcttctctgaccttggccacagctcccaggatccgatatcctgagtccaggaagctcttttgcagtcctaaacacaagacatcctcactttcagctgggtgggtcagtgccccaaagcactgtctttgcagcagcagaactggttccatgaacaaaagctggatgtgaagctgccagtaaatatcacgggcagtgattgaagaagggg

SEQ ID NO: 16502 - DNA, 420 bp, Homo sapiens
caagttcaaatatgacgacgcagaaaggagattctacgagcagatgaacgggcctgtggcaggtgcctcccgccaggagaacggcgccagcgtgatcctccgtgacattgcgagagccagagagaacatccagaaatccctggctggaagctcaggccccggggcctccagcggcaccagcggagaccacggtgagctcgtcgtccggattgccagtctggaagtggagaaccagagtctgcgtggcgtggtacaggagctgcagcaggccatctccaagctggaggcccggctgaacgtgctggagaagagctcgcctggccaccgggccacggccccacagacccagcacgtatctcccatgcgccaagtggagcccccagccaagaagccagccacaccagcagaggatgacgagga

SEQ ID NO: 16503 - DNA, 495 bp, Homo sapiens
  misc_feature (1)...(495): n = A,T,C or G
gggccgggaggctaattcctatatctcgtanaacnnctnnnttcagttacctgngcagnaacgccccgnaannncnggnncgacccacgcggccggcgccatggctggcaaagcacacaggctgagcgctgaggagagggaccagctgctgccaaacctgagggctgnggggnggaangagctggaaggccgngatgccatcttcaagcagtttcatttcaaagacttcaacagggcctttgggttcatgacaagagtggccctgcaggctgagaaactggaccaccatcctgaatggtttaacgtgtacaacaaggtccacatcacgctgagcacccatgagtgtgccggcctttcagaacgggacataaacctggccagcttcatcgaacaagtagcagtgtccatgacatagaccctgcccttcctctttgaattcttccgggggaaagggtgactgaactgggagtccagggagggagctgaggagccctt

SEQ ID NO: 16504 - DNA, 397 bp, Homo sapiens
ctctgttatgatgttgatacaggaagagaattggctgttaagcaagttcaatttgaccccgatagtcctgagaccagcaaggaagtaaatgcacttgagtgtgaaattcagttgctgaaaaacttgctacatgagcgaattgttcagtattatggctgtttgagggatccccaggaaaaaacactttccatatttatggaatatatgccagggggttcaattaaggaccaattaaaagcatatggcgctcttactgagaatgtgactaggaaatacacccgtcagattctggagggtgtccattatttgcacagtaatatgattgtccatagagatatcaaaggcgcaaatatcctgcgagattcaacaggcaacgtcaaactaggagattttgggg

SEQ ID NO: 16505 - DNA, 406 bp, Homo sapiens
cccacgcgtccgtgatggaagagacctcatcagaggtggccgtcagctggcaggagcgcaggatggcagctgctcccccgggttgcacccccccagctctgctggacataagctggttaacagagagcctgggagctgggcagcctgtacctgtggagtgccggcaccgcctggaggtggctgggccaagcaaggggcctctgagcccagcatggatgcctgcctatgcctgccagcgccctacgcccctcacacaccacaacactggcctctccgaggctctggagatactggccgaggcagcaggctttgaaggcagtgagggccgcctcctcaccttctgcagagcagcctcggtgctcaaggcccttcccagccctgtcacaaccctgagccagctgcaggg

SEQ ID NO: 16506 - DNA, 404 bp, Homo sapiens
  misc_feature (1)...(404): n = A,T,C or G
cgggggcctcacttcattctcttccacgtcatttggtggtagtggcatgggcaacttcaaatcgatatcaacttcaactaaaatggttaatggcagaaaaatcactacaaagagaattgtcgagaacggtcaagaaagagtataagttgaagaagatggccagctaaagtccttaacaataaatggtaaggagcagctgctgcgcttggataacaagtaattcaacgcacgcacttaacagaaatgttaaactataacaagcaccatttgaggattaacaggaacatttttttgaagatttcaaacgaactcgactttcagtataattgtacctaaagtatttataaacagctcatcggagcctctatttgtcatagacttttgagttgattgttgggaccacn

SEQ ID NO: 16507 - DNA, 410 bp, Homo sapiens
  misc_feature (1)...(410): n = A,T,C or G
cgcctcggaggcgttcagctgcttcaagatgaagctgaacatctccttcccagccactggctgccagaaactcattgaagtggacgatgaacgcaaacttcgtactttctatgagaagcgtatggccacagaagttgctgctgacgctctgggtgaagaatggaagggttatgtggtccgaatcagtggtgggaacgacaaacaaggtttccccatgaagcagggtgtcttgacccatggccgtgtccgcctgctactgagtaaggggcattcctgttacagaccaaggagaactggagaaagaaagagaaaatcagttcgtggttgcattgtggatgcaaatctgagcgttctcaacttggttattgtaaaaaaaggagagaaggatattcctggactgactgatactn

SEQ ID NO: 16508 - DNA, 476 bp, Homo sapiens
  misc_feature (1)...(476): n = A,T,C or G
cgcgcctccccactgagcgccttggattgatggtcatgaanacccgcgtcgacccacgcgtncggagaaaattcacacgagcatcacttagcctagagaggtgattcttttcgttccttcaataagccaagcaggaattgtgagcaagcagaagacagggccaccatttcccgaggttggtcagacttttctctctctcttttggccttagtctcacttgcacgtttcttgccccagccagcgtgtctagtgaccaccacttagaaacttctcatcccagtctgcataaggggctggagtcaatatgtggttggcacgtagtgctctcagccagctcggtgcactctaaagagactcaggtggtcagcactcactcaatcctccacgtgctctgacaggctgggctttgactgggtatctgggcacttagtgagcttcttttcctataagctcacaattgcattgttctgactggt

SEQ ID NO: 16509 - DNA, 462 bp, Homo sapiens
  misc_feature (1)...(462): n = A,T,C or G
tccctatgagnttttctcaagggtcctcgaaccgcncgaacangcgggcgaggggccagctggctaatcctagctcccagcctgctgttacttcttcattcggcccatatggaggagcccggccctcagggtcggccctgtcctcctatgggggtcaggcagctgccgcttcttcgctcaactcctatggggctcagggttcctcccttgcctcctatgggaaccagccatcctcttacggcgcccaggctgcctcttcctatggggttcgagcaggtgcttcttcctacaacacccagggagcagcttcctccttaggctcctacggggctcaggcagcctcctatggggcccaggccgcagcctcctcactagcttaaggagcccaggcggctttatataatgcccagccctcggcctcttacaatgcccagtctgccccatatgctgtacagcaggctg

SEQ ID NO: 16510 - DNA, 446 bp, Homo sapiens
gccgtccatgagccctcataggtctgcgaccgcccggaatcgggcgaccacgcgtcggttagctttgatccccaccctatctcatcttgtattataatctccatatacccatggagagaccaggtggaggtaattgaatctgggggtggtttcacccatgctgttcttgtgatagtgaatgagttctcacgagatctaatggttttatgaggggctcttcccagctttgcctggacttctccttcctgcgccttgtgaaaaagggcattgcatccctttcaccttctcctataattgaagtttcctgaggccttcccagccatgctgaacttaagtaattaaacctttttcttttaaattactcagactctggtggttctttatagcagcgtgaaaatggactaatgaagttcccatttatgaatttttgcttttgttgcaattgc

SEQ ID NO: 16511 - DNA, 473 bp, Homo sapiens
  misc_feature (1)...(473): n = A,T,C or G
gccgctcccgatgagagccctcactgagggtcatgcaannccgcgtcgacccacgcgtgcgcaacaatcatttgtaagataatcagggaaatttgaacactgagtggataatgatgatattgtacttaaattagaagagtattatcatttagagacacataccaaaatatctacagattaaataatcgaatgccttggatttgcctcaaagtaatatagggtgagagaggagtagaagcatagattggttatgggttaaccattgttgaagtggatgatgggtatatggaattcattatactctatttttggatgtgtttgaaatgtcttataaaaaggagccttgcttatctaagacaataaaccacctcactaaattcataactgaatttagatgagtatatcagtatgatgagaactaaagagaaagccagaccccttncnaaaaaaaaaaaaagataaaaaaaaaaagg

SEQ ID NO: 16512 - DNA, 420 bp, Homo sapiens
  misc_feature (1)...(420): n = A,T,C or G
caaagccatcatccaggtgtctgctgccctcttcacgctctacaacaagaacattgaaactcacctcaaggaatttctggtggtggcctctgtcagcctcttgcagctgggccaggagactgacaagcttaaaaccagaaatcgagaatccatttctctgctcatgcgcttggtggtggaggagtcatccttcctgaccctggacatgctggagtcctgtttcccttatgtcctgcttcgaaatgcctatcgggaggtgtctcgggccttccacctaaactgaatgcctgccagtacccactgaagagccctttggaccttcctaaacccttgccatagtggaagctgtggtcactttcgcagggggtgggaatggnngtgngtcactaaggagagagggtcangagccagagttgatga

SEQ ID NO: 16513 - DNA, 404 bp, Homo sapiens
tacatctgtgatatttaaatgcatgtctgttttcaaggtcagtttccggaaacagtgaccctgagaaggcttcctcctgagtatgcataaacattcacagcttgcatgcgtgtgtgtgtgtgtgtgtgtgtgtgtgtgtgtgtgtgtgtgtatgtttgctcgcactgcataaaaacaattgcgacatccacataaataaaaggtagaggaatagttctcctccgactctgccgatctatacagagaatctttttattctggggaaaagctccttcagttcttgtgcatagataggtatatactttataagtcaaacaattaggctgggcgcagtagctcatgcgtgaaatcccacccctttgggaggccgagctgcgcagatcacttgagatcatgtgttagag

SEQ ID NO: 16514 - DNA, 420 bp, Homo sapiens
cggacgcgtgggcggacgcgtgggcacacacacacacttctgaaatatatgccgaaaattgacgtctttgacctcagggagagcacctgtccaggtctgcctaaaggaaatggctccagtgggtctaaacaaccacatcctatccatggataggtctagtcataacactttagagagaatgtcagagcaggagggaggcaagccgcctcttctcggccatcgactgcagatgatgaaagagcgggattcaactttgttttcttttcctgtggccccagtgaaacctcctgccctccctgcacgtctgtgtcttcatttctaaaatgggggtgatgctttcatattgacctcaccccatactacctcacagatgtgttgtgaggattaataaaattatgtctatggtattttcagcttctg

SEQ ID NO: 16515 - DNA, 418 bp, Homo sapiens
tctcaatttaatttttcatattcttgcaatgaaatggacttgaggaagctaagatcatagctagaaatacagataattccacagcacatctgtagcaaatttagcctattcctattctctagcctattccttaccacctgtaatcttgaccatataccttggagttgaatattgttttcatactgctgtggtttgaatgttccctccaacactcatgttgagacttaatccctaatgtggcaatactgaaaggtggggcctttgagatgtgattggatcgtaaggctgtgccttcattcatgggttaatggattaatgggttatcacaggaatgggactggtggctttataagaagaggaaaagagaactgagctagcatgcccagcccacagagagcctccactagagtgatgctaa

SEQ ID NO: 16516 - DNA, 411 bp, Homo sapiens
aggtgcctcagccatggcatggatccctctcttcctcggcgtccttgctttctgcacagattccgcggcctcctttgagctgactcaaccaccctccctgtccgtgtccccgggacagacagccaacatcacctgctccggagatagattgggagatatatatccttcatggtatcaacagaggccaggccagtcccctattttggtcatgtctcgatataacaagcggccctcagggatccctgagcgattctctggctccaactctggggacacagtcactctgaccatcagggaggcccaggctctcgatgaggctgactattactgtcaggcgtgggacagcagcacttcctatgtggtgttcggtggagggaccaagctgaccgtcctatgtcagcccaaggctgc

SEQ ID NO: 16517 - DNA, 411 bp, Homo sapiens
  misc_feature (1)...(411): n = A,T,C or G
agctctggccaggctgtgccagtgtgtcccggacgcatcactaaggaagagagagtttatttagtcaactggcccaaggcagcgaggcttctacagtcccacaccccatagccgcctgggctggggcttactgggggctgaaggttctggacatgaacaagggtcaggtagaagagaaaggcttcccctacaccccagcctcctgctgtcccctgaagcccaggactgcgttgtatgctttccatccactcaccttaccccatagcatcttgcggcccagaaaccagagccatttgtctcagaccctanatcaataatcacaaaccccaaaacgggagagagcagtgaaaacatgcatggctgtggacggnggaagggttgtggcgggtgttctgatgctgagaggacacc

SEQ ID NO: 16518 - DNA, 405 bp, Homo sapiens
cccacgcgtccggcccagccctgctgagaaatgtgcttctgcttctacagcaatggctgcaggagggccattgggcatgtcagggtttggccatgacccgaagagactcctggcgtccttcctactctgctctggccagaggtgccaggtgccacccagggctactgcctggctatctggcctggcctctgggctggggctggggctgggagcacacacgctgggacctatgtgtttgtgtggtcgttccaaactgccccagggctttgggggcggcacttggggtttctgggaatgacatcatctctgttccccatccccagtagcttacattcctgacttctgaatacagcacagctgagccccctgcagctcccatctccagctattcctaggcaaagagcg

SEQ ID NO: 16519 - DNA, 443 bp, Homo sapiens
  misc_feature (1)...(443): n = A,T,C or G
cctcgacgccacttgagttactgggaaaancncggncganccangcgnncgnaccactcgagtggatttggattacacacaaacatccttcccaccttacttttgtccttgagagcagnagcacaaatgttcaaggcactgattaggaatatgaccatgatctgtgacccttaggcatgcaagaaattcctcagcctttaagactcagctcatatgtcaacacctctgtgaagccttcccgacagcccttgcccaacatacatgaatgcacgcacaaggcaatgttaggcctcgggcttccacaggaccctgcacttagttacctccgtcctagcctgtaccacactgtagggtgtcggtctgtggatgtctctttgttccccactagactgtgaactccttgagggcagggaccaggtttcattcatctccatacccatagg

SEQ ID NO: 16520 - DNA, 403 bp, Homo sapiens
gtgtcatagatatcccgttttgtgaggtagagctgtgcattaaacttgcacatgactggaacgaagtatgagtgcaactcaaatgtgttgaagatactgcagtcatttttgtaaagaccttgctgaatgtttccaatagactaaatactgtttaggccgcaggagagtttggaatccggaataaatactacctggaggtttgtcctctccatttttctctttctcctcctggcctggcctgaatattatactactctaaatagcatatttcatccaagtgcaataatgtaagctgaatcttttttggacttctgctggcctgttttatttcttttatataaatgtgatttctcagaaattgatattaaacactatcttatcttctcctgaactggtgatttta

SEQ ID NO: 16521 - DNA, 502 bp, Homo sapiens
  misc_feature (1)...(502): n = A,T,C or G
tcgggggttttacctgaatccactcgannnncnnanactgangcctttcgaaancnncgnaatnngggaagacccacgcgtgcgcccacgcgtccgggtggctgcaagtgacagctgagagcctggtggggggcctcgggacagaggctttcagggctgtagctgccctcacagcgtgcaggccacggagcgtgaccatccagccccttctgcaaagcagccaaaaccagagcttcaatgcctcctctggcctgctgtccccgagccccgaccaccaagacctgggcaggaatggcaaggtggaccgcaaccccttctgcctcacaaactacccagtcacgcgggaggacatggacgtggtgtcggtgcacttccagcccctggacagggtctcggagagggtgtgttcggacacgccctccgtgatgcggctgcgcctgaacaccggcatggacagcggnggttccctcaccatctccctgcgggccaacaagacnaggag

SEQ ID NO: 16522 - DNA, 409 bp, Homo sapiens
aggtacggggccccgaaccgtcctcctgatgctctggggggcattggccctgacctgacctgaccgcgtggcggagcagctgaaagcctacctggaaggccagcgcgtggagcggctccgcacatacctggagaacgggaaggagacgctgcagggcgcggaccccccaaagacacacgtgacccaccaccccatatgtgaccatgaggccaccctgaggggctgggccctgggcttctaccctgcggagatcacactgacctggcagcggtatggcgaggaccaaactcatgacactgagcttgtggagaccacaccagcaggagatacaaccttccagaagcgggcaggtgtggaggcgccttctggagaagacagagatacacctgccctgcacagcatgaggggg

SEQ ID NO: 16523 - DNA, 403 bp, Homo sapiens
tgaataagtgttatatcttcatgtacggaatgtatgtttagtgccaatgccaaggagcaaacaggtgggaagacaaggggctgtgcataaggagccatggctaagccctggggtctaaaaggctgaaaccagcaagcctggagaccagtggatacagtctgtgtgtctgtgtgacgaagtcacctctgtcctccagaaggttgggtttcctgggccccatgcatatgcaggctttttttgtttgtttgttttttgacagtctcattctgtcacccaggctgcaatgccgtggtgcgatctcggctcactgcaacctctgccttccgggttcaagcaatttttgtgcatcagcctcctgagcagcttggactagaggcaaacactaccacacccagctaatttt

SEQ ID NO: 16524 - DNA, 405 bp, Homo sapiens
gcgacccgctgaatttaagcatattagtcagcggaggaaaagaaactaaccaggattccctcagtaacggcgagtgaacagggaagagcccagcgccgaatccccgccccgcggcggggcgcgggacatgtggcgtacggaagacccgctccccggcgccgctcgtggggggcccaagtccttctgatcgaggcccagcctctaccaccagtccagaacttgcagtgggtgcggtaaacggtggcccctcctcagcaaacatttccaggggattctggcagcagagtttccatgggaacatgtgctggttctgcgctgaacccggtgtggctggggttcccttcacagccaatattgcaggaactgagcctggtggcctcggccagggtaggcagtgctctttgg

SEQ ID NO: 16525 - DNA, 408 bp, Homo sapiens
cggacgcgtgggcggacgcgtgggtcctcaggcacttggacgtcagaatcctactgaccaagatccgaaccaagagcacctttctccctcccctgcccacctcagtccagaatctcgcccacccgccagaagtcgtgttgacagatttccagaccctggatggaagccagtacaacccggtcaaacagcagctagtgcgttacgccaccagctgttacagctgttgtccgcgactggcctcggtgctgctatactccgattatgggataggagaagtgcccgtggagcccctggatgtccccttaccctccacgatcaggccagcttcccccgtggccgggtctccaaagcagccggtgcgtggctactaccgtggcgctgtcggtggcacgtttgaccgcctgcaca

SEQ ID NO: 16526 - DNA, 415 bp, Homo sapiens
ctgcgagccaggattcccgatccagagacaatggccctgatgggatggagcccgaaggcgtcatcgagagtaactggaatgagattgttgacagctttgatgacatgaacctctcggagtcccttctccgtggcatctacgcctatggttttgagaagccctctgccatccagcagcgagccattctaccttgtatcaagggttatgatgtgattgctcaagcccaatctgggactgggaaaacggccacatttgccatatcgattctgcagcagattgaattagatctaaaagccacccaggccttggtcctagcacccactcgagaattggctcagcagatacagaaggtggtcatggcactaggagactacatgggcgcctcctgtcacgcctgtatcgggggcaccaacgt

SEQ ID NO: 16527 - DNA, 407 bp, Homo sapiens
gttgactgtgccaaagagggcaatcctcactcttctgagatggaagaggtagccccacagccacctcagccagaggagatggagcctgaggggcagcccagtccagacggctgtctatgcccctgttctcttggcctgggtggcgtgggcatgcgtctagcttccactctggttcaggtccaacaggtccgctctgtgcctgtggtgccccccaagccacagtttgccaagatgcccagtgcaatgtgtagcaagattcatgtggcacctgcaaatccatgcccgaggcctggccggcttgatgggactcctggagaaagggcttgggggtcccgagcttctcgatcctcttggaggaatgggggtagtctttcctttgatgctgctgtggccctagcccgggaccg

SEQ ID NO: 16528 - DNA, 407 bp, Homo sapiens
  misc_feature (1)...(407): n = A,T,C or G
gcaaatccagcctaaggaaaggagttctggaattttacaatttcacattaaattacacgtcagtatgtggcattaggggaatggtagaaattctcagtgctaagaattgagtggcccctttaaccagctaccttgacccccaaagccaagatttgtaatggaaaaatattgtatgggcaggtgctgtggcttacnccacancactttggaaggctgaggctggcggatcactcgaggtcaggagtttgagaccagcctggccaacatggcgaaaccccatctctactaaaaatacaaaaattagccgggatggtgacacacacttgtagccccagctactcgggagactgaggcaggagaatcgcttgaatccaggaggcaaaggttgcagtgagccgagatcaccn

SEQ ID NO: 16529 - DNA, 418 bp, Homo sapiens
  misc_feature (1)...(418): n = A,T,C or G
cccacgcgtgcggccatccctggcatcccgggtatccctgggacacctggccccgatggccaacctgggaccccagggataaaaggagagaaagggcttccagggctggctggagaccatggtgagttcggagagaagggagacccagggattcctgggaatccaggaaaagtcggccccaagggccccatgggccctaaaggtggcccaggggcccctggagccccaggccccaaaggtgaatcgggagactacaaggccacccagaaaatcgccttctctgccacaagaaccatcaacgtccccctgcgccgggaccagaccatccgcttcgaccacgtgatcaccaacatgaacaacaattatgagccccgcagtggcaagttcacctgcaaggtgcccggtctctactacttcn

SEQ ID NO: 16530 - DNA, 408 bp, Homo sapiens
ccagctcccaaccaagagctggttctatgcctgtgttatatgtcatatttagcgtttttatatatgacctttgatttctgttgtttgtattttagcacagtgtatgcaccttcatttaaatacatctgtgtgcatacagatacgcatatatgtgtgtgcgtatgcatatatctctcatctgtagtttccaagagttcagctgaagcagatggagtcctgcagcccaggagacaccctgcatccctgctaatagtgtttgccacaagtattagtgagtcttccttattaatattttcatttcagaagactgaagcaaagctgatagtgtttgctgtttctttggcagctaagtgagggtcttgggatgacttgctgtgttcctcaagctgcactttggggccatctctg

SEQ ID NO: 16531 - DNA, 448 bp, Homo sapiens
tcgctgtctgaaaatatatatataaataaataaaaaatcttaaactacacgggagtggaggaggttacactaagaatagaacaacctcttcaagatagagtgaggctcacatgtcatacattgaatataccatgccgtgcattcattctaagactgacttttgagaaattatgctagtagggcacagagaaataaggaagtgcttagttcagagggtgctttgtggctagcaactcctaggtctctccttacaacttagattgcaaagtaccaacaactagtatatgctgtattaggatttctagaaactgaatatcatgtctcaaaccaggcacggtggctcacgcctataatccaagcactttgggaggctgaggcaggtggatcacctgaggtcaagagttcaagaccagccctggccaacatggtgaaacctcgtctctactag

SEQ ID NO: 16532 - DNA, 445 bp, Homo sapiens
  misc_feature (1)...(445): n = A,T,C or G
gggaatgtgtttttgtgtgtgagtgtctggctttagtgtcagaagggaaataaaagtgtaaggaggacactttaaaccctttgggtggagtttcgtaatttcccagactattttcaagcaacctggtccacccaggattagtgaccaggttttcaggaaaggatttgcttctctctagaaaatgtctgaaaggattttattttctgatgaaaggctgtatgaaaataccctcctcaaataacttgcttaactacatatagattcaaggggggcaatattctattttgtatattaaatgctatataatggggacaaatctatattatactgtgtatggcattattaagaagctttttcattattttttatcacagtaattntaaaatgtgtaaaaattaaaaccagcgactcctgtttaaaaataaaaagtgtagttttttattct

SEQ ID NO: 16533 - DNA, 448 bp, Homo sapiens
  misc_feature (1)...(448): n = A,T,C or G
nttgccctagggccttcgnnctttggatnaganannccnannnanngnnnggagngctcaaaaggagcgtgcaatanaagaaagaagggtggtcttcattggaaagatacctggcggcatgactcgagcagagctgaaacagaggttctccgtttttggagagattgaggagtgcaccatccacttccgtgtccaaggggacaactacggcttcgtcacttatcgctatgctgaggaggcatttgcagccattgagagtggccacaagctgcggcaggcagatgagcagccctttgatctctgctttgggggccgaaggcagttctgcaagaggagctattctgatcttgactccaaccgggaagactttgacccagcacctgtaaagagcaaatttgattctcttgactttgacacattggtgaaacaggcccagaagaaccttaag

SEQ ID NO: 16534 - DNA, 505 bp, Homo sapiens
  misc_feature (1)...(505): n = A,T,C or G
gtgggcgttttnaccttgaatccctcggaanngctttancctagnaggctgctgaaccccnccggaaatncgggncgagccacgcgggcgatttattgataacatctttcgcttcacccaggctggttcagaggaggctgcattattgggccgaatcccgtgtgctgtgggctatcaacctaccctggccactgacatgggtactatgcaagaaagaattaccactaccaagaagggatctatcacctctgtgcaggactacaaatccctccaggatatcattgccatcctgggtatggatgaactttctgaggaagacaaggtgaccgtgtcccgtgcacggaaaatacagcgtttcttgtctcagccattccaggttgctgaggtcttcacaggtcatatggggaagctggtacccctgaaggagaccatcaaaggattccagcagattttggcaggtgaatatgaccatctcccagaacaggccttctatatggtgggaccc

SEQ ID NO: 16535 - DNA, 420 bp, Homo sapiens
cgctgcttacttagtacacaacctgtgagactgtgcagtggcatgatctcggctcactgcaacctccacctccagggttcaagtgattttcctgcatcatcctccctagtagatgggactacaggcgcctgccaccacgtccagctaatttttgtatttttaggagagacggcgtttcaccatgatggccatgtctccaactcctggcctcaagcgatctgcctgcctcagcctcccaaagtgctgggattacaggtgtgtgccactgcttaatacagtcttacggcgcgctggagagcacccacctttccagcccaccccagcgtcgctcactgtttcttacaccgtgctcaggtgaagagctcttttcatcctttctgtctcctcttctcaccagcctatacattctttctctttctg

SEQ ID NO: 16536 - DNA, 433 bp, Homo sapiens
  misc_feature (1)...(433): n = A,T,C or G
attttataaactacttttattttttcaaatgttaaaccagcctttgtttctgaaataaatccatggtgatcattgtatatttccctcataaaatatcagtgctggccgggtgtggtggctgatgtctgtaatcccagcactttgggagactgaggccggtggatcaggaggtcaagagattgagaccatcctagccaacgtgctgaaaccccatctgtactaaaaatacaaaaactagctgggtgtggtggtgtgcacctatagtcccagctactcgagaggctgaggcaggagaatcacttcaaaccaggggtcggaggttgcagtgagccgagagggcaccactgcactccaacctggcgacagagggagactctgtcncnnnnnnnnnnnnnnnnnngnctnnnnnnncngnnncctccctgggggggcg

SEQ ID NO: 16537 - DNA, 475 bp, Homo sapiens
  misc_feature (1)...(475): n = A,T,C or G
gtgccagggggtaanaactgatagctccgaacccntcgacctgaggccctcgcacgccncggntnctatgatccggcgccacaagaccaccatcttcacggacgccaaggagtccagcacggtggtggaactgaagcgcatcgtcgagggcatcctcaagcggcctcctgacgagcagcggctgtacaaggatgaccaactcttggatgatggcaagacactgggcgagtgtggcttcaccagtcaaacagcacggccacaggccccagccacagtggggctggccttccgggcagatgacacctttgaggccctgtgcatcgagccgttttccagcccgccagagctgcccgatgtgatgaagccccaggactcgggaagcagtgccaatgaacaagccgtgcagtgagacccccaagaggcccatttcccccaataaaagagatttgggagtctgcctggttgctgcctcttt

SEQ ID NO: 16538 - DNA, 402 bp, Homo sapiens
ctggttagccataagactgaccgacagttccaggagctcaacgagctggcggagtttgcccgcttacaggaccagctggaccacagaggggaccaccccctgacgcccggcagccactatgcctaggcccatgtggtctgggcccttccagtgctttggccttacgcccttccccttgaccttgtcctgccccagcctcacggacagcctgcgcagggggctgggcttcagcaaggggcagagcatggagggaagaggatttttataagagaaatttctgcactttgaaactgtcctctaagagaataagcatttcctgttcttccagctccaggtccacctcctgttgggaggcggtggggggccaaagtggggccacacactcgctgtgcccctctcctt

SEQ ID NO: 16539 - DNA, 410 bp, Homo sapiens
cttcgccttgaaggataagtacaagcagatcttgctggggggcgtggacaagcacacgcagatctggaggtactttgcgggcaacctggcctccggcggtgcggccggcgcgacctccctctgcttcgtgtacccgctggatttcgccagaacccgcctggcagcggacgtgggaaagtcaggcacagagcgcgagttccgaggcctgggagactgcctggtgaatatcaccaagtgcgacggcattcggggcctgtaccacggcttcagtgtctccgagcagggcatcatcatgtaccgggcggcctacttcggcgtgtacgatacggccaagggcatgctccccgaccccaagaacacgcacatcgtggtgagctggatgatcgcgcagaccgtgactgccgtggccg

SEQ ID NO: 16540 - DNA, 456 bp, Homo sapiens
  misc_feature (1)...(456): n = A,T,C or G
gggcganagataanttagggngcccgttcagnnncatagaaaaccncngannangngnnggnaggctgggcccggggacttctctctggacctgctccctccgatcgctccgccgttgcccgggtggcccctacggaggccttagccaggatggaggctgtcgcgaacttgtaccaagaggtgatgaagcacgcagatccccggatccagggctaccctctgatggggtcccccttggtaatgacctccattctcctgacctacgagtacttcgttctctcacttgggcctcgcatcatggctaatcggaagcccttccagctccgtggcttcatgattgtgtacaacttctcactggtggcactctccctctacattgtctatgagaacctgatgtcgggctggctgagcacctatacctggcgctgtgaccctgtggactattccaacagccct

SEQ ID NO: 16541 - DNA, 464 bp, Homo sapiens
  misc_feature (1)...(464): n = A,T,C or G
aggggcggngnaggttaanccaggggccttagnttagcgnnctacgananncncgancangcgtnnggaaacttggggcaacatttagcaaaagccttttagtctgtgccttttgactaaacgatgccactgctatgactgcgggctaaggatgtacttaaacaaccgtgcaactgggtgtggtggcccacacctgtaataccaacactttgagaggctgaggcgggtggatcgcttgagctcaggagttcaagaccagcctgtccaacatggcaaaactttgtctctaccaaaagtacaaaacttagctgggcgtggtggtcccacagatgagaacatgacgtgagaggactgcttgagcccacgtggcataggttgcaatgagctgacattgtaccactgcacttcagcctgggcaagagagcaagattgtctcaaaaacaaacaaacaaggcttgcaagaa

SEQ ID NO: 16542 - DNA, 411 bp, Homo sapiens
  misc_feature (1)...(411): n = A,T,C or G
cactgccacacacagctcagcctgggctgcacagccaggtgtcaggtgcgtctctgctgatctgagtccaccctgcagcatggacctgcatcttccctgaaggatctccagggctggagggacgactgccatgccctacaggaaagacagccaggctcctgggagggcagttccacttcctgtgtggctgcagatgacaaaaccccatgagaagaaggaccgagcctccaagtgtccacaccctgtgtgtcctctgtcctgccagcaccgagggctcatccatccacagagcagtgcagtgggaggagacgccatgacccccatcctcacggtcctgatctgtctcgggctgagcctggaccccaggacccacgtgcaggcagggcccctccccaagcccaccctctgggn

SEQ ID NO: 16543 - DNA, 412 bp, Homo sapiens
cccacgcgtccgggccagagaaagaaattgacaggcaaaagcaagaaattgagtttgtgtttagggaacaatgagtggctctttttgcccttggcagtgggattcacatctaggagaagacagaggaggtggaggcaggaggatcatttgagcccaggaatgcaagaccagcctgggcaaaatggcaagaccctgtctttacagaaaattttttaaaaattagccagccatggtggcctgcacctgtgatcccagatactcaggaggctgaggcaggaggattgcttgagcccgggagatggagactgcagtgagccatgatcatgcgactgcactctagcctggatgacagagcaagatcctgtctcaccaaaaaaaaaaaaaaaaaaaaaaaagggggcggccgttttaa

SEQ ID NO: 16544 - DNA, 382 bp, Homo sapiens
  misc_feature (1)...(382): n = A,T,C or G
cggggcnaattgaatcatagcaccgcccggactcccggtcgacccacgcgtcacgcgaacgacttcacctattgccctcctgacccagggattgaggctttgagtcccacagtgtggcgatacagagcactagctgacactgcctggctttatttagaggaactgcagcatgctacctctgtagagctctgaaaaggttgactatatacaggccacgcatgtctatacttggtcaaggatttatcacatcttttgatatcagagtaccattccaatctcttaacttgcagttgtgtggaaaactggcttgtaacgaaagatcttcattgggggattgagcatcatttaataaagtctatgtctgtaaaaaaaaataaaaaag

SEQ ID NO: 16545 - DNA, 410 bp, Homo sapiens
  misc_feature (1)...(410): n = A,T,C or G
cgaaaagacggcggccttggcacctgtaattgctctcgtgtattcggtgccgcgactttcacgatggctcgcccaaccttactaccttctgtcggccctgctctctgctgccttcctactcgtgaggaaactgccgccgctctgccacggtctgcccacccaacgcgaagacggtaacccgtgtgactttgactggagagaagtggagatcctgatgtttctcagtgccattgtgatgatgaagaaccgcagatccatcactgtggagcaacatataggcaacattttcatgtttagtaaagtggccaacacaattcttttcttccgcttggatattcgcatgggcctactttacatcacactctgcatagtgttcctgatgacgtgcaaaccccccctatatatgggcn

SEQ ID NO: 16546 - DNA, 471 bp, Homo sapiens
  misc_feature (1)...(471): n = A,T,C or G
cgcgcgcnaattgatttcatagccattcgccacgacttcggaattccaggcacgagccacgcgaccggtcggaagcacttgggggtcgtggtaatttccagtgttttctgtgtcctaggtttacccttcctaaacactgtcctttttgaaagtgtggaatatatccacattctattgaaaccttgaaactaaatatatacactcttatcgacgtcttaagttcttcatgctactcttaacctcccaaaaagcagtatctaagtcacatacatgatgtcttgggcattttctgagccatggagaactctgaaaggaagaatcgctgcttttctcaagcaaatcggtttcttgatgtcttttggttctccttgcctgctcctgatgcttggaccccttttattgatcagagtgctctacaataatggatggtcttggatgatggataaatagggacagggacagttaaattgg

SEQ ID NO: 16547 - DNA, 476 bp, Homo sapiens
  misc_feature (1)...(476): n = A,T,C or G
tcccccactgaagccgtcggacggccgatgatnaccgtcgacacacgcgtccggnacaggagaccatgtccgggggcagcagctgcacccataccccaagccgggccatccttgccactcgccgggtggtgctcggcgacggcgtgcagctcccgcccggggactacagcacgacccccggcggcacgctcttcagcaccaccccgggaggtaccaggatcatctatgaccggaaattcctgatggagtgtcggaactcacctgtgaccaaaacacccccaagggatctgcccaccattccgggggtcaccagcccttccagagatgagccccccatggaagccagccagagccacctgcgcaatagcccagaagataagcgggcgggcggtgaagagtcacagtttgagatggacatttaaagcaccagccatcgtgtggagcactaccaaggggcccctcagggccttcctgag

SEQ ID NO: 16548 - DNA, 438 bp, Homo sapiens
cggacgcgtgggcggacgcgtgggcggacgcgtgggcggacgcgtggggggatgtgtacataccccaccccaccccttggcagggtgatgctgaggtgtggatttttaacagttcccagactttcccaggaggcttgggtttgggtgcccacagtgggagctggtgtgatatcataccttcgccggccgcctttccttcctgttctctgtgcccctactcccactctagagctgccccgtttctctgttttcgtgaaagagctgaccctgtgctgcctcccactctcccaatgcccctgccactcctgtgagcctgctgctggggaggtcggggctgacctctgtgttgctggataatgagtcatctatctctggaggagaagaaaagcaggtcctccacagccctgataaaatctccaagtcttccagtttcgggtc

SEQ ID NO: 16549 - DNA, 478 bp, Homo sapiens
  misc_feature (1)...(478): n = A,T,C or G
ctccgaaattgacgcctgtagtaccggcccgatagatcaccgtcgacccacgcgtccggggcacctctgttggttccatcagccagagctctgccaaaggccccgcagtccctctcccaggaggaccctagaggcaattaaatgatgtcctgttccattggcnnaaaaaaaaaaaaaaaaaaaaaaaaggggggggccctttaaaaaaacccctgggggggccaaaatttacccggggtagaaaaaaaaaaattttttttttaaagggggggcaaaaaaaacccacctgggaatttttggaaaaaaaccttattttgggggggggacaaaatgggaaaacccccctaaaaaaaataaagcccttaaggaaaaaaaaaaattttaaaggggaaaaggggaaaaaccaaccgaaaatccttggtggtagaaaactttgnnnnnccncccccccaccacaataaaggcgtgggggaaaaaa

SEQ ID NO: 16550 - DNA, 223 bp, Homo sapiens
caggtcacgcatgaagggagcaccgtggagaagacagtggcccctacagaatgttcataggttctcaaccctcacccccaccacgggagactagagctgcaggatcccaggggaggggtctctcctcccaccccaaggcatcaagcccttctccctgcactcaataaaccctcaataaatattctcattgtcaatcagaaaaaaaaaaaaaaaaaaaaagggg

SEQ ID NO: 16551 - DNA, 444 bp, Homo sapiens
caggtcacgcatgaagggagcaccgtggagaagacagtggcccctacagaatgttcataggttctcaaccctcacccccaccacgggagactagagctgcaggatcccaggggaggggtctctcctcccaccccaaggcatcaagcccttctccctgcactcaataaaccctcaataaatattctcattgtcaatcagaaaaaaaaaaaaaaaaaaaagggggggccgttctaaagaatccttgggggggccaaaccttacgggggcatgcaaggaaaaacctttttccttttggggagcggattaaaaaccaacctggggatctttggaaagaaacctaactttgggggggggacatattgggccaacctacctaccaaaatttaaaggcttcagggaaaaaaaaaaattttaaagggaaaggggggtaaacaaccggcctcg

SEQ ID NO: 16552 - DNA, 395 bp, Homo sapiens
cccacgcgtccgcccacgcgtccgcggacgcttgggctggtgaagcccccagcaacccctctgtcccagtagcagtgagcagcgggccaggccggggagatgctgacagtcatgctagtatgaagagtctgctgaccagcaggcctgaggacaccacacacaatcgccgcagcagaggcatggtccagagcagctccccaatcatgcccacagtggggccctccactgcatccccagaagaacccccaggctccagtttacccagtgatacatcagatgagatcatggaccttctggtgcagtcagtgaccaagagcagtcctcgtgccttagctgctagggaacgcaagcgttcccgcggcaaccgcaagtctttgagaaggacgttgaagagg

SEQ ID NO: 16553 - DNA, 502 bp, Homo sapiens
  misc_feature (1)...(502): n = A,T,C or G
agagcgccnnnnnnaattgagaactgancatcntcgcaaanccgcattgacccatgcgtccgagagtatgaatatatttattgggagcactcacacaaaaattaactgcaatttgaattaacttttgtttatgtatgagaaaggaatataacttgattttccccgagtgaatatgcagttgcttcatcactacgtgttaagcagttaattatttaaatgctattttaaggaaaattcatagagacagaaagtggaacataggttatctggaagaagggaggaatgggaacttcttgtttaatgggtgtagcttctgtttggggtgatgaaaagttctggaaatagatggtggtgatggctatacaacattgtgaaggtagttaatgccactgaattgtttgcataaaaatggttaaaagggtaaattttatgttatgtctattttaccacaataaaatattattttatcatatataaaattcccacacattcatagatgtgg

SEQ ID NO: 16554 - DNA, 435 bp, Homo sapiens
  misc_feature (1)...(435): n = A,T,C or G
cgctctcgggacgtctccaccatggcctgggctctgctgctcctcactctcctcactcaggacacagggtcctgggcccagtctgccctgactcaacctgcctccgtgtctgggtctcctggacggtcggtcgccatctcctgcactggaaccagcagtgatgttggaagttctaatcttgtctcctggtaccaacagcacccaggcatagcccccaaagtcttgatttatgaggggacagtaagcggccctcaggggtctctaatcgcttctctggctccacgtctggcaacacggcctccctgacaatttctggactccaggctgaggacgaggctgactattattgctgctcatatgcaactaatangatttttggggtccgggggagggaccaagctgaccgtcctaggtcagcccaaggctgccccctcg

SEQ ID NO: 16555 - DNA, 421 bp, Homo sapiens
  misc_feature (1)...(421): n = A,T,C or G
gcgcccacgcgtccggtcgctgcttctgtgtccctgtcgggcttcccagcagcggcctagcgggaaaagtaaaagatgtctgaatatattcgggtaaccgaagatgagaacgatgagcccattgaaataccatcggaagacgatgggacggtgctgctctccacggttacagcccagtttccaggggcgtgtgggcttcgctacaggaatccagtgtctcagtgtatgagaggtgtccggctggtagaaggaattctgcatgccccagatgctggctggggaaatctggtgtatgttgtcaactatccaaaagataacaaaagaaaaatggatgagacagatgcttcatcagcagtgaaagtgaaaagagcagtccagaaaacatccgatttaatagtgttgggtctcccatggaaaacan

SEQ ID NO: 16556 - DNA, 440 bp, Homo sapiens
tgaagcaggcgctcttggctcggcgcggcccgctgcaatccgtggtggaacgcgccgccgagccaccatcatgcctgggcacttacaggaaggcttcggctgcgtggtcaccaaccgattcgaccagttatttgacgacgaatcggaccccttcgaggtgctgaaggcagcagagaacaagaaaaaagaatccggcgggggcggcgttgggggccctgggggccaagagcgcagctcaggccgcggcccagaccaactccaacgcggcaggcaaacagctgcgcaaggagtcccagaaagaccgcaagaacccgctgccccccagcgttggcgtggttgacaagaaagaggagacgcagccgcccgtggcgcttaagaaagaaggaataagacgagttggaagaagacctgatcaacaacttcagggtgaagggaaaata

SEQ ID NO: 16557 - DNA, 487 bp, Homo sapiens
  misc_feature (1)...(487): n = A,T,C or G
agagagagtggttgagccttgatagccccttganactcnctccggaaccgccgngncgacccacgcgtccggcaggaaaaatctggagatttacgaggctgcgacgtccccccagggtcccgccatgacctggagcatgtttgctgtgggctgcatggatctgaaggacgcattgcgggcccggggcctcctggacaggagctttgccaacatggctgaacccttcaaggtgtggacggagaatgcagacgggtcaggcgctgtgaacttcctgacaggcatggggggcttcctgcaggcggtggtcttcgggtgcacggggttcagggtcacccgagcgggcgtgacctttgaccctgtgtgtctgtcggggatcttcagagtgagcgtctccggcatcttctaccaggggaacaagctcaacttctctttttacgaggactccgtgaccgtggaggtgacaactcgagcaaggccctgttctcct

SEQ ID NO: 16558 - DNA, 481 bp, Homo sapiens
  misc_feature (1)...(481): n = A,T,C or G
gtcctgacgctgtggnacccttgaggaccttccgggncgacccacgcgtccgggctttcattgccaagtccttctatgacctcagtgccatcagcctggatggggagaaggtagatttcaatacgttccggggcagggccgtgctgattgagaatgtggcttcgctctgaggcacaaccacccgggacttcacccagctcaacgagctgcaatgccgctttcccaggcgcctggtggtccttggcttcccttgcaaccaatttggacatcaggagaactgtcagaatgaggagatcctgaacagtctcaagtatgtccgtcctgggggtggataccagcccaccttcacccttgtccaaaaatgtgaggtgaatgggcagaacgagcatcctgtcttcgcctacctgaaggacaagctcccctacccttatgatgacccattttccctcatgaccgatcccaagctcatcatttggagccc

SEQ ID NO: 16559 - DNA, 494 bp, Homo sapiens
  misc_feature (1)...(494): n = A,T,C or G
agcnagaaagagagggactgagtctgatagcctcagtaactacctgcgaaccgcnccggaaatccaggggcgacccacgcgtgcggntgtggngctagtttctctaagccattcagagccattctcgtcgctgcagcgacacacgctgtcgccgggggcatgactgagcagatgacccttcgtggcaccctcaagggccacaacggctgggtaacccagatcgctactaccccgcagttcccggacatgatcctctccgcctctcgagataagaccatcatcatgtggaaactgaccagggatgagaccaactatggaattccacagcgtgctctgcggggtcactcccactttgttagtgatgtggatatctcctcagatggccagcttgccctctcaggctcctgggatggaaccctgcgcctctgggatctcacaacgggcaccaccacgaggcgacttgtgggccataccaaagatgtgctgagtgtggn

SEQ ID NO: 16560 - DNA, 416 bp, Homo sapiens
cccacgcgtccggtggaatgttccttcgttaagtcacaggaaacggaatgtacctacttctccacaccgctgctgcttgggaaaaagggcatcgagaagaacctgggcatcggcaaagtctcctcttttgaggagaagatgatctcggatgccatccccgagctgaaggcctccatcaagaagggggaagatttcgtgaagaccctgaagtgagccgctgtgacgggtggccagtttccttaatttatgaaggcatcatgtcactgcaaagccgttgcagataaactttgtattttaatttgctttggtgatgattactgtattgacatcatcatgccttccaaattgtgggtggctctgtgggcgcatcaataaaagccgtccttgattttaaaaaaaaaaaaaaaaaaaaaaaa

SEQ ID NO: 16561 - DNA, 484 bp, Homo sapiens
  misc_feature (1)...(484): n = A,T,C or G
gtgcccgatgccttcggnaagttgacgaccntccggancgacccacgcgtccgggcagcagtgttgtctgggagctggatgatggcctggatgaagcgttttcgaggcttgcccagtctcggacaaaccctcaggtcctggacactggcctgacagcccaggacatgcattacgcccagtgcctctcgcctgtcgactgggacaagcctgacagcagcggcacagagcaggatgacctcttcagcttctgagggcccggggccagccggacacaagcggccctgacacgtgatggaccaaagccacctgctgcgggggagccagttctggggcccgcctgccacctctcccagccctcagcattgtcagcctgaagatcagagctgcagccagtcaggcaggggagagatttttcttttaagccctgctctttctctgagaaccaaaagatgccttgaatatttattcagtgacttctggcttn

SEQ ID NO: 16562 - DNA, 423 bp, Homo sapiens
cgccatttttttggaaacctctgcgccatgagagtcaagtgtaggaagaagcgaatgcgcaggctgaagcgcaaaagaagaaagatgaggcagaggtccaagtaaaccgctagcttgttgcaccgtggaggccacaggagcagaaacatggaatgccacacgctggggatgctggtacaagttgtgggactgcatgctactgtctagagcttgtctcaatggatctagaacttcatcgtcctctgatcgccgatcacctctgagacccaccttgctcataaacaaaaagcccatgttggtcctctgccctggacctgtgacattctggactatttctgagtttatttgtggccgagtgtaacaaccatataataaatcacctcttccgcttgtttagctgaagaattacaaaaaaataaagaa

SEQ ID NO: 16563 - DNA, 418 bp, Homo sapiens
cggacgcgtggggagccgctgcacgccgcggcctactggggccaggtgcccctggtggagctgctcgtggcgcacggggccgacctgaacgcaaagtccctgatggacgagacgccccttgatgtgtgcggggacgaggaggtgcgggccaagctgctggagctgaagcacaagcacgacgccctcctgcgcgcccagagccgccagcgctccttgctgcgccgccgcacctccagcgccggcagccgcgggaaggtggtgaggcgggtgagcctaacccagcgcaccgacctgtaccgcaagcagcacgcccaggaggccatcgtgtggcaacagccgccgcccaccagcccggagccgcccgaggacaacgatgaccgccagacaggcgcagagctcaagccgccgccccccgagg

SEQ ID NO: 16564 - DNA, 417 bp, Homo sapiens
  misc_feature (1)...(417): n = A,T,C or G
cccacgcgtccggacaataaagcgactttgcgactgtcccacccccttccgggccccttgcgtgttggcgtcatggctggcctgctaaggctaacagactctccctggtctcgagcatagactgccagacatccgcctgaaagcatagttcctgggcctctacttctgaaaaatcgcgggaatagcatccgcttctctgagctgggagaggtgtaacaggtaaacccatgtaaggtgcttatgacagggctggtgctggctaagtgccgttaatatcgtcagcatcattacctgcgttattgtagcactgatcgccatgtcagctgccttcatggtctggcaggtaaagtagaggggccaggtagagatcctgctgacctggcaagcacatgttccctccagtcggggcgttgacgn

SEQ ID NO: 16565 - DNA, 424 bp, Homo sapiens
cccacgcgtccggtcagcctcagtcttcaatgagggaccccgtacagagtaacccaaacgcttgttcctatttcaggatgtgaacactctgcaaggaggtgggcagcctgtggtgactccgtccgtccagccctctcttcagccggcccatccagcgttaccacagatgacctcacaggcacctcagccatctgttactgggctccaggcaccttctgctgccttaatgcaagtgtcatctctcgattcccactcagctgtatctggaaaagcccaatcctttcagccctatgcaggtatgcaagcctacgcttatccccaggcatctgccgtcacctcccagctgcagcccgttcggcctttgtacccagcaccgctctctcagcctccccatttccaaggatcaggtgatatggcttcattt

SEQ ID NO: 16566 - DNA, 406 bp, Homo sapiens
gcgtgagccactgggccctgcctgtattttttatcatccacaaatccagcttgttgctggatttgtggctgataaaaaatacagcaacaagctgaggattcagctcataaaacaggtttggcgtcttggtgatctcacataaccaagatgctaccccgtggggaaccacatccccctggatgccctccagccttggtttgggctggagtcagggcctggatacagtattttgaatttgtatgccactggcttgcattgctggtcaggaactctagtgctttgcatagccctggtttagaaacatgttatagcacctcttggtatagagcaaactagaagaaccagcaatcattccactgtcctgccaaggtacacctcagtactccccttcccaactgaagtggtg

SEQ ID NO: 16567 - DNA, 422 bp, Homo sapiens
cccacgcgtccgaaatgggaaaaatgtgttctcttcttctggaacttcattctctggccgcaagataaagactgctgttagacgcaggaaataaaggtcacattggtgttgtactcaattttaacaacagctggtgccctgctttcagatactggattgtactttgtgctggggttatctgaagtcagatctgcctaaggacttctttaattttggaattttcctcctttctctttcgttacagaagccccaccctgcctcacccacccttttttaaataaataaatagctagactggtgactgattcttcagcaaaaatattttatgatccagcagattattcactgatttgacatagtctggctgtacccaggaatggagcctgcacggtgaatggctttgtatagaacctctttgtcta

SEQ ID NO: 16568 - DNA, 407 bp, Homo sapiens
tgctacaggttgggggttgtgggcgagagttggtataggtttcacgtcataatttaaataagaacaagggtagaaaacaactggatggctttcctgataaagccttttagataaatgcaaaggtcctcagagcggctgttcccatctggccacagcccaccacaagcccatcccacgttttcactctctatcctctgctggggccccttggagcttctcagtgtcctccaaatgcaccacctcctttcaggagctcatgtctttgcatgttgttccttctagaacgcacttcctccggtgcctgccccctacttcaccatcttccacactgagctccaggattggctctttcacaggcagcagccactccctcattggggcccttccctcatgatgtcatccctcag

SEQ ID NO: 16569 - DNA, 416 bp, Homo sapiens
cctgtggtgacttgctggtgactctacagtccctgagccgccagggtgagaagcggagcctccagctctccggcaaggtcaacgccatgactttcacctttgacaacgtgctccctggaaaatacaaaataagcatcatgcatgaggattggtgctggaagaacaagagcctggaggtggaagtgctggaggatgacatgtctgcagttgagttcaggcagacgggctacatgctgagatgttccctgtctcacgccatcactctggaattttatcaggatggaaatgggcgtgagaatgtggggatttataacctctccaaaggagtcaaccgattctgcctgtccaagcctggtgtgtacaaagtgacccctcgctcctgccaccggtttgagcaagcgttctacacctatgat

SEQ ID NO: 16570 - DNA, 415 bp, Homo sapiens
gaagcaggactgcgccgcgtcttcctcaaggttgatatcaaaaacatgcacctggagtttccccggagccctctgcgtggttgagcttcggtggaatttcggggctcttggctgccagccgcgcttgcctggtagcaacagaaaccagtcctgctcgcctccgtggacatttcattaccatccagaagtgtctcccactgaaggcatccgtggttgtttttaagccacaaaaaagccacacccaagatcacctgacacccaccctgacaagtgtccatgatgctgggccctgagggaggtgaaggctttgtggtcaagctccgtggcctgccctggtcctgctctgttgaggacgtgcagaacttcctctctgactgcacgattcatgatggggccgcaggtgtccacttcatct

SEQ ID NO: 16571 - DNA, 409 bp, Homo sapiens
cggacgcgtgggcggacgcgtgggtccacaggcacttggacgtcagaatcctactgaccaatatccgaaccaagagcacctttctccctcccctgcccacctcagtccagaatctcgcccacccgccagaagtcgtgttgacagatttccagaccctggatggaagccagtacaacccggtcaaacagcagctagtgcgttacgccaccagctgttacagctgttgtccgcgactggcctcggtgctgctatactccgattatgggataggagaagtgcccgtggagcccctggatgtccccttaccctccacgatcaggccagcttcccccgtggccgggtctccaaagcagccggtgcgtggctactaccgtggcgctgtcggtggcacgtttgaccgcctgcacaa

SEQ ID NO: 16572 - DNA, 417 bp, Homo sapiens
  misc_feature (1)...(417): n = A,T,C or G
agcaggcactccttggagcaaaagcccactgacgctccaccgaaagtactgaccaagtgccaggaagaggtcagccacatccctgctgtccacccgggttcattcaggcccaagtgcgacgagaacggcaactatctgccactccagtgctatgggagcatcggctactgctggtgtgtcttccccaacggcacggaggtccccaacaccagaagccgcgggcaccataactgcagtgagtcactggaactggaggacccgtcttctgggctgggtgtgaccaagcaggatctgggcccagtccccatgtgagagcagcagaggcggtcttcaacatcctgccagccccacacagctacagctttcttgctcccttcagcccccagcccctcccccatctcccaccctgtacctcan

SEQ ID NO: 16573 - DNA, 415 bp, Homo sapiens
cggacgcgtggggaaataattatcagtcataacactgtggtgtgatataaccatgcctttaaagcctgttacagggaatctatgctacagattgtaacagctatgcttttcttatttataactgctttttaacttacttttaaaaatgtagtttctttctatcaatgtgcctgcttccagtgctgcctcctccaccagctcttcttaggcattttgaaacatataaccattgagggtatatatgatcctgacattaaaataaatttattacaattttattattattacttagtagtattgaacatttactgagctcttcctatttgccaaacactgttctaagtccattaggtgtataatctcatttgtcttcacaaagactatgggttaaggtaaatggtagaagagcaataat

SEQ ID NO: 16574 - DNA, 405 bp, Homo sapiens
acagaccagcagaagaaaggaaaagggcttatgtttaagcgactggaatcattcctacatgattcctggcggcacaaacgtgacaaggcgcgtctcacacgactagaagtgaaacctcatgccttggaattgccacataaacattcacttggcctttgttgcacgcatcgaaaggattgacggcgtgagtttactggagcagacaaccatcgcgagacttcgcctaaagaaaatttttagaggtgtctttgtctaagtcaccccccataatctaaaaacgctgcgtatagcggaaccttatgtgacctggcgatatccaaatctgaagtccgccccctaactcattttgaaacctggacacgcccaggtcaagaataacaccatccctctgacagacaatacagg

SEQ ID NO: 16575 - DNA, 406 bp, Homo sapiens
acgcggacgcgtgggcggacgcgtggtttttagtcgcatttcatactattcggacagatgggacacaaaccggtgcgcctcttggcttgtggagatgttgaaagaaagcttgatattttattcaatagagttcaagcacttcagaagaaaagtggaaactttgatctgctgttgtgtgtaggaaatttctttggctccacccaagatgctgaatgggaggagtataagactggcatcaagaaagctcctattcagacatatgtgcttggtgctaataaccaggaaacagtaaaatatttccaggatgctgatggatgtgaattagctgaaaacattacttatctgggtcgtaaaggtatcttcactggaagctcggggctgcacattgtgtacctcagagggacag

SEQ ID NO: 16576 - DNA, 410 bp, Homo sapiens
cggacgcgtgggttgaaagctcagaactcggagctggcgtccacggccaacatgctcagggaacaggtggcacagcttaaacagaaagtcatgaaccacgttaacagtgggtgccaactcatgctaacgcagcagttgcaaacattttgaagagagaccgtcgggggctgaggggcaacgaagaaaaaaaataacacagagagacagacttgagaacttgacaagttgcgacggagagaaaaaagaagtgtccgagaactaaagccaagggtatccaagttggactgggttgcgtcctgacggcgcccccagtgtgcacgagtgggaaggacttggcgcgccctcccttggcgtggagccagggagcggtcgcctgcgggctgccccgctttgcggacgggctgtccccg

SEQ ID NO: 16577 - DNA, 398 bp, Homo sapiens
caggcagcggctcaggcgaccctgagtgagcccccaccccgccatggcccggctgctgcaggcgtcctgcctgctttccctgctcctggccggcttcgtctcgcagagccggggacaagagaagtcgaagatggactgccatggtggcataagtggcaccatttacgagtacggagccctcaccattgatggggaggagtacatccccttcaagcagtatgctggcaaatacgtcctctttgtcaacgtggccagctactgaggcctgacgggccagtacattgaactgaatgcactacaggaagagctcgcaccattcggactggtcattctgggctttccctgcaaccaatttggaaaacaggaaccaggagagaactcagagatccttcctaccc

SEQ ID NO: 16578 - DNA, 391 bp, Homo sapiens
tgaaattgacctgaaccgagggtgggttcagcttacttacaagaccctgaacctctgcaagatgatcgacggacgcatgtggcagaccatgtgtgctctgcgccagttccggaaactccctgaggaagtagtgaagaagattgagaagaagaatttcccctttgagcgtctgtacgacctgaatcataatgagattggggagcttatccgcatgccaaagatggggaagaccatccacaaatatgtccatctgtttcccaagctggagttgtcagtgcacctgcagcctatcacacgctccaccctgaaggtggagctgaccatcacgccagacttccagtgggatgaaaaggtgcatggttcatccgaggctttttggattctggtggag

SEQ ID NO: 16579 - DNA, 419 bp, Homo sapiens
gctgaggcatgataattgcttgaaccccagaggcagaggttgcagtgagctgtgattgcaccactgcacgtgcaacctaggcgacaaagcgagactctgtctccaaaaaaaaaaaaaggaaaaaaaaaaaaaatccggcctaaaacccatccggccaaattgaaacccaacctttgccttaatggaaaaaaaggccctgaaaaaagaaataaacccttttggggcctaagttttttcttttacaaaaggaaaaggaaaatagccccgccctcaaggggttgggaagaataaaacagccatgtggctaaaaatggggttgggcccgaacaaacccctaaaaaaaagctccttgagtttaatagcacataaaaggccaggccggggcagttaaaaaaaaccttggaagggaaaaaaaaaag

SEQ ID NO: 16580 - DNA, 493 bp, Homo sapiens
  misc_feature (1)...(493): n = A,T,C or G
gggccgggaggctcacttctgaaaatctcgtananccgntnnnnttcatttagtctcgcagnacncgcnccgaattnccgggncgacccacgcgnccgaacgnctgcgncggcttccctgggaacctcggtcaagctcacctgcttgatgagcagtgggcaccggctctctgagtagtggtcaaaatgtggccatcatcgcaaggaatcagcaccagggaggggccttgttgaacgtaatggaagtcagaataggggcagcggatttcctgatcccttctcaggctccatctctgggccagaccgccacctaaacatcccagacctccagcgactgagactgattgttttagtgggacctgggacactgatcctgggtaatcgccggatgggccaagctgaccgccctcggtcagcccaaggctgccccctcggtcactctgttcccaccctcctctgaggagcttcaagccaacaaggccacactggtgtgn

SEQ ID NO: 16581 - DNA, 405 bp, Homo sapiens
  misc_feature (1)...(405): n = A,T,C or G
gcgctgatagatcaggggtggctgctgtaggctgtgctgtgtgatctgaggtttggtctgggctcagtgggagacggcagtgcaatcctgatgagggatgtctgccangcaccgtaagtttgattagtgatgtctgccacgggcagggatggaaggagcagtgtgatgtctgctctcttctctcccctctgtccctcttcaggaagaaagagctcattctgtctcacaagccaccggcatcctgtatcagcttccagcctcccctcatgctttccagtcaccagggacactcggagccacagcctatagccccgtgttccctggcctgtgcgtctgcccccttctgagatgcagccagaagctctgtgcctgctgcaaagattcaggtggaccctcctctaatct

SEQ ID NO: 16582 - DNA, 438 bp, Homo sapiens
  misc_feature (1)...(438): n = A,T,C or G
gccacacagaggccggcttggtcactatggaggagataggcatcttggtggagaaggctcaggatgagatcccagcactgtccgtgtcccggccccagaccggcctgtccttcctgggccctgagcctgaggacctggaggacctgtacagccgctacaagaagctgcagcaagagctggagttcctggaggtgcaggaggaatacatcaaagatgagcaaaagaacctgaaaaaggaatttctccatgcccaggaggaggtgaagcgaatccaaagcatcccgctggtcatcggacaatttctggaggctgtggatcagaatacagccatcggggggctctaccacaggctccaactattatgtgcgcatcctgagcaccatcgatcgggagctgctcaagcccaacgcctcagtggccctccacaagcacagcaan

SEQ ID NO: 16583 - DNA, 410 bp, Homo sapiens
gaagatgtcatctgcttaagaaggtatttatgtttgtttttctgcccggtgatatacatgaacccgggagtgtgtgaaagaaagcatcttagtcctcatttcagtgaatcagaagaaactaaaaggcatggttatttctccctcggtatgatgaagtctatataatatttgcaaaatctcctttggtgaatttgtataaacaatctatcacaaagaaagtattgttttctatatgggcttaaaggatttttggaaaatgggcagaggattttcccatgtattccctgagcctggggaatggaaatcatctcatggagacagatgaccacaggctttccacccagtccccgtggcccactagaattgtccagcatgtttcagtggtatttgattgggctcaagaccaaagt

SEQ ID NO: 16584 - DNA, 443 bp, Homo sapiens
agattccactgagagcattccagtgtcagatgaggattctgatgccatggtagatgaccccaatgatgaggactttgtgccattccggccccggcgctctcctcgcatgtccctacgctcaagtgtgtcacaaagggccgggcgctctgcagtgggcaccaagatgacttgtgcacattgccggacaccactgcagaaggggcagactgcctatcagcgcaaggggctgcctcagctcttctgctcgtcatcctgcctcaccactttctccaagaagccctcgggcaaaaagacctgtaccttctgcaagaaggagatctggaacaccaaggactcggttgtggcgcagactgggtctggaggctccttccatgagttctgcacatccgtctgtctctccctgtatgaggcccagcagcagcgcccgatcccccagtctgggg

SEQ ID NO: 16585 - DNA, 437 bp, Homo sapiens
  misc_feature (1)...(437): n = A,T,C or G
ctacggtgcacacaacctctcctctgagtgctcagccccaggctgggctctcccaggccaacttcaccctgggccctgtgagccgctcctacgggggccagtacagatgctacggtgcacacaacctctcctctgagtgctcggcccccagcgaccccctggacatcctgatcacaggacagatccgtggcacacccttcatctcagtgcagccaggccccacagtggcctcaggagagaacgtgaccctgctgtgtcagtcatggcggcagttccacactttccttctgaccaaggcgggagcagctgatgccccactccgtctaagatcaatacacgaatatcctaagtaccaggctgaattccccatgagtcctgtgacctcagcccacgcggngacctacaggtgctacggctcactcaactccgacccctac

SEQ ID NO: 16586 - DNA, 506 bp, Homo sapiens
  misc_feature (1)...(506): n = A,T,C or G
tgggcgnnnnnaattgagnatcagttacacgatcgcaantccngcgtcgacccatgcgtccgcacgaggtctacacgccgccgcttgtgctgcagccatgtctctagcgatccctgataagttccagcatattttgcgagtactcaacaccaagatcgatgggcggcggaaaataacctttgccatcactgccattaagggtgagggccgaagatatgctcatgtggtgttgaggaaagcagacattgacctcaccaagagggcgggagaactcactgaggatgaggcggaacgtgtgatcaccattatgcagaatccacgccagtacaagatcccagactggctcttgatcagacagaccgatgcaaaggatggaaaatacagccaggtcctagccaatggtctggacaacaagctccgtgaagacctggagcgactgaagaagattccgtcccatagagggctgcgtcacttctggtgcctttgagtccgaggccagcacacca

SEQ ID NO: 16587 - DNA, 438 bp, Homo sapiens
cggacgcgtggggtgatatatgaggcccaggacgtctactcaggtgacatcatcagtggcctccgagatgaaaccaacttcacagtgatcatcaacccttcaggggtagtgatgtggtacctgtatcccatcaagaacctggagatgtcccagcagtgaggagctgggacatgtgacaggctgtggtggcaccactgagcctagaccatggagccttggcatgcccagggcaagtggggaggttctctgctccccaggcctgctcggtgactgaccccatcatacccaaagtgcaatctcacggccaggttctatgccctgtccaagcgtaaaccctcttggaaacttcttttggggcaattttcctgtggccttcctggcctctacttccatgtgcgcagccccacagacgttgctgagcaactcgccagcctcctg

SEQ ID NO: 16588 - DNA, 472 bp, Homo sapiens
  misc_feature (1)...(472): n = A,T,C or G
agggccnnnnnagcttaacctagggggcttganttcaggnctnaganancgnnngaattnngggnngaccacgcgtccgtgtctgtgagatttccccctttagtttccaaccttctccccaacccttggagctaaatgcgtggtaaaatattgccaaaatgaaaagtgttttgtaatactgcaataaaggctgcttgtttttgtggaaaaaaaaaaaaaaaaaaaaaaaaaaaaaaaaaaaaaaaaaaaaaaaaaaaaaaaaaacaaaaaaaaaaaaaaaaaaaaaaaaaaataaaaaaaaaaaaaaaaaaaaaattnnttggggggggggggggtaaaaaatttttggtgggggggctctcccttttcctttaaaaaaaatttttttgttctctttttgggggggttttttaaaaaaggaatttttttttataaggaaaaactatttttttggggggggggaaaaaaaaaa

SEQ ID NO: 16589 - DNA, 401 bp, Homo sapiens
caggacccctgattcttgattgtttagagtgctcaacaggtggcaaaactctctccgacgtcgtagtggggacataagtggtgtggatggctgtgtgcaggatataactcattgccgtcaaccaccacgcgagatagcatacacatttcacagtgagaagaggtggggtgagatcacagcccatggtcacacagccaggtgggttcagtcacagaggaagcaaaggaaaggactgagcgaatgggagacttggtccccagagcttttcttccagcagctcccctgctttggcagaccaatggcattgaaaacacagcctcttcttgagcctgtgcctttccaggggttgccaatgggctactgcagactggccctggcaaccacatgctcagaacatttta

SEQ ID NO: 16590 - DNA, 505 bp, Homo sapiens
  misc_feature (1)...(505): n = A,T,C or G
ggaggcnnnnnnaattgacctcgacacacagtcgcaantncgcgtcgacccacgcgtccgcccacgcgtccgggattttcaaaggtgtggggtgtgtctggttctttgcgtgctctccagttgtgggcatgtggccaggcccccaaaaggcttctgggcactttctgggctatgttgtttcccacaactccatgtcctcttcataggcatgctggtccttttagggctcaattctgctttttctactttttctcctttgctcagacatcccctcaatcccccctctgttttgatgggtcttcaaaaatacctaagtcctgggcttggttcgggttggcagggccaggactctagagtggggcagtgaggcactggcctgtggggcagaattttaaaggggtgccaaaacactcagtaactcagatcgatactattttaatgcagcgtgttttttaaaattaattctaaaaaaacatgttggacaaaataatcaaagttaaaatca

SEQ ID NO: 16591 - DNA, 474 bp, Homo sapiens
  misc_feature (1)...(474): n = A,T,C or G
cgccgctccctaatgagagtcctgtaggtgggtcttcgcacccgcgncgacccangcgnncgggcggcgggggcggcggtggtgaagaagaggacagttttcaggaatcttaaactcctgacccaagtggaggcttccgaggaacaatggaagcagaccgaggaatggaaggtttaatcagtcccacagaggccatggggaacagtaatggggccagcagctcctgtcctggctggcttcgaaaggagctggaaaatgcagaatttatccccatgcctgacagcccatctcctctcagtgcagcgttttcagaatctgagaaagataccctgccctatgaagagctgcaaggactcaaagtggcctctgaagctcctttggaacacaaaccccaagtagaagcctcgtcacctcggctgaatcctgcagtaacctgtgctgggaagggaacaccactgactcctcctgcgtgtg

SEQ ID NO: 16592 - DNA, 475 bp, Homo sapiens
  misc_feature (1)...(475): n = A,T,C or G
gccgcttccaatgagacctctcactgagggtcatgcgaacccgcgncgacccacgcgtgcggagtccctctgcccagctcctgctgtaattagctccacgtgtacccccttcactccctcccaccagctctgcagccagcctatggcaattatattttaagaggtgttcccaggacttttgggacctactaaaacaatgatggttattttagatgtgatgatttatatttatgtagagatatttctggaccactcaagctcttcgataccaaaatcaggagcatcttgggatttattaaattatgtaagaagatagcacagatatcgggatattattgtgtgaaaatgctgcttttactttgatgtgatctcattgatgtacacaaccaagttccaataaagtgctagaatgtgaaaaaaaaaataaaaagcctctatttgacataaaactttaaagaaaattgaagggaccgcg

SEQ ID NO: 16593 - DNA, 475 bp, Homo sapiens
  misc_feature (1)...(475): n = A,T,C or G
gaccctgaagacgtcgaaannacttaggatcgtgtgaccgcccggaatccgggcgacccacgcgtccgggcaggaggaagacctgggcgctcttaaccacccccaactcccttgtctgcatgtggttttctctgtctcctccttttctgtttcttctcccagacaggtgaagaaacaagaaaactaagaaatccgagcggttggagggggagtctgtgtggatgggatggggacgccgggggaggggctgggccgctgctcccatgccctgatccggggagtcccagagagcctggcgtcgggggaaggtgcgggggctggccttcccgctctggatctggccaaagctcaaagggagcacggggtgctgggaggtaaactgaggcaacgactggggctacagctgctagaactgccacctgaggagtcattgccgctgggaccgctgcttggcgacacggccgtgatccaaggn

SEQ ID NO: 16594 - DNA, 385 bp, Homo sapiens
acacaagcccttgttgtgtgcctgagccttgctctccggcctggagacatccatctgcccactctcctaggaactgctgattaccaggaagcaccatcggctctgctgccctccccctggcagagaggcacaatgaccacattatttctcttccagcttcacgttacagcatggaagctgttgccaagtttgatttcactgcttcaggtgaggatgaactgagctttcacactggagatgttttgaagattttaagtaaccaagaggagtggtttaaggcggagcttgggagccaggaaggatatgtgcccaagaatttcatagacatccagtttcccaaatggtttcacgaaggcctctctcgacaccaggcagagaacttact

SEQ ID NO: 16595 - DNA, 482 bp, Homo sapiens
  misc_feature (1)...(482): n = A,T,C or G
cgtgattatgcctgtggnaccgtagatgaccttccggaacgacccacgcgtccgggtgtttggtgaagaaggcatgttgtgcccatattagatttatttcatctctcctaatgaatttggttgctttttatagtctgtgtacatatatgtatggcaccttatttttttctttgtagatgagtaatgaaatactggaaaaagttatttgctaaacataaagggcataatgtattgatttaaaattggattcatggaattttaaggaatttgtctattgtatctatgtaaataggattattttttataatttaggtttttgttttaaaaatcacatttgtgaggtctgtgtatggtagcttatgcctgtaatcccagcggtttgggaggctgaggtgggacgatcacttgaggccaggagttcatgggttacagtgagcttgattgtgcctctgcactccagcttggatgacagagcaacaccc

SEQ ID NO: 16596 - DNA, 406 bp, Homo sapiens
  misc_feature (1)...(406): n = A,T,C or G
aaatgatgctgtaaatgcatttacttattactccattgtaaggtagaagagtgcgttgctatcacgtgggggggtataaagtgcagtgaggattttcttgtaaatctcagatttggggcttggctatgtcacgtccctggaagaaggaggagtcatttactgccggctgttctctcctcttgggcctctgtagagatttggccctatgccttggcgggctctgctctgcagcttggccagacacatccctcagcatggcaagaagtgtggaaggtcaagaggatgtgcccacttggcctaatcctaacccaccagcacccctgttcttaaccatgtccctcatgtacctgggatccctgaattccctccccaaacaccctggaccctacttccagggcctgcgagn

SEQ ID NO: 16597 - DNA, 471 bp, Homo sapiens
  misc_feature (1)...(471): n = A,T,C or G
tttttacgagcccttgatgaccgccntggaaaacccgcgncgacccacgcgtccgattggggacttcgggctggctagggacatcatgaattatctccaactactttgtcaagggcaatgcccgcctgcctgtgaaggggatggccccagagagcatctttgactgtgtctacacggttcagagcgacgtctggtcctatggcatcctcctgtgggagatcttctcacttgggctgaatccctaccctggcatcctggtgaacagcaagttctatatactggtgaaggatggataccaaatggcccagcctgcatttgccccaaagaatatatacagcatcatgcaggcctgctgggccttggagcccacccacagacccaccttccagcagatctgctccttccttcaggagcaggcccaagaggacaggagagagcgggactataccaatctgccgagcagcagcagat

SEQ ID NO: 16598 - DNA, 407 bp, Homo sapiens
  misc_feature (1)...(407): n = A,T,C or G
acacaggagaattgcttgagacccaggagttcaaggtcagcttgggcaacatagcaagacctcaacgctacaaaaaatttttaatagcctggtgtggtggcatgcacctgtagatccagctgtttaggaggctgaggtgggaggatctcttgtgcccaggagtttgaggctgcagtgagccatgattgcaccactgcactcagcctgggtgacagagtgagatcttgtctctaaaaataaaatacaagcagtaatttaaatttgagtttattcccccttttttaaaaaagcaattgcattgcttcaatttgttcattcagtgtttagttattgctttatttccctacttctaatatttttaaaaaatttgttagcaaaacacatgtttacatgttctttcatcctcn

SEQ ID NO: 16599 - DNA, 433 bp, Homo sapiens
ctaggctgcagtatctgtggctctccctgatgttttctttctgcctttctgtcttggaggggaacctgaggatttggagggagagggctctactagcgcttcctttttgtccttttctcattgcccaaaagaggcttaagcgatctccaggagatcccctgctcctgccaggaatctgcctgtgagtatttgagtgagtggctgctttttaagtaccacttgagaagctgaaggctggtggtgtggttgtgataaactcccaacatgaaaactgaggaccaccagcgttttcagctcacctttgactcacgctggcagctccaggaacactgaacaggagtccccactgaacctttgctgcgttccgaagcagcacagccatggttaggcactgccaggcagctcttggaaaccacagggagggaagttttgg

SEQ ID NO: 16600 - DNA, 505 bp, Homo sapiens
  misc_feature (1)...(505): n = A,T,C or G
ggagcggtnnnnnnaaaactgaaagctgaagaacatcgcaannncgcgtcgacccacgcgtccgcgcaaccacagcatcttcttggcagatataaatcaggagcggggtatctatgagttctacaagaaaaacctgatggccctgaagaagtttgtgatggtgaaattcctcaatgattccattgtggaccctgaagattcggaagtggtttggattttacagaagtggccaagccaaggaaaccattcccttacaggagacctccctgtacacacaggaccgcctggggctaaaggaaatggacaatgcaggacagctagtgtttctggctacagaaggggaccatcttctattgtctgaagaatggttttatgcccacatcataccattccttggatgaaacccgcatagttcacaataaaagctcagggagcccctaactcttccaaaccacatgggagacagtttccttcatgcccaagcctgagctcagatccagcttgg

SEQ ID NO: 16601 - DNA, 433 bp, Homo sapiens
cccacgcgtgcgggttttaatagaaaaggattggatctcttttggacataaattttcagagaggtgtggccagttggatggtgacccaaaggaagtctcaccagtgtttactcagttcttggaatgtgtgtggcatttgaccgaacagtttccacaagcctttgaattcagtgaagcatttcttcttcagatccatgagcatattcattcatgccagtttggaaacttccttggaaattgtcagaaggaaagagaagagctcaagttgaaggagaagacttattccctgtggccatttcttttggaagaccaaaagaagtacttaaatcctctctacagtttcgaatctcacagatttacagttttggagccaaatacagtatctttcaattttaagttttggaggaacatgtaccatcagtttgatcgaaca

SEQ ID NO: 16602 - DNA, 416 bp, Homo sapiens
ttaatatgctaagtgccttcaataaatcccaggaagccgttgaagggcaggaattgttttggtgtaaggagcaaaaaggagtttctataatgtaggaaatgaatgtagctgttctctttcagggctgggtctagtggtctaaagttcaactgaatgggcatgattgaggcatcctcaagtattaaatagacccatagctctctgttccaggaaggggaggagagcagtccaagccaagggaggatcttgagacttgaagaagactactgggggtgtgagagggtatgggtaggtgacatttaagatttctggctttttcctgcaagcagtggcttaaagggcaacaccttaggagacaaatcagatacatacattaaaacaaatccctctgttagggtcttcctacctctaaggac

SEQ ID NO: 16603 - DNA, 486 bp, Homo sapiens
  misc_feature (1)...(486): n = A,T,C or G
ngggattgatcgctgtaggtacctttgacggaccttccgggtcgacccacgcgtccgcggacgcgtgggcggacgcgtgggggcctgagaacatactttctaaatgcctttgacccaggaaccgattatctatatttgttcccattttccttcaccgtgacattccagcattgtctgactgtgaggtgggcctttgagagcctccaggttcctcaaaacaggcctgagcgatgggcatcacaccctctgcctacccacgtgcctgcttacctgccagataaccaagtgagatgtctgcgagtggctagttttcacattcttactagtgtttggctcacctttgggcaaaggccccctctaggccttgccccacctccatcaaacgcagacactgtagtcagacctcagcaatataggaggcaataatcttttaacagtgttttgcaaacaaacaaaaagagaaaaatcccagccaggggaactcgn

SEQ ID NO: 16604 - DNA, 298 bp, Homo sapiens
  misc_feature (1)...(298): n = A,T,C or G
cggggncagtgattgaccgctgtggtaccgttgaggaacctccgggtcgacccacgcgtccgcttttggaatccttgccctagacaggggtgtccaatcttttggcttccctggtccacaatggaagaagaattgtcttggaccacacataaaatacactaacactaacaatagctgatgagctaaaaaaaaaaaaaaaaaaaaagggggggccgttttaaagaatccttgggggggccaaagtttacgcgggcatgcaaggtaaaagttttttccttataggggggggaattaaaac

SEQ ID NO: 16605 - DNA, 418 bp, Homo sapiens
cccacgcgtccgtgattatatacctagggacaatgtgtaatgtaagattactaattggttcttcccaatctcctttcagattttattaggaaaaaaaaataaacctcctgatcggagacaatgtattaatcagaagtgtaaactgccagttctatatagcatgaaatgaaaagacagctaatttggtccaacaaacatgactgggtctagggcacccaggctgattcagctgatttcctaccagcctttgcctcttccttcaatgtggtttccatgggaatttgcttcagaaaagccaagtatgggctgttcagaggtgcacacctgcattttcttagctcttctagaggggctaagagacttggtacgggccaggaagaatatgtggcagagctcctggaaatgatgcagattaggg

SEQ ID NO: 16606 - DNA, 494 bp, Homo sapiens
  misc_feature (1)...(494): n = A,T,C or G
cggggncagtggttgatcgctgtggnaccctagatgaccttccggaacgacccacgcgtccgcggacgcgtgggtgacaaaactggcacacgtgcccatgctagtgtggcatggatttgatcctggggccatgtttagaaaatggttcccagcgctaagaggatttaaaactcttataataaaagttataatagtaataggaatctgcttactgctcccttgtttgctacctgtacttcttcagatgataaaaagcttcattgttaccttggttcaccaaaatgcttcagcacaagtgtaatatatgaatcactatcgatctgtcttgcaagaaacataggtagtaaaaataaaagtgagaactcccactattgagagtctcanagtgggggaataagggaggagaccacccctcatattgtcttatgcccaatttctgcttccaaagaaagaaaaagtaaaaactaaaaggcagaaatgaaatccacaagcag

SEQ ID NO: 16607 - DNA, 418 bp, Homo sapiens
gcgccaggtcacagtcctgtcccaggtactctctgcttgcctttatcttgctctggtcagcttcctttgggagcagattcgcagaggtgggtggggagtaggaggtggaggttcccatggggcaaggaaggtgggggacactgtagctccaggttttctcctgttgcagagagaagccagcttcatgggaaagggcaacaggttgaggcctcggtccccagcagcttcaggctcaggccctgagtgtccacttcaaccaggtggatgctgtaattcccaaggccctggacaagacaggaagtatttagaaggctctggacaaatctcaggccttctggaggctggactgggcctgcaggaccagggggacttacagatataccccctggttaacttgtgggccacagtgaggtctctt

SEQ ID NO: 16608 - DNA, 414 bp, Homo sapiens
tgctccgtggtgaaactattttgtacctcacataagtttttcagtctatcagtgaatgagagcttgaagataaactggacaagataattaatgcggttgagaagcaacccttgtcatcaaacatgattgaacgatctgtggtggaagcagcagtccaggaatgcagtcagtctgttgatgaaactatagagcacgttttcaatatcataggagcatttgatattccacgctttgtgtacaattcacaaagaaaaaaatttcttcctatgttaatgaccaaccaccctgcaccagattgtaaagtaaaaagctgaccactccatgctgaagtaaacaccatgagagcctctaaatggagccgcccccggtaagagtgccccattttgcggggccctgacggcatatcatttaaaa

SEQ ID NO: 16609 - DNA, 430 bp, Homo sapiens
  misc_feature (1)...(430): n = A,T,C or G
tgctccgtggtgaagctattaagtacctcacagaagctcttcagtctatcagtgaattagagcttgaagataaactggaaaagataattaatgcagttgagaagcaacccttgtcatcaaacatgattgaacgatctgtggtggaagcagcagtccaggaatgcagtcagtctgttgatgaaactatagagcacgttttcaatatcataggagcatttgatattccacgctttgtgtacaattcagaaagaaaaaaatttcttcctctgttaatgaccaaccaccctgcnccnnnnaaaaaaaaaaaaaaaaaaaaaaaaaaaaaaaaaaaaaaaaaaaaaaannnnnnnnnnnnnnnnagggggggcctttagaagaacatttgtgggggcccccacaaacacaactgatcttccctcttttttttttt

SEQ ID NO: 16610 - DNA, 417 bp, Homo sapiens
caatatgagagctttaatatactaaccatttcttatggaaaggtcctgtggggagcccatcctctcgccaagccatcacaggctctgcatacacatgcactcagtgtggactgggaagcattactttgtagatgtattttcaataaagaaaaaaatagttttacattaaaaaaaaaaaaatttaaaaaaggggccgccccttttaaaggacccctgggggggcccagctttacccgggcttgaaaggtttaagttttttccttatagggggccgtttaaaaacctacctgggaatttttggaaaggacccttacttttggggggggacatattgggacaacctccctacaaaaattaaaggctttagggaaaaaataaaattttaaagggtataaggggtaaaccaacctcgttacg

SEQ ID NO: 16611 - DNA, 417 bp, Homo sapiens
ccatgtggtaactttacgtaacataaatccagggtggaggttctagaatcttccatccacctaatgagatttagatttgcctacagtcatggagggatttttgtagccttccctgttatcagcaatcatttccttgagagaaacccagttctagctctacctgctgttgagggctgtgaagttgcccccaggaaacagagacaatgataggcaccaggatcatcatctccaatatttttattgaagttctctatttaccaatgggtcaatcttgtttccttaaatcaggaataaatttccacctgctaaagatgagttggaagtatgactgttcttgtgggtaactaagtccagaactgttctgggtttctgatcacagtatcagtttctcttgcctcagcgggtaaggaaaggctg

SEQ ID NO: 16612 - DNA, 402 bp, Homo sapiens
  misc_feature (1)...(402): n = A,T,C or G
tttgttttaactgaactaaaataaatacatgcttaatcctgaaaaaaaaaaaaaaaaaaaaaaaaggggggggcccgtttaaaaaaacccttggggggcccaaatttaacgggggaaggcaaggtaaaacttttttccttaaggggggccgaataaaaacctactggggaattttggaaaaaaaacttaattttggggggggaaaaaatgggaccaacctccccacaaaaattaaagcctttagggaaaaaaaaaaattttaaggggaaaagggggaaaaaaaacctcaaattccttgtttttaaaaaattgnnnnnnncngnncnngnnnnnnctnngnncaaaaccggctgggggcccacccagaataagctcccttgcctcagcgggaaagaaaagttt

SEQ ID NO: 16613 - DNA, 414 bp, Homo sapiens
aaataccaattattttgatggaaattatttgaaggcattggaatacaaatctgtgtgaagtgagttaaatctccgcaaggccaagatacactgtgtttaattacaccttcatggaaactcaattatatccttcttgctgatagaaaactgaattccttaaaaattaaatgaattaaaatttgtgtatgacaggactattatacccataacagttccactgcaagtacatgagactgtcatggcaataactgaaaaactaaaggagatgtctatgtagacagctgctcatttactgcctgaggctcagaatcaatcataactccaggtgaactgaatccctcagagcaccaagggaaacctgagaagcattccaggagacctccgtttgactggcttttcggatatatataacac

SEQ ID NO: 16614 - DNA, 412 bp, Homo sapiens
aggtcacagagttcctccctcctgaggatgcagtgttcatgaaagcaaacactgggccctcaccaggcaacaaacctgctggtgccttcatcttggacttcccagccttcggaactatggagcccgcactctccagttcatcaccaccccagcatccctactcttgcatctaacagtttccgctattttgcaccacctgcctggcccttatgggcaactcaaggaagaaaggaaagaagagatagaggaaaaatggattcaacaaatgaaagtgttctttctgactactgctgtgtttacaaacattttaatcatcaaaacatgctttatttgatagaaagatcaaatctgcctttgtaaaacaagagactattttaatcattaagacaacacacatgtttgatttggaggc

SEQ ID NO: 16615 - DNA, 424 bp, Homo sapiens
  misc_feature (1)...(424): n = A,T,C or G
aaggacacctagcgcaagagagagccctccgggctttgacgtttggacagcaccgggagggctcacagcgccaaccgcctgcccttctttttcggcttcctctcccgggaggaggcataaaattacctgggccattttggcaagagaaattttctttatttgctgcgccagagccgcaactacctgcgtggctttttcctgtccgtgggccacggaaggaatgcacaccactacaccatcgaacgggagctgaatggctcctacgccatagacggtggcangacccatgccagccccgccgacctctgccactaccactcccaggagtctgatggcctggtctgcctcctcaagaagcccttcaaccggccccaaggggtgcagcccaagactgggccctttgaggatttgaaggacaacctcn

SEQ ID NO: 16616 - DNA, 425 bp, Homo sapiens
tcgccgagacgctggatatagcacccctaaccgggcttctgctgatctcggcggccctggccctgaccgagacctgagccggatcccactccatgacgaatttctacacctccgtgacccggcccggtcgcggggagccccgcttcatctcagtgggctacgtggacgacacccagttcgtgaggttctacagcgactccgcgagtccgagagaggagccgcggcctccgcggatagagcaagaggggccggagtattgggaccggaacacacagatctacaaggcccaggcacagactgaccgagagagcctgcggaacctgcgcggctactacaaccagagcgaggccgggtctcacaccctccagagcatgtacggctgcgacgtggggccggacgggcgcctcctccgcgggcatgaccag

SEQ ID NO: 16617 - DNA, 416 bp, Homo sapiens
  misc_feature (1)...(416): n = A,T,C or G
agtaacgccattaccgccggagccgccgagagccttagccgacggaaactggacactggaccggcagcgccatgagactcctcccccgcttgctgcttgagagtttagtcgngntccctgccactgtcttgttccgaggcggccccagaggcttgttagcagtggcacaagatcttacagaggatgaagaaacagtagaagattccataattgaggatgaagatgatgaagccgaggtagaagaagatgaacccacagatttggtagaagataaagaggaagaagatgtgtctggtgaacctgaagcttcaccgagtgcagatacaactatactgtttgtaaaaggagaagattttccagcaaataacattgtgaagttcctggtaggctttaccaacaagggtacagaagatttt

SEQ ID NO: 16618 - DNA, 423 bp, Homo sapiens
cccacgcgtacgcacgctcggtatcgcgacgggggagagcaaaacctttaaacaaatgctccagttttccccgcagagagccggagtcaaatccgtgaggaagcccgggggtcgcagtgaagcccaacccactggtgctgggaaaacctcgcccgcaacccggatccaggccgcaggtcccccgaggctccgcccctgacggcgacactcaatcccgggtgtccccgcccccttactgaattttggccccgcctccgccctccgattggccggacgccagctctacgccgcacgggcaagacgcggaggagcggccccagccagaagacagggcacccgcggccttgctgcgcatgctcgcgctgtgaccccggcttgaggtaacagcgcgagctgaggctggggcccttggcgcggaggctg

SEQ ID NO: 16619 - DNA, 418 bp, Homo sapiens
  misc_feature (1)...(418): n = A,T,C or G
aacgcagccatggctcgtggtcccaagaagcatctgaagtgggtggcagctccaaagcattggatgctggataaattgaccggtgtgtttgctcctcgtccatccaccggtccccacaagttgagagagtgtctccccctcatcattttcctgaggaacagacttaagtatgccctgacaggagatgaagtaaagaagatttgcatgcagcggttcattaaaatcgatggcaaggtccgaactgatataacctaccctgctggattcatggatgtcatcagcattgacaagacgggagagaatttccgtctgatctatgacaccaagggtcgctttgctgtacatcgtattacacctgaggaggccaagtacaagttgtgcaaagtgagaaagatctttgtgggcacaaaaggaatcn

SEQ ID NO: 16620 - DNA, 390 bp, Homo sapiens
tttaaaaggctgaacatcaatgcggccaaatctagtttcctcccagaagatgaaaagagggagcttctcgacctgctctataaagcctatgggatgccaccttcagcctctgcagggcagaacctctgaagacgccactcctccaagccttcaccctgtggagtcaccccaactctgtggggctgagcaacatttttacatttattccttccaagaagaccatgatctcaatagtcagttactgatgctcctgaaccctatgtgtccatttctgcacacacgtatacctcggcatggccgcgtcacttctctgattatgtgccctggccagggaccagcgcccttgcacatgggcatggttgaatctgaaaccctccttctgtggcaacg

SEQ ID NO: 16621 - DNA, 416 bp, Homo sapiens
aggtcttgaggctatcagatcggtatggcattggcgttcgggcccgcaaggcgggcgctagctggctccgggcagctcggccttgggggcttcggggccccgagacgcggggcgtatgagtggggcgtgcgctccacgcggaagtcggagcctcctcccctggatagggtgtacgagatccctggactggagcccatcacctttgcggggaagatgcacttcgtgccctggctggcgcggccgatctttccgccctgggaccgcggctacaaggacccaaggttctaccgctcgccccctcttcacgagcatccgctgtacaaagaccaggcctgctatatctttcaccaccgttgccgccttctcgagggtgtaaagcaggccctctggctcaccaagaccaagttaatagaagg

SEQ ID NO: 16622 - DNA, 417 bp, Homo sapiens
gagaagcaggagctgtccggtatattacaagccactcttttatgaccagcgcgaccttagctccaacaatgagcaactgcccatgctgggccggcgccctggggccccggagagcaagtgcagccgcggagccctgtacacaggcttttccatcctggtgactctgctcctcgctggccaggccaccaccgcctacttcctgtaccagcagcagggccggctggacaaactgacagtcacctcccagaacctgcagctggagaacctgcgcatgaagcttcccaagcctcccaagcctgtgagcaagatgcgcatggccaccccgctgctgatgcaggcgctgcccatgggagccctgccccaagggcccatgcagaatgccaccaagtatggcaacatgacagaggaccatgtgag

SEQ ID NO: 16623 - DNA, 493 bp, Homo sapiens
  misc_feature (1)...(493): n = A,T,C or G
nggggncagtgtttgatcgctgtggtaccgttgaggaccttccgggacgacccacgcgtccgctccagtcctgcccaggccctgggtcaccaggtcactgctgcagcccccgcccctgggccctggtcttcctccaacatcacacctgctgcccattctccatttctgtgtgtgtcaaaggggactaacagcagaatctacctcccaactgccatgtgattaagaaatgggtcttgagtcctgtgctgttggcaaagtgccaggcacagttggggaggggggggtccttaacaagcgtgactttgctcattctgtcatcactaaggcaataaacctttgccaggtgaaaaaaaaaaaaaaaaaaaaaggggcggccgttttaaagaatccctgggggggccaaagtttacgcgggcatgcaaaggaatagttttttccttatagggagccgaataaaaacctacctgggaatctttggaaaggaaccttactt

SEQ ID NO: 16624 - DNA, 405 bp, Homo sapiens
cccacgcgtccgcccacgcgtccggtgagagccatcattcattcctcacacctaaagcagggtgtaacagttcatactggaaagaaatctaaaaagactaagaaacatgggaaatccttcactaatttttctcaactttctgcacatgtgaaaattcataaaggagagaagtcctttgaatgtaaagaatgtggaagatcctttagaacttcctcatcctttaatgttcacattcaaattcacactggaataaaaccacacaaatatacggaatgtgggaaagccttcactaggtcaactcaccttactcaacatgtaagaactcacactggaataaaaccctatgaatgtaaggaatgtggccaagccttcactcagtacacgggccttgctatacacatacga

SEQ ID NO: 16625 - DNA, 386 bp, Homo sapiens
tcctcacagcgtcgctcccggccctcttttcgtcttactccggcctgggagcagcaggaggagcccccagcccccaaccctcctgaggaggagctgtcagctcctgagcagagacccctccagctggaggaacccctggagccaagccctctgaggcatgatgggaccccggtgccagccaggagaaggcccctgggacacgggtttggcctcgcgcaccctggcatgatgcaggagctgcaagcccgtctgggccggcctaagccccagtgactgagacccggtgctctgggagccaggccctgagtgggtgccagaaggcttgctccaatgccactgagccctgctccctctgccactgtggacacatcctctccaccctctgg

SEQ ID NO: 16626 - DNA, 390 bp, Homo sapiens
  misc_feature (1)...(390): n = A,T,C or G
cccacgcgtccggggaagagctgaagctggcgctncttgttcggcgcggcccgctgcaatccgtggaggaacgcgccgccgagccaccatcatgcctgggcacttacaggaaggcttcggctgcgtggtcaccaaccgattcgaccagttatttgacgacgaatcggaccccttcgaggtgctgaaggcagcagagaacaagaaaaaagaagccggcgggggcggcgttgggggccctggggccaagagcgcagctcaggccgcggcccagaccaactccaacgcggcaggcaaacagctgcgcaaggagtcccagaaagaccgcaagaacccgctgccccccagcgttggcgtggttgacaagaaagaggagacgcagccgcccgtggc

SEQ ID NO: 16627 - DNA, 468 bp, Homo sapiens
  misc_feature (1)...(468): n = A,T,C or G
ggagtacccgattttcccanaactgacaggcttcgatcagctncggaancccggncgacccacgcgtccgcccacgcgtccggagaagagctgaagcaagcgccccttgctcggctttgcccgcngcaanccgnggaggagcgcgccgacgagccaccatgatgcctgggcacttacaggaaggcttcggctgcgtggacaccaaccgattcgaccagttatttgacgacgaatcggaccccttcgaggtgctgaaggcagcagagaacaagaaaaaagaatccggcgggggcggcgttgcgggccctggggccaagagcgcagctcaggccgcggcccagaccaactccaacgcggcaggcaaacagctgcgcaaggaggcccagaaagaccgaaagaacccgctgccccccagcgctggcgtggttgacaagaaagaggagacgcagccgcccgtggcgcttaaga

SEQ ID NO: 16628 - DNA, 389 bp, Homo sapiens
tgatgaaagccctactggccgggcttttccggccttttgagcgtccctggaggaacccgattccctttcccgagacggttgacggagataccgaccgactcccggagtttatagagcagacggggctcctacatgtgcgaggacgataacacgttgtgcaacgacgccctgaaagagacgttcctcataacccgcctcacggggccagccctgcagtgggtgagcccctacatcaagaaagagagccccctgctcaatgattaccggggcttcctggccgagatgaagcgggtctttggatgggaggaggacgaggacttctaggccgggagacccttgggcctgggggcgggtgctctgggaagagttcgctgtgccagtggccaccg

SEQ ID NO: 16629 - DNA, 450 bp, Homo sapiens
  misc_feature (1)...(450): n = A,T,C or G
gcagcccaatttgaaagcacgtcgagatcagtacgacncgaannnngggggancacgcgggcgccttcgtncgtgcttaacagagcttggacgggtgcttttttttttccccaccccggccggccggcgatagcttgtcgtccgttagggcttcaccgcaccctcggactgccccaaggcccccgccgccgctccagcgccgcgcagccaccgccgccgccgccgcctctccttagtcgccgccatgacgaccgcgtccacctcgcaggtgcgccagaactaccaccaggactcagaggccgccatcaaccgccagatcaacctggagctctacgcctgctacgtttacctgtccatgtcttactactttgaccgcgatgatgtggctttgaagaactttgccaaatactttcttcaccaatctcatgaggagagggaacatgctgagag

SEQ ID NO: 16630 - DNA, 482 bp, Homo sapiens
  misc_feature (1)...(482): n = A,T,C or G
cgccgctcccattgaactcctgnatgaccggccctgaaancccgcgncgacccacgcgtccggttaacagtagtgagcaggctgtagttcgttattaacttaattatgactcacaatgcagcttaccctacatgattcgtaattttatcgtagccaagagaaaatggagtttctttgaacagcatctgtctcccttcactgctggtaatttgtgtgttattattaatcactgtttttggaatctctgggtaaataggcactaaataagcccaaaaatatgagcaaaagttgtctgttaattcattggccactgcagaaaggagtactaaagcccagaaaagagntctgagcttccttctatctctcactagcgcgttctctctaatttgcattccttaaaaatgaggtgcacttgctttagtggcatgtatattttttaaaaatacagataaggttagtgtggctcctgtataaaaatgact

SEQ ID NO: 16631 - DNA, 369 bp, Homo sapiens
cccacgcgtccgcggacgcgtgggataatgttttaaaaagttgcaatacaaatgctgcttcaaaaagtttttgttatggccaggcacggtggctcatgcctgtaatcccagcactttgggaggccgaggcaggtggatcaagaggtcaggagttcaacaccagcctgaccaacatggtgaaaccctgtctgtactaaaaatgcaaaaattagccaggcatggtggcacatgcttgtaatcccagctactcaggaggctgaggcaggagaatcacttgaacccgggaggcggaggttgcagtgagccaagatcgtgccactgcactccagcctgggcgacagagaccatctaaaaaaaaaaaaaaaaaag

SEQ ID NO: 16632 - DNA, 398 bp, Homo sapiens
aatcttgatgggaaaattgggtgtttgctaagtattttaggatctacttgttatggtcattcatgctccaaaggaagaggagattgagactttaaatgaaaggtctcacaagctatgtgatccaggttttgtggtctttgcaacccttgtggacattgtggccttgatattaatcttcgtggtgggtcctcgccatggacagacaaacattcttgtgtacataacaatctgctctgtaatcggcgcgttttcagtctcctgtgtgaagggcctgggcattgctatcaccgagctgtttgcagggaagcctgtgctgcagcatcccctggcttggattctgctgctgagcctcatcgtctgtgtgagcacacagattaattacctaaatagggccctgg

SEQ ID NO: 16633 - DNA, 515 bp, Homo sapiens
  misc_feature (1)...(515): n = A,T,C or G
nagcgttnnnnnaaactgaaacctgacggncgctcgcaagtccncaattgacggatggacccacgcgtgcggcaggaccatacagagtgtgggaactgctggggatctagggaattcagtgggaccaatgaaagcatggctgagaaatagcaggtagtccaggatagtctaagggaggtgttcccatctgagcccagagataagggtgtcttcctagaacattagccgtagtggaattaacaggaaatcatgagggtgacgtagaattgagtcttccaggggactctatcagaactggaccatctccaagtatataacgatgagtcctcttaatgctaggagtagaaaatggtcctaggaaggggactgaggattgcggtggggggtggggtggaaaagaaagtacagaacaaaccctgtgtcactgtcccaagttgctaagtgaacagaactatctcagcatcagaatgagaaagcctgagaagaaagaaccaaccacaagcacacaggaaggg

SEQ ID NO: 16634 - DNA, 396 bp, Homo sapiens
ttgttcccaaaacaagagggagctgggctggaagctccactattcttctttaggcatcttgttacagagagaggcagggtcttcactgacatattaaatcctgttccctgaaccagcccctccctcttctgctccacttcctcacctgtgcagagtcattttcaggtgttagccttactgatttgcactgatctgtttgttccctgagctttttaaataccctgtgaaaattttctttcctcccttggtcatcatgcatctaattgtggggaaatgtttgtcaaaccaacctgcaaagcagcatggtgtagttgagaagaataaacagagaagactgggtgaaaaaaaaaaaaaaaaaaaaaaaaaaggggccgccccctaaaagaacccctcggg

SEQ ID NO: 16635 - DNA, 390 bp, Homo sapiens
tgctgatgaagccttacaaaaagcaatttagtcagactcctccagcccccaaagagtgcagagacctcactctagtcctcctcgctttgtgacagtagaagaacttctagagacagcgagaggcgtcaccaacatggctctagcccatgaaattgtagtaaatggagactttcagattaaaccagttgaattaccagaaaacagcttgaagaagagagtaaaggagattgtacataaagcgttttgggattgcttgagtgtgcagctaagtgaagatcccccagcatatgaccatgctatcaaacttgtaggagaaatcaaagagactctcttatctttcttgctgcctggtcatactagactgagaaaccagataacagaagtcttgga

SEQ ID NO: 16636 - DNA, 407 bp, Homo sapiens
cccacgcgtccgcagccagaaagaaggctcgggaatgtggcacagaacacatcccagcccacgttccaggagcatccagcctgtttctagggcggcacttgccattcaagttgcatgtaagtgagatctggagtcgaagtttaccctggagaaagggaagaaaaaaaagcagttgaatccgtgaatgtactggagagtttactggagagagggcactcatggtgggtggtgtgtgtgtgtgtgtggtgtgtgtgtgtgtttgcctttcatccttttgcttaagagaaagattgtattctttatgacatccgacagacctatctgtttctttttattaaaattcatgttatcctagggccatagaaataaattagcatcctttggccccatgcttccacattcttcag

SEQ ID NO: 16637 - DNA, 392 bp, Homo sapiens
gctccgcaggggctcggctgttttccgcgcgttaggcgcggtcatggcgcagctgggaaagctgctcaaggagcagaagtacgaccggcagctgaggttgtggggtgatcatgggcaagaggctttagaatctgctcatgtttgcctaataaatgcaacagccacaggaactgaaattcttaaaaacttggtactaccaggtattggttcgtttacaattattgatggaaatcaggtcagcggagaagatgctggaaacaatttcttccttcaaagaagcagtatcggcaagaaccgagctgaagctgccatggaattcttacaagaattaaatagcgatgtctctggaagttttgtggaagagagtccagaaaaccttctagacaatgatc

SEQ ID NO: 16638 - DNA, 406 bp, Homo sapiens
  misc_feature (1)...(406): n = A,T,C or G
aacttagaggtggggagcagagaattctcttatccaacatcaacatcttggtcagatttgaactcttcaatctcttgcactcaaagcttgttaagatagctaagcgtgcataagttaacttccaatttacatactctgcttagaatttgggggaaaatttagaaatataattgacaggattattggaaatttgttataatgaatgaaacattttgtcatataagattcatatttacttcttatacatttgataaagaaaggcatggttgtggttaatctggtttatttttgttccacaagttaaataaatcataaaacttgaaaaaaaaaaaaaaaaaaaaaaaaaagggcggccgttttaaaggattccttggggggcccaaactttaggggggatggcacaatn

SEQ ID NO: 16639 - DNA, 415 bp, Homo sapiens
  misc_feature (1)...(415): n = A,T,C or G
aggcatctgaatgtgtctgcgttcctgttagcataatgtgaggaggtggagagacagcccacccccgtgtccaccgtgacccctgtccccacactgacctgtgttccctccccgatcatctttcctgttccagagaagtgggctggatgtctccatctctgtctcaacttcatggtgcgctgagctgcaacttcttacttccctaatgaagttaagaacctgaatataaatttgttttctcaaatatttgctatgaagggttgatggattaattaaataagtcaattcctggaagttgagagagcaaataaagacctgagaaccttccagaaaaaaaaaaaaaaaaaaaaaaaaaaaaaaaaaaaaaaaaaaaaaaaaaaaaaaaaaaaanaaaaagggggggccccttttaaaa

SEQ ID NO: 16640 - DNA, 472 bp, Homo sapiens
gcgggggttttaactcatcgcatgcggtacggcttccagattccaggccacgacgcccgcgaggagaagcaggagctgacgggaagaccagaagtttgtcttgtatgaccagcgcgaccttatctccaacaatgagcaactgcccatgctgggccggcgccctggggccccggagagcaagtgcagccgcggagccctgtacacaggcttttccatcctggtgactctgctcctcgctggccaggccaccaccgcctacttcctgtaccagcagcagggccggctggacaaactgacagtcacctcccagaacctgcagctggagaacctgcgcatgaagcttcccaagcctcccaagcctgtgagcaagatgcgcatggccaccccgctgctgatgcaagcgctgcccatgggagccctgccccaggggcccatgcagaatgccaccaagtatggcaacatgacagaggac

SEQ ID NO: 16641 - DNA, 413 bp, Homo sapiens
ggaaccatggaaaccccagcgcaacttctcttcctcctgctactctggctcccagataccaccggagaaattgtgttgacgcactctccaggcaccctgtctttgtctccaggggaaagagccaccctctcctgcagggccagtcagagtattagcagcacctacttagcctggtaccagcagaaacctggccaggctcccaggctcctcatctatggagcatccagcagggccactggcatcccacacaggttcagcggcagtgggtctgggacagactttactctcaccatcagcagactggagcctgaagattttgcagtctattactgtcagcagtatggtagctcacctcggacgctcggcccagggaccaaggtggaaatcaaacgagctgtggctgcaccatctgc

SEQ ID NO: 16642 - DNA, 410 bp, Homo sapiens
cccacgcgtccgcccacgcgtccgcggacgcgtgggccagcctctgccaggttcggtccgccatcctcgtcccgtcctccgccggcccctgccccgcgcccagggatcctccagctcctttcgcccgcgccctccgttcgctccggacaccatggacaagttttggtggcacgcagcctggggactctgcctcgtgccgctgagcctggcgcagatcgatttgaatataacctgccgctttgcaggtgtattccacgtggagaaaaatggtcgctacagcatctctcggacggaggccgctgacctctgcaaggctttcaatagcaccttgcccacaatggcccagatggagaaagctctgagcatcggatttgagacctgcaggtatgggttcatagaagggcacgtgg

SEQ ID NO: 16643 - DNA, 412 bp, Homo sapiens
  misc_feature (1)...(412): n = A,T,C or G
tgtatatgctgtttaatttaagttaatgttaagtaatcatttctcattccaaagacaatgcaaaaaacttcagcactgcttgagagttgtatttcagccacagatattttctccattggaaagctattttcattttagaaaaatgggttgtttgaagatgaaagtcttttatcttttttcacaatttattttggttatatgttcgtacattcttattaaatatttcatacactttattgcaactactttgttatttctacatcttagataaatgctgaaaaggaaaacgatttcattgttcatctaattaaataaattaaaaagagcggtttgtgtagaaattggagagaactatgttttatatgaatcacaacagtgctcgttgggactgaattanatgctttgcctctgg

SEQ ID NO: 16644 - DNA, 413 bp, Homo sapiens
cagctccggccgcctggctccccatactagtcgccgatatttggagttcttacaacatggcagacattgacaacaaagaacagtctgaacttgatcaagatttggatgatgttgaagaagtagaagaagaggaaactggtgaagaaacaaaactcaaagcacgtcagctaactgttcagatgatgcaaaatcctcagattcttgcagcccttcaagaaagacttgatggtctggtagaaacaccaacaggatacattgaaagcctgcctagggtagttaaaagacgagtgaatgctctcaaaaacctgcaagttaaatgtgcacagatagaagccaaattctatgaggaagttcacgatcttgaaaggaagtatgctgttctctatcagcctctatttgataagcgatttgaa

SEQ ID NO: 16645 - DNA, 477 bp, Homo sapiens
  misc_feature (1)...(477): n = A,T,C or G
acgggttcaccctggcagcgtgcgatacccccttaaaatattttgtgagacgcacgcgaanggnggagnggngcaatctcagctcactgcaaactccacctcctgggttgatgccattctcctgcctcagcggcctgagtagctgggaagacaggtgcatgccaccatgccaggctaattttttttgtatttttagtagagaaggggttttactgtgttagccaggatggtcttgatctcctgacctcatgatctgcccacctcagcctcccaaagtgctgggattataggcgtgagccactgtgcctggccttttttttttttttttttaaagaaacccccctttgggaaaaagggaaaatttttcttttgcctttttggagtttttaccccacccctaaggccctcaaaactttttttttttttgcccaaggggaaaaaaaaggtttcctttttaaatcaaggggttgttgtttc

SEQ ID NO: 16646 - DNA, 483 bp, Homo sapiens
  misc_feature (1)...(483): n = A,T,C or G
gggccggaggttaaccctgcnagcttgtananacgctggaaactgagatctagcacgcgcccgnccacgcgtncggccgtctccggtggggccattagaatgaggcagacaccaggccactctagaagccgagccgtcacacctcaggcgtgtgcggggcggggacggggggtctcctggttacattttggattaaacctgtttcccggttatgtgtagggaacagcagagtgatgcacgaactttgaacattcgttatggggaaaacatcctttaacttcggggtcgtctgccagagcagggtctgggagggtccatgcagttcccgctggtgtggagggaaatgccctggtctggcctccgagcccccaggtccaccgtctcccctcccctcatttgtaagaatagctacacactaacattttgggaaggagaggcacataactttttttaacatttggtaactaggttatgggctctaca

SEQ ID NO: 16647 - DNA, 443 bp, Homo sapiens
  misc_feature (1)...(443): n = A,T,C or G
ccacgcgtncgggcagatcatgaggtcaggaaatcgagaccatcctggctaacacagtgaaaccccatctctactaaaaaaaatacaaaaaattagccgggcatggtggagggcgccggtagtcccagctactcaggaggctgaggcaggagaatggcatgaacctgcgggggtggagcttgcagtgagccgagatcgcgccactgcactccagcctgggcaacagagcgagactgcgtctcaaaaaaaaaaaaaaacgggaggaaaggatcaccgggacttttcccttaggggggtgagcataggcccttatttgggcctgggggcacaggaaaaaggaatttatttcaaaccatttgggaaaaacaaggttatttctgttttttgcatgggcaatttttttcagggagaggaccagatttaaaacttacctatattttcgg

SEQ ID NO: 16648 - DNA, 482 bp, Homo sapiens
  misc_feature (1)...(482): n = A,T,C or G
ggccggagattaatccttgtgctcgcanaacgctgancctagnagcctcgcangcgcncggngagncacccggnctggcctagaaggacttttaaaagaacaaantaaancagggcactcctttgcttacaacgcagtgcgtttagaggtacaccccatgtctccacagggcatacagcatccgatttaatctggatccattccggcgccttcctctcccagtcacccagagggccccaaccccggcggccctttcttcctcaaatgtcctcggctctataccgtgcctgggtcttttctctttctctctgcctggaagattccttctttccccttttgtcttgcccactcctgtttacccttcaagtttcaagttcatgtcactgtctcagagaggttttcctgtgctcgccctgtttctctcaggaagccttgctcttttccatcatgcctctaatcacagcttataatcggatatttat

SEQ ID NO: 16649 - DNA, 477 bp, Homo sapiens
  misc_feature (1)...(477): n = A,T,C or G
aggcgngnnnagccgccactgacgccctcggnctgatcacgtttgccgggccgacccacgcgtccgcccacgcgtccggacatgggggacttttgcacaaccgacgcttttccttaatgttagtgagatatatatatattatatatatatatttttttttcggttacgaagggtgacattttgtgtgtatgatatctgggcaaaaacaacacccacacagatgcggacttgtgccttgcttggacatggtcaaacccactgggccttgatcgctgacacacacactcttaccccaaccaaactaaatgcctataaccctgtgaagtgccagtccttgtccacgaaactcagatcccggcctggctttctttcatgaaaggagcaggccttggacagagtatcgagcatcctgacccactgcccctgcctgagaacgccatcttggctcccgggcacatgtgatggggttaggggatt

SEQ ID NO: 16650 - DNA, 438 bp, Homo sapiens
gacttcctgtgcaagaacatgaaacatctgtggttcttccttctcctggtggcagctcccagatgggtcctgtcccaggtgcaactgcaagagtcgggcccaggactggtgaagccttcggagaccctgtccctcagttgcagtgtctctggtggttccttcactagttactactggagctggatacgacagcccccagggaaggcattggagtggattggatatatctttcatactgggaacaccgattacaacccctccctcaggagtcgagtctccatgtcagtggacacgtccaagagtcaattctccctaaacctgacttctgtgaccgctgcagacacgggcgtgtatttctgtgcgagagatcgtcctagtcctggttatcctgggcccggcttccacccctggggccagggaattctggtcaccgtctct

SEQ ID NO: 16651 - DNA, 508 bp, Homo sapiens
  misc_feature (1)...(508): n = A,T,C or G
tggagggtccanactttaannagaaactgacgccctccgnannnnacatgagtatcgtcgtgaccgncnncgaannnnngggncgacccacgcgtccgcccacgcgtccgcaggaacccttctctgaagcaacagctcttctcctacgccattctgggctttgccctctcggaggccatggggctcttttgtctgatggtagcctttctcatcctctttgccatgtgaaggagccgcctccacctcccatagttctcccgcgtctggttggccccgtgtgttccttttcctatacctccccaggcagcctggggaacgtggttggctcagggtttgacagagaaaagacaaataaatactgtattaataagaaaaaaaaaaaaaaaaaaaaaaaaaaaaaataaaaaaaaaaaaaaaaaaaaaaaaaaaaaaaaaaaaaaaaaaaaaaaaaaatttgggggggggccccataaaaaaaccctggggggggcccctttctcctccgtgt

SEQ ID NO: 16652 - DNA, 512 bp, Homo sapiens
  misc_feature (1)...(512): n = A,T,C or G
naaggccggnntnnattgaaaactgagaggcactcgccagnccgcaattgccggatcgacccacgcgtacggcactgcctgcacgcaggaaccctcagagtcctgagctgaaccaagatggaggagggggtcgggcctccgaggaaggcctagctgctgctgctgccaggaattccaggttggaggggcggcaacctcctgccagccttcaggccactctcctgtgcctgccagaagagacagagcttgaggagagcttgaggagagcaggaaagcctcccccgttgcccctctggatccactgcttaaatacggacgaggacagggccctgtctcctcagcttcaggcaccaccactgacctgggacagtgaatcgacaatgccgtcttctgtctcgtggggcatcctcctgctggcaggcctgtgctgcctggtccctgtctccctggctgaggatccccagggagatgctgcccagaagacagatacatcccaccatgatcaggatcan

SEQ ID NO: 16653 - DNA, 407 bp, Homo sapiens
agagtaactgactagttagtattagaagaccctcgaggtttttttccacagaaaaacatctgaagatggattgggtgagggctggcaaaacgaaggcatgccgggccagctccttaacccaatgacccagtgatgctgcaaggctggaacggggtccaggagactgtgtgtaacaggtgccctaggtgacccttataatcagggaagtttggtgaacaaaaatcgaacccatgagtgaacataaattaaaaagttgatcaacctattaaaatgtgtatttcattgggtagcttttctcactgtagacagattttttccttcttcaatgaaaaggcttttaaattagtacaactgttactatttaaaaaaaaaataccctaagtactctgtttacttctggtgaaaca

SEQ ID NO: 16654 - DNA, 477 bp, Homo sapiens
cgccgcgtcccgatagagacccttcatagacggccctgagaacccgcgtcgacccacgcgtccgcagagctctgccgggggctggaggcactgaccgggtgaccagagacccttagaccagaccccctccacggcgcccgggatttcggggacagcttctcccatcgcaagtagggcttggacgggaggcgacaaaagagaacttggtccgcacacagccaccgaaattggaatgaggagctgtagggaggccccgtagccagcagaaaagcattggggtccctggctgggttagcccaggcttctaggagtgtggtaagcgtcgaatgacttttgtccttttaaagcacattatgttactttttccccaaggtttcaacagaaaatgagaaatatcgcccgacgattggctgaaaacatgcagcaaccactattttcttcctgcccctcgttgatgagagcattcgaagtgacctc

SEQ ID NO: 16655 - DNA, 484 bp, Homo sapiens
  misc_feature (1)...(484): n = A,T,C or G
gcgagttcccccaggagctccgcatnnncncaaaananactggagaaccccnnccgaannnnngggnngacccacgcgtgcgcccacgcgtacggcaaaccaggagatcagcccactgtacagcatgattcagggactacaacaggagcaagacctgagacgttctggtgaagcaggtatcaataataccagccgtttaagtagaggctccataagttctacctcagaggttcattcaccaccaaacgtaggactaagacgtagtggacaaattgaaggtgtacggcaaatgcacagcaacgcaccaagaagtgaaatagccacagagcgggatctggtagcttggagtcgaagggtggtagtacccgagctatcagctggtgtagccaggcaagaagaatggagaactgcaaagggagaagaagaaataaagacttacaggtcagaagagaaaagaaaacacttaactgttccaaaagagaat

SEQ ID NO: 16656 - DNA, 499 bp, Homo sapiens
  misc_feature (1)...(499): n = A,T,C or G
gcgggggttttnaccttgatccctccggaaccgctncggactgagagtcgtctgaacgccnccgggcgccgntccccgctcctcctccccagccatggcgttcacgttcgcggccttctgctacatgctggcgctgctgctcactgccgcgctcaggttcttcgccatttggcacattatagcatttgatgagctgaagactgattacaagaatcctatagaccagtgtaataccctgaatccccttgtactcccagagtacctcatccacgctttcttctgtgtcatgtttctttgtgcagcagagtggcttacactgggtctcaatatgcccctcttggcatatcatatttggaggtatatgagtagaccagtgatgagtggcccaggactctatgaccctacaaccatcatgaatgcagatattctagcatattgtcagaaggaaggatggtgcacattagctttttatcttctagcattcttttactacctatag

SEQ ID NO: 16657 - DNA, 407 bp, Homo sapiens
  misc_feature (1)...(407): n = A,T,C or G
gagccttagccctggattccaaggcctatccacttggtgatcagcactgagcaccgaggattcaccatggaactggggctccgctgggttttacttgttgctattttagaaggtgtccagtgtgaggtgcagttggtggagtctgggggaggcctggtcaagcctggggggtctctgagactctcctgtgcagcctctggattctccttcagtaactataagatgaactgggtccgccaggctccagggaaggggctggagtgggtctcatccattagtagtagtggtagttacatatactacgcagactcagtgaagggccgcttcaccatctccagagacaacgccaagaactcactgtatctgcaaatgaacagcctgagagccgaggacacggctgtgtattn

SEQ ID NO: 16658 - DNA, 411 bp, Homo sapiens
  misc_feature (1)...(411): n = A,T,C or G
agcactttggagctggcctcgccccctaggaggagagggtccctcctgggtagctggagagtagagggtcccgcctggggagctgtccccatggctctcccctagagccagtgggacccttcaggaccctgggctggaaccaccaccactggtcctgtctcaagtgcacttagggggtggtggaggcagggacacctgagacacacctgtctccatttccagttccaggaccccaaagccatttgcccctgtgccttatacacgtgccaacctggaaataaaatgtcagccttttttataaaaaaaaaaaaaaaaaaaaaaaaaaaaaaaaaaaaaaaaaaaaaaaaannggggggggcctttttaaaaaatttttgggggggcccaatttttcccggggggggaaaaaat

SEQ ID NO: 16659 - DNA, 467 bp, Homo sapiens
  misc_feature (1)...(467): n = A,T,C or G
tcccctttgagagctntcgatgatggcctgacnacccgcnncgacccacgcgtccgaatactccctgtgtgaaaaaagaaaaggaaaagaccttagatcaggaggcaggaaatgcagtttggcagagttggttgatgccacttacttctggacaagaagactggaggcttggccacccttgatggaaattgcagcagaaccatctctctattctgttgattcccgcaccaggctggcaaatagcttttgtcttttctgcttccttgatgcaaaagggtacaaaagcctcccacccaccccacccccaatcgccctttgtgccattatctttcaaggtgacttagcttttgaagtccctgccatctgctctgcaggcctgtactttgcaggatgtgagagcaccgcgttcccagaatgccttctgttctacccgacgtggctactgatagctctgcctgtgaggggaa

SEQ ID NO: 16660 - DNA, 435 bp, Homo sapiens
  misc_feature (1)...(435): n = A,T,C or G
cccacgcgtccgcccacgcgtccgcccacgcgtccgcccacgcgtccgttcaggttggcaggaacatcattcatggcagtgattcagtaaaaagtgctgaaaaagaaatcagcctatggtttaagcctgaagaactggttgactacaagtcttgtgctcatgactggggtctatgaataagaggtggacacaacagcagtctccttcagcacggcgtggtgtgtccctggacacagctcttcattccattgacttagaggcaacaggattgatcattcttttatagagcatatttgccaataaagcttttggaagccggaaaaaaaaaacaaattaaaaatnaaaaaggggggcccctttaaaagattccctggggggcccaaatttatcgggggttggaaaataaaaatttttttctttaaagggggcggaatt

SEQ ID NO: 16661 - DNA, 480 bp, Homo sapiens
  misc_feature (1)...(480): n = A,T,C or G
gggccgggaggctaanaactgaatagctcgtanacccgctggaaaattatagcctcgcacgcgcncgngcngnncgngcagggcgttccaccgggtccaggtccttccagattcctctccaccccgccctcggaatccgcggcctcaacttccgcggtgggactccggagcagcgtgcgccgcgctcgcctgagttctcgccgaaagccagggcggctctgcggcctggcgccggttagttagtgtggtgcaaaagccggaaggagacacatttggtcctggcctcccggcagtcaccgtgccaaggacgaatggactatcgcttgatttggagtacacttcctcctctttaaagattacagatgagggggatctcgcgttctggggtgccctaaagccctcttttggcagggcgcagtggctcacgcctgtaatccctacactttgggaagccgaggagggaggattgcttgagcccag

SEQ ID NO: 16662 - DNA, 434 bp, Homo sapiens
cgaaagttcaatatgggtggctctcccaagacagctgttgaccatattatagagatcctgaacatcaaccagaagaggagtgactgtctggacatctatgccatcggggtgggcaagctggatgtggactggagagaactgaatgagctagggtccaacaaggatggtgagaggcatgccttcattctgcaggacacaaaggctctggaccacgtctttgaacatatgctggatgtgtccaagctcacagacaccatctgcggggtggggaacatgtcaacaaacgcctctgaccaggagaggacaccctggcatgtcactattaagcccaagagccaagagacctgccggggggccctcatctcctaccaatgggtcctgacagcagctcattgctttcgcgatggcaacgaacaactccctgtggagggaag

SEQ ID NO: 16663 - DNA, 435 bp, Homo sapiens
  misc_feature (1)...(435): n = A,T,C or G
cggacgcgtggggccaagtatggctttgtccctatgactcagaggagggtttgtcgggcaaattcaggtggatgaagtatgtgtgtgcgtgtgcatgggagtgtgcgtggactgggatatcatctctacagcctgcaaataaaccagacaaacttataaaaaaaaaaaaaaaaaaaaaaaaaaaaaaaaaanggggggggcccttttaaaaaaatccctgggggggccaaattttcccgggggggggaaaatattttttttttttttttggggggggattaaaaaaaccctttgggattttttgaaaaaaaccttttttttgggggggggacttttggggcccccccccccccaaaattttaggcctttgggggaaaaaaaaattttttagggggtaaggggggaaaacccccccctttttcttttttttaaaan

SEQ ID NO: 16664 - DNA, 432 bp, Homo sapiens
ctctcttacagctgttgccagtatctaacgtggtgagcgtaatggtgctcacagttctgtgcaatgttgcagaaaagggtcctgcttactgccagcggctgtggccagggcccctgcttcccgccttgctgcacacactagccttttctgacactgaagtagtaggccagagtttggagctgctgcatctgctgttcctgtatcagccagaggctgttcaggtcttcctgcagcagtcagggctgcaagccctggaaaggcatcaagaagaagcccaactccccgatcgtgtgggttgctctccagcagacagctcttcaagggtgatcttgtttctcaatgtcactcattcccctctctcttaacatcaagcttgtttgtccagtagagcctttggagatttaggaccataatgaggtctcatgttctctg

SEQ ID NO: 16665 - DNA, 489 bp, Homo sapiens
  misc_feature (1)...(489): n = A,T,C or G
ctccccataaaacgcccgttagagcggcctgcaattcccgcgtcgacccacgcgttcgagagtaaactgcggtaaaatactggcttgccctgcttattgcacaggcgctgggcacgacagccgcccgggtgcccaggacagtgctgccctttgaagccatgccccggcgtccaggcaacaagtggctgaggctgctgcagatctggagggagcagggttatgaggacctgcacctggaagtacaccagaccttccaggaactggggcccattttcaggtaccacttgcgaggagcaggcatggtgtgtgtgatgctgccggaggacgtggagaagctgcaacaggtggacagcctgcatccccacaggatgagcctggagccctgggtggcctacagacaacatcgcgggcacaaatgtggcgcgttcttgctgaatgggcctgaatggcgcttcaaccgattgcggctgaatccagaagtgctgtccn

SEQ ID NO: 16666 - DNA, 416 bp, Homo sapiens
  misc_feature (1)...(416): n = A,T,C or G
ntacttttttttcttctttttcttttcatctgcctccatcttaagtgcaatttcttcagctgtaagagctcccagnttcttattctttgctttcttaaccttttccttgatgctggccacatcaattttagtttcagtagaagctagacaaattaaaagcacaacacatgtaatactttagattttaccaagtaaaacaaagaatatatgtttaacaaagaatatatgtttaaggcagttaacttcagagtattcttataattgaataattgaaagatgatcacagtataaaatataaaaacacttgcctaaagcagttagaaatttcttcagattaagataaaacaaatcataaaatactttatatattagtacaagtatacataaaaatggcataaatggcataattgaaccaa

SEQ ID NO: 16667 - DNA, 407 bp, Homo sapiens
cgctgctcgtccagctgattcaggaacgcctggctgaagaggattgcatcaagcagggctggattctggatggcatccctgagacgcgtgagcaggctctgaggatccagaccctggggatcacacccagacacgtcattgtgctgagtgctccagacacggtcctgatcgagagaaacttggggaagagaatcgaccctcaaactggagagatttatcacaccacctttgactggccacccgaatctgaaatccagaaccgtctcatggtgccagaggacatctcagagctggagacggctcagaaactgctggagtatcataggaacatcgtcagggtcattccctcctaccccaaaatcctcaaagtcatcagtgctgaccagccatgtgtggacgtcttctac

SEQ ID NO: 16668 - DNA, 416 bp, Homo sapiens
ctgaaccctgaaaggctcgcgatgcctctacacaagtatcccgtgtggctctggaagcggctgcagctgcgggagggcgtctgttctcgcctgcccggccactacctgcgctccctggaggaggagcggacgcccactcccgtgcactataagcctcatggggccaagctcaagatcaaccccaagaacgggcaacgggagcgtgtggaggacgtgcccattcccatctactttccccccgaatcccagcgggggttgtggggcggcgagggctggatcctgggccaaatatatgccaacaacgacaagctctccaagaggctgaagaaagtgtggaagccacagctgtttgagcgagagttctacagtgagatcctggacaagaagttcacagtgactgtgaccatgcggaccct

SEQ ID NO: 16669 - DNA, 410 bp, Homo sapiens
ggcggcggcgttggcggcttgtgcagcaatggccaagatcaaggctcgagatcttcgcgggaagaagaaggaggagctgctgaaacagctggacgacctgaaggtggagctgtcccagctgcgcgtcgccaaagtgacaggcggtgcggcctccaagctctctaagatccgagtcgtccggaaatccattgcccgtgttctcacagttattaaccagactcagaaagaaaacctcaggaaattctacaagggcaagaagtacaagcccctggacctgcggcctaagaagacacgtgccatgcgccgccggctcaacaagcacgaggagaacctgaagaccaagaagcagcagcggaaggagcggctgtacccgctgcggaagtacgcggtcaaggcctgaggggcgcatt

SEQ ID NO: 16670 - DNA, 403 bp, Homo sapiens
ggcggcgcgtggtctacgccgagtgacagagacgctcaggctgtgttctcaggatgaccgagtgggagacagcagcaccagcggtggcagagaccccagacatcaagctctttgggaagtggagcaccgatgatgtgcagatcaatgacatttccctgcaggattacattgcagtgaaggagaagtatgccaagtacctgcctcacagtgcagggcggtatgccgccaaacgcttccgcaaagctcagtgtcccattgaggagcgcctcactaactccatgatgatgcacggccgcaacaacggcaagaagctcatgactgtgcgcatcgacaagcatgccttcgagatcatacacctgctcacaggcgagaaccctctgcaggacctggtgaacgccatcat

SEQ ID NO: 16671 - DNA, 473 bp, Homo sapiens
  misc_feature (1)...(473): n = A,T,C or G
cgcccgttccgatgaaagcctcactgaagccatgagnacccgcgncgacccacgcgtccgttgagtagaagcggtcgccatgtccgcggggagcgctacacatcctggtgctggcgggcgccgcagcaaatgggaccaaccagctccagccccacttctcttcctcccgccagcggccccaggtggggaggtcaccagcagtgggggaagtcctgggggcaccacagctgctccttcaagagccttggatgctgctgctgctgtggctgccaagattaatgccatgctcatggcaaaagggaagctgaaaccaactcagaatgcttctgagaagcttcaggctcctggcaaaggcctaactagcaataaaagcaaggatgacctggtggtagctgaagtagaaattaatgatgtgcctctcacatgtaggaacttgctgactcgaggacagactcaagacgagatcagccgac

SEQ ID NO: 16672 - DNA, 402 bp, Homo sapiens
  misc_feature (1)...(402): n = A,T,C or G
cgagcccacgataccagaacattaactcctttcattataccacccctgaatatgggcactatgatgagaaggataccctggacctcaccacccgtgtgcataaaacttgtaacacgctgcttcatacagacatactgtccttagccatctttgcgatcttcttactggtgggaggactgggccatgccctggggaactgggtgacgagcattctaaggcgacgaaccatcaatgccatctggatccatcaacttgggggtagccgacatgctctcctgactggcgctggccatcttgctcacgtccattgtacagcatcaccactggccctttggcggggccgcctgcancatcctgccctccctcatcctgctcaacatgtacgccagcatcctgctcctg

SEQ ID NO: 16673 - DNA, 405 bp, Homo sapiens
gcgcggacgcgtggggtttttagtttgttaagctggaattagagagaagggcctcacagtgagggcttcaggaggggtcaaaggcgaaggcctttgtgatgcgagcaaaggcaaccaaaacttagcctcactccacttttctaaagatggaaattccttttttgggccttggactgcttctagggtaacatctcgtaggacactcttctactttgtactactttgcacctgccctgatgtcccttgggcctccatcctactgcctggctttcttggccctcatttctcagcttctgcatttccttccctgctcctaacaaatgaagaagcatgctgcagcctgcattgtggaacatctccagccttcttgtagaggataaagagatgtgtagcatctgtgcggat

SEQ ID NO: 16674 - DNA, 503 bp, Homo sapiens
  misc_feature (1)...(503): n = A,T,C or G
tggtnnnnnaaatgatgactgacgacatcgcaannnngcntngacccacgcgtccgccggagccgctcgctcccgacacggctcacgatgcgcggcgagcatggcgcggtggtggcccgcgtgctccagttcactaactgccggatcctgcgcggagggaaactgctcagggaggatctgtgggtgcgcggaggccgcatcttggacccagagaagctgttctttgaggagcggcgcgtggccgacgagcggcgggactgcgggggccgcatcttggctcccggattcatcgacgtgcagatcaacggtggatttggtgttgacttctctcaagccacggaggacgtgggttcgggggttgccctccgggcccggaggatcctgtcgcacggcgtcacctccttctgccccaccctggtcacttccccaccggaggtttatcacaaggttgttcctcagatccctgtgaagagtggtggtccccatggggcaggggtcctcgg

SEQ ID NO: 16675 - DNA, 413 bp, Homo sapiens
gagcccagcactagaagtcggcggtgtttccattcggtgatcagcactgaacacagaggactcaccatggaatttgggctgagctgggttttcctcgatgctcttttaagaggtgtccagggtcaggtgcagctggtggagtctgggggaggcgtggaccagcctgggacgtccctgagactctcctgtgcaggctctggattcaccttcagtagtcatgccatgcactgggtccgccaggctccaggcaaggggctggagtgggtgtcaattatatcatatgatggaagtcataaatactattcagacgccgtgaagggccgattcaccatctccagagacaattccaacaacactctatatctgcaaatgaacagcctgagacctgaagacacggctgttttttactgtgt

SEQ ID NO: 16676 - DNA, 481 bp, Homo sapiens
  misc_feature (1)...(481): n = A,T,C or G
ctccccaatagatagnccgtggtaccggnccggaattcccgactgatccccntcgtccgcggacgcgtgggctccacacatccaaagcctggaaagggtggaagatgaatatgaacggacagatccctcatgctcacccttggtggtgaattgagtcatcagctgagtatggaaaggagtggggaacaagctcacaggctctttgtctccttcgacttttgtttcacatttgccaggaggtaaggccttcatacctgcagctgggtcaagtatctggaaacacgtgggctgccagcagagccacttcatgtcagcatcagagtacaaagtgagtgtgagactgagtgagaatgtgaactgccagggtattcctacccgtgtggcccaggcctggctgcagggagggcaaagtctggctgcagggaggggaaaggtcagctacaggtcccaccacacatgtcctccaactgcactttccttg

SEQ ID NO: 16677 - DNA, 425 bp, Homo sapiens
aagccttctgtcgagaagcagctacccaagctccatgagcttccgaagaaacaggaccagagagggaaggtgacctgaaagtcacagaataattttttagagctgaacaagaatccaagcctgcaactgcagagacgagagatctttctgctgtctatactcttggaaagcacatcctaagatctttgcagattatcctgtggaaggaaaatgcctaaagtcaaaagaagccggaaagcacccccagatggctgggagttgattgagccaacactggatgaattagatcaaaagatgagagaagctgaaacagaaccgcatgagggaaagaggaaagtggaatctctgtggcccatcttcaggatccaccaccagaaaacccgctacatcttcgacctcttttacaagcggaaagccatcagcag

SEQ ID NO: 16678 - DNA, 507 bp, Homo sapiens
aggggcgtggcgcagggggctttcccaatagaacgccctcattgagcggccttcaattcccgcgtcgacccacgcgttcgagagtaaactgcgttcaaataatggctgtaccacttgttagcttcatgactttgagaccttatcttctctatgcctggattttctatatctaacatgggaatggtaacagtgcatacatacctcataagattgtggagaggcttaaatgagataaaacatgtaaagagcttagattaggtctggaacacagtaagtgtccaattttgggtgaacagatacgaatacatagccctcagttctaagcacactacatatattatactttatcaaatgtaagatgtcattgattgtaaaatgtaccattatattcaattaatacagaaaaaatgctattgaactatgacatgtcattgacacatccagaaaaattagattgagagtattaaatcagggaagcttgaacacagatgaggtgttacatgttac

SEQ ID NO: 16679 - DNA, 412 bp, Homo sapiens
tttaagtgggatagaaaaaccttaaggaaagttcatagtaggtcctcagtggtggagtgttgtgggaagtcagggaccctgaatgaagggactggctgaagccatggcagaagaacataaactgtgaagatttcatggacatttattagttccccaaattaatacttttataatttcttacgcctgtctttactgcaatctctgaacataaattgtgaagattttatggacatttatcacttccccaatcaatactcttgtgatttcctatgcctgtctttactttaatctcttaatcccgtcatcttcgtaagctgaggaggatgtatgtcgcctcaggaccctgtgatgattgtgttaactgcacaaattgtttgtagagcatgtgtgtttgaacagtatcaaatctggg

SEQ ID NO: 16680 - DNA, 408 bp, Homo sapiens
cggacgcgtgggcggacgcgtgggcggacgcgtgggtttttcatggaaaagaagtatgttgttcttcattataactatagtttactatttgtctttgctatttcctgatacatacacatacgcacacacgcgcgcacatgcatgcacgtatgcacatgcacgctcccagtgtcccagtgaaggctcaacaggaagcttgagaaggtcatctcaatggccacagggttcctgttcaaccagtagccctgggatgccgctttgcttgtcattctttattgtcacaagttagttccctgacttgtgtgcagtcagggaactgcacacaactgaaaccaacatggtggaatcatgtttgcaatattttggtgagtaaaataagataattttgaactaaagaagacggaggca

SEQ ID NO: 16681 - DNA, 405 bp, Homo sapiens
aagcttttggagaagtcagggagagacacagtatgtttaaaattaattaacattttctttaatgtatatttttcaaagaggaccactgaatggtggtctctaacccaaggggcagtgtaggtggctttaagcccacagaatattgagatatttctcttgtggttttggaggggtggtgggatgcagaatgttattaaagatcaatttaagcatcagatagactatcccttttatttttttaacttttaggttcaggggtacatgtgcaggatgttatataggtaaactcatgtcaagtggttttggtgtacagagtattttgtcacccaggtgctaagcctagtacccagtagttattttccctgctgttgtccctcctcccaccctgcaccctcaagtaggccg

SEQ ID NO: 16682 - DNA, 392 bp, Homo sapiens
  misc_feature (1)...(392): n = A,T,C or G
gcgctctgaccagcggcgtgcacaccttcccggctgtcctacagtcctcaggactctactccctcagcagcgtggtgaccgtgccctccagcaacttcggcacccagacctacacctgcaacgtagatcacaagcccagcaacaccaaggtggacaagacagttgagcgcaaatgttgtgtcgagtgcccaccgtgcccagcaccacctgtggcaggaccgtcagtcttcctcttccccccaaaacccaaggacaccctcatgatctcccggacccctgaggtcacgtgcgtggtggtggacgtgagccacgaagaccccgaggtccagttcaactggtacgtggacggcgtggaggtgcataatgccaagacaaagccacgggaggagcan

SEQ ID NO: 16683 - DNA, 394 bp, Homo sapiens
aaaacttacatccacacaaaaacttccactcagacatttccagtatctttgttcataactgccaaaacatgaaagcaaccaggatgtctttcaataggtgaatggataaacaaactgtggtacatacatgcagtggaatattattcagcactaaaagcaaatgagctatagaaaagatgtgggggtagatgctaatttgactccttaacttaactatctgaccttgaactagttacttagtctctagacctcaatttcctcatctgcagaatgtgaataatgagtgttcttgtgcaaattaaatgagatatgtatttatactagatattgtcattttttccttcagatccactgtctacctgctactccttggtctccctcccaaggaggctgg

SEQ ID NO: 16684 - DNA, 416 bp, Homo sapiens
acaaatctaaattatatgtcaccctgagaaagctgagacctatttggtgtttagctctctaaaaatgcggctatattaaagatcctcttagatctcactcttattgaaacttcctcaaatttaaaatcacattgttcatttgcatagacactgtgaggtgcataaaaggcgaggaatgtggcttacagtcacatgtttcataacaataagtttccaggcagaaaattccacagcaacatcagaagttcattcctaagaaaagccagggacagtttggtaaattcagataacagtcataaggagttgctttaaaactcaacattgaggcatttctaggaaagccatctgcctctggctacaatcctacagaggacactgtgtacagctcagaatgggtcaccatgaccgtttctcct

SEQ ID NO: 16685 - DNA, 532 bp, Homo sapiens
  misc_feature (1)...(532): n = A,T,C or G
cctgtcagctcgcacaaacgcccgcaccacagtangcaggaaaatagtactactaatctcccctcccncnncaggggggaatgagtcatcgcatngcgaagacnccggaanngagggacgagccacgcgtccggtatatgagaattgacaaatgcagcatgatttaggttgaacaacataggacattttcatcacccaaagaagggtctcatgcccctggttaggccccccaccccatcctaagcaacctatgtgggtgggttttggcttttctagaatttgatgcacgtggaatcctgcagcatgttcacgtttgtatccggcggcttgcgttcctgcttctgttccctgatccctacacttacactgtctcctgggtcagggcagccccttgttagtatcttaaacaatggaacggtttgaggagagctcgagggttgaaaaacactaagcgagcggaaatgtaatgtagtaagaaacagaactctaggcggggagaaaacctagggaggtaaaaggctgtccttcccga

SEQ ID NO: 16686 - DNA, 400 bp, Homo sapiens
tcctcttctggcttttacccgacaagcactgaacctaccacatgtatttgggttggtcgtcctcgcattggaactgaaactacggatcttccgacttctggatgttcgttccgtcttgtctttgtctgaggcttggagggacctctttactgattcaaatgacccactcctgaggaggtttttatatctgcgctattttcgagacaatactgtcagagttcaagacacagattggaaagaactgtacaggaagaggcacatacaaagaaaagaatccccgaaagggcgggttgtgatgctcctgccatcgtcaactcacaccattccattctatcccaaccccttgcaccctaggccatgttctagctcccgccttcctccaggaattatcggaggtgag

SEQ ID NO: 16687 - DNA, 412 bp, Homo sapiens
cccacgcgtccgaccacgcgtccggtgctatatacctgcagtgccaggtagtcaggtgtctgagacacaagaatagaatcgcttaaacctaggaggcagaggttgcagtgagctgagatcgtgccactgcactccagcctgggcaacaaagggagactatctcaaaagaaaaaaaaaaaaaaaaaaaaaaaaaaaaaaaaaaggggtttcccccgggggggggggggaacccccccctgaaccccccctttttggaaaactaaaagggggggtccccttggggcccgggttttaaaacccgggggggccaaaaaaggaaaaattgtttttttttttaaaaaaaaaaaaaaattttttggggggggggggggcccaaaccggggccccccccccttttgggtaaaaagggggg

SEQ ID NO: 16688 - DNA, 419 bp, Homo sapiens
attgtcttcatgtacatttggaactaacacgtgatgtgatatattcctaaactatgaaacctttttcctagtagtcagctagatcatttgttctgggagtataaagccacccacgtaagttaataagcaaaatcctgactattatgttgttagagaaaaatgctttgctttgtctggaagaaagataaaatagtgaattataaataagtcaggccgggcgtggtggctcacacctgtaatcccagcacactgggaggccgaggcagggggactgcttgagctcaggagttcgagaccagcctgggcaacaaagtgagactccatctctatataaaaacaaaaaccacgaaagcacacacaaaataaatcagtgggatttggtaatgtgttttagagtaagaaatttcaggttgttggtg

SEQ ID NO: 16689 - DNA, 405 bp, Homo sapiens
cacaagcaataaatgctattttagaagcgcgcgcatttttttctcattaaccggaaagataaatatgaaccatgggggcaggatgaggagaaaaatgaaagtgggttaactgaatacagattagtctccatcaataaaagcaggcctcttcaaaaacaacttcctgcattcatctcagaagatgcctccggatatttgaccagctcctggctgacactctttgtcccatctgcgacaccggagtgtttgtagtcagcctcccactaaacatcatgggcatcgttgtgttcatcctgaaaatgaaggacaagaagccggcggtggtgtacatgctgcacctggccacggcagatgagctgtttgtgtctgtgctcccctttaagatcagctattactttttcggca

SEQ ID NO: 16690 - DNA, 419 bp, Homo sapiens
  misc_feature (1)...(419): n = A,T,C or G
ggagagaggccgcagccaggcctctgctgccctttctgtgccccccaggttctatctccccgtcacacccgaggcctggcttcaggagggagcggagcagccattctccaggccccgtggttgcccctggacgtgtgcgtctgctgctccggggtggagctggggtgtgggatgcacggcctcgtgggggccgggccgtcctccagccccgctgctccctggccagcccccttgtcgctgtcggtcccgtctaaccatgatgccttaacatgtggagtgtaccgtggggcctcactagcctctaactccctgtgtctgcatgagcatgtggcctccccgtcccttccccggtggcgaacccagtgacccagggacacgtggngtgtgctgctgctgctccccagcccaccagtgcctga

SEQ ID NO: 16691 - DNA, 420 bp, Homo sapiens
  misc_feature (1)...(420): n = A,T,C or G
tggtttgcttaggcgcagacggggaagcggagccaacatgccagtggcccggagctgggtttgtcgcaaaacttatgtgaccccgcggagacccttcgagaaatctcgtctcgaccaagagctgaagctgatcggcgagtatgggctccggaacaaacgtgaggtctggagggtcaaatttaccctggccaagatccgcaaggccgcccgggaactgctgacgcttgatgagaaggacccacggcgtctgttcgaaggcaacgccctgctgcggcggctggtccgcattggggtgctggatgagggcaagatgaagctggattacatcctgggcctgaagatagaggatttcttagagagacgcctgcagacccaggtcttcaagctgggcttggccaagtccatccaccacgctcgcgn

SEQ ID NO: 16692 - DNA, 421 bp, Homo sapiens
aggaggcagcgctctcaggacatctccaccatggcctgggctctgctgctcctcaccctcctcactcagggcacagggtcctgggcccagtctgccctgactcagcctgcctccgtgtctgggtctcctggacagtcgatcaccatctcctgcactggaaccagcagtgacattggtgtttacaaccatgtctcctggtaccaacaacacccaggcaaagcccccaaactcatgatttatgaggtcagtaatcggccctcaggggtttctaatcgcttctctggctccaagtctggcaacacggcctccctgaccatctctgggctccaggctgaggacgaggctgattattactgcagctcatatacaagcagcgatactctggtggtcggcggagggaccaagctgaccgtcctgggta

SEQ ID NO: 16693 - DNA, 418 bp, Homo sapiens
cggaggcggaggcttgggtgcgttcaagattcagcttcacccgtaacccaccgccatggccgaggaaggcattgctgctggaggtgtaatggacgttaatactgctttacaagaggttctgaagactgccctcatccacgatggcctagcacgtggaattcgcgaagctgccaaagccttagacaagcgccaagcccatctttgtgtgcttgcatccaactgtgatgagcctatgtatgtcaagttggtggaggccctttgtgctgaacaccaaatcaacctaattaaggttgatgacaacaagaaactaggagaatgggtaggcctttgtaaaattgacagagaggggaaaccccgtaaagtggttggttgcagttgtgtagtagttaaggactatggcaaggagtctcaaagccag

SEQ ID NO: 16694 - DNA, 411 bp, Homo sapiens
acgcccacgcgtccgcccacgcgtccgtgctctgtcacccaggctggagtgctatggctcgatcttggctcactgcaacctccacctcccaggttcaagcaattctcttgccccagcctcccgagtagctgggattacaggtgcatgccaccatggctggctaatttttgtatttttagtagagatggggtttcaccatattggtcaggctgatctggaactcctgacctcaggtgatccacctgcctcagcctcccaaagtgctgggattacaggcgtgagcaatcgtgcccagccttgttcttaattttgtatcatccagtcatcgctaatattacacgcaccttctcacttaatcctcacgacaagcctgtgaggcagatgctcattgttcccatcttgatgaaactt

SEQ ID NO: 16695 - DNA, 409 bp, Homo sapiens
cccacgcgtccgcccacgcgtccggcgtcagccatcttgtaagccaagatgggtgcatacaagtacatccaggagctatggagaaagaagcagtctgatgtcatgcgctttcttctgagggtccgctgctggcagtaccgccagctctctgctctccacagggctccccgccccacccggcctgataaagcgcgccgactgggctacaaggccaagcaaggttacgttatatataggattcgtgttcgccgtggtggccgaaaacgcccagttcctaagggtgcaacttacggcaagcctgtccatcatggtgttaaccagctaaagtttgctcgaagccttcagtccgttgcagaggagcgagctggacgccactgtggggctctgagagtcctgaattcttactggg

SEQ ID NO: 16696 - DNA, 404 bp, Homo sapiens
  misc_feature (1)...(404): n = A,T,C or G
tcctcttctggcttttacccgacaagcactgaacctaccagatgtatttgggttggtcgtcctcccattggaactgaaactacggatcttccgacttctggatgttcgttccgtcttgtctttgtctgcggtttgtcgtgacctctttactgcttcaaatgacccactcctgtggaggtttttatatctgcgtgattttcgagacaatactgtcagagttcaagacacagattggaaagaactgtacaggaagaggcacatacaaagaaaagaatccccgaaagggcgcgttgtgatgctcctgccatcgtcaactcacaccattccattctatcccaaccccttgcaccctaggccatttcctagctcccgccttcctccaggaattatcggnggtgaatatg

SEQ ID NO: 16697 - DNA, 407 bp, Homo sapiens
atacccttctgtggattctcactatggattcctctccttgtgctctcttggccagacgaacttccctggggcagcttcaaaagatggtccatgatattaaaaacaatgaaggtggaataatgaataaaatcaaaaagctaaaagtcaaagcacctccaagtgttcctcgaagggactacgcttcagagagccctgctgacgaagaggagcagtggtccgatgactttgacagcgactatgaaaatccagatgagcactcggactcagagatgtacgtgatgcccgccgaggagaacgctgatgacagctacgagccgcctccagtagagcaggaaaccaggccggttcacccagccctgcccttcgccagaggcgagtatatagacaatcgatcaagccagaggcat

SEQ ID NO: 16698 - DNA, 405 bp, Homo sapiens
agcagaacaatgctgctcttgaaagatgcctaactctggctctaaagaaattggatgactacctgaacacccctctaccagaggagattgacgccaacacttgtggggaagacaaggggtcccggcgcaagttcctggatggggatgagctgaccctggctgactgcaatctgttgcccaagctccatgtggtcaagattgtggccaagaaataccgcaactatgatatcccggctgagatgacaggcctgtggcggtacctcaagaacgcctatgcccgtgatgagttcaccaacacctgtgcagctgacagtgagatcgagttggcctacgctgatgtcgccaaacgcctcagccgatcctgagcacagccattttgccccatccccgctgcagaaggactca

SEQ ID NO: 16699 - DNA, 413 bp, Homo sapiens
  misc_feature (1)...(413): n = A,T,C or G
tcctggacctcctgtgcaagaacatgaaacatctgtggttcttccttctcctggnggcagctcccagatgggtcctgtcccaagtgcagctgctggagtcgggcccaggactggtgaagccttcggagaccctgtccctcacctgcactgtctctggtgactccatcagtagttactactggagctggatccggcagcccccagggaagggactggagtggattgggcatatctattacagtggaagcaccaactacaacccctccctcaagagtcgagtcaccatatcactagacacgtcgaagaaccacctctccctgaagctgatctctgtgaccgccgcagacacggccgtgtattactgtgcgagacaagtcgggtggcaacacccacttgactactggggccagggg

SEQ ID NO: 16700 - DNA, 407 bp, Homo sapiens
cccacgcgtacgggcatggtgctgggcctcctggtgttgatctgggatgaccccacacagaacagaaaccggatcgcaagcttcccaggattcctcttcgtgctgctgggggtgggaagcatgggtgtggctgcgatcgcgtggggtgcctggttctggggccgccgcagctgccagcaaagggactcaggaaatgcattctacagcaacgtcctataccggccccggggggccccaaagaagagtgaggactgctctggagaggggaaggaccagaggggccagagcatttattcaacctccttcccgcaaccggccccccgccagccgcacctggcgtcaagaccctgccccagcccgagaccctgccccagccccaggcccggccaccccgtctctatggtcag

SEQ ID NO: 16701 - DNA, 413 bp, Homo sapiens
cccacgcgtccgggcggcttcccataccttattgcaggaaagtacgcccaagattttgggctggtggaagaagcttgcttcccctacacaggcactgattctccatgcaaaatgaaggaagactgctttcgttattactcctctgagtaccactatgtaggaggtttctatggaggctgcaatgaagccctgatgaagcttgagttggtccatcatgggcccatggcagttgcttttgaagtatatgatgacttcctccactacaaaaaggggatctaccaccacactggtctaagagaccctttcaacccctttgagctgactaatcatgctgttctgcttgtgggctatggcactgactcagcctctgggatggattactggattgttaaaaacagctggggcaccggctg

SEQ ID NO: 16702 - DNA, 412 bp, Homo sapiens
cagcttttctcgggctgtggttgcctcactggggattgtacattttctctttggcccagcttttctataccacagttctggagctctgctatgttatttatttcacaaagttactgggttccccagaatcaaccaagcttcaaactcttcctgtctccagaataacagatctgttacccaatattacaagaaatggagcgcttattaactggaaagaggctaaactgacttggagttttttcaaacagtctttcttgaaacagattttgacagaaggcgagcgatatgtgatgacatttttgaatgtattgaactttggtgatcagggtgtgtatgatatagtgaataatcttggctcccttgtggccagattaattttccagccaatagaggaaagttttatatattcttg

SEQ ID NO: 16703 - DNA, 390 bp, Homo sapiens
agctgaggtggaggcaggctgcggtttacggcgactgtggcggcggcgccatggcagggcttgcaggatccctgctgccttggggatcccgggctgacagccagagagcacagcggctcacctcctggagagtgagggatgaagaaagcggagggcagccgactgcgcccgctggttcccattaggtcggctcctgcagcggagcccggcagccttggtgaaggccctgcccggcagagatcatgtattgcctccagtggctgctgcccgtcctcctcatccccaagcccctcaaccccgccctgtggatcagccactccatgttcatgggcttctacctgctcagcttcctcctggaacggaagccttgcacaatttgtgccttggttt

SEQ ID NO: 16704 - DNA, 400 bp, Homo sapiens
  misc_feature (1)...(400): n = A,T,C or G
atccaatgggagtccatggtgtcatgccaagacagtatcagacacagccccagaagggggcattatgggccctgcctccccataggccatttggactctgccttcaaacaaaggcagttcagtccacaggcatggaagctgtgaggggacaggcctgtgcgtgccatccagagtcatctcagccctgcctttctctggagcattctgaaaacagatattctggcccagggaatccagccatgacccccacccctctgccaaagtactcttaggtgccagtctggtaactgaactccctctggaggcaggcttgagggaggattcctcagggttcccttgaaagctttatttatttattttgttcatttatttattggagaggcagcattgcacagtgaan

SEQ ID NO: 16705 - DNA, 389 bp, Homo sapiens
aaataaatgtcatgaatgaataataatttctttcatttacacagtaattcaacctgttgaatgctgacttaatgctttactacactctaataggaatggacaatttgtcctttgcccttgccctgaagagggaaacaatagaaattaaataccgactgactatgaaggaggacatttttcagaaggggtctccctccttctatttctcatcttcttgagtttgccccctgctttctgtgatacttaatacttaagagatggtccacaaatcattctttactttgtgtgcccagcagtatcccagcagcaggattctccagggacaaggcctatgtctgccactgaggggagtctgcttccttcatcagaactgccgctgctggacttat

SEQ ID NO: 16706 - DNA, 438 bp, Homo sapiens
cagttgatgaatcgatgcctcgcggaccgatccagtcacccacgaccccgccattgatattttctggatggagtattattttttctgtggtcttactgatctttgcatattacatacatgctgctgaagcttctggatagccctatttttattgacctaatatatcagcgacagttgcagcccttgggatgtgattagtgtctcatgtggaaccatggcatggttattgatgagtttcttaaccctttccagagtcctcctttgcctgatcctccaacagctgtcacaacttgtgttgagcaagcagtagcatttgcttcctcccaacaagcagctgggttaggaaaaccatgggtaaggacggactcacttctctttttagttgaggccttctagttaccacattactctgcctctgtatataggtggctttcttta

SEQ ID NO: 16707 - DNA, 478 bp, Homo sapiens
  misc_feature (1)...(478): n = A,T,C or G
cgcgagttcccctggagctccgntnnnccctagnaagctgcggaacccnccggaatcccggtcgacccacgcgtccgattaaaaccatctggcagacttacaaagcttgggacagttattggagattaagctaccatttattgaatgcatactctgtgcaaggaaatttgcaaatattagcttatttaatctgtactatccagggaggtaatttcttcccccccaagatagagtcaagctctgtcacccaggctggagtgcagaagcatgatcacagctcactacagtttcaacgtcccccgctcaggtggtccttccacctcagcctcccaagtagctgggaccacaagtgtgcattaccacactcagctaatttttgtattttggcagagatggggtttcaccatgttgcccaggctggtctcaaactcctgagttcaagcaatccaccttcctcggcctcccaaagtactaggag

SEQ ID NO: 16708 - DNA, 406 bp, Homo sapiens
acgagtgcggctggtgtcttcaaagcgatggacaagatggctgctggagctaggcaaagtgaccacgtctgcccagaaagctcagaaggctaaatgaatattatccctaatacctgccaccccactcttaatcagcggtggaagaacggtctcagaactgtttgtttcaattggccatttaagtttagtagtaaaagactgggtaatgcatcgtaaaaccttcagaaggaaaggagaatgttttgtggaccactttggttttcttttttgcgtgtggcagttttaagttattagtttttaaaatcagtactttttaatggaaacaacttgaccaaaaatttgtcacagaattttgagacccattaaaaaagttaaatgagaaaaaaaaaaaaaggggggggccgtt

SEQ ID NO: 16709 - DNA, 412 bp, Homo sapiens
cccacgcgtccgcccacgcgtccgcccacgcgtccggtgagttcaccctctaaatcaccacgatcaaaagggacaagcatcaagcacgcagcaatgcagctcaaaacgcttagcctagccacacccccacgggaaacagcagtgattaacctttagcaataaacgaaagtttaactaagctatactaacccaaaaaaaaaaaaaagggggggccgttttaaagaacccttgggggggccaaagtttacgcgggcaggcaaggaaaaagctttttccttatggggagccgtataaaaacctacctgggaatcttgggaaagaacccttacttggggggggggacatatggggccaacctccctacagaaatttaaggctttagggaaaatataaacttttaaagggtataggg

SEQ ID NO: 16710 - DNA, 419 bp, Homo sapiens
  misc_feature (1)...(419): n = A,T,C or G
tgatgaccaagaattacaagtagaatggcagctggaatttaaggagggacaagaatcaatggataagcgtgggtggaggaagatccaaacagaaaagtgcaaagttattccccatcttccaagggttgaattctggaggaagaagacacattcctagttccccgtgaacttcctttgacttattgtccccactaaaacaaaacaaaaaacttttaatgccttccacattaattagattttcttgcagtttttttatggcatttttttaaagatgccctaagtgttgaagaagagtttgcaaatgcaacaaaatatttaattaccggttgttaaaactggtttagcacaatttatattttccctctcttgcctttcttatttgcaataaaaggtattgagccattttttaaatgacattn

SEQ ID NO: 16711 - DNA, 411 bp, Homo sapiens
  misc_feature (1)...(411): n = A,T,C or G
cccacgcgtccgctggactgtgggttgttggcagccttatcctctccaacctggcacccactgcccgtgggccttatgcacctgcttggggtcctggagccccttaaggccaccagcaaatcctaggagaccgagtcttggcacgtgaacagagccagacttcacactgagcagctgcagtcggagaaatcagagaaagcgtcacccagccccagattccgaggggcctgccagggactctctcctcctgctccttggaaaggaagaccccgaaagacccccaagccaccggctcagacctgcttctgggctgccatgggacttgcggncaccgccccccggctgtcctccacgctgccgggcagataagggcagctgctgcccttggggcacctgctcactcccgcagcn

SEQ ID NO: 16712 - DNA, 410 bp, Homo sapiens
agcttctcagccttctgatgaagaggagctgttaactagtactggttttgagtatcagcaggtggcctttcagccctccatacttactgagcctcccactgaggatcatcttctgcagaatactttgtggcctgaagttcaaaaactatatgggcacggttatgaaatattttgtgttacttgtaacagttcaaagactctgcttgcctcagcttgtaaggcagctaagaaagagcatgcagctatcattctttggaacactacatcttggaaacaggtgcagaatttagttttccacagtttgacagtcacgcagatggccttctcacctaatgagaagttcttactagctgtttccagagatcgaacctggtcattgtggaaaaagcaggatacaatctcacctgagt

SEQ ID NO: 16713 - DNA, 418 bp, Homo sapiens
  misc_feature (1)...(418): n = A,T,C or G
caggaaaacagcagctgttgattggggcttatgccaaggccttggagattatcccacgccagctgtgtgacaatgctggctttgatgccacaaacattctcaacaagctgcgggctcggcatgcccaggggggtacatggtatggagtagacatcaacaacgaggacattgctgacaactttgaagctttcgtgtgggagccagctatggtgcggatcaatgcgctgacagcagcctctgaggctgcgtgcctgatcgtgtctgtagatgaaaccatcaagaacccccgctcgactgtggatgctcccacagcancaggccggggccgtggtcgtggccgcccccactgagaggcaccccacccatcacatggctggctggctgctgngtgcacttaccctccttggctnggttactt

SEQ ID NO: 16714 - DNA, 411 bp, Homo sapiens
  misc_feature (1)...(411): n = A,T,C or G
agctgatacctgaagcactcccaggctcatcatgggagctttcctcagcaccttcaccttccctcccagtgtagcctcctgtcagtgggggctggacccttctaattcagaggtctcatgcctgcccttgcccagatgcccagggtcgtgcactctctgggataccagttcagtctccacatttctggttttctgtccccatagtacagttcttcagtggacatgaccccacccagccccctgcagccctgctgcaccatctcaccagacacaaggggaagaagcagacatcaggtgctgcactcacttctgccccctggggagttggggaaaggaacgaaccctggctggaggggataggagggcttttaatttatttctttttctggtgaggcttccccctctctgagn

SEQ ID NO: 16715 - DNA, 418 bp, Homo sapiens
cccacgcgtccgcccacgcgtccgcccacgcgtccgttgagttacagttattttttgaaatgtgttttactatcctatttatcccacgtttctttgggttacaggtttatcttcagcaaaaactcactctgtgttgaaactcaagtttgtacgattaatacttgagtgctcttcaatttatcagttttgaaagaatgtttagtgttggaaggagcgaggaccttatagtaagtccctgtatttctcagctgagtgataggctccctagaactgtcaatcactgcgtttcttgccaacaatccctggtccacaggaagccatgttgtatctcatacctctgacccccaacccccagcccccagtggttggattagttaccctggtccaaagatttaataatagcctatgacaaacctct

SEQ ID NO: 16716 - DNA, 405 bp, Homo sapiens
aactcacatgagcttcttatggttagtgaaggaacattttatggcctgcacatacgatctgatcctactcatcgataatgagggacagactactactggcaactacatggatgaaactcagaagccttttgctgacagaaggattcctccgacagacccagaagactacgtactgtatgattcaagttatatggtgctctgggaaaggcacaactatagggacaaaaaaacctggtccgtggatggtgagttgcagggaaatttttttggaggtgaccgaaggaactattctgtatcttgattatagcattgactatatgctttgtcaaactcacagaactgctgagcacagtggctcatgcctgtagacccaacactttgggagtccgaggtgtgtggatcact

SEQ ID NO: 16717 - DNA, 418 bp, Homo sapiens
ctcctgcggaagcagtgacctctgacccctggtgaccttcgctttgagtgccttttgaacgctggtcccgcgggacttggttttctcaagctctgtctgtccaaagacgctccggtcgaggtcccgcctgccctgggtggatacttgaaccccagacgcccctctgtgctgctgtgtccggaggcggccttcccatctgcctgcccacccggagctctttccgccggcgcagggtcccaagcccacctcccgccctcagtcctgcggtgtgcgtctgggcacgtcctgcacacacaatgcaagtcctggcctccgcgcccgtccgcccacgcgagccgtacccgccgccaactctgttatttatggtgtgaccccctggaggtgccctctgcccaccggagctatttattgtttaatt

SEQ ID NO: 16718 - DNA, 418 bp, Homo sapiens
  misc_feature (1)...(418): n = A,T,C or G
agagccaagctgactactgaggaagaagagattctatgcagcacacgatttataaaaatacagatgacatatgatgaatggaaaaagaatgccaaaatcaacaatctcctggaggagcacctccaccagggcaagcttcttgcgtgcatcacttcaaggccgtgacagtgcggccgagcacatggctatgtgctagagggcatagagttggagttctatcttacgaaaatcaaggcccgcgcaggcaaactaaatccttgttttggcttcacccatgtaataaaggtggttattgttttgctcccacaaaaaaaaaataaaaaaggctgcccgtttaatatgataccttgagggcccaaggctaacgcgctggtcggagngcttacccttctctttagcaaagagtttattacacccg

SEQ ID NO: 16719 - DNA, 419 bp, Homo sapiens
  misc_feature (1)...(419): n = A,T,C or G
tatcacttgagcactcattggacacaagaggtcaactgttttgtcatttgtgtagtaagaacaaaattaagtgtgtggcattaaagaaataacactgtctggccgggatcggtggctcacgcctgtaatcccagcactttgggaggccgaggcgggcatatcacgaggtcaggagttcgagaccagcctgaccaacatgatgaaaccctgtctctactaaaaatacaaaaattagccaggcatggtggtgcacacctgtagtcccagctgctcaggaggctgaggcaggagaatcgctcgaacccgggaggtggaggttgcagtgagctgagatggcgccactgcattccaggcctggngggtgacagagcaagactcagtctcaaaaaaaaaaaaaaaaaaaaaaaaaaaaaaaacgg

SEQ ID NO: 16720 - DNA, 419 bp, Homo sapiens
  misc_feature (1)...(419): n = A,T,C or G
tctgaagagtgggcctcgggtgccctctcacatctcctgttggatgctgggggagaagcaataaacctcagccctctggtctccactttcctctcaatttgggctgcaaatatgaagcctgaattttatgaaattagctttctgattcttatttattaatagattaagttctgaggcagctccgcaggactgtgtgtgaatgtgtatgtatacttacatatgtgtgtgcatgtgccatggggcggggggtatcactatactgtcctcaaatataagccaagggtaatttcagcggatgcacacacaaccctgcctcccacagttcctcccctaatctggtttctgtgttgagcctgggatggaggagccctangccagcctgggataagagtcccacagtctagggagatctgagggca

SEQ ID NO: 16721 - DNA, 422 bp, Homo sapiens
  misc_feature (1)...(422): n = A,T,C or G
tatcacttgagcactcattggacacaagaggtcaactgttttgtcatttgtgtagtaagaacaaaattaagtgtgtggcattaaagaaataacactgtctggccgggatcggtggctcacgcctgtaatcccagcactttgggaggccgaggcgggcatatcacgaggtcaggagttcgagaccagcctgaccaacatgatgaaaccctgtctctactaaaaatacaaaaattagccaggcatggtggtgcacacctgtagtcccagctgctcaagaggctgaggcaggagaatcgctcgaacccgggaggtggaggttgcagtgagctgagatggcgccactgcattccaggcctggngggtgacagagcatgactcagtctcaaaaaaagannnggaaaaaaaaaaaaaaaaaaaggggg

SEQ ID NO: 16722 - DNA, 420 bp, Homo sapiens
  misc_feature (1)...(420): n = A,T,C or G
cccacgcgtccgcaaagggtataccctggctctgtcacccatgaaccagcccagcatccagccagtgagtgggcacccaatgcctctcaggatgagaccagtaaatgccggaggtggagctgggcagctgtggagccccaggccacaggccagtctcgcttggctctcatgactgtggtggtggagatagcgtggggagcctcgcccatggtctcacgtggcaagaagtgcctttagctctggatcccaaccgtttggcacagctttggccacagccaggcccctctggaattgtccttattaaaccagtttcccgagaannannnnnnnnnnnnnnnnnnnnnnnnnnnnnnnnnnnggggggggcctttttaaaagattctttggggggcccaaatttaacgcgggttggacaaattt

SEQ ID NO: 16723 - DNA, 420 bp, Homo sapiens
  misc_feature (1)...(420): n = A,T,C or G
cggacgcgtgggaaaataccaaatgtaagagaacctccaagtcagggcgcagtggctcacccctgtaatctcagcactttgggtggccaaggcgggcagatgacttgaggtcaggagttcgagaccagcctggccaacatggtgaaaccccgtctctactaaaaatacaaaaattagtcaggtgtggtggacgcctgtgatctcaatctcagctactcgggaggctgaggcaggagaatcacttgaacccaggaggtgttgcagtgaaccaagatcacaccactgcactccagcctaggcaacagagactctgtctcaaaaaaaaaaaaaaaaaaggggcggccgttttaaaggatccttggaggggcccaagtttacgcgggcatgcaaggtaatagttctttccttatagggagncgt

SEQ ID NO: 16724 - DNA, 420 bp, Homo sapiens
atctgtgttaatctgagtaacttattgcctagcctataaataaattccaaaatatccaattcatttcttcttgaaatggtgcttgttttgttttctttccattacacaattagactcctacagtttaaaacaaactttaaaccactatcttgcactgctaacttttttctacctttgtaaatagaaacatttctgcataaaagtcatacatatgaagcaagggctgaatcataatcacaaggcttaattttgataaacgaatccagtgacctaaggattttctgcaaaatttgactgggagttgtgataggggggatttttgtttattttcttcctcttactccttaagataaaggtaagttgacttgaacaactttcttttgcactgggaaaataagcaaatgtttaaatgcttcaaaa

SEQ ID NO: 16725 - DNA, 419 bp, Homo sapiens
ctactcaggaggctgaggcagaagaatctctcattcccaggaggtggaggttgcagagagccaagatcgagccactgcactctagcctgggtgacagagcaagactccatctcaaaaaataagaagaaaagactgtatcccctttcagttctggaggctagaagtccaaacaggttgttggtggggcttctgcttcctctaaaagctttagggctgggggcccctgccccatagccacagaccattacttgtctgtggcctgtcaagaacaaggtcacacagcaggagataagtaacaggtgagcacttgaagcttcatctgtatttatggctgccccccatcgctcacatttttgccgtagctcctcctcctgtcataccagcagtggcattagattctcataggagcgtgaatccta

SEQ ID NO: 16726 - DNA, 415 bp, Homo sapiens
  misc_feature (1)...(415): n = A,T,C or G
aactttttaaattacatttgaaatataaaccaaatgaaatattttactgataagattcttcatgcttctttgctctccttaaaacggctttttcactagttagttccaagggtcagtctcataattttgttcttatactttgatttcctttttcttttttttttttttaaaaaaaggggggggaccgtccttccttcttttttttttttttaaaaaaaaaaacctgctcttgttcccccggtgggattcgtagggcggaaattaagctaaggagccccccccccttttggagaaagagaaatatggggcccttgccccccgggttaggggaataaagggtgcccccccccctcccccagtatattttttttttttaaacaaaaggggtgttcccccatttggggaccgggtgctn

SEQ ID NO: 16727 - DNA, 464 bp, Homo sapiens
  misc_feature (1)...(464): n = A,T,C or G
gatcaaggacgtaccgatttgaaaacccttcngnggctagcatcaggcncggaannccgggncgacccacgcgtgcggtgagtgtctggtgctgtgcaggacaaagggncaangtacttttttgtcccttacctgattgctggcatgcaacactcatgccaggacattggtgccaagagcttgacccaagtccgagccatgatgtactctggggagcttaagtttgagaagagaacgtcctcagcccaggtggaaggtggcgtccatagcctccattcgtatgagaagcggcttttctgaaaagggatccagcacacctcctcggtttttttttcaataaaagtttngaaggaaaaaaaaaaaaaaaaaaaaaaaaaaaaaanggggggcccctttaaaaaaacccttgggggggccaaattttccgggggatggcaagagataattttttcccttaaggggag

SEQ ID NO: 16728 - DNA, 398 bp, Homo sapiens
  misc_feature (1)...(398): n = A,T,C or G
acaaagcggagaacgctggtgggcctgttgtggagtacgctttggactgagaagcatcgaggctataggacgcagctgttgccatgacggcccaggggggcctggtggctaaccgaggccggcgcttcaagtgggccattgagctaagcgggcctggaggaggcagcaggggtcgaagtgaccggggcagtggccagggagactcgctctacccagtcggttacttggacaagcaagtgcctgataccagcgtgcaagagacagaccggatcctggtggagaagcgctgctgggacatcgccttgggtcccctcaaacagattcccatgaatctcttcatcatgtacatggcaggcaatactatctccatcttccctactatgatggngtgtatgatg

SEQ ID NO: 16729 - DNA, 478 bp, Homo sapiens
  misc_feature (1)...(478): n = A,T,C or G
ataaaatctgatcgccccatanatagctgtggaannnccgggnagatccaggcgtgacgcaagcgttcgggaataatctagacctgctatatcactccaagcattctggctaaagttaaggtcaacatgaattttactacaaatgtacactcactaaagtaaaaagaacgctcccaaaattacaaatgttaatctgatgattatacataaataagttaaaatcatatattaacataagtaaagacttttccaagcagtaatgaaataaactgctatgaaactggaaaaaggaatttaatagtcaactatctactattaaaaatctgtaagtcaggtactcaaaaatctgcaagggtctaataagctaaattcattccacttgtaaggagaaaatactctgctgcaagaatactgagaaccagctgagacataatttagcactggctgatgggaaagagctcatcaggaatgtacctat

SEQ ID NO: 16730 - DNA, 474 bp, Homo sapiens
  misc_feature (1)...(474): n = A,T,C or G
ttttgtttgataccccactanatcgctgcggaaccgccggggagatccacgcgtgcgcacaccactgcctgataaccatgctggctgccacagttctgaccctggccctgctgggcaatgcccatgcctgctccaaaggcacctcgcacgaggcaggcatcgtgtgccgcatcaccaagcctgccctcctggtgttgaaccacgagactgccaaggtgatccagaccgccttccagcgagccagctacccagatatcacgggcgagaaggccatgatgctccttggccaagtcaagtatgggttgcacaacatccagatcagccacttgtccatcgccagcagccaggtggagctggtggaagccaagtccattgatgtctccattcagaacgtgtctgtggtcttcaaggggaccctgaagtatggctacaccactgcctggtggctgggtattgatcagtccattgacttcg

SEQ ID NO: 16731 - DNA, 405 bp, Homo sapiens
  misc_feature (1)...(405): n = A,T,C or G
cacttctccaaaacaaaacacagcaagtttaatgaatctggtcagcttagtgcgttctacctttttgcctgtgtttggggcacattcattctcatctctgaaaactacatctcagacccaactatcttatggagggcttatccccataacctgatgacatttcaaatgaagtttttctacatatcacagctggcttactggcttcatgcttttcctgaactctacttccagaaaaccaaaaaagaagatattcctcgtcagcttgtctacattggtctttacctcttccacattgctggagcttaccttttgaacttgaatcatctaggacttgttcttctggtgctacattattttgttgaatttcttttccacatttcccgcctgttttattttagcaatgan

SEQ ID NO: 16732 - DNA, 400 bp, Homo sapiens
aggacacatgggcgcgcccaggggtggcctgtaggccaagcagatgtggcagttctgcagcagaagcatctgccacaaaagcggaagatgactcctttcttcagtgggtcctgctcctcatccctgggactgcctttggcttggggacatggcaggtccagcgtcggaagtggaagctgaacctgattgcagagttggagtccatagttctggctgagcctgtccctctgccagccgacccaatggaactggaaaatctggagtataggccagtgaaggtcacggggtgctttgaccattccaaggagctgtatatgatgccccggaccatggtggaccctgtccgggaggcccgggagggcggcctcatctcctcctcaactcagagtgaggcctatgg

SEQ ID NO: 16733 - DNA, 430 bp, Homo sapiens
cttacactttatgcacaaaatgtagggttataataatgttaacatggacatgatcttctttataattctactttgagtgctgtctccatgtttgatgtatctgagcaggttgctccacaggtagctctaggagggctggcaacttagaggtggggagcagagaattctcttatccaacatcaacatcttggtcagatttgaactcttcaatctcttgcactcaaagcttgttaagatagttaagcgtgcataagttaacttccaatttacatactctgcttagaatttgggggaaaatttagaaatataattgacaggattattggaaatttgttataatgaatgaaacattttgtcatataagattcatatttacttcttatacatttgataaagtaaggcatggttgtggttaatctggtttattttt

SEQ ID NO: 16734 - DNA, 397 bp, Homo sapiens
ggggaagcagcttccattctggatgtttggaaccttttagctttgttttggaatggcccaccattctcactggaaaacagtggtctgctgtgaaaggccagctctcggcagcccctgtggtttcagcgctgccgctctgtgtcattcaggttgtgcacattgtttttcttctgacttccagaaataaaagtgtttccatgggaaacctataatataaagaagggtcgcccttttaaaaggttcctttctgggcctcaatttaacccgtgcgtctaaggttttagtttttccttaaaggggggttttattaatagctagcttggcttctgtgtaaagggccttttttctttgggctggtttaaatggcataatctcccttttggtcataatggtctct

SEQ ID NO: 16735 - DNA, 385 bp, Homo sapiens
cttgacgaggctgcggggtctgctgctattctccgagcttcgcaatgccgccgagggacgacaagaagaagaaggacgctggaaagtcggccaagaaagacaaagacccagggaacaaatccgggggcaaggccaaaaagaagaagtggtccaaaggcaaagttcgggacaagctcaataacttagtcttgtttgacaaagctacctatgataaactctgtaaggaaggtcccaactataaacttataaccccagctgtggtctctgagagactgaagattcaaggctccctggccagggcagcccttcaggagctccttagtaaaggacttatcaaactgggttcaaagcacagagctcacgtaatttacaccagaaataccaa

SEQ ID NO: 16736 - DNA, 395 bp, Homo sapiens
tttctgtgggtgagagatgtgttgctgtgcccacccagtacagcttcctcctctgaccctttggctcttcttcctttgtactcttcagctggcacctgctccattctgccctacatgatgggtaactgtgatctttcttccctgttagattgtaagcctccgtctttgtatcccagcccctagcccagtgcctgacacaggaactgtgcacaataaaggtttatggaacagaaacaaaaaaaaaaaaaaagggggggcccgtttaaaagaacccttggggggcccaaatttaacccgggcgggcagaggattatttttttccttatagggagccaaataaaaacctacctgggaattttggaaaagaacccttccttcgggggggaaacaaaatg

SEQ ID NO: 16737 - DNA, 388 bp, Homo sapiens
  misc_feature (1)...(388): n = A,T,C or G
ctttctttctcacaggcataagacacaaattatatattgttatgaagcactttttaccaacggtcagtttttacattttatagctgcgtgcgaaaggcttccagatgggagacccatctctcttgtgctccagacttcatcacaggctgctttttatcaaaaaggggaaaactcatgcctttcctttttaaaaaatgcttttttgtatttgtccatacgtcactatacatctgagctttataagcgcccgggaggaacaatgagcttggtggacacatttcattgcagngttgctccattcctagcttgggaagcttccgcttagaggtcctggcgcctcggcacagctgccacgggctctcctgggcttatggccggtcacagcctn

SEQ ID NO: 16738 - DNA, 451 bp, Homo sapiens
  misc_feature (1)...(451): n = A,T,C or G
nattgaaggctnattgaacncgtctcggaaacccggggcgacccacgcgtccggctgactctcaacttgtcatgagtggaagcattaatgttcattatgcttcttagattctgaagacaggtccctgctcatggatgactctggcttccttaggaaaatatttttcttccaaaatcagtaggaaatctaaacttatcccctctttgcagatgtctagcagcttcagacatttggttaagaacccatgggaaaaaaaaaatccttgctaatgtggtttcctttgtaaaccaggattcttatttgtgctgttataaatatcagctctgaacgtgtggtaaagatttttgtgtttgaatataggagaaatcagtttgctgaaaagttagtcttaattatctattggccacgatgaaacagatttcaactgataaagagctggagaactccatgt

SEQ ID NO: 16739 - DNA, 447 bp, Homo sapiens
  misc_feature (1)...(447): n = A,T,C or G
atcatgtgaatccctcatttcactggattaaagntatttatttatatgtctggctctggcactatactgagctctttgaggtcaaggattatggctttatgtattcagcacttaatatgttatctggaatgtattagacgctcagtaaatacttaatgaaggaaaaattcctaaaaagctggaaaggttttctttatatgtcatgattccttaaccattctagtcatctttaaatatgccactcagaaaacctgatactttatagcctgaccagagccaagtataatatgacttactgtcttcccatctgagcactaaattcttattaatgatgccaaaagttgtattggcaggcanaacaaaaattgctcttttttattttttgcatgaacttccattatgccagnctttttccttacatgtatggacaactaaatttgtatgccn

SEQ ID NO: 16740 - DNA, 445 bp, Homo sapiens
acgaagaaaaatagttacatttagcagatgccctctccataaaactcttcacatttaattctcacagcattgactgtagattgatgtcataatctttagttcacagtatcagaaactgaggctcagtgagattacattgctgtatacattttagtggaaaaaagcttgagcctgcattcatactctgatatatctgactgtaagcgttcttcctattattctacccacatccaagtctgttcttctcttggatgctagttagttttctatggtttacgcacctcatctggcaaagtagaattgtaatacctgctgtcatagacttcccaaaaagagagagtgcgttgagaggttggctttataattatatcataatggctggaaataaatgtaatgtcctctatacatttcctcctttgaaaaatggggatctgggaagattggt

SEQ ID NO: 16741 - DNA, 494 bp, Homo sapiens
  misc_feature (1)...(494): n = A,T,C or G
gagccggggcncttttnaccttattaccgtgcgacggccggaatttcggctgaatacgtcggcagngccggaccgntggannctggcagagaagctggggggttgtgccgacatctccctggagggcaagtttttgtgagccccttctggccccctgcctggagcatctggcagccccacacctgcccttgggggttgcaggctgcccccttcctgccagaccggaggggctggggggatcccagcagggggagggcaatcccttcaccccagttgccaaacagaccccccaccccctggattttccttctccctccatcccttgacggttctggccttcccaaactgcttttgatcttttgattcctcttgggctgaagcagaccaagttccccccaggcaccccagttgtgggggagcctgtattttttttaacaacatccccattccccacctggtcctcccccttcccatgctgccaacttctaaccgan

SEQ ID NO: 16742 - DNA, 510 bp, Homo sapiens
  misc_feature (1)...(510): n = A,T,C or G
gaggaggggnnnttttnaccttgatgccgtgggaangnncngnnnnnntnnnnnctagactgccgtaggcaccggncccggaatcccgggncgacccacgcgnccgcttacctacctggttgatcctgccagtagcatatgcttgtctcaaagattaagccatgcatgtctaagtacgcacggccggtacagtgaaactgcgaatggctcattaaatcagttatggttcctttggtcgctcgctcctctcctacttggataactgtggtaattctagagctaatacatgccgacgggcgctgacccccttcgcgggggggatgcgtgcatttatcagatcaaaaccaacccggtcagcccctctccggccccggccggggggcgggcgccggcggctttggtgactctagataacctcgggccgatcgcacgccccccgtggcggcgacgacccattcgaacgtctgccctatcaactttcgatgggaggcgccgngcctaccatagggn

SEQ ID NO: 16743 - DNA, 430 bp, Homo sapiens
  misc_feature (1)...(430): n = A,T,C or G
ctcccagccctcctctgtgctggctcctgccaggacgcagtcagcgccgtcagctgtctgtgttgttggagtgtcttttctgttaaaacccaagctttctgaaagtctgtcttctgaagaggtgcatattacctcatatagagcgttaagaatgctcaccatggccaggcgcggtggctcacgcctgtaatcccagcactttgggaggctggggcccggtggatcacttgaggtcaggaatttgagaccagcctggccatcatggtgaaaccctgtttctactaaaaatataaaaattagccagatgtggtggtgcacacctgtaatcccagctactcgggagactgaggcaggagcatcacttgaacccgggaggtggaggttacagtgagccgagattgcaccactgtactccagccggngcgacagn

SEQ ID NO: 16744 - DNA, 433 bp, Homo sapiens
  misc_feature (1)...(433): n = A,T,C or G
cccacgcgtccggtctcactttgtcacataggctggagtgcagtgggatgatcttggctcactgcagccttggcctcctgggcttaagcaatcctcctgtcttggtctcccaagtagcagggactacaggtgtgtgccatcatgcccggcgacagatttttgattattaaagcagccttggctgggcacagtggctcacacctgtaatctcaacactttgggaggccggggcagacagatcacttgaggccaggagtttgagaccagcctgagtgacacagtgaaaccactttcttaactaannntccccgannaaaaaaaaaaaaaaaaaaaaaaaaaaaaaaaanngnnnnnaaattaaaaatttttttggggggaaaaaattaagggggtgggggaggaaaaaanttttttcctttaggggggtgttttt

SEQ ID NO: 16745 - DNA, 479 bp, Homo sapiens
  misc_feature (1)...(479): n = A,T,C or G
cgcgagttgcccatgcagctgcgatannccctaaatagctgcggaaccgcnccggaatccgggtcgacccacgcgtccgcggacgcgtgggccgagggcatggacaagctctatgagatgatcctgaaacgcaggaagtccctcaagcagaagaagaagcggtaatgcgcccggagcgaccggggagcgagcgagtgcgtcaagaaagaatgaatggatggatggatggttggatggatggatggatggatgagcgagaacccgcgcccgcgaacaaagagcgaaccaaagcgatgcttcgaatttttaaaacggaatctctgcacccaaatgcaggactggtgacttaaggagctgcgaagtctgatttaccggcctactctcgacctgccccccacccccagctcaggggaccttttgtctgaacgccagagctactgaccaggtcggggggccgcggtggggagtggaagagccgg

SEQ ID NO: 16746 - DNA, 393 bp, Homo sapiens
tgccgccaaggtgctcggtccttccgaggaagctaaggctgcgttggggtgaggccctcacttcatccggcgactagcaccgcgtccggcagcgccagccctacactcgcccgcgccatggcctctgtctccgagctcgcctgcatctactcggccctcattctgcacgacgatgaggtgacagtcacggaggataagatcaatgccctcattaaagcagccggtgtaaatgttgagcctttttggcctggcttgtttgcaaaggccctggccaacgtcaacattgggagcctcatctgcaatgtaggggccggtggacctgctccagcagctggtgctgcaccagcaggaaggcctgccccctccactgctgctgctccagctgaggagaag

SEQ ID NO: 16747 - DNA, 399 bp, Homo sapiens
cggacgcgtgggcggacgcgtgggaagatgctcttttcctgaacctcaagggtcccgcccctctcactttcaggtctctggacctctgactgacactgtgcctgcccaggtccctgtatgcactgccacagtgccctgggccccatgtccacccctgtcctgcccttctctgggatagggctggccttcctctgcctctgcctggctgcatccatggtcgatctcaagtgccttggcatgaactccactctcctgcagccttcaatcaaggaatgatggggatgtgtacataccccaccccaccccttggcagggtgatgctgaggtgtggatttttaacagttcccagactttcccaggaggcttgggtttgggtgcccacagtgggagctggtgtga

SEQ ID NO: 16748 - DNA, 405 bp, Homo sapiens
atgactagatgtcagagctggctcccggatgggatatgagtgactttgtggaggatggcgcctaaatgaggcatgccaatttccgcaccagggtgacgaacataagggctcctaaaaggctagcccaatgtatctgtatttccttggggattaaaacccatgatcttcagctcctcagagaactgaaagttgcaaggagaaatccagtaattcctgttatctgcaggctttataagtcagtggagcctgcggaagtggccagaatccagcactccaagcactgctgtcttctcacagagtcttgaagccagagcagcgccaggatgtcacgggagctggccccactgctgcttctcctcctctccatccacagcgccctggccatgaggatctgctccttcaacg

SEQ ID NO: 16749 - DNA, 399 bp, Homo sapiens
catggtggccaaagtcaatacttccaaatgctttttgattgatggctacccgcgggaggtgcagcaaggagaagagtttgagcgacggattggacagcccacactgctgctgtatgtggacgcaggccctgagaccatgacccagcggctcttgaaacgtggagagaccagcgggcgtgtggacgacaatgaggagaccatcaaaaagcggctggagacctattacaaggccacagaacccgtcatcgccttctatgagaaacgtggcattgtgcgcaaggtcaacgctgagggctccgtggacagtgtcttctcccaggtctgcacccacctggacgccctaaagtagcaacgctggagccgcttccccagctcagagccccgccccaccccgtcctg

SEQ ID NO: 16750 - DNA, 416 bp, Homo sapiens
agcagttgtcatgtgggtaacctcaggcacctctaatcctgtcctggaagaaggaccagcagcccctccagaactctgcccaggacagcaggtgcctgctggctctgggtttggaagttggggtgggtagggggtggtaagtactatatatggctctggaaaaccagctgctacttccaaatctattgtccataatggcttctttctgaggttgcttcttggcctcagaggaccccaggggatgtttggaaatagcctctctacccttctggagcatggtttacaaaagccagctgacttctggaattgtctatggaggacagcttgggtgtaggttactgatgtctcaactgaatagcttgtgttttataagctgctgttggctattatgctgggggagtcttttttttttatat

SEQ ID NO: 16751 - DNA, 418 bp, Homo sapiens
agggccgacggcggtgggcggagcgttgcgcatgctcgggcctcccgctcgccgctgcgttgggaccgcgcagcccggtgtgtgcagtggcctcagggatccggaaagtctaggactgaacttctcctaacatccagtaatggggacctggaacctgggcgtactagagtgccgcgcgtagggctccaggtcgctggcttctgcgctttcttcctctccaaagttgagtatctcctatctgtgtcctcatacatactgccgcctgaggtgccatggcccccaagccgggggccgagtggagcacagccctgtcccatctggtgctgggagtggtgtctctgcacgcagccgtgagcacagccgaagcaagtcgaggggctgctgctggcttcctgctccaggtcttagctgccaccac

SEQ ID NO: 16752 - DNA, 485 bp, Homo sapiens
cggggcatggacgccctccgaccttgaggaccttccgggacgacccacgcgtccgcggacgcgtgggcggacgcgtgggcggacgcgtgggcggacgcgtgggcgacgaatcagtcggcgggagcccacggtcgctgggcggtgtctttaagggagggggcggagccacgtctctggacatcctgagcccaagtcccccacactcagtgcagtgatgagtgcggaagtgaaggtgacagggcagaaccaggagcaatttctgctcctagccaagtcggccaagggggcagcgctggccacactcatccatcaggtgctggaggcccctggtgtctacgtgtttggagaactgctggacatgcccaatgttagagagctggctgagagtgactttgcctctaccttccggctgctcacagtgtttgcttatgggacatacgctgactacttagctgaagcccggaatcttcctccactaacagagg

SEQ ID NO: 16753 - DNA, 434 bp, Homo sapiens
catagacttaactcccttaaacccacacatctgatgcgacctgacccctagacattggataccagcgcgtcaggcactctgcactttccagtgatgccactgagaatggccccgtgacaaaagagcactgcgcccatttctagattcgtggactcttcacataaattctgacattttcatttcacttcctgaaagccacggtcggcttgtgaaaagttggtaaacaacatgctaaatgtgaaatggggaccctcactctaaactttccctgttcagagcatcagatgaagacttcattgggttttatagtggctttctgatttttggtagtccatcgaacataggagtttgaaagttgttgtatactgctaacgattgtctgcccatgtcctgcctgaaataccatgattgtttatggaaaggatctttaataa

SEQ ID NO: 16754 - DNA, 580 bp, Homo sapiens
  misc_feature (1)...(580): n = A,T,C or G
gataacggccgcgtgcacgcgggtaacacgcacacggacnactcggtcgcgcgcgcgatcgcacgcgacggccacaccacacncctcccnnnnnnaagagtnnaattgagattgtgtgcaatncggangngcnccggaanngacggancgacccacgcgtccgaggacgcgtgggctggnngaagaagatttccacttatgagggaagnccagcaccctgtgtgccagtccagaactggcccatcgggagaccccctgaaaatcatatgggcttggatttggatattctcaacagaaagggttaaaggctgatggtacctaaagcctggtacttgaattttgatcaagataagctgccttaaggtctcttcattacacaaatgatcctagataattgatagatcctgtggctcaactggatttctagatagaagctggattcatgtgatgccagaggagtaaaatttcaagagactgaaaccagatctgagtttcgctgttccaggctggacctctttggtgctgcaaatcctggatatactgcagatgacgactgcgcctttcttttatgggctctctt

SEQ ID NO: 16755 - DNA, 417 bp, Homo sapiens
cggacgcgtgggctggttgaagatgatttccactgaggagggaagtccagcaccctgtgtgccagtccagaactggcccatctgtagaccccctgaaaatcatatgggcttggatttggatattctcaacagaaagggttaaaggctgatggtacctaaagcctggtacttgaattttgatcaagataagctgccttaagttctcttcattacacaaatgatcctagataattgatagatcctgtggttcaactggatttctagatagaagctggattcatgtgatgccagaggagtaaaatttcaagagactgaaaccagatctgagtttcgctgttccagtctggacctctttggtgctgtaaatcctggatatactggagatgagtactggcgttttcttttatggcctctctt

SEQ ID NO: 16756 - DNA, 420 bp, Homo sapiens
  misc_feature (1)...(420): n = A,T,C or G
cagggcagcgcgtccgggagcggagtccgcgcccgccgccgccatgccggacagctgggacaaggatgtgtaccctgagcccccgcgccgcacgccggtgcagcccaatcccatcgtctacatgatgaaagcgttcgacctcatcgtggaccgacccgtgaccctcgtgagagaatttatagagcggcagcacgcaaagaacaggtattactactaccaccggcagtaccgccgcgtgccagacatcactgagtgcaaggaggaggacatcatgtgcatgtatgaagccgaaatgcagtggaagagggactacaaagtcgaccaagaaattatcaacattatgcaggatcggctcanagcctgtcagcagagggaaggacagaactaccagcagaactgtatcaaggaagtggagcagtt

SEQ ID NO: 16757 - DNA, 415 bp, Homo sapiens
  misc_feature (1)...(415): n = A,T,C or G
ccagcgcgcgaggacgtgatccgcttctgctccggcttggattgtagccttgacgaggtctgagcgaccatggaccggccggggttcgtggcagcgctggtgctgctgcattttttatcacctatgaatatgtgaagtggtttttgcatgctgattcatcttcatatttgacacctatgaaacatatgttggctgcctctgctggagaagtggttgcctgcctgattcgagttccatctgaagtggttaagcagagggcacaggtatctgcttctacaagaacatttcagattttctctaacatcttatatgaagagggtatccaagggttgtatcgaggctataaaagcacagttttaagagagattcctttttctttggtccagnttcccttatgggagtccttaaaagccct

SEQ ID NO: 16758 - DNA, 417 bp, Homo sapiens
  misc_feature (1)...(417): n = A,T,C or G
tttcttttgggttttggtttttatgtttgttttttggggttaggaaaaacatgcatttttaccgtgcacgtaaataggtcagcagaaaagggagcccagaaaaggcagcagatggaccatgcccttgctgggttttccttttctttgggactgtgaggggaaatggtttttagaggtgagggttggtccatgtggaggaaagaagtgtctctgttgggggacagaggaacctggggagtccatcgcatgtcctacaatctgctcttagacacggccttgccaggagagcctgccctcagactgcaggaccagaacccctgcctccatctttccaagcaccggngcgaaaaaccacaaaggataggaagaacatttatatatatataatataaaatcacttggtgattataaaaatac

SEQ ID NO: 16759 - DNA, 432 bp, Homo sapiens
acagcctcaaaaatctcagctctggaggggctgctcaagtcccagacgcccagcttcaaccaccacaccatgctgcacatgcatacagcactggactatggctcacagtctgggagggaaggccaaggatttcacatcctgatcccgaccatcctgggccttttcctgctggcacttgtggggctggtggtgaaaagggccgatgaaaggaggaaagccctctccaggcgggcccgccgactggccgtgaggatgctcgccctggagagctcccagaggccccgcggttcgccgtgaccgcgctcccaaaacaacatctacagagcctgcccgcggcgcgctcgtggagcggacgctgcaagcacaggggaggcccccgttcccggccccggagcgccgatagcccccgccccgcttgaggtgtctgaatct

SEQ ID NO: 16760 - DNA, 418 bp, Homo sapiens
agcgccaccgcggtgttggcgagtgtgaagagagaggaggagcgtttgcggcctcagcgtctgtcaacagaaccctcttcacccgtgggtaaaccctccctaaccctgagctcgtgctcccctcccggaggacgcagacctgaccacagaagccctgcagcactcactgggggcttgagggagcccctgagtcccctccaccctcgccgccttctcctgggtacccaggaaacgtctccaagggaggctgtgacccaggaccccgcctcgacctcaccttcttctgtaaggcgcagtgaaagacgaagatgaagaccccctggaaggcgttgaaggtggtgaagagataggccatgaccaccgactcctttgtgatgaagaggaggccgatagcccagtgagagcctcgaagatgtat

SEQ ID NO: 16761 - DNA, 422 bp, Homo sapiens
cccacgcgtccgggtgtttcatttggtttatcagtgtttaatttgatgaatgccatcatgggaagtggcatccttggcttagcttatgttatggctaataccggtgtctttggatttagcttcttgctgctgacaggtgctgtcctggcttcttactcagtccatcttctgcttaggatgtgtattcagacagctgtaacatcttatgaagagcttggactctttgcatttggattacctggaaagaaggtggtggcaggcaccataataattcagaatattggagctatgtcatcttatcttttaattattaaaacagagcttcctgctgctattgcagaatttttgactggagactatagtagatattggtatcttgatggacaaacactactaataatcatatgtggtggcattagtgt

SEQ ID NO: 16762 - DNA, 495 bp, Homo sapiens
  misc_feature (1)...(495): n = A,T,C or G
nggccgtgtnnacctgatagctntcggtaccttngccgactttccgggtcgacccacgcgtccgttttgaggttactatattgtcaagcaatgccattcattatctttgacaatgaaagattgatctctgttttcatgggcagtgtctatagttttcttatgcgttagtagaagtctgtagactccatgtccttttgatgtaactcttcatgaattatttatttttaggtctgttagaattccacaattcagctttcaaagactgtaatctatggcaaagccttgtttcttcttaatagcatttaccacatttacaattatcttattttttatgtgtttgattttatttcccacagaagaatgcaactcccatgaagataaaaactattcttttttgttcagtgtgtccccattgcctagcgtagagccaggctcatagtagctgttcagacatgttgggtaaatgaatgatggctgaatctagtagtaacgaaa

SEQ ID NO: 16763 - DNA, 403 bp, Homo sapiens
cgagagtccagagaggaggaagctcctgccggctgagcgggcctggaggaagtgagcagcggggctcctgcctcccggcctggtccccgaagaccccagaagaacccggaacttgcttccattcggaatccagggaccaccctttgcactcagtaggcctttgttttcctgcgtggaaagcggttgggcttgggaggcgatggagccggagttcttgtacgacctgctgcagctccccaagggggtggagcccccagcggaggaggagctctcaaaaggaggaaagaagaaatacctgccacccacttcccggaaggaccccaaatttgaagaactgcagaaggtgttgatggagtggatcaatgccactcttctccccgagcacattgtggtccgcagcctg

SEQ ID NO: 16764 - DNA, 414 bp, Homo sapiens
  misc_feature (1)...(414): n = A,T,C or G
cccacgcgtccgatgataattcctatgcggaaatgattccagccatggacccctcacttgagcatgcgaatattctcacggagagaagccccagcgagattctgcggtgaatacagtattgcacttactctttcatcacggaaacagaccccccgagagaagccccaacgagattctgcggtgaatacgggactgcacgtactctctcatcatgagaacagagccccgttcataaaattttcatcgttattcttaaggatatactcctctaactaacccttaagcctcatgaagataggattgtttatagaacttttactatagcttcatccttgataacgtcctaacttccttctggaccacctccttgaccaaaggcatattgagatctatgtgacatgaggatatctctcn

SEQ ID NO: 16765 - DNA, 405 bp, Homo sapiens
  misc_feature (1)...(405): n = A,T,C or G
cgtggacctcccggcctgtagggggcgtcgggcgcatcggaagggcctgctccggagcctggccagggctgcgcagtcatgatcaccgagaccgcggcggagcctacggtccctgcagtgcctgctgctgaggaggccaccgaagctcggggacgcgaggagccggcgtggccctggaaagacgccccgatccggacgctggtgcagcgcatccaccagctgcaggctgagcgcgcgcagggcttccgccgactggaggagtggttggcgccggtgcagggcctgagagcctgggggcgcggcctcagggtccccacatgccgcagaggccaccgccagtacctgcgcagcggccctgactacgacttcgcgcgctaccggagcacagtgcacggngtgacccan

SEQ ID NO: 16766 - DNA, 401 bp, Homo sapiens
  misc_feature (1)...(401): n = A,T,C or G
ctgatttcgagcaccgcatgccacgggagcagtggtggctgagcctgcggctcatgctgaagatgctggcacaataccgcatcagtatggccgcctacgtgtcaggggagctggagcacgtgacccgccgcaccctgagcatggacaagggcttctgaggccagccatgcccacgcccctccccagcccccacccatgccagcgcagcgccagggctcagatggggcctgggctgttgtgtctggagcctgcaggcaggtgggggctgcgtccctgctcagcccatcccctgcctctatccctggccacctgccaggcctccctccggctggtgtcttgagaccagcctgccaggccctccagcaggaggacagagtgccctgnggcatccaccttcctgn

SEQ ID NO: 16767 - DNA, 416 bp, Homo sapiens
aaaagaagagcagtcacagatcaccatccaggtaactgtgcagattggctggcggcgagagggtatcaagtatcgtcggaatgagctcttcctggatgtgctggagagtgtgaacctgctcatgtccccacaagggcaggtgctgagtgcccatgtgtcgggccgggtggtgatgaagagctacctgagtggcatgcctgaatgcaagtttgggatgaatgacaagattgttattgaaaagcagggcaaaggcacagctgatgaaacaagcaagagcgggaagcaatcacttgccattgatgactgcaccttccaccagtgtgtgcgactcagcaagtttgactctgaacgcagcatcagctttatcccgccagatggagagtttgagcttatgaggtatcgcacaaccaaggaca

SEQ ID NO: 16768 - DNA, 408 bp, Homo sapiens
cttccccctctctgagccagttttcatttcttcctggtggcattagccactccctgcctctcactccagacctgttcccacaactggggaggtaggctgggagcaaaaggagagggtgggacccagttttgcgtggttggtttttattaattatctggataacagcaaaaaaactgaaaataaagagagagagagaaaaaaaaaaaaaaaaaaaaaaaaaaaaaaaaaaaggggggggcctttttaaagaacccttgggggggccaaattttccgggggttgggaaggtataatttttttctttttggggggcctttttaaaacccccttgggaatttttggaaggaaccttttttttgggggggggacttattggcccaacctccttccagaattttaaggttttgg

SEQ ID NO: 16769 - DNA, 403 bp, Homo sapiens
ctggtgtcggaggttagtttctgcgacttgtgttgtgactgctgataggaagatgtcttcaggaaatgctaaaattgggcaccctgcccccaacttcaaagccacagctgttatgccagatggtcagtttaaagatatcagcctgtctgactacaaaggaaaatatgccgcggacttcttttaccctcttgacttcacctttgtgcgccccacggagatcattgctttcagtgatagggcagaagaatttaagaaactcaactgccaagtgattggggcttctgtggattctcacttctgtcatctagcatgggtcaatacacctaacaaacaaggaggactgggacccatgaacattcctttggtatcagacccgaagcgcaccattgctcaggattatggg

SEQ ID NO: 16770 - DNA, 399 bp, Homo sapiens
tcagccctcctcattcctaaataacttgccttacatatcagccctcccacttctgaagttcaaattagtgcctcggaaatgtagaatttattatttgtcattttttttttttagcatagattgagaacagttgaactcttaaatcctcaaatgccaggggtctgctctagcatcagtaagtatttagcaaaaactaactccgtaatgaagggaattcaattccacacatggtttgttcaagcacacttaataagtagcctattttttaaatgtctttttaaaaggtaaatatttggatgaagtttttctttgttttgatatattcatttgctacaccaactatgttttcagaattcatcttttgaacaacttggtttcagaatatgtaaaatgacttta

SEQ ID NO: 16771 - DNA, 400 bp, Homo sapiens
  misc_feature (1)...(400): n = A,T,C or G
gcgaccacgcgtccggacttctgcatctccttccaggtcagctcattcacaagagttgctcccaagcctggatgagttgcaccttgcatcttgagcatgcatttctcacaataattattaagctgtgtgataatttctgctttcaggacactcatccattatcttggctgtgagctccttgggtacgggtaccttgtatgtttaattttatatccctagcacaaagcaagtgcctggcacatagtcagtgccctaagtattcgtagagtgaagaatgccagcctctcttgtccctggtttccttatgtgttgaatgtnggtgagtttgtccattgctagggagagacttccaagaataaaatttactattctagatgcttctactgctatcgtttatctg

SEQ ID NO: 16772 - DNA, 478 bp, Homo sapiens
  misc_feature (1)...(478): n = A,T,C or G
ccgccccccgaaantaaattagaacgccctgagttgaganccgtgttgccgggtcgacccacgcgtgcgcccacgcgtccggtgagcttcctggagcccagagatgagaagataaagatgccgctcctacgaggactgctgtggctccaggtgctgtgtgcgggccctctccatacagaggctgtggtacttctggttccttctgatgatgggcgtgcttttctgctgcggagccggcttcttcatccggaggcgcatgtaccccccgccgctgatcgaggagccagccttcaatgtgtcctacaccaggcagcccccaaatcccggcccaggagcccagcagccggggccgccctattacactgacccaggaggaccggggatgaaccctgtcgggaattccatggcaatggctttccaggtcccacccaactcaccccaggggagtgtggcctgcccgccnctccagcctactgan

SEQ ID NO: 16773 - DNA, 398 bp, Homo sapiens
atccagagcacagatctgtttcttgcattgaaagaccccacccaagcttggcagccgagctcgtgtatgctggggctcccttcatctccagggagacccctccccgggcctaccagcgcccgctgggctgagcccctaccccacaccaggccggcctcccgggccctaccttggaaacctgccctgcctgagggcccctctgcccagcttgggcccaactgggctctgccaccctacctgttcaatgtaccgggcccgttgaggatgaggccgctagaggcctgacgatgatctggaaggagtgagaggggacaaaacccaccttgttggagcctgcagggtggtgctgggactgagccagtcccaggggcatgtattggcctggaggtggggttggg

SEQ ID NO: 16774 - DNA, 383 bp, Homo sapiens
  misc_feature (1)...(383): n = A,T,C or G
cgaggaaacagnacagncgctagtcaagtggattttaaagtaaagcatattcgtaaggtaacagttattgtgttggtataaaactatacccactgcaaaagtagtagtcaagtgtctaggtctttgatattgctcttttggttaacactaagcttaagtagactatacagttgtatgaatttgtaaaagtatatgaacacctagtgagatttcaaacttgtaattgtgggtaaatagtcattgtattttcttgtgaactgtgttttatgattttacctcaaatcagaaaacaaaatgatgtgctttggtcagttaataaaaatggttttacccacaaaaaaaaaaaaaaaggggggcccttttaaaagaacccctgggggggc

SEQ ID NO: 16775 - DNA, 403 bp, Homo sapiens
cccacgcgtccggactggcccagccgcactttgtgttccgccttctccgcagccccgcaggccccgggccctgtcattcccagcgctgccctggcttgcgttccagtgttccagcttctgcgagatgaccctcaaggcgagcgagggcgagagtgggggcacgcatgcacacggcgctctccgacctctacctggagcatttgctgcagaagcgtagtcggccagaggctgtatcgcatccattgaatactgtgaccgaggacatgtacaccaacgggtctcctgccccaggtagccctgcccaggtcaagggacaggaggtgcggaaagtgcgactcatacagtttgagaaggtcacagaagagcccatgggaatcactctgaagctgaatgaagaacagtc

SEQ ID NO: 16776 - DNA, 481 bp, Homo sapiens
  misc_feature (1)...(481): n = A,T,C or G
agaaccaaaaaacnataaattttgatagccctcaggtagagacccgtagttgccgcgtcgacccacgcgtgcgggtaggaataatgacagtattctccgcagctctcctggcagtgatgggtcctagtcctagcgcaggaatttgaagctcaagtgatccacccacctcggcctcccaaagtgctgggatggacaggcttgagccaccatgcccagctctaattcaggtcattctgacttcagagcccagacccttcacccagcactgaattggtctaggccttcgtgagttattgttacatcaccgtttgggagtgggctactttttattaaaacctgggtctccataacagagcgatgtagaaagaaaggaagtcatgggttgtactcgccatgcttgcttagagggtaaaactcaaccagatgggcgcaaatgataggctgtgtcaaaatgaaaaaaaagcccttttcctttcttctg

SEQ ID NO: 16777 - DNA, 470 bp, Homo sapiens
gtaaggaaccgaggcgggtttagacctgaaagcctcgatacgcctgagaaccctggacgacccacgcgtccgcgaggaaacagtacagacgctagtcaagtggctcttaaagtaaagtatattcataagggaacagttattctgttgatataaaactatgcccactgcgaaagtagtactcaagtgtctaagtctttgatattgctcttttgggtaacactaagcttaagtagactatacagttggatgaatttgtaaaaggatatgaacacctagtgagatttcaaacttgtaattgcggctaaatagtcattgtattttcttgtgaactgcgttttatgattttacctcaaatcagaaaacaaaatgatgtgctttggtcagttaataaaaatggttttacccacaaaaaaaaaaaaaaaggggccgccttcttagagtgacctttggggggccaaattttgcctggt

SEQ ID NO: 16778 - DNA, 401 bp, Homo sapiens
  misc_feature (1)...(401): n = A,T,C or G
aagtatacgttctaggagcttttacaggattacatggccgaaggagaagagagtactggcaggtctgcacaatgctgaagtgcaaaactactaatttgacaacttgtggacggccagtagaaactgcttctacaagatttgaaatgttctccctcagtggcacatttggaacagagtatgtttttcctgaagtgctacttaccgaaattcatctgtcacctggaaaatttgaggtgctgaaagatgggcgtttggtaaacaagaatggatcatctgggcctatactaacagtgtcactctttgggaggtggtacacaaaggactcactttacagctcatgtgggaccagcaattcagcaataacttacctgctaatattcatattattaatgatcatagcn

SEQ ID NO: 16779 - DNA, 406 bp, Homo sapiens
ggacccgaacccagcctctcccctacccgaacaccggccccggctccaccgaggcccgggtcccccagcccgtctcgccgccgccatggcggaccctaaatacgccgaccttcccggcattgccaggaatgagccagatgtttatgaaactagcgacctacctgaggatgatcaagcggagttcgatgcggaggagctgacaagcacaagtgtggaacacatcattgtcaatcctaatgctgcctatgacaagttcaaggacaagagagtggggacaaagggacttgatttctcagatcgtattggaaaaaccaagaggacaggatatgaatctggagaatatgagatgcttggagagggtctgggagtgaaggagacaccccagcaaaagtaccagcgcctactg

SEQ ID NO: 16780 - DNA, 478 bp, Homo sapiens
  misc_feature (1)...(478): n = A,T,C or G
agtaggggccgnggagatttagacctgagagcctcgaatnncnctgagagccctgcgaaccgccccggaattcccggggctgaggattcttgggccgcacgctcctgctcctgactcaccgctgttcgctctcgccgaggaacaaggcgggcaggaagcccgcgcgcaacagccatggcttttaaggataccggaaaaacacccgtggagccggaggtggcaattcaccgaattcgaatcaccctaacaagccgcaacgtaaaatccttggaaaaggtgtgtgctgacttgataagaggcgcaaaagaaaagaatctcaaagtgaaaggaccagttcgaatgcctaccaagactttgagaatcactacaagaaaaactccttgtggtgaaggttctaagacgcgggatcgtttccagatgagaattcacaagcgactcattgacttgcacagtccttctgagattggtaagcagatta

SEQ ID NO: 16781 - DNA, 382 bp, Homo sapiens
attggcataaatgtggcaataaaaatagtagtaatataagtgcaaaacaactgaaatgtgtgtggccataaggatacatgagcaggtaaattgacctctaagccctgaatggatgctatctgctttatcatcttttaactttttttttgttaatagatttttcaaaccagatttaggtttaaaaaactgatcagaatcaccactggggcctgtcagggggtggggagaaaggggaggaagagcattaggacaaatacctaatgcatgcagggcttaaaacctaaatgatgggttgataggtgcagcaaaccaccatggcatatgtatacctatgtaacaaacctgcacgctcagcacgtgtattcatgtatcccagaactta

SEQ ID NO: 16782 - DNA, 401 bp, Homo sapiens
cccacgcgtccggctccggcaaccgctccggcaacgccaaccgctccgctgcgcgcaggctgggctgcaggctctcggctgcagcgctgggtggatctaggatctggcttccaacatgtggcagctctgggcctccctctgctgcctgctggtgttggccaatgcccggagcaggccctctttccatcccgtgtcggatgagctggtcaactatgtcaacaaacggaataccacgtggcaggccgggcacaacttctacaacgtggacatgagctacttgaagaggctatgtggtaccttcctgggtgggcccaagccaccccagagagttatgtttaccgaggacctgaagctgcctgcaagcttcgatgcacgggaacaatggccacagtgtcccaccc

SEQ ID NO: 16783 - DNA, 406 bp, Homo sapiens
cagcgacctcttccgtgccatctaggagaccaccagtgtcattgtgtatgatgtctccatggactacctggagatcgactctgagatgatccgggacctgctgaacacctttcctgttctacctggagctgcagcaggactcttctggggtgatccaaggggccggcatcaccgaagcctccaccatcaatgccaaggagatcatgcacctgctgatgaaggggaaccggcagaggacccaggagcccacggccgccaaccagacgtcctcccgctcccacgcggtactgcaggtgaccgtgcgccagcgcagccgggtcaagaacatcttgcaggaggtgcggcagggccgcctgttcatgatcgacctggctggctcagagcgcgcctcgcagacacagaatcg

SEQ ID NO: 16784 - DNA, 385 bp, Homo sapiens
cggacgcgtgggctgcctgttcccatcttcccctcgggacctgtttataaattgaggaatggatgagggccctggagggtccttgggagtagttagcggagggcaggattctcaggtccccatagagagggaaagagaagaccagatgtgcatagaagccaatctctgtcacatacaccgcaggtggtcaccgagttattttccaaaagctgaggaacataaagcacatttaggcttttgtccttctgcaatacatgcacttgaaaataaacagaaaagagatgcttaataacaagtttacttccggtctgctagcaccctcagcctgggagctactgccagaggctggcgtactggggcagctgctgaccaaaccccacagaaa

SEQ ID NO: 16785 - DNA, 409 bp, Homo sapiens
cccacgcgtccgggcagtgggcgggggccaagctgctggaccatggctgtgtggagagcagcattctggattcctctgcgggctctgctccccactacgaggtgtttgtggcgctgagggggctgaggaatctgtcagaggaaaatcgagacaagctggaccactgccttcaggaagcctctccccgctacaagtccctgcggttctggggcagcgtgggccctgccagagtccacctggtggggcagggagccttccgagcactccgggcagccctcgctgcctgcccctcctcccccttcccccctgcgatgccccgggtccttcggcacaggcacctggcccagtgtctgcaggagagggtggtgtcctgagtcaagtcctgccccaccgcccagctccccccaga

SEQ ID NO: 16786 - DNA, 487 bp, Homo sapiens
  misc_feature (1)...(487): n = A,T,C or G
gcccagctccgtttgaactccntcatagagcgccntcaggacccgcgnnctactgtaaacttgggtcgcctgtagcttagcgagcgctggagtttgaagagcgggcagtggctgcacacgccaaactttccctatggcttcggggaccagggccgtgtttggagagctgccctcgggaggagggacagtggagaagttccagctgcagtcagacctcttgagagtggacatcatctcctggggctgcacgatcacagccctagaggtcaaagacaggcaggggagagcctcggacgtggtgcttggcttcgccgagttggaaggatacctccaaaagcagccatactttggagcagttattgggagggtggccaaccgaatcgccaaaggaaccttcaaggtggatgggaaggagtatcacctggccattaacaaggaacccaacagtctgcatggaggagtcagagggtttgataaagtgctctgg

SEQ ID NO: 16787 - DNA, 414 bp, Homo sapiens
  misc_feature (1)...(414): n = A,T,C or G
cggacgcgtgggcggacgcgtgggcatcctcgggcacctcgttctccaacctccctgccgaggtgagaggagggaaggagcttgctacggtccacagctggtgagtagtagagctgggatttgaacccaggtctggggttggagactcggccttcacaccgcgcctctcagcagtgtagcgtgcagttgcccaggagggtcactttagctctctgaagtcttttattcaggcaggaagcagcctcattgttacaaggacagatgtgaatgtgcagagctcactatgaaatttgacaacctgggcaacatggcgaaaccccatctctaccaaataatatacacatacaaaaattanctgagtgtggtggtatgtgcctgtagtcccagctactcaggaggctgaggtggaaagat

SEQ ID NO: 16788 - DNA, 412 bp, Homo sapiens
ctggcagcgaggagacccagacgctggctcgagagtacttttcctgggagggggccttccagcatgtgggcaaagccttcaatcagggcaagatcttcaagtgaacatctcttgccatcacctagctgcctgcacctgcccttcagggagatgggggtcattaaaggaaactgaacattgaaaaaaaaaaaaagaaaaaaaaaaaaaaaaaaaaaaaaaaaaacaaaaaaaaaaaatgaacagagacaataaggggcggggccccattaaaaaaaacactggggggccccccattaaggggggaggggggggttttttttttttttttttggggggggctaaaaaacccccggggggttttttaaaaaaacccctctttttggggggggaaaataaagggccaccccccccc

SEQ ID NO: 16789 - DNA, 397 bp, Homo sapiens
  misc_feature (1)...(397): n = A,T,C or G
tgtctcctctctccgccatggcgtgtgctcgcccactgatatcggtgtactccgaaaagggggagtcatctggcaaaaatgtcactttgcctgctgtattcaaggctcctattcgaccagatattgtgaactttgttcacaccaacttgcgcaaaaacaacagacagccctatgctgtcagtgaattagcaggtcatcagactagtgctgagtcttggggtactggcagagctgtggctcgaattcccagagttcgaggtggtgggactcaccgctctggccagggtgcttttggaaacatgtgtcgtggaggccgaatgtttgcaccaaccaaaacctggcgccgttggcatcgtagagtgaacacaacccaaaaacgatacgccatctgttctgn

SEQ ID NO: 16790 - DNA, 409 bp, Homo sapiens
  misc_feature (1)...(409): n = A,T,C or G
caactccacactgccccagctggacatcaccagggccatctctgtgggcctggtgctgggcgccttcatcctctttgccatcgtgggcaacatcctagtcatcttgtctgtggcctgcaaccggcacctgcggacgcccaccaactacttcattgtcaacctggccatggccgacctgctgttgagcttcaccgtcctgcccttctcagcggccctagaggtgctcggctactgggtgctggggcggatcttctgtgacatctgggcagccgtggatgtcctgtgctgcacagcgtccattcttgaccctgtgcgccatctccatcgatcgctacatcggngtgcgctactctctgcagtatcccacgctggtcacccggaggaaggccatcttggcgctgctcagtgt

SEQ ID NO: 16791 - DNA, 441 bp, Homo sapiens
  misc_feature (1)...(441): n = A,T,C or G
cccacgcgtncgcccacgcgtncgattagctcactttatctgagctggcttgggtgtggtcttgcttagaggacaggtgaggtggcccagccgatggtttcatggcacttctctcatcagtgggctctgttcttcccaacacacatgctggactctcagaaggatgcatctccctctgtgcagattttgccgtgaattaccagatagagatcaatattaagtgtggtctctgctgactaaaagttgaagaccgtctcagagtgccttgaggagatggacttgattccctaatagtgcctaccatccattgaagggggaattcttttggcataaaaaattcaagcatccaagtggaggccccttcccctcccctaccnnnnnnnnnnnnnnnnnnnnnnnnnnnnnannnnnnnnnnnnnnaaaaaaaaaaaaaaagggggg

SEQ ID NO: 16792 - DNA, 486 bp, Homo sapiens
  misc_feature (1)...(486): n = A,T,C or G
aggtccaggaggctaannaactgaatagctgcgnanacacgnctgganactgaggacgtcgcacgcgcncggnctntnttacagctgttgccagtatctaacgtggtgagcgtaatggtgctcacagttctgtgcaatgttgcagaaaagggtcctgcttactgccagcggctgtggccagggcccctgcttcccgccttgctgcacacactaaccttttctgacactgaagtagtaggccagagtttggagctgctgcatctgctgttcctgtatcagccagaggctgttcaggtcttcctgcagcagtcagggctgcaagccctggaaaggcatcaggaagaggcccagctccaggatcgtgtgtatgctctccagcagacagctcttcaagggtgatcttgtttctcaatgtcactcattcccctctctcttaacatcaagcttgtttgtgcagtaaagcctttggagatttaggaccataaa

SEQ ID NO: 16793 - DNA, 494 bp, Homo sapiens
  misc_feature (1)...(494): n = A,T,C or G
ggccccggagggttttncccttgataaccgtccgcangnnccgttnntttactattatcttcgnanacacgcccggaannnccgggncgacccacgcggccgcgagagctncctccttccccccacctgctccttaccttctctgccctgctttttagaactgcaggtcattgttttaagggattgggggagggagcctggggacacaaaccttttatacaatacaaagctttgcttttttttttttttttttcctttcccctttcggggttcttttttttcctttaaagggggaaaaacccctctcccaagggaggtggggaattggggaacagggccctttggggctaatggcctaaagggccctgacctggggccaaatccatttttttggggcctggggaaacctctcacgttgctgggcccgggggaccaccccaaccaaaaaccctgtttttttaaaaaaaaaaaaaaaaaaaaaaaaaaaaaggggg

SEQ ID NO: 16794 - DNA, 435 bp, Homo sapiens
cttttaaacttggctgggctatcagaccctattctcggctcaggttttgagaagccatcagcaaatgtgtacgtgcatgctgtagctgcagcctgcatcccttcgcctgcagcctactttggggaaataaagtgccttactgactgtagccattacagtatccaatgtcttttgacaggtgcctgtccttgaaaaacaaagtttctatttttatttttaattggtttagttcttaactgctggccaactcttacatccccagcaaatcatcgggccattggattttttccattatattcatcacccttatatcatgtacctcagatctctctctctctcctctctctcagatatatagtttcttgccttggactttatttttcttttctttttctttgcttttggctctaaaacaagtgtgaggccatatcaagg

SEQ ID NO: 16795 - DNA, 405 bp, Homo sapiens
  misc_feature (1)...(405): n = A,T,C or G
tcggaggaggccaaggtgcaacttccttcggtcgtcccgaatccgggttcatccgacaccagccgcctccaccatgccgccgaagttcgaccccaacgagatcaaagtcgtatacctgaggtgcaccggaggtgaagtcggtgccacttctgccctggcccccaagatcggccccctgggtctgtctccaaaaaaagttggtgatgacattgccaaggcaacgggtgactggaagggcctgaggattacagtgaaactgaccattcagaacagacaggcccagattgaggtggtgccttctgcctctgccctgatcatcaaagccctcaaggaaccaccaagagacagaaagaaacagaaaaacattatacacagtgggaatatcacttttgatgagattgtcan

SEQ ID NO: 16796 - DNA, 398 bp, Homo sapiens
tggggcctgaggctgccgccctccgccctggctggctggccctgctgctgtgggtctcagccctgagctgggctttctccttgccagcttcttccctttcttctctggtgccccaagtcagaaccagctacaattttggaaggactttcctcggtcttgataaatgcaatgcctgcatcgggacatctatttgcaagaagttctttaaagaagaaataagatctgacaactggctggcttcccaccttggactgcctcccgattccttgctttcttatcctgcaaattactcagatgattccaaaatctggcgccctgtggagatctttagactggtcagcaaatatcaaaacgagatctcagacaggagaatctgtgcctctgcatcagccccaaag

SEQ ID NO: 16797 - DNA, 414 bp, Homo sapiens
  misc_feature (1)...(414): n = A,T,C or G
caaaatattgtggtttaataagangcgctccctggttataaatattatgcctttatttttggctagaagaagaattatttttagcctagatctaaccattttcatactcttaactgattgagacagattcaaagaagtatctagtgctatgcattgaaacttgtttttaaatgttagatggcactatgtatattaatggaaaacaatgttaatttactcaagttttcagtttgtaccgcctggtatgtctgtgtaagaagccatttttgtgtattgttacagcttcaggttatttatattcgatgttttgtaaaactcaaataacgactatacttatggaccaaataaatggcatctgcattcttgttaaaaaaaaaaaaaaaaaaaaggggcggccgttttaaagaatccttg

SEQ ID NO: 16798 - DNA, 410 bp, Homo sapiens
ccgaggtctatttcccagttcgaggccgctgtgcggccctgcgcatgctgctggcagatcagggccagagctggaaggaggaggtggggaccgtggagacgtggcaggagggctcactcaaagcctcctgcctatacgggcagctccccaagttccaggacggagacctcaccctgtaccagtccaataccatgctgcgtcacctgggccgcacccttgggctctatgggaaggaccagcaggaggcagccctggtggacatggtgaatgacggcgtggaggacctccgctgcaaatacatctccctcatctacaccaactatgaggcgggcaaggatgactatgtgaaggcactgcccgggcaactgaagccttttgagaccctgctgtcccagaaccagggaggcaag

SEQ ID NO: 16799 - DNA, 386 bp, Homo sapiens
  misc_feature (1)...(386): n = A,T,C or G
cccacgcgtncggagagatggaatcctttttacaagttgagagatggaaggagggacacatcttctatttttgtaagaaaggaggagtaaaggaaaggagcacatgcaagcccacgtgtagatttggtactgaaaggttaagaggtttcccaagtgatgggcactgaggggcaaggtcctgctaagaataagcggggaagagatttaaggaaagtagagatttgaaatcgttcttgagacaaatgggacagcaagttgaccagagaaatacagtaggactctccttggcagtgtggaaggtgcaggtgagtctggtgggttgatgttgatacctatctgctctgtcatgggattttctccagcagtttggggaccaaggtgcaaag

SEQ ID NO: 16800 - DNA, 410 bp, Homo sapiens
  misc_feature (1)...(410): n = A,T,C or G
gccggagcaggaacaagtggaacagactaccctcccttatcagggaactactcacaccctggagcctgcgtagacctaaccatcttttccttacacctagcaggggtcgcctctatgttaggggccatcagtgtcatgacaacagtgatgaatattgaaccccctgccataacccaataccaaacgcccctcttcgtctgatccggccgaaacacagcaggcctacttctgctatgtgtcccagtcctagctgctggcatcactatactactaacagaccgcaacctcaacaccaccttcttcgaccccgccggaggaggagaccccattctataccaacacctaaaaggaaagagaggaattattatttgctcacaccgagacagaatataanggctgggggggggcgg

SEQ ID NO: 16801 - DNA, 415 bp, Homo sapiens
tgagcctgggccccaggacccgggtgcaggcttaaaacctacccaaacccatcctgtgggccgagccaggtcccgtgatcacctggcataaccccgtgaccatctggtgtcagggcaccctggaggcccacgggtaccgtctggataaagagggaaactcaatgtcgaggcacatattaaaaacactggagtctgaaaacaaggtcaaactctccatcccatccatgatgtgggaacatgcagggcgatatcactgttactatcagagccctgcaggctggtcagagcccatcgaccccctgtagctggtggtgacagcctacagcagacccaccctgtccgcactgccaagacctgtggtgacctcaggagtgaacgtgaccctccggtgtgcctcacggatgggactgggcag

SEQ ID NO: 16802 - DNA, 417 bp, Homo sapiens
  misc_feature (1)...(417): n = A,T,C or G
actcggaggttcgcctccagcttgcgcatcatctgcggccgggtcccgatgagcctcctgttgcctccgctggcgctgctgctgcttctcgcggcgcttgtggccccagccacagccgccactgcctaccggccggactggaaccgtctgagcggcctaacccgcgcccgggtagagacctgcgggggatgacagctgaaccgcctaaaggaggtgaaggctttcgtcacgcaggacattccattctatcacaacctggtgatgaaacacctccctggggccgaccctgagctcgtgctgctgggccgccgctacgaggaactagagcgcatcccactcagtgaaatgacccgcgaagagatcaatgcgctagtgcaggagctcggcttctactgcagggcngcgcccgacgcgcaa

SEQ ID NO: 16803 - DNA, 406 bp, Homo sapiens
cccacgcgtccgaagcagcgtgcggggaagtcactgaaaagtgctgcctaaggaagtttggaaatagtccctgttccagattgccttgaattttaaaacattttgctttgggaaagtaggtcagcagcacctaagatcaaggatgcgttccattttcacacttcacagtcatgaaaactgagaagactgtcttcagcgtgaactaaagttcacaggcagatcactgatccagaacacttcatgaactcgtcaaacagctcgataagcctttttgactgtgtacatctgtaccgggaataacattcctaggctgaaatttccacaaagaatagaacctgtacccagttcttcaggctgatttccctgacctcttgggcatttgtatttgtagtaaagtattgcagag

SEQ ID NO: 16804 - DNA, 401 bp, Homo sapiens
cccacgcgtacggcggtcctgaggctgtgtctactgttgctccggagctggtggcgccgcgataggagagccgatggccaagtggggtgagggagacccacgctggatcgtggaggagcgggcggacgccaccaacgtcaacaactggcactggacggagagagatgcttcaaattggtccacggataagctgaaaacactgttcttggcagtgcaggttcaaaatgaaaaaggcaagtgtgaggtgacggaagtgagtaagcttgatggagaggcatccattaacaatcgcagatggaaacttatcttcttttatgaatggagcgtctaactaaactggacaggtacttctaagtcaggagtacagtacaaaggacatgtggagatccccaatttgtctt

SEQ ID NO: 16805 - DNA, 405 bp, Homo sapiens
cccacgcgtccgggccaaaacagtttgtgccaccagatcactgcggcctgcaagcatggtggagacttgtatgtggtgggagggtccatcccacggcgcatgtggaagtgcaacaatgccaccgttgactgggagtggtgtgctcctttgcctcgggaccggctccagcacaccctggtgtctgtgcccgggaaagatgccatatattcactgggtggcaagacactgcaagataccctctccaacgcagtcatttattatcgcgtacgtgataatgtgtggacagagacaactcagctagaggtggctgtgtcaggggctgctggtgccaacctcaacgggatcatctacttactatggggggaggagaatgatctggacttctttaccaaaccttcccgactc

SEQ ID NO: 16806 - DNA, 405 bp, Homo sapiens
cggacgcgtgggcggacgcgtggggttcttaattacatttcattcatttatattagagtaaatggcttcataactactttaaaatttaacccacaagcatattaaatctgtttgttataagattggaaacaatttttgagagggactaatttaaacaagtcctcctttagtcttttgggtcgcgtagttgctgaaacctaagtacctgcagcctacaggataaggaagttcacagcctgcggggtgaatgaacccatgtgtgaactgcacagagcaattcatagaaaatgcatagaaatttgtaacactttggtcacatctgtctctagatggtcattgaatttgtttaaagatggatgaaaggccaggcatggtggctcatgcctgtaatcccagcactttggg

SEQ ID NO: 16807 - DNA, 406 bp, Homo sapiens
  misc_feature (1)...(406): n = A,T,C or G
cccacgcgtccggttgtgcagatcagtttcactatctccaaagcatttgcatcatgaccttatacatttcaatcccttttatgctggattccgtttaaagaagacattattagagcaggaagtacaagcatttaaaatatgtagttcccatatatttcagggtctctgtgtattaagctaactcagatgttttgaaagctttttctttaaacagaggtgaaatatctgtggctaaaaagtttgagatttgtgataactttgtagtcatgtaaaacttaagtgcttcatgcctctccaaatgtggttattctaataaatggagaaatgagccannnnnnnnnnnnnnnnnnnnnnnnnnnnnnnnnnnnnnnnnnnnnnnnnnggagagggggggcggggttgaggg

SEQ ID NO: 16808 - DNA, 459 bp, Homo sapiens
  misc_feature (1)...(459): n = A,T,C or G
aattgacaaccttgatagccntcggaaccgccccggaaatccagggtggacccacgcgtgcgcccacgcgtacatctattctgagaggctattgctcattggattccgaggcatcagcaaagcgtgggaattacagataaattaagactgtggaacccctttcctcggctgccgccaaggtgttcggtccttccgaggaagctaaggccgcgttggggtgagaccctcacttcatccggtgagtagcaccgcgtccggcagccccagccccacactcgcccgcgctatggcctccgtctgccagctagcctgcatctactctgccctcattctgcaggactatgaggtgacctttacggaggataagatcaatgcccttattaaagcagccagtgtaaatattgaaactttttggcctggcttgtttgcaaaggtcctggccaacgtcaacattgtgag

SEQ ID NO: 16809 - DNA, 375 bp, Homo sapiens
tgtcgctgctgccaattttagccgagcttgcgatgtcgtacctgtttgaataaagggagacagatgataaagtggctctgcaggtcctggaagggatcttacttctgcggggtgacgtagtggtactgactatctacggagacgtagagacctaagggaaacatgagaacgtgaagcggatgacgtgataggatatctaggtatgcttgctgattgagaggcctgaggttctccaggccctgctggtcagcagggtgcaatcggcagtccaggacctgcaggccccagaggacctgttggacccagtggacctcctggcaaagatggaaccagtggacatccaggtcccattggaccaccagggcctcgaggtaa

SEQ ID NO: 16810 - DNA, 488 bp, Homo sapiens
  misc_feature (1)...(488): n = A,T,C or G
tggattgatcgctgtggnacatttgacggactttccggancgacccacgcgtccgcccacgcgtccgcaggtgtcgtgaaaactacccctaaaagtcaaaatgggaaaggaaaagactcatatcaacattgtcgtcattggacacgtagattcgggcaagtccaccactactggccatctgatctataaatgcggcggcatcgacaaaagaaccattgaaaaatttgagaaggaggctgctgagatgggaaagggctccttcaagtatgcctgggtcttggataaactgaaagctgagcgtgaacgtggtatcaccattgatatctccttgtggaaatttgagaccagcaagtactatgtgactatcattgatgccccaggacacagagactttatcaaaaacatgattacagggacatctcaggctgactgtgctgtcctgattgttgctgctggtgttggtgaatttgaagctggtatctccaaga

SEQ ID NO: 16811 - DNA, 419 bp, Homo sapiens
ctgcagaggggtccatacggcgttgttctggattcccgtcgtaacttaaagggaaactttcacaatgtccggagcccttgatgtcctgcaaatgaaggaggaggatgtccttaagttccttgcagcaggaacccacttaggtggcaccaatcttgacttccagatggaacagtacatctataaaaggaaaagtgatggcatctatatcataaatctcaagaggacctgggagaagcttctgctggcagctcgtgcaattgttgccattgaaaaccctgctgatgtcagtgttatatcctccaggaatactggccagagggctgtgctgaagtttgctgctgccactggagccactccaattgctggccgcttcactcctggaaccttcactaaccagatccaggcagccttccgggagc

SEQ ID NO: 16812 - DNA, 489 bp, Homo sapiens
  misc_feature (1)...(489): n = A,T,C or G
cgtgattgacgccngtggnacagttgacggacctttcggancgacccacgcgtccgctgggaactctacccgcggtccaggagacggagggaacatagaccactggaaggattcagataggaaagatggcaaaaaggatcaagactccagatctgcacctgagccaaagaaacctgaggaaaatccagcttctaagttcagttctgcaagcaagtatgctgctctctctgttgatggtgaagatgaaaatgagggagaagattatgccgaatagacctctacatcctgtgcttttctcctagtttctctccaccctggaacattcgagagcaaatcataacctctatccagacaagacaaaataaaactcaacatctcctgaagacctttcttacctttttttaaaaacaaaaaatgaaattattttgcatgctgctgcagcctttaaaggattgaatgaactggagaattgccaatacagccagagag

SEQ ID NO: 16813 - DNA, 454 bp, Homo sapiens
  misc_feature (1)...(454): n = A,T,C or G
tggagaccacatttgacacccctgaagccctccgaanccgggcgaccacgcgtncgatcccccagccacgagtccagcagctcatcgggctcttatgaaggtaccttgtactacccccacctagtcttcttgcagaacaaagctcgccgagaggacttctgtcctcggaagctgcggcagatgcacctgatgattgaccagctcatggcccactcccacctgcgttacaagggaactctgtccatgttacaatgcaatgtcttcccggggcttccacctgacttcctggactctgaggtcaacttattcctggtacccttcatggacagtgaagcagagagtgaaaacccaccaagagcaggacctggttccagcccactcttctccctgctgcctgggtatcgtggccaccccagtttccagtccttggtgagcaagctccggagccaagtgg

SEQ ID NO: 16814 - DNA, 473 bp, Homo sapiens
  misc_feature (1)...(473): n = A,T,C or G
gggcctcccaatgagnccnttgctagtaggctagcgcanccgcnncgacccacgcgtncgaatcagaactgacagctattcatgcttcctctttcctctgttggaaaagctctcttcaactttgttacctgatgaactttcgattattctcaatgtctcatttctctcttaaaatgtaatttaaatcaggttataaccctgccaaagggtctttgagagcttctcattgcacatgagttaaatgtaaacttcttacttagacttaaatgcctgtgcatgatctggtccctgcctactcctccaacctcatctcatgctactcttgtcctctaacaaccctttgccgtcacatgggctttctctcctttcctcaaacacatcaaatttactaaactgtggtaagtcttccagaggagaaggtttttgggagaggagctatcagaagctctgtttagacatgttaattctgatgc

SEQ ID NO: 16815 - DNA, 406 bp, Homo sapiens
agcctttttggcctggcttgcttgcaaaggccctggccaacgtcaacattgggagcctcatctgcaatgtaggggccgggggacctgctccagcagctggtgctgcaccagcaagaggtcctgccccctccactgctgctgctccagctgaggagaagaaagtggaagcaaagaaagaagaatccgaggagtctgatgatgacatgggctttggtctttttgactaaacctcttttataacatgttcaataaaaagctgaactttaaagcagaacagccaagaaaaaatgcccgtgaaagaaaaaaaagaaaaagaaaaaaaaaaacctttggggggggggctgaataaaaaataccggggggggcccttttttttgggggggtgagaataatatttttttctttt

SEQ ID NO: 16816 - DNA, 482 bp, Homo sapiens
  misc_feature (1)...(482): n = A,T,C or G
gccgccgtccccatagaaangccctcgactantaatcatgcagaaccgcgccgaaccacgcgggcgaccacgcgtgcggaactcctgggctcaggtgatccttctgcttcagccttctgcacagctaggactacaggcgcatgctaccatgcctggctaattttttaaaaacttttttgcagagatgggtcttgctatgttgtccaggctggtcttgacttctggcaagtgatcctccttccttgacctcccaattacaggcacaagccactatgcctggccaaaaaaataaaattttaatttaaaaaatacggttggtgatattttaagctatagttcccaaatgctggtctgcaaatcatgaatacccatgaagaataatttattaatccaccatgaaatcagaaaaaaactgttatgaatttttcataatgctgaattcatttaattttaaggaccagattttaatcttaagtactttt

SEQ ID NO: 16817 - DNA, 427 bp, Homo sapiens
ctaggaagtctcaggaatggatagaagataaagtacataatagtttcctgaagcagcagaatgaaagaactctctgtggcatgaaaatttactggaggcagcagctgaggctgtggtgggagaaaaatgacaagaactgagcgtgggccacgggctcttaccttcagcaacttcatcagctcttacagctggaccatcagctcccgcctgctctcctgcagggccgacatactctgctacagttcatccttcctttgcctatccaagacgagaagcctatcagataaagagaccctcaaagatggatctaaggccaggtgaaatggatttcagacctgatcctgctacttaccagttatgagacgctgagcaagtcatttagcatccaatacctcataaaatggtgataatgtctgttttgcctact

SEQ ID NO: 16818 - DNA, 393 bp, Homo sapiens
cggggctgctgtaaggccgaggttgctgcggaagcttagaccatgttccgagcggcggctccggggcagcggcggcgggcggcctcattgctacgatttcagagtaccctggtaatagctgagcatgcaaatgattccctagcacccattactttaaataccattactgcagccacacgccttggaggtgaagtgtcctgcttagtagctggaaccaaatgtgacaaggtggcacaagatctctgtaaagtagcaggcatagcaaaagttctggtggctcagcatgatgtgtacaaaggcctacttccagaggaactgacaccattgattttggcaactcagaagcagttcaattacacacacatctgtgctggagcatctgccttcggaaat

SEQ ID NO: 16819 - DNA, 393 bp, Homo sapiens
cggacgcgtgggctgccgccaaggtgctcggtcctttcgaggaagctaaggctgcgttggggtgaggccctgacttcatccggcgactagcaccgcgtccggcagcgccagccctacactcgcccgcgccatggcctctgtctccgagctcgcctgcatctactcggccctcattctgcacgacgatgaggtgacagtcacggaggataagatcaatgccctcattaaagcagccggtgtaaatgttgagcctttttggcctggcttgtttgcaaaggccctggccaacgtcaacattgggagcctcatctgcaatgtaggggccggtggacctgctccagcagctggtgctgcaccaagcaggaggcctgccccctccactgctgctgctcc

SEQ ID NO: 16820 - DNA, 430 bp, Homo sapiens
agggcccccaccggaagatgtgtacagctggtctttactccatcggcagggcccgagcccagggaccagtgacttggcctggacctcccggtctcactccagcatctccccaggcaaggcttgtgggcaccggagcttgagagagggcgggagtgggaaggctaagaatctgcttagtaaatggtttgaactctcaaaaaaaaaaaaaaaaaaaaaaaaaaagggggggcccttttaaaagatcccttggggggcccaaatttaacgggggttggaaaggaaaaattttttcccttaaggggggccaaataaaacccaccctgggatttttggaaaagaacctttctttgggggggggaccttatgggcccaccctccccccaaaatttaagggctttggggaaaataaaaatttttaaggggtataggg

SEQ ID NO: 16821 - DNA, 401 bp, Homo sapiens
cccacgcgtccgcggagaattcctggggcgcaccgtctagagctggggtttgatcttgctcttctacctaggtttttatgggttcctggctgcactcttctcattcacgatgtgggttatgcttcaaactctcaacgatgaggttccacaataccgggaccagactcctaccccaggactcatgggtttttccaaaccagtgaccgcattggaatatacatttagtaggtctgatcccacttcttatgcagggcacatcgcagaccttaagaagtttctaaaaccatatactttataagaacacaacaacctctcagtctgtcctgatggcgcacttttcgatcagaagggtccagtttatgttgcatgtcagtatcctatttcattacttcaagcatgcg

SEQ ID NO: 16822 - DNA, 408 bp, Homo sapiens
aatctttataaccttaaatattcttctataacatgttttttagtagccctatggtactctatctttgagaagcatcataatttagttatttgctttgtgcatttagagttgttctaaacaaacatctttgaacatatacctttttgcatattttgatcttatgaaaagttcagaagcaaatttattaggtcagagggtaaaaataatttttagggcttaaaatatctatctatatatattatatagatatatatttgccaaattgcctttcagaaaggatgtaaacagttaatgttccccttggcagagtatgggagtgcctattttgaaatgtatttgccaacttaacagacagaaaatggtatgttgttctaatttgcagtatttgataactagcgaagttggatt

SEQ ID NO: 16823 - DNA, 413 bp, Homo sapiens
  misc_feature (1)...(413): n = A,T,C or G
ttttaatatgtttttcctgataagttggatattaaaaaataaggacaatattcagagttttctgaagatgcactaaatcaaggtagggattgtcatgtcaacttaaaatagttgagagcaggctgggtgcagtggctcactttgggaggccaagcactttgggaggccgaggcgggtggatcacctgaggtcaagagtttgagaccagcctggccaacgtggtgaaatcctgtctctactaaaaatacaaaaattagccaagtgtggtggcatgtgcccgttgttccagctactcgggaggctgaggcaggagaatcacttgaacccgggaggtcgaggttgcattgagccaagatcatgccgctgcactccagcctgggtgacagagtgagactccatctcaaaaaaaaaan

SEQ ID NO: 16824 - DNA, 200 bp, Homo sapiens
ccctgtggctgctgccaccacagctgctcctgctgctgctgcagccccagctaaggttgaagccaaggaagagtcggaggagtcggacgaggatatgggatttggtctctttgactaatcaccaaaaagcaaccaacttagccagttttatttgcaaaacaaggaaataaaggcttacttctttaaaaaaaaaaaaaagg

SEQ ID NO: 16825 - DNA, 484 bp, Homo sapiens
  misc_feature (1)...(484): n = A,T,C or G
gtgattgacgcctgtggtaccgttgatggaccttccggaacgacccacgcgtccgggaagagtaatgaactattttactttggacatgtggcaacatcataattttgctaagtaaaaattggggaatatagtagataattttaaaatttggcaattagtctcagcatatcaatgcagtactgagcgtgtattacagtaattcagttgttcagttcttgatttatgatatgaagttatgatttaagtttagtagaagaatttgtgagggcatatagcaaaagtggaaatgtcctttatataaaacattttaagaggttctggcaatacgtaattgtaagagtataggaagtagggttgaactggtctcctaatgagattttttttggcaccagatacaattataatgtgctaactcaaaggagacattgcagagaatatgaagttaaggataatccaaaaataacctggtagccttgctgtgtan

SEQ ID NO: 16826 - DNA, 389 bp, Homo sapiens
cccacgcgtccggtacagtcaatgtaacccacttgtgcagaagccatgcttccaaggaaggtctcaggttgacaactagacatcaaatctgagaagccaactgtggagtaatgtgtttttttctctgtggacaagagtgatcagaaaggtgcttgatcttgaacaattgatccatgatgaaaaaatgaccattagctctcccccagaagcgtctgtgtttgctgaatggagctgagattttgatccgctatcagactccagaaagatccaggagttccaagaacatggcaaagagtcaaaatcttaggacaaggaattaaaatgccagaatgcaaatgtccaacaggcctggtagctcacagctatcaacaccctagaattccacactg

SEQ ID NO: 16827 - DNA, 422 bp, Homo sapiens
cagaaattcaactgtcagatattttgataatggcacagcacttgtggtccagtgggaccatgtacatctccaggataattataacctgggaagcttcacattccaggcaaccctgctcatggatggacgaatcatctttggatacaaagaaattcctgtcttggtcacacagataagttcaaccaatcatccagtgaaagtcggactgtccgatgcatttgtcgttgtccacaggatccaacaaattcccagtacgtagaagaagggcagtcgcaatgagtgagcctctgtgggggtaaatttaaaggagattggtctatggcagctgtacctgaattaaaaaaaaaatagctaatcgattagctgattaatgcttaaaaaaaaaaaaaaaaaaaaaaaaaaaaaaaaaaaaaaaaaaaggg

SEQ ID NO: 16828 - DNA, 420 bp, Homo sapiens
cacatgggcattatttacacacttgataaatgaaaggtatttctctgtccgttcaaggaaataaaatgtaagttcttgttttattaaatgaatgaagccttttggttaaaaaaaaagtaatgtaatatgtttctgttcaaacttgagctaatgacatttaaggaattaaagacattgatctagttcttagtatgaaaagtgtacatgtagatatagctatataattgtgtatatacatatctacacacatggttggttttatattgctttttcatcaatatttttgactgaaacctttacaataaattttattttaattatgtaaccactaatattttgagagaaggaagcaaatgttatatgtccttctgttaaaagaaaaaaaattcagtcctccgccaaccgcttaccacacactca

SEQ ID NO: 16829 - DNA, 417 bp, Homo sapiens
  misc_feature (1)...(417): n = A,T,C or G
cccacgcgttcggagtgcttggcagaaaaatccaatacattctaagcattaccaacttacaagcattggaggaagccatagaaggacaaaatagcagatctgaatataaataacttctaaagccccattaataaaataaaaagagataaaagtaagcttgtataaatattaaaatagtaaaatgggaggccgagttgggcacatcacgaggtcaggagatcgagaccatcctggctaatacggtgaaacccctctactaaaaatacaaaaaattaaccaggcgtggaggcggnggcctgtagtcccagctactcgggaggctgaggtagcagaatggcatgaacccgggaggcagagcttgcaatgagcccagatagcaccactgcactccagcctangttacagagggagactcct

SEQ ID NO: 16830 - DNA, 416 bp, Homo sapiens
tgggaaagcattcagttgtttcacatacctttctcaacatagaaggactcacatggctgaaaaaccttatgaatgtaaaacatgtaagaaagccttcagtcattttggtaacttaaaagtccatgaaaggattcacactggagagaagccatatgaatgtaaggaatgcaggaaagcattctcttggctcacttgccttctgcgacatgaaagaattcacactggaaagaaatcttatgaatgtcaacaatgtggtaaagccttcactcgttctcgtttccttcgaggacatgaaaaaactcacactggagagaagatgcatgaatgtaaggaatgtgggaaggcactgagttctctcagttccttgcatagacataaaaggactcactggagagatactctataaatgtggaaaa

SEQ ID NO: 16831 - DNA, 421 bp, Homo sapiens
  misc_feature (1)...(421): n = A,T,C or G
ttcatgtggaggtcagagtggaagcaggtgtgagagggtccagcagaaagaaacatggctgccaaagtgtttgagtccattggcaagtctggcctggccttatctgttgcaggaggcgtggagaactctgccttatataatgtggatgctgggcacagagctgtcatctttgaccgattccgtggagtgcaggacattgtggtaggggaagggactcattttctcatcccgtgggtacagaaaccaattatctttgactgccgttctcgaccacgtaatgtgccagtcatcactggtagcaaagatttacagaatgtcaacatcacactgcgcatcctcttccggcctgtcgccagccagcttcctcgcatcttcaccagcatcggagaggactatgatgagcgtgtgctgccgtccatcn

SEQ ID NO: 16832 - DNA, 415 bp, Homo sapiens
ggaggaaggtggcaagatggtgttggaaagcactatggtgtgtgtggacaacagtgagtatatgcggaatggagacttcttacccaccatgctgcaggcccagcaggatgctgtcaacatagtttgtcattcaaagacccgcagcaaccctgagaacaacgtgggccttatcacactggctaatgactgtgaagtgctgaccacactcactccagacactggccgtatcctgtccaagctacatactgtccaacccaagggcaagatcaccttctgcacgggcatccgcgtggcccatctggctctgaagcaccgacaaggcaagaatcacacgatgcgcatcattgcctttgtgggaagcccagtggaggacaatgagaaggatctggtgaaactggctaaacgcctcaagaag

SEQ ID NO: 16833 - DNA, 421 bp, Homo sapiens
  misc_feature (1)...(421): n = A,T,C or G
ccctggtccgcgggcgagctcgagcagccaaccccgggcgcgtcggggccatggacggcctgaggcagcgcgtggagcacttcctggagcaaaggaacctggtcaccgaagtgctgggggcgctggaggccaagaccggggtggagaagcggtatctggctgcaggagccgtcactctgctaagcctgtatctgctgttcggctacggagcgtctctgctgtgcaatctcatcggatttgtgtaccccgcatatgcctcaatcaaagctatcgagagcccaagcaaggacgacgacactgtgtggctcacctactgggtggtgtacgccctgtttgggctggccgagttcttcagcgatctactcctgtcctggttccctttctactacgtgggcaagtgcgccttcctgttgttctgcan

SEQ ID NO: 16834 - DNA, 416 bp, Homo sapiens
atatggcccgcacgcctacccaggagcagctgctggccgcagccatggcagcagcccggggggaggatgaggacgaggtctccgaggcccaggagactccagaccacgccatcttccggtggcttgccatctccttcgcctacgcacacctcaccttgaccgagccctaccgcggaggctgccaagcccaggactacaccggcggcatgggcatcgtcaacggggccaagtggaacccccggaccgggactatcaatgacttcagttacctgcataccaactgcctggagctctccttctacctgggctgtgacaagttccctcatgagagtgagctgccccgcgagtgggagaacaacaaggaggcgctgctcaccttcatggagcaggagcaccgcggcattaaggaggtggtg

SEQ ID NO: 16835 - DNA, 495 bp, Homo sapiens
  misc_feature (1)...(495): n = A,T,C or G
aggtattgacgcctaggaccgttgagaacccctcgggtcgacccacgcgtncggggctgctaactgtatttattgtgatgccttgggcagggcccctctacccacttcttccagtcagttgtggccccagcccctctccctgtgctgtgtggagtggacaccctgacccccgaagcggggagggccgctgtggccttcgtcacagccgcgcagtgcccatggaggcgctgctgccaccttcctctcccaagttctttctccatccctctcctcttcccgccgcgccgctagcccgcctcggtgtctatgcaaggccgcttcgccattgcggtattctttgcggtattcttgtccccgtcccccagaaggctcgcctctccccgtggaccctgttaatcccaataaaattctgagcaagttcaaaaaaaaaaaaaaagggggggccgtttaaaagaacctttggggggcccaagcttatcccgggctggaaagatn

SEQ ID NO: 16836 - DNA, 409 bp, Homo sapiens
  misc_feature (1)...(409): n = A,T,C or G
taaatatatgagatgtattgggactgtaggtaaactgcatcaccctcgtttaaaacatgagtaaattaagttctggagtttgtgatttaagcaaagtttatacagttagtttctatctttaccatccttgtgtgtcactgacattattatacctctaggagtgcaggtgaagcatccactccctcgtctcccttcccacccacaaggagaaaagggttggcaaggcttatttgaaagcaacactgtagatgatgagagctttgcctgggaagccacactcacccccagccctcccaggaaatgcaagcccctgatgaaaccacaaaggagtgcagggcaaaactctgtgtgctgttcaatcaaaatgacccttgngaaagctaaataacacaacttgtggcagatattt

SEQ ID NO: 16837 - DNA, 476 bp, Homo sapiens
  misc_feature (1)...(476): n = A,T,C or G
gtggggccgggggnattaaagccgatagctgcgtantnncnattganancgtntgaananacncgnnngannatgngnngngnnngaccacacgnncngnagaangccgnnnggnncngagnangccnggcnggaagggaggccaggaaannctagagggacaggctctagncctttccaaccaaaacaaacctcatgggaatgtttgagggaccagttaatgttgagacagagagagtatggtctagaatggtggctttcagattgtgttttgagaagccagaggtcatctttaggcctctgaagagtggtaaggggaggagaagctctcaactcccacacccacctcactccaagcagctcaagttccatctgatttatacattagcattctaagtaaaattttatttggaggcagtaaaaaggtctaggagaaataaaaacaatttgttatggagtgtattccagggcctgct

SEQ ID NO: 16838 - DNA, 388 bp, Homo sapiens
  misc_feature (1)...(388): n = A,T,C or G
cccacgcgtccggatcgagctaccctctaaaagcagtttagagtggtaaaaaagaaaaaaaaccccccgggcgctcgcagccacaaaggggataaaatttttttgggacatcctcctgcttctcccgttactgaccgtttgctccctaaagcccttggggaagcttttttttcctaaaaggaaaaaatcagcccccggcaaaatcgtcctgattacaggacctgggcatggaattggaaaactgactgcctataaatttgctaaactaaaaaccaagctggttctttggaatttaaataaccatggactggaggaaacagctgccaaatgcaagggactgggtgccaaggttcatacctttggggtaaacggcaccaaccgaaaaaan

SEQ ID NO: 16839 - DNA, 449 bp, Homo sapiens
atcgacagcctggttgacggcctgaaatccgcgacgacccacgcgtccgcaatctgtgaacactaggaggggataaaataagctttgcagggaaatttatttgtaaatagcttcctcacctaaactttgacttggcaatcaatactttctactttgtggaggggattaagaatagaatgggcaggatgagaccatgaaaattataatgattcatgtatatatttgtatgatgcttgtaactttgcaaagtcttttttattcattgtctcatttggtcagaacaattttattgaggacatgaatttaacaattagaatttagattttctgactgtagctactaaatgttgtagctactagaccaggtgagctaggtttagagcaaagtatataagccttgtatggactatattagaattttaaaaattggaattaattccttatcattat

SEQ ID NO: 16840 - DNA, 399 bp, Homo sapiens
ctcctttacctttcagtgcagtttcttttcacattaggctgttggttcaaacttttgggagcacggactgtcagttctgtgggaagtggtcagcgcatcctgcagggcttctcctcctctgtcttttggagaaccagggctcttctcaggggctctagggactgccaggctgtttcagccaggaaggccaaaatcaagagtgagatgtacaaagttgtaaaatagaaaaagtggagttggtgaatcggttgttctttcctcacatttggatgattgactaaggcttttagcatggtgctcctttactcaccctcccctgttttcttctattaatcaaaagaaacttcgcagctaatgggatggtcgatctcacaggctgggaactcgttcaccctccag

SEQ ID NO: 16841 - DNA, 465 bp, Homo sapiens
  misc_feature (1)...(465): n = A,T,C or G
aaccgtttgccctcgcantnnctcccgaaaccgtcgcaanagcnccgnaanttngggncgacccacgcgtccggaagctgtgtcctcagtactccgtgatgacgagtgatcctctgtgaaatgggcaggtgggaaaacagctggctgctggcctgcccaggcacccgccacgggcccacgctgctcagcttctcaatgtgagactgtccacacctgcgaggtgtgctaaaggtgcaggttaggtggactgaccccaggacctccctgacccccaaccaggccagcggaagcctgccacctcctatgtgcggaccaccatcaacaagaatgctcgcgccacgctcagcagcatcagacacatgatccgcaagaacaagtaccgccccgacctgcgcatggcagccatccgcagggccagcgccatcctgcgcagccagaagcctgtgatggtgaagaggaagcgga

SEQ ID NO: 16842 - DNA, 399 bp, Homo sapiens
cacgcgttcgatcctagaataaatgagagaatttctcttggtttttaatgtatgcaggtatcaagtattaagtatctaagctagtagctaaggggaaaaatgggagtgatatatataatttaaatttagttaatgtaattttatcaaaacgaaaatagtaccttttacaacagtagtgtctcagtttcctgaattatgtaactaaattgttctcatttatataacaaatcatcatttgcctctataaaaaaaaatactggtagggcagtatagtatactactggtatgtaaggattattttcataatcagaaaatccaaaaatcatttgttctttattaaaatgggaagaaagtaataactggtcagatttttttcttagattctgatttgagaaaaaa

SEQ ID NO: 16843 - DNA, 386 bp, Homo sapiens
gtgagaagccatgagcagcaaagtctctcgcgacaccctgtacgaagcggggcgggaagtcctgcacgggaaccagcgcaagcgccgcaagttcctggagacggtggagttgcagatcagcttgaagaactatgatccccagaaggacaagcgcttctcgggcaccgtcaggcttaagtccactccccgccctaagttctctgtgtgtgtcctgggggaccagcagcactgtgacgaggctaaggccgtggatatcccccacatggacatcgaggcgctgaaaaaactcaacaagaataaaaaactggtcaagaagctggccaagaagtatgatgcgtttttggcctcagagtctctgatcaagcagattccacgaatcctcggcc

SEQ ID NO: 16844 - DNA, 457 bp, Homo sapiens
  misc_feature (1)...(457): n = A,T,C or G
ttaaaaatgaaagactgngantcccactgatatcgtcgatanacccgnnngnntaagttttgagagacctctatcactcacagttaagtttctccatcactttaatttttttaattaaaaagggttttactttctgctctgactagtagatattatatatttgatttgcattgaattagtgtgtttattttatatgttgaaaattataaattggtacagtctagtttctgtaaggaagaaataattattcttagaattaattgagtaaaatacaggtggtaaaaataaatacttagaccagtaaatttttagaaattaacatttataaggttatactttgaagaaataactgaactaccactgtagtcacattttaaattctggatatatctttctgtaacaagtagtaattaaatcattttttgaatcttaagataggaatatataccatttcttg

SEQ ID NO: 16845 - DNA, 416 bp, Homo sapiens
  misc_feature (1)...(416): n = A,T,C or G
cggacgcgtgggtgacaatagcgtattactggattttagactgtccttactgtaactacttcctgaggaggaatatgaccatttgactgttcaatgattatttggatttacaggtccccaaggctgtcattataataggaacaatctttgctgtatacttttaagaaatactctgctatttctcttgctggaactgttgaaagaaaatatatacaatgatctattgctcatcagctttattttttaaacatacgacttattttgttgaaattgacaaagactgtatttagatctcataatgctgtgttacatgtttacaagaaaatagctttgatgtcagaatattattgggtgctgcattggcaatgcatgttacccattccccattatatagactaccaaattttttatggaan

SEQ ID NO: 16846 - DNA, 410 bp, Homo sapiens
ggaaggggaccctccgctctgtagtgctacagggtccaacatagagccgggtgtccccaacagcgcccaaaggacgcactgagcaacgctattccagctgtccccccactccctcacaagtgggtacccccaggaccagaagctcccccagcaaagcccccagagcccaggctcggcctgcccccaccccattcccgcagtgggagcaaactgcatgcccagagacccagcggacacacgcggtttggtttgcagcgactggcatactatgtggatgtgacagtggcgtttgtaatgagagcactttcttttttttctatttcactggagcacaataaatggctggaaaatctcaaaaaaaaaaaaaaaaggggcggccgttttaaagagatccctggggggcccaacct

SEQ ID NO: 16847 - DNA, 419 bp, Homo sapiens
aatcaaggagctcactcagagtgaacttgaattatgacttttcaggctcatttgtactctcttcccctctcatcgtcatggtcaggctctgatacctgcttttaaaatggagctagaatgcttgctggattgaaagggagtgcctatctatatttagcaagagacactattaccaaagattgttggttaggccagattgacacctatttataaaccatatgcgtatatttttctgtgctatatatgaaaaataattgcatgatttctcattcctgagtcatttctcagagattcctaggaaagctgccttattctctttttgcagtaaagtatgttgttttcattgtaaagatgttgatggtctcaataaaatgctaacttgccagtgattaaaaaaaaaaaaaaagggcggccgttct

SEQ ID NO: 16848 - DNA, 492 bp, Homo sapiens
  misc_feature (1)...(492): n = A,T,C or G
tggaagtaacccgggggngggtaaaaactgagaccntcggaactgangccctcgaaggnncacccacgcgtncgcagcactttacaacacaaggcttgactgtaattttcatcaaactgcaacttgtgcaggtttgtgagagatgtcttattacttaaaggcagctgtacggctcttttaccttcaaggactgttcccttgatacaccctgtcagctgagggtggcaggataacaattagcctgcaaatccatccatttaaattaaaaacaaaatgcaacgggattgcaggcagaatgtgttcaaattcccttcctatggattcaaggtgggcccagccctcctcctggaccaaggatacctggagactggactctgggggttggtgacagaggggagaaggcaagacacagtcccggcccattggcttcagctgtgaaccatcgttgtggaggcaaatctgcagcttgtctcacgtactatttctatatct

SEQ ID NO: 16849 - DNA, 491 bp, Homo sapiens
  misc_feature (1)...(491): n = A,T,C or G
ggcaagttccccgggggaggtagaaactgaggccttcggattttgangccatcgaaggnncanccacgcgtccgcccacgcgtccggtcttctgtggctaatgccgtattataaatgaaaaacatttgtaataggaaattagcctgcccttcgttctgttgatcctgttttctggtggtcataattgtgggtagaagagagtacagtttgcaaataatgtgatgagttggcaatgcagaagtttccagcatttggaaacactttactctgacaaactgattatcttgtgaattttatctatgctccacagaatgagcttttaaaagcactgatttttcttaatttgtgtccattcataagaaattaatctgtgccctggtttcctattgacaggtatttatttatcatgtgttcatagtcttcttaattctgtttccaatatttgatccatataattctctattttatagaacaagaaaaaggtatatgaa

SEQ ID NO: 16850 - DNA, 406 bp, Homo sapiens
cgaagcccgagctgccgccgcatccacagccgagggctctatggcttctggagttacagtgaatgatgaaggcatcaaagtttttaatgatatgaaagtaaggaaatcttctacacaagaggagatcaaaaagagaaagaaagcagttctcttctgtttaagcgatgacaaaagacaaataattgtagaggaagcaaagcagatcttggtgggtgacattggtgatactgtagaggacccctacacatcttttgtgaagttgctacctctgaatgattgccgatatgctttgtacgatgccacatacgaaacaaaagagtctaagaaagaagacctagtatttatattctgggctcctgaaagtgcacctttaaaaagcaagatgatttatgctagctctaaagat

SEQ ID NO: 16851 - DNA, 509 bp, Homo sapiens
  misc_feature (1)...(509): n = A,T,C or G
tggggagtnaccccaggcannnagtttaanaactggatgaccgttngaanattgatnagctntngggananngcnccggaantnccgggncgacccacgcgnccgcccacgcgnccgnnnacaaaatgctcactagagaacactgcagncatttcctaagtgcttcctttgccacagactggcctgggtcctttacttaccttccctcattcactttccctcggccaataccacgttcttgattttctttcttcactggaagaaagcagataaactcctctttggtctgctttcagaggccaggctgattcagatgcctgttgctattgttgctctccattgttgggaggcattccttttcacaagaatgttctgggaaactcttcagaggacgtgaaggaaataccctgaagagtcatgattaactattgactattttctgatttaaaactgctcacctgaaattgatacttttagactttacgatcagtaaattattcagaattcag

SEQ ID NO: 16852 - DNA, 406 bp, Homo sapiens
cagagttacagcaattacctgaaaagtttcctaacattttaataatgttagggatttcgttttggttttaggtgtcctcaagagacaacaggttcacagtaatttccatgatgttgggtgtggctaagctggggattggttctgttccccctgctcccgtgtagagaaaagctatatttatactgcattctttctcaactttcaggtaaaacaaactatgatttaaaaaaagaaaaaagaaaagacaggtacttttacttcaaagagtgctttgctacatttttatttaaaccaaaaatcaaataaaataaggaggggggctgggtatactttaaacaaaaccagtcctgaaatgctgttattctcaaagtacattccaaaaaaaaaaaaaaaaaaaaacttttgg

SEQ ID NO: 16853 - DNA, 421 bp, Homo sapiens
  misc_feature (1)...(421): n = A,T,C or G
cccacgcgtncgcagccgcatcttcttttgcgtcgtcagccgagccacatcgctgagacaccatggggaaggtgaaggtcggagtcaacggatttggtcgtattgggcgcctggtcaccagggctgcttttaactctggtaaagtggatattgttgccatcaatgaccccttcattgacctcaactacatggtttacatgttccaatatgattccacccatggcaaattccatggcaccgtcaaggctgagaacgggaagcttgtcatcaatggaaatcccatcaccatcttccaggagtgagtggaagacagaatggaagaaatgtgctttggggaggcaactaggatggtgtggctcccttgggtatatggtaaccttgtgtccctcaatatggtcctgtccccatctcccccccaccc

SEQ ID NO: 16854 - DNA, 401 bp, Homo sapiens
accagggcggcgcgtggtctacgccgagtgacagagacgctcaggctgcgttctgaggatgaccgagtgggagacagcatcaccagcggtggcagagaccccagacatcaagctctttgggaagaggagcaccgatgatgtgcagatcaatgacatttccctgcaggattacattgcagtgaaggagaagtatgccaagtacctgcctcacagtgcaaggcggtatgccgccaaacgcttccgcaaagctcagtgtcccattgtggagcgcctcactaactccatgatgatgcacggccgcaacaacggcaagaagctcatgactgtgcgcatcgtccagcatgccttcgagatcatacacctgctcacaggcgagaaccctctgcaggtcctggtgaacg

SEQ ID NO: 16855 - DNA, 410 bp, Homo sapiens
  misc_feature (1)...(410): n = A,T,C or G
aacgaggggggagagcgaatgaggaggcatattggtttttaattcaagaaaagagaaaatactaatgagatctacttgataagtaattctgagaattaaatgtgttaatacctgaacgcatttgcaacagtgcctggtacatgtgcttaacacccctgggggtaggagtgagaagaaaggctgtgaaccagatgccagcatctttgatgaatgagtacaggagagcaaagaggtggagtcaaggtgtaaccaaatatcatgaaactcagaggaagaaggatcagggggttttgcctgagggtggaggaggaatggtttgaaagatgcagtgtggttggaagaggatacccaccttacctcctccatatgcagnacatgcgatgtgttggtatagatcactttcactggaa

SEQ ID NO: 16856 - DNA, 566 bp, Homo sapiens
  misc_feature (1)...(566): n = A,T,C or G
gcccgcgctccgcaagcgccgcncctatagatgcacgctgcttcatatgtcatcgtcttgcccacgcgttcattcctccgtgnccccccnccaggggaaggttagaattcatcagcactcggccaggaaccccgggncgacccacgcgnccgnnnnagccccgagctgggaaaggccccactatctctattagaattgtgctactataaaacatgaagatatcagcaattgggccacttgcagtttttttcagcatgttaaagcaagtgctaagtactttattagtactttatttagtactttattttaaagggctagaaaacaacagtcttcctggaggccccagaatccctttcatgggattcataagggactcaggtattcttattttctgccaaaaggtgtgcttatttagggactcttttacgatactttggttctgaagttagggagatcttgggttactgtgccaagggcctacctagcattccctgtaggaatatttgaaattccactagctaggctaagaaagcaaagcccaaaattaattggcaacgcttctctca

SEQ ID NO: 16857 - DNA, 397 bp, Homo sapiens
acttgatataaagtattggaatcactgtctttaacacctgtgcctgatgtcaaggtataccgtttcacgggactggagggtcatatgcttaaatgcataccccttattttgccggtgtgaagcatataccctgcttttctttacagtagcggagtcaccttaccagctccatcggtcctaaacttcgctaacattacagtgccccatcctccgccttaatgtaattcaggatacagacaatactaaactgttaaatatatgtaacaaagtccaataaagtttttatttttttctcacaagaattaaaataggggatacacatatgatttagggaaaaacaaaaatccgtggttctttcttttttcctggtttaccccctggagagcgggaaaccccc

SEQ ID NO: 16858 - DNA, 403 bp, Homo sapiens
  misc_feature (1)...(403): n = A,T,C or G
atcaacattcagaatacacggaatcgatttgaaggatcaaggtctgaagtggaagagctcatgaacaaaagcagacagaatcccaaggaccacaaacgagcaagtcactttacagccgaaggctacctgtatgtccaggaaaaaaggcctgctccgtttggttccagttgggtcaaacactattgcatgtatcgaaaagcagcaaagaagttcaacatgatcccatttgagcacagatctggagggaaacttggtgacggagaggagttctttatgaaagaatgcaccatgaggcatactgactccattgacagaaggctttgctttgacatanaaactgttgattggcctggcgtgtacttgaccatgcatgcattgttcgaataggaaaagaagctgtgcg

SEQ ID NO: 16859 - DNA, 394 bp, Homo sapiens
ggggagggaggcctgaggacagagggaaggttggccagcgcaggccacatcaggacacagctcctcaggatgtggcagccgctgatgtacatggtactcgcgcggcttctcagcagcttagaagctgcccagcgtgtgtcaatgggcaacggctaaggaaatgtcttaaaaatcctaacctggccaggtgcggtggctcacgcctgtaatcctagcactttgggaggccgaggtgggcggatgacttgagcccaggagtttgagaccagcttaggcaacatggtaaaaccccgtctttacagaacaaaacaaaacaaaaacaaaaaaaacctggcattgtggccgctgtagtcccagctacttgagaggctggggtgggaggatcacctgagcc

SEQ ID NO: 16860 - DNA, 395 bp, Homo sapiens
gagcagttcctgaccatcctgcccccggagatccatgctcgggtcaggcatcgatgtccaatgagcagcagggagattgtgaccctcgtggaagattttcacagagcatccaagaaaccaaagcagtgggtggccgcttgtatgcaggggcaaaaggtgctcttggagaaaactggatctcagcttggagaacaggaactgccagactttcaaccgcagactcctaggagagatctcagggagagctctccagcagagccttcccaggcaggagcttatgaccggctgagcccccatcattgggagaaatccccactcctccaagaaccaacccccaaattggctgggacagaggcccccagaatgagaagtgacaacaaggaaaatccacaaca

SEQ ID NO: 16861 - DNA, 406 bp, Homo sapiens
  misc_feature (1)...(406): n = A,T,C or G
tgagccaagatcatgccattgcactaccctagccggggcaataagagcaaaactctgtctcnaaaaaagaaaggggaaaaaaaaaaaaaaaaggggttacccttaaaacatcggggttaacataaaaatcaaggggcagaaaaaaggctctgcctttaaaggtttccttagaaaaaaacccccttccccccgggcccccattttaaacccacctccgccttttaaaattttaaataaattttaacctcccccgggggaaggggaaccccccctttttaaaaacattaattttaaaaaaaaaaagggggggccgtttaaaagaatccttgggggggccaaagttaacccgggaagggagaggaaaatttttttccttaaagggaggcgaataaaaaccaagctgggg

SEQ ID NO: 16862 - DNA, 404 bp, Homo sapiens
  misc_feature (1)...(404): n = A,T,C or G
tggcaaccgtctcanaaaaaaaaggaaccttaaaatttcggggtaggggaaccagcgacctcccccaagggtaaaaggataaataaatctgggtctgtttttacaatggaacattacacagccatgcaaacaaaaaggcataacttctttccttaaaaatatgaataaatagggccataccattgggcaaaaaaggccagacccaaaaaagtaacctccggcggggttccttttttttgaggttcaaaatcaggaaaaactaatctttgggggcaaaaattaaaaaaagggttacttttggagaaaagttttatttaggaggaggcttgagggaccctgctggggaattgaaaaggccctacattttgatctgggggggggttatggtaacatgaaggaaataa

SEQ ID NO: 16863 - DNA, 403 bp, Homo sapiens
ttccccttccactgagggcagtcgatagagctgtattaagccacttaaaatgttcacttttgacaaaggcaagcacttgtgggtttttgttttgcttttcattcagtcttacgaatacttttgccctttgattaaagactccagttaaaaaaaactttaatgaagaaagtggaaaacaaggaagtcaaagcaaggaaactatgtaacatgtaggaagtaggaagtaaattatagtgatgtaatcttgaattgtaactgttcttgaatttaataatctgtagggaaattagtaacatgtgttaagtattttcataagtatttcaaattggagcttcatggcagaaggcaaacccatcaacaaaaattgtcccttaaacaaacatgaccctaaatcttgactacg

SEQ ID NO: 16864 - DNA, 402 bp, Homo sapiens
  misc_feature (1)...(402): n = A,T,C or G
cggacgcgtgggctatgccttgctaattttcgtatttttagtagagatgggatttcaccatgttggccagcctggtcttgaactcctgacctcaggtaatccacctgcctcggcctcccaaagtgctgggattacaggcgtgagccactgtgaccggcctgaagttagttttttcctagtactggtatatttacacttagcccaccagttaactcttagtttttctgtggttaatcacaattnctttcttttctttttttttttttttttgggaaaagggagtttttttttttacccagggcggactggcgggggaattttttgggttaatggaagccccccctttcggggtaaaaacatttttctggcttaaccctcaaaagaagttggaattacgggccc

SEQ ID NO: 16865 - DNA, 393 bp, Homo sapiens
tggacaatacactgtagaaattctagaaattttatcttcctctgaagacttgattgttcttgtaggcatttaaattactgtaagcttgtgtatgcttggttttatgctttgttagggaagatctgtagaaagcccaagtcatttcccaagcctttctaagttggtggtacccaatttctgaaccttgtttcttagacgatcttgtcaaggcttggttttatttaggttttgttaggacaggcctaaggtacagcttactccagggtatagtcctttaagggtgacctttctggcttctcaggtagatcccagggagattaacaaagtctgtctcctctgaagatagaattcaagctgagttcttctagaaatccatgacctctacttcttctc

SEQ ID NO: 16866 - DNA, 403 bp, Homo sapiens
  misc_feature (1)...(403): n = A,T,C or G
antaagagaaaataagattgcaagattgttagtaatctgttagaaaaacgctatgtctaaacctagtatgtggggaataatacaggtgtgttttttgataactttaatataaaaaaaactcattttatttgtggcaaaaaaaaattaattttttgggggggaaaaaaaaggcggggccccccaaaaaaaaaaaagctgggggggaaaaaaaaaactttgtaggggaaaagagggttatctcatttataagacccctttaaaaaaaaaattgggaatttttaaaaaaaaaccttttttttgggggggaaaaaaatggcaaacctccctcccgcgcttttaattgttgaggggaaaaaaaaactttttaagggggatggggggaaacaactcttttctttttgtg

SEQ ID NO: 16867 - DNA, 405 bp, Homo sapiens
ctgacccagtccagtgcctggctctccacagatcgctggcctccccaacgacacactgtcagtggagaacggggtcatcaaccagttttcccagcgctggacccacttcattgaccctcagagccaggccaacaaatggatcaagaacatggagaaggacaatgggctggatgtgttcaagttgagtgaccgcgacttcctgcgcagcatggagaacgccatccgctttggcaagccatgtctcctggagaacgtgggcgaggagctagacccagccctggagccagtgctgctcaagcagacgtacaagcagcagggaaacacggtgctgaagctgggggacacggtgatcccctaccatgaggacttcaggatgtacatcaccaccaagcttgccaacccacg

SEQ ID NO: 16868 - DNA, 409 bp, Homo sapiens
cggacgcgtgggcggacgcgtgggcggacgcgtgggtgcatgttgaaagacatgcttttatttttttgtaaaacaatataggagctgtgtctactattaaaagtgaaacattttggcatgtttgttaattctagtttcatttaataacctgtaaggcacgtaagtttaagctttttttttttttaagtaaagggaaaaaatttgagacccaataccaatacttaggattttggccttggggtttgaataaaattctgaggcctggattaaaatctttcattgaatggggattcccttttaggaatatggccctaagggaaacttgtaaaaaaaatcctctttttaaaaccgtgggaaaaaaaaaaaaaaaaaaaaaaaaaaggggggcccttttaaaaaacccctcggg

SEQ ID NO: 16869 - DNA, 395 bp, Homo sapiens
tggaggttggccgggtggcctatgtctcctttggacctcatgccggaaaattggtcgcgattgtagatgttattgatcagaacagggctttggtcgatggaccttgcactcaagtgaggagacaggccatgcctttcaagtgcatgcagctcactgatttcatcctcaagtttccgcacagtgcccaccataagtatgtccgacaagcctggcagaaggcagacatcaatacaaaatgggcagccacacgatgggccaagaagattgaagccagagaaaggaaagccaagatgacagattttgatcgctttaaagttatgaaggcaaagaaaatgaggaacagaataatcaagaatgaagttaagaagcttcaaaaggcagctctcctgaaagct

SEQ ID NO: 16870 - DNA, 470 bp, Homo sapiens
  misc_feature (1)...(470): n = A,T,C or G
cgggcgggatttaattgatagcttacgagaccatccgaaacccggncgaccacgcgtccggtgtgagctgccgcacccggacgatcccattttttattggtgccaacatttcaaaacttcatactgtttatagaactgagggtctggtttatttctactgtaatctctcaatattcatagaagatgaagaaataagtctgacaacactaaagaaatttcttaatatactattattagaatagtagaggataaaagataatgttatccagttacaaaggaatttggatgataattataacttaatgttagagatggtaaagctgcacttacttgaacagcccaaaagcattaaaaatctatttccagaggaatgttttgctatgtagggaaattttgaagtagtttttgctaaaaaattatttctagagttgtgttattcttagcagcaatcttggctagaaatgtttttg

SEQ ID NO: 16871 - DNA, 396 bp, Homo sapiens
aggttggccatgggtggagaggaagatcagtcagtgggcacaagacagtcaaatgggcaaggcctgcctcggggaactagaaccttccaggatctggagcccgggagagccacactgtgggcttaatgtgaatagaggaacaagtgggtatctctgccaggcaccccactttctcctagtaacatgggctcaggggactcagccctggacagagagcctccagagagtgaacagtcttccagatctgggccaatcatcctggacagaggcccgcgaggcagctttgccctgtccacctgttgggtgggcagagccaccaggaacccagacaccacctccaactctgagccttccagagcttcagcctctcttcgtcgtcttaccccactgaaaccg

SEQ ID NO: 16872 - DNA, 402 bp, Homo sapiens
  misc_feature (1)...(402): n = A,T,C or G
aagagaagaagcacacctgcttctcctcatttggatatgtaaaccttactcagcctgggagatgaatacatcttccactctggataactcaactcctgggcccatcagtcctcaaatttttctgcttctgacttgaacctggtaaaggaagtgacaccgaaaaattgaaagaaactgtcaaaaggccactttgatgtatatctcagatgttaaagtcatcttattctcttgtgtctaagcaagagttctaagtaaagagtggtttttgttttctttggaaaatcatcattgtctctcattcttgtgttgncccaccaatgtgtttgctggagtgagtgcatcaaggatgctttcctgaaactgtaactgtggagcttctagaagaatctgattgcagaactn

SEQ ID NO: 16873 - DNA, 409 bp, Homo sapiens
taatttgtttacagaatccaaaaatacaatagagaagatacatgagggcttaaacaagaaatagtaataaatatcatttgtatggatttttaaataatcgaatactattttatatatggaaaaaaatgaccattttttcacttttaggggaaaatgcaaaagtgtaatacataaattgtcacaaattatacctgaaattgattacaaatacatttgaaaaacatatgcctctactcataagtatttttttctatttagacttgaatgataatctgttttttgatcagtatatggctttggaattcaatcatgtctgatatggtagtatttcactaccattttctgacttttagcttttattttcacctcaatgtgatttaagcagaccaaaatttctaattctgctaag

SEQ ID NO: 16874 - DNA, 403 bp, Homo sapiens
  misc_feature (1)...(403): n = A,T,C or G
cccagttcctcctgttaatgaaccagaaactttaaaacagcaaaatcagtaccaggccagttataaccagagcttttctagtcagcctcaccaagtagaacaaacagagcttcagcaagaacagcttcaaacagtggttggcacttaccatggttccccagaccagtcccatcaagtgactggtaaccaccagcagcctcctcagcagaacactggatttccacgtagcaatcagccctattacaatagtcggggtgtgtctcggggaggctcccggggggctagaggcttgatgaatggataccggggccctgccaatggattcagaggaggatatgatggntaccgcccttcattctctaacactccaaacagggggtatacacttgacgttcagatgctn

SEQ ID NO: 16875 - DNA, 412 bp, Homo sapiens
gcaaaaattcttattctttctatgtaaaagcacaaatgtacatatggtacggaagcagaggcgtagtatgtctgtggcattacaatttcacagcaggggtgcaattaggaaaaaactgtctaaaaagtctccttagggagcaataataataataaaaaaagaagatctggaaacactggtctggaaagaaaggcagtcaaataaatagttacaaagcactaatgtgactactttaacacagagatgtgtgcagtaagagagaagtatttttgaaggcctactatgtgtgataataatagtcactattcatcaagtacatcaaggacttactcggtgcaagcacttgctatgtgctttgcagatggaacttgacttttttttttttgaaacagggtctcactctgtcaggctg

SEQ ID NO: 16876 - DNA, 401 bp, Homo sapiens
  misc_feature (1)...(401): n = A,T,C or G
tatgtgagtactaatcacattgaataatagttataaaattattgtatagacatctgcttcttaaacagattgtgagttctttgagaaacagcgtggattttacttatctgtgtattcacagagcttagcacagtgcctggtaatgagcaagcatacttgccattacttttccttcccactctctccaacatcacattcactttaaatttttctgtatatagaaaggaaaactagcctgggcaacatgatgaaaccccatctccactgcnnaaaaaaaaaaaaaaaaattttggaagaaccaaccccccccccccaaaattatctgggttttaagggcccggccttgtacccccatttcctcaggataatggttggcccctggggggggggggctccagggg

SEQ ID NO: 16877 - DNA, 401 bp, Homo sapiens
ttttccaccaaagtcctattaaaggggcatttaaattagatttttctttcaaatgtgtgatttacagttcttcatttttgaataagagtatattcaaattatatattactgtcattttgttagttaaaaatgaattaatcctttacctacattcctttgactctgttacagtcttatttttccacattttgggtaagctttactttgtatggagtaaaaaatcctagaaccctccagggggcagcagagaaagccatttgaagcctgaaaacagactgagtgaaagagcctgtctaaggaacatgtctacattggaatcacactcttaggcttttgctctcagagcagtaggatatcacatctttctactgagaggcagagagtccaccacccatcctgca

SEQ ID NO: 16878 - DNA, 417 bp, Homo sapiens
  misc_feature (1)...(417): n = A,T,C or G
nnnccacgcgtccggatggcaacatagcggtcataggccatcacagcaagcagggaggattcagtgcccccagtggcaaacacaaagaagacctaagccatgcagccctctactgagatggttttcttctcagacaggaggttctccaacagcttaggtgcagtgacagaggaatggcagagatccaagaaggacaattgtcccaggaagaagtacatgggtgtgtggaggcaagaatcagcattaatcaccaccagcagcagcaggtttcccatcacagtcaggaggcaaatcaccacgaacagcacaaagagcagagtctgggtctgggggccagctgacagcccgaggaggacaaactcagggacaacactgcggnttctcattgccttcagtattttatttggaataagatan

SEQ ID NO: 16879 - DNA, 438 bp, Homo sapiens
caactctggagtcctctgagagagccaccaaggaggattaggggagcgacggccggtgtcagaagttgagaccacccagcagaggagctaggccagtccatctgcatttgtcacccaagaactcttaccatgaagaccctcctactgttggcagtgatcatgatctttggcctactgcaggcccatgggaatttggtgaatttccacagaatgatcaagttgacgacaggaaaggaagccgcactcagttatggcttctatggctgccactgtggcgtgggtggcagaggatcccccaaggatgcaacggatcgctgctgtgtcactcatgactgttgctacaaacgtctggagaaacgtggatgtggcaccaaatttctgagctacaagtttagcaactcgtggagcagaatcacctgtgcaaaacaggactcctgg

SEQ ID NO: 16880 - DNA, 501 bp, Homo sapiens
  misc_feature (1)...(501): n = A,T,C or G
agaggccgaggggagtttcgctgatcgctgtgtgaccgctgataacctcgggacgacccacgcgtncgaatacttttcacaagagacgaaataacatgagccactataattattggctcagttccacccaatttccatattttgggtgtaatttaaaatttttgacttggaattttaactttttttttgttttgattttttaccaggtttctaagcatgaattgaggaacagaagaagcagagcagatgatcggagcagcatttgtttctccccaaatctagaaattttagttcatatgtacactagccagtggttgtggacaaccatttacttggtgtaaagaacttaatttcagtataaactgactctgggcagcattggtgatgctgtatcctgagttgtagcctctgtaattgtgaatattaactgagatagtgaaacatggtgtcggttttctattgcattttttcaagtggaaaagttaactaaatggttgacac

SEQ ID NO: 16881 - DNA, 433 bp, Homo sapiens
atcaaaaacgtccccaaacaccataagaccatcacagagttgctgccctaaaatgtataattagtgaaaaattgacctctgcttccatttaaagcatggcagtgggttgggtgtcattatgtagtataaaaactggactagataaactgctattttagagcattattagcattctctgaatatatgtatatatacatatatatacgcacacacacacacacataaatatatatatatatatatatatataaactcacatactcccacttaaaagtcgggtgaaagctacacaggattacagaagcatctattatatcactcttgctctttgactaaacctatgctggttttggtatagaaaagtacaaggacatggatgaagtgttttttttttaaaaaaaagacatatttgcactacacatacattttggtt

SEQ ID NO: 16882 - DNA, 421 bp, Homo sapiens
cccacgcgtccgcccggttcactgcgcaggcacaacagagccgctcccctctcctcgccccgccaccgggacggagagcgcccgccgctgcatttccggcgacacctcgcagtcattcctgcggcttgcgcgcccttgtcgacagccggggccttcgtgagaccggtgcaggcctggggtagtctcctgtctggacagagaagagaaaaatgcaggacactggctcagtagtgcctttgcattggtttggctttggctacgcagcactggatgcttctggcgggatcattggctatgtaaaagcaagcagcgtgccgtccctggctgcagggctgctctttggcagactaaccggcctgggtgcttaccagctgtcttaggatccaaggaacgtttgggttttcctagctacatctggtag

SEQ ID NO: 16883 - DNA, 478 bp, Homo sapiens
  misc_feature (1)...(478): n = A,T,C or G
ggggccannnnnnatttacctaatcccctcgaaccctgnanctcgganaaaccacgcgtncgntgactctgntgcctgggcaacatagggagaccctgtctctaaaaaaattttgattaaaatttctttaagggtataaagaaggaggggtgtgtgagactagcttgttcaggaacaaaaaagaaatagtgaaggggacttctttaccagatttcagaacctattttaaacctcttataattgaatcaatatagtgtctgcatgggattggacagaacaatgcatggaacagagtagggaatttacaaatagatgcaagtgtgctgaaaatttaatatatgagaaaggtggtatttcaattcagtgggtttatttaataaataatgctggagtataactatccataaggaagaaaagaaaattagaccattgcattgtataaaaataaaggggactaaagactttaagaaactttcag

SEQ ID NO: 16884 - DNA, 405 bp, Homo sapiens
cgggcgggcgctcggctggcggctgcagcagcagagggagacccgcggcaaccccggcaacccagggctcggcgtcgctgccaccatgacgggaagcaatatgtcggacgccttggccaacgccgtgtgccagcgctgccaggcccgcttctcccccgccgagcgcattgtcaacagcaatggggagctgtaccatgagcactgcttcgtgtgtgcccagtgcttccggcccttccccgaggggctcttctatgagtttgaaggccggaagtactgcgaacacgacttccaaatgctgtttgctccgtgctgtggatcctgcggtgagttcatcattggccgcgtcatcaaggccatgaacaacaactggcacccgggctgcttccgctgcgagctgtgtgatgt

SEQ ID NO: 16885 - DNA, 482 bp, Homo sapiens
  misc_feature (1)...(482): n = A,T,C or G
gggggcccccnnnnnttttacctgaaaccgtccgaanactgagncctttgnaaaacncccgcgtncgggatacagcagctcaaagaatgcttgccaagtcactaatagtctttgctctctctagttcagtgactttgcgatactgtgtaacattcagggcactatgtgaacttgtaagtgtgaccatactgcatgttttatggtgacctggtccagtactgcctttgttaaagcatctgtcatcagtaagagatgataagttttttgcacaacagtgaaaaccccacctttaagcatatgattacgcttaataaatattttattaaaaggaaaattaaagacctaaaagggaagaagttagactgttctagttctggtactgttgaggcactgatgaggataaatgatcatgcagaggtctcttcataattgaccccaatggagtcatcaagcatttgagcgtcaacgatctcccagtgggc

SEQ ID NO: 16886 - DNA, 409 bp, Homo sapiens
ctgctacggtggactgtgagactcagtgcactgttctcctcccagcgaccccacgctggaccccctgccggaccctccacccttcggcccccaagcttcccaggggcttcctttggactggactgtccctgctcatccattctcctgccacccccagacctcctcagctccaggttgccacctcctctcgccagagtgatgaggtcccggcttctgctctccgtggcccatctgcccacaattcgggagaccacggaggagatgctgcttgggggtcctggacaggagcccccaccctctcctagcctggatgactacgtgaggtctatatctcgactggcacagcccacctctgtgctggacaaggccacggcccagggccaacccaggccaccccacaggccagcct

SEQ ID NO: 16887 - DNA, 408 bp, Homo sapiens
cccacgcgtccggggattgttcggcttcatgggcattcagagtagaagtcgaaatggcagaagaagaggagaggacatgatgcatccactcaaagtatctttagaagatctgtataatggcaagacaaccaaactacaacttagcaagaatgtgctctgtagtgcatgcagtggccaaggcggaaagtctggagctgtccaaaagtgtagtgcttgtcgaggtcgaggtgtgcgcatcatgatcagacagctggctccagggatggtacaacagatgcagtctgtgtgctctgattgtaatggagaaggagaggtaattaatgaaaaagaccgctgtaaaaaatgtgaagggaagaaggtgattaaagaagtcaagattcttgaagtccacgtagacaaaggcatgag

SEQ ID NO: 16888 - DNA, 481 bp, Homo sapiens
  misc_feature (1)...(481): n = A,T,C or G
gatggtgccgggggggttttaatcgagtacttacccaactncctgnanaancnnngnnnngannnangggggcggaatgatctttactgaatttgccctttataataaacttattgaatttctagagcacgtcccaaaaactaggggacaggtgagaacttattatgggtgacttcaaaggcctaaactgcgttttttatgtccactaaacaacttgattaaaagacggaattttgactcgtgtctgtatcatacaagtacaaatactacttttgccctatgtatccgtaaatgtcctttgtgactatgacttatttatttaatgccctttcttatgccgttgcttttcaagtttactcatttctatggttgcaaataactctaaaacttattatataaactttcatattataggcagaacacaatggctaaatatctgttgcatgtactttaaagcttattattaaatataaacagatat

SEQ ID NO: 16889 - DNA, 483 bp, Homo sapiens
  misc_feature (1)...(483): n = A,T,C or G
gaaagagcccggggccttaataccgaaaactggctaggacgngcaanancncnnnaannnnngggnggacccacgcgtccgggcgggacccgcgaggagtcgcgccgaggacggaggccacgatacctgcgtggctggggctgggggctccggggtcaccaccctgggcgacccggaggtggcgcctccgccggccgcagctggagaggagcgcgtccccaagccgggggagcaggacttgagcaggcacgcggggtcaccgccgggcagcgtggaggagccatctcctggaggagaaaactcacctggtggcggaggctccccttgtttgtcctcccggagcctggcgtggggttcttctgcgggaagagagagtgcgcgcggagatagcagtgtggaaacgcgcgaggagtcggagggcacgggcggccagcgctcagcctgcgccatgggtggtcccgggaccaagagcggtgagccttt

SEQ ID NO: 16890 - DNA, 417 bp, Homo sapiens
cccacgcgtccgcgctatgatgtgtaggaggaagagctcaggtggaaaaggagggagctgctctcaggctgcgtgcagcaacagtgcccagggctctgatgagtctctcatcacttgtaaagcctgagacagctgcctgtgtgggactgagatgcaggatttcttcacacctctcctttgtgacttcaagagcctctggcatctctttctgcaaaggcgtctgaatgtgtctgcgttcctgttagcataatgtgaggaggtggagagacagcccacccccgtgtccaccgtgacccctgtccccacactgacctgtgttccctccccgatcatctttcctgttccagagaggtggggctggatgtctccatctctgtctcaaattcatggtgcactgagctgcaacttcttacttcc

SEQ ID NO: 16891 - DNA, 423 bp, Homo sapiens
atcttcttcctgcccctgaaagtgacccagaatttgaccttgatagaggaggatcctttcttcaaagtccccgtgaacaagctgagttacgaaggcgaagtcaccaagtccctgcaggagatgaagctgcaatccttgtttgattcaccagactttagcaagatcacaggcaaacccatcaagctgactcaggtggaacaccgggctggctttgagtggaacgaggatggggcgggaaccacccccagcccagggctgcagcctgcccacctcaccttcccgctggactatcaccttaaccagcctttcatcttcgtactgagggacacagacacaggggcccttctcttcattggcaagattctggaccccaggggcccctaatatcccagtttaatattccaataccctagaagaaaaccc

SEQ ID NO: 16892 - DNA, 416 bp, Homo sapiens
  misc_feature (1)...(416): n = A,T,C or G
tgaggggctgcagtgcatgaacaccagcacgagctacctcagcaagacggtgggtattgcccattcctgctacctgcgagagcccccttaatcagaagctttaactttggggatgatgtgtttaaacttctggttgctttaaactaacttggttcaactcagggtctcttatattttctttaggggaatgaagtcagtttttcagtgttttgtgtgtttgacaacacagtgtcacaaagaaagtaattgatgctttattactttgcaaactcttcatatagtggagtcaaagcctcatgcagaaaacaataaatatacatatgtatgtgtgtacatgtacgtgtgtatgtgtgtgtgttgatcttcaagaataaacatgttcatttggcaataaaatacttttaaatgggtgagtn

SEQ ID NO: 16893 - DNA, 421 bp, Homo sapiens
cggacgcgtgggcttttatataaactttactttccagatgaagagctgagcctgattcaaatggtttttctgctttatacttctttttagttcattggtttttatagtagaggttttctatttgttttttttttttttttaacaacattaataggccggaaccaaaaccggctttggaaacattcaggtaccaccggaaatggggaaagtaccctttttggacaaaatccccttgaatttttatccttggctggcaacattaaaaactcaaagcccctggtttatggaataaagttttttcctgtaaaggcaattataaaaatacatcggaaacccaccaaagggggccattacaggtttcataaaataaccctgactgggctgtcacttgatcttaggaaacaccccagtttaaaatttt

SEQ ID NO: 16894 - DNA, 418 bp, Homo sapiens
cccacgcgtccgcccacgcgtccgcccacgcgtccggtgattcaagggactatgtcactcagcctcatttgctggaccaaatctggagggagaacccctaaaacccctaagtgaggttgcccagggggttgtccccaggtggggggaagcaggggagagaaaatggtagccatttttacattgttttgtatagtatttattgattcaggaaacaaacacaaaattctgaataaaatgacttggaaactgccaaaaaaaaaaaaaagggggggccgttttaaagaatccttgggggggccaaatttaacgcgggctggcaaggtaatatttttttccttatagggagccgatttaaaacctacctgggaatctttgaaaaggacctttacttcgggggggaaacatattggaacaacct

SEQ ID NO: 16895 - DNA, 415 bp, Homo sapiens
tcgaagcttcctctaagttcattctcttttatccttccccagaagaaacgtgtctgaaatatggaatgtatcattgccaaacaaaaagaatttgtgaaaacttcttagttgcataactaggaagactagagactattgactgtcatacatacttttactaaatatgagtactgttgtatttttactatttataaatattaaaattacatactattaacttgcatgtttttaaacaacatataaatggtatcacattgtattttttgcaacttgcttttttcacttctgactgtgtttttaagacttctccatgttgacacatgtcatttattcattcgttttaattgctggaagatattcttttgtcaggatatactacaacttatatatctggtattctttctggggacattta

SEQ ID NO: 16896 - DNA, 421 bp, Homo sapiens
cggacgcgtgggtgcttacagaaaatatagccatgattgaaatcaaatagtaaaggctgttctggctttttatcttcttagctcatcttaaataagcagtacacttggatgcagtgcgtctgaagtgctaatcagttgtaacaatagcacaaatcgaacttaggatttgtttcttctcttctgtgtttcgatttttgatcaattctttaattttggaagcctataatacagttttctattcttggagataaaaattaaatggatcactgatattttagtcattctgcttctcatctaaatatttccatattctgtattaggagaaaattaccctcccagcaccagcccccctctcaaacccccaacccaaaaccaagcattttggaatgagtctcctttactttcagagtgtggattggat

SEQ ID NO: 16897 - DNA, 415 bp, Homo sapiens
taaaaagcccttaaaaatatgtgtatactactttggctcttgtgcataaaaacaagaacactgagaattgggaatatgcacaaacttggcttctttaaccaagaatattattggaaaattctctaaaagttaatagggtaaattctctatttttttgtaatgtgttcggcgatttcagaaagctagaaagtgtatgtgtggcatttgttttcactttttaaaacatccctaactgatcgaatatatcagtaatttcagaatcagatgcatcctttcataagaagtgagaggactctgacagccataacaggagtgccacttcatggtgcgaagtgaacactgtagtcttgttgttttcccaaagagaactccgtatgttctcttaagttgagtaacccactctgaattctggtta

SEQ ID NO: 16898 - DNA, 480 bp, Homo sapiens
  misc_feature (1)...(480): n = A,T,C or G
ccgccctcntttgaaaccagagtcctcccgaccgctccgaattcccggtcgaccacgcgtccgatagtgctaggatgacacttgcaaaagcttgtgaactctgtccagaggaggagccagatgaccaagatgctccagatgaacatgagtcgcctccacctgaagatgccccattgtacccccattcacctggatctcagtatcaacagaataaccatgtgcatggacagccatatacaggcccagcagcacatcacatgaacaaccctcagagaactggccaacgagcacaagaaaattatgaaggcagtgaagaagtatccccacctcaaaccaaggatcaatgaaatgcacataattaactggttccatcaagactgtgcacccaggccttacagtccaaccttcttctgtgtctggctaatatttaaaactagaanaactattcctaatcaacatggagtggagagttattcactg

SEQ ID NO: 16899 - DNA, 399 bp, Homo sapiens
cggacgcgtgggcagatgtttgcatatatgcctttttgaatttttgctggttaacctttatcatttatctttgtaatgtgaacatgcttcagagtgtaccttttgccataacctattttaatttactttttctgaagtttggagtgataatttttagtggaagcaatttgtaatttaagttggtagttatattatatatagaaaagattttttagttaaacttctggacatgagcgtcctgtttaaatttcttgttaatatcgtgccaagcctcaaaaataggcttattccatggaacaagaattaaaaatgaataagctatcaatatataatttaagtacaagtttaggctgggcgtggtggctcacgcctgtaatcccagcactttgggaggccgag

SEQ ID NO: 16900 - DNA, 401 bp, Homo sapiens
  misc_feature (1)...(401): n = A,T,C or G
atggcccggggccccaagaagcacttaaagcgtgttgcagcgccaaagcattggatgcttgacaaactaacgggtgtatttgcacctcgtccatcgacaggtccccacaagctgagggaatgtcttcctctgatcgtcttcctcaggaatagactcaagtatgcgttgactggagatgaggtaaagaagatatgtatgcaacgtttcatcaaaattgatggcaaggttcgagtggatgtcacataccctgctggattcatggatgtcatcagcatcgagaagacaggtgaacatttccgcctggtctatgacaccaagggccgttttgctgttcaccgcatcacagtggaagaggcaaagtacaagttgtgcaaagtgaggaagattactgagggagtgan

SEQ ID NO: 16901 - DNA, 440 bp, Homo sapiens
cttgtcagacaatggctataaactgaattaggcagtcttataaaaatttaataacccgaaaaggaaaaaaaagaccgttgcaaatttgttaaaaggccaaaaaggacagtttaattttgaacaaattatgcttacctcaggtttttttagggggctggaatgcccttctttccataaaaaacttatcttcttcttaattcggcaagggaatatcttttaagttttaaaaaaacgggaataattatatctatctttttggccgctaatattaaggggtttttgtggataaaaaaaagcctgggggggggctggcggaataaaatatttaggaggggggcatttttaaggatagggaacaaaacccctttttaagtccagggataaagctttttttttctggaaaaaaaaaaaaaatcccccttcgccggtttttaaaaaac

SEQ ID NO: 16902 - DNA, 433 bp, Homo sapiens
  misc_feature (1)...(433): n = A,T,C or G
ccaaaacagaacagacccccatccctgggctggaggacccgcctcttggcagccagctgagaaggcgccccggggagggggaaactgacatcccatctagagccgtccctcctcttcctcccctcccgactctctgctcctttcccgccccagaagttcaagggcccccggcctcctgcgctcctgccgccgggaccctcgacctcctcagagcagccggctgccgccccgggaagatggcgaggaggagccgccaccgcctcctcctgctgctgctgcgctacctggtggtcgccctgggctatcataaggcctatgggttttctgccccaaaagaccaacaagtagtcacagcagtagagtaccaagaggctattttagcctgcaaaaccccaaagaagactgcttcctccagattagagtggaagaaacn

SEQ ID NO: 16903 - DNA, 410 bp, Homo sapiens
ataatacttacctcgtgattgagaaggaaaagcaataatgtgcttaaagctgtgcttgataaagtgttcaaaaaatcatcactactaatatcagacgatgaacataatgcttgttctcaggagttctcaaatcctgaggggaagagagagatatatatgtgcaattatatggtaacagtgtataatattagcagtatccttgtagaagaggccttgatgccaagtcttcatctgttgctccagtgtgcaggtgacggtcctaccttcatggtaatgagtccagtctgaggcgttatcctcagcctgtcagcaccccaaggaccttgcacatagggattataactcctactccttcccttaaaacactaataacattggagtgggtgggagccacatgttaaataccatca

SEQ ID NO: 16904 - DNA, 402 bp, Homo sapiens
cgctctgcagagaaccccccttcaggatccgtgaggaagaccagaaagaacaagcagaagactcctggaaacggagatggtggcagtaccagcgaagcacctcagccccctcggaagaaaagggcccgggcagaccccactgttgaaagtgaggaggcgtttaagaatagaatggaggttaaagtgaagattcctgaagaattaaaaccatggcttgttgaggactgggacttagttaccaggcagaagcagctgtttcaactccctgccaagaaaaatgtagatgcaattctggaggagtatgcaaattgcaagaaatcgcagggaaatgttgataataaggaatatgcggttaatgaagttgtggcaggaataaaagaatatttcaatgtgatgttgggg

SEQ ID NO: 16905 - DNA, 408 bp, Homo sapiens
agatttcagcataaaatctttagtatgaagtgagagaaagaagagggaggctggttctgttgctcgtatcaataggttatctgtgtccctcatcttggtgttacagtgttatttctgtcagtattatgaatatgtggttgacccatcctgtcaaatgtaccaacattttcgaaagaattcattcaaatctcttatgccaacagaaaagttccttcttgtttaatatctctttacctcagtcctacattttgattctctggaggagattttagcttgtcttaaaaagccaaatttggagtcatcaagcctgctgaacctgatggggcagctttttgaacagctttctggaagtaagaacttcagttgaaaagccctttgatcgcttcagcccgggacatgcccttcaga

SEQ ID NO: 16906 - DNA, 400 bp, Homo sapiens
  misc_feature (1)...(400): n = A,T,C or G
aaattgcagtttgagaagtgaattaaccttacatccctttgttcagataccttaaaagttactttatttaaaagcatttattaatcttagtctgaaatcaaaatatagattaattggctcagctttaatacctttctaggaggtgtcacaatgtagggtaccaagggttggattgtgatggggcatggtcgtacactgctcattgtgccacaggtgtgactggaaagcatgatattctagggttggtttgtagattcaaataatccagaaatatacctaataagattgagtgaaaaatttgagtcaaatatctagggcattcacagagtagctgtgagttcttggtaatgtgaaaaaggccttggttttcagaaactcctgggtttcctgttaaaaaatn

SEQ ID NO: 16907 - DNA, 410 bp, Homo sapiens
tctttaaaccctgcgtggcaatccctgacgcaccgccgtgatgcccagggaagacagggcgacctggaagtccaactacttccttaagatcatccaactattggatgattatccgaaatgtttcattgtgggagcagacaatgtgggctccaagcagatgcagcagatccgcatgtcccttcgcgggaaggctgtggtgctgatgggcaagaacaccatgatgcgcaaggccatccgagggcacctggaaaacaacccagctctggagaaactgctgcctcatatccgggggaatgtgggctttgtgttcaccaaggaggacctcactgagatcagggacatgttgctggccaataaggtgccagctgctgcccgtgctggtgccattgccccatgtgaagtcactgtgg

SEQ ID NO: 16908 - DNA, 400 bp, Homo sapiens
cttctttgaagattaccaatgattatattttttaaagcactgtgatttgaatttgcttatgtaattttatttgcttgactttttatatgatattgtgcaaatgtttgccataggcaattggtacttaaatgagaggtgagtctctcttttgccttggtgctttggaaattaaatgtcacaaacgagtatataattttttatctgtacttttagagctgagtttaatcaggtgtccaaaatgtgagttaaacattaccttatatttacactgttagtttttattgttttagatttattatgcttcttctggaagtattagtgatgctacttttaaaagatcccaaacttgtaactaaattctgacatatctgttactgctgactcacattcattctccgcg

SEQ ID NO: 16909 - DNA, 354 bp, Homo sapiens
ggcctctaaataagctgctctagggagccgcctactttttgatgagaaattagaagagtacctaatgttgaaaacatgacatgcgctcttgggatctgctgttctctccagggctccagaacctgatacctgttaccaaagctaggaaagagctttatcacaagccttcactgtcctggcatgagaactggctgccaggctcagtgtaccccattaactgtgaatgaatctgagcttggtttcctttattgctttctctgcaatatgattgctgaaacacattttaaaaattcagaagcttgtcactcctggttatgggaggatcactcacacatgtgtagtacaagggcggcg

SEQ ID NO: 16910 - DNA, 412 bp, Homo sapiens
cgatgcggggcatgcgtagatgagactccatctgcccggagcagctttcctgagccttggaggatagcttcgtcatggctcctagacttccgtttatccttgctgcctatctggttgcagcctgcagcctggccatcctgcaggctgggaagcacagcccctggcaaaaaccagacgcgagcacttcagagaaggaaggatgagacaggaattgaagctgaacagccacatctgtacaagctcaaaaaaaaaaaaaaaaaaaaaaaagccggggggctttttcttttggccccagcgagacatccaacccttggaaccctttgcccatatggaaggctcaccctggccccacggggattcatattagagacccaagccggtcccctttcctggccttaacaaaccatttttg

SEQ ID NO: 16911 - DNA, 487 bp, Homo sapiens
  misc_feature (1)...(487): n = A,T,C or G
aggatgccctttgaaccccgtagatcngcctgcgaaaccgcgccgcgactcacgcgtccagccacgcgaagatatacgtaccataaccaaaatcagtttcaaattttttctttctagttttattagtactaatattgagtgtaactgctttgatgggcatgtgcaacaaagtcattcattttgttaatttttcccccgatttgacagaaagcagaatgtcgtcatccaggttgtggataaattgaaaggcttttcaattgcaccagacgtctgtgagaccacgactcacgtgctttccgggaagccacttcgcaccctgaatgtgctgctgggaattgcgcgaggctgctgggttctctcttatgattgggtaagccctgtgtgtgaactgcggattttaaaacaaggcattctgatagagtgggtcaccctgaggagccgacatcagcactcaggccggcgagcacccttgggatctgacactttn

SEQ ID NO: 16912 - DNA, 432 bp, Homo sapiens
caccgccatcgacgtgcaggtggggctcctgtacgaagagggtgttcgcaaggcccagagcagcgactccagcaagaggactttctccgtgtacagcagctctcggcagcagggccgctacgcccccagctatacccccagtgccccgatggacaccaacctcttgagcaatatccagaagctattctctgaacgtattgatgtgttcagccctgtggagttcaacaaggtgtcggtgctgaccggcatcatcaagatcagcctgaagacgctgctggagtgtgtgcggctgcgcacctttgggcgcttcgggctgcagcaggtgcaagtggactgccactttctgcagctctacctgtggcgttttgtggccgacgaagaactcgtgcacttgctgctggacgaagtgggggcctctgctgccctgcgctg

SEQ ID NO: 16913 - DNA, 398 bp, Homo sapiens
agctcgtgggagccatattgtgaagagctttgtgtgccagaccaggcagtgggaattttggcctaaagggctgacagtagtagctctagacctctctttagtcacaaaggcctttacaaatctattgaaaatgacaagccctctctccaccaaactttttgtgcaatatgagaattctttgaccctttgaagcccatcttggactccagcttaaaaagccctcccatagagagccaatgaaaggttttgaggcctggggtgatcagagtttgcattttgtaaagcagcccttggggcagcattgtgaagaatgaaatagagagaaagacagaagacaggaagaccagttaggaggctaggtaggaatcccgtgtcagaggtaaggccagaacctagga

SEQ ID NO: 16914 - DNA, 476 bp, Homo sapiens
  misc_feature (1)...(476): n = A,T,C or G
gcccatgtgttagaagatagaggccctcggccacgaaccccgggncgacccacgcgtncgcccannnagccgaattaggacaggcctcatctcattgcttggcccttcaagcaacctagctaaaaggtgctgatattttatttagtactgccaacttcaagggatttagatatctatctatctatctagatttctgaaccaagatatatttatagttcacttttgggtttttatacccacggtaggattctgcattccagcattaaatctgcttcattttagaacctttataaaagcaatagctggaatatactcccagttttaaaataaataaatgcctgattgatttaaagcaagtaggttatgctgaagtatataaagaagttttatattctctcaaaaatggtattatctttctttatttgctagattcttacaaatcttttaagagggctgtaacagttgctgctagtatt

SEQ ID NO: 16915 - DNA, 471 bp, Homo sapiens
  misc_feature (1)...(471): n = A,T,C or G
atcggaattgaggccatcgatanaaatgataccctacgaaccgctccgaatccgggtcgacccacgcgtccgctccaaaccatcctaagacagtggaggggtgcatagtggcccatggacagcagagtgtcatagtcgacggcccagtggaacagtcggccccagactctggccaggctaacttgacaagctaagggctggcagagtccagtttcagaaaatacgcctggagccagagcagtcgactcgagtgccgaccctgcgtcctcactcccacctgttactgctgggagtcaagtcagctaggaaggaagcaggacattttctcaaacagcaagtggggcccatggaactgaatctttactccttggtgcaccgcttctgtcgtgcgttgccttgctccgtttttcccaaaaagcactggcttcatcaaggccaccgacgatctcctgagtgcactgngaaatctgg

SEQ ID NO: 16916 - DNA, 122 bp, Homo sapiens
ccgaattccagtttagaggcggatttggtcgtggacgtggtcagccacctcagtaaaattggagaggattcttttgcattgaataaacttacagccaaaaaaccttaaaaaaaaaaaaaagg

SEQ ID NO: 16917 - DNA, 390 bp, Homo sapiens
ctagttcaggttttagcttgattagcaaaggtttttgacaaacagtttatgaaaaaataaaacttaaatacattacacgggttgtaaggacaaaggattttaaaatctgagcacttaggtgaagggacaagcaggtttatgtgtttaaacagaaagaagggaaaaggtactatgtgatatggtactgaaattttgatcccaatagaattcatttctcttacgttgaatccccaatcataattaagccgtatacacagattaaattaacagaagcatttcacataaatgttggtttcagtcatcaactacccatgaattcctgcccaaggatacttaatcaggattaaattttctatgaataattgaaaaacaaaacactcactgcatttg

SEQ ID NO: 16918 - DNA, 427 bp, Homo sapiens
cacgggccgcagcggcagtgacgtagggtaggcgcatggatccgttgcggctgcagctctgcagtcgggccgttccttcgccgccgccaggggtagcggtgtagctgcgcagcgtcgcgcgcgctaccgcacccaggttcggcccgtaggcgtctggcagcccggcgccatcttcatcgagcgccatggccgcagcctgcgggccgggagcggccgggtactgcttgctcctcggcttgcatttgtttctgctgaccgcgggccctgccctgggctggaacgaccctgacagaatgttgctgcgggatgtaaaagctcttaccctccactatgaccgctataccacctcccgcaggctggatcccatcccacagttgaaatgtggtggaggcacagctgggtgtgattcttataccaccaaagtcat

SEQ ID NO: 16919 - DNA, 399 bp, Homo sapiens
  misc_feature (1)...(399): n = A,T,C or G
ccgtagctcacttttgtctagcaacagatcacatggtcttggatgagggagacagatgatccgtagctcacttttgtctagcaacagattaaatacagcattttctgtgtgatatctttgttgaggtctttgcagatggctgtttctttgtcctgaaactttcttcatctgctctttcaaaatgagtgactcttcatcctcgaagnctatgcttatatattgcttttcagaggaatcttttctgaactgggcattctgccttcaaccaactattttctattatagtttcctgtttgtgagttaatagtccttttgaaaatttgactactcatttaccttcttgggttatttgaaattatctcctcttcactagattctatagaagcatagccatgcctg

SEQ ID NO: 16920 - DNA, 416 bp, Homo sapiens
  misc_feature (1)...(416): n = A,T,C or G
tgatttccaaaattctcgcagttttttttgaaacagaatcttgctctgtcgcccaggactggagtgcaggggtgcaatctcagctcactgcaacctctgcctcctgggttcaagtgattctcatgcctcagcctcccgagtagctgggattacaggtgcatgccaccacgcccagctaatttttgtatttttagtagagacggggttttgccatgttgaccaggctggtctcaaactcctgacctcaagtgatctgcacgccttggcctcccaaagtgctgggattacaggcgtgagccaccacacccggcctcttaaataatgttttatgggagtaattagaatttgtaatgttccacggcctaagtgtagttttcatgtttaattatgtagaatcaagtaaagccttttgcttn

SEQ ID NO: 16921 - DNA, 417 bp, Homo sapiens
  misc_feature (1)...(417): n = A,T,C or G
cggacgcgtggggccttatatctgttacacttaatttgtaattaaaaaccttcctcagaacagctgtgtcagattgcttcacggatgaattctaccaaatgtttaagaaaggaatgataccaactttgtacaacctcttttagaaagagctacatattttttagaaaatctaggagggaagaacacttctcatttgataccaaactcaattgatacccaacttatttgataacttctcaactcaccttgataccaaaaccagacacagacactacaaaatttgaagttacagactggtatctctcaagaacatagacacaacaatccaaacaaaatattactaagtcaagctcagtactatataaaagaatgatacagtcatgaccaagtgggatttttctcaaggacacaggttgn

SEQ ID NO: 16922 - DNA, 434 bp, Homo sapiens
cccacgcgtccgcgaggatggccgtcatggcgccccgaaccctcctcctgctactctcgggggccctggccctgacccagacctgggcgggctcccactccatgaggtatttcttcacatccgtgtcccggcccggccgcggggagccccgcttcatcgccgtgggctacgtggacgacacgcagttcgtgcggttcgacagcgacgccgcgagccagaagatggagccgcgggcgccgtggatagagcaggaggggccggagtattgggaccaggagacacggaatatgaaggcccactcacagactgaccgagcgaacctggggaccctgcgcggctactacaaccagagcgaggacggttctcacaccatccagataatgtatggctgcgacgtggggccggacgggcgcttcctccgcgggtaccggcag

SEQ ID NO: 16923 - DNA, 469 bp, Homo sapiens
  misc_feature (1)...(469): n = A,T,C or G
attcactccgtaaaacgctcgataancccctgaggatctnctgaacgcnccggaannnngggtcgacccacgcgtccggtcaaaggtggattggggaaaattttttctcttgaaacggttcaacaaagaaaaactcggtctcctgttgctcactttcctgggtattgtagccgctgtgcttgtcaaggctgaatattactgaagaatgatcctgttcaacctcctagtgcctctactgaattattcctcttttaaatgggtaatgaaccaataatttttaaatcataccaaaaatagtaagaaaatatgcaaacactctgtgatcaaacttaaaagtcattgccattcatcattaataaaagttgccatttcaactacgtcccaacattccctaatagggtattcagggaacctgtcttaaattgtgcttatctaaatcttggaactttgagctaggggaggagaatgt

SEQ ID NO: 16924 - DNA, 418 bp, Homo sapiens
cccgagcgtacgccaatgatgttgtttataacttatacttttaccaagaaaatgttcacttctcacttgttcacttcttcccaatatacagtaagtacgtgagccactcattcatacactaaggcctaggtgagaaaaacctttgattcaggatggctgggttactaaccttgaaaggtaagagacctggctttgaatgtataagttgcaacacacaaacggaagtcttaaaaactgtttgcatctctgtgagttacaggtggatccccaataatctgtttttgtgtatctgagggaaataatagaattagggggaaatcgaatctggctggtaggtggctacagtattataagaggcgatgagggcactgtttaacactaagctctaatacttgcagaggctgagcattccagatcg

SEQ ID NO: 16925 - DNA, 419 bp, Homo sapiens
ttgcctaaacaagctttgtgaaagttaagcgttcaaacaccagtgtcagttacctggaaggctactaaggtaaataagcaaagcaggccacttgtcaggaaagcagagattgtgcctggtgctgaatggccttggggcctgatcttggcatggcagagacctggggactgccactgtccccaggtacgtgtacatggagccaaactgtgtgtcctgtggcattgtcagagttatgttgaaatcttatttgaaaatgttagcaacttacttgcatttttaaagaccaaacaagagctggtaacctatggcctcaagcatctgtccttcctaaaaatggaatagtgggatgtagtgcttaatggaaactctaaatctttttctaaaaactaacagtggatttttaaaatatattggttttt

SEQ ID NO: 16926 - DNA, 413 bp, Homo sapiens
  misc_feature (1)...(413): n = A,T,C or G
cagacatactttcactttaaaaaaagtttatctgaaattcaaatgtaactgggtatggcctatatattttttcgtaaatctcacaattctatccacactgcctttctatctttttcagctgggctatctataaggggcgagatctacctccctccatacccttgtgttcagacaccttatgaatatctgcagtcataatgtccttcaagaaagaaaacattggtcagctctaggtcctgcaaatgctttttgaaggacgaactcacatacagatgggataatcaagtaaatatcttcataggatcaatgccaccatgttcaacacttccctttgccagcctgttgtgaggtccaagcttcccattaatcccttatatagcatttcccagtaactgggacaaccaaaaacacan

SEQ ID NO: 16927 - DNA, 490 bp, Homo sapiens
  misc_feature (1)...(490): n = A,T,C or G
gaggccgggagggtttccctgaacgcagtggaccgctgataacctcggncgaccacgcgtccggagccgttctcccacaacctgaagagaaaggtgttattgactccactttctcaaggaacacaggagactaagacaggcaaagatgcagcccagggagggaccatgtgggggactggtctaggtagtgagtccccacttggagcctctgtgatcccagaccatcatggaggagcagctggtactgaagcgggtggccaacatcctcatcaacctgtatggcatgacggccgtgctgtcgcgggccagccgctccatccgcattgggctccgcaaccacgaccacgaggttctcttggccaacaccttctgcgtggaagcttacttgcagaatctcttcagcctctctcagctggacaagtatgctccagaaaacctaatgagcagattaagaaagtgtcccagcagatccttgagaagcgagcctata

SEQ ID NO: 16928 - DNA, 411 bp, Homo sapiens
gcaacgtcaagtgatgaatttcccccctttactctgcctctgctccccatttgctagtttgaggaagtgacatagaggagaagccagctgtaggggcaagagggaaatgcaagtcacctgcaggaatccagctagatttggagaagggaatgaaactaacattgaatgactaccatggcacgctaaatagtatcttgggtgccaaattcatgtatccacttagctgcattggtccagggcatgtcagtctggatacagccttacctccaggtagcacttaactggtccattcacctagactgcaagtaagaagacaaaatgactgagaccgtgtgcccacctgaacttattgtctttacttgcctgagctaaaagcttgggtgcaggacctgtgtaactagaaagttgcct

SEQ ID NO: 16929 - DNA, 501 bp, Homo sapiens
  misc_feature (1)...(501): n = A,T,C or G
agagtgccgagggggagtttcccctgaaagctctcgtaaccgactgataccntcgggacgacccacgcgtccgaattgatgtggaagatatactctgcaaggcagaagcaatttctctacagatggtaatatgcaaggaattgccagaagcagtctgtgagatccttgggcttcaaggcagtgaagttacaacaccagattcagacgttggtgaagacgaaaatgttgtcatgactccttgtcctacatctgcatttcaaagtaatgccttgcctacactctctgccagtggagccagaaatgacagcccaacacagataccagtgtcctcagatgtctgcagattaacacctgcatgatcactgttcttgcttttttgggaagagacactttgttgcaaccctttttcaagtacttgaaagttgaaaatttgaaatcttggcattgatcagctttaaggtttatgtaaagaaagtgtactgatgttcttacattaaagct

SEQ ID NO: 16930 - DNA, 485 bp, Homo sapiens
  misc_feature (1)...(485): n = A,T,C or G
ttccctaccgaaagcctcgtanntcggaaaccntcggaccgcccggaatcccggtcgacccacgcgtccgcccacgcgtccgcccacgcgttcggtcgttcgttgggcggtgctggcttttcgctcggcgactgcggctcttgctcgggcagcggaagcggcgcggcggtcggagaagtggcctaaaacttcggcgttgggtgaaagaaaatggcccgaaccaagcagactgctcgtaagtccaccggtgggaaagccccccgcaaacagctggccacgaaagccgccaggaaaagcgctccctctaccggcggggtgaagaagcctcatcgctacaggcccgggaccgtggcgcttcgagagattcgtcgttatcagaagtcgaccgagctgctcatccggaagctgcccttccagaggttggtgagggagatgcgcaggatttcaaaaccgacctgaggcttcagagcgcagccatcggtgcg

SEQ ID NO: 16931 - DNA, 490 bp, Homo sapiens
gaggccgagagggtttcaatgaacgcatctgaccgttgagaacctcggtcgaccacgcgtccggccagcaccagggtcagccgtgactcagacatgagttcacctctgcgccgtctctcagcaggcaggcacctgccacctgcatggccatatcgtggttaggcacgtggcttttgcagtcccatagacattggtctgaaccccagctctgccgcttgccagccagacaccatttgataaacctcaacttcatggtggctgaggggattggagatcgtgcctggcacataataagtgctcagctgttcatgacttttagctttcatgcagttattctacaaacagatctgggagaggccgggaaatataaagacaagtgagacacagtttcagtgtcattcacgtgcccgctccgacttcactcatccacactgctggcttgtgcttgtgttggacacagtaattctcatgataggtcatgtgtgttgag

SEQ ID NO: 16932 - DNA, 409 bp, Homo sapiens
  misc_feature (1)...(409): n = A,T,C or G
ggcagctgctgtcggctggacgtgtggaatgaccactcccggctgcacaaaagcctgcggatagacatagtgggcaggtatcccgaaaggtctttgtataagggctggatgaagttgttgaacaccaaaggcaaaacctggttgcatgatccttggttttgctcctaagtatgccaggttcacgttggcctttctgccatcaatgatgggattgggatccttgcaggccctttcggcagcagcccggtcagccatggtgacaaatccatagccccgggacttgcccgtctgccggtcggtgatgaccaccgcctcctcgatctcgccgaagacctcgaagtacttgcgcaagctggcgcggtggtgtggtagggcagccccccgacgaagatcttggtgtacgtcgtgn

SEQ ID NO: 16933 - DNA, 429 bp, Homo sapiens
cggacgcgtggggcccaggatggccttgaactcctgggctcaagtgatccacttgccttggccccccaaagtgctgggattacaggttgctatgaaaagaaaaatcatgatattaagcacatcttattgaactgctgaaaatgaaaagtaaagaaaaaattttggactgatcattccaagatggccaaataggaacagctccggtctacagcttccagtgtgatcgttgcagaagacgggtgatttctgcatttccaactgagattttagcatcgatattatggaagctatgcctggactcaacaacacgaacttctactcaccaaggctgatcttgtactaatactaagtgcccaacctgacaacagagaagatgatgacctttataagacaccattccttatgggcatcagccagtcccatggtgtt

SEQ ID NO: 16934 - DNA, 504 bp, Homo sapiens
  misc_feature (1)...(504): n = A,T,C or G
gagtnccgggngngtttcgactgagagcctcggtannactgaatatcctcgganaccgcccgcaancccgggtcgacccacgcgtccggtaacagtcacagatccctactctgcctggctaagacccgtggccgtcaaggactggggcggggtggattcaacaaaactgccagcttttatgtatcctcttcccttcccctcccttggtaaaggcacagatgttttgagaactttatttgcagagacacctgagaatcgatggctcagtctgctctggagccacagtctggcgtctgacccttcagtgcaggccagcctggcagctggaagcctcccccacgccgaggctttggagtgaacagcccgcttggctgtggcatctcagtcctatttttgagtttttttgtgggggtacaggagggggccttcaagctgtactgtgagcagacgcatggtattatcattcaaagcagtctccctcttatttgtaagtttacatttttn

SEQ ID NO: 16935 - DNA, 388 bp, Homo sapiens
  misc_feature (1)...(388): n = A,T,C or G
ctttaattgggtgttggtccaaaattaaaatttttgctgtctgtttttctctaccccattttgtggtaatttggcaacttgagctctcccaattattgtaatataaggacagacataatagtattctgtacccatagtaataattgcatcaagcttagatgagaaatttttttcatatactggcctttaaatcattaatggacaattggctataaaggtaggtctgttaactttctttgtgtgttcctgatggaattcaccatagccttacagcttttctcagaaggtaacttgttataagagaaatggcatttgcatgttccagagtcagaacctgtacagtatataaagcataaacaccttgaatttgattntagttcaccacatn

SEQ ID NO: 16936 - DNA, 490 bp, Homo sapiens
  misc_feature (1)...(490): n = A,T,C or G
agcgcgtaaaattgataccctgcggctcgagcaccggtatgaangggccgacccacgcgtccggattattgttaaatagatattgtggtttggggaagttgaattttttataggttaaatgtcattttagagatggggagagggattatactgcaggcagcttcagccatgttgtgaaactgataaaagcaacttagcaaggcttcttttcattattttttatgtttcacttataaagtcttaggtaactagtaggatagaaacactgtgtcccgagagtaaggagagaagctactattgattagagcctaacccaggttaactgcaagaagaggcgggatactttcagctttccatgtaactgtatgcataaagccaatgtagtccagtttctaagatcatgttccaagctaactgaatcccacttcaatacacactcatgaactcctgatggaacaataacaggcccaagcctgtggtatgatgtgct

SEQ ID NO: 16937 - DNA, 485 bp, Homo sapiens
  misc_feature (1)...(485): n = A,T,C or G
cgttggtggccggggggnnatgaatttgacacctgncgacnccttgaaatcctgggaagacccacgcgnncggnaggcagaacctgcttcacaaaggcccagangattgagtactttctggaggctgggagtgggtccctctgctggctgtttgtgggattcacatttcctgatggggcccagggaagtttagcagtggctcagggtcacagaggagctagggttgaaatcaggcctgtctgattccagagttcatactttttttttttttctttccttggaaacaaagtttcgttgtggtggcccaggctggagttaaggggggcaatttgggttaattgaaacctttgcctcccgggttaaggcgattttcctgcctcaccctcctaagaagctggaattacaggcgcccaccaccatgccacgctaatttttttgggttaagaagagacggagttcacttatgtgggccaggctggacttga

SEQ ID NO: 16938 - DNA, 439 bp, Homo sapiens
aactatatacttttaacatacattgggggaaaaatgatcttttctagaacacttaaaagaagtaatttcttgacaaagagcaaatttttgttacatgagtacttatgccaaaaagttccattcttgaagagaaataggtaagttttttcctccataaagcaatgaaatattgtcttttagtggattcctcagttcttcctgggaactattcataaaatagcttcagttgtaataatgggtctttaagttgttaatatttccaaagctcttagtaggtgctaaatagggttaaataaaaagttttgtctgcagtgagagtaatctttgttaaatctaaaaaactgctaagatactcagttcccttccgctcagatgctactgctgcacacctgaggaagtatgggtttaagcgcagactggcgtggaagcagcccagcgc

SEQ ID NO: 16939 - DNA, 436 bp, Homo sapiens
  misc_feature (1)...(436): n = A,T,C or G
tggagttggcatcttgtaactctcctttctcctttcttcccctttctctgcccgcctttcccatcctgctgtagacttcttgattgtcagtctgtgtcacatccagtgattgttttggtttctgttccctttctgactgcccaaggggctcagaaccccagcaatcccttcctttcactaccttcttttttgggggtagttggaagggactgaaattgtggggggaaggtaggaggcacatcaataaagaggaaaccaccaagctgattaaaaaaaaaaaaaaaaaaaaaaaaaaaaaaaaaaaaaaaaaaaaaaaaaannggggggggccttttttaaaaattttttggggggccccaattttcccggggggggaaaaataatttttttttttttttgggggggctaataaaacccccggggggtttttggggaa

SEQ ID NO: 16940 - DNA, 410 bp, Homo sapiens
ggaaaaggagattctcattgaacggatccagtccatcaaggaggagaaggaggacatcacctaccggctgccggagctggacccaaggggctcggacgaggagaacctggactcggagacgtcggccagcaccgagagcctgctggaggagcgggcgcctgctctcccttgccccggcgcgcccaccccgagccccctccccaccgtggccgcccctccacgacgaaggccgtcgtccttcgtaacggtcagagtgaagaccccccggcggacccccatcatgcccacgggcaacatcaagctcccaccaggcctgccctcccacctgcctcgctgggcaccgggtgcccgggaggcggctgccccagtgcggcgccgggagccacctgcccgccgcccggaccagatac

SEQ ID NO: 16941 - DNA, 490 bp, Homo sapiens
  misc_feature (1)...(490): n = A,T,C or G
ggtnaggggcccgagggagggtttaaaaattgatcgccgtgaggtaccgaactgataaccctgcggcagacccacgcgancggatcgggtatggacaaggcgctggctgtctcatcacagacacgggcgagcatctcggcctgcagttccaacagtccccaaagccggcacgctcagttaccaccagcaacccttccaaattcactgcgaagtttggagagtccgagaagtgccctcgatgtggcaagtcagtctatgctgctgagaaggttatgggaggtggcaagccttggcacaagacctgtttccgctgtgccatctgtgggaagagtctggagtccacaaatgtcactgacaaagatggggaactttattgcaaagtttgctatgccaaaaattttggccccacgggtattgggtttggaggccttacacaacaagtggaaaaaaaaaaaaaagggggggccgttttaaaggatccctcgggggc

SEQ ID NO: 16942 - DNA, 416 bp, Homo sapiens
cccacgcgtccggtgacgggacttatggcccatccagattacccatgataattcccttattccaagattcttaattatatctgaaaggaccttttttccaaataaggtactatcacaggttccagggagtaggatattgaatatcttttttggggagggggcaccatgcagctcactacactattcattgcacacaaatgaatttttcactttttaagatgcattcttggtgctcaaaccagatcgaagtttgtctctaaaagctattgtctgcacaggctgctgcatgctctgttgttaaatggatggacaggctattctaaattttggttgatacttttgctactatgggcaattaacttgaaaaaaataatcgatcccaactctgtgctctgatgtacctcttctgccccttt

SEQ ID NO: 16943 - DNA, 507 bp, Homo sapiens
  misc_feature (1)...(507): n = A,T,C or G
gtggggctannntttgatngcgtcggntccgcttttgaagccctgcggtaccggcccggaattcccgggcccacgcgtccgggagctcaggcaatataaagttctggttcactctcaggaactatagctgacccacttaagggagaagttacgggaagggagagatgcctcccgctcattgaatcagcatctccaggccctcctcactccggataagccagacaagtcccaggggcaggacctccaagaacagctggctgaggggtgtagactggcacagcaacttttccagaagctcagcccagaaaatgacgaagatgaggatgaagatgttcaagttgaggaggctgagaaagtactggaatcatctgcccccagggaggtgcagaaggctgaagaaagcaaagtccctgaggactcactggaggaatgtgccatcacttgttcaaatagccacggcccttgtgactccaaccagcctcacaagaacatcaacatcacctttgg

SEQ ID NO: 16944 - DNA, 436 bp, Homo sapiens
aaatcttgttactagaacaagaaatgtcagatggccattaacaagatgaccagatttgatctcagcctgatgaccctacaggtcgtgctatgatatggagtcctcatgggtaaagcaggaagagagtgggaaagagaaccaccccactctgtcttcatatttgcatttcatgtttaacctccggctggaaatagaaagcattcccttagagatgaggataaaagaaagtttcagattcaacagggggaagaaaatggagatttaatcctaaaactgtgacttggggaggtcagtcatttacagttagtcctgtgtctttcgacttctgtgattattaaccccactcactaccctgtttcagatgcatttggaataccaaagattaaatccttgacataagatctcatttgcagaaagcagattaaagaccatctga

SEQ ID NO: 16945 - DNA, 418 bp, Homo sapiens
  misc_feature (1)...(418): n = A,T,C or G
acgtgacctctgacaaatcccatcccaggagacggggtgaagctattccccacactctcctgtgaacactggagtcttgcaagacccagggagaacccactgcttttcccaggaggctccaggattaggaaatgtgtgtatttagtgaaaaataggtttgtagtgaaatagttactatttcatgaaagtagatatttttagaatttttgaaataccacagttgttttcctggattataaggaaaggcacattacatttagtcttcctttcgatataaaactctttgaagaaatatgatttttagaaatcagctacccattatagcacanaatcagccaaagcagaatttttaaaaattggcttttttaggattctttttctccccctcccatcttagtcttaccttgagggaacagtc

SEQ ID NO: 16946 - DNA, 417 bp, Homo sapiens
gcaaggcctcgtgcccctgcccagcccattcatggagccctgggccttcttggcttccatagatcctaagctcttgactgtagtttagccagacttgttttgctatcttataagcagttcagaattagggaatgctggttttgaagagcaaaggacaggtagtctagagagggtcgtctggcctgcttgctgggtctttgtaacccagcacttcctcttgccctcctggctttatgtttatggggagaggactcaatagctccaccccttctggcaccagatggggcttggttagtttgcaataagcaccttgcagaggttaaagccagcgggtccctagtcttaagcccagcctgcttgtgtgggctctggcctggcctggtggctggcccagggggcaacattgcttatagcttg

SEQ ID NO: 16947 - DNA, 434 bp, Homo sapiens
cccacgcgtccgcccacgcgtccgatcttcatctgagataggctaaaatgttttcagctaggaacaaatcttcctggtcgaaagttagtaggatatgcctgctctttggcctgatgaccaattttaacttagagctttttttttttaattttgcctgccccaagttttgggaaatttttcatattttaatttcaagcttatttgggagagataggaaggccatttccatgtatgcataataatcctgcaaagtacaggtcctttgtctaaaaaacattggaagcaggttaaatgctttgtaaactttgaaatatatggcctaatgtttaagcagaattggaaaagactaagatcggttaacaaataccaaccttttttcctttcttcctttcgggcttggaaaggggggggttgggcttggtttttgagtcttt

SEQ ID NO: 16948 - DNA, 489 bp, Homo sapiens
  misc_feature (1)...(489): n = A,T,C or G
agccgtaaaatgagaccctgcggatcgagcacggtttgtangggccgacccacgcgtccgtgaaaaaacactatatacaacaactcagatatggcttatgtgaagtcaatgttccgggaagatcttccaaagcaagggccactgtttgtggaagatataaagacaatggtgctgtgtaaacccaaacttttacccttaaaatctctgactctggaaaaactacagaaaatgcatcaagcagcacagaatacaattcgccaacaagaaatggcagaaaaggatcaacggcaaataacccactgaatgataactgagcactttagggaacaacctgccttatctactatttaacaataactagaaaatatgcttctgtgtgctgaaagtagtatgtgttatcaataaaattgatagtattcatagaaatacaaaaatatccaagattgatgaaacttgtattgagaatgtaaacactctggctcgtattgn

SEQ ID NO: 16949 - DNA, 419 bp, Homo sapiens
cggacgcgtgggtgagatgaacctgcaaaaaatacagatatccaggccccacccagcagcatctgaataagacactgagtgggggaggggagggggcggtggagggaggctgaaggtggatgcttactgctgcacccgcttcctcccccactgtcttcctagtagctcctttcctgggagaacgacgtcctgtcctcacagcatatctggagactcagtgtctgactcaacacgaccatgcccttgactctgagtggaatacatgggtcgcttgtctggaatccatgtgtgcccggtatcccatgagcttggcactagaattagcttttggagagagactggcaactgcagtctcttttggttcctcactaaactggagggacctgaacttttgccaggcaggcttgacgttctgtttg

SEQ ID NO: 16950 - DNA, 394 bp, Homo sapiens
  misc_feature (1)...(394): n = A,T,C or G
cggacgcgtgggtccaaaatggcgcgggtgctgtttgctgcagccgcgaatgccgtagatattcagggaaaattcagacttatgttcggccaggcgtgagccgtcatgcctggccgagttcagcttttattcacattttttccccgaagtgatttattcttcacagtagacagtcatgttctatagagtgttttgttttttctttaagaaaataatttacataaacagagattatggtaaacattttaaatcttaggctgttggttaaatttaatggtttaagcactgttgggttctctttaattaatatttgcagaaggagaacatatgtgtttcacctgatatgtatggtccagaaaaattacttaattctcaaaaatatgttgccttctcn

SEQ ID NO: 16951 - DNA, 403 bp, Homo sapiens
aagctagttttctttgcttgcttcttttctttcttttttccttcctttttttttttttttcccttggaaaacaggggggaatcttttaggggtttttttgggggaaccaacccccttttttggttttcggaaaccgggaacccccccctttggcttgggggatttaaaaaggtaaactttgaccggttttgaaaaccgaaaaattttggtaaatttttaaatttccttggccttaaaattccggtgggggacggcccataaagaagtttccccaccccaaagtaaatttttaggctggcttaaaaagtatataccgggccgcggagaaagggaacttcccatcctttttaaaaaaccaacaagttggcccagctagagggtgtttgaaaaaaaatgtatttgt

SEQ ID NO: 16952 - DNA, 430 bp, Homo sapiens
  misc_feature (1)...(430): n = A,T,C or G
tcttactctgttcttactcttaatcgattgtatggttgtgtataaaatttagcttgtaattttcctttggaattttaaagggaagttccattgttttctagtttcttctatgcttcctgcattgctcctgaagacctaagccattctgattcctgatttttcatgttatcagttcttttctttgtccctcagcattagacatttcacaataatgtgccttaatgtggtgaggtacttgatgctgagtacttgaggaatcctttccatcattgtgagtaattatgaacccctgcaatctggcaactacttttgcattattttgttgatgactntctcgcctccttttttcttccttagntttctcttgaaccttgttattcaaatattgaacattttggactgggcttccaatgtttttctccttttctat

SEQ ID NO: 16953 - DNA, 416 bp, Homo sapiens
gttggggcactccttgtgtttctcggctggattaatgttattgcagcactgaccgttcggagctgaagatggagatgcagcggccttggtcccagccgcagtatgggtctcgggacatgaggcaaccgtggcagcccccgccatagacctcacacaggtccaggggcacctggctcacctcccactgggagctcacatacagcttcctccgctcaacatccaacgacatggtctggatggcagccgcgcggcggaagggctggatctccatgatgttgaaagcgaagctgtgctcctgctcccccggtttcaccaccttgtggatagtgcccctgtctgttattaggttaagcacatgaaaggtctcctcgtggctgctagcatgcggtggacggacactctctgtgagtgggatt

SEQ ID NO: 16954 - DNA, 406 bp, Homo sapiens
catggacccccgtctgcccgcctgggcgctggtgctgctgggccctgccctggtgttcgcgttgggccccgcgcccaccccagagatgcgtgagaagttgtgcggccaccacttcgtacgcgcgctggtgcgcgtgtgcggcggcccccgctggtccaccgaagccaggaggcctgcggccggaggcgaccgtgagttgctacagcggctggagagacgacatctgctccatgggctggtgggcgacagtaatcttacgctgggacctggcctgcagcctctgccccagacctgtcaccatcaccgccaccaccgtgcagctggcaacaaccctgcacgctactgctgtctcagtgagtgtacccaacaagacctgctgaccctctgtccctactgattcctcctc

SEQ ID NO: 16955 - DNA, 481 bp, Homo sapiens
  misc_feature (1)...(481): n = A,T,C or G
tggagccnnnnnnnttttacctgagacctgctaacnctganacccttggaacgaccacgcgtncgatggacccccgtctgcccgcctgggcgctggtgctgctgggccctgccctggtgttcgcgttgggccccgcgcccaccccagagatgcgtgagaagttgtgcggccaccacttcgtacgcgcgctggtgcgcgtgtgcgggggcccccgctggtccaccgaagccaggaggcctgcggccggaggcgaccgtgagttgctacagtggctggagagacgacatctgctccatgggctggtggccgacagtaatctcacgctgggacctggcctgcagcccctgccccagacctctcaccatcaccgccaccaccgtgcagctgccaccaaccctgcacgctactgctgcctcagtggctgtacccaacaagacctgctgaccctctgtccctactgattcctccttgggtgcagcct

SEQ ID NO: 16956 - DNA, 414 bp, Homo sapiens
taccatctaatttttattttttttagagataatttttttttagaaatatgttttgaaacatgtgtttaaagaaaagtcaataatcacacagatggtatatggagaacaaaattcatgaaggaggaacatgaggttttataaacatataatgcttaattattcttggctttcaaagcatcttacgtacattaaaatatttgattcctacaaccacctcatgaagctcatagggattatgatccattttaaagatgaaaaaaaaaaaacagggttcaaagaacataatctatttgccagggtccacacaggtagtaaaaagtgagccagggttcagtgttaacactaaacttcacattgcaagagcttccccaacttttgtcagtaaatttttataggcgggatgggtttaggttt

SEQ ID NO: 16957 - DNA, 404 bp, Homo sapiens
cacaggacgtgagcagcagattgtaatccagtcttctggtggattaagcaaagatgatattgaaaatatgggtaaaaatgcagagaaatatgctgaagaagaccggcgaaagaaggaacgagttgaagcagttaatatggctgaaggaatcattcacgacacagaaaccaagatggaagaattcaaggaccaattacctgctgatgagtgcaacaagctgaaagaagagatttccaaaatgagggagctcctggctagaaaagacagcgaaacaggagaaaatattagacaggcagcatcctctcttcagcaggcatcactgaagctgttcgaaatggcatacaaaaagatggcatctgagcgagaaagctctggaagttctggcactggggaacaaaaggaag

SEQ ID NO: 16958 - DNA, 404 bp, Homo sapiens
gcgttggctgctagagcgatgccgggccggagttgcgtcgccttagtcctcctggctgccgccgtcagctgtgccgtcgcgcagcacgcgccgccgtggacagaggactgcagaaaatcaacctatcctccttcaggaccaacgtacagaggtgcagttccatggtacaccataaatcttgacttaccaccctacaaaagatggcatgaattgatgcttgacaaggcaccaatgctaaaggttatagtgaattctctgaagaatatgataaatacattcgtgccaagtggaaaagttatgcaggtggtggatgaaaaattgcctggcctacttggcaactttcctggcccttttgaagaggaaatgaagggtattgccgctgttactgatatacctttaggaga

SEQ ID NO: 16959 - DNA, 418 bp, Homo sapiens
tgaaaaaacactatatccaacaactcagatatggcagaagtgaagtcaatgttccgggaagttcttccaaagcaagggccactgtttgtggaagatataatgacaatggtgctgtgtaaacccaaacttttacccttaaaatctctgactctggaaaaactagagaaaatgcatcaagcagcacagaatacaattcgccaacaagaaatggcagaaaaggatcaacggcaaataacccactgaatgataactgagcactttagggaacaacctgccttatctactatttaacaataactagaaaatatgcttctgtgtgctgaaagtagtatgtgttatcaataaaattgatagtattcatagaaatacaaaaatatccaagattgatgaaatttgtattgtgaatgtaaacactctg

SEQ ID NO: 16960 - DNA, 399 bp, Homo sapiens
ctgctaatgaattctcttaaaaacatactgtattctgttgctgtgtgtttcattttaaattgagcattaagggaatgcagcatttaaatcagaactctgccaatgcttttatctagaggcgtgttgccatttttgtcttatatgaaatttctgtcccaagaaaggcaggattacatctttttttttttttttaccagtttgagtgggggaagggtatttttggttataaaaaaactcatataccttggggattttgaatgggaaaatattcttgaggggggaaaaatcatgatacttactgtacagtctcagccccataaaatgggatgttgggcctacccccgggatttaaaaaaatatgtcaaactataacctgcttgggaattgaaatgacttttt

SEQ ID NO: 16961 - DNA, 396 bp, Homo sapiens
accacgcgtccggcgagaatgaagactattctcagcattcagactgtcgacattccagaaagcgtccacattactctgacgggacgcacaggtatcgtgaagggccccataggaaccctgcggagggacttccgtcacatcaatgttgaactgaaccttcttggaaagaaaaaaaagaggctccggcctgacaaatggtggggcaacagaaaggagctggctaccgtgcggactattctgtatcgtgtacggaacatgatcaagggtgttacactgggcttccgttacaagatgaggtctgtgtatgctcacttccccatcaacgttgttatccaggagaatgggtctcttgttgaaatccgaaatttcttgggtgaaaaatacatccgcagggtt

SEQ ID NO: 16962 - DNA, 408 bp, Homo sapiens
  misc_feature (1)...(408): n = A,T,C or G
attgttttcattttcaagtatagattcatgtcagaatggccaacttaacgtgggtttctgtattccctggtgttgctcttaacctgaactcataatcagttgccatactgaggcaagagcactcagggtgaacatagtcaagttactttaaaagtgataaaagtgtttttccatggtgaaaccttcagtatttggctgaatgtaaagtatgttgaagtggtatattgatggtaagttgttaatcactaaccttgtttgcacttttgtacaccactgcttgcactaggatcttggtgtgaattttcaattgttttacagtgtatacagattattaaggataatttatataaagatgtttctgtttaactttgtgtgttttacaacaaagagctataatagatggttaan

SEQ ID NO: 16963 - DNA, 398 bp, Homo sapiens
cccacgcgtccgcggacgcgtgggggtatgtccccaaactcagatatgtatagcttatataggaaatcagcgttgtgtcattggcctgcctaaggaaactaccactcatgttgaggaaacatcatcaggaaagggaaaaggggtctcttggcatgattagcaatttgtcattttgactttccttttccactacctcacaggtcatagaggtcactttaaaaaaaaatcacaaaatgatttatatggaaataattctacgtgggggaaatcttctcctctttggtcttttagctccttgctttggtcttagatctcataatcccctgtacccctggttcagttatctgtccaagtcaagcaaatggtgccaaagtaaacatacttacattttaaatgcg

SEQ ID NO: 16964 - DNA, 400 bp, Homo sapiens
tcgaaaatataaaggtcaatcatttataatagaaacaccttgaccacaagcccttgattgaacattttataatatgtcatctacttattaaaacaaataatttcccttgggttggaggggaagtgatttcataaattaattagaaagccatctttagcatattgcttatgtctggatccatgtttctgaggaaaaagacattctcaggtgatgtatttttttcatgcattagtatgcatttttaaaaaataatgcatgtttctttaataattaattttcatcttctataagatgccatgtgaagaagttgtggaaatgtagaataaaaagctaaagctgccaaatttctgttgaactcttaaaaacagctcatgtttgtttgtcctctcgggttgtggcc

SEQ ID NO: 16965 - DNA, 482 bp, Homo sapiens
  misc_feature (1)...(482): n = A,T,C or G
tggaagtggaccgggggggttttnatttgagagccagatgaacngcntccgaaancccgggncgacccacgcgtccgaagaaggtatatgtgtatatacatttatatacgtgcacatgtatactcgtacatgtatgcacacatacccatacatgtatatgaactccgttctgatttcctctgaaattttgttgataccatctaaatacctctttgaatcaaaataacttaattttagctcattcctcaagagaaagagaaggatccccaaggaagaaaaactgttgtaccttctgtgattctcaaaccaaaatgtgatgcgcttctgttttgttatcttaaattgttgtatcatatctttctgaaaccattctgaattaagttgaaattttcaacatttatactttaactgttctaaatttaagcctacatgtaaatcttttttggggggaaggtaacttgaaaagtttaacttgaaaattt

SEQ ID NO: 16966 - DNA, 414 bp, Homo sapiens
  misc_feature (1)...(414): n = A,T,C or G
nnncccacgcgtccgggggtgggggtgagcagnctgtcctgttcttctgctcataacctgacaaaatgccaaactagtaagcaggatagctgataccacggctatgagggagtaggctctgagagggcacagacttgtggagctgggcgtctggatcaaaactgctttgggatggaacctcgagccctagcagtgaagaagattccatttcttgtccaggggatttaaaagagttttctgctttgagagagaaatagagagtttagaaagcaattgctcttgggaaagctatacacagctctgttttgtcaatgacctttgttgtaagtctcccaacgtcctattaagagccacagcaggtgaggcatttggtgcagcaggaaacatggggactgcctaagctcgaatctgtgg

SEQ ID NO: 16967 - DNA, 414 bp, Homo sapiens
  misc_feature (1)...(414): n = A,T,C or G
cccacgcgtccgcccacgcgtccgagataaaaaaaaattttaaaaaaaaaaaaaaaaaaaaaggggataaaaaagggggagtttatatagaggggaaaaagaggggggatggataatgatggtggtagtggagggggggggggggggttttttgtgtgggggggggggggggtttttttgtgggggggggggggatgttttttttttttggggggggggggggtttttttttggggggggggtgtttggggggggttttttttttttggggggggttgtggggggggaaagttttttttgtttggtggggggggggtgggggtaggtttgtttggggggggggggggngggggnggngggggtgttttgtgggggggtgaaaaaggggggngggaagnttttttgttggggttg

SEQ ID NO: 16968 - DNA, 413 bp, Homo sapiens
aacggtccccgccgttttgaggcgaggcctggtctgttttttctgttcgaggagggcccttgtattgatgagagcgcagaggacgcatggccgctgtaggcgcaagtaacgaagctagggtgcggttgggaccgcggctgagctttttccgggtccctggtgtaccagctgaactttgatcagaccctgaggaatgtagataaggctggcacctgggccccccgggagctggtgctggtggtccaggtgcataaccggcccgaatacctcagactgctgctggactcacttcgaaaagcccagggaattgacaacgtcctcgtcatctttagccatgacttctggtcgaccgagatcaatcagctgatcgccggggtgaatttctgtccgagtctgcaggtgttctttccttg

SEQ ID NO: 16969 - DNA, 400 bp, Homo sapiens
  misc_feature (1)...(400): n = A,T,C or G
cggacgcgtggggtctcatcctgttgcccaggttggagtacagtgttgcgttctcggctcactgcaacctccgcctcccgggttcaggcaattcttctgcctcggcctcctgggtggctgggattgcaggcacatgctaccatgccccagtaattgtatttttggtagggacggggtttcgccatgttggccaggctggtctcaagctcctgacctcaggtgatctgtccaccttagcctccaaaagtgctgagattacagagcctgggtgacaaagcaagactctgtctcaaaaaaaaaatttttgtttctttaatcttaataagtgttttatgtaattttaagtaaaatgtacacaaatgaagaaatagaaaatgaatttactatttagtagtaaatn

SEQ ID NO: 16970 - DNA, 207 bp, Homo sapiens
tttgtattgaataaaaacatcttcatgtgggctggggtagaaactggtgtctgctctggtgtgatctgaaaaggcgtcttcactgctttatctcatgatgcttgcttgtaaaacttgattttagtttttcatttctcaaataggaatactacctttgaattcaataaaattcactgcaggatagaccagttaaaaaaaaaaaaaagg

SEQ ID NO: 16971 - DNA, 408 bp, Homo sapiens
  misc_feature (1)...(408): n = A,T,C or G
cccacgcgtccgcccacgcgtccgcccacgcgtccgcccacgcgtccggtcagtctcgccagctgccggtctttcgggggctccgtaactttctatccgtccgcgtcagcgccttgccaccctcatctccaatatgcctggtccgacccccagtggcactaacgtgggatcctcagggcgctctcccagcaaagcagtggccgcccgggcggcgggatccactgtccggcagaggaaaaatgccagctgtgggacaaggagtgcaggccgcacaacctcggcaggcaccggggggatgtggcgattctacacagaagattcacctgggctcaaagttggccctgttccagtattgggtatgagtcttctgttcatcgcttctgtatttatgttgcacatttggggcan

SEQ ID NO: 16972 - DNA, 408 bp, Homo sapiens
  misc_feature (1)...(408): n = A,T,C or G
cccacgcgtccgtccttttccttctctttctcattgtctttatgctttctatttctcttttactaaatcctgcttttcagggtaggttttaaaaactcatccacaaataggaatgggaagttgaaaataagtataatcattttcctagggagcctcacttctaatataattgctatcgactactcatctgctagagagggttaaaaaaggcccctgaattggctggaccctgattcaaaatgctctcagaggtctgaccccactgtaaagtcctgtagttctaattgtgcaatttcagcctccagtgagggtagaagaggcaagggagccttgcaggggtctctgaaatcagataggcagttttttatgtcatttacttagatggcagnttaaaagagtgacaaaaat

SEQ ID NO: 16973 - DNA, 407 bp, Homo sapiens
aaaaagacaaaaacttactgttttaccagtgttgttcctaatctcttactgtgcctgatttacaaattaaactttagcataggtatgtatgtgtaggtacgtatgttgtactatccacagtttgagatatgcagtggggttcttggagagtataccccatggatagagtgggtgatactgtagtcaaaaggagaactacctaaggtcttgagactggagaagtggtaaacgagagaaagtatgtttcttcagcataagtcacaaaaatagttggtggctatctgtgcttacaaaagcagtgggtagcagtcatggagtcaactgatgaaacttgcgtgtaaatgcatcttagtgtaataacctcacctaattttttaagccttaattttaaaatttgtggacacaag

SEQ ID NO: 16974 - DNA, 402 bp, Homo sapiens
ccaagagacccgacgcttgcttcatggcctacacgttcgagagagagtcttcgggagaggaggaggagtagggccgcctcggggctgggcatccggcccctggggccaccccttgtcagccgggtgggtaggaaccgtagactcgctcatctcgcctgggtttgtccgcatgttgtaatcgtgcaaataaacgctcactccgaattagcggtgtatttcttgaagtttaatattgtgtttgtgatactgaagtatttgctttaattctaaataaaaatttatattttacttttttaaaaaaaaaaaaaaaaaaaggggcggccgttttaaaggatccttgggggggcccaagtttacccgggcatgcaacggaatagttttttccttatagggaggcgaatt

SEQ ID NO: 16975 - DNA, 436 bp, Homo sapiens
cggacgcgtgggtaatggggttggaaagaaccttacagagcatattacctgataaactggagtgggtttgggagaacaaactaataggattattgtgtctcctagttggtacctgggagcaattgacatgcccccttcagaaccttaactgttagtagcagtggctgtaacaacacaaaccagtgaccagagataacagcttttaggccaagctggcctgacggtatggctgcaggaagtgactgagcagtagcggtactcagccagaccaagacggagagggaagagtccacagctttctggaagctaaggcattctggtggtagaaaagtgtgccccaagccttcatggacgagttataggtcttaagattagtctcctcttgtttggattccatacttgctaaataacctgataataacctgggtttccatgt

SEQ ID NO: 16976 - DNA, 503 bp, Homo sapiens
  misc_feature (1)...(503): n = A,T,C or G
agagtgccgggngngttttcactgaagccctcggaccgttgatgaccctcgggacgacccacgcgtccgcggagaagctggtgcgggcgctgcagactccgctgatgaggctgtgcgcctggtacctgtatggagagaagcaccgcggctacgcgctgaaccccgtggccaacttccacctgcagaacggggcggtgctgtggcgcatcaactggatggcggatgtgagcctcagaggcatcaccggctcctgcggcctgatggccaactaccgctacttcctggaggagacgggccccaacagcacctcctacctcggctccaagatcatcaaagcctctgagcaggtcctcagcctagtggcccagtttcaaaagaacagcaagctctgacagtaaacctctcctaaagcacagggccccggctaagaaaacgatcattttcaggagggccgggagttatgtatctgaagcagctttccaagcaaagccaaagttgactgg

SEQ ID NO: 16977 - DNA, 419 bp, Homo sapiens
attactgcattgaaaaggaaaacctgtctgagaaaatgcctgacagtttaatttaaaactatggtgtaagtctttgacaagaaaaaaaaaacaaacaaacacttctttccatcagtaacactggcaatcttcctgttaaccactctccttagggatggtatctgaaacaacaatggtcaccctcttgagattcgttttaagggtaattccataatgagcagaggtgtacgcgaaattgtgttatgactgatagccttcagctacaaaaagataggactgacctggtttaaagggttctattttgtaaatcattccatttgagtctttctgatgaacttggctatactgaaatctgttattttagggagctccaaaatgagcaaagctaggcctgattagagtagagtgactattaaaaa

SEQ ID NO: 16978 - DNA, 503 bp, Homo sapiens
  misc_feature (1)...(503): n = A,T,C or G
gaggccgaggggagttttccctgatcgctgtcgtaccgctgagaaccctcgggacgacccacgcgtccgccgatctggaacaacccacctccagcttccatgttgggacatgttttgcaaatgctcagaggggaacatattttgacggaaccggttttgccaaagcagttggtggattcaaagtgggattggaccttcttgtagaatttgaattccgcacaactacaacgactggagttcttctggggatcagtagtcaaaaaatggatggaatgggtattgaaatgattgatgaaaagttgatgtttcatgtggacaatggtgcgggcagattcactgctgtctatgatgctggggttccagggcatttgtgtgatggacaatggcataaagtcactgccaacaagatcaaacaccgcattgagctcacagtcgatgggaaccaggtggagcccaaagcccaaacccagcatctacatcagctgacacaaatgaccctgtgn

SEQ ID NO: 16979 - DNA, 419 bp, Homo sapiens
aacaaaaatcactctcaattaagagctacttttctagtggaaaatgtacccagtatagtgggagcagagtataacggaaaatggaccctgtctttctggcagcgtcaggatactggatgaaggttatcagaaacattcactgactatctgaaagcatcacagtgggatgtcagcggagacgtggctgtctcaggagattggacggaggtgtgctcttctttaagaaaacccatcacaaaacaaagcattcctacaaaggaggcactgaaacgatttcctgattgaagaaagtaatcactattaagtctcctggaatattgttctctcgtggtgtgtttaattacattttcatgtttaagaattatataacccacaactttccagagaagagctaaatatactactgtgaaagacaacgg

SEQ ID NO: 16980 - DNA, 420 bp, Homo sapiens
tctttccgcgccgccacaatggtgcgcatgaatgtcctggcagatgctctcaagagtatcaacaatgccgaaaagagaggcaaacgccaggtgcttattaggccgtgctccaaagtcatcgtccggtttctcactgtgatgatgaagcatggttacattggcgaatttgaaatcattgatgaccacagagctgggaaaattgttgtgaacctcacaggcaggctaaacaagtgtggggtgatcagccccagatttgacgtgcaactcaaagacctggaaaaatggcagaataatctgcttccatcccgccagtttggtttcattgtactgacaacctcagctggcatcatggaccatgaagaagcaagcgaaaacacacaggagggaaaatcctgggattctttttctagggatgtaata

SEQ ID NO: 16981 - DNA, 499 bp, Homo sapiens
  misc_feature (1)...(499): n = A,T,C or G
ggggccggnnnttttccctgagagcctctgaccactgagaaccctcgggacgacccacgcgtncgagggaaccgggggtggagaaaggaaaagaaggttgagacctccaaaacatagttttctgttctatgggaatttttgctctcattatctgggaagtgttcttaaaaataagaattaatagcaaagatgcagcaaagctctgaggatgcatttgcctgatatttttttctttgctcttgtgcttttgtatgtagttataaatactgtagatttttttttttgtgattttttgccaaagttgttgttctatttatacattttaatgccttaagacattttttcaatatcacaaaaagattttactgcgtattttgcaaagaaaaaaagctcactacctttagcttgcacatacttgcaaagttaattaaaaggctttttgttttaaggggattttgtaaaatatccatataaataatgtatttatctttcgaatttg

SEQ ID NO: 16982 - DNA, 420 bp, Homo sapiens
  misc_feature (1)...(420): n = A,T,C or G
ctcgggtaggacacatctacctaaatcaggattcccattcccccctcgaccaggagaccaccctgaggaacagggttcgcattgctgagacctggctggggtcattcaaagaaaccttctacaagcatagcccagaggccttctccttgagcaaggctgagaagccagactgcatggaacgcttgcagctgcaaaggagactgggttgtcggacattccactggtttctggctaatgtctaccctgagctgtacccatccgaacccaggcccagtttctctggaaagctccacaacactggacttgggctctgtgcagactgccaggcagaaggggacatcctgggctgtcccatggtgttggctcctgcagtgacagccggcagcaacagtacctgcagcacaccagcaggaaggagan

SEQ ID NO: 16983 - DNA, 482 bp, Homo sapiens
  misc_feature (1)...(482): n = A,T,C or G
agccaatgtgnttagaattcgtagagtcntcggcaccgncncggaannnccgggncgacccacgcgnnnncgacatagacttcaatgattttatttccagcttcaaactaaacatttctaaccttttaaataaatggggaatttagtttcatgagaatttttactgacaactaataaacactgtatgtgtacatattcatatacactgtggactggagaaagtcagtatggaaataaatttcactgagatccagaaagtagcaatataggacttttaggggtatgtattagtgtaaataatatatgtgcagtctaggctaatcattttaattaaaaacaaataagcatacttttttgctttaaaaatatgccctcaaaatggtgggggataaaatgtaagatattctttagctttaattatttttccatcttattcaagtcagagcacttttttttaaatagcaatacaacaggcaaagagt

SEQ ID NO: 16984 - DNA, 402 bp, Homo sapiens
cctcagcctcccaaagtgttgggattacaggcatgatccaccatgcccagctgctcctttattttaatccctaaatataatccctaaatatagttatatttcatacttagcttgcttttaaaaagttttctctgtagaaaattttaatcattcataccctttacctttaggtttttctttctatacattcagtcaggcactgggatcatctgtttacaggcattatatttatttggcactcctggaacaagtatatctaacccattcttgatttttggactattcaggtgaactatttgaggggtatggggtctagaagttaaaagatacgcatgtcttctgttcttttcccgtatcaattcattccttcatctctttgccaagatgttttcctttcagggc

SEQ ID NO: 16985 - DNA, 398 bp, Homo sapiens
  misc_feature (1)...(398): n = A,T,C or G
tcgcccacgcgtncgtgctttgcaaaaatggtttcacgtttgcttaaatgcttcatcacagtcacattcaaaatagtgactctaaacaaagaagaaagcagcactgtcatcagatgcatgataaaccaaaatatgaaaatgggaaatgtttaattaacctagtacttgggtgggttaagtacatgggtgaattttatatgtgattcttgctttgccttgttttgttcagactaactgcttatagccttagaaagcctcttacaaaattaaaaaaaaaatagatgtgcattcagcttttaagaatggaatcatccaaaggaattcctttttttgaggtttggatgttgcagctagtaaaggatatttttgctctgttcagcacttctaaaaattgctgg

SEQ ID NO: 16986 - DNA, 402 bp, Homo sapiens
aatttagaaggtgtttgactttacgatgcaaattatactttgacaacttactatctcagcgggcctattgtggaaaaatgaattttgaccacaagaatgaaactctaagtatatcagttcagcctggagaaggaaataaagctgctttcaatgacatgagagccttgtctggaggtgaacgttctttctccacagtgtgttttattctttccctgtggtccatcgcagaatctcctttcagatgcctggatgaatttgatgtctacatggatatggttaataggagaattgccatggacttgatactgaagatggcagattcccagcgttttagacagtttatcttgctcacacctcaaagcatgagttcacttccatccagtaaactgataagaattctcc

SEQ ID NO: 16987 - DNA, 392 bp, Homo sapiens
gttgttctctccagtaaaatttgaaagagtgtgagaagatctttttttttttttttttgggttttcccccctcctcccgccaaaaaaaccgggggggggagaacccacgcccggggccggaaaaaccaacagaacccaaaccgacttttggttcggaaaaaggaacctttttttctgggaaacctttaaaaagccccctttggccttgaaattcctcaaattcaataaaaaggaacagggggggggtttttttttttttttcattaataggggggggggcccccccaaaaccccaaaaatttttataaaaagccccccttaaaagggaggggccccataaaattcttttttacaaggcccaaagttaaaattttgggtgaaaacaaaccccc

SEQ ID NO: 16988 - DNA, 404 bp, Homo sapiens
taattgacaacttaatcatttcacatgaattaaaaggaaacataaatgtctctgaatattgtgtggcgacttactgcgggtttttagcccccagtttaaagagttcaaaagtgcgcacgaatgtcactgtgaagctgagagtacaagacacctacttggattgtggaaccctgcagtatcgggaggaccccacattcacggggtatcgggtggaatccgaggtggacacagaactggaagtgaaaattcaaaaagaaaatgacaacttcaacatttccaaaaaagacattgaacttactctcttccatggggaaaatgggcacttaacttgcagctttgaaaatattactagaaatcaagatcttaccaccatcctttgcaaaattaaaggcatcaagactgcg

SEQ ID NO: 16989 - DNA, 480 bp, Homo sapiens
  misc_feature (1)...(480): n = A,T,C or G
nttgaagccctcggaccgcccgtagttcgcgtcgacccacgcgtccgcggggcggcaggcttctcgagctccgggcccgcggcattctcgggcgctgttctgcaggccgcgaccggcatgtacgagcaactcaagggcgagtggaaccgtaaaagccccaatcttagcaagtgcggggaagagctgggtcgactcaagctagttcttctggagctcaacttcttgccaaccacagggaccaagctgaccaaacagcagctaattctggcccgtgacatactggagatcggggcccaatggagcatcctacgcaaggacatcccctccttcgagcgctacatggcccagctcaaatgctactactttgattacaaggagcagctccccgagtcagcctatatgcaccagctcttgggcctcaacctcctcttcctgctgtcccagaaccgggtggctgagttccacacggagttggagcgg

SEQ ID NO: 16990 - DNA, 397 bp, Homo sapiens
  misc_feature (1)...(397): n = A,T,C or G
aagaattttactactctaaaaatcccttgtgcttcttcttttcatccctcttttctcaagaatccctggaaagtactgggcattttaattttggcttagttttcctcttaccagaatgtaatatagttggaattatacagcatgtggccttttcaggatggtttatttcacttagcattatgctgttaacctttcatccatgactttccacagttgatagctgtcttagttgtctggctgctataacaaaataccctaaaatgagtaacttatgaacaatagaaattaacttcccacagttctggagactgggaagtctaaatcaaggcatcggcagatctgatgtctgttgagggactgctttcccatatatggctgactttttacggtgacttan

SEQ ID NO: 16991 - DNA, 402 bp, Homo sapiens
  misc_feature (1)...(402): n = A,T,C or G
cagagcaagactctgtcttatacaaaagaaaaaaagtttctaattttaacgtctgcaaaacttggtttggggaaattgtgtgtgtgtgtgtgtgtgtatttggctaaaaaattatactgccaaaattactgattataaatacttgactacactgattgatgggacaaaatgattaaagtattttcagggatcttattccatatgtcaccaccaaagatttctacagtgttataaagtatataaatattccaaatttctgtggntaaatatttttttcttttttttccttttttagaataacacagtctgtgctttccaaaaatgcttgaacttttatgttgttaagaaatatataatgatatcttacattaagcatgagtctaatttgtattaattgggatg

SEQ ID NO: 16992 - DNA, 474 bp, Homo sapiens
  misc_feature (1)...(474): n = A,T,C or G
cgcgatggaaatgatacctagttgatantcgtccggaanncccgggncgacccacgcgtgcgaataattagagcattttggctttgtagggtttgttataatttttaataaacagtttttgggggaaataattttttagaataagtacacttgagacaactagtcttttttgttataatgtgatttattttttctaaatatttccaaaactgtttttttgaaaaaatatactacagtatgtactgcagcttatcatagggtaaaagctgtcacttcaagccaaacctgcagctaaaaatagatatcctgttgttagagtgaaaaacatttgcttagagcataattcattagcatcttttgcttaaataagatgcttggaagttaacctttgattcagatatttttaagagaagtagaatatggtttctctgataacataacagtcctataatttgcatttataagatttggaat

SEQ ID NO: 16993 - DNA, 403 bp, Homo sapiens
tccttaggatagaagtgagtctctatccctgctacaccagagagctgaagagagatgtggtctggttccatccatacttgctggcatcctttgttaagccttctgagggcagtcttctttgaggtagaccttggaggcctgacatcgaagacctgtgtgttttattttcataaaagtatatatccttggtctaaagtgtcttcttttaatataacactagtaaaaatgacatggtatgaccagcactgagtgctatagaaccacacatgtgtacatgttctggatgccaaatgagactgtgtgtaaatgactaagtgtagataactagaaattagataggggtcatcaggcgtttcggtatacctataaccagcactcggaattcctgacactgtttacttgt

SEQ ID NO: 16994 - DNA, 413 bp, Homo sapiens
aacccctcttgccactgccttctaccttgtgtgaaacctgaatcctaataatgaattaatagctccctgttcactggctgaagagacaatcccaataagcatatataaggggagggtaaaaacatgggtgggatagcttactgtatatgtattcccttggattatgttaaagctggaacatttgatattttttcctttatttatgaaaaaatatgaacctattttcatttgtacaagggaattgctttttaaagcggggcaccttagggtggctttaattgtataagtcaagcacatgtaataaattcaaaacctgcagttaacaggatattagacatcaatcctggtaaccagatattaaagaatctctttaaaaaagactgaacatgtttacaggtttgaattaggctaag

SEQ ID NO: 16995 - DNA, 473 bp, Homo sapiens
  misc_feature (1)...(473): n = A,T,C or G
agcgatccatatggagcgtagtganantcgtccggaanncccggnncgacccacgcgtgcggccaccttctccgccgccgcgcgcccctcggagtttcgcgccccaccatgcccaacatcgtgctgttcagcggcagctcgcatcaggacctatcccagcgcgtggccgaccgcctgggcctggagctgggcaaggtggtcacgaagaagttcagcaaccaggagaccagcgtggagattggtgaaagcgtgagaggggaagatgtctacatcatccagagcggctgcggggaaattaacgacaacctgatggaactcctcatcatgatcaatgcctgcaagattgcgtcatcatccagagtaactgccgtgatcccgtgtttcccatacgcccgacaagataaaaaggacaagagtcgtgccccaacttctgctaaacttgtggccaatatgctgtcggtggctgacgcgga

SEQ ID NO: 16996 - DNA, 399 bp, Homo sapiens
aaaataccacaatgatttcagaggagactctgcaaaatcgtcccttgtggagaatgcaggcaacatggaatactacgaatgaaatcacatcactgtatcttttacatcaatagcctcaccactaatatatcttgtatctaggggtctataatggctgaaaccactacacccatactcgtttctgattcagaatcagtgtgggctcctgcagtgggcgcgggtcacggctgactccaacttccaatacaacagccatcactagcacagtgtttttttgtttaaccaacgtagttgtattagtagttctataaagagaactgcttttaacattagggactgggagcagtccatgggataaaaaggaaagtgttttctcacgagaaaacatgtcaggaaaag

SEQ ID NO: 16997 - DNA, 478 bp, Homo sapiens
  misc_feature (1)...(478): n = A,T,C or G
ccccccttttagggtacctanaaanncagcnntgcatcgnaaanccnccnaaattnngggncgacccacgcgtccggactagttctaggatggagttatcataccgtacaggtttagggatgggactggaaatcaaatgttacagggcatggaaaatggaacatttgcaaaatacaaatattttacccatgtcatgatcaataagacagatatgctaatgataaccagacgtggtgtattgtttgtaacaaagggaacatttggacaactcacgtgtgagtggcagtatagttttgatgaatttaccaaagagccattcattgttcatgggagaagattgcgcattgaagcaaaggaacgagtgaagtctgtatttcatgccagagagtttggaaaaataattaacttcaagaccccagaggatgccaggtggatcctcacaaagctacaagaagcaagagaaccttctccgagcctt

SEQ ID NO: 16998 - DNA, 410 bp, Homo sapiens
ccgtcctcgcgccccttttcctacactttcctcttctctccgaccggaggagccgctctttccgcgcggtgcgttctggggcccgaggtcgagcccgccgctgccgccgtcgcctgagggaagcgagaagaggccgcgaccggagagaaaaagcggagtcgccaccggagagaagtcgactccctagcagcagccgccgccagagaggcccgcccaccagttcgcccgtccccctgccccgttcacaatgcagcctgcttctgcaaagtggtacgatcgaagggactatgtcttcattgaattttgtgttgaagacagtaaggatgttaatgtaaattttgaaaaatccaaacttacattcagttgtctcggaggaagtgataattttaagcatttaaatgaaattgatg

SEQ ID NO: 16999 - DNA, 401 bp, Homo sapiens
atgtactcacatccagtgggtggaggccaggaatgctgctaagcaccctgcaatgcacagcagcccccatgacaaaaaactggacacaccaaaatgtcaatagagccgaggatgagaaaatccggccaaaagaaatggaatcaaaaaagaaaattgtttgcaacttcatagagataccctcaatgaataaaaccacatatggtttgacttctgtccctgttcctatgctgaagggaaacttgtacaactttccctttttaaagtaaagagataccaccccactcttttttttttttaaacacagtaacagaggggccccaagttaaaaccagttctccagcctaaggactccacctgggggtcctctctggaattaaatgaagttgaggttttattttgtg

SEQ ID NO: 17000 - DNA, 394 bp, Homo sapiens
tgtttgggcttatagaatttctttttaggaattacttttaatgtatctaccacttattttgtaaagtggcagctgacagagactatactcattcattcagtaacttttttgcttttttgctttttttttgctttttttgagacagtcactcaggctggagtgccatggcacgatctcggttcactgcaacttccacctcctggtttcaagggatccttgtgcctcagcctccctagtagctgggattacaggtgtgcaccaccatgcccagctaatttttgtatttttagtaaagatgggttttttccacgttggtaaggctggtctcgaactcctgacctcaagtgatccgcccgccttatcctcccaaagcgctgtcaggaggggcattctg

SEQ ID NO: 17001 - DNA, 401 bp, Homo sapiens
tggggatatattcaggggtccccaggaactcctcggttcagagaccaagtggtggccttggaaagcagatgacaggctttggtgtgcctgtgaccacctcattgctcccatattatcccccatttttactagagacggggttttagtagagacttggcctcccagaacccccttcctctgctcctccatgaatgacaattccaggcctcccctacctcatgtcctctcatttgggggattgctccgtgctgtccctttctctcatggccgaagttgggaagtgagaaaccatgtttttaacttgtggctgcttttgctgctgctgctcctccgtatctggctgtatgggtggagaacccaccccctgcccaccacaggggtctccttccatgccactcagg

SEQ ID NO: 17002 - DNA, 430 bp, Homo sapiens
tgactgaaccactggaattgctcaagtctaaacctgcttttctttttttttcaggctctgtgtgctccgggatggagcaggtgtgcagagggtgagaacccagctctgggaccaagtcacttgcttccttacttagcaagactatcgacttgagcaaacttggacctgggatgaggatgtctgtgggcctctcgctgctgctgcccctctgggggaggacctttctcctcctgctctctgtggttatggctcagtcccactggcccagtgaaccctcagaggctgtcagggactgggaaaaccagcttgaggcatccatgcactcagtgctctcagacctccacgaggctgttcccacagtggttggcattcctgatggcacggctgtcgtcgggcgctcatttcgagtgaccattccaacagatttgat

SEQ ID NO: 17003 - DNA, 483 bp, Homo sapiens
  misc_feature (1)...(483): n = A,T,C or G
agcgcgtaaaatgagcccctcggctgacaccgtatttanggccgacccacgcgtccggacattttaaaaagtcagggttttattttaaagtaggtaactagagttggcaggacagaaagatggacatcttcttcatggtgatttcaatataaatgttccaattttcatgattgagaatgtctctaaagatcaatcagtagtgttagttcctttttttaaaaaaagaagggaagaaaatcatttaggaacttatgttgcagtgttattaattgagcattgattttgtgcaagaaactgtgtttcttgctaaatttgttacactttaaatcccaccagactgtaagcttcaaaagggcagggaatgtgtttaatccaccgccataatctcattgttgagcataatttttgacgcagaatagtaacttaataaatatttatcaagtnncanannnnnnnntttcctcctaannaaaaccaactttc

SEQ ID NO: 17004 - DNA, 483 bp, Homo sapiens
  misc_feature (1)...(483): n = A,T,C or G
aggggtaacctgaggcttcgnctgaccgcntgggaacccnccggaatcccggtcgaccacgcgtccggcctgagagaggggaagagagagacctcggacctgcatgtcaagatggattttccccttttatctctgccgtcctccactccctttttgtaactcccttacagcccccagacccttcttgaaacgagagccagcaagctgagcacagaccagcagcgacctcccttccagcccccagaaagctcggtcacttgagtgttttctagaatcctggggtgctcccgggccgctctcagagaagtggcaggtttcacgttcagccgtgtggcggatcgtgtggcttccaaagccttttacagcccccgccccccatcccgtggtctgtctgcaggaactctcccgtctgtgagaagcctctttccgagtcgacctcccggccaccccggccctgtgcctgctcggaagagctcactgcca

SEQ ID NO: 17005 - DNA, 477 bp, Homo sapiens
  misc_feature (1)...(477): n = A,T,C or G
aggggtaaactgaagctgcgactgacaccgttgtaagnnccaccacgcgtgcggtgggaagcggttgggaaagtgtcggtttatcttttcgccccttgcgttcttgccgcggcttgcctggggaggtaaagcgcgagtgcgagagctcggcaaccctgccgactcagccggaaccggctcccggcccgaggggcgtggtgtcctggtgctccgactccttccgcaggctccttgggacccgcggttccgggagtcccttgctcagggtccctttcctgcagtgaggcgccgtccgccttccctgtgtccccgcagacccccatcatgggcaataccagcagtgagcgcgccgcgctggagcggcatggtggccataagacgccccggagggacagctcggtgggcaccaaggacggggacaggcccaagatcctgatggacagccccgaagacgccgacctcttccacttcgaggaa

SEQ ID NO: 17006 - DNA, 487 bp, Homo sapiens
  misc_feature (1)...(487): n = A,T,C or G
aggcgtaaccttgatnccgtcggatcgacanccgtatgaacgggccgacccacgcgtccgcgagaaaccatcctggaccccaaccttcaggcaacactttaagggttcggcaatcactgtcacccccggacagcagaacgctggcatcagctatcttagctcctcctctcccctctcctctttcagagcactggctctccagccccaggaggagaacaggagggaggaggagatgaaagaggagggacaggttcttggtgctgtacctttgagaacttcctaggaaggaatggtggggtggcgtttgggaacttgtgccccctaaacacatttactggcctcctctaatgactttggggaaaagatgattctgggtctttcccttgacttcttgtttcaattacaaactcctgggctttctggggaggggttcagaaaacatcaaaacactgcagcagttcctaaatgattctcacaagcaaccctg

SEQ ID NO: 17007 - DNA, 438 bp, Homo sapiens
caccgtgtcaacctgatggggagatatggggacaataaccacagtcagggcgttaactggttccactggaagggccacgaacactcaatccagtttgctgagatgaagctgagaccaagcaacttcagaaatcttgaaggcaggcgcaaacgggcataaattccagggaccactgggtgagagaggaataaggcccagagcgaggaaaggattttaccaaagcatcaatacaaccagcccaaccatcggtccacacctgggcatttggtgagagtcaaagctgaccatggatccctggggccaacggcaacagcatgggcctcacctcctctgtgatttctttctttgcaccaaagacatcagtctccaacatgtttctgttttgttgtttgattcagcaaaaatctcccagtgacaacatcgcaatagttctttact

SEQ ID NO: 17008 - DNA, 484 bp, Homo sapiens
  misc_feature (1)...(484): n = A,T,C or G
aagtgtaacctgaggcttgggctgacaccatctgaaggnccgacccacgcgtccggtcttgctgtgttgcccaggctggactgcagttgtgcaatcttggctcactgtaacctctgcctcctggattcaagcaattctcatgcttcagcctcccgagtagctgggactacaggtgcatgcagccatgcctgggctggttttgaatgaaacgacctgaactgtcaaaaaaaaaaaaaaacaaaaaaaaaaaaaaaaaaaaaaaaaaaggggggggcctttttaaaaaatttttgggggggccaaaatttaagggggggggggaaaaaaattttttttttttttgggggggggaaaaaaaacaccctgggggttttttgagaaaaaccctttttttggggggggaacaaaggggggcccccccccccacagtataaaaggtgttgggggaaaaaaaatttttttgaggtgtgtggggtccaaacct

SEQ ID NO: 17009 - DNA, 500 bp, Homo sapiens
  misc_feature (1)...(500): n = A,T,C or G
gaaacgggggccggggggggattttgaattgaaattctcgtatnnccccttataccccatctgaacgcnnccgaannnccgggncgacccacgcgnccgagagaccccgggngggtgagcgctggcttctcaaacggccgaagntgcctcttttaggaatctctttggaggggggagcacgatgactctgagtttgagctattaaagtacttcttacacattggaaaaaaaaaaaaaaaaaaaaaaaaaaaaaaaaaaaaaaaggggggggggcctttaaaaaaaaccctggggggggccaaattttccggggggggggaaaaaaattttttttttttttagggggggtaaaaaaaaaccccgggggggtttttgggaaaaacccctttttttgggggggggcaaatggggccccccccccccaaaaaaattaagggtttgggggaaaaaaaaacttttttggggggaagggggggaaaccacccccccaccccctgggc

SEQ ID NO: 17010 - DNA, 407 bp, Homo sapiens
cgtccggagccagccaacgagcggaaaatggtagacaatttttcgctccatgatgcgttatctgggtctggaaacccaaaccctcaaggatggcctggcgcatgggggaaccagcctgctggggcagggggctacccaggggcttcctatcctggggcctaccccgggcaggcacccccaggggcttatcctggacaggcacctccaggcgcctaccctggagcacctggagcttatcccggagcacctgcacctggagtctacccagggccacccagcggccctggggcctacccatcttctggacagccaagtgccaccggagcctaccctgccactggcccctatggcgcccctgctgggccactgattgtgccttataacctgcctttgcctgggggagtggg

SEQ ID NO: 17011 - DNA, 414 bp, Homo sapiens
  misc_feature (1)...(414): n = A,T,C or G
caacagcagagccaggagctgcaggaggtcctcgttgagacagagcggttcctgagccaagtgctaggccgggtgctgcagctgctgccgccagggcaggtgcaggtccacaagatgaaggccgtgtacctggccctgaaccagtgcagcgtgagcaccacgcacaagtgcctcattgccgaggcctggtgctctgtgcgagacctgcccgccctgcaggaggccctgcgggacagctcgatggaggagggagtgagtgccgtggctcaccgcatcccctgccgggacatgccccccacactcatccgcaccaaccgcttcacggccagcttccagggcatcgtggatgcctacggcgtgggccgctaccaggaggtcaaccccgctccctacaccatcatcaccttccccttn

SEQ ID NO: 17012 - DNA, 411 bp, Homo sapiens
cggacgcgtgggcagataccctcctagctcttcattaagagtgtgaagacatcaaaaagatactgaagcacttgcaggagcagaaagacagccagtgcctgcatgtggaggagtaccagaacctggtgaaggatctgcgcgtggaactagaggccgtgtcggaacagaagagaaacatcatgaaggacatgatgaagctggagctggacctgcacggactgcgggaggagacatctgcccacattgagaggaaggataaggacatcaccatcctgcagtgccggctgcaggagctgcagctggagttcaccgagacccaaaagctcactttgaagaaagacaagttcctccaagagaaagatgagatgctgcaagagctggagaagaaactgacacaggttcagaacagct

SEQ ID NO: 17013 - DNA, 408 bp, Homo sapiens
gtgaaactgaggatgaatcatttccagattcatttgattctcttttgcagcagatgtttatagttcggtttttgggatcaatggcagttaaaacagacagcactactgaagtgatttatgaagcgatgagacaagtattggctgctcgggctattcataacatcttccgcatgacagaatcccatctgatggtcaccagtcaatctttgaggttgatagatccacagactcaagtatcaagggccaattttgaacttaccagtgtcacacaatttgctgctcatcaagaaaacaagagactggttggttttgtcatccgtgttcctgaatccactggagaagaatctctgagtacatacatttttgaaagcaactcagaaggcgaaaagatatgttatgctattaatt

SEQ ID NO: 17014 - DNA, 409 bp, Homo sapiens
  misc_feature (1)...(409): n = A,T,C or G
cagctcatgtgcatgttttgtgtttaaatataactgtaaaaactgcaaagaaaaaccaaaaaacaacaacaaaaaattattttgtgttaggcttccttcgctttttcagactgctttcaatttccattttcacatatggtattattagtttttttttttagttttagcctttctgatggatgtatctcattgcagtttcaaatttacatttttcctgatgactaaagatgttgaacatcatttcgtacgtttaaaggctatttggtttttttgtgtgtgtgagggactagttcaaatcttttgcctattggctgtaaaagggtgactttttcttattgaatcataggagttctttatatattctagatacaagccctttgtcagatacgtttattaccaatatcttttn

SEQ ID NO: 17015 - DNA, 413 bp, Homo sapiens
  misc_feature (1)...(413): n = A,T,C or G
agccacatattgggagttctagatttgagtgaattatttgtgagccacatattgggagttctagatttgagtgaatggcaggaaagggccatctccattgagatgattaagtgaaccaaactagttctcggaattctacagagaaggagggaatcagactgaggaagctgtgacataggacttgaagaccaaagactttgaaatttgcgagctgctcatgtgtgagttattatcactgctgtctttctattgagttacaaatctatatttttattgaagtttaaataaagaaaaaatttacctgaaaaaaaaaaaaaaaaaaaaaaaaaaaaaaaaaaatnnannnnnnnnnggggggggggctttttaaaagtcccccgggggggcccattttttagggggggggaaaatta

SEQ ID NO: 17016 - DNA, 412 bp, Homo sapiens
cccacgcatgagaccacgctgctgcagacgcgtagtcagtccaccggatattattttgcgtcactacacgagccccatcgtttggacaccatggggaaggtgaaggtcggaatcaacggatttgggcgcattgggcgcctggtcaccagggctgcttttaactctggtaaagaggatattgttgccatcaatgaccccttcattgacctcaactacatggtttacatgttccaatatgattccacccatggcggattccatggcaccgtcaaggctgagaacgggaagcttgtcatcaatggaaatcccatcaccatcttccaggagcgagatccctccaaaatcaagtggggcgatgctggcgctgagtacctcgtggagtccactggcgtcttcaccaccatggagaagg

SEQ ID NO: 17017 - DNA, 409 bp, Homo sapiens
  misc_feature (1)...(409): n = A,T,C or G
cttgaccatttgtttctgtttccccgactggggcagggtgtttagaattttctaaatgtagttctgctccagacagggaattaggcccccatcatcctctggcttggccacagccaggggagcagaggggcagaggcccacattggaagagcagcacctcctcagcctgaaccccagggctgtaactgccaggctctctttgcccagttggagactgtctggcccccctggtcccctccttcccaagtgagtctctctgggccttaggaagagccttccacccaggggcagccccaggccaaaggggacctggaagggaggtgggccgtggcccttgagtccccattgaggcttggttccttcccaatccagtggacttcgcagtccacttctgacagcctcagtgacn

SEQ ID NO: 17018 - DNA, 411 bp, Homo sapiens
cgagatggcactcataaacggcgttgacgtaatttaggacgtggaatcataagcgaaacagcacactgtttgaataaagagcgagtcggtatttatatttgtttttcttttgtcatgattatttgatttttaagttgctccagctaaggcatttttttgtattagtatttctattagggaacctttcttattaggcggtttgtattgtctggtttctaacatgcaggtagctgtttggcagttaaacacgtttagagtaatttgagttacaacgtgtgaaactgagcaaaaaagcagcgataagtttgggttaccataccaaatatttgttttcccactggaaaaaagtaagttttagaaaatagttaacctttgcagcatttgtttacagtttacagctccagaagtgcg

SEQ ID NO: 17019 - DNA, 407 bp, Homo sapiens
cccacgcgtccgtcgaccttgtttctgaagctcacttttcagtgccattgatgtgagatgtgctggagtggctattaacctttttttcctaaagattattgttaaatagatattgtggtttggggaagttgaattttttataggttaaatgtcattttagagatggggagagggattatactgcaggcagcttcagccatgttgtgaaactgataaaagcaacttagcaaggcttcttttcattattttttatgtttcacttataaagtcttaggtaactagtaggatagaaacactgtgtcccgagagtaaggagagaagctactattgattagagcctaacccaggttaactgcaagaagaggcgggatactttcagctttccatgtaactgtatgcataaagcc

SEQ ID NO: 17020 - DNA, 412 bp, Homo sapiens
cccacgcgttcgctttccccagacatggccaacattggttcttcctatggcatgagccgcgaagtgcagtccaaaatcgagaagaagtatgacgaggagctggaggagcggctggtggagtggatcatagtgcagtgtggccctgatgtgggccgcccagaccgtgggcgcttgggcttccaggtctggctgaagaatggcgtgattctgagcaagctggtgaacagcctgtaccctgatggctccaagccggtgaaggtgcccgagaacccaccctccatggtcttcaagcagatggagcaggtggctcagttcctgaaggcggctgatgactatggggtcatcaagactgacatgttccagactgttgacctctttgaaggcaaagacatggcagcagtgcagaggacct

SEQ ID NO: 17021 - DNA, 406 bp, Homo sapiens
gcaaattctgaggtaagtgtatgatcttagggtactttgatacaaatgggaattcactcactggaatcgtggctcccaaaaagatgctttaattgtgtggtgcttttatagtttagctccaaaacaaactatagacattcactccagtaactcctagattaaatatacagtagctatgagggtctgccctcttatttcattaaatgctatttggttactatttcaacatccatttttatccttgacctgtttttgcctttcccagtttaaaacaggaaaatttcaagtattggtagataattataaagaagttacatgttactttacagggaggtcagtgagttctaactccaaaattcaacatatgcataaaactcatagcatccacattccttttcgagaaaat

SEQ ID NO: 17022 - DNA, 410 bp, Homo sapiens
tttcccatggtgctgctccaaccatcagataaatgattctcccaagcaccatgtcagtgtcgtacaatctaccaaccaaccagtgctgaagagattttagaaccttgtaacatacaatttttaagagcttatatggcagcttcctttttaccttgttttcctttggggcatgatgttttaacctttgctttagaagcacaagctgtaaatctaaaaggcacttttttttagaggtataaagaaaaactagatgtaataaataagatcatggaaggctttatgtgaaaaaagttgaatgttatagtaaaaaaaaaaagatatttatgtatgtacagtttgctaaagccaagttttgtttgaattgatttctttgcatttattatagatattataaaataaaaaaaaaaaag

SEQ ID NO: 17023 - DNA, 409 bp, Homo sapiens
attggaaacactttcagtacagtatctgtatagttcagtaatgttgagagaactagaaacttggaatccaaccacccaggtcaaacaggaggttttgtgcgagtacccccaaggttgccaccgagacctgtgaatggaaaaaccattccaactcaacagcctccaaccaaggtgccccctgagagaccacctcccccaaagctttctgcaaccagaagatctaataagaaactgccttttaatcgatcctcttctgacatggatcttcagaaaaaacaaagtaacttggcaactggactctcaaaagccaagagtcaagtttttaaaaatcaagatccggtgctaccccctcgtcccaaaccaggacaccctctctacagtaaatacatgctgtctgtgcctcatggaa

SEQ ID NO: 17024 - DNA, 405 bp, Homo sapiens
tctgtttaaagttagtggtggctagagttttatttgtttggatctgaggagtgggtttgaaaatcactgtcttctataagtggtcttcattttatcaagtcagcttcatggtgatgcctatgtcatttgcttataaactgcataaaaaactattacattgctaccctgaaattaacccttcatttttatttctcttcacttattttcattttattattggctatactaggaagaattataaatacatataataagcccacttggtaaacttggcttgataccctgaaaattcgtttattccctttttagaatttgactgcttgtaagaataactagattgtacaaatactattttcaaggacctattttatctaggggaaaaagtactatttcttttattgtatc

SEQ ID NO: 17025 - DNA, 416 bp, Homo sapiens
cccacgcgtccgcgctgctgtcctgtggcgctgcttcttcatccctgcgggtgaccgtcgacgcgttcccctggctcgcttcttggttacgggccaggggatactcctgcccgaccctcggcattgcccaagggagtttgcacttcccactgtgctctgccaagcctctgtggagaggagccctccacctgcctgaccgggcccagctttggggaagaccttcttggttttgtctgctggctggactgaccctggccctcagcccaggtgaggcgaccagcggcatgatgcccgggtggaacacggatttctctccagggtggccgaagaatggcttagaagcagcagtgggatgagggagaatccgaccccgtctcaaaagggaagaaaccacagcggcacttcccacagaaatc

SEQ ID NO: 17026 - DNA, 497 bp, Homo sapiens
  misc_feature (1)...(497): n = A,T,C or G
agaggccgaggggnttttncctgaagccctcgtgaccgctgataacctcggacgaccccgcgnccggaaatcttttacagtaaaatatatcctgaattcatatatgcttgttcataattgagtctcttcttgagctaccttttcaatattagacaatgtgaagacagtgacagcgtccttttctagagatatttagcctgttattacaaactgtgaagacaaagaattttatacttttactaatgtttgtggttttaaacagttattttcattctaatcagttctctaccctctaatttctactaaagctgtaaatacatttagaaattatatttgtaaatacagtatatggagacaagttaattttttggtcagtggaaaaagcctcccaaccaattggccctgccttggcagntgcgccttttgttgctgctgttgttgctttacttacctttttttttttaaacaacagaaaggatactgtcggttcactgttg

SEQ ID NO: 17027 - DNA, 418 bp, Homo sapiens
  misc_feature (1)...(418): n = A,T,C or G
agaatggctcccgcaaagatgggtggcgagaagaaaaagggccgttctgccatcagcgaagtggtaacccgagaatacaccatcaacattcacaagcgcatccatggagtgggcttcaagaagcgtgcacctcgggcactcaaagagattcggaaatttgccatgaaggagatgggaactccagatgtgcgcattgacaccaggctcaacaaagctgtctgggccaaaggaataaggaatgtgccataccgaatccgtgtgcggctgtccagaaaacgtaatgaggatgaagattcaccaaataagctatatactttggttacctatgtacctgttaccactttcaaaatttctgtgctaaacagtgtacagtcgccaagagcccataaagggagccctcctggaagtggatgaggcn

SEQ ID NO: 17028 - DNA, 508 bp, Homo sapiens
  misc_feature (1)...(508): n = A,T,C or G
agagtgccgaggnnnagttttncaattgaaaagtctcgtaaccgctgaagaaccntcggaacgacccacgcgnccggatcttcactcactgcaacctccgcctcccgggttcaagtgattcccctgcctcattctcccaagtagctgggactacaggcatgtaccaccacgcccagctaattttttttttggtatttttagtagggacggggtttcaccatgttagccaggatggtctcgatctcctgacctcgggatccgcctgcctcagcctcccaaagtgttgagattacaggtgtgagccactgcactcagcccaaagaatacttttgatgttcctctttgttcatatttgcttttgatgccccccttgatcatgttctgtgtttaccctcatggccggcctctccatctcctaggcagcctggcatcctcgctacaacctcattgttgtggccgatacccagatcctaatttcaaaagtggtaccccttatgaatagaggacg

SEQ ID NO: 17029 - DNA, 418 bp, Homo sapiens
cccacgcgtccgcaaaaatgactttggaatggtgaagaataataaaaaatatatgtcaggattagaatacttaatatagaaatccacattgccacgaggcttttatcagtaaacaaccgtatgctctattaagagaatattgtcaaagcatgagaatgggtttatccagggaaaaacgtaacagcagccacactcattggggtatatgaattaagggttggtaaactatggccgacagaccatatctagtctgttacctgtttttataaagttttatgtaaatacaaacatggccgcttgacagatttctcacagttgttgtggtgtgtgggtatggcttagcaggttcctcccttgagagtttgaccaggctgagatcacagcgtcagctggagctgcagttttcatctgatgctcg

SEQ ID NO: 17030 - DNA, 469 bp, Homo sapiens
  misc_feature (1)...(469): n = A,T,C or G
atccccactgaagcctcggatccnactganagatgnagaaccncnncgnacgnggacgcgngggcatttttgtattttaatagtctacaggctatataaaagaacatggctttttgactgatagaaagtgattacagatgtgggctcaagttcagggccaccatcatatacctaacaagagttcatgattctttaggtaatgtcaaaacattttgtatttttccatcttaagctttataacattttgtgagtaagacaaatgttatttaaaattcttgttgtcagtccagcaattgaggctttcatagttcagtgttataatattcagtagggaccctcaacaaatatataaaaatatgttgctcactctataatcctcctatggctaacctctaggatagntctgccactatattttacttctttgccatcagcaagagtaggatttcatcaaggcaaggtaggaatn

SEQ ID NO: 17031 - DNA, 397 bp, Homo sapiens
  misc_feature (1)...(397): n = A,T,C or G
gatcagatcagttttggctgtgcttgagaagagaaggggtcttaccacacataacttctctcatttccatgggtgaatttccctccctccagcaaatctcaagatattttcccctggcctcagtgatctgtttagagttcttggccttttcttcttatttgggccacatggaggacaagttggcacagcacctgcctcctggggtcagggcctggcagtgccttctcacccacatggacttttcccctctctcctcctctgagctcactgcagagtgaagactacattctctcccgaaaccgctggtctacacaactagcaaaatagcctcttgcttgtgggtgtatctggtaatcatggcaataagtgaaagaacgagtttttcttgacagtgagn

SEQ ID NO: 17032 - DNA, 478 bp, Homo sapiens
  misc_feature (1)...(478): n = A,T,C or G
cgggtgatttgatgccatcggcaccggcccggaanncccgggncgacccacgcgnccgnaacgtggaaagcatggtggaactattcccattgtacccacggcagagttccaagacagtatatcgggtgcatctgagaaagacattgtgcactctgccttggcatacacaatggagcgttctgccaggcaaattatgcacacagccatgaagtataacctgggattggacctgagaacagctgcctatgtcaatgccattgaaaaagtcttcaaagtgtacagtgaagctggtgtgaccttcacatagatggatcatggctgacttcctcactaacctcttcacgtgtaacttctgcagacctaccacaagtttacatgtaaccacagaaatccctttctctcctgactcattactaatggataccattctcaacaagtcaatccaaatcagcccggttaggagatagaaattaatatc

SEQ ID NO: 17033 - DNA, 485 bp, Homo sapiens
  misc_feature (1)...(485): n = A,T,C or G
gtnggtagccggggnggnttttaanttagntggctgcgtaantnccnactganttcgtctgannnanccgnnngnnnangcgnnngntntcttcaaggctactaaacaaatatatttgactttatgtttctatattgacataaatagttagacagtatcttttgggtaaaagtgttgggagaactgggaagccacctgaaaaaaaatattgatagattcgtattcatacaccaggataaattccaagtggaacagtcatgagctccaaaccactcaagcccctgccttggcattacacttaatgacctatacttaagtcaggccatgacatgaactaaacactggtactaatatcagaatctttttcatagggggcttcctggaacttgacttggacctatgggctagaatttaccgaaagcagctgacccgtgctttgcttttactattccaggaatgcagataaagtctaacttccagctagg

SEQ ID NO: 17034 - DNA, 400 bp, Homo sapiens
tgataatagcaaaacttaatctattgaaatctgaggtaaaaaaggtaaaatattcgtgtggctccccagtactgacaggcagaaacacactcatatgtatatgtacatttttcacatcagaggaaatgacaaagctggttctagtgagggaaattttgcaatagaaaagccccctacttgttttttcttgctttgcctgagatttgggttgaggtctcactatgcctaaaccatatgttcagatgaatactattaaaaatcatgttaagccaaaaacatgtatacttttctgcttaatcaatgacaatcatttaactggtttattcacatagaatttggtttaaagtagaaatactttctccttccttacaaccagttttacacactggagaggttaaag

SEQ ID NO: 17035 - DNA, 464 bp, Homo sapiens
  misc_feature (1)...(464): n = A,T,C or G
attgaccccttcggaccgcatcgaaatgcctgcggcgacgcacgcgtncggccatttttaaaagagaaaattcataatgatgttatgtcaaacagataagactgataaacttcgtattgtatagctttgaaaataattatgcctagtatggagaaacaggaataagatctgattttcttagagttgaatatattttagtagattggttttccttttttttattttgtacatagttaactgtgtatctataaataaagcatcctatatgagtttttaataataaacaagggatttgtccttattctttctgggtgtctgacgggtgtgagccctgttcagtttgaaaactgaatacttacagatactcgtgattgtgtggttgcctctaagtttcactgaattgtctgtaactatcaatatattcccaaagctcatacaaacaatttaggcaagtagatttttgg

SEQ ID NO: 17036 - DNA, 419 bp, Homo sapiens
cccacgcgtccgcccacgcgtccgggctctttgcttatgccagggcatgaagcctcatctaaagacccaaatcacagcacagctttgaaagtgatagagtcagacactcacaggacaaatacaccaaggagaaggaagggaagaaataaagaaatccaggacctggaggagagctttgtgcctgttgctgcacccctaggtcatccaagagagctgcagaagtactccagtgattctgagagccccagaggaactggcagtggtgcgttgccaagtggtcagaagctggaggagttgaaggcagaggagccagataacttcagcagcaaagtagtgcagaggggccgagagttctttgacagcaacgggaacttcctgtacagaatttgagtcggggctaggcttatggagatgcctcg

SEQ ID NO: 17037 - DNA, 438 bp, Homo sapiens
tggggtctggggaaacttctgttagaaggaggctatgcagcacagcagagagaaggccggagctaggagtccaccaacagactaacagccttcagtgaactcagggatcccaaaggacaggaacagcttgaaagtacttgcatccttcctgcagggaccagccctttgcctccaaaagcaataggaaatttaaaagatttcactgagaaggggccacgtttaagttataatgtctaaggagaagtcacttcaaaatgcagcatcacatacaataggaatttgggttccagagtcagacatatctaggtttgaaaactggatctgccacttatcagttatgtgaccttaaagaactccgttaatttctcagagcctcagtttccttgtctataagttgggagtaatattaatactatcatttttccaaggattgatgtg

SEQ ID NO: 17038 - DNA, 443 bp, Homo sapiens
  misc_feature (1)...(443): n = A,T,C or G
ggaacagttttgtcctgtatgctgatgtgtccagaatttcatttaatgatagacggaaaatgtgtggttactgaaaactgtatatgatacagaatttcataagagccatgctgttgggcaaagcaactctttttcaaccactgctcatcagtttctgtagagacaaaaactctgtacatattttggaatctgaagaatcctatgtaaatcatttgttacttaagtctgtgaaaaacatatttctttggaggaaaatgtatgcatttataagtgttccatggaatcagtttttattgtatcgatataattgtctctaagtgttgactgtcttcattgcaatatgaaattcattaaaatgtccatgttccataattactattataaaagctctgtgttattgggagtcttattatttttatagtttttcatgttctgctttggan

SEQ ID NO: 17039 - DNA, 442 bp, Homo sapiens
aactactcatttctctcctggtcagcagacagaaatagccatactaatctcatagggctcaaatgcatcttcaggcagcagggaaccaagcagcgtggcacaggccttcttgactggaggaagagcttgctggcatggtgggcagtattccaggagaggccatgtccgtgttcacttcttggcacatttcagttccgttttcctcttgtttaaaactgcctctttagatgtggatgccttaatgctgtaacacatttgaaaacattggcaatacttaagttgctgccatgattacagatggaattattggctaccaaagagacgcaattgatgatgagaagcatgattcttgcttccatataaccaaagttaatcttaattgcaatttgactccgtttccttggtagggatagactttcttcagatttcaagtgctctctta
